United States Patent Application Publication US 2020/0095579 A1 - sequence listing, part 17

SEQ ID NO: 260819 - DNA, 20 bp, Artificial Sequence
  Description of Artificial Sequence: Synthetic oligonucleotide
  Target: LAMA2; (-) strand; PAM type: YTN; PAM sequence: TTT
agtcaacagagtaattatct

SEQ ID NO: 260820 - DNA, 20 bp, Artificial Sequence
  Description of Artificial Sequence: Synthetic oligonucleotide
  Target: LAMA2; (-) strand; PAM type: YTN; PAM sequence: CTT
tagtcaacagagtaattatc

SEQ ID NO: 260821 - DNA, 20 bp, Artificial Sequence
  Description of Artificial Sequence: Synthetic oligonucleotide
  Target: LAMA2; (-) strand; PAM type: YTN; PAM sequence: TTC
agtcaactttagtcaacaga

SEQ ID NO: 260822 - DNA, 20 bp, Artificial Sequence
  Description of Artificial Sequence: Synthetic oligonucleotide
  Target: LAMA2; (-) strand; PAM type: YTN; PAM sequence: TTA
aagtaatcaaaaaattcagt

SEQ ID NO: 260823 - DNA, 20 bp, Artificial Sequence
  Description of Artificial Sequence: Synthetic oligonucleotide
  Target: LAMA2; (-) strand; PAM type: YTN; PAM sequence: TTT
aaagtaatcaaaaaattcag

SEQ ID NO: 260824 - DNA, 20 bp, Artificial Sequence
  Description of Artificial Sequence: Synthetic oligonucleotide
  Target: LAMA2; (-) strand; PAM type: YTN; PAM sequence: TTT
taaagtaatcaaaaaattca

SEQ ID NO: 260825 - DNA, 20 bp, Artificial Sequence
  Description of Artificial Sequence: Synthetic oligonucleotide
  Target: LAMA2; (-) strand; PAM type: YTN; PAM sequence: TTG
atggtgattttaaagtaatc

SEQ ID NO: 260826 - DNA, 20 bp, Artificial Sequence
  Description of Artificial Sequence: Synthetic oligonucleotide
  Target: LAMA2; (-) strand; PAM type: YTN; PAM sequence: TTT
gatggtgattttaaagtaat

SEQ ID NO: 260827 - DNA, 20 bp, Artificial Sequence
  Description of Artificial Sequence: Synthetic oligonucleotide
  Target: LAMA2; (-) strand; PAM type: YTN; PAM sequence: TTT
tgatggtgattttaaagtaa

SEQ ID NO: 260828 - DNA, 20 bp, Artificial Sequence
  Description of Artificial Sequence: Synthetic oligonucleotide
  Target: LAMA2; (-) strand; PAM type: YTN; PAM sequence: CTT
ttgatggtgattttaaagta

SEQ ID NO: 260829 - DNA, 20 bp, Artificial Sequence
  Description of Artificial Sequence: Synthetic oligonucleotide
  Target: LAMA2; (-) strand; PAM type: YTN; PAM sequence: CTA
gacttttgatggtgatttta

SEQ ID NO: 260830 - DNA, 20 bp, Artificial Sequence
  Description of Artificial Sequence: Synthetic oligonucleotide
  Target: LAMA2; (-) strand; PAM type: YTN; PAM sequence: TTC
agaagtctagacttttgatg

SEQ ID NO: 260831 - DNA, 20 bp, Artificial Sequence
  Description of Artificial Sequence: Synthetic oligonucleotide
  Target: LAMA2; (-) strand; PAM type: YTN; PAM sequence: CTC
gattcagaagtctagacttt

SEQ ID NO: 260832 - DNA, 20 bp, Artificial Sequence
  Description of Artificial Sequence: Synthetic oligonucleotide
  Target: LAMA2; (-) strand; PAM type: YTN; PAM sequence: TTC
tcgattcagaagtctagact

SEQ ID NO: 260833 - DNA, 20 bp, Artificial Sequence
  Description of Artificial Sequence: Synthetic oligonucleotide
  Target: LAMA2; (-) strand; PAM type: YTN; PAM sequence: TTT
ctcgattcagaagtctagac

SEQ ID NO: 260834 - DNA, 20 bp, Artificial Sequence
  Description of Artificial Sequence: Synthetic oligonucleotide
  Target: LAMA2; (-) strand; PAM type: YTN; PAM sequence: TTC
ataatggtgaagtatttctc

SEQ ID NO: 260835 - DNA, 20 bp, Artificial Sequence
  Description of Artificial Sequence: Synthetic oligonucleotide
  Target: LAMA2; (-) strand; PAM type: YTN; PAM sequence: CTT
cataatggtgaagtatttct

SEQ ID NO: 260836 - DNA, 20 bp, Artificial Sequence
  Description of Artificial Sequence: Synthetic oligonucleotide
  Target: LAMA2; (-) strand; PAM type: YTN; PAM sequence: TTC
ttcataatggtgaagtattt

SEQ ID NO: 260837 - DNA, 20 bp, Artificial Sequence
  Description of Artificial Sequence: Synthetic oligonucleotide
  Target: LAMA2; (-) strand; PAM type: YTN; PAM sequence: TTG
taattcttcataatggtgaa

SEQ ID NO: 260838 - DNA, 20 bp, Artificial Sequence
  Description of Artificial Sequence: Synthetic oligonucleotide
  Target: LAMA2; (-) strand; PAM type: YTN; PAM sequence: TTT
gtaattcttcataatggtga

SEQ ID NO: 260839 - DNA, 20 bp, Artificial Sequence
  Description of Artificial Sequence: Synthetic oligonucleotide
  Target: LAMA2; (-) strand; PAM type: YTN; PAM sequence: TTT
tgtaattcttcataatggtg

SEQ ID NO: 260840 - DNA, 20 bp, Artificial Sequence
  Description of Artificial Sequence: Synthetic oligonucleotide
  Target: LAMA2; (-) strand; PAM type: YTN; PAM sequence: TTT
ttgtaattcttcataatggt

SEQ ID NO: 260841 - DNA, 20 bp, Artificial Sequence
  Description of Artificial Sequence: Synthetic oligonucleotide
  Target: LAMA2; (-) strand; PAM type: YTN; PAM sequence: TTT
tttgtaattcttcataatgg

SEQ ID NO: 260842 - DNA, 20 bp, Artificial Sequence
  Description of Artificial Sequence: Synthetic oligonucleotide
  Target: LAMA2; (-) strand; PAM type: YTN; PAM sequence: TTT
ttttgtaattcttcataatg

SEQ ID NO: 260843 - DNA, 20 bp, Artificial Sequence
  Description of Artificial Sequence: Synthetic oligonucleotide
  Target: LAMA2; (-) strand; PAM type: YTN; PAM sequence: TTT
tttttgtaattcttcataat

SEQ ID NO: 260844 - DNA, 20 bp, Artificial Sequence
  Description of Artificial Sequence: Synthetic oligonucleotide
  Target: LAMA2; (-) strand; PAM type: YTN; PAM sequence: TTT
ttttttgtaattcttcataa

SEQ ID NO: 260845 - DNA, 20 bp, Artificial Sequence
  Description of Artificial Sequence: Synthetic oligonucleotide
  Target: LAMA2; (-) strand; PAM type: YTN; PAM sequence: TTG
tttttttttgtaattcttca

SEQ ID NO: 260846 - DNA, 20 bp, Artificial Sequence
  Description of Artificial Sequence: Synthetic oligonucleotide
  Target: LAMA2; (-) strand; PAM type: YTN; PAM sequence: TTT
gtttttttttgtaattcttc

SEQ ID NO: 260847 - DNA, 20 bp, Artificial Sequence
  Description of Artificial Sequence: Synthetic oligonucleotide
  Target: LAMA2; (-) strand; PAM type: YTN; PAM sequence: TTT
tgtttttttttgtaattctt

SEQ ID NO: 260848 - DNA, 20 bp, Artificial Sequence
  Description of Artificial Sequence: Synthetic oligonucleotide
  Target: LAMA2; (-) strand; PAM type: YTN; PAM sequence: CTA
tgagttttgtttttttttgt

SEQ ID NO: 260849 - DNA, 20 bp, Artificial Sequence
  Description of Artificial Sequence: Synthetic oligonucleotide
  Target: LAMA2; (-) strand; PAM type: YTN; PAM sequence: CTC
tatgagttttgttttttttt

SEQ ID NO: 260850 - DNA, 20 bp, Artificial Sequence
  Description of Artificial Sequence: Synthetic oligonucleotide
  Target: LAMA2; (-) strand; PAM type: YTN; PAM sequence: CTG
atacaggctctatgagtttt

SEQ ID NO: 260851 - DNA, 20 bp, Artificial Sequence
  Description of Artificial Sequence: Synthetic oligonucleotide
  Target: LAMA2; (-) strand; PAM type: YTN; PAM sequence: TTG
tctgatacaggctctatgag

SEQ ID NO: 260852 - DNA, 20 bp, Artificial Sequence
  Description of Artificial Sequence: Synthetic oligonucleotide
  Target: LAMA2; (-) strand; PAM type: YTN; PAM sequence: TTA
tagcaatgcaagaattgtct

SEQ ID NO: 260853 - DNA, 20 bp, Artificial Sequence
  Description of Artificial Sequence: Synthetic oligonucleotide
  Target: LAMA2; (-) strand; PAM type: YTN; PAM sequence: TTT
atagcaatgcaagaattgtc

SEQ ID NO: 260854 - DNA, 20 bp, Artificial Sequence
  Description of Artificial Sequence: Synthetic oligonucleotide
  Target: LAMA2; (-) strand; PAM type: YTN; PAM sequence: CTT
tatagcaatgcaagaattgt

SEQ ID NO: 260855 - DNA, 20 bp, Artificial Sequence
  Description of Artificial Sequence: Synthetic oligonucleotide
  Target: LAMA2; (-) strand; PAM type: YTN; PAM sequence: TTC
tttatagcaatgcaagaatt

SEQ ID NO: 260856 - DNA, 20 bp, Artificial Sequence
  Description of Artificial Sequence: Synthetic oligonucleotide
  Target: LAMA2; (-) strand; PAM type: YTN; PAM sequence: TTT
ctttatagcaatgcaagaat

SEQ ID NO: 260857 - DNA, 20 bp, Artificial Sequence
  Description of Artificial Sequence: Synthetic oligonucleotide
  Target: LAMA2; (-) strand; PAM type: YTN; PAM sequence: CTC
aggtatttctttatagcaat

SEQ ID NO: 260858 - DNA, 20 bp, Artificial Sequence
  Description of Artificial Sequence: Synthetic oligonucleotide
  Target: LAMA2; (-) strand; PAM type: YTN; PAM sequence: TTA
taatcagtctcaggtatttc

SEQ ID NO: 260859 - DNA, 20 bp, Artificial Sequence
  Description of Artificial Sequence: Synthetic oligonucleotide
  Target: LAMA2; (-) strand; PAM type: YTN; PAM sequence: CTT
ataatcagtctcaggtattt

SEQ ID NO: 260860 - DNA, 20 bp, Artificial Sequence
  Description of Artificial Sequence: Synthetic oligonucleotide
  Target: LAMA2; (-) strand; PAM type: YTN; PAM sequence: TTC
ttataatcagtctcaggtat

SEQ ID NO: 260861 - DNA, 20 bp, Artificial Sequence
  Description of Artificial Sequence: Synthetic oligonucleotide
  Target: LAMA2; (-) strand; PAM type: YTN; PAM sequence: TTT
cttataatcagtctcaggta

SEQ ID NO: 260862 - DNA, 20 bp, Artificial Sequence
  Description of Artificial Sequence: Synthetic oligonucleotide
  Target: LAMA2; (-) strand; PAM type: YTN; PAM sequence: TTT
tcttataatcagtctcaggt

SEQ ID NO: 260863 - DNA, 20 bp, Artificial Sequence
  Description of Artificial Sequence: Synthetic oligonucleotide
  Target: LAMA2; (-) strand; PAM type: YTN; PAM sequence: TTA
aaccagttttcttataatca

SEQ ID NO: 260864 - DNA, 20 bp, Artificial Sequence
  Description of Artificial Sequence: Synthetic oligonucleotide
  Target: LAMA2; (-) strand; PAM type: YTN; PAM sequence: CTG
tgagcccattaaaccagttt

SEQ ID NO: 260865 - DNA, 20 bp, Artificial Sequence
  Description of Artificial Sequence: Synthetic oligonucleotide
  Target: LAMA2; (-) strand; PAM type: YTN; PAM sequence: CTC
cagaactgtgagcccattaa

SEQ ID NO: 260866 - DNA, 20 bp, Artificial Sequence
  Description of Artificial Sequence: Synthetic oligonucleotide
  Target: LAMA2; (-) strand; PAM type: YTN; PAM sequence: CTG
tacaccctccagaactgtga

SEQ ID NO: 260867 - DNA, 20 bp, Artificial Sequence
  Description of Artificial Sequence: Synthetic oligonucleotide
  Target: LAMA2; (-) strand; PAM type: YTN; PAM sequence: TTC
ctgtacaccctccagaactg

SEQ ID NO: 260868 - DNA, 20 bp, Artificial Sequence
  Description of Artificial Sequence: Synthetic oligonucleotide
  Target: LAMA2; (-) strand; PAM type: YTN; PAM sequence: CTT
cctgtacaccctccagaact

SEQ ID NO: 260869 - DNA, 20 bp, Artificial Sequence
  Description of Artificial Sequence: Synthetic oligonucleotide
  Target: LAMA2; (-) strand; PAM type: YTN; PAM sequence: CTA
tgcttcctgtacaccctcca

SEQ ID NO: 260870 - DNA, 20 bp, Artificial Sequence
  Description of Artificial Sequence: Synthetic oligonucleotide
  Target: LAMA2; (-) strand; PAM type: YTN; PAM sequence: TTC
accagaaacagatgccgcta

SEQ ID NO: 260871 - DNA, 20 bp, Artificial Sequence
  Description of Artificial Sequence: Synthetic oligonucleotide
  Target: LAMA2; (-) strand; PAM type: YTN; PAM sequence: CTT
caccagaaacagatgccgct

SEQ ID NO: 260872 - DNA, 20 bp, Artificial Sequence
  Description of Artificial Sequence: Synthetic oligonucleotide
  Target: LAMA2; (-) strand; PAM type: YTN; PAM sequence: CTG
aggccttcaccagaaacaga

SEQ ID NO: 260873 - DNA, 20 bp, Artificial Sequence
  Description of Artificial Sequence: Synthetic oligonucleotide
  Target: LAMA2; (-) strand; PAM type: YTN; PAM sequence: TTC
ctgaggccttcaccagaaac

SEQ ID NO: 260874 - DNA, 20 bp, Artificial Sequence
  Description of Artificial Sequence: Synthetic oligonucleotide
  Target: LAMA2; (-) strand; PAM type: YTN; PAM sequence: CTT
cctgaggccttcaccagaaa

SEQ ID NO: 260875 - DNA, 20 bp, Artificial Sequence
  Description of Artificial Sequence: Synthetic oligonucleotide
  Target: LAMA2; (-) strand; PAM type: YTN; PAM sequence: CTG
gaagcttcctgaggccttca

SEQ ID NO: 260876 - DNA, 20 bp, Artificial Sequence
  Description of Artificial Sequence: Synthetic oligonucleotide
  Target: LAMA2; (-) strand; PAM type: YTN; PAM sequence: TTC
catcatgactggaagcttcc

SEQ ID NO: 260877 - DNA, 20 bp, Artificial Sequence
  Description of Artificial Sequence: Synthetic oligonucleotide
  Target: LAMA2; (-) strand; PAM type: YTN; PAM sequence: CTT
ccatcatgactggaagcttc

SEQ ID NO: 260878 - DNA, 20 bp, Artificial Sequence
  Description of Artificial Sequence: Synthetic oligonucleotide
  Target: LAMA2; (-) strand; PAM type: YTN; PAM sequence: TTG
gccttccatcatgactggaa

SEQ ID NO: 260879 - DNA, 20 bp, Artificial Sequence
  Description of Artificial Sequence: Synthetic oligonucleotide
  Target: LAMA2; (-) strand; PAM type: YTN; PAM sequence: CTT
ggccttccatcatgactgga

SEQ ID NO: 260880 - DNA, 20 bp, Artificial Sequence
  Description of Artificial Sequence: Synthetic oligonucleotide
  Target: LAMA2; (-) strand; PAM type: YTN; PAM sequence: TTG
cttggccttccatcatgact

SEQ ID NO: 260881 - DNA, 20 bp, Artificial Sequence
  Description of Artificial Sequence: Synthetic oligonucleotide
  Target: LAMA2; (-) strand; PAM type: YTN; PAM sequence: CTT
gcttggccttccatcatgac

SEQ ID NO: 260882 - DNA, 20 bp, Artificial Sequence
  Description of Artificial Sequence: Synthetic oligonucleotide
  Target: LAMA2; (-) strand; PAM type: YTN; PAM sequence: CTG
tccttgcttggccttccatc

SEQ ID NO: 260883 - DNA, 20 bp, Artificial Sequence
  Description of Artificial Sequence: Synthetic oligonucleotide
  Target: LAMA2; (-) strand; PAM type: YTN; PAM sequence: CTG
ccatgtggaagtctgtcctt

SEQ ID NO: 260884 - DNA, 20 bp, Artificial Sequence
  Description of Artificial Sequence: Synthetic oligonucleotide
  Target: LAMA2; (-) strand; PAM type: YTN; PAM sequence: CTG
atcctgccatgtggaagtct

SEQ ID NO: 260885 - DNA, 20 bp, Artificial Sequence
  Description of Artificial Sequence: Synthetic oligonucleotide
  Target: LAMA2; (-) strand; PAM type: YTN; PAM sequence: CTC
ctgatcctgccatgtggaag

SEQ ID NO: 260886 - DNA, 20 bp, Artificial Sequence
  Description of Artificial Sequence: Synthetic oligonucleotide
  Target: LAMA2; (-) strand; PAM type: YTN; PAM sequence: TTC
tcctgatcctgccatgtgga

SEQ ID NO: 260887 - DNA, 20 bp, Artificial Sequence
  Description of Artificial Sequence: Synthetic oligonucleotide
  Target: LAMA2; (-) strand; PAM type: YTN; PAM sequence: TTT
ctcctgatcctgccatgtgg

SEQ ID NO: 260888 - DNA, 20 bp, Artificial Sequence
  Description of Artificial Sequence: Synthetic oligonucleotide
  Target: LAMA2; (-) strand; PAM type: YTN; PAM sequence: TTT
tctcctgatcctgccatgtg

SEQ ID NO: 260889 - DNA, 20 bp, Artificial Sequence
  Description of Artificial Sequence: Synthetic oligonucleotide
  Target: LAMA2; (-) strand; PAM type: YTN; PAM sequence: CTT
ttctcctgatcctgccatgt

SEQ ID NO: 260890 - DNA, 20 bp, Artificial Sequence
  Description of Artificial Sequence: Synthetic oligonucleotide
  Target: LAMA2; (-) strand; PAM type: YTN; PAM sequence: CTG
cttttctcctgatcctgcca

SEQ ID NO: 260891 - DNA, 20 bp, Artificial Sequence
  Description of Artificial Sequence: Synthetic oligonucleotide
  Target: LAMA2; (-) strand; PAM type: YTN; PAM sequence: TTA
aatgcatggcatccctgctt

SEQ ID NO: 260892 - DNA, 20 bp, Artificial Sequence
  Description of Artificial Sequence: Synthetic oligonucleotide
  Target: LAMA2; (-) strand; PAM type: YTN; PAM sequence: TTT
aaatgcatggcatccctgct

SEQ ID NO: 260893 - DNA, 20 bp, Artificial Sequence
  Description of Artificial Sequence: Synthetic oligonucleotide
  Target: LAMA2; (-) strand; PAM type: YTN; PAM sequence: TTG
tttaaatgcatggcatccct

SEQ ID NO: 260894 - DNA, 20 bp, Artificial Sequence
  Description of Artificial Sequence: Synthetic oligonucleotide
  Target: LAMA2; (-) strand; PAM type: YTN; PAM sequence: CTG
gttgtttaaatgcatggcat

SEQ ID NO: 260895 - DNA, 20 bp, Artificial Sequence
  Description of Artificial Sequence: Synthetic oligonucleotide
  Target: LAMA2; (-) strand; PAM type: YTN; PAM sequence: CTA
ccggcaagatctggttgttt

SEQ ID NO: 260896 - DNA, 20 bp, Artificial Sequence
  Description of Artificial Sequence: Synthetic oligonucleotide
  Target: LAMA2; (-) strand; PAM type: YTN; PAM sequence: TTC
ctaccggcaagatctggttg

SEQ ID NO: 260897 - DNA, 20 bp, Artificial Sequence
  Description of Artificial Sequence: Synthetic oligonucleotide
  Target: LAMA2; (-) strand; PAM type: YTN; PAM sequence: TTG
tgaccatgagttcctaccgg

SEQ ID NO: 260898 - DNA, 20 bp, Artificial Sequence
  Description of Artificial Sequence: Synthetic oligonucleotide
  Target: LAMA2; (-) strand; PAM type: YTN; PAM sequence: CTT
gtgaccatgagttcctaccg

SEQ ID NO: 260899 - DNA, 20 bp, Artificial Sequence
  Description of Artificial Sequence: Synthetic oligonucleotide
  Target: LAMA2; (-) strand; PAM type: YTN; PAM sequence: CTG
tccttgtgaccatgagttcc

SEQ ID NO: 260900 - DNA, 20 bp, Artificial Sequence
  Description of Artificial Sequence: Synthetic oligonucleotide
  Target: LAMA2; (-) strand; PAM type: YTN; PAM sequence: TTG
gtgctgtccttgtgaccatg

SEQ ID NO: 260901 - DNA, 20 bp, Artificial Sequence
  Description of Artificial Sequence: Synthetic oligonucleotide
  Target: LAMA2; (-) strand; PAM type: YTN; PAM sequence: CTT
ggtgctgtccttgtgaccat

SEQ ID NO: 260902 - DNA, 20 bp, Artificial Sequence
  Description of Artificial Sequence: Synthetic oligonucleotide
  Target: LAMA2; (-) strand; PAM type: YTN; PAM sequence: CTC
agggcttggtgctgtccttg

SEQ ID NO: 260903 - DNA, 20 bp, Artificial Sequence
  Description of Artificial Sequence: Synthetic oligonucleotide
  Target: LAMA2; (-) strand; PAM type: YTN; PAM sequence: CTG
atccctcagggcttggtgct

SEQ ID NO: 260904 - DNA, 20 bp, Artificial Sequence
  Description of Artificial Sequence: Synthetic oligonucleotide
  Target: LAMA2; (-) strand; PAM type: YTN; PAM sequence: TTG
gatcatgggggctgatccct

SEQ ID NO: 260905 - DNA, 20 bp, Artificial Sequence
  Description of Artificial Sequence: Synthetic oligonucleotide
  Target: LAMA2; (-) strand; PAM type: YTN; PAM sequence: TTT
ggatcatgggggctgatccc

SEQ ID NO: 260906 - DNA, 20 bp, Artificial Sequence
  Description of Artificial Sequence: Synthetic oligonucleotide
  Target: LAMA2; (-) strand; PAM type: YTN; PAM sequence: CTG
gtgggaggtgtttggatcat

SEQ ID NO: 260907 - DNA, 20 bp, Artificial Sequence
  Description of Artificial Sequence: Synthetic oligonucleotide
  Target: LAMA2; (-) strand; PAM type: YTN; PAM sequence: TTG
gaggtggagcctggtgggag

SEQ ID NO: 260908 - DNA, 20 bp, Artificial Sequence
  Description of Artificial Sequence: Synthetic oligonucleotide
  Target: LAMA2; (-) strand; PAM type: YTN; PAM sequence: TTA
aaatataatccccagtgttg

SEQ ID NO: 260909 - DNA, 20 bp, Artificial Sequence
  Description of Artificial Sequence: Synthetic oligonucleotide
  Target: LAMA2; (-) strand; PAM type: YTN; PAM sequence: CTC
gtgttaaaatataatcccca

SEQ ID NO: 260910 - DNA, 20 bp, Artificial Sequence
  Description of Artificial Sequence: Synthetic oligonucleotide
  Target: LAMA2; (-) strand; PAM type: YTN; PAM sequence: TTC
tcgtgttaaaatataatccc

SEQ ID NO: 260911 - DNA, 20 bp, Artificial Sequence
  Description of Artificial Sequence: Synthetic oligonucleotide
  Target: LAMA2; (-) strand; PAM type: YTN; PAM sequence: CTA
attctcgtgttaaaatataa

SEQ ID NO: 260912 - DNA, 20 bp, Artificial Sequence
  Description of Artificial Sequence: Synthetic oligonucleotide
  Target: LAMA2; (-) strand; PAM type: YTN; PAM sequence: TTG
gatatgtccccactaattct

SEQ ID NO: 260913 - DNA, 20 bp, Artificial Sequence
  Description of Artificial Sequence: Synthetic oligonucleotide
  Target: LAMA2; (-) strand; PAM type: YTN; PAM sequence: CTG
atacagttggatatgtcccc

SEQ ID NO: 260914 - DNA, 20 bp, Artificial Sequence
  Description of Artificial Sequence: Synthetic oligonucleotide
  Target: LAMA2; (-) strand; PAM type: YTN; PAM sequence: CTC
tgatacagttggatatgtcc

SEQ ID NO: 260915 - DNA, 20 bp, Artificial Sequence
  Description of Artificial Sequence: Synthetic oligonucleotide
  Target: LAMA2; (-) strand; PAM type: YTN; PAM sequence: TTG
agaggtctctgatacagttg

SEQ ID NO: 260916 - DNA, 20 bp, Artificial Sequence
  Description of Artificial Sequence: Synthetic oligonucleotide
  Target: LAMA2; (-) strand; PAM type: YTN; PAM sequence: CTT
gagaggtctctgatacagtt

SEQ ID NO: 260917 - DNA, 20 bp, Artificial Sequence
  Description of Artificial Sequence: Synthetic oligonucleotide
  Target: LAMA2; (-) strand; PAM type: YTN; PAM sequence: TTA
cttgagaggtctctgataca

SEQ ID NO: 260918 - DNA, 20 bp, Artificial Sequence
  Description of Artificial Sequence: Synthetic oligonucleotide
  Target: LAMA2; (-) strand; PAM type: YTN; PAM sequence: CTC
ataaataaattacttgagag

SEQ ID NO: 260919 - DNA, 20 bp, Artificial Sequence
  Description of Artificial Sequence: Synthetic oligonucleotide
  Target: LAMA2; (-) strand; PAM type: YTN; PAM sequence: TTA
aaaacagtaaaacacatgct

SEQ ID NO: 260920 - DNA, 20 bp, Artificial Sequence
  Description of Artificial Sequence: Synthetic oligonucleotide
  Target: LAMA2; (-) strand; PAM type: YTN; PAM sequence: TTT
aaaaacagtaaaacacatgc

SEQ ID NO: 260921 - DNA, 20 bp, Artificial Sequence
  Description of Artificial Sequence: Synthetic oligonucleotide
  Target: LAMA2; (-) strand; PAM type: YTN; PAM sequence: TTT
taaaaacagtaaaacacatg

SEQ ID NO: 260922 - DNA, 20 bp, Artificial Sequence
  Description of Artificial Sequence: Synthetic oligonucleotide
  Target: LAMA2; (-) strand; PAM type: YTN; PAM sequence: TTA
aagtcatcccagttttaaaa

SEQ ID NO: 260923 - DNA, 20 bp, Artificial Sequence
  Description of Artificial Sequence: Synthetic oligonucleotide
  Target: LAMA2; (-) strand; PAM type: YTN; PAM sequence: TTA
aattaaagtcatcccagttt

SEQ ID NO: 260924 - DNA, 20 bp, Artificial Sequence
  Description of Artificial Sequence: Synthetic oligonucleotide
  Target: LAMA2; (-) strand; PAM type: YTN; PAM sequence: TTT
aaattaaagtcatcccagtt

SEQ ID NO: 260925 - DNA, 20 bp, Artificial Sequence
  Description of Artificial Sequence: Synthetic oligonucleotide
  Target: LAMA2; (-) strand; PAM type: YTN; PAM sequence: TTC
atttaaattaaagtcatccc

SEQ ID NO: 260926 - DNA, 20 bp, Artificial Sequence
  Description of Artificial Sequence: Synthetic oligonucleotide
  Target: LAMA2; (-) strand; PAM type: YTN; PAM sequence: CTG
ttcatttaaattaaagtcat

SEQ ID NO: 260927 - DNA, 20 bp, Artificial Sequence
  Description of Artificial Sequence: Synthetic oligonucleotide
  Target: LAMA2; (-) strand; PAM type: YTN; PAM sequence: CTC
aaatcactgttcatttaaat

SEQ ID NO: 260928 - DNA, 20 bp, Artificial Sequence
  Description of Artificial Sequence: Synthetic oligonucleotide
  Target: LAMA2; (-) strand; PAM type: YTN; PAM sequence: CTA
taaatctcaaatcactgttc

SEQ ID NO: 260929 - DNA, 20 bp, Artificial Sequence
  Description of Artificial Sequence: Synthetic oligonucleotide
  Target: LAMA2; (-) strand; PAM type: YTN; PAM sequence: TTA
tccatgacacaaagaaaggg

SEQ ID NO: 260930 - DNA, 20 bp, Artificial Sequence
  Description of Artificial Sequence: Synthetic oligonucleotide
  Target: LAMA2; (-) strand; PAM type: YTN; PAM sequence: TTA
gcacagagaaattatccatg

SEQ ID NO: 260931 - DNA, 20 bp, Artificial Sequence
  Description of Artificial Sequence: Synthetic oligonucleotide
  Target: LAMA2; (-) strand; PAM type: YTN; PAM sequence: CTT
agcacagagaaattatccat

SEQ ID NO: 260932 - DNA, 20 bp, Artificial Sequence
  Description of Artificial Sequence: Synthetic oligonucleotide
  Target: LAMA2; (-) strand; PAM type: YTN; PAM sequence: CTC
acaccttagcacagagaaat

SEQ ID NO: 260933 - DNA, 20 bp, Artificial Sequence
  Description of Artificial Sequence: Synthetic oligonucleotide
  Target: LAMA2; (-) strand; PAM type: YTN; PAM sequence: TTC
aataacagcccaaatgatgt

SEQ ID NO: 260934 - DNA, 20 bp, Artificial Sequence
  Description of Artificial Sequence: Synthetic oligonucleotide
  Target: LAMA2; (-) strand; PAM type: YTN; PAM sequence: CTT
caataacagcccaaatgatg

SEQ ID NO: 260935 - DNA, 20 bp, Artificial Sequence
  Description of Artificial Sequence: Synthetic oligonucleotide
  Target: LAMA2; (-) strand; PAM type: YTN; PAM sequence: CTA
cttcaataacagcccaaatg

SEQ ID NO: 260936 - DNA, 20 bp, Artificial Sequence
  Description of Artificial Sequence: Synthetic oligonucleotide
  Target: LAMA2; (-) strand; PAM type: YTN; PAM sequence: TTC
tacttcaataacagcccaaa

SEQ ID NO: 260937 - DNA, 20 bp, Artificial Sequence
  Description of Artificial Sequence: Synthetic oligonucleotide
  Target: LAMA2; (-) strand; PAM type: YTN; PAM sequence: TTC
gtattctacttcaataacag

SEQ ID NO: 260938 - DNA, 20 bp, Artificial Sequence
  Description of Artificial Sequence: Synthetic oligonucleotide
  Target: LAMA2; (-) strand; PAM type: YTN; PAM sequence: CTT
cgtattctacttcaataaca

SEQ ID NO: 260939 - DNA, 20 bp, Artificial Sequence
  Description of Artificial Sequence: Synthetic oligonucleotide
  Target: LAMA2; (-) strand; PAM type: YTN; PAM sequence: CTA
gtgaaagaaggcaggcttcg

SEQ ID NO: 260940 - DNA, 20 bp, Artificial Sequence
  Description of Artificial Sequence: Synthetic oligonucleotide
  Target: LAMA2; (-) strand; PAM type: YTN; PAM sequence: CTG
ctagtgaaagaaggcaggct

SEQ ID NO: 260941 - DNA, 20 bp, Artificial Sequence
  Description of Artificial Sequence: Synthetic oligonucleotide
  Target: LAMA2; (-) strand; PAM type: YTN; PAM sequence: TTC
ccctgctagtgaaagaaggc

SEQ ID NO: 260942 - DNA, 20 bp, Artificial Sequence
  Description of Artificial Sequence: Synthetic oligonucleotide
  Target: LAMA2; (-) strand; PAM type: YTN; PAM sequence: CTA
ttcccctgctagtgaaagaa

SEQ ID NO: 260943 - DNA, 20 bp, Artificial Sequence
  Description of Artificial Sequence: Synthetic oligonucleotide
  Target: LAMA2; (-) strand; PAM type: YTN; PAM sequence: CTC
actattcccctgctagtgaa

SEQ ID NO: 260944 - DNA, 20 bp, Artificial Sequence
  Description of Artificial Sequence: Synthetic oligonucleotide
  Target: LAMA2; (-) strand; PAM type: YTN; PAM sequence: TTA
ctcactattcccctgctagt

SEQ ID NO: 260945 - DNA, 20 bp, Artificial Sequence
  Description of Artificial Sequence: Synthetic oligonucleotide
  Target: LAMA2; (-) strand; PAM type: YTN; PAM sequence: TTT
actcactattcccctgctag

SEQ ID NO: 260946 - DNA, 20 bp, Artificial Sequence
  Description of Artificial Sequence: Synthetic oligonucleotide
  Target: LAMA2; (-) strand; PAM type: YTN; PAM sequence: TTA
gcaatagagaatttactcac

SEQ ID NO: 260947 - DNA, 20 bp, Artificial Sequence
  Description of Artificial Sequence: Synthetic oligonucleotide
  Target: LAMA2; (-) strand; PAM type: YTN; PAM sequence: TTT
agcaatagagaatttactca

SEQ ID NO: 260948 - DNA, 20 bp, Artificial Sequence
  Description of Artificial Sequence: Synthetic oligonucleotide
  Target: LAMA2; (-) strand; PAM type: YTN; PAM sequence: TTG
tttagcaatagagaatttac

SEQ ID NO: 260949 - DNA, 20 bp, Artificial Sequence
  Description of Artificial Sequence: Synthetic oligonucleotide
  Target: LAMA2; (-) strand; PAM type: YTN; PAM sequence: TTT
gtttagcaatagagaattta

SEQ ID NO: 260950 - DNA, 20 bp, Artificial Sequence
  Description of Artificial Sequence: Synthetic oligonucleotide
  Target: LAMA2; (-) strand; PAM type: YTN; PAM sequence: TTA
aatcataaatagaggtaata

SEQ ID NO: 260951 - DNA, 20 bp, Artificial Sequence
  Description of Artificial Sequence: Synthetic oligonucleotide
  Target: LAMA2; (-) strand; PAM type: YTN; PAM sequence: TTT
aaatcataaatagaggtaat

SEQ ID NO: 260952 - DNA, 20 bp, Artificial Sequence
  Description of Artificial Sequence: Synthetic oligonucleotide
  Target: LAMA2; (-) strand; PAM type: YTN; PAM sequence: CTA
tggccatcatcaaatttaaa

SEQ ID NO: 260953 - DNA, 20 bp, Artificial Sequence
  Description of Artificial Sequence: Synthetic oligonucleotide
  Target: LAMA2; (-) strand; PAM type: YTN; PAM sequence: TTA
gatagcactatggccatcat

SEQ ID NO: 260954 - DNA, 20 bp, Artificial Sequence
  Description of Artificial Sequence: Synthetic oligonucleotide
  Target: LAMA2; (-) strand; PAM type: YTN; PAM sequence: TTT
agatagcactatggccatca

SEQ ID NO: 260955 - DNA, 20 bp, Artificial Sequence
  Description of Artificial Sequence: Synthetic oligonucleotide
  Target: LAMA2; (-) strand; PAM type: YTN; PAM sequence: TTA
accatgtgtttagatagcac

SEQ ID NO: 260956 - DNA, 20 bp, Artificial Sequence
  Description of Artificial Sequence: Synthetic oligonucleotide
  Target: LAMA2; (-) strand; PAM type: YTN; PAM sequence: TTA
tagtggagaataaaccagac

SEQ ID NO: 260957 - DNA, 20 bp, Artificial Sequence
  Description of Artificial Sequence: Synthetic oligonucleotide
  Target: LAMA2; (-) strand; PAM type: YTN; PAM sequence: TTC
aggaagttatagtggagaat

SEQ ID NO: 260958 - DNA, 20 bp, Artificial Sequence
  Description of Artificial Sequence: Synthetic oligonucleotide
  Target: LAMA2; (-) strand; PAM type: YTN; PAM sequence: TTA
ttcaggaagttatagtggag

SEQ ID NO: 260959 - DNA, 20 bp, Artificial Sequence
  Description of Artificial Sequence: Synthetic oligonucleotide
  Target: LAMA2; (-) strand; PAM type: YTN; PAM sequence: TTT
attcaggaagttatagtgga

SEQ ID NO: 260960 - DNA, 20 bp, Artificial Sequence
  Description of Artificial Sequence: Synthetic oligonucleotide
  Target: LAMA2; (-) strand; PAM type: YTN; PAM sequence: TTC
caaatcaggaagtttattca

SEQ ID NO: 260961 - DNA, 20 bp, Artificial Sequence
  Description of Artificial Sequence: Synthetic oligonucleotide
  Target: LAMA2; (-) strand; PAM type: YTN; PAM sequence: TTT
ccaaatcaggaagtttattc

SEQ ID NO: 260962 - DNA, 20 bp, Artificial Sequence
  Description of Artificial Sequence: Synthetic oligonucleotide
  Target: LAMA2; (-) strand; PAM type: YTN; PAM sequence: CTT
tccaaatcaggaagtttatt

SEQ ID NO: 260963 - DNA, 20 bp, Artificial Sequence
  Description of Artificial Sequence: Synthetic oligonucleotide
  Target: LAMA2; (-) strand; PAM type: YTN; PAM sequence: TTG
ggacctttccaaatcaggaa

SEQ ID NO: 260964 - DNA, 20 bp, Artificial Sequence
  Description of Artificial Sequence: Synthetic oligonucleotide
  Target: LAMA2; (-) strand; PAM type: YTN; PAM sequence: TTG
acagtacaaatagacattgg

SEQ ID NO: 260965 - DNA, 20 bp, Artificial Sequence
  Description of Artificial Sequence: Synthetic oligonucleotide
  Target: LAMA2; (-) strand; PAM type: YTN; PAM sequence: TTG
ttgacagtacaaatagacat

SEQ ID NO: 260966 - DNA, 20 bp, Artificial Sequence
  Description of Artificial Sequence: Synthetic oligonucleotide
  Target: LAMA2; (-) strand; PAM type: YTN; PAM sequence: TTA
caaaattgttgacagtacaa

SEQ ID NO: 260967 - DNA, 20 bp, Artificial Sequence
  Description of Artificial Sequence: Synthetic oligonucleotide
  Target: LAMA2; (-) strand; PAM type: YTN; PAM sequence: TTT
acaaaattgttgacagtaca

SEQ ID NO: 260968 - DNA, 20 bp, Artificial Sequence
  Description of Artificial Sequence: Synthetic oligonucleotide
  Target: LAMA2; (-) strand; PAM type: YTN; PAM sequence: TTT
tacaaaattgttgacagtac

SEQ ID NO: 260969 - DNA, 20 bp, Artificial Sequence
  Description of Artificial Sequence: Synthetic oligonucleotide
  Target: LAMA2; (-) strand; PAM type: YTN; PAM sequence: TTT
ttacaaaattgttgacagta

SEQ ID NO: 260970 - DNA, 20 bp, Artificial Sequence
  Description of Artificial Sequence: Synthetic oligonucleotide
  Target: LAMA2; (-) strand; PAM type: YTN; PAM sequence: TTG
tataaaaccaaagcatgaat

SEQ ID NO: 260971 - DNA, 20 bp, Artificial Sequence
  Description of Artificial Sequence: Synthetic oligonucleotide
  Target: LAMA2; (-) strand; PAM type: YTN; PAM sequence: TTA
tccaaataattgtataaaac

SEQ ID NO: 260972 - DNA, 20 bp, Artificial Sequence
  Description of Artificial Sequence: Synthetic oligonucleotide
  Target: LAMA2; (-) strand; PAM type: YTN; PAM sequence: CTA
aaatatgaagttatccaaat

SEQ ID NO: 260973 - DNA, 20 bp, Artificial Sequence
  Description of Artificial Sequence: Synthetic oligonucleotide
  Target: LAMA2; (-) strand; PAM type: YTN; PAM sequence: TTA
actaaaatatgaagttatcc

SEQ ID NO: 260974 - DNA, 20 bp, Artificial Sequence
  Description of Artificial Sequence: Synthetic oligonucleotide
  Target: LAMA2; (-) strand; PAM type: YTN; PAM sequence: TTT
aactaaaatatgaagttatc

SEQ ID NO: 260975 - DNA, 20 bp, Artificial Sequence
  Description of Artificial Sequence: Synthetic oligonucleotide
  Target: LAMA2; (-) strand; PAM type: YTN; PAM sequence: CTT
taactaaaatatgaagttat

SEQ ID NO: 260976 - DNA, 20 bp, Artificial Sequence
  Description of Artificial Sequence: Synthetic oligonucleotide
  Target: LAMA2; (-) strand; PAM type: YTN; PAM sequence: TTA
tctttaactaaaatatgaag

SEQ ID NO: 260977 - DNA, 20 bp, Artificial Sequence
  Description of Artificial Sequence: Synthetic oligonucleotide
  Target: LAMA2; (-) strand; PAM type: YTN; PAM sequence: TTT
atctttaactaaaatatgaa

SEQ ID NO: 260978 - DNA, 20 bp, Artificial Sequence
  Description of Artificial Sequence: Synthetic oligonucleotide
  Target: LAMA2; (-) strand; PAM type: YTN; PAM sequence: CTT
tatctttaactaaaatatga

SEQ ID NO: 260979 - DNA, 20 bp, Artificial Sequence
  Description of Artificial Sequence: Synthetic oligonucleotide
  Target: LAMA2; (-) strand; PAM type: YTN; PAM sequence: CTG
tgaggcatctttatctttaa

SEQ ID NO: 260980 - DNA, 20 bp, Artificial Sequence
  Description of Artificial Sequence: Synthetic oligonucleotide
  Target: LAMA2; (-) strand; PAM type: YTN; PAM sequence: TTA
tcctgtgaggcatctttatc

SEQ ID NO: 260981 - DNA, 20 bp, Artificial Sequence
  Description of Artificial Sequence: Synthetic oligonucleotide
  Target: LAMA2; (-) strand; PAM type: YTN; PAM sequence: TTA
aattatcctgtgaggcatct

SEQ ID NO: 260982 - DNA, 20 bp, Artificial Sequence
  Description of Artificial Sequence: Synthetic oligonucleotide
  Target: LAMA2; (-) strand; PAM type: YTN; PAM sequence: TTT
aaattatcctgtgaggcatc

SEQ ID NO: 260983 - DNA, 20 bp, Artificial Sequence
  Description of Artificial Sequence: Synthetic oligonucleotide
  Target: LAMA2; (-) strand; PAM type: YTN; PAM sequence: CTA
taatcaaataataaatttaa

SEQ ID NO: 260984 - DNA, 20 bp, Artificial Sequence
  Description of Artificial Sequence: Synthetic oligonucleotide
  Target: LAMA2; (-) strand; PAM type: YTN; PAM sequence: TTA
tcaaaactataatcaaataa

SEQ ID NO: 260985 - DNA, 20 bp, Artificial Sequence
  Description of Artificial Sequence: Synthetic oligonucleotide
  Target: LAMA2; (-) strand; PAM type: YTN; PAM sequence: TTA
atagaaaatcatgttatcaa

SEQ ID NO: 260986 - DNA, 20 bp, Artificial Sequence
  Description of Artificial Sequence: Synthetic oligonucleotide
  Target: LAMA2; (-) strand; PAM type: YTN; PAM sequence: TTA
aacaaaataggccataatcg

SEQ ID NO: 260987 - DNA, 20 bp, Artificial Sequence
  Description of Artificial Sequence: Synthetic oligonucleotide
  Target: LAMA2; (-) strand; PAM type: YTN; PAM sequence: CTT
aaacaaaataggccataatc

SEQ ID NO: 260988 - DNA, 20 bp, Artificial Sequence
  Description of Artificial Sequence: Synthetic oligonucleotide
  Target: LAMA2; (-) strand; PAM type: YTN; PAM sequence: CTC
acttaaacaaaataggccat

SEQ ID NO: 260989 - DNA, 20 bp, Artificial Sequence
  Description of Artificial Sequence: Synthetic oligonucleotide
  Target: LAMA2; (-) strand; PAM type: YTN; PAM sequence: TTA
actcacttaaacaaaatagg

SEQ ID NO: 260990 - DNA, 20 bp, Artificial Sequence
  Description of Artificial Sequence: Synthetic oligonucleotide
  Target: LAMA2; (-) strand; PAM type: YTN; PAM sequence: TTG
agtatgtattaactcactta

SEQ ID NO: 260991 - DNA, 20 bp, Artificial Sequence
  Description of Artificial Sequence: Synthetic oligonucleotide
  Target: LAMA2; (-) strand; PAM type: YTN; PAM sequence: TTT
gagtatgtattaactcactt

SEQ ID NO: 260992 - DNA, 20 bp, Artificial Sequence
  Description of Artificial Sequence: Synthetic oligonucleotide
  Target: LAMA2; (-) strand; PAM type: YTN; PAM sequence: CTT
tgagtatgtattaactcact

SEQ ID NO: 260993 - DNA, 20 bp, Artificial Sequence
  Description of Artificial Sequence: Synthetic oligonucleotide
  Target: LAMA2; (-) strand; PAM type: YTN; PAM sequence: CTG
ctttgagtatgtattaactc

SEQ ID NO: 260994 - DNA, 20 bp, Artificial Sequence
  Description of Artificial Sequence: Synthetic oligonucleotide
  Target: LAMA2; (-) strand; PAM type: YTN; PAM sequence: TTG
ccaactgctttgagtatgta

SEQ ID NO: 260995 - DNA, 20 bp, Artificial Sequence
  Description of Artificial Sequence: Synthetic oligonucleotide
  Target: LAMA2; (-) strand; PAM type: YTN; PAM sequence: TTT
gccaactgctttgagtatgt

SEQ ID NO: 260996 - DNA, 20 bp, Artificial Sequence
  Description of Artificial Sequence: Synthetic oligonucleotide
  Target: LAMA2; (-) strand; PAM type: YTN; PAM sequence: CTT
tgccaactgctttgagtatg

SEQ ID NO: 260997 - DNA, 20 bp, Artificial Sequence
  Description of Artificial Sequence: Synthetic oligonucleotide
  Target: LAMA2; (-) strand; PAM type: YTN; PAM sequence: TTC
tttgccaactgctttgagta

SEQ ID NO: 260998 - DNA, 20 bp, Artificial Sequence
  Description of Artificial Sequence: Synthetic oligonucleotide
  Target: LAMA2; (-) strand; PAM type: YTN; PAM sequence: TTT
ctttgccaactgctttgagt

SEQ ID NO: 260999 - DNA, 20 bp, Artificial Sequence
  Description of Artificial Sequence: Synthetic oligonucleotide
  Target: LAMA2; (-) strand; PAM type: YTN; PAM sequence: TTT
tctttgccaactgctttgag

SEQ ID NO: 261000 - DNA, 20 bp, Artificial Sequence
  Description of Artificial Sequence: Synthetic oligonucleotide
  Target: LAMA2; (-) strand; PAM type: YTN; PAM sequence: TTT
ttctttgccaactgctttga

SEQ ID NO: 261001 - DNA, 20 bp, Artificial Sequence
  Description of Artificial Sequence: Synthetic oligonucleotide
  Target: LAMA2; (-) strand; PAM type: YTN; PAM sequence: TTA
catagtttttctttgccaac

SEQ ID NO: 261002 - DNA, 20 bp, Artificial Sequence
  Description of Artificial Sequence: Synthetic oligonucleotide
  Target: LAMA2; (-) strand; PAM type: YTN; PAM sequence: CTT
acatagtttttctttgccaa

SEQ ID NO: 261003 - DNA, 20 bp, Artificial Sequence
  Description of Artificial Sequence: Synthetic oligonucleotide
  Target: LAMA2; (-) strand; PAM type: YTN; PAM sequence: TTC
acttacatagtttttctttg

SEQ ID NO: 261004 - DNA, 20 bp, Artificial Sequence
  Description of Artificial Sequence: Synthetic oligonucleotide
  Target: LAMA2; (-) strand; PAM type: YTN; PAM sequence: TTA
catattcacttacatagttt

SEQ ID NO: 261005 - DNA, 20 bp, Artificial Sequence
  Description of Artificial Sequence: Synthetic oligonucleotide
  Target: LAMA2; (-) strand; PAM type: YTN; PAM sequence: CTT
acatattcacttacatagtt

SEQ ID NO: 261006 - DNA, 20 bp, Artificial Sequence
  Description of Artificial Sequence: Synthetic oligonucleotide
  Target: LAMA2; (-) strand; PAM type: YTN; PAM sequence: TTA
ggatgtcttacatattcact

SEQ ID NO: 261007 - DNA, 20 bp, Artificial Sequence
  Description of Artificial Sequence: Synthetic oligonucleotide
  Target: LAMA2; (-) strand; PAM type: YTN; PAM sequence: TTC
aaaattaggatgtcttacat

SEQ ID NO: 261008 - DNA, 20 bp, Artificial Sequence
  Description of Artificial Sequence: Synthetic oligonucleotide
  Target: LAMA2; (-) strand; PAM type: YTN; PAM sequence: TTT
caaaattaggatgtcttaca

SEQ ID NO: 261009 - DNA, 20 bp, Artificial Sequence
  Description of Artificial Sequence: Synthetic oligonucleotide
  Target: LAMA2; (-) strand; PAM type: YTN; PAM sequence: TTA
aagaacatcagatgtagaat

SEQ ID NO: 261010 - DNA, 20 bp, Artificial Sequence
  Description of Artificial Sequence: Synthetic oligonucleotide
  Target: LAMA2; (-) strand; PAM type: YTN; PAM sequence: CTT
aaagaacatcagatgtagaa

SEQ ID NO: 261011 - DNA, 20 bp, Artificial Sequence
  Description of Artificial Sequence: Synthetic oligonucleotide
  Target: LAMA2; (-) strand; PAM type: YTN; PAM sequence: CTC
accgccaagtaacttaaaga

SEQ ID NO: 261012 - DNA, 20 bp, Artificial Sequence
  Description of Artificial Sequence: Synthetic oligonucleotide
  Target: LAMA2; (-) strand; PAM type: YTN; PAM sequence: CTA
acctcaccgccaagtaactt

SEQ ID NO: 261013 - DNA, 20 bp, Artificial Sequence
  Description of Artificial Sequence: Synthetic oligonucleotide
  Target: LAMA2; (-) strand; PAM type: YTN; PAM sequence: TTC
caaggcatagaataacccac

SEQ ID NO: 261014 - DNA, 20 bp, Artificial Sequence
  Description of Artificial Sequence: Synthetic oligonucleotide
  Target: LAMA2; (-) strand; PAM type: YTN; PAM sequence: CTT
ccaaggcatagaataaccca

SEQ ID NO: 261015 - DNA, 20 bp, Artificial Sequence
  Description of Artificial Sequence: Synthetic oligonucleotide
  Target: LAMA2; (-) strand; PAM type: YTN; PAM sequence: TTA
taaatatggacaaagcttcc

SEQ ID NO: 261016 - DNA, 20 bp, Artificial Sequence
  Description of Artificial Sequence: Synthetic oligonucleotide
  Target: LAMA2; (-) strand; PAM type: YTN; PAM sequence: TTG
tatattataaatatggacaa

SEQ ID NO: 261017 - DNA, 20 bp, Artificial Sequence
  Description of Artificial Sequence: Synthetic oligonucleotide
  Target: LAMA2; (-) strand; PAM type: YTN; PAM sequence: TTT
gtatattataaatatggaca

SEQ ID NO: 261018 - DNA, 20 bp, Artificial Sequence
  Description of Artificial Sequence: Synthetic oligonucleotide
  Target: LAMA2; (-) strand; PAM type: YTN; PAM sequence: TTA
tttgtatattataaatatgg

SEQ ID NO: 261019 - DNA, 20 bp, Artificial Sequence
  Description of Artificial Sequence: Synthetic oligonucleotide
  Target: LAMA2; (-) strand; PAM type: YTN; PAM sequence: CTA
aaatgtgattatttgtatat

SEQ ID NO: 261020 - DNA, 20 bp, Artificial Sequence
  Description of Artificial Sequence: Synthetic oligonucleotide
  Target: LAMA2; (-) strand; PAM type: YTN; PAM sequence: TTA
aacccaaagatctaaaatgt

SEQ ID NO: 261021 - DNA, 20 bp, Artificial Sequence
  Description of Artificial Sequence: Synthetic oligonucleotide
  Target: LAMA2; (-) strand; PAM type: YTN; PAM sequence: TTT
aaacccaaagatctaaaatg

SEQ ID NO: 261022 - DNA, 20 bp, Artificial Sequence
  Description of Artificial Sequence: Synthetic oligonucleotide
  Target: LAMA2; (-) strand; PAM type: YTN; PAM sequence: TTT
taaacccaaagatctaaaat

SEQ ID NO: 261023 - DNA, 20 bp, Artificial Sequence
  Description of Artificial Sequence: Synthetic oligonucleotide
  Target: LAMA2; (-) strand; PAM type: YTN; PAM sequence: CTA
gaagatattttaaacccaaa

SEQ ID NO: 261024 - DNA, 20 bp, Artificial Sequence
  Description of Artificial Sequence: Synthetic oligonucleotide
  Target: LAMA2; (-) strand; PAM type: YTN; PAM sequence: TTC
tagaagatattttaaaccca

SEQ ID NO: 261025 - DNA, 20 bp, Artificial Sequence
  Description of Artificial Sequence: Synthetic oligonucleotide
  Target: LAMA2; (-) strand; PAM type: YTN; PAM sequence: CTT
ctagaagatattttaaaccc

SEQ ID NO: 261026 - DNA, 20 bp, Artificial Sequence
  Description of Artificial Sequence: Synthetic oligonucleotide
  Target: LAMA2; (-) strand; PAM type: YTN; PAM sequence: CTG
caataagggcggcttctaga

SEQ ID NO: 261027 - DNA, 20 bp, Artificial Sequence
  Description of Artificial Sequence: Synthetic oligonucleotide
  Target: LAMA2; (-) strand; PAM type: YTN; PAM sequence: CTA
atcagtagaaaggctgcaat

SEQ ID NO: 261028 - DNA, 20 bp, Artificial Sequence
  Description of Artificial Sequence: Synthetic oligonucleotide
  Target: LAMA2; (-) strand; PAM type: YTN; PAM sequence: TTG
ctaatcagtagaaaggctgc

SEQ ID NO: 261029 - DNA, 20 bp, Artificial Sequence
  Description of Artificial Sequence: Synthetic oligonucleotide
  Target: LAMA2; (-) strand; PAM type: YTN; PAM sequence: TTA
ttgctaatcagtagaaaggc

SEQ ID NO: 261030 - DNA, 20 bp, Artificial Sequence
  Description of Artificial Sequence: Synthetic oligonucleotide
  Target: LAMA2; (-) strand; PAM type: YTN; PAM sequence: CTA
attattgctaatcagtagaa

SEQ ID NO: 261031 - DNA, 20 bp, Artificial Sequence
  Description of Artificial Sequence: Synthetic oligonucleotide
  Target: LAMA2; (-) strand; PAM type: YTN; PAM sequence: CTA
tctaattattgctaatcagt

SEQ ID NO: 261032 - DNA, 20 bp, Artificial Sequence
  Description of Artificial Sequence: Synthetic oligonucleotide
  Target: LAMA2; (-) strand; PAM type: YTN; PAM sequence: TTC
tatctaattattgctaatca

SEQ ID NO: 261033 - DNA, 20 bp, Artificial Sequence
  Description of Artificial Sequence: Synthetic oligonucleotide
  Target: LAMA2; (-) strand; PAM type: YTN; PAM sequence: TTT
ctatctaattattgctaatc

SEQ ID NO: 261034 - DNA, 20 bp, Artificial Sequence
  Description of Artificial Sequence: Synthetic oligonucleotide
  Target: LAMA2; (-) strand; PAM type: YTN; PAM sequence: TTT
tctatctaattattgctaat

SEQ ID NO: 261035 - DNA, 20 bp, Artificial Sequence
  Description of Artificial Sequence: Synthetic oligonucleotide
  Target: LAMA2; (-) strand; PAM type: YTN; PAM sequence: TTT
ttctatctaattattgctaa

SEQ ID NO: 261036 - DNA, 20 bp, Artificial Sequence
  Description of Artificial Sequence: Synthetic oligonucleotide
  Target: LAMA2; (-) strand; PAM type: YTN; PAM sequence: TTA
taggtaagtatttttctatc

SEQ ID NO: 261037 - DNA, 20 bp, Artificial Sequence
  Description of Artificial Sequence: Synthetic oligonucleotide
  Target: LAMA2; (-) strand; PAM type: YTN; PAM sequence: TTT
ataggtaagtatttttctat

SEQ ID NO: 261038 - DNA, 20 bp, Artificial Sequence
  Description of Artificial Sequence: Synthetic oligonucleotide
  Target: LAMA2; (-) strand; PAM type: YTN; PAM sequence: CTT
tataggtaagtatttttcta

SEQ ID NO: 261039 - DNA, 20 bp, Artificial Sequence
  Description of Artificial Sequence: Synthetic oligonucleotide
  Target: LAMA2; (-) strand; PAM type: YTN; PAM sequence: TTG
tctttataggtaagtatttt

SEQ ID NO: 261040 - DNA, 20 bp, Artificial Sequence
  Description of Artificial Sequence: Synthetic oligonucleotide
  Target: LAMA2; (-) strand; PAM type: YTN; PAM sequence: CTT
gtctttataggtaagtattt

SEQ ID NO: 261041 - DNA, 20 bp, Artificial Sequence
  Description of Artificial Sequence: Synthetic oligonucleotide
  Target: LAMA2; (-) strand; PAM type: YTN; PAM sequence: TTC
ttgtctttataggtaagtat

SEQ ID NO: 261042 - DNA, 20 bp, Artificial Sequence
  Description of Artificial Sequence: Synthetic oligonucleotide
  Target: LAMA2; (-) strand; PAM type: YTN; PAM sequence: TTT
cttgtctttataggtaagta

SEQ ID NO: 261043 - DNA, 20 bp, Artificial Sequence
  Description of Artificial Sequence: Synthetic oligonucleotide
  Target: LAMA2; (-) strand; PAM type: YTN; PAM sequence: TTA
tttcttgtctttataggtaa

SEQ ID NO: 261044 - DNA, 20 bp, Artificial Sequence
  Description of Artificial Sequence: Synthetic oligonucleotide
  Target: LAMA2; (-) strand; PAM type: YTN; PAM sequence: TTT
atttcttgtctttataggta

SEQ ID NO: 261045 - DNA, 20 bp, Artificial Sequence
  Description of Artificial Sequence: Synthetic oligonucleotide
  Target: LAMA2; (-) strand; PAM type: YTN; PAM sequence: CTT
tatttcttgtctttataggt

SEQ ID NO: 261046 - DNA, 20 bp, Artificial Sequence
  Description of Artificial Sequence: Synthetic oligonucleotide
  Target: LAMA2; (-) strand; PAM type: YTN; PAM sequence: TTA
gctttatttcttgtctttat

SEQ ID NO: 261047 - DNA, 20 bp, Artificial Sequence
  Description of Artificial Sequence: Synthetic oligonucleotide
  Target: LAMA2; (-) strand; PAM type: YTN; PAM sequence: TTA
tcaggattagctttatttct

SEQ ID NO: 261048 - DNA, 20 bp, Artificial Sequence
  Description of Artificial Sequence: Synthetic oligonucleotide
  Target: LAMA2; (-) strand; PAM type: YTN; PAM sequence: CTC
aaaaaaaaaaaaaaatgatt

SEQ ID NO: 261049 - DNA, 20 bp, Artificial Sequence
  Description of Artificial Sequence: Synthetic oligonucleotide
  Target: LAMA2; (-) strand; PAM type: YTN; PAM sequence: CTC
cgtctcaaaaaaaaaaaaaa

SEQ ID NO: 261050 - DNA, 20 bp, Artificial Sequence
  Description of Artificial Sequence: Synthetic oligonucleotide
  Target: LAMA2; (-) strand; PAM type: YTN; PAM sequence: CTG
ggtgacagagcgagactccg

SEQ ID NO: 261051 - DNA, 20 bp, Artificial Sequence
  Description of Artificial Sequence: Synthetic oligonucleotide
  Target: LAMA2; (-) strand; PAM type: YTN; PAM sequence: CTC
cagcctgggtgacagagcga

SEQ ID NO: 261052 - DNA, 20 bp, Artificial Sequence
  Description of Artificial Sequence: Synthetic oligonucleotide
  Target: LAMA2; (-) strand; PAM type: YTN; PAM sequence: CTG
cactccagcctgggtgacag

SEQ ID NO: 261053 - DNA, 20 bp, Artificial Sequence
  Description of Artificial Sequence: Synthetic oligonucleotide
  Target: LAMA2; (-) strand; PAM type: YTN; PAM sequence: TTG
cagtgagccgagatcgcgcc

SEQ ID NO: 261054 - DNA, 20 bp, Artificial Sequence
  Description of Artificial Sequence: Synthetic oligonucleotide
  Target: LAMA2; (-) strand; PAM type: YTN; PAM sequence: CTT
gcagtgagccgagatcgcgc

SEQ ID NO: 261055 - DNA, 20 bp, Artificial Sequence
  Description of Artificial Sequence: Synthetic oligonucleotide
  Target: LAMA2; (-) strand; PAM type: YTN; PAM sequence: CTG
aggcaggagaatggcgtgaa

SEQ ID NO: 261056 - DNA, 20 bp, Artificial Sequence
  Description of Artificial Sequence: Synthetic oligonucleotide
  Target: LAMA2; (-) strand; PAM type: YTN; PAM sequence: CTC
gggaggctgaggcaggagaa

SEQ ID NO: 261057 - DNA, 20 bp, Artificial Sequence
  Description of Artificial Sequence: Synthetic oligonucleotide
  Target: LAMA2; (-) strand; PAM type: YTN; PAM sequence: CTA
ctcgggaggctgaggcagga

SEQ ID NO: 261058 - DNA, 20 bp, Artificial Sequence
  Description of Artificial Sequence: Synthetic oligonucleotide
  Target: LAMA2; (-) strand; PAM type: YTN; PAM sequence: CTG
tagtcccagctactcgggag

SEQ ID NO: 261059 - DNA, 20 bp, Artificial Sequence
  Description of Artificial Sequence: Synthetic oligonucleotide
  Target: LAMA2; (-) strand; PAM type: YTN; PAM sequence: TTA
gccgggcgtggtagcgggcg

SEQ ID NO: 261060 - DNA, 20 bp, Artificial Sequence
  Description of Artificial Sequence: Synthetic oligonucleotide
  Target: LAMA2; (-) strand; PAM type: YTN; PAM sequence: CTA
aaaatacaaaaaattagccg

SEQ ID NO: 261061 - DNA, 20 bp, Artificial Sequence
  Description of Artificial Sequence: Synthetic oligonucleotide
  Target: LAMA2; (-) strand; PAM type: YTN; PAM sequence: CTA
ctaaaaatacaaaaaattag

SEQ ID NO: 261062 - DNA, 20 bp, Artificial Sequence
  Description of Artificial Sequence: Synthetic oligonucleotide
  Target: LAMA2; (-) strand; PAM type: YTN; PAM sequence: CTC
tactaaaaatacaaaaaatt

SEQ ID NO: 261063 - DNA, 20 bp, Artificial Sequence
  Description of Artificial Sequence: Synthetic oligonucleotide
  Target: LAMA2; (-) strand; PAM type: YTN; PAM sequence: CTA
acacggtgaaaccccgtctc

SEQ ID NO: 261064 - DNA, 20 bp, Artificial Sequence
  Description of Artificial Sequence: Synthetic oligonucleotide
  Target: LAMA2; (-) strand; PAM type: YTN; PAM sequence: CTG
gctaacacggtgaaaccccg

SEQ ID NO: 261065 - DNA, 20 bp, Artificial Sequence
  Description of Artificial Sequence: Synthetic oligonucleotide
  Target: LAMA2; (-) strand; PAM type: YTN; PAM sequence: TTG
ggaggccgaggcgggcggat

SEQ ID NO: 261066 - DNA, 20 bp, Artificial Sequence
  Description of Artificial Sequence: Synthetic oligonucleotide
  Target: LAMA2; (-) strand; PAM type: YTN; PAM sequence: TTT
gggaggccgaggcgggcgga

SEQ ID NO: 261067 - DNA, 20 bp, Artificial Sequence
  Description of Artificial Sequence: Synthetic oligonucleotide
  Target: LAMA2; (-) strand; PAM type: YTN; PAM sequence: CTT
tgggaggccgaggcgggcgg

SEQ ID NO: 261068 - DNA, 20 bp, Artificial Sequence
  Description of Artificial Sequence: Synthetic oligonucleotide
  Target: LAMA2; (-) strand; PAM type: YTN; PAM sequence: CTG
taatcccagcactttgggag

SEQ ID NO: 261069 - DNA, 20 bp, Artificial Sequence
  Description of Artificial Sequence: Synthetic oligonucleotide
  Target: LAMA2; (-) strand; PAM type: YTN; PAM sequence: CTC
acgcctgtaatcccagcact

SEQ ID NO: 261070 - DNA, 20 bp, Artificial Sequence
  Description of Artificial Sequence: Synthetic oligonucleotide
  Target: LAMA2; (-) strand; PAM type: YTN; PAM sequence: TTA
tcggccgggcgcggtggctc

SEQ ID NO: 261071 - DNA, 20 bp, Artificial Sequence
  Description of Artificial Sequence: Synthetic oligonucleotide
  Target: LAMA2; (-) strand; PAM type: YTN; PAM sequence: TTA
aaatgattatcggccgggcg

SEQ ID NO: 261072 - DNA, 20 bp, Artificial Sequence
  Description of Artificial Sequence: Synthetic oligonucleotide
  Target: LAMA2; (-) strand; PAM type: YTN; PAM sequence: TTA
ttaaaatgattatcggccgg

SEQ ID NO: 261073 - DNA, 20 bp, Artificial Sequence
  Description of Artificial Sequence: Synthetic oligonucleotide
  Target: LAMA2; (-) strand; PAM type: YTN; PAM sequence: CTG
ttattaaaatgattatcggc

SEQ ID NO: 261074 - DNA, 20 bp, Artificial Sequence
  Description of Artificial Sequence: Synthetic oligonucleotide
  Target: LAMA2; (-) strand; PAM type: YTN; PAM sequence: TTC
tgttattaaaatgattatcg

SEQ ID NO: 261075 - DNA, 20 bp, Artificial Sequence
  Description of Artificial Sequence: Synthetic oligonucleotide
  Target: LAMA2; (-) strand; PAM type: YTN; PAM sequence: TTC
ccagattctgttattaaaat

SEQ ID NO: 261076 - DNA, 20 bp, Artificial Sequence
  Description of Artificial Sequence: Synthetic oligonucleotide
  Target: LAMA2; (-) strand; PAM type: YTN; PAM sequence: CTT
cccagattctgttattaaaa

SEQ ID NO: 261077 - DNA, 20 bp, Artificial Sequence
  Description of Artificial Sequence: Synthetic oligonucleotide
  Target: LAMA2; (-) strand; PAM type: YTN; PAM sequence: TTA
aaaatcttcccagattctgt

SEQ ID NO: 261078 - DNA, 20 bp, Artificial Sequence
  Description of Artificial Sequence: Synthetic oligonucleotide
  Target: LAMA2; (-) strand; PAM type: YTN; PAM sequence: TTG
gttaaaaatcttcccagatt

SEQ ID NO: 261079 - DNA, 20 bp, Artificial Sequence
  Description of Artificial Sequence: Synthetic oligonucleotide
  Target: LAMA2; (-) strand; PAM type: YTN; PAM sequence: TTT
ggttaaaaatcttcccagat

SEQ ID NO: 261080 - DNA, 20 bp, Artificial Sequence
  Description of Artificial Sequence: Synthetic oligonucleotide
  Target: LAMA2; (-) strand; PAM type: YTN; PAM sequence: TTC
atgcccaaatatttggttaa

SEQ ID NO: 261081 - DNA, 20 bp, Artificial Sequence
  Description of Artificial Sequence: Synthetic oligonucleotide
  Target: LAMA2; (-) strand; PAM type: YTN; PAM sequence: TTT
catgcccaaatatttggtta

SEQ ID NO: 261082 - DNA, 20 bp, Artificial Sequence
  Description of Artificial Sequence: Synthetic oligonucleotide
  Target: LAMA2; (-) strand; PAM type: YTN; PAM sequence: CTT
tcatgcccaaatatttggtt

SEQ ID NO: 261083 - DNA, 20 bp, Artificial Sequence
  Description of Artificial Sequence: Synthetic oligonucleotide
  Target: LAMA2; (-) strand; PAM type: YTN; PAM sequence: TTG
tctttcatgcccaaatattt

SEQ ID NO: 261084 - DNA, 20 bp, Artificial Sequence
  Description of Artificial Sequence: Synthetic oligonucleotide
  Target: LAMA2; (-) strand; PAM type: YTN; PAM sequence: CTA
ttgtctttcatgcccaaata

SEQ ID NO: 261085 - DNA, 20 bp, Artificial Sequence
  Description of Artificial Sequence: Synthetic oligonucleotide
  Target: LAMA2; (-) strand; PAM type: YTN; PAM sequence: CTC
tattgtctttcatgcccaaa

SEQ ID NO: 261086 - DNA, 20 bp, Artificial Sequence
  Description of Artificial Sequence: Synthetic oligonucleotide
  Target: LAMA2; (-) strand; PAM type: YTN; PAM sequence: CTC
ctctattgtctttcatgccc

SEQ ID NO: 261087 - DNA, 20 bp, Artificial Sequence
  Description of Artificial Sequence: Synthetic oligonucleotide
  Target: LAMA2; (-) strand; PAM type: YTN; PAM sequence: TTC
ctcctctattgtctttcatg

SEQ ID NO: 261088 - DNA, 20 bp, Artificial Sequence
  Description of Artificial Sequence: Synthetic oligonucleotide
  Target: LAMA2; (-) strand; PAM type: YTN; PAM sequence: TTC
caagatcaccagttcctcct

SEQ ID NO: 261089 - DNA, 20 bp, Artificial Sequence
  Description of Artificial Sequence: Synthetic oligonucleotide
  Target: LAMA2; (-) strand; PAM type: YTN; PAM sequence: TTT
ccaagatcaccagttcctcc

SEQ ID NO: 261090 - DNA, 20 bp, Artificial Sequence
  Description of Artificial Sequence: Synthetic oligonucleotide
  Target: LAMA2; (-) strand; PAM type: YTN; PAM sequence: TTA
tcatttccaagatcaccagt

SEQ ID NO: 261091 - DNA, 20 bp, Artificial Sequence
  Description of Artificial Sequence: Synthetic oligonucleotide
  Target: LAMA2; (-) strand; PAM type: YTN; PAM sequence: TTA
tgagattatcatttccaaga

SEQ ID NO: 261092 - DNA, 20 bp, Artificial Sequence
  Description of Artificial Sequence: Synthetic oligonucleotide
  Target: LAMA2; (-) strand; PAM type: YTN; PAM sequence: CTT
atgagattatcatttccaag

SEQ ID NO: 261093 - DNA, 20 bp, Artificial Sequence
  Description of Artificial Sequence: Synthetic oligonucleotide
  Target: LAMA2; (-) strand; PAM type: YTN; PAM sequence: TTG
cttatgagattatcatttcc

SEQ ID NO: 261094 - DNA, 20 bp, Artificial Sequence
  Description of Artificial Sequence: Synthetic oligonucleotide
  Target: LAMA2; (-) strand; PAM type: YTN; PAM sequence: TTT
gcttatgagattatcatttc

SEQ ID NO: 261095 - DNA, 20 bp, Artificial Sequence
  Description of Artificial Sequence: Synthetic oligonucleotide
  Target: LAMA2; (-) strand; PAM type: YTN; PAM sequence: CTA
acagtagtttgcttatgaga

SEQ ID NO: 261096 - DNA, 20 bp, Artificial Sequence
  Description of Artificial Sequence: Synthetic oligonucleotide
  Target: LAMA2; (-) strand; PAM type: YTN; PAM sequence: CTG
ctaacagtagtttgcttatg

SEQ ID NO: 261097 - DNA, 20 bp, Artificial Sequence
  Description of Artificial Sequence: Synthetic oligonucleotide
  Target: LAMA2; (-) strand; PAM type: YTN; PAM sequence: TTC
ctgctaacagtagtttgctt

SEQ ID NO: 261098 - DNA, 20 bp, Artificial Sequence
  Description of Artificial Sequence: Synthetic oligonucleotide
  Target: LAMA2; (-) strand; PAM type: YTN; PAM sequence: CTG
ttcctgctaacagtagtttg

SEQ ID NO: 261099 - DNA, 20 bp, Artificial Sequence
  Description of Artificial Sequence: Synthetic oligonucleotide
  Target: LAMA2; (-) strand; PAM type: YTN; PAM sequence: TTC
tgttcctgctaacagtagtt

SEQ ID NO: 261100 - DNA, 20 bp, Artificial Sequence
  Description of Artificial Sequence: Synthetic oligonucleotide
  Target: LAMA2; (-) strand; PAM type: YTN; PAM sequence: TTT
ctgttcctgctaacagtagt

SEQ ID NO: 261101 - DNA, 20 bp, Artificial Sequence
  Description of Artificial Sequence: Synthetic oligonucleotide
  Target: LAMA2; (-) strand; PAM type: YTN; PAM sequence: TTA
tgtttctgttcctgctaaca

SEQ ID NO: 261102 - DNA, 20 bp, Artificial Sequence
  Description of Artificial Sequence: Synthetic oligonucleotide
  Target: LAMA2; (-) strand; PAM type: YTN; PAM sequence: TTA
ccaggagtattatgtttctg

SEQ ID NO: 261103 - DNA, 20 bp, Artificial Sequence
  Description of Artificial Sequence: Synthetic oligonucleotide
  Target: LAMA2; (-) strand; PAM type: YTN; PAM sequence: TTA
tatccaccattaccaggagt

SEQ ID NO: 261104 - DNA, 20 bp, Artificial Sequence
  Description of Artificial Sequence: Synthetic oligonucleotide
  Target: LAMA2; (-) strand; PAM type: YTN; PAM sequence: CTT
atatccaccattaccaggag

SEQ ID NO: 261105 - DNA, 20 bp, Artificial Sequence
  Description of Artificial Sequence: Synthetic oligonucleotide
  Target: LAMA2; (-) strand; PAM type: YTN; PAM sequence: TTC
ttatatccaccattaccagg

SEQ ID NO: 261106 - DNA, 20 bp, Artificial Sequence
  Description of Artificial Sequence: Synthetic oligonucleotide
  Target: LAMA2; (-) strand; PAM type: YTN; PAM sequence: TTA
attcttatatccaccattac

SEQ ID NO: 261107 - DNA, 20 bp, Artificial Sequence
  Description of Artificial Sequence: Synthetic oligonucleotide
  Target: LAMA2; (-) strand; PAM type: YTN; PAM sequence: CTT
aattcttatatccaccatta

SEQ ID NO: 261108 - DNA, 20 bp, Artificial Sequence
  Description of Artificial Sequence: Synthetic oligonucleotide
  Target: LAMA2; (-) strand; PAM type: YTN; PAM sequence: CTC
agcttaattcttatatccac

SEQ ID NO: 261109 - DNA, 20 bp, Artificial Sequence
  Description of Artificial Sequence: Synthetic oligonucleotide
  Target: LAMA2; (-) strand; PAM type: YTN; PAM sequence: CTC
ctcagcttaattcttatatc

SEQ ID NO: 261110 - DNA, 20 bp, Artificial Sequence
  Description of Artificial Sequence: Synthetic oligonucleotide
  Target: LAMA2; (-) strand; PAM type: YTN; PAM sequence: TTC
cctcctcagcttaattctta

SEQ ID NO: 261111 - DNA, 20 bp, Artificial Sequence
  Description of Artificial Sequence: Synthetic oligonucleotide
  Target: LAMA2; (-) strand; PAM type: YTN; PAM sequence: TTT
ccctcctcagcttaattctt

SEQ ID NO: 261112 - DNA, 20 bp, Artificial Sequence
  Description of Artificial Sequence: Synthetic oligonucleotide
  Target: LAMA2; (-) strand; PAM type: YTN; PAM sequence: CTT
tccctcctcagcttaattct

SEQ ID NO: 261113 - DNA, 20 bp, Artificial Sequence
  Description of Artificial Sequence: Synthetic oligonucleotide
  Target: LAMA2; (-) strand; PAM type: YTN; PAM sequence: CTC
acactttccctcctcagctt

SEQ ID NO: 261114 - DNA, 20 bp, Artificial Sequence
  Description of Artificial Sequence: Synthetic oligonucleotide
  Target: LAMA2; (-) strand; PAM type: YTN; PAM sequence: CTG
tgtatctcacactttccctc

SEQ ID NO: 261115 - DNA, 20 bp, Artificial Sequence
  Description of Artificial Sequence: Synthetic oligonucleotide
  Target: LAMA2; (-) strand; PAM type: YTN; PAM sequence: CTC
actgtgtatctcacactttc

SEQ ID NO: 261116 - DNA, 20 bp, Artificial Sequence
  Description of Artificial Sequence: Synthetic oligonucleotide
  Target: LAMA2; (-) strand; PAM type: YTN; PAM sequence: CTG
catctcactgtgtatctcac

SEQ ID NO: 261117 - DNA, 20 bp, Artificial Sequence
  Description of Artificial Sequence: Synthetic oligonucleotide
  Target: LAMA2; (-) strand; PAM type: YTN; PAM sequence: CTG
gctgcatctcactgtgtatc

SEQ ID NO: 261118 - DNA, 20 bp, Artificial Sequence
  Description of Artificial Sequence: Synthetic oligonucleotide
  Target: LAMA2; (-) strand; PAM type: YTN; PAM sequence: CTA
gatccaagtctggctgcatc

SEQ ID NO: 261119 - DNA, 20 bp, Artificial Sequence
  Description of Artificial Sequence: Synthetic oligonucleotide
  Target: LAMA2; (-) strand; PAM type: YTN; PAM sequence: CTC
ctagatccaagtctggctgc

SEQ ID NO: 261120 - DNA, 20 bp, Artificial Sequence
  Description of Artificial Sequence: Synthetic oligonucleotide
  Target: LAMA2; (-) strand; PAM type: YTN; PAM sequence: CTG
gccaaactcctagatccaag

SEQ ID NO: 261121 - DNA, 20 bp, Artificial Sequence
  Description of Artificial Sequence: Synthetic oligonucleotide
  Target: LAMA2; (-) strand; PAM type: YTN; PAM sequence: CTA
cagcccagtggtaaagtcat

SEQ ID NO: 261122 - DNA, 20 bp, Artificial Sequence
  Description of Artificial Sequence: Synthetic oligonucleotide
  Target: LAMA2; (-) strand; PAM type: YTN; PAM sequence: CTC
agatctacagcccagtggta

SEQ ID NO: 261123 - DNA, 20 bp, Artificial Sequence
  Description of Artificial Sequence: Synthetic oligonucleotide
  Target: LAMA2; (-) strand; PAM type: YTN; PAM sequence: TTC
tcagatctacagcccagtgg

SEQ ID NO: 261124 - DNA, 20 bp, Artificial Sequence
  Description of Artificial Sequence: Synthetic oligonucleotide
  Target: LAMA2; (-) strand; PAM type: YTN; PAM sequence: CTT
ctcagatctacagcccagtg

SEQ ID NO: 261125 - DNA, 20 bp, Artificial Sequence
  Description of Artificial Sequence: Synthetic oligonucleotide
  Target: LAMA2; (-) strand; PAM type: YTN; PAM sequence: TTA
tccttctcagatctacagcc

SEQ ID NO: 261126 - DNA, 20 bp, Artificial Sequence
  Description of Artificial Sequence: Synthetic oligonucleotide
  Target: LAMA2; (-) strand; PAM type: YTN; PAM sequence: CTA
ttatccttctcagatctaca

SEQ ID NO: 261127 - DNA, 20 bp, Artificial Sequence
  Description of Artificial Sequence: Synthetic oligonucleotide
  Target: LAMA2; (-) strand; PAM type: YTN; PAM sequence: TTC
tattatccttctcagatcta

SEQ ID NO: 261128 - DNA, 20 bp, Artificial Sequence
  Description of Artificial Sequence: Synthetic oligonucleotide
  Target: LAMA2; (-) strand; PAM type: YTN; PAM sequence: CTG
ttctattatccttctcagat

SEQ ID NO: 261129 - DNA, 20 bp, Artificial Sequence
  Description of Artificial Sequence: Synthetic oligonucleotide
  Target: LAMA2; (-) strand; PAM type: YTN; PAM sequence: TTG
gtgctgttctattatccttc

SEQ ID NO: 261130 - DNA, 20 bp, Artificial Sequence
  Description of Artificial Sequence: Synthetic oligonucleotide
  Target: LAMA2; (-) strand; PAM type: YTN; PAM sequence: TTT
ggtgctgttctattatcctt

SEQ ID NO: 261131 - DNA, 20 bp, Artificial Sequence
  Description of Artificial Sequence: Synthetic oligonucleotide
  Target: LAMA2; (-) strand; PAM type: YTN; PAM sequence: TTT
tggtgctgttctattatcct

SEQ ID NO: 261132 - DNA, 20 bp, Artificial Sequence
  Description of Artificial Sequence: Synthetic oligonucleotide
  Target: LAMA2; (-) strand; PAM type: YTN; PAM sequence: TTT
ttggtgctgttctattatcc

SEQ ID NO: 261133 - DNA, 20 bp, Artificial Sequence
  Description of Artificial Sequence: Synthetic oligonucleotide
  Target: LAMA2; (-) strand; PAM type: YTN; PAM sequence: CTT
tttggtgctgttctattatc

SEQ ID NO: 261134 - DNA, 20 bp, Artificial Sequence
  Description of Artificial Sequence: Synthetic oligonucleotide
  Target: LAMA2; (-) strand; PAM type: YTN; PAM sequence: CTC
tttttggtgctgttctatta

SEQ ID NO: 261135 - DNA, 20 bp, Artificial Sequence
  Description of Artificial Sequence: Synthetic oligonucleotide
  Target: LAMA2; (-) strand; PAM type: YTN; PAM sequence: TTA
actctttttggtgctgttct

SEQ ID NO: 261136 - DNA, 20 bp, Artificial Sequence
  Description of Artificial Sequence: Synthetic oligonucleotide
  Target: LAMA2; (-) strand; PAM type: YTN; PAM sequence: CTT
aactctttttggtgctgttc

SEQ ID NO: 261137 - DNA, 20 bp, Artificial Sequence
  Description of Artificial Sequence: Synthetic oligonucleotide
  Target: LAMA2; (-) strand; PAM type: YTN; PAM sequence: TTG
tgacttaactctttttggtg

SEQ ID NO: 261138 - DNA, 20 bp, Artificial Sequence
  Description of Artificial Sequence: Synthetic oligonucleotide
  Target: LAMA2; (-) strand; PAM type: YTN; PAM sequence: TTT
gtgacttaactctttttggt

SEQ ID NO: 261139 - DNA, 20 bp, Artificial Sequence
  Description of Artificial Sequence: Synthetic oligonucleotide
  Target: LAMA2; (-) strand; PAM type: YTN; PAM sequence: CTT
tgtgacttaactctttttgg

SEQ ID NO: 261140 - DNA, 20 bp, Artificial Sequence
  Description of Artificial Sequence: Synthetic oligonucleotide
  Target: LAMA2; (-) strand; PAM type: YTN; PAM sequence: TTG
ccaccatatggtgtatgcac

SEQ ID NO: 261141 - DNA, 20 bp, Artificial Sequence
  Description of Artificial Sequence: Synthetic oligonucleotide
  Target: LAMA2; (-) strand; PAM type: YTN; PAM sequence: TTT
gccaccatatggtgtatgca

SEQ ID NO: 261142 - DNA, 20 bp, Artificial Sequence
  Description of Artificial Sequence: Synthetic oligonucleotide
  Target: LAMA2; (-) strand; PAM type: YTN; PAM sequence: CTG
agtttgccaccatatggtgt

SEQ ID NO: 261143 - DNA, 20 bp, Artificial Sequence
  Description of Artificial Sequence: Synthetic oligonucleotide
  Target: LAMA2; (-) strand; PAM type: YTN; PAM sequence: CTG
tctgagtttgccaccatatg

SEQ ID NO: 261144 - DNA, 20 bp, Artificial Sequence
  Description of Artificial Sequence: Synthetic oligonucleotide
  Target: LAMA2; (-) strand; PAM type: YTN; PAM sequence: CTC
tgtctgagtttgccaccata

SEQ ID NO: 261145 - DNA, 20 bp, Artificial Sequence
  Description of Artificial Sequence: Synthetic oligonucleotide
  Target: LAMA2; (-) strand; PAM type: YTN; PAM sequence: CTC
tctgtctgagtttgccacca

SEQ ID NO: 261146 - DNA, 20 bp, Artificial Sequence
  Description of Artificial Sequence: Synthetic oligonucleotide
  Target: LAMA2; (-) strand; PAM type: YTN; PAM sequence: CTC
tctctgtctgagtttgccac

SEQ ID NO: 261147 - DNA, 20 bp, Artificial Sequence
  Description of Artificial Sequence: Synthetic oligonucleotide
  Target: LAMA2; (-) strand; PAM type: YTN; PAM sequence: TTA
caaagggtatcacctctctc

SEQ ID NO: 261148 - DNA, 20 bp, Artificial Sequence
  Description of Artificial Sequence: Synthetic oligonucleotide
  Target: LAMA2; (-) strand; PAM type: YTN; PAM sequence: TTG
gcattacaaagggtatcacc

SEQ ID NO: 261149 - DNA, 20 bp, Artificial Sequence
  Description of Artificial Sequence: Synthetic oligonucleotide
  Target: LAMA2; (-) strand; PAM type: YTN; PAM sequence: CTT
ggcattacaaagggtatcac

SEQ ID NO: 261150 - DNA, 20 bp, Artificial Sequence
  Description of Artificial Sequence: Synthetic oligonucleotide
  Target: LAMA2; (-) strand; PAM type: YTN; PAM sequence: CTC
ccaagcagagcatgacttgg

SEQ ID NO: 261151 - DNA, 20 bp, Artificial Sequence
  Description of Artificial Sequence: Synthetic oligonucleotide
  Target: LAMA2; (-) strand; PAM type: YTN; PAM sequence: CTG
tctcccaagcagagcatgac

SEQ ID NO: 261152 - DNA, 20 bp, Artificial Sequence
  Description of Artificial Sequence: Synthetic oligonucleotide
  Target: LAMA2; (-) strand; PAM type: YTN; PAM sequence: TTC
tgtctcccaagcagagcatg

SEQ ID NO: 261153 - DNA, 20 bp, Artificial Sequence
  Description of Artificial Sequence: Synthetic oligonucleotide
  Target: LAMA2; (-) strand; PAM type: YTN; PAM sequence: TTT
ctgtctcccaagcagagcat

SEQ ID NO: 261154 - DNA, 20 bp, Artificial Sequence
  Description of Artificial Sequence: Synthetic oligonucleotide
  Target: LAMA2; (-) strand; PAM type: YTN; PAM sequence: TTA
aaaaaccagtgtagtttctg

SEQ ID NO: 261155 - DNA, 20 bp, Artificial Sequence
  Description of Artificial Sequence: Synthetic oligonucleotide
  Target: LAMA2; (-) strand; PAM type: YTN; PAM sequence: TTT
aaaaaaccagtgtagtttct

SEQ ID NO: 261156 - DNA, 20 bp, Artificial Sequence
  Description of Artificial Sequence: Synthetic oligonucleotide
  Target: LAMA2; (-) strand; PAM type: YTN; PAM sequence: CTG
tttaaaaaaccagtgtagtt

SEQ ID NO: 261157 - DNA, 20 bp, Artificial Sequence
  Description of Artificial Sequence: Synthetic oligonucleotide
  Target: LAMA2; (-) strand; PAM type: YTN; PAM sequence: TTC
actgtttaaaaaaccagtgt

SEQ ID NO: 261158 - DNA, 20 bp, Artificial Sequence
  Description of Artificial Sequence: Synthetic oligonucleotide
  Target: LAMA2; (-) strand; PAM type: YTN; PAM sequence: TTT
cactgtttaaaaaaccagtg

SEQ ID NO: 261159 - DNA, 20 bp, Artificial Sequence
  Description of Artificial Sequence: Synthetic oligonucleotide
  Target: LAMA2; (-) strand; PAM type: YTN; PAM sequence: TTC
catttcactgtttaaaaaac

SEQ ID NO: 261160 - DNA, 20 bp, Artificial Sequence
  Description of Artificial Sequence: Synthetic oligonucleotide
  Target: LAMA2; (-) strand; PAM type: YTN; PAM sequence: TTA
acaattccatttcactgttt

SEQ ID NO: 261161 - DNA, 20 bp, Artificial Sequence
  Description of Artificial Sequence: Synthetic oligonucleotide
  Target: LAMA2; (-) strand; PAM type: YTN; PAM sequence: TTA
ccagttaacaattccatttc

SEQ ID NO: 261162 - DNA, 20 bp, Artificial Sequence
  Description of Artificial Sequence: Synthetic oligonucleotide
  Target: LAMA2; (-) strand; PAM type: YTN; PAM sequence: TTT
accagttaacaattccattt

SEQ ID NO: 261163 - DNA, 20 bp, Artificial Sequence
  Description of Artificial Sequence: Synthetic oligonucleotide
  Target: LAMA2; (-) strand; PAM type: YTN; PAM sequence: TTT
taccagttaacaattccatt

SEQ ID NO: 261164 - DNA, 20 bp, Artificial Sequence
  Description of Artificial Sequence: Synthetic oligonucleotide
  Target: LAMA2; (-) strand; PAM type: YTN; PAM sequence: CTT
ttaccagttaacaattccat

SEQ ID NO: 261165 - DNA, 20 bp, Artificial Sequence
  Description of Artificial Sequence: Synthetic oligonucleotide
  Target: LAMA2; (-) strand; PAM type: YTN; PAM sequence: TTA
gtaaccaaccaccttttacc

SEQ ID NO: 261166 - DNA, 20 bp, Artificial Sequence
  Description of Artificial Sequence: Synthetic oligonucleotide
  Target: LAMA2; (-) strand; PAM type: YTN; PAM sequence: TTT
agtaaccaaccaccttttac

SEQ ID NO: 261167 - DNA, 20 bp, Artificial Sequence
  Description of Artificial Sequence: Synthetic oligonucleotide
  Target: LAMA2; (-) strand; PAM type: YTN; PAM sequence: TTT
tagtaaccaaccacctttta

SEQ ID NO: 261168 - DNA, 20 bp, Artificial Sequence
  Description of Artificial Sequence: Synthetic oligonucleotide
  Target: LAMA2; (-) strand; PAM type: YTN; PAM sequence: TTT
ttagtaaccaaccacctttt

SEQ ID NO: 261169 - DNA, 20 bp, Artificial Sequence
  Description of Artificial Sequence: Synthetic oligonucleotide
  Target: LAMA2; (-) strand; PAM type: YTN; PAM sequence: TTT
tttagtaaccaaccaccttt

SEQ ID NO: 261170 - DNA, 20 bp, Artificial Sequence
  Description of Artificial Sequence: Synthetic oligonucleotide
  Target: LAMA2; (-) strand; PAM type: YTN; PAM sequence: CTT
ttttagtaaccaaccacctt

SEQ ID NO: 261171 - DNA, 20 bp, Artificial Sequence
  Description of Artificial Sequence: Synthetic oligonucleotide
  Target: LAMA2; (-) strand; PAM type: YTN; PAM sequence: TTA
tccttttttagtaaccaacc

SEQ ID NO: 261172 - DNA, 20 bp, Artificial Sequence
  Description of Artificial Sequence: Synthetic oligonucleotide
  Target: LAMA2; (-) strand; PAM type: YTN; PAM sequence: TTT
atccttttttagtaaccaac

SEQ ID NO: 261173 - DNA, 20 bp, Artificial Sequence
  Description of Artificial Sequence: Synthetic oligonucleotide
  Target: LAMA2; (-) strand; PAM type: YTN; PAM sequence: TTT
tatccttttttagtaaccaa

SEQ ID NO: 261174 - DNA, 20 bp, Artificial Sequence
  Description of Artificial Sequence: Synthetic oligonucleotide
  Target: LAMA2; (-) strand; PAM type: YTN; PAM sequence: CTT
ttatccttttttagtaacca

SEQ ID NO: 261175 - DNA, 20 bp, Artificial Sequence
  Description of Artificial Sequence: Synthetic oligonucleotide
  Target: LAMA2; (-) strand; PAM type: YTN; PAM sequence: TTC
ttttatccttttttagtaac

SEQ ID NO: 261176 - DNA, 20 bp, Artificial Sequence
  Description of Artificial Sequence: Synthetic oligonucleotide
  Target: LAMA2; (-) strand; PAM type: YTN; PAM sequence: TTT
cttttatccttttttagtaa

SEQ ID NO: 261177 - DNA, 20 bp, Artificial Sequence
  Description of Artificial Sequence: Synthetic oligonucleotide
  Target: LAMA2; (-) strand; PAM type: YTN; PAM sequence: CTT
tcttttatccttttttagta

SEQ ID NO: 261178 - DNA, 20 bp, Artificial Sequence
  Description of Artificial Sequence: Synthetic oligonucleotide
  Target: LAMA2; (-) strand; PAM type: YTN; PAM sequence: TTA
tagctttcttttatcctttt

SEQ ID NO: 261179 - DNA, 20 bp, Artificial Sequence
  Description of Artificial Sequence: Synthetic oligonucleotide
  Target: LAMA2; (-) strand; PAM type: YTN; PAM sequence: CTT
atagctttcttttatccttt

SEQ ID NO: 261180 - DNA, 20 bp, Artificial Sequence
  Description of Artificial Sequence: Synthetic oligonucleotide
  Target: LAMA2; (-) strand; PAM type: YTN; PAM sequence: CTC
gggacaccttatagctttct

SEQ ID NO: 261181 - DNA, 20 bp, Artificial Sequence
  Description of Artificial Sequence: Synthetic oligonucleotide
  Target: LAMA2; (-) strand; PAM type: YTN; PAM sequence: CTG
tactcgggacaccttatagc

SEQ ID NO: 261182 - DNA, 20 bp, Artificial Sequence
  Description of Artificial Sequence: Synthetic oligonucleotide
  Target: LAMA2; (-) strand; PAM type: YTN; PAM sequence: CTG
tacctgtactcgggacacct

SEQ ID NO: 261183 - DNA, 20 bp, Artificial Sequence
  Description of Artificial Sequence: Synthetic oligonucleotide
  Target: LAMA2; (-) strand; PAM type: YTN; PAM sequence: TTC
tgtacctgtactcgggacac

SEQ ID NO: 261184 - DNA, 20 bp, Artificial Sequence
  Description of Artificial Sequence: Synthetic oligonucleotide
  Target: LAMA2; (-) strand; PAM type: YTN; PAM sequence: CTT
ctgtacctgtactcgggaca

SEQ ID NO: 261185 - DNA, 20 bp, Artificial Sequence
  Description of Artificial Sequence: Synthetic oligonucleotide
  Target: LAMA2; (-) strand; PAM type: YTN; PAM sequence: CTC
ttctgtacctgtactcggga

SEQ ID NO: 261186 - DNA, 20 bp, Artificial Sequence
  Description of Artificial Sequence: Synthetic oligonucleotide
  Target: LAMA2; (-) strand; PAM type: YTN; PAM sequence: CTG
ctcttctgtacctgtactcg

SEQ ID NO: 261187 - DNA, 20 bp, Artificial Sequence
  Description of Artificial Sequence: Synthetic oligonucleotide
  Target: LAMA2; (-) strand; PAM type: YTN; PAM sequence: CTA
gagggagtagctgctcttct

SEQ ID NO: 261188 - DNA, 20 bp, Artificial Sequence
  Description of Artificial Sequence: Synthetic oligonucleotide
  Target: LAMA2; (-) strand; PAM type: YTN; PAM sequence: CTC
agcctagagggagtagctgc

SEQ ID NO: 261189 - DNA, 20 bp, Artificial Sequence
  Description of Artificial Sequence: Synthetic oligonucleotide
  Target: LAMA2; (-) strand; PAM type: YTN; PAM sequence: CTC
cctcagcctagagggagtag

SEQ ID NO: 261190 - DNA, 20 bp, Artificial Sequence
  Description of Artificial Sequence: Synthetic oligonucleotide
  Target: LAMA2; (-) strand; PAM type: YTN; PAM sequence: TTC
ctccctcagcctagagggag

SEQ ID NO: 261191 - DNA, 20 bp, Artificial Sequence
  Description of Artificial Sequence: Synthetic oligonucleotide
  Target: LAMA2; (-) strand; PAM type: YTN; PAM sequence: TTT
cctccctcagcctagaggga

SEQ ID NO: 261192 - DNA, 20 bp, Artificial Sequence
  Description of Artificial Sequence: Synthetic oligonucleotide
  Target: LAMA2; (-) strand; PAM type: YTN; PAM sequence: CTT
tcctccctcagcctagaggg

SEQ ID NO: 261193 - DNA, 20 bp, Artificial Sequence
  Description of Artificial Sequence: Synthetic oligonucleotide
  Target: LAMA2; (-) strand; PAM type: YTN; PAM sequence: CTG
tctttcctccctcagcctag

SEQ ID NO: 261194 - DNA, 20 bp, Artificial Sequence
  Description of Artificial Sequence: Synthetic oligonucleotide
  Target: LAMA2; (-) strand; PAM type: YTN; PAM sequence: TTC
actgtctttcctccctcagc

SEQ ID NO: 261195 - DNA, 20 bp, Artificial Sequence
  Description of Artificial Sequence: Synthetic oligonucleotide
  Target: LAMA2; (-) strand; PAM type: YTN; PAM sequence: CTT
cactgtctttcctccctcag

SEQ ID NO: 261196 - DNA, 20 bp, Artificial Sequence
  Description of Artificial Sequence: Synthetic oligonucleotide
  Target: LAMA2; (-) strand; PAM type: YTN; PAM sequence: CTC
cttcactgtctttcctccct

SEQ ID NO: 261197 - DNA, 20 bp, Artificial Sequence
  Description of Artificial Sequence: Synthetic oligonucleotide
  Target: LAMA2; (-) strand; PAM type: YTN; PAM sequence: TTA
actccttcactgtctttcct

SEQ ID NO: 261198 - DNA, 20 bp, Artificial Sequence
  Description of Artificial Sequence: Synthetic oligonucleotide
  Target: LAMA2; (-) strand; PAM type: YTN; PAM sequence: CTT
aactccttcactgtctttcc

SEQ ID NO: 261199 - DNA, 20 bp, Artificial Sequence
  Description of Artificial Sequence: Synthetic oligonucleotide
  Target: LAMA2; (-) strand; PAM type: YTN; PAM sequence: TTA
gcccttaactccttcactgt

SEQ ID NO: 261200 - DNA, 20 bp, Artificial Sequence
  Description of Artificial Sequence: Synthetic oligonucleotide
  Target: LAMA2; (-) strand; PAM type: YTN; PAM sequence: CTT
agcccttaactccttcactg

SEQ ID NO: 261201 - DNA, 20 bp, Artificial Sequence
  Description of Artificial Sequence: Synthetic oligonucleotide
  Target: LAMA2; (-) strand; PAM type: YTN; PAM sequence: CTC
ttagcccttaactccttcac

SEQ ID NO: 261202 - DNA, 20 bp, Artificial Sequence
  Description of Artificial Sequence: Synthetic oligonucleotide
  Target: LAMA2; (-) strand; PAM type: YTN; PAM sequence: CTC
tcttagcccttaactccttc

SEQ ID NO: 261203 - DNA, 20 bp, Artificial Sequence
  Description of Artificial Sequence: Synthetic oligonucleotide
  Target: LAMA2; (-) strand; PAM type: YTN; PAM sequence: CTG
caagtggggagaaggagcat

SEQ ID NO: 261204 - DNA, 20 bp, Artificial Sequence
  Description of Artificial Sequence: Synthetic oligonucleotide
  Target: LAMA2; (-) strand; PAM type: YTN; PAM sequence: TTG
ctgcaagtggggagaaggag

SEQ ID NO: 261205 - DNA, 20 bp, Artificial Sequence
  Description of Artificial Sequence: Synthetic oligonucleotide
  Target: LAMA2; (-) strand; PAM type: YTN; PAM sequence: TTT
gctgcaagtggggagaagga

SEQ ID NO: 261206 - DNA, 20 bp, Artificial Sequence
  Description of Artificial Sequence: Synthetic oligonucleotide
  Target: LAMA2; (-) strand; PAM type: YTN; PAM sequence: CTT
tgctgcaagtggggagaagg

SEQ ID NO: 261207 - DNA, 20 bp, Artificial Sequence
  Description of Artificial Sequence: Synthetic oligonucleotide
  Target: LAMA2; (-) strand; PAM type: YTN; PAM sequence: CTC
agctttgctgcaagtgggga

SEQ ID NO: 261208 - DNA, 20 bp, Artificial Sequence
  Description of Artificial Sequence: Synthetic oligonucleotide
  Target: LAMA2; (-) strand; PAM type: YTN; PAM sequence: CTG
aacctcagctttgctgcaag

SEQ ID NO: 261209 - DNA, 20 bp, Artificial Sequence
  Description of Artificial Sequence: Synthetic oligonucleotide
  Target: LAMA2; (-) strand; PAM type: YTN; PAM sequence: TTC
tgaacctcagctttgctgca

SEQ ID NO: 261210 - DNA, 20 bp, Artificial Sequence
  Description of Artificial Sequence: Synthetic oligonucleotide
  Target: LAMA2; (-) strand; PAM type: YTN; PAM sequence: TTT
ctgaacctcagctttgctgc

SEQ ID NO: 261211 - DNA, 20 bp, Artificial Sequence
  Description of Artificial Sequence: Synthetic oligonucleotide
  Target: LAMA2; (-) strand; PAM type: YTN; PAM sequence: TTG
aaagatttctgaacctcagc

SEQ ID NO: 261212 - DNA, 20 bp, Artificial Sequence
  Description of Artificial Sequence: Synthetic oligonucleotide
  Target: LAMA2; (-) strand; PAM type: YTN; PAM sequence: CTT
gaaagatttctgaacctcag

SEQ ID NO: 261213 - DNA, 20 bp, Artificial Sequence
  Description of Artificial Sequence: Synthetic oligonucleotide
  Target: LAMA2; (-) strand; PAM type: YTN; PAM sequence: CTC
ttgaaagatttctgaacctc

SEQ ID NO: 261214 - DNA, 20 bp, Artificial Sequence
  Description of Artificial Sequence: Synthetic oligonucleotide
  Target: LAMA2; (-) strand; PAM type: YTN; PAM sequence: CTA
tgacagcaacgccctcttga

SEQ ID NO: 261215 - DNA, 20 bp, Artificial Sequence
  Description of Artificial Sequence: Synthetic oligonucleotide
  Target: LAMA2; (-) strand; PAM type: YTN; PAM sequence: TTC
ctatgacagcaacgccctct

SEQ ID NO: 261216 - DNA, 20 bp, Artificial Sequence
  Description of Artificial Sequence: Synthetic oligonucleotide
  Target: LAMA2; (-) strand; PAM type: YTN; PAM sequence: CTG
tacattcctatgacagcaac

SEQ ID NO: 261217 - DNA, 20 bp, Artificial Sequence
  Description of Artificial Sequence: Synthetic oligonucleotide
  Target: LAMA2; (-) strand; PAM type: YTN; PAM sequence: TTG
accatccataggctgtacat

SEQ ID NO: 261218 - DNA, 20 bp, Artificial Sequence
  Description of Artificial Sequence: Synthetic oligonucleotide
  Target: LAMA2; (-) strand; PAM type: YTN; PAM sequence: TTT
gaccatccataggctgtaca

SEQ ID NO: 261219 - DNA, 20 bp, Artificial Sequence
  Description of Artificial Sequence: Synthetic oligonucleotide
  Target: LAMA2; (-) strand; PAM type: YTN; PAM sequence: TTG
tttgaccatccataggctgt

SEQ ID NO: 261220 - DNA, 20 bp, Artificial Sequence
  Description of Artificial Sequence: Synthetic oligonucleotide
  Target: LAMA2; (-) strand; PAM type: YTN; PAM sequence: TTT
gtttgaccatccataggctg

SEQ ID NO: 261221 - DNA, 20 bp, Artificial Sequence
  Description of Artificial Sequence: Synthetic oligonucleotide
  Target: LAMA2; (-) strand; PAM type: YTN; PAM sequence: TTT
tgtttgaccatccataggct

SEQ ID NO: 261222 - DNA, 20 bp, Artificial Sequence
  Description of Artificial Sequence: Synthetic oligonucleotide
  Target: LAMA2; (-) strand; PAM type: YTN; PAM sequence: TTG
gttttgtttgaccatccata

SEQ ID NO: 261223 - DNA, 20 bp, Artificial Sequence
  Description of Artificial Sequence: Synthetic oligonucleotide
  Target: LAMA2; (-) strand; PAM type: YTN; PAM sequence: TTT
ggttttgtttgaccatccat

SEQ ID NO: 261224 - DNA, 20 bp, Artificial Sequence
  Description of Artificial Sequence: Synthetic oligonucleotide
  Target: LAMA2; (-) strand; PAM type: YTN; PAM sequence: TTT
tggttttgtttgaccatcca

SEQ ID NO: 261225 - DNA, 20 bp, Artificial Sequence
  Description of Artificial Sequence: Synthetic oligonucleotide
  Target: LAMA2; (-) strand; PAM type: YTN; PAM sequence: TTT
ttggttttgtttgaccatcc

SEQ ID NO: 261226 - DNA, 20 bp, Artificial Sequence
  Description of Artificial Sequence: Synthetic oligonucleotide
  Target: LAMA2; (-) strand; PAM type: YTN; PAM sequence: TTG
tttttggttttgtttgacca

SEQ ID NO: 261227 - DNA, 20 bp, Artificial Sequence
  Description of Artificial Sequence: Synthetic oligonucleotide
  Target: LAMA2; (-) strand; PAM type: YTN; PAM sequence: TTT
gtttttggttttgtttgacc

SEQ ID NO: 261228 - DNA, 20 bp, Artificial Sequence
  Description of Artificial Sequence: Synthetic oligonucleotide
  Target: LAMA2; (-) strand; PAM type: YTN; PAM sequence: CTC
cgacgtgtttgtttttggtt

SEQ ID NO: 261229 - DNA, 20 bp, Artificial Sequence
  Description of Artificial Sequence: Synthetic oligonucleotide
  Target: LAMA2; (-) strand; PAM type: YTN; PAM sequence: CTA
caaactccgacgtgtttgtt

SEQ ID NO: 261230 - DNA, 20 bp, Artificial Sequence
  Description of Artificial Sequence: Synthetic oligonucleotide
  Target: LAMA2; (-) strand; PAM type: YTN; PAM sequence: TTG
cctacaaactccgacgtgtt

SEQ ID NO: 261231 - DNA, 20 bp, Artificial Sequence
  Description of Artificial Sequence: Synthetic oligonucleotide
  Target: LAMA2; (-) strand; PAM type: YTN; PAM sequence: TTT
gcctacaaactccgacgtgt

SEQ ID NO: 261232 - DNA, 20 bp, Artificial Sequence
  Description of Artificial Sequence: Synthetic oligonucleotide
  Target: LAMA2; (-) strand; PAM type: YTN; PAM sequence: CTA
cagacatgcatttgcctaca

SEQ ID NO: 261233 - DNA, 20 bp, Artificial Sequence
  Description of Artificial Sequence: Synthetic oligonucleotide
  Target: LAMA2; (-) strand; PAM type: YTN; PAM sequence: TTC
tacagacatgcatttgccta

SEQ ID NO: 261234 - DNA, 20 bp, Artificial Sequence
  Description of Artificial Sequence: Synthetic oligonucleotide
  Target: LAMA2; (-) strand; PAM type: YTN; PAM sequence: CTT
ctacagacatgcatttgcct

SEQ ID NO: 261235 - DNA, 20 bp, Artificial Sequence
  Description of Artificial Sequence: Synthetic oligonucleotide
  Target: LAMA2; (-) strand; PAM type: YTN; PAM sequence: CTC
caagaacggtgggcagcttc

SEQ ID NO: 261236 - DNA, 20 bp, Artificial Sequence
  Description of Artificial Sequence: Synthetic oligonucleotide
  Target: LAMA2; (-) strand; PAM type: YTN; PAM sequence: CTA
tcctccaagaacggtgggca

SEQ ID NO: 261237 - DNA, 20 bp, Artificial Sequence
  Description of Artificial Sequence: Synthetic oligonucleotide
  Target: LAMA2; (-) strand; PAM type: YTN; PAM sequence: CTC
ctatcctccaagaacggtgg

SEQ ID NO: 261238 - DNA, 20 bp, Artificial Sequence
  Description of Artificial Sequence: Synthetic oligonucleotide
  Target: LAMA2; (-) strand; PAM type: YTN; PAM sequence: CTC
agtagcccagcgtgctccta

SEQ ID NO: 261239 - DNA, 20 bp, Artificial Sequence
  Description of Artificial Sequence: Synthetic oligonucleotide
  Target: LAMA2; (-) strand; PAM type: YTN; PAM sequence: TTC
tcagtagcccagcgtgctcc

SEQ ID NO: 261240 - DNA, 20 bp, Artificial Sequence
  Description of Artificial Sequence: Synthetic oligonucleotide
  Target: LAMA2; (-) strand; PAM type: YTN; PAM sequence: CTT
ctcagtagcccagcgtgctc

SEQ ID NO: 261241 - DNA, 20 bp, Artificial Sequence
  Description of Artificial Sequence: Synthetic oligonucleotide
  Target: LAMA2; (-) strand; PAM type: YTN; PAM sequence: TTG
aagtcggcttctcagtagcc

SEQ ID NO: 261242 - DNA, 20 bp, Artificial Sequence
  Description of Artificial Sequence: Synthetic oligonucleotide
  Target: LAMA2; (-) strand; PAM type: YTN; PAM sequence: CTT
gaagtcggcttctcagtagc

SEQ ID NO: 261243 - DNA, 20 bp, Artificial Sequence
  Description of Artificial Sequence: Synthetic oligonucleotide
  Target: LAMA2; (-) strand; PAM type: YTN; PAM sequence: CTG
accttgaagtcggcttctca

SEQ ID NO: 261244 - DNA, 20 bp, Artificial Sequence
  Description of Artificial Sequence: Synthetic oligonucleotide
  Target: LAMA2; (-) strand; PAM type: YTN; PAM sequence: CTC
tgaccttgaagtcggcttct

SEQ ID NO: 261245 - DNA, 20 bp, Artificial Sequence
  Description of Artificial Sequence: Synthetic oligonucleotide
  Target: LAMA2; (-) strand; PAM type: YTN; PAM sequence: CTG
cacacacgctctgaccttga

SEQ ID NO: 261246 - DNA, 20 bp, Artificial Sequence
  Description of Artificial Sequence: Synthetic oligonucleotide
  Target: LAMA2; (-) strand; PAM type: YTN; PAM sequence: TTG
gtctgcacacacgctctgac

SEQ ID NO: 261247 - DNA, 20 bp, Artificial Sequence
  Description of Artificial Sequence: Synthetic oligonucleotide
  Target: LAMA2; (-) strand; PAM type: YTN; PAM sequence: TTT
ggtctgcacacacgctctga

SEQ ID NO: 261248 - DNA, 20 bp, Artificial Sequence
  Description of Artificial Sequence: Synthetic oligonucleotide
  Target: LAMA2; (-) strand; PAM type: YTN; PAM sequence: CTT
tggtctgcacacacgctctg

SEQ ID NO: 261249 - DNA, 20 bp, Artificial Sequence
  Description of Artificial Sequence: Synthetic oligonucleotide
  Target: LAMA2; (-) strand; PAM type: YTN; PAM sequence: CTA
gctttggtctgcacacacgc

SEQ ID NO: 261250 - DNA, 20 bp, Artificial Sequence
  Description of Artificial Sequence: Synthetic oligonucleotide
  Target: LAMA2; (-) strand; PAM type: YTN; PAM sequence: CTG
actagctttggtctgcacac

SEQ ID NO: 261251 - DNA, 20 bp, Artificial Sequence
  Description of Artificial Sequence: Synthetic oligonucleotide
  Target: LAMA2; (-) strand; PAM type: YTN; PAM sequence: TTC
tgactagctttggtctgcac

SEQ ID NO: 261252 - DNA, 20 bp, Artificial Sequence
  Description of Artificial Sequence: Synthetic oligonucleotide
  Target: LAMA2; (-) strand; PAM type: YTN; PAM sequence: CTT
ctgactagctttggtctgca

SEQ ID NO: 261253 - DNA, 20 bp, Artificial Sequence
  Description of Artificial Sequence: Synthetic oligonucleotide
  Target: LAMA2; (-) strand; PAM type: YTN; PAM sequence: CTC
cataggcacccttctgacta

SEQ ID NO: 261254 - DNA, 20 bp, Artificial Sequence
  Description of Artificial Sequence: Synthetic oligonucleotide
  Target: LAMA2; (-) strand; PAM type: YTN; PAM sequence: CTC
tccataggcacccttctgac

SEQ ID NO: 261255 - DNA, 20 bp, Artificial Sequence
  Description of Artificial Sequence: Synthetic oligonucleotide
  Target: LAMA2; (-) strand; PAM type: YTN; PAM sequence: TTG
tctctccataggcacccttc

SEQ ID NO: 261256 - DNA, 20 bp, Artificial Sequence
  Description of Artificial Sequence: Synthetic oligonucleotide
  Target: LAMA2; (-) strand; PAM type: YTN; PAM sequence: TTG
ggagggcacattgtctctcc

SEQ ID NO: 261257 - DNA, 20 bp, Artificial Sequence
  Description of Artificial Sequence: Synthetic oligonucleotide
  Target: LAMA2; (-) strand; PAM type: YTN; PAM sequence: TTA
gttgggagggcacattgtct

SEQ ID NO: 261258 - DNA, 20 bp, Artificial Sequence
  Description of Artificial Sequence: Synthetic oligonucleotide
  Target: LAMA2; (-) strand; PAM type: YTN; PAM sequence: TTT
agttgggagggcacattgtc

SEQ ID NO: 261259 - DNA, 20 bp, Artificial Sequence
  Description of Artificial Sequence: Synthetic oligonucleotide
  Target: LAMA2; (-) strand; PAM type: YTN; PAM sequence: CTT
tagttgggagggcacattgt

SEQ ID NO: 261260 - DNA, 20 bp, Artificial Sequence
  Description of Artificial Sequence: Synthetic oligonucleotide
  Target: LAMA2; (-) strand; PAM type: YTN; PAM sequence: TTA
gcacgggagcccagtggccc

SEQ ID NO: 261261 - DNA, 20 bp, Artificial Sequence
  Description of Artificial Sequence: Synthetic oligonucleotide
  Target: LAMA2; (-) strand; PAM type: YTN; PAM sequence: TTT
agcacgggagcccagtggcc

SEQ ID NO: 261262 - DNA, 20 bp, Artificial Sequence
  Description of Artificial Sequence: Synthetic oligonucleotide
  Target: LAMA2; (-) strand; PAM type: YTN; PAM sequence: TTA
tttagcacgggagcccagtg

SEQ ID NO: 261263 - DNA, 20 bp, Artificial Sequence
  Description of Artificial Sequence: Synthetic oligonucleotide
  Target: LAMA2; (-) strand; PAM type: YTN; PAM sequence: TTG
tattatttagcacgggagcc

SEQ ID NO: 261264 - DNA, 20 bp, Artificial Sequence
  Description of Artificial Sequence: Synthetic oligonucleotide
  Target: LAMA2; (-) strand; PAM type: YTN; PAM sequence: TTT
gtattatttagcacgggagc

SEQ ID NO: 261265 - DNA, 20 bp, Artificial Sequence
  Description of Artificial Sequence: Synthetic oligonucleotide
  Target: LAMA2; (-) strand; PAM type: YTN; PAM sequence: TTT
tgtattatttagcacgggag

SEQ ID NO: 261266 - DNA, 20 bp, Artificial Sequence
  Description of Artificial Sequence: Synthetic oligonucleotide
  Target: LAMA2; (-) strand; PAM type: YTN; PAM sequence: TTT
ttgtattatttagcacggga

SEQ ID NO: 261267 - DNA, 20 bp, Artificial Sequence
  Description of Artificial Sequence: Synthetic oligonucleotide
  Target: LAMA2; (-) strand; PAM type: YTN; PAM sequence: TTA
tttttgtattatttagcacg

SEQ ID NO: 261268 - DNA, 20 bp, Artificial Sequence
  Description of Artificial Sequence: Synthetic oligonucleotide
  Target: LAMA2; (-) strand; PAM type: YTN; PAM sequence: TTC
atcattatttttgtattatt

SEQ ID NO: 261269 - DNA, 20 bp, Artificial Sequence
  Description of Artificial Sequence: Synthetic oligonucleotide
  Target: LAMA2; (-) strand; PAM type: YTN; PAM sequence: CTT
catcattatttttgtattat

SEQ ID NO: 261270 - DNA, 20 bp, Artificial Sequence
  Description of Artificial Sequence: Synthetic oligonucleotide
  Target: LAMA2; (-) strand; PAM type: YTN; PAM sequence: CTA
aaaaaaaaaaaagaatcttc

SEQ ID NO: 261271 - DNA, 20 bp, Artificial Sequence
  Description of Artificial Sequence: Synthetic oligonucleotide
  Target: LAMA2; (-) strand; PAM type: YTN; PAM sequence: CTG
tctaaaaaaaaaaaaagaat

SEQ ID NO: 261272 - DNA, 20 bp, Artificial Sequence
  Description of Artificial Sequence: Synthetic oligonucleotide
  Target: LAMA2; (-) strand; PAM type: YTN; PAM sequence: CTC
tgtctaaaaaaaaaaaaaga

SEQ ID NO: 261273 - DNA, 20 bp, Artificial Sequence
  Description of Artificial Sequence: Synthetic oligonucleotide
  Target: LAMA2; (-) strand; PAM type: YTN; PAM sequence: CTA
ggcgacagagcaaggctctg

SEQ ID NO: 261274 - DNA, 20 bp, Artificial Sequence
  Description of Artificial Sequence: Synthetic oligonucleotide
  Target: LAMA2; (-) strand; PAM type: YTN; PAM sequence: CTC
cagcctaggcgacagagcaa

SEQ ID NO: 261275 - DNA, 20 bp, Artificial Sequence
  Description of Artificial Sequence: Synthetic oligonucleotide
  Target: LAMA2; (-) strand; PAM type: YTN; PAM sequence: CTG
cactccagcctaggcgacag

SEQ ID NO: 261276 - DNA, 20 bp, Artificial Sequence
  Description of Artificial Sequence: Synthetic oligonucleotide
  Target: LAMA2; (-) strand; PAM type: YTN; PAM sequence: TTG
cagtgagccgagatcgcgcc

SEQ ID NO: 261277 - DNA, 20 bp, Artificial Sequence
  Description of Artificial Sequence: Synthetic oligonucleotide
  Target: LAMA2; (-) strand; PAM type: YTN; PAM sequence: CTT
gcagtgagccgagatcgcgc

SEQ ID NO: 261278 - DNA, 20 bp, Artificial Sequence
  Description of Artificial Sequence: Synthetic oligonucleotide
  Target: LAMA2; (-) strand; PAM type: YTN; PAM sequence: CTG
aggcaggagaatggcgtgaa

SEQ ID NO: 261279 - DNA, 20 bp, Artificial Sequence
  Description of Artificial Sequence: Synthetic oligonucleotide
  Target: LAMA2; (-) strand; PAM type: YTN; PAM sequence: CTG
aggctgaggcaggagaatgg

SEQ ID NO: 261280 - DNA, 20 bp, Artificial Sequence
  Description of Artificial Sequence: Synthetic oligonucleotide
  Target: LAMA2; (-) strand; PAM type: YTN; PAM sequence: CTC
ctgaggctgaggcaggagaa

SEQ ID NO: 261281 - DNA, 20 bp, Artificial Sequence
  Description of Artificial Sequence: Synthetic oligonucleotide
  Target: LAMA2; (-) strand; PAM type: YTN; PAM sequence: CTA
ctcctgaggctgaggcagga

SEQ ID NO: 261282 - DNA, 20 bp, Artificial Sequence
  Description of Artificial Sequence: Synthetic oligonucleotide
  Target: LAMA2; (-) strand; PAM type: YTN; PAM sequence: CTG
tagtcccagctactcctgag

SEQ ID NO: 261283 - DNA, 20 bp, Artificial Sequence
  Description of Artificial Sequence: Synthetic oligonucleotide
  Target: LAMA2; (-) strand; PAM type: YTN; PAM sequence: TTA
gccgggcgtggtggcggacg

SEQ ID NO: 261284 - DNA, 20 bp, Artificial Sequence
  Description of Artificial Sequence: Synthetic oligonucleotide
  Target: LAMA2; (-) strand; PAM type: YTN; PAM sequence: TTA
aaaacacaaaaaattagccg

SEQ ID NO: 261285 - DNA, 20 bp, Artificial Sequence
  Description of Artificial Sequence: Synthetic oligonucleotide
  Target: LAMA2; (-) strand; PAM type: YTN; PAM sequence: CTA
ttaaaaacacaaaaaattag

SEQ ID NO: 261286 - DNA, 20 bp, Artificial Sequence
  Description of Artificial Sequence: Synthetic oligonucleotide
  Target: LAMA2; (-) strand; PAM type: YTN; PAM sequence: CTC
tattaaaaacacaaaaaatt

SEQ ID NO: 261287 - DNA, 20 bp, Artificial Sequence
  Description of Artificial Sequence: Synthetic oligonucleotide
  Target: LAMA2; (-) strand; PAM type: YTN; PAM sequence: CTG
tctctattaaaaacacaaaa

SEQ ID NO: 261288 - DNA, 20 bp, Artificial Sequence
  Description of Artificial Sequence: Synthetic oligonucleotide
  Target: LAMA2; (-) strand; PAM type: YTN; PAM sequence: CTA
acatggtgaaaccctgtctc

SEQ ID NO: 261289 - DNA, 20 bp, Artificial Sequence
  Description of Artificial Sequence: Synthetic oligonucleotide
  Target: LAMA2; (-) strand; PAM type: YTN; PAM sequence: CTG
gctaacatggtgaaaccctg

SEQ ID NO: 261290 - DNA, 20 bp, Artificial Sequence
  Description of Artificial Sequence: Synthetic oligonucleotide
  Target: LAMA2; (-) strand; PAM type: YTN; PAM sequence: TTG
agaccgtcctggctaacatg

SEQ ID NO: 261291 - DNA, 20 bp, Artificial Sequence
  Description of Artificial Sequence: Synthetic oligonucleotide
  Target: LAMA2; (-) strand; PAM type: YTN; PAM sequence: TTG
ggaggccgaggagggcggat

SEQ ID NO: 261292 - DNA, 20 bp, Artificial Sequence
  Description of Artificial Sequence: Synthetic oligonucleotide
  Target: LAMA2; (-) strand; PAM type: YTN; PAM sequence: TTT
gggaggccgaggagggcgga

SEQ ID NO: 261293 - DNA, 20 bp, Artificial Sequence
  Description of Artificial Sequence: Synthetic oligonucleotide
  Target: LAMA2; (-) strand; PAM type: YTN; PAM sequence: CTT
tgggaggccgaggagggcgg

SEQ ID NO: 261294 - DNA, 20 bp, Artificial Sequence
  Description of Artificial Sequence: Synthetic oligonucleotide
  Target: LAMA2; (-) strand; PAM type: YTN; PAM sequence: CTG
taatcccagcactttgggag

SEQ ID NO: 261295 - DNA, 20 bp, Artificial Sequence
  Description of Artificial Sequence: Synthetic oligonucleotide
  Target: LAMA2; (-) strand; PAM type: YTN; PAM sequence: CTC
atgcctgtaatcccagcact

SEQ ID NO: 261296 - DNA, 20 bp, Artificial Sequence
  Description of Artificial Sequence: Synthetic oligonucleotide
  Target: LAMA2; (-) strand; PAM type: YTN; PAM sequence: TTA
ggccgggcgcggtggctcat

SEQ ID NO: 261297 - DNA, 20 bp, Artificial Sequence
  Description of Artificial Sequence: Synthetic oligonucleotide
  Target: LAMA2; (-) strand; PAM type: YTN; PAM sequence: TTC
attaggccgggcgcggtggc

SEQ ID NO: 261298 - DNA, 20 bp, Artificial Sequence
  Description of Artificial Sequence: Synthetic oligonucleotide
  Target: LAMA2; (-) strand; PAM type: YTN; PAM sequence: CTT
cattaggccgggcgcggtgg

SEQ ID NO: 261299 - DNA, 20 bp, Artificial Sequence
  Description of Artificial Sequence: Synthetic oligonucleotide
  Target: LAMA2; (-) strand; PAM type: YTN; PAM sequence: TTC
ttcattaggccgggcgcggt

SEQ ID NO: 261300 - DNA, 20 bp, Artificial Sequence
  Description of Artificial Sequence: Synthetic oligonucleotide
  Target: LAMA2; (-) strand; PAM type: YTN; PAM sequence: CTG
gttcttcattaggccgggcg

SEQ ID NO: 261301 - DNA, 20 bp, Artificial Sequence
  Description of Artificial Sequence: Synthetic oligonucleotide
  Target: LAMA2; (-) strand; PAM type: YTN; PAM sequence: TTC
tggttcttcattaggccggg

SEQ ID NO: 261302 - DNA, 20 bp, Artificial Sequence
  Description of Artificial Sequence: Synthetic oligonucleotide
  Target: LAMA2; (-) strand; PAM type: YTN; PAM sequence: CTG
agttctggttcttcattagg

SEQ ID NO: 261303 - DNA, 20 bp, Artificial Sequence
  Description of Artificial Sequence: Synthetic oligonucleotide
  Target: LAMA2; (-) strand; PAM type: YTN; PAM sequence: TTC
caagctgagttctggttctt

SEQ ID NO: 261304 - DNA, 20 bp, Artificial Sequence
  Description of Artificial Sequence: Synthetic oligonucleotide
  Target: LAMA2; (-) strand; PAM type: YTN; PAM sequence: CTT
ccaagctgagttctggttct

SEQ ID NO: 261305 - DNA, 20 bp, Artificial Sequence
  Description of Artificial Sequence: Synthetic oligonucleotide
  Target: LAMA2; (-) strand; PAM type: YTN; PAM sequence: TTG
gaaggacccaataagtccat

SEQ ID NO: 261306 - DNA, 20 bp, Artificial Sequence
  Description of Artificial Sequence: Synthetic oligonucleotide
  Target: LAMA2; (-) strand; PAM type: YTN; PAM sequence: CTT
ggaaggacccaataagtcca

SEQ ID NO: 261307 - DNA, 20 bp, Artificial Sequence
  Description of Artificial Sequence: Synthetic oligonucleotide
  Target: LAMA2; (-) strand; PAM type: YTN; PAM sequence: TTA
gtcaatagaggccttggaag

SEQ ID NO: 261308 - DNA, 20 bp, Artificial Sequence
  Description of Artificial Sequence: Synthetic oligonucleotide
  Target: LAMA2; (-) strand; PAM type: YTN; PAM sequence: CTT
agtcaatagaggccttggaa

SEQ ID NO: 261309 - DNA, 20 bp, Artificial Sequence
  Description of Artificial Sequence: Synthetic oligonucleotide
  Target: LAMA2; (-) strand; PAM type: YTN; PAM sequence: CTC
cgtatccggtggcagaatga

SEQ ID NO: 261310 - DNA, 20 bp, Artificial Sequence
  Description of Artificial Sequence: Synthetic oligonucleotide
  Target: LAMA2; (-) strand; PAM type: YTN; PAM sequence: TTC
tccgtatccggtggcagaat

SEQ ID NO: 261311 - DNA, 20 bp, Artificial Sequence
  Description of Artificial Sequence: Synthetic oligonucleotide
  Target: LAMA2; (-) strand; PAM type: YTN; PAM sequence: TTT
ctccgtatccggtggcagaa

SEQ ID NO: 261312 - DNA, 20 bp, Artificial Sequence
  Description of Artificial Sequence: Synthetic oligonucleotide
  Target: LAMA2; (-) strand; PAM type: YTN; PAM sequence: TTG
tgatacagtaggtagacccc

SEQ ID NO: 261313 - DNA, 20 bp, Artificial Sequence
  Description of Artificial Sequence: Synthetic oligonucleotide
  Target: LAMA2; (-) strand; PAM type: YTN; PAM sequence: TTT
gtgatacagtaggtagaccc

SEQ ID NO: 261314 - DNA, 20 bp, Artificial Sequence
  Description of Artificial Sequence: Synthetic oligonucleotide
  Target: LAMA2; (-) strand; PAM type: YTN; PAM sequence: CTT
tgtgatacagtaggtagacc

SEQ ID NO: 261315 - DNA, 20 bp, Artificial Sequence
  Description of Artificial Sequence: Synthetic oligonucleotide
  Target: LAMA2; (-) strand; PAM type: YTN; PAM sequence: CTG
ctttgtgatacagtaggtag

SEQ ID NO: 261316 - DNA, 20 bp, Artificial Sequence
  Description of Artificial Sequence: Synthetic oligonucleotide
  Target: LAMA2; (-) strand; PAM type: YTN; PAM sequence: TTC
accctgctttgtgatacagt

SEQ ID NO: 261317 - DNA, 20 bp, Artificial Sequence
  Description of Artificial Sequence: Synthetic oligonucleotide
  Target: LAMA2; (-) strand; PAM type: YTN; PAM sequence: CTC
caaattcaccctgctttgtg

SEQ ID NO: 261318 - DNA, 20 bp, Artificial Sequence
  Description of Artificial Sequence: Synthetic oligonucleotide
  Target: LAMA2; (-) strand; PAM type: YTN; PAM sequence: CTG
agctccaaattcaccctgct

SEQ ID NO: 261319 - DNA, 20 bp, Artificial Sequence
  Description of Artificial Sequence: Synthetic oligonucleotide
  Target: LAMA2; (-) strand; PAM type: YTN; PAM sequence: TTC
tgagctccaaattcaccctg

SEQ ID NO: 261320 - DNA, 20 bp, Artificial Sequence
  Description of Artificial Sequence: Synthetic oligonucleotide
  Target: LAMA2; (-) strand; PAM type: YTN; PAM sequence: TTT
ctgagctccaaattcaccct

SEQ ID NO: 261321 - DNA, 20 bp, Artificial Sequence
  Description of Artificial Sequence: Synthetic oligonucleotide
  Target: LAMA2; (-) strand; PAM type: YTN; PAM sequence: CTG
tttctgagctccaaattcac

SEQ ID NO: 261322 - DNA, 20 bp, Artificial Sequence
  Description of Artificial Sequence: Synthetic oligonucleotide
  Target: LAMA2; (-) strand; PAM type: YTN; PAM sequence: CTA
ctgtttctgagctccaaatt

SEQ ID NO: 261323 - DNA, 20 bp, Artificial Sequence
  Description of Artificial Sequence: Synthetic oligonucleotide
  Target: LAMA2; (-) strand; PAM type: YTN; PAM sequence: TTA
tacatctactgtttctgagc

SEQ ID NO: 261324 - DNA, 20 bp, Artificial Sequence
  Description of Artificial Sequence: Synthetic oligonucleotide
  Target: LAMA2; (-) strand; PAM type: YTN; PAM sequence: CTG
tgccaattatacatctactg

SEQ ID NO: 261325 - DNA, 20 bp, Artificial Sequence
  Description of Artificial Sequence: Synthetic oligonucleotide
  Target: LAMA2; (-) strand; PAM type: YTN; PAM sequence: TTC
agggaccagctgtgccaatt

SEQ ID NO: 261326 - DNA, 20 bp, Artificial Sequence
  Description of Artificial Sequence: Synthetic oligonucleotide
  Target: LAMA2; (-) strand; PAM type: YTN; PAM sequence: TTT
cagggaccagctgtgccaat

SEQ ID NO: 261327 - DNA, 20 bp, Artificial Sequence
  Description of Artificial Sequence: Synthetic oligonucleotide
  Target: LAMA2; (-) strand; PAM type: YTN; PAM sequence: TTG
gaataagtcatttcagggac

SEQ ID NO: 261328 - DNA, 20 bp, Artificial Sequence
  Description of Artificial Sequence: Synthetic oligonucleotide
  Target: LAMA2; (-) strand; PAM type: YTN; PAM sequence: CTT
ggaataagtcatttcaggga

SEQ ID NO: 261329 - DNA, 20 bp, Artificial Sequence
  Description of Artificial Sequence: Synthetic oligonucleotide
  Target: LAMA2; (-) strand; PAM type: YTN; PAM sequence: TTA
ggatcttggaataagtcatt

SEQ ID NO: 261330 - DNA, 20 bp, Artificial Sequence
  Description of Artificial Sequence: Synthetic oligonucleotide
  Target: LAMA2; (-) strand; PAM type: YTN; PAM sequence: TTT
aggatcttggaataagtcat

SEQ ID NO: 261331 - DNA, 20 bp, Artificial Sequence
  Description of Artificial Sequence: Synthetic oligonucleotide
  Target: LAMA2; (-) strand; PAM type: YTN; PAM sequence: CTA
aaatgtcatttaggatcttg

SEQ ID NO: 261332 - DNA, 20 bp, Artificial Sequence
  Description of Artificial Sequence: Synthetic oligonucleotide
  Target: LAMA2; (-) strand; PAM type: YTN; PAM sequence: TTC
taaaatgtcatttaggatct

SEQ ID NO: 261333 - DNA, 20 bp, Artificial Sequence
  Description of Artificial Sequence: Synthetic oligonucleotide
  Target: LAMA2; (-) strand; PAM type: YTN; PAM sequence: TTT
ctaaaatgtcatttaggatc

SEQ ID NO: 261334 - DNA, 20 bp, Artificial Sequence
  Description of Artificial Sequence: Synthetic oligonucleotide
  Target: LAMA2; (-) strand; PAM type: YTN; PAM sequence: TTA
ataaaaatgccaagtgaatt

SEQ ID NO: 261335 - DNA, 20 bp, Artificial Sequence
  Description of Artificial Sequence: Synthetic oligonucleotide
  Target: LAMA2; (-) strand; PAM type: YTN; PAM sequence: TTT
aataaaaatgccaagtgaat

SEQ ID NO: 261336 - DNA, 20 bp, Artificial Sequence
  Description of Artificial Sequence: Synthetic oligonucleotide
  Target: LAMA2; (-) strand; PAM type: YTN; PAM sequence: TTG
caatttaataaaaatgccaa

SEQ ID NO: 261337 - DNA, 20 bp, Artificial Sequence
  Description of Artificial Sequence: Synthetic oligonucleotide
  Target: LAMA2; (-) strand; PAM type: YTN; PAM sequence: CTT
gcaatttaataaaaatgcca

SEQ ID NO: 261338 - DNA, 20 bp, Artificial Sequence
  Description of Artificial Sequence: Synthetic oligonucleotide
  Target: LAMA2; (-) strand; PAM type: YTN; PAM sequence: TTC
ttgcaatttaataaaaatgc

SEQ ID NO: 261339 - DNA, 20 bp, Artificial Sequence
  Description of Artificial Sequence: Synthetic oligonucleotide
  Target: LAMA2; (-) strand; PAM type: YTN; PAM sequence: CTT
cttgcaatttaataaaaatg

SEQ ID NO: 261340 - DNA, 20 bp, Artificial Sequence
  Description of Artificial Sequence: Synthetic oligonucleotide
  Target: LAMA2; (-) strand; PAM type: YTN; PAM sequence: CTC
atatcttcttgcaatttaat

SEQ ID NO: 261341 - DNA, 20 bp, Artificial Sequence
  Description of Artificial Sequence: Synthetic oligonucleotide
  Target: LAMA2; (-) strand; PAM type: YTN; PAM sequence: TTA
cagagctcatatcttcttgc

SEQ ID NO: 261342 - DNA, 20 bp, Artificial Sequence
  Description of Artificial Sequence: Synthetic oligonucleotide
  Target: LAMA2; (-) strand; PAM type: YTN; PAM sequence: TTT
acagagctcatatcttcttg

SEQ ID NO: 261343 - DNA, 20 bp, Artificial Sequence
  Description of Artificial Sequence: Synthetic oligonucleotide
  Target: LAMA2; (-) strand; PAM type: YTN; PAM sequence: TTG
atttacagagctcatatctt

SEQ ID NO: 261344 - DNA, 20 bp, Artificial Sequence
  Description of Artificial Sequence: Synthetic oligonucleotide
  Target: LAMA2; (-) strand; PAM type: YTN; PAM sequence: CTT
gatttacagagctcatatct

SEQ ID NO: 261345 - DNA, 20 bp, Artificial Sequence
  Description of Artificial Sequence: Synthetic oligonucleotide
  Target: LAMA2; (-) strand; PAM type: YTN; PAM sequence: CTC
ttgatttacagagctcatat

SEQ ID NO: 261346 - DNA, 20 bp, Artificial Sequence
  Description of Artificial Sequence: Synthetic oligonucleotide
  Target: LAMA2; (-) strand; PAM type: YTN; PAM sequence: CTG
ctcttgatttacagagctca

SEQ ID NO: 261347 - DNA, 20 bp, Artificial Sequence
  Description of Artificial Sequence: Synthetic oligonucleotide
  Target: LAMA2; (-) strand; PAM type: YTN; PAM sequence: TTC
tgctcttgatttacagagct

SEQ ID NO: 261348 - DNA, 20 bp, Artificial Sequence
  Description of Artificial Sequence: Synthetic oligonucleotide
  Target: LAMA2; (-) strand; PAM type: YTN; PAM sequence: TTT
ctgctcttgatttacagagc

SEQ ID NO: 261349 - DNA, 20 bp, Artificial Sequence
  Description of Artificial Sequence: Synthetic oligonucleotide
  Target: LAMA2; (-) strand; PAM type: YTN; PAM sequence: TTA
aaggtttctgctcttgattt

SEQ ID NO: 261350 - DNA, 20 bp, Artificial Sequence
  Description of Artificial Sequence: Synthetic oligonucleotide
  Target: LAMA2; (-) strand; PAM type: YTN; PAM sequence: TTT
aaaggtttctgctcttgatt

SEQ ID NO: 261351 - DNA, 20 bp, Artificial Sequence
  Description of Artificial Sequence: Synthetic oligonucleotide
  Target: LAMA2; (-) strand; PAM type: YTN; PAM sequence: TTT
taaaggtttctgctcttgat

SEQ ID NO: 261352 - DNA, 20 bp, Artificial Sequence
  Description of Artificial Sequence: Synthetic oligonucleotide
  Target: LAMA2; (-) strand; PAM type: YTN; PAM sequence: CTT
ttaaaggtttctgctcttga

SEQ ID NO: 261353 - DNA, 20 bp, Artificial Sequence
  Description of Artificial Sequence: Synthetic oligonucleotide
  Target: LAMA2; (-) strand; PAM type: YTN; PAM sequence: TTA
tccttttaaaggtttctgct

SEQ ID NO: 261354 - DNA, 20 bp, Artificial Sequence
  Description of Artificial Sequence: Synthetic oligonucleotide
  Target: LAMA2; (-) strand; PAM type: YTN; PAM sequence: TTA
cattatccttttaaaggttt

SEQ ID NO: 261355 - DNA, 20 bp, Artificial Sequence
  Description of Artificial Sequence: Synthetic oligonucleotide
  Target: LAMA2; (-) strand; PAM type: YTN; PAM sequence: CTT
acattatccttttaaaggtt

SEQ ID NO: 261356 - DNA, 20 bp, Artificial Sequence
  Description of Artificial Sequence: Synthetic oligonucleotide
  Target: LAMA2; (-) strand; PAM type: YTN; PAM sequence: TTG
tcttacattatccttttaaa

SEQ ID NO: 261357 - DNA, 20 bp, Artificial Sequence
  Description of Artificial Sequence: Synthetic oligonucleotide
  Target: LAMA2; (-) strand; PAM type: YTN; PAM sequence: TTT
gtcttacattatccttttaa

SEQ ID NO: 261358 - DNA, 20 bp, Artificial Sequence
  Description of Artificial Sequence: Synthetic oligonucleotide
  Target: LAMA2; (-) strand; PAM type: YTN; PAM sequence: TTT
tgtcttacattatcctttta

SEQ ID NO: 261359 - DNA, 20 bp, Artificial Sequence
  Description of Artificial Sequence: Synthetic oligonucleotide
  Target: LAMA2; (-) strand; PAM type: YTN; PAM sequence: TTT
ttgtcttacattatcctttt

SEQ ID NO: 261360 - DNA, 20 bp, Artificial Sequence
  Description of Artificial Sequence: Synthetic oligonucleotide
  Target: LAMA2; (-) strand; PAM type: YTN; PAM sequence: CTT
tttgtcttacattatccttt

SEQ ID NO: 261361 - DNA, 20 bp, Artificial Sequence
  Description of Artificial Sequence: Synthetic oligonucleotide
  Target: LAMA2; (-) strand; PAM type: YTN; PAM sequence: TTG
tctttttgtcttacattatc

SEQ ID NO: 261362 - DNA, 20 bp, Artificial Sequence
  Description of Artificial Sequence: Synthetic oligonucleotide
  Target: LAMA2; (-) strand; PAM type: YTN; PAM sequence: TTT
gtctttttgtcttacattat

SEQ ID NO: 261363 - DNA, 20 bp, Artificial Sequence
  Description of Artificial Sequence: Synthetic oligonucleotide
  Target: LAMA2; (-) strand; PAM type: YTN; PAM sequence: TTA
tccatttgtctttttgtctt

SEQ ID NO: 261364 - DNA, 20 bp, Artificial Sequence
  Description of Artificial Sequence: Synthetic oligonucleotide
  Target: LAMA2; (-) strand; PAM type: YTN; PAM sequence: CTT
atccatttgtctttttgtct

SEQ ID NO: 261365 - DNA, 20 bp, Artificial Sequence
  Description of Artificial Sequence: Synthetic oligonucleotide
  Target: LAMA2; (-) strand; PAM type: YTN; PAM sequence: CTG
cttatccatttgtctttttg

SEQ ID NO: 261366 - DNA, 20 bp, Artificial Sequence
  Description of Artificial Sequence: Synthetic oligonucleotide
  Target: LAMA2; (-) strand; PAM type: YTN; PAM sequence: TTC
tgcttatccatttgtctttt

SEQ ID NO: 261367 - DNA, 20 bp, Artificial Sequence
  Description of Artificial Sequence: Synthetic oligonucleotide
  Target: LAMA2; (-) strand; PAM type: YTN; PAM sequence: TTT
ctgcttatccatttgtcttt

SEQ ID NO: 261368 - DNA, 20 bp, Artificial Sequence
  Description of Artificial Sequence: Synthetic oligonucleotide
  Target: LAMA2; (-) strand; PAM type: YTN; PAM sequence: TTA
atttctgcttatccatttgt

SEQ ID NO: 261369 - DNA, 20 bp, Artificial Sequence
  Description of Artificial Sequence: Synthetic oligonucleotide
  Target: LAMA2; (-) strand; PAM type: YTN; PAM sequence: TTT
aatttctgcttatccatttg

SEQ ID NO: 261370 - DNA, 20 bp, Artificial Sequence
  Description of Artificial Sequence: Synthetic oligonucleotide
  Target: LAMA2; (-) strand; PAM type: YTN; PAM sequence: CTT
taatttctgcttatccattt

SEQ ID NO: 261371 - DNA, 20 bp, Artificial Sequence
  Description of Artificial Sequence: Synthetic oligonucleotide
  Target: LAMA2; (-) strand; PAM type: YTN; PAM sequence: CTC
atctttaatttctgcttatc

SEQ ID NO: 261372 - DNA, 20 bp, Artificial Sequence
  Description of Artificial Sequence: Synthetic oligonucleotide
  Target: LAMA2; (-) strand; PAM type: YTN; PAM sequence: CTC
tcatctttaatttctgctta

SEQ ID NO: 261373 - DNA, 20 bp, Artificial Sequence
  Description of Artificial Sequence: Synthetic oligonucleotide
  Target: LAMA2; (-) strand; PAM type: YTN; PAM sequence: TTC
tctcatctttaatttctgct

SEQ ID NO: 261374 - DNA, 20 bp, Artificial Sequence
  Description of Artificial Sequence: Synthetic oligonucleotide
  Target: LAMA2; (-) strand; PAM type: YTN; PAM sequence: TTT
ctctcatctttaatttctgc

SEQ ID NO: 261375 - DNA, 20 bp, Artificial Sequence
  Description of Artificial Sequence: Synthetic oligonucleotide
  Target: LAMA2; (-) strand; PAM type: YTN; PAM sequence: TTA
tttctctcatctttaatttc

SEQ ID NO: 261376 - DNA, 20 bp, Artificial Sequence
  Description of Artificial Sequence: Synthetic oligonucleotide
  Target: LAMA2; (-) strand; PAM type: YTN; PAM sequence: TTT
atttctctcatctttaattt

SEQ ID NO: 261377 - DNA, 20 bp, Artificial Sequence
  Description of Artificial Sequence: Synthetic oligonucleotide
  Target: LAMA2; (-) strand; PAM type: YTN; PAM sequence: TTT
tatttctctcatctttaatt

SEQ ID NO: 261378 - DNA, 20 bp, Artificial Sequence
  Description of Artificial Sequence: Synthetic oligonucleotide
  Target: LAMA2; (-) strand; PAM type: YTN; PAM sequence: TTG
aataattttatttctctcat

SEQ ID NO: 261379 - DNA, 20 bp, Artificial Sequence
  Description of Artificial Sequence: Synthetic oligonucleotide
  Target: LAMA2; (-) strand; PAM type: YTN; PAM sequence: TTT
gaataattttatttctctca

SEQ ID NO: 261380 - DNA, 20 bp, Artificial Sequence
  Description of Artificial Sequence: Synthetic oligonucleotide
  Target: LAMA2; (-) strand; PAM type: YTN; PAM sequence: TTT
tgaataattttatttctctc

SEQ ID NO: 261381 - DNA, 20 bp, Artificial Sequence
  Description of Artificial Sequence: Synthetic oligonucleotide
  Target: LAMA2; (-) strand; PAM type: YTN; PAM sequence: CTT
ttgaataattttatttctct

SEQ ID NO: 261382 - DNA, 20 bp, Artificial Sequence
  Description of Artificial Sequence: Synthetic oligonucleotide
  Target: LAMA2; (-) strand; PAM type: YTN; PAM sequence: TTC
ttttgaataattttatttct

SEQ ID NO: 261383 - DNA, 20 bp, Artificial Sequence
  Description of Artificial Sequence: Synthetic oligonucleotide
  Target: LAMA2; (-) strand; PAM type: YTN; PAM sequence: CTT
cttttgaataattttatttc

SEQ ID NO: 261384 - DNA, 20 bp, Artificial Sequence
  Description of Artificial Sequence: Synthetic oligonucleotide
  Target: LAMA2; (-) strand; PAM type: YTN; PAM sequence: TTA
acttcttttgaataatttta

SEQ ID NO: 261385 - DNA, 20 bp, Artificial Sequence
  Description of Artificial Sequence: Synthetic oligonucleotide
  Target: LAMA2; (-) strand; PAM type: YTN; PAM sequence: CTT
aacttcttttgaataatttt

SEQ ID NO: 261386 - DNA, 20 bp, Artificial Sequence
  Description of Artificial Sequence: Synthetic oligonucleotide
  Target: LAMA2; (-) strand; PAM type: YTN; PAM sequence: TTG
caatcttaacttcttttgaa

SEQ ID NO: 261387 - DNA, 20 bp, Artificial Sequence
  Description of Artificial Sequence: Synthetic oligonucleotide
  Target: LAMA2; (-) strand; PAM type: YTN; PAM sequence: CTA
ttgcaatcttaacttctttt

SEQ ID NO: 261388 - DNA, 20 bp, Artificial Sequence
  Description of Artificial Sequence: Synthetic oligonucleotide
  Target: LAMA2; (-) strand; PAM type: YTN; PAM sequence: TTA
ccctattgcaatcttaactt

SEQ ID NO: 261389 - DNA, 20 bp, Artificial Sequence
  Description of Artificial Sequence: Synthetic oligonucleotide
  Target: LAMA2; (-) strand; PAM type: YTN; PAM sequence: TTC
attaccctattgcaatctta

SEQ ID NO: 261390 - DNA, 20 bp, Artificial Sequence
  Description of Artificial Sequence: Synthetic oligonucleotide
  Target: LAMA2; (-) strand; PAM type: YTN; PAM sequence: TTT
cattaccctattgcaatctt

SEQ ID NO: 261391 - DNA, 20 bp, Artificial Sequence
  Description of Artificial Sequence: Synthetic oligonucleotide
  Target: LAMA2; (-) strand; PAM type: YTN; PAM sequence: TTT
tcattaccctattgcaatct

SEQ ID NO: 261392 - DNA, 20 bp, Artificial Sequence
  Description of Artificial Sequence: Synthetic oligonucleotide
  Target: LAMA2; (-) strand; PAM type: YTN; PAM sequence: TTA
ttttcattaccctattgcaa

SEQ ID NO: 261393 - DNA, 20 bp, Artificial Sequence
  Description of Artificial Sequence: Synthetic oligonucleotide
  Target: LAMA2; (-) strand; PAM type: YTN; PAM sequence: CTT
attttcattaccctattgca

SEQ ID NO: 261394 - DNA, 20 bp, Artificial Sequence
  Description of Artificial Sequence: Synthetic oligonucleotide
  Target: LAMA2; (-) strand; PAM type: YTN; PAM sequence: TTG
tatacacataccaccaatgc

SEQ ID NO: 261395 - DNA, 20 bp, Artificial Sequence
  Description of Artificial Sequence: Synthetic oligonucleotide
  Target: LAMA2; (-) strand; PAM type: YTN; PAM sequence: TTA
ttgtatacacataccaccaa

SEQ ID NO: 261396 - DNA, 20 bp, Artificial Sequence
  Description of Artificial Sequence: Synthetic oligonucleotide
  Target: LAMA2; (-) strand; PAM type: YTN; PAM sequence: TTT
attgtatacacataccacca

SEQ ID NO: 261397 - DNA, 20 bp, Artificial Sequence
  Description of Artificial Sequence: Synthetic oligonucleotide
  Target: LAMA2; (-) strand; PAM type: YTN; PAM sequence: TTT
tattgtatacacataccacc

SEQ ID NO: 261398 - DNA, 20 bp, Artificial Sequence
  Description of Artificial Sequence: Synthetic oligonucleotide
  Target: LAMA2; (-) strand; PAM type: YTN; PAM sequence: TTA
caggaaaagttttattgtat

SEQ ID NO: 261399 - DNA, 20 bp, Artificial Sequence
  Description of Artificial Sequence: Synthetic oligonucleotide
  Target: LAMA2; (-) strand; PAM type: YTN; PAM sequence: TTT
acaggaaaagttttattgta

SEQ ID NO: 261400 - DNA, 20 bp, Artificial Sequence
  Description of Artificial Sequence: Synthetic oligonucleotide
  Target: LAMA2; (-) strand; PAM type: YTN; PAM sequence: TTT
tacaggaaaagttttattgt

SEQ ID NO: 261401 - DNA, 20 bp, Artificial Sequence
  Description of Artificial Sequence: Synthetic oligonucleotide
  Target: LAMA2; (-) strand; PAM type: YTN; PAM sequence: CTG
ttttacaggaaaagttttat

SEQ ID NO: 261402 - DNA, 20 bp, Artificial Sequence
  Description of Artificial Sequence: Synthetic oligonucleotide
  Target: LAMA2; (-) strand; PAM type: YTN; PAM sequence: CTC
ctgttttacaggaaaagttt

SEQ ID NO: 261403 - DNA, 20 bp, Artificial Sequence
  Description of Artificial Sequence: Synthetic oligonucleotide
  Target: LAMA2; (-) strand; PAM type: YTN; PAM sequence: TTC
acagctcctgttttacagga

SEQ ID NO: 261404 - DNA, 20 bp, Artificial Sequence
  Description of Artificial Sequence: Synthetic oligonucleotide
  Target: LAMA2; (-) strand; PAM type: YTN; PAM sequence: TTT
cacagctcctgttttacagg

SEQ ID NO: 261405 - DNA, 20 bp, Artificial Sequence
  Description of Artificial Sequence: Synthetic oligonucleotide
  Target: LAMA2; (-) strand; PAM type: YTN; PAM sequence: CTT
tcacagctcctgttttacag

SEQ ID NO: 261406 - DNA, 20 bp, Artificial Sequence
  Description of Artificial Sequence: Synthetic oligonucleotide
  Target: LAMA2; (-) strand; PAM type: YTN; PAM sequence: CTA
ctttcacagctcctgtttta

SEQ ID NO: 261407 - DNA, 20 bp, Artificial Sequence
  Description of Artificial Sequence: Synthetic oligonucleotide
  Target: LAMA2; (-) strand; PAM type: YTN; PAM sequence: TTG
gtatcctactttcacagctc

SEQ ID NO: 261408 - DNA, 20 bp, Artificial Sequence
  Description of Artificial Sequence: Synthetic oligonucleotide
  Target: LAMA2; (-) strand; PAM type: YTN; PAM sequence: CTC
aaattggtatcctactttca

SEQ ID NO: 261409 - DNA, 20 bp, Artificial Sequence
  Description of Artificial Sequence: Synthetic oligonucleotide
  Target: LAMA2; (-) strand; PAM type: YTN; PAM sequence: CTC
tcaaattggtatcctacttt

SEQ ID NO: 261410 - DNA, 20 bp, Artificial Sequence
  Description of Artificial Sequence: Synthetic oligonucleotide
  Target: LAMA2; (-) strand; PAM type: YTN; PAM sequence: TTA
cctctcaaattggtatccta

SEQ ID NO: 261411 - DNA, 20 bp, Artificial Sequence
  Description of Artificial Sequence: Synthetic oligonucleotide
  Target: LAMA2; (-) strand; PAM type: YTN; PAM sequence: TTT
acctctcaaattggtatcct

SEQ ID NO: 261412 - DNA, 20 bp, Artificial Sequence
  Description of Artificial Sequence: Synthetic oligonucleotide
  Target: LAMA2; (-) strand; PAM type: YTN; PAM sequence: CTG
tatttacctctcaaattggt

SEQ ID NO: 261413 - DNA, 20 bp, Artificial Sequence
  Description of Artificial Sequence: Synthetic oligonucleotide
  Target: LAMA2; (-) strand; PAM type: YTN; PAM sequence: TTG
ctgtatttacctctcaaatt

SEQ ID NO: 261414 - DNA, 20 bp, Artificial Sequence
  Description of Artificial Sequence: Synthetic oligonucleotide
  Target: LAMA2; (-) strand; PAM type: YTN; PAM sequence: CTT
gctgtatttacctctcaaat

SEQ ID NO: 261415 - DNA, 20 bp, Artificial Sequence
  Description of Artificial Sequence: Synthetic oligonucleotide
  Target: LAMA2; (-) strand; PAM type: YTN; PAM sequence: TTC
ttgctgtatttacctctcaa

SEQ ID NO: 261416 - DNA, 20 bp, Artificial Sequence
  Description of Artificial Sequence: Synthetic oligonucleotide
  Target: LAMA2; (-) strand; PAM type: YTN; PAM sequence: TTT
cttgctgtatttacctctca

SEQ ID NO: 261417 - DNA, 20 bp, Artificial Sequence
  Description of Artificial Sequence: Synthetic oligonucleotide
  Target: LAMA2; (-) strand; PAM type: YTN; PAM sequence: TTA
catttcttgctgtatttacc

SEQ ID NO: 261418 - DNA, 20 bp, Artificial Sequence
  Description of Artificial Sequence: Synthetic oligonucleotide
  Target: LAMA2; (-) strand; PAM type: YTN; PAM sequence: TTT
acatttcttgctgtatttac

SEQ ID NO: 261419 - DNA, 20 bp, Artificial Sequence
  Description of Artificial Sequence: Synthetic oligonucleotide
  Target: LAMA2; (-) strand; PAM type: YTN; PAM sequence: TTT
tacatttcttgctgtattta

SEQ ID NO: 261420 - DNA, 20 bp, Artificial Sequence
  Description of Artificial Sequence: Synthetic oligonucleotide
  Target: LAMA2; (-) strand; PAM type: YTN; PAM sequence: TTG
ttttacatttcttgctgtat

SEQ ID NO: 261421 - DNA, 20 bp, Artificial Sequence
  Description of Artificial Sequence: Synthetic oligonucleotide
  Target: LAMA2; (-) strand; PAM type: YTN; PAM sequence: TTT
gttttacatttcttgctgta

SEQ ID NO: 261422 - DNA, 20 bp, Artificial Sequence
  Description of Artificial Sequence: Synthetic oligonucleotide
  Target: LAMA2; (-) strand; PAM type: YTN; PAM sequence: CTT
tgttttacatttcttgctgt

SEQ ID NO: 261423 - DNA, 20 bp, Artificial Sequence
  Description of Artificial Sequence: Synthetic oligonucleotide
  Target: LAMA2; (-) strand; PAM type: YTN; PAM sequence: TTC
ctttgttttacatttcttgc

SEQ ID NO: 261424 - DNA, 20 bp, Artificial Sequence
  Description of Artificial Sequence: Synthetic oligonucleotide
  Target: LAMA2; (-) strand; PAM type: YTN; PAM sequence: TTT
cctttgttttacatttcttg

SEQ ID NO: 261425 - DNA, 20 bp, Artificial Sequence
  Description of Artificial Sequence: Synthetic oligonucleotide
  Target: LAMA2; (-) strand; PAM type: YTN; PAM sequence: TTT
tcctttgttttacatttctt

SEQ ID NO: 261426 - DNA, 20 bp, Artificial Sequence
  Description of Artificial Sequence: Synthetic oligonucleotide
  Target: LAMA2; (-) strand; PAM type: YTN; PAM sequence: CTG
caatcattttcctttgtttt

SEQ ID NO: 261427 - DNA, 20 bp, Artificial Sequence
  Description of Artificial Sequence: Synthetic oligonucleotide
  Target: LAMA2; (-) strand; PAM type: YTN; PAM sequence: TTC
tgcaatcattttcctttgtt

SEQ ID NO: 261428 - DNA, 20 bp, Artificial Sequence
  Description of Artificial Sequence: Synthetic oligonucleotide
  Target: LAMA2; (-) strand; PAM type: YTN; PAM sequence: CTT
ctgcaatcattttcctttgt

SEQ ID NO: 261429 - DNA, 20 bp, Artificial Sequence
  Description of Artificial Sequence: Synthetic oligonucleotide
  Target: LAMA2; (-) strand; PAM type: YTN; PAM sequence: CTA
atgtcttctgcaatcatttt

SEQ ID NO: 261430 - DNA, 20 bp, Artificial Sequence
  Description of Artificial Sequence: Synthetic oligonucleotide
  Target: LAMA2; (-) strand; PAM type: YTN; PAM sequence: CTA
taatatcctaatgtcttctg

SEQ ID NO: 261431 - DNA, 20 bp, Artificial Sequence
  Description of Artificial Sequence: Synthetic oligonucleotide
  Target: LAMA2; (-) strand; PAM type: YTN; PAM sequence: CTG
ccaaatctataatatcctaa

SEQ ID NO: 261432 - DNA, 20 bp, Artificial Sequence
  Description of Artificial Sequence: Synthetic oligonucleotide
  Target: LAMA2; (-) strand; PAM type: YTN; PAM sequence: CTC
tgccaaatctataatatcct

SEQ ID NO: 261433 - DNA, 20 bp, Artificial Sequence
  Description of Artificial Sequence: Synthetic oligonucleotide
  Target: LAMA2; (-) strand; PAM type: YTN; PAM sequence: CTC
tctgccaaatctataatatc

SEQ ID NO: 261434 - DNA, 20 bp, Artificial Sequence
  Description of Artificial Sequence: Synthetic oligonucleotide
  Target: LAMA2; (-) strand; PAM type: YTN; PAM sequence: TTC
tctctgccaaatctataata

SEQ ID NO: 261435 - DNA, 20 bp, Artificial Sequence
  Description of Artificial Sequence: Synthetic oligonucleotide
  Target: LAMA2; (-) strand; PAM type: YTN; PAM sequence: CTG
ttctctctgccaaatctata

SEQ ID NO: 261436 - DNA, 20 bp, Artificial Sequence
  Description of Artificial Sequence: Synthetic oligonucleotide
  Target: LAMA2; (-) strand; PAM type: YTN; PAM sequence: CTC
tgttctctctgccaaatcta

SEQ ID NO: 261437 - DNA, 20 bp, Artificial Sequence
  Description of Artificial Sequence: Synthetic oligonucleotide
  Target: LAMA2; (-) strand; PAM type: YTN; PAM sequence: TTA
aagtacatcactctgttctc

SEQ ID NO: 261438 - DNA, 20 bp, Artificial Sequence
  Description of Artificial Sequence: Synthetic oligonucleotide
  Target: LAMA2; (-) strand; PAM type: YTN; PAM sequence: CTT
aaagtacatcactctgttct

SEQ ID NO: 261439 - DNA, 20 bp, Artificial Sequence
  Description of Artificial Sequence: Synthetic oligonucleotide
  Target: LAMA2; (-) strand; PAM type: YTN; PAM sequence: TTC
ttaaagtacatcactctgtt

SEQ ID NO: 261440 - DNA, 20 bp, Artificial Sequence
  Description of Artificial Sequence: Synthetic oligonucleotide
  Target: LAMA2; (-) strand; PAM type: YTN; PAM sequence: CTA
taattcttaaagtacatcac

SEQ ID NO: 261441 - DNA, 20 bp, Artificial Sequence
  Description of Artificial Sequence: Synthetic oligonucleotide
  Target: LAMA2; (-) strand; PAM type: YTN; PAM sequence: TTC
aggatcatctataattctta

SEQ ID NO: 261442 - DNA, 20 bp, Artificial Sequence
  Description of Artificial Sequence: Synthetic oligonucleotide
  Target: LAMA2; (-) strand; PAM type: YTN; PAM sequence: TTT
caggatcatctataattctt

SEQ ID NO: 261443 - DNA, 20 bp, Artificial Sequence
  Description of Artificial Sequence: Synthetic oligonucleotide
  Target: LAMA2; (-) strand; PAM type: YTN; PAM sequence: TTT
tcaggatcatctataattct

SEQ ID NO: 261444 - DNA, 20 bp, Artificial Sequence
  Description of Artificial Sequence: Synthetic oligonucleotide
  Target: LAMA2; (-) strand; PAM type: YTN; PAM sequence: TTT
ttcaggatcatctataattc

SEQ ID NO: 261445 - DNA, 20 bp, Artificial Sequence
  Description of Artificial Sequence: Synthetic oligonucleotide
  Target: LAMA2; (-) strand; PAM type: YTN; PAM sequence: CTT
tttcaggatcatctataatt

SEQ ID NO: 261446 - DNA, 20 bp, Artificial Sequence
  Description of Artificial Sequence: Synthetic oligonucleotide
  Target: LAMA2; (-) strand; PAM type: YTN; PAM sequence: TTC
tttttcaggatcatctataa

SEQ ID NO: 261447 - DNA, 20 bp, Artificial Sequence
  Description of Artificial Sequence: Synthetic oligonucleotide
  Target: LAMA2; (-) strand; PAM type: YTN; PAM sequence: TTT
ctttttcaggatcatctata

SEQ ID NO: 261448 - DNA, 20 bp, Artificial Sequence
  Description of Artificial Sequence: Synthetic oligonucleotide
  Target: LAMA2; (-) strand; PAM type: YTN; PAM sequence: TTT
tctttttcaggatcatctat

SEQ ID NO: 261449 - DNA, 20 bp, Artificial Sequence
  Description of Artificial Sequence: Synthetic oligonucleotide
  Target: LAMA2; (-) strand; PAM type: YTN; PAM sequence: TTA
atcaattttctttttcagga

SEQ ID NO: 261450 - DNA, 20 bp, Artificial Sequence
  Description of Artificial Sequence: Synthetic oligonucleotide
  Target: LAMA2; (-) strand; PAM type: YTN; PAM sequence: CTA
attaatcaattttctttttc

SEQ ID NO: 261451 - DNA, 20 bp, Artificial Sequence
  Description of Artificial Sequence: Synthetic oligonucleotide
  Target: LAMA2; (-) strand; PAM type: YTN; PAM sequence: TTC
taattaatcaattttctttt

SEQ ID NO: 261452 - DNA, 20 bp, Artificial Sequence
  Description of Artificial Sequence: Synthetic oligonucleotide
  Target: LAMA2; (-) strand; PAM type: YTN; PAM sequence: CTG
ttctaattaatcaattttct

SEQ ID NO: 261453 - DNA, 20 bp, Artificial Sequence
  Description of Artificial Sequence: Synthetic oligonucleotide
  Target: LAMA2; (-) strand; PAM type: YTN; PAM sequence: TTA
catctgttctaattaatcaa

SEQ ID NO: 261454 - DNA, 20 bp, Artificial Sequence
  Description of Artificial Sequence: Synthetic oligonucleotide
  Target: LAMA2; (-) strand; PAM type: YTN; PAM sequence: TTT
acatctgttctaattaatca

SEQ ID NO: 261455 - DNA, 20 bp, Artificial Sequence
  Description of Artificial Sequence: Synthetic oligonucleotide
  Target: LAMA2; (-) strand; PAM type: YTN; PAM sequence: TTT
tacatctgttctaattaatc

SEQ ID NO: 261456 - DNA, 20 bp, Artificial Sequence
  Description of Artificial Sequence: Synthetic oligonucleotide
  Target: LAMA2; (-) strand; PAM type: YTN; PAM sequence: TTT
ttacatctgttctaattaat

SEQ ID NO: 261457 - DNA, 20 bp, Artificial Sequence
  Description of Artificial Sequence: Synthetic oligonucleotide
  Target: LAMA2; (-) strand; PAM type: YTN; PAM sequence: TTG
atttttacatctgttctaat

SEQ ID NO: 261458 - DNA, 20 bp, Artificial Sequence
  Description of Artificial Sequence: Synthetic oligonucleotide
  Target: LAMA2; (-) strand; PAM type: YTN; PAM sequence: TTT
gatttttacatctgttctaa

SEQ ID NO: 261459 - DNA, 20 bp, Artificial Sequence
  Description of Artificial Sequence: Synthetic oligonucleotide
  Target: LAMA2; (-) strand; PAM type: YTN; PAM sequence: TTT
tgatttttacatctgttcta

SEQ ID NO: 261460 - DNA, 20 bp, Artificial Sequence
  Description of Artificial Sequence: Synthetic oligonucleotide
  Target: LAMA2; (-) strand; PAM type: YTN; PAM sequence: TTT
ttgatttttacatctgttct

SEQ ID NO: 261461 - DNA, 20 bp, Artificial Sequence
  Description of Artificial Sequence: Synthetic oligonucleotide
  Target: LAMA2; (-) strand; PAM type: YTN; PAM sequence: TTG
tttttgatttttacatctgt

SEQ ID NO: 261462 - DNA, 20 bp, Artificial Sequence
  Description of Artificial Sequence: Synthetic oligonucleotide
  Target: LAMA2; (-) strand; PAM type: YTN; PAM sequence: TTT
gtttttgatttttacatctg

SEQ ID NO: 261463 - DNA, 20 bp, Artificial Sequence
  Description of Artificial Sequence: Synthetic oligonucleotide
  Target: LAMA2; (-) strand; PAM type: YTN; PAM sequence: TTC
agatttgtttttgattttta

SEQ ID NO: 261464 - DNA, 20 bp, Artificial Sequence
  Description of Artificial Sequence: Synthetic oligonucleotide
  Target: LAMA2; (-) strand; PAM type: YTN; PAM sequence: CTT
cagatttgtttttgattttt

SEQ ID NO: 261465 - DNA, 20 bp, Artificial Sequence
  Description of Artificial Sequence: Synthetic oligonucleotide
  Target: LAMA2; (-) strand; PAM type: YTN; PAM sequence: TTC
ttcagatttgtttttgattt

SEQ ID NO: 261466 - DNA, 20 bp, Artificial Sequence
  Description of Artificial Sequence: Synthetic oligonucleotide
  Target: LAMA2; (-) strand; PAM type: YTN; PAM sequence: CTT
cttcagatttgtttttgatt

SEQ ID NO: 261467 - DNA, 20 bp, Artificial Sequence
  Description of Artificial Sequence: Synthetic oligonucleotide
  Target: LAMA2; (-) strand; PAM type: YTN; PAM sequence: TTC
ttcttcagatttgtttttga

SEQ ID NO: 261468 - DNA, 20 bp, Artificial Sequence
  Description of Artificial Sequence: Synthetic oligonucleotide
  Target: LAMA2; (-) strand; PAM type: YTN; PAM sequence: TTT
cttcttcagatttgtttttg

SEQ ID NO: 261469 - DNA, 20 bp, Artificial Sequence
  Description of Artificial Sequence: Synthetic oligonucleotide
  Target: LAMA2; (-) strand; PAM type: YTN; PAM sequence: CTG
tttcttcttcagatttgttt

SEQ ID NO: 261470 - DNA, 20 bp, Artificial Sequence
  Description of Artificial Sequence: Synthetic oligonucleotide
  Target: LAMA2; (-) strand; PAM type: YTN; PAM sequence: TTC
agtactgtttcttcttcaga

SEQ ID NO: 261471 - DNA, 20 bp, Artificial Sequence
  Description of Artificial Sequence: Synthetic oligonucleotide
  Target: LAMA2; (-) strand; PAM type: YTN; PAM sequence: TTG
attcagtactgtttcttctt

SEQ ID NO: 261472 - DNA, 20 bp, Artificial Sequence
  Description of Artificial Sequence: Synthetic oligonucleotide
  Target: LAMA2; (-) strand; PAM type: YTN; PAM sequence: TTT
gattcagtactgtttcttct

SEQ ID NO: 261473 - DNA, 20 bp, Artificial Sequence
  Description of Artificial Sequence: Synthetic oligonucleotide
  Target: LAMA2; (-) strand; PAM type: YTN; PAM sequence: TTT
tgattcagtactgtttcttc

SEQ ID NO: 261474 - DNA, 20 bp, Artificial Sequence
  Description of Artificial Sequence: Synthetic oligonucleotide
  Target: LAMA2; (-) strand; PAM type: YTN; PAM sequence: TTG
tgttttgattcagtactgtt

SEQ ID NO: 261475 - DNA, 20 bp, Artificial Sequence
  Description of Artificial Sequence: Synthetic oligonucleotide
  Target: LAMA2; (-) strand; PAM type: YTN; PAM sequence: TTG
ggaacataattgtgttttga

SEQ ID NO: 261476 - DNA, 20 bp, Artificial Sequence
  Description of Artificial Sequence: Synthetic oligonucleotide
  Target: LAMA2; (-) strand; PAM type: YTN; PAM sequence: TTT
gggaacataattgtgttttg

SEQ ID NO: 261477 - DNA, 20 bp, Artificial Sequence
  Description of Artificial Sequence: Synthetic oligonucleotide
  Target: LAMA2; (-) strand; PAM type: YTN; PAM sequence: TTC
agtttgggaacataattgtg

SEQ ID NO: 261478 - DNA, 20 bp, Artificial Sequence
  Description of Artificial Sequence: Synthetic oligonucleotide
  Target: LAMA2; (-) strand; PAM type: YTN; PAM sequence: TTT
cagtttgggaacataattgt

SEQ ID NO: 261479 - DNA, 20 bp, Artificial Sequence
  Description of Artificial Sequence: Synthetic oligonucleotide
  Target: LAMA2; (-) strand; PAM type: YTN; PAM sequence: CTT
tcagtttgggaacataattg

SEQ ID NO: 261480 - DNA, 20 bp, Artificial Sequence
  Description of Artificial Sequence: Synthetic oligonucleotide
  Target: LAMA2; (-) strand; PAM type: YTN; PAM sequence: TTC
tttcagtttgggaacataat

SEQ ID NO: 261481 - DNA, 20 bp, Artificial Sequence
  Description of Artificial Sequence: Synthetic oligonucleotide
  Target: LAMA2; (-) strand; PAM type: YTN; PAM sequence: CTG
gaacatagttctttcagttt

SEQ ID NO: 261482 - DNA, 20 bp, Artificial Sequence
  Description of Artificial Sequence: Synthetic oligonucleotide
  Target: LAMA2; (-) strand; PAM type: YTN; PAM sequence: TTA
ctggaacatagttctttcag

SEQ ID NO: 261483 - DNA, 20 bp, Artificial Sequence
  Description of Artificial Sequence: Synthetic oligonucleotide
  Target: LAMA2; (-) strand; PAM type: YTN; PAM sequence: CTT
actggaacatagttctttca

SEQ ID NO: 261484 - DNA, 20 bp, Artificial Sequence
  Description of Artificial Sequence: Synthetic oligonucleotide
  Target: LAMA2; (-) strand; PAM type: YTN; PAM sequence: TTC
catcaacttactggaacata

SEQ ID NO: 261485 - DNA, 20 bp, Artificial Sequence
  Description of Artificial Sequence: Synthetic oligonucleotide
  Target: LAMA2; (-) strand; PAM type: YTN; PAM sequence: TTT
ccatcaacttactggaacat

SEQ ID NO: 261486 - DNA, 20 bp, Artificial Sequence
  Description of Artificial Sequence: Synthetic oligonucleotide
  Target: LAMA2; (-) strand; PAM type: YTN; PAM sequence: TTT
tccatcaacttactggaaca

SEQ ID NO: 261487 - DNA, 20 bp, Artificial Sequence
  Description of Artificial Sequence: Synthetic oligonucleotide
  Target: LAMA2; (-) strand; PAM type: YTN; PAM sequence: TTT
ttccatcaacttactggaac

SEQ ID NO: 261488 - DNA, 20 bp, Artificial Sequence
  Description of Artificial Sequence: Synthetic oligonucleotide
  Target: LAMA2; (-) strand; PAM type: YTN; PAM sequence: TTT
tttccatcaacttactggaa

SEQ ID NO: 261489 - DNA, 20 bp, Artificial Sequence
  Description of Artificial Sequence: Synthetic oligonucleotide
  Target: LAMA2; (-) strand; PAM type: YTN; PAM sequence: TTT
ttttccatcaacttactgga

SEQ ID NO: 261490 - DNA, 20 bp, Artificial Sequence
  Description of Artificial Sequence: Synthetic oligonucleotide
  Target: LAMA2; (-) strand; PAM type: YTN; PAM sequence: TTT
tttttccatcaacttactgg

SEQ ID NO: 261491 - DNA, 20 bp, Artificial Sequence
  Description of Artificial Sequence: Synthetic oligonucleotide
  Target: LAMA2; (-) strand; PAM type: YTN; PAM sequence: TTT
ttttttccatcaacttactg

SEQ ID NO: 261492 - DNA, 20 bp, Artificial Sequence
  Description of Artificial Sequence: Synthetic oligonucleotide
  Target: LAMA2; (-) strand; PAM type: YTN; PAM sequence: TTT
tttttttccatcaacttact

SEQ ID NO: 261493 - DNA, 20 bp, Artificial Sequence
  Description of Artificial Sequence: Synthetic oligonucleotide
  Target: LAMA2; (-) strand; PAM type: YTN; PAM sequence: TTT
ttttttttccatcaacttac

SEQ ID NO: 261494 - DNA, 20 bp, Artificial Sequence
  Description of Artificial Sequence: Synthetic oligonucleotide
  Target: LAMA2; (-) strand; PAM type: YTN; PAM sequence: TTT
tttttttttccatcaactta

SEQ ID NO: 261495 - DNA, 20 bp, Artificial Sequence
  Description of Artificial Sequence: Synthetic oligonucleotide
  Target: LAMA2; (-) strand; PAM type: YTN; PAM sequence: TTG
ttttttttttttccatcaac

SEQ ID NO: 261496 - DNA, 20 bp, Artificial Sequence
  Description of Artificial Sequence: Synthetic oligonucleotide
  Target: LAMA2; (-) strand; PAM type: YTN; PAM sequence: TTT
gttttttttttttccatcaa

SEQ ID NO: 261497 - DNA, 20 bp, Artificial Sequence
  Description of Artificial Sequence: Synthetic oligonucleotide
  Target: LAMA2; (-) strand; PAM type: YTN; PAM sequence: TTG
ggtttgttttttttttttcc

SEQ ID NO: 261498 - DNA, 20 bp, Artificial Sequence
  Description of Artificial Sequence: Synthetic oligonucleotide
  Target: LAMA2; (-) strand; PAM type: YTN; PAM sequence: CTT
gggtttgttttttttttttc

SEQ ID NO: 261499 - DNA, 20 bp, Artificial Sequence
  Description of Artificial Sequence: Synthetic oligonucleotide
  Target: LAMA2; (-) strand; PAM type: YTN; PAM sequence: CTG
aagcttgggtttgttttttt

SEQ ID NO: 261500 - DNA, 20 bp, Artificial Sequence
  Description of Artificial Sequence: Synthetic oligonucleotide
  Target: LAMA2; (-) strand; PAM type: YTN; PAM sequence: TTC
tgaagcttgggtttgttttt

SEQ ID NO: 261501 - DNA, 20 bp, Artificial Sequence
  Description of Artificial Sequence: Synthetic oligonucleotide
  Target: LAMA2; (-) strand; PAM type: YTN; PAM sequence: TTT
ctgaagcttgggtttgtttt

SEQ ID NO: 261502 - DNA, 20 bp, Artificial Sequence
  Description of Artificial Sequence: Synthetic oligonucleotide
  Target: LAMA2; (-) strand; PAM type: YTN; PAM sequence: TTT
tctgaagcttgggtttgttt

SEQ ID NO: 261503 - DNA, 20 bp, Artificial Sequence
  Description of Artificial Sequence: Synthetic oligonucleotide
  Target: LAMA2; (-) strand; PAM type: YTN; PAM sequence: CTA
gaattttctgaagcttgggt

SEQ ID NO: 261504 - DNA, 20 bp, Artificial Sequence
  Description of Artificial Sequence: Synthetic oligonucleotide
  Target: LAMA2; (-) strand; PAM type: YTN; PAM sequence: TTG
ctagaattttctgaagcttg

SEQ ID NO: 261505 - DNA, 20 bp, Artificial Sequence
  Description of Artificial Sequence: Synthetic oligonucleotide
  Target: LAMA2; (-) strand; PAM type: YTN; PAM sequence: TTT
gctagaattttctgaagctt

SEQ ID NO: 261506 - DNA, 20 bp, Artificial Sequence
  Description of Artificial Sequence: Synthetic oligonucleotide
  Target: LAMA2; (-) strand; PAM type: YTN; PAM sequence: TTT
tgctagaattttctgaagct

SEQ ID NO: 261507 - DNA, 20 bp, Artificial Sequence
  Description of Artificial Sequence: Synthetic oligonucleotide
  Target: LAMA2; (-) strand; PAM type: YTN; PAM sequence: TTT
ttgctagaattttctgaagc

SEQ ID NO: 261508 - DNA, 20 bp, Artificial Sequence
  Description of Artificial Sequence: Synthetic oligonucleotide
  Target: LAMA2; (-) strand; PAM type: YTN; PAM sequence: TTC
atatttttgctagaattttc

SEQ ID NO: 261509 - DNA, 20 bp, Artificial Sequence
  Description of Artificial Sequence: Synthetic oligonucleotide
  Target: LAMA2; (-) strand; PAM type: YTN; PAM sequence: TTA
cataattcatatttttgcta

SEQ ID NO: 261510 - DNA, 20 bp, Artificial Sequence
  Description of Artificial Sequence: Synthetic oligonucleotide
  Target: LAMA2; (-) strand; PAM type: YTN; PAM sequence: TTT
acataattcatatttttgct

SEQ ID NO: 261511 - DNA, 20 bp, Artificial Sequence
  Description of Artificial Sequence: Synthetic oligonucleotide
  Target: LAMA2; (-) strand; PAM type: YTN; PAM sequence: TTA
tttacataattcatattttt

SEQ ID NO: 261512 - DNA, 20 bp, Artificial Sequence
  Description of Artificial Sequence: Synthetic oligonucleotide
  Target: LAMA2; (-) strand; PAM type: YTN; PAM sequence: TTT
atttacataattcatatttt

SEQ ID NO: 261513 - DNA, 20 bp, Artificial Sequence
  Description of Artificial Sequence: Synthetic oligonucleotide
  Target: LAMA2; (-) strand; PAM type: YTN; PAM sequence: CTT
tatttacataattcatattt

SEQ ID NO: 261514 - DNA, 20 bp, Artificial Sequence
  Description of Artificial Sequence: Synthetic oligonucleotide
  Target: LAMA2; (-) strand; PAM type: YTN; PAM sequence: CTC
tttatttacataattcatat

SEQ ID NO: 261515 - DNA, 20 bp, Artificial Sequence
  Description of Artificial Sequence: Synthetic oligonucleotide
  Target: LAMA2; (-) strand; PAM type: YTN; PAM sequence: TTC
tctttatttacataattcat

SEQ ID NO: 261516 - DNA, 20 bp, Artificial Sequence
  Description of Artificial Sequence: Synthetic oligonucleotide
  Target: LAMA2; (-) strand; PAM type: YTN; PAM sequence: TTT
ctctttatttacataattca

SEQ ID NO: 261517 - DNA, 20 bp, Artificial Sequence
  Description of Artificial Sequence: Synthetic oligonucleotide
  Target: LAMA2; (-) strand; PAM type: YTN; PAM sequence: TTT
tctctttatttacataattc

SEQ ID NO: 261518 - DNA, 20 bp, Artificial Sequence
  Description of Artificial Sequence: Synthetic oligonucleotide
  Target: LAMA2; (-) strand; PAM type: YTN; PAM sequence: TTC
gcccaagatgtatacacgat

SEQ ID NO: 261519 - DNA, 20 bp, Artificial Sequence
  Description of Artificial Sequence: Synthetic oligonucleotide
  Target: LAMA2; (-) strand; PAM type: YTN; PAM sequence: CTT
cgcccaagatgtatacacga

SEQ ID NO: 261520 - DNA, 20 bp, Artificial Sequence
  Description of Artificial Sequence: Synthetic oligonucleotide
  Target: LAMA2; (-) strand; PAM type: YTN; PAM sequence: TTC
ttcgcccaagatgtatacac

SEQ ID NO: 261521 - DNA, 20 bp, Artificial Sequence
  Description of Artificial Sequence: Synthetic oligonucleotide
  Target: LAMA2; (-) strand; PAM type: YTN; PAM sequence: TTT
cttcgcccaagatgtataca

SEQ ID NO: 261522 - DNA, 20 bp, Artificial Sequence
  Description of Artificial Sequence: Synthetic oligonucleotide
  Target: LAMA2; (-) strand; PAM type: YTN; PAM sequence: TTT
tcttcgcccaagatgtatac

SEQ ID NO: 261523 - DNA, 20 bp, Artificial Sequence
  Description of Artificial Sequence: Synthetic oligonucleotide
  Target: LAMA2; (-) strand; PAM type: YTN; PAM sequence: TTT
ttcttcgcccaagatgtata

SEQ ID NO: 261524 - DNA, 20 bp, Artificial Sequence
  Description of Artificial Sequence: Synthetic oligonucleotide
  Target: LAMA2; (-) strand; PAM type: YTN; PAM sequence: TTA
gtaacgtttttcttcgccca

SEQ ID NO: 261525 - DNA, 20 bp, Artificial Sequence
  Description of Artificial Sequence: Synthetic oligonucleotide
  Target: LAMA2; (-) strand; PAM type: YTN; PAM sequence: CTG
ttagtaacgtttttcttcgc

SEQ ID NO: 261526 - DNA, 20 bp, Artificial Sequence
  Description of Artificial Sequence: Synthetic oligonucleotide
  Target: LAMA2; (-) strand; PAM type: YTN; PAM sequence: CTC
tgttagtaacgtttttcttc

SEQ ID NO: 261527 - DNA, 20 bp, Artificial Sequence
  Description of Artificial Sequence: Synthetic oligonucleotide
  Target: LAMA2; (-) strand; PAM type: YTN; PAM sequence: TTG
aggtctctgttagtaacgtt

SEQ ID NO: 261528 - DNA, 20 bp, Artificial Sequence
  Description of Artificial Sequence: Synthetic oligonucleotide
  Target: LAMA2; (-) strand; PAM type: YTN; PAM sequence: TTT
gaggtctctgttagtaacgt

SEQ ID NO: 261529 - DNA, 20 bp, Artificial Sequence
  Description of Artificial Sequence: Synthetic oligonucleotide
  Target: LAMA2; (-) strand; PAM type: YTN; PAM sequence: CTG
atttgaggtctctgttagta

SEQ ID NO: 261530 - DNA, 20 bp, Artificial Sequence
  Description of Artificial Sequence: Synthetic oligonucleotide
  Target: LAMA2; (-) strand; PAM type: YTN; PAM sequence: TTC
tgatttgaggtctctgttag

SEQ ID NO: 261531 - DNA, 20 bp, Artificial Sequence
  Description of Artificial Sequence: Synthetic oligonucleotide
  Target: LAMA2; (-) strand; PAM type: YTN; PAM sequence: TTG
catacaattctgatttgagg

SEQ ID NO: 261532 - DNA, 20 bp, Artificial Sequence
  Description of Artificial Sequence: Synthetic oligonucleotide
  Target: LAMA2; (-) strand; PAM type: YTN; PAM sequence: CTT
gcatacaattctgatttgag

SEQ ID NO: 261533 - DNA, 20 bp, Artificial Sequence
  Description of Artificial Sequence: Synthetic oligonucleotide
  Target: LAMA2; (-) strand; PAM type: YTN; PAM sequence: TTC
ttgcatacaattctgatttg

SEQ ID NO: 261534 - DNA, 20 bp, Artificial Sequence
  Description of Artificial Sequence: Synthetic oligonucleotide
  Target: LAMA2; (-) strand; PAM type: YTN; PAM sequence: TTA
ttcttgcatacaattctgat

SEQ ID NO: 261535 - DNA, 20 bp, Artificial Sequence
  Description of Artificial Sequence: Synthetic oligonucleotide
  Target: LAMA2; (-) strand; PAM type: YTN; PAM sequence: TTT
attcttgcatacaattctga

SEQ ID NO: 261536 - DNA, 20 bp, Artificial Sequence
  Description of Artificial Sequence: Synthetic oligonucleotide
  Target: LAMA2; (-) strand; PAM type: YTN; PAM sequence: TTG
gcatttattcttgcatacaa

SEQ ID NO: 261537 - DNA, 20 bp, Artificial Sequence
  Description of Artificial Sequence: Synthetic oligonucleotide
  Target: LAMA2; (-) strand; PAM type: YTN; PAM sequence: TTT
ggcatttattcttgcataca

SEQ ID NO: 261538 - DNA, 20 bp, Artificial Sequence
  Description of Artificial Sequence: Synthetic oligonucleotide
  Target: LAMA2; (-) strand; PAM type: YTN; PAM sequence: TTT
tggcatttattcttgcatac

SEQ ID NO: 261539 - DNA, 20 bp, Artificial Sequence
  Description of Artificial Sequence: Synthetic oligonucleotide
  Target: LAMA2; (-) strand; PAM type: YTN; PAM sequence: TTT
ttggcatttattcttgcata

SEQ ID NO: 261540 - DNA, 20 bp, Artificial Sequence
  Description of Artificial Sequence: Synthetic oligonucleotide
  Target: LAMA2; (-) strand; PAM type: YTN; PAM sequence: TTT
tttggcatttattcttgcat

SEQ ID NO: 261541 - DNA, 20 bp, Artificial Sequence
  Description of Artificial Sequence: Synthetic oligonucleotide
  Target: LAMA2; (-) strand; PAM type: YTN; PAM sequence: TTG
ttttttggcatttattcttg

SEQ ID NO: 261542 - DNA, 20 bp, Artificial Sequence
  Description of Artificial Sequence: Synthetic oligonucleotide
  Target: LAMA2; (-) strand; PAM type: YTN; PAM sequence: CTA
gtatattgttttttggcatt

SEQ ID NO: 261543 - DNA, 20 bp, Artificial Sequence
  Description of Artificial Sequence: Synthetic oligonucleotide
  Target: LAMA2; (-) strand; PAM type: YTN; PAM sequence: TTG
aagagaagtaacatctagta

SEQ ID NO: 261544 - DNA, 20 bp, Artificial Sequence
  Description of Artificial Sequence: Synthetic oligonucleotide
  Target: LAMA2; (-) strand; PAM type: YTN; PAM sequence: CTT
gaagagaagtaacatctagt

SEQ ID NO: 261545 - DNA, 20 bp, Artificial Sequence
  Description of Artificial Sequence: Synthetic oligonucleotide
  Target: LAMA2; (-) strand; PAM type: YTN; PAM sequence: TTG
gggaatccaaggagagcttg

SEQ ID NO: 261546 - DNA, 20 bp, Artificial Sequence
  Description of Artificial Sequence: Synthetic oligonucleotide
  Target: LAMA2; (-) strand; PAM type: YTN; PAM sequence: CTT
ggggaatccaaggagagctt

SEQ ID NO: 261547 - DNA, 20 bp, Artificial Sequence
  Description of Artificial Sequence: Synthetic oligonucleotide
  Target: LAMA2; (-) strand; PAM type: YTN; PAM sequence: CTA
gacttggggaatccaaggag

SEQ ID NO: 261548 - DNA, 20 bp, Artificial Sequence
  Description of Artificial Sequence: Synthetic oligonucleotide
  Target: LAMA2; (-) strand; PAM type: YTN; PAM sequence: CTA
tgtgaacatacaaagggcat

SEQ ID NO: 261549 - DNA, 20 bp, Artificial Sequence
  Description of Artificial Sequence: Synthetic oligonucleotide
  Target: LAMA2; (-) strand; PAM type: YTN; PAM sequence: TTA
tataataggagaagtccaaa

SEQ ID NO: 261550 - DNA, 20 bp, Artificial Sequence
  Description of Artificial Sequence: Synthetic oligonucleotide
  Target: LAMA2; (-) strand; PAM type: YTN; PAM sequence: TTA
gcataacatgatagaataag

SEQ ID NO: 261551 - DNA, 20 bp, Artificial Sequence
  Description of Artificial Sequence: Synthetic oligonucleotide
  Target: LAMA2; (-) strand; PAM type: YTN; PAM sequence: CTA
gtagagggagacaagtaaat

SEQ ID NO: 261552 - DNA, 20 bp, Artificial Sequence
  Description of Artificial Sequence: Synthetic oligonucleotide
  Target: LAMA2; (-) strand; PAM type: YTN; PAM sequence: TTA
cggtctagtagagggagaca

SEQ ID NO: 261553 - DNA, 20 bp, Artificial Sequence
  Description of Artificial Sequence: Synthetic oligonucleotide
  Target: LAMA2; (-) strand; PAM type: YTN; PAM sequence: CTT
acggtctagtagagggagac

SEQ ID NO: 261554 - DNA, 20 bp, Artificial Sequence
  Description of Artificial Sequence: Synthetic oligonucleotide
  Target: LAMA2; (-) strand; PAM type: YTN; PAM sequence: TTG
gagacataccttacggtcta

SEQ ID NO: 261555 - DNA, 20 bp, Artificial Sequence
  Description of Artificial Sequence: Synthetic oligonucleotide
  Target: LAMA2; (-) strand; PAM type: YTN; PAM sequence: TTT
ggagacataccttacggtct

SEQ ID NO: 261556 - DNA, 20 bp, Artificial Sequence
  Description of Artificial Sequence: Synthetic oligonucleotide
  Target: LAMA2; (-) strand; PAM type: YTN; PAM sequence: TTA
tttggagacataccttacgg

SEQ ID NO: 261557 - DNA, 20 bp, Artificial Sequence
  Description of Artificial Sequence: Synthetic oligonucleotide
  Target: LAMA2; (-) strand; PAM type: YTN; PAM sequence: TTT
atttggagacataccttacg

SEQ ID NO: 261558 - DNA, 20 bp, Artificial Sequence
  Description of Artificial Sequence: Synthetic oligonucleotide
  Target: LAMA2; (-) strand; PAM type: YTN; PAM sequence: TTA
aacatttatttggagacata

SEQ ID NO: 261559 - DNA, 20 bp, Artificial Sequence
  Description of Artificial Sequence: Synthetic oligonucleotide
  Target: LAMA2; (-) strand; PAM type: YTN; PAM sequence: TTT
aaacatttatttggagacat

SEQ ID NO: 261560 - DNA, 20 bp, Artificial Sequence
  Description of Artificial Sequence: Synthetic oligonucleotide
  Target: LAMA2; (-) strand; PAM type: YTN; PAM sequence: TTG
tagcatttaaacatttattt

SEQ ID NO: 261561 - DNA, 20 bp, Artificial Sequence
  Description of Artificial Sequence: Synthetic oligonucleotide
  Target: LAMA2; (-) strand; PAM type: YTN; PAM sequence: CTC
ataattgtagcatttaaaca

SEQ ID NO: 261562 - DNA, 20 bp, Artificial Sequence
  Description of Artificial Sequence: Synthetic oligonucleotide
  Target: LAMA2; (-) strand; PAM type: YTN; PAM sequence: TTA
tctcataattgtagcattta

SEQ ID NO: 261563 - DNA, 20 bp, Artificial Sequence
  Description of Artificial Sequence: Synthetic oligonucleotide
  Target: LAMA2; (-) strand; PAM type: YTN; PAM sequence: TTA
ttatctcataattgtagcat

SEQ ID NO: 261564 - DNA, 20 bp, Artificial Sequence
  Description of Artificial Sequence: Synthetic oligonucleotide
  Target: LAMA2; (-) strand; PAM type: YTN; PAM sequence: CTT
attatctcataattgtagca

SEQ ID NO: 261565 - DNA, 20 bp, Artificial Sequence
  Description of Artificial Sequence: Synthetic oligonucleotide
  Target: LAMA2; (-) strand; PAM type: YTN; PAM sequence: TTA
ccttattatctcataattgt

SEQ ID NO: 261566 - DNA, 20 bp, Artificial Sequence
  Description of Artificial Sequence: Synthetic oligonucleotide
  Target: LAMA2; (-) strand; PAM type: YTN; PAM sequence: TTT
accttattatctcataattg

SEQ ID NO: 261567 - DNA, 20 bp, Artificial Sequence
  Description of Artificial Sequence: Synthetic oligonucleotide
  Target: LAMA2; (-) strand; PAM type: YTN; PAM sequence: TTT
taccttattatctcataatt

SEQ ID NO: 261568 - DNA, 20 bp, Artificial Sequence
  Description of Artificial Sequence: Synthetic oligonucleotide
  Target: LAMA2; (-) strand; PAM type: YTN; PAM sequence: TTA
ttttaccttattatctcata

SEQ ID NO: 261569 - DNA, 20 bp, Artificial Sequence
  Description of Artificial Sequence: Synthetic oligonucleotide
  Target: LAMA2; (-) strand; PAM type: YTN; PAM sequence: TTA
gacaaagttattttacctta

SEQ ID NO: 261570 - DNA, 20 bp, Artificial Sequence
  Description of Artificial Sequence: Synthetic oligonucleotide
  Target: LAMA2; (-) strand; PAM type: YTN; PAM sequence: TTT
agacaaagttattttacctt

SEQ ID NO: 261571 - DNA, 20 bp, Artificial Sequence
  Description of Artificial Sequence: Synthetic oligonucleotide
  Target: LAMA2; (-) strand; PAM type: YTN; PAM sequence: TTT
tagacaaagttattttacct

SEQ ID NO: 261572 - DNA, 20 bp, Artificial Sequence
  Description of Artificial Sequence: Synthetic oligonucleotide
  Target: LAMA2; (-) strand; PAM type: YTN; PAM sequence: TTA
aattttagacaaagttattt

SEQ ID NO: 261573 - DNA, 20 bp, Artificial Sequence
  Description of Artificial Sequence: Synthetic oligonucleotide
  Target: LAMA2; (-) strand; PAM type: YTN; PAM sequence: CTC
aaagattaaattttagacaa

SEQ ID NO: 261574 - DNA, 20 bp, Artificial Sequence
  Description of Artificial Sequence: Synthetic oligonucleotide
  Target: LAMA2; (-) strand; PAM type: YTN; PAM sequence: TTG
tctcaaagattaaattttag

SEQ ID NO: 261575 - DNA, 20 bp, Artificial Sequence
  Description of Artificial Sequence: Synthetic oligonucleotide
  Target: LAMA2; (-) strand; PAM type: YTN; PAM sequence: TTT
gtctcaaagattaaatttta

SEQ ID NO: 261576 - DNA, 20 bp, Artificial Sequence
  Description of Artificial Sequence: Synthetic oligonucleotide
  Target: LAMA2; (-) strand; PAM type: YTN; PAM sequence: CTT
tgtctcaaagattaaatttt

SEQ ID NO: 261577 - DNA, 20 bp, Artificial Sequence
  Description of Artificial Sequence: Synthetic oligonucleotide
  Target: LAMA2; (-) strand; PAM type: YTN; PAM sequence: CTG
ctttgtctcaaagattaaat

SEQ ID NO: 261578 - DNA, 20 bp, Artificial Sequence
  Description of Artificial Sequence: Synthetic oligonucleotide
  Target: LAMA2; (-) strand; PAM type: YTN; PAM sequence: TTC
caactgctttgtctcaaaga

SEQ ID NO: 261579 - DNA, 20 bp, Artificial Sequence
  Description of Artificial Sequence: Synthetic oligonucleotide
  Target: LAMA2; (-) strand; PAM type: YTN; PAM sequence: TTT
ccaactgctttgtctcaaag

SEQ ID NO: 261580 - DNA, 20 bp, Artificial Sequence
  Description of Artificial Sequence: Synthetic oligonucleotide
  Target: LAMA2; (-) strand; PAM type: YTN; PAM sequence: TTT
tccaactgctttgtctcaaa

SEQ ID NO: 261581 - DNA, 20 bp, Artificial Sequence
  Description of Artificial Sequence: Synthetic oligonucleotide
  Target: LAMA2; (-) strand; PAM type: YTN; PAM sequence: TTT
ttccaactgctttgtctcaa

SEQ ID NO: 261582 - DNA, 20 bp, Artificial Sequence
  Description of Artificial Sequence: Synthetic oligonucleotide
  Target: LAMA2; (-) strand; PAM type: YTN; PAM sequence: TTT
tttccaactgctttgtctca

SEQ ID NO: 261583 - DNA, 20 bp, Artificial Sequence
  Description of Artificial Sequence: Synthetic oligonucleotide
  Target: LAMA2; (-) strand; PAM type: YTN; PAM sequence: CTG
ggtatgggttttttccaact

SEQ ID NO: 261584 - DNA, 20 bp, Artificial Sequence
  Description of Artificial Sequence: Synthetic oligonucleotide
  Target: LAMA2; (-) strand; PAM type: YTN; PAM sequence: CTG
aggtagagaggggctgggta

SEQ ID NO: 261585 - DNA, 20 bp, Artificial Sequence
  Description of Artificial Sequence: Synthetic oligonucleotide
  Target: LAMA2; (-) strand; PAM type: YTN; PAM sequence: TTC
tgaggtagagaggggctggg

SEQ ID NO: 261586 - DNA, 20 bp, Artificial Sequence
  Description of Artificial Sequence: Synthetic oligonucleotide
  Target: LAMA2; (-) strand; PAM type: YTN; PAM sequence: TTT
ctgaggtagagaggggctgg

SEQ ID NO: 261587 - DNA, 20 bp, Artificial Sequence
  Description of Artificial Sequence: Synthetic oligonucleotide
  Target: LAMA2; (-) strand; PAM type: YTN; PAM sequence: CTT
tctgaggtagagaggggctg

SEQ ID NO: 261588 - DNA, 20 bp, Artificial Sequence
  Description of Artificial Sequence: Synthetic oligonucleotide
  Target: LAMA2; (-) strand; PAM type: YTN; PAM sequence: CTC
tttctgaggtagagaggggc

SEQ ID NO: 261589 - DNA, 20 bp, Artificial Sequence
  Description of Artificial Sequence: Synthetic oligonucleotide
  Target: LAMA2; (-) strand; PAM type: YTN; PAM sequence: CTC
tctttctgaggtagagaggg

SEQ ID NO: 261590 - DNA, 20 bp, Artificial Sequence
  Description of Artificial Sequence: Synthetic oligonucleotide
  Target: LAMA2; (-) strand; PAM type: YTN; PAM sequence: TTC
tctctttctgaggtagagag

SEQ ID NO: 261591 - DNA, 20 bp, Artificial Sequence
  Description of Artificial Sequence: Synthetic oligonucleotide
  Target: LAMA2; (-) strand; PAM type: YTN; PAM sequence: CTT
ctctctttctgaggtagaga

SEQ ID NO: 261592 - DNA, 20 bp, Artificial Sequence
  Description of Artificial Sequence: Synthetic oligonucleotide
  Target: LAMA2; (-) strand; PAM type: YTN; PAM sequence: TTA
gaaagaaaatgtgtcttctc

SEQ ID NO: 261593 - DNA, 20 bp, Artificial Sequence
  Description of Artificial Sequence: Synthetic oligonucleotide
  Target: LAMA2; (-) strand; PAM type: YTN; PAM sequence: CTA
tgtgaattagaaagaaaatg

SEQ ID NO: 261594 - DNA, 20 bp, Artificial Sequence
  Description of Artificial Sequence: Synthetic oligonucleotide
  Target: LAMA2; (-) strand; PAM type: YTN; PAM sequence: TTA
tggaaatatatgatcgtcca

SEQ ID NO: 261595 - DNA, 20 bp, Artificial Sequence
  Description of Artificial Sequence: Synthetic oligonucleotide
  Target: LAMA2; (-) strand; PAM type: YTN; PAM sequence: TTT
atggaaatatatgatcgtcc

SEQ ID NO: 261596 - DNA, 20 bp, Artificial Sequence
  Description of Artificial Sequence: Synthetic oligonucleotide
  Target: LAMA2; (-) strand; PAM type: YTN; PAM sequence: CTG
catttatggaaatatatgat

SEQ ID NO: 261597 - DNA, 20 bp, Artificial Sequence
  Description of Artificial Sequence: Synthetic oligonucleotide
  Target: LAMA2; (-) strand; PAM type: YTN; PAM sequence: TTC
ctgcatttatggaaatatat

SEQ ID NO: 261598 - DNA, 20 bp, Artificial Sequence
  Description of Artificial Sequence: Synthetic oligonucleotide
  Target: LAMA2; (-) strand; PAM type: YTN; PAM sequence: CTT
cctgcatttatggaaatata

SEQ ID NO: 261599 - DNA, 20 bp, Artificial Sequence
  Description of Artificial Sequence: Synthetic oligonucleotide
  Target: LAMA2; (-) strand; PAM type: YTN; PAM sequence: TTG
cttcctgcatttatggaaat

SEQ ID NO: 261600 - DNA, 20 bp, Artificial Sequence
  Description of Artificial Sequence: Synthetic oligonucleotide
  Target: LAMA2; (-) strand; PAM type: YTN; PAM sequence: TTA
aaattgcttcctgcatttat

SEQ ID NO: 261601 - DNA, 20 bp, Artificial Sequence
  Description of Artificial Sequence: Synthetic oligonucleotide
  Target: LAMA2; (-) strand; PAM type: YTN; PAM sequence: TTG
ggaaacatcagtgaacataa

SEQ ID NO: 261602 - DNA, 20 bp, Artificial Sequence
  Description of Artificial Sequence: Synthetic oligonucleotide
  Target: LAMA2; (-) strand; PAM type: YTN; PAM sequence: CTT
gggaaacatcagtgaacata

SEQ ID NO: 261603 - DNA, 20 bp, Artificial Sequence
  Description of Artificial Sequence: Synthetic oligonucleotide
  Target: LAMA2; (-) strand; PAM type: YTN; PAM sequence: TTA
gtcacttgggaaacatcagt

SEQ ID NO: 261604 - DNA, 20 bp, Artificial Sequence
  Description of Artificial Sequence: Synthetic oligonucleotide
  Target: LAMA2; (-) strand; PAM type: YTN; PAM sequence: TTT
agtcacttgggaaacatcag

SEQ ID NO: 261605 - DNA, 20 bp, Artificial Sequence
  Description of Artificial Sequence: Synthetic oligonucleotide
  Target: LAMA2; (-) strand; PAM type: YTN; PAM sequence: CTA
gtttagtcacttgggaaaca

SEQ ID NO: 261606 - DNA, 20 bp, Artificial Sequence
  Description of Artificial Sequence: Synthetic oligonucleotide
  Target: LAMA2; (-) strand; PAM type: YTN; PAM sequence: TTC
tagtttagtcacttgggaaa

SEQ ID NO: 261607 - DNA, 20 bp, Artificial Sequence
  Description of Artificial Sequence: Synthetic oligonucleotide
  Target: LAMA2; (-) strand; PAM type: YTN; PAM sequence: CTA
ttctagtttagtcacttggg

SEQ ID NO: 261608 - DNA, 20 bp, Artificial Sequence
  Description of Artificial Sequence: Synthetic oligonucleotide
  Target: LAMA2; (-) strand; PAM type: YTN; PAM sequence: TTG
tactattctagtttagtcac

SEQ ID NO: 261609 - DNA, 20 bp, Artificial Sequence
  Description of Artificial Sequence: Synthetic oligonucleotide
  Target: LAMA2; (-) strand; PAM type: YTN; PAM sequence: TTT
gtactattctagtttagtca

SEQ ID NO: 261610 - DNA, 20 bp, Artificial Sequence
  Description of Artificial Sequence: Synthetic oligonucleotide
  Target: LAMA2; (-) strand; PAM type: YTN; PAM sequence: CTT
tgtactattctagtttagtc

SEQ ID NO: 261611 - DNA, 20 bp, Artificial Sequence
  Description of Artificial Sequence: Synthetic oligonucleotide
  Target: LAMA2; (-) strand; PAM type: YTN; PAM sequence: TTA
taggctttgtactattctag

SEQ ID NO: 261612 - DNA, 20 bp, Artificial Sequence
  Description of Artificial Sequence: Synthetic oligonucleotide
  Target: LAMA2; (-) strand; PAM type: YTN; PAM sequence: CTG
ttataggctttgtactattc

SEQ ID NO: 261613 - DNA, 20 bp, Artificial Sequence
  Description of Artificial Sequence: Synthetic oligonucleotide
  Target: LAMA2; (-) strand; PAM type: YTN; PAM sequence: TTA
atcatgtatctgttataggc

SEQ ID NO: 261614 - DNA, 20 bp, Artificial Sequence
  Description of Artificial Sequence: Synthetic oligonucleotide
  Target: LAMA2; (-) strand; PAM type: YTN; PAM sequence: TTA
aacacatattaatcatgtat

SEQ ID NO: 261615 - DNA, 20 bp, Artificial Sequence
  Description of Artificial Sequence: Synthetic oligonucleotide
  Target: LAMA2; (-) strand; PAM type: YTN; PAM sequence: TTC
cattaaacacatattaatca

SEQ ID NO: 261616 - DNA, 20 bp, Artificial Sequence
  Description of Artificial Sequence: Synthetic oligonucleotide
  Target: LAMA2; (-) strand; PAM type: YTN; PAM sequence: CTT
ccattaaacacatattaatc

SEQ ID NO: 261617 - DNA, 20 bp, Artificial Sequence
  Description of Artificial Sequence: Synthetic oligonucleotide
  Target: LAMA2; (-) strand; PAM type: YTN; PAM sequence: CTA
tgcttccattaaacacatat

SEQ ID NO: 261618 - DNA, 20 bp, Artificial Sequence
  Description of Artificial Sequence: Synthetic oligonucleotide
  Target: LAMA2; (-) strand; PAM type: YTN; PAM sequence: TTC
tatgcttccattaaacacat

SEQ ID NO: 261619 - DNA, 20 bp, Artificial Sequence
  Description of Artificial Sequence: Synthetic oligonucleotide
  Target: LAMA2; (-) strand; PAM type: YTN; PAM sequence: TTT
ctatgcttccattaaacaca

SEQ ID NO: 261620 - DNA, 20 bp, Artificial Sequence
  Description of Artificial Sequence: Synthetic oligonucleotide
  Target: LAMA2; (-) strand; PAM type: YTN; PAM sequence: CTA
atgtttctatgcttccatta

SEQ ID NO: 261621 - DNA, 20 bp, Artificial Sequence
  Description of Artificial Sequence: Synthetic oligonucleotide
  Target: LAMA2; (-) strand; PAM type: YTN; PAM sequence: TTC
taatgtttctatgcttccat

SEQ ID NO: 261622 - DNA, 20 bp, Artificial Sequence
  Description of Artificial Sequence: Synthetic oligonucleotide
  Target: LAMA2; (-) strand; PAM type: YTN; PAM sequence: TTA
attctaatgtttctatgctt

SEQ ID NO: 261623 - DNA, 20 bp, Artificial Sequence
  Description of Artificial Sequence: Synthetic oligonucleotide
  Target: LAMA2; (-) strand; PAM type: YTN; PAM sequence: TTT
aattctaatgtttctatgct

SEQ ID NO: 261624 - DNA, 20 bp, Artificial Sequence
  Description of Artificial Sequence: Synthetic oligonucleotide
  Target: LAMA2; (-) strand; PAM type: YTN; PAM sequence: TTT
taattctaatgtttctatgc

SEQ ID NO: 261625 - DNA, 20 bp, Artificial Sequence
  Description of Artificial Sequence: Synthetic oligonucleotide
  Target: LAMA2; (-) strand; PAM type: YTN; PAM sequence: TTA
aaattttaattctaatgttt

SEQ ID NO: 261626 - DNA, 20 bp, Artificial Sequence
  Description of Artificial Sequence: Synthetic oligonucleotide
  Target: LAMA2; (-) strand; PAM type: YTN; PAM sequence: CTT
aaaattttaattctaatgtt

SEQ ID NO: 261627 - DNA, 20 bp, Artificial Sequence
  Description of Artificial Sequence: Synthetic oligonucleotide
  Target: LAMA2; (-) strand; PAM type: YTN; PAM sequence: TTA
tgggaaatatcttaaaattt

SEQ ID NO: 261628 - DNA, 20 bp, Artificial Sequence
  Description of Artificial Sequence: Synthetic oligonucleotide
  Target: LAMA2; (-) strand; PAM type: YTN; PAM sequence: TTT
atgggaaatatcttaaaatt

SEQ ID NO: 261629 - DNA, 20 bp, Artificial Sequence
  Description of Artificial Sequence: Synthetic oligonucleotide
  Target: LAMA2; (-) strand; PAM type: YTN; PAM sequence: CTT
tatgggaaatatcttaaaat

SEQ ID NO: 261630 - DNA, 20 bp, Artificial Sequence
  Description of Artificial Sequence: Synthetic oligonucleotide
  Target: LAMA2; (-) strand; PAM type: YTN; PAM sequence: TTA
acacaactttatgggaaata

SEQ ID NO: 261631 - DNA, 20 bp, Artificial Sequence
  Description of Artificial Sequence: Synthetic oligonucleotide
  Target: LAMA2; (-) strand; PAM type: YTN; PAM sequence: CTA
tagaggagataaaaacagca

SEQ ID NO: 261632 - DNA, 20 bp, Artificial Sequence
  Description of Artificial Sequence: Synthetic oligonucleotide
  Target: LAMA2; (-) strand; PAM type: YTN; PAM sequence: TTA
caagcctatagaggagataa

SEQ ID NO: 261633 - DNA, 20 bp, Artificial Sequence
  Description of Artificial Sequence: Synthetic oligonucleotide
  Target: LAMA2; (-) strand; PAM type: YTN; PAM sequence: CTG
cagttacaagcctatagagg

SEQ ID NO: 261634 - DNA, 20 bp, Artificial Sequence
  Description of Artificial Sequence: Synthetic oligonucleotide
  Target: LAMA2; (-) strand; PAM type: YTN; PAM sequence: CTG
tgctgcagttacaagcctat

SEQ ID NO: 261635 - DNA, 20 bp, Artificial Sequence
  Description of Artificial Sequence: Synthetic oligonucleotide
  Target: LAMA2; (-) strand; PAM type: YTN; PAM sequence: TTG
gaaatccaaggatcccactg

SEQ ID NO: 261636 - DNA, 20 bp, Artificial Sequence
  Description of Artificial Sequence: Synthetic oligonucleotide
  Target: LAMA2; (-) strand; PAM type: YTN; PAM sequence: TTG
cattggaaatccaaggatcc

SEQ ID NO: 261637 - DNA, 20 bp, Artificial Sequence
  Description of Artificial Sequence: Synthetic oligonucleotide
  Target: LAMA2; (-) strand; PAM type: YTN; PAM sequence: TTA
cattgcattggaaatccaag

SEQ ID NO: 261638 - DNA, 20 bp, Artificial Sequence
  Description of Artificial Sequence: Synthetic oligonucleotide
  Target: LAMA2; (-) strand; PAM type: YTN; PAM sequence: TTT
acattgcattggaaatccaa

SEQ ID NO: 261639 - DNA, 20 bp, Artificial Sequence
  Description of Artificial Sequence: Synthetic oligonucleotide
  Target: LAMA2; (-) strand; PAM type: YTN; PAM sequence: CTG
tatttacattgcattggaaa

SEQ ID NO: 261640 - DNA, 20 bp, Artificial Sequence
  Description of Artificial Sequence: Synthetic oligonucleotide
  Target: LAMA2; (-) strand; PAM type: YTN; PAM sequence: TTG
gcctgtatttacattgcatt

SEQ ID NO: 261641 - DNA, 20 bp, Artificial Sequence
  Description of Artificial Sequence: Synthetic oligonucleotide
  Target: LAMA2; (-) strand; PAM type: YTN; PAM sequence: TTG
cattggcctgtatttacatt

SEQ ID NO: 261642 - DNA, 20 bp, Artificial Sequence
  Description of Artificial Sequence: Synthetic oligonucleotide
  Target: LAMA2; (-) strand; PAM type: YTN; PAM sequence: TTG
gatgacagttgcattggcct

SEQ ID NO: 261643 - DNA, 20 bp, Artificial Sequence
  Description of Artificial Sequence: Synthetic oligonucleotide
  Target: LAMA2; (-) strand; PAM type: YTN; PAM sequence: TTT
ggatgacagttgcattggcc

SEQ ID NO: 261644 - DNA, 20 bp, Artificial Sequence
  Description of Artificial Sequence: Synthetic oligonucleotide
  Target: LAMA2; (-) strand; PAM type: YTN; PAM sequence: TTT
tggatgacagttgcattggc

SEQ ID NO: 261645 - DNA, 20 bp, Artificial Sequence
  Description of Artificial Sequence: Synthetic oligonucleotide
  Target: LAMA2; (-) strand; PAM type: YTN; PAM sequence: TTG
caccagagaattttggatga

SEQ ID NO: 261646 - DNA, 20 bp, Artificial Sequence
  Description of Artificial Sequence: Synthetic oligonucleotide
  Target: LAMA2; (-) strand; PAM type: YTN; PAM sequence: TTT
gcaccagagaattttggatg

SEQ ID NO: 261647 - DNA, 20 bp, Artificial Sequence
  Description of Artificial Sequence: Synthetic oligonucleotide
  Target: LAMA2; (-) strand; PAM type: YTN; PAM sequence: TTT
tgcaccagagaattttggat

SEQ ID NO: 261648 - DNA, 20 bp, Artificial Sequence
  Description of Artificial Sequence: Synthetic oligonucleotide
  Target: LAMA2; (-) strand; PAM type: YTN; PAM sequence: CTG
tacattttgcaccagagaat

SEQ ID NO: 261649 - DNA, 20 bp, Artificial Sequence
  Description of Artificial Sequence: Synthetic oligonucleotide
  Target: LAMA2; (-) strand; PAM type: YTN; PAM sequence: CTC
tgtacattttgcaccagaga

SEQ ID NO: 261650 - DNA, 20 bp, Artificial Sequence
  Description of Artificial Sequence: Synthetic oligonucleotide
  Target: LAMA2; (-) strand; PAM type: YTN; PAM sequence: CTG
cactctgtacattttgcacc

SEQ ID NO: 261651 - DNA, 20 bp, Artificial Sequence
  Description of Artificial Sequence: Synthetic oligonucleotide
  Target: LAMA2; (-) strand; PAM type: YTN; PAM sequence: CTC
gactgcactctgtacatttt

SEQ ID NO: 261652 - DNA, 20 bp, Artificial Sequence
  Description of Artificial Sequence: Synthetic oligonucleotide
  Target: LAMA2; (-) strand; PAM type: YTN; PAM sequence: TTC
cagtgacctcgactgcactc

SEQ ID NO: 261653 - DNA, 20 bp, Artificial Sequence
  Description of Artificial Sequence: Synthetic oligonucleotide
  Target: LAMA2; (-) strand; PAM type: YTN; PAM sequence: TTG
cagcgagggtagttccagtg

SEQ ID NO: 261654 - DNA, 20 bp, Artificial Sequence
  Description of Artificial Sequence: Synthetic oligonucleotide
  Target: LAMA2; (-) strand; PAM type: YTN; PAM sequence: CTG
tcccagggaggaagcagtca

SEQ ID NO: 261655 - DNA, 20 bp, Artificial Sequence
  Description of Artificial Sequence: Synthetic oligonucleotide
  Target: LAMA2; (-) strand; PAM type: YTN; PAM sequence: TTG
tggcatctgtcccagggagg

SEQ ID NO: 261656 - DNA, 20 bp, Artificial Sequence
  Description of Artificial Sequence: Synthetic oligonucleotide
  Target: LAMA2; (-) strand; PAM type: YTN; PAM sequence: CTG
aatcacaggttgtggcatct

SEQ ID NO: 261657 - DNA, 20 bp, Artificial Sequence
  Description of Artificial Sequence: Synthetic oligonucleotide
  Target: LAMA2; (-) strand; PAM type: YTN; PAM sequence: CTC
tgaatcacaggttgtggcat

SEQ ID NO: 261658 - DNA, 20 bp, Artificial Sequence
  Description of Artificial Sequence: Synthetic oligonucleotide
  Target: LAMA2; (-) strand; PAM type: YTN; PAM sequence: TTA
gtctctgaatcacaggttgt

SEQ ID NO: 261659 - DNA, 20 bp, Artificial Sequence
  Description of Artificial Sequence: Synthetic oligonucleotide
  Target: LAMA2; (-) strand; PAM type: YTN; PAM sequence: TTT
agtctctgaatcacaggttg

SEQ ID NO: 261660 - DNA, 20 bp, Artificial Sequence
  Description of Artificial Sequence: Synthetic oligonucleotide
  Target: LAMA2; (-) strand; PAM type: YTN; PAM sequence: TTT
tagtctctgaatcacaggtt

SEQ ID NO: 261661 - DNA, 20 bp, Artificial Sequence
  Description of Artificial Sequence: Synthetic oligonucleotide
  Target: LAMA2; (-) strand; PAM type: YTN; PAM sequence: TTT
ttagtctctgaatcacaggt

SEQ ID NO: 261662 - DNA, 20 bp, Artificial Sequence
  Description of Artificial Sequence: Synthetic oligonucleotide
  Target: LAMA2; (-) strand; PAM type: YTN; PAM sequence: TTT
tttagtctctgaatcacagg

SEQ ID NO: 261663 - DNA, 20 bp, Artificial Sequence
  Description of Artificial Sequence: Synthetic oligonucleotide
  Target: LAMA2; (-) strand; PAM type: YTN; PAM sequence: CTA
caggagcattttttagtctc

SEQ ID NO: 261664 - DNA, 20 bp, Artificial Sequence
  Description of Artificial Sequence: Synthetic oligonucleotide
  Target: LAMA2; (-) strand; PAM type: YTN; PAM sequence: TTG
atcactacaggagcattttt

SEQ ID NO: 261665 - DNA, 20 bp, Artificial Sequence
  Description of Artificial Sequence: Synthetic oligonucleotide
  Target: LAMA2; (-) strand; PAM type: YTN; PAM sequence: TTT
gatcactacaggagcatttt

SEQ ID NO: 261666 - DNA, 20 bp, Artificial Sequence
  Description of Artificial Sequence: Synthetic oligonucleotide
  Target: LAMA2; (-) strand; PAM type: YTN; PAM sequence: CTG
cccagtttgatcactacagg

SEQ ID NO: 261667 - DNA, 20 bp, Artificial Sequence
  Description of Artificial Sequence: Synthetic oligonucleotide
  Target: LAMA2; (-) strand; PAM type: YTN; PAM sequence: TTA
caagtgcactgcccagtttg

SEQ ID NO: 261668 - DNA, 20 bp, Artificial Sequence
  Description of Artificial Sequence: Synthetic oligonucleotide
  Target: LAMA2; (-) strand; PAM type: YTN; PAM sequence: CTT
acaagtgcactgcccagttt

SEQ ID NO: 261669 - DNA, 20 bp, Artificial Sequence
  Description of Artificial Sequence: Synthetic oligonucleotide
  Target: LAMA2; (-) strand; PAM type: YTN; PAM sequence: CTG
catgtcagcagcacatacct

SEQ ID NO: 261670 - DNA, 20 bp, Artificial Sequence
  Description of Artificial Sequence: Synthetic oligonucleotide
  Target: LAMA2; (-) strand; PAM type: YTN; PAM sequence: CTA
gctgcatgtcagcagcacat

SEQ ID NO: 261671 - DNA, 20 bp, Artificial Sequence
  Description of Artificial Sequence: Synthetic oligonucleotide
  Target: LAMA2; (-) strand; PAM type: YTN; PAM sequence: TTC
cctagctgcatgtcagcagc

SEQ ID NO: 261672 - DNA, 20 bp, Artificial Sequence
  Description of Artificial Sequence: Synthetic oligonucleotide
  Target: LAMA2; (-) strand; PAM type: YTN; PAM sequence: TTT
ccctagctgcatgtcagcag

SEQ ID NO: 261673 - DNA, 20 bp, Artificial Sequence
  Description of Artificial Sequence: Synthetic oligonucleotide
  Target: LAMA2; (-) strand; PAM type: YTN; PAM sequence: TTT
tccctagctgcatgtcagca

SEQ ID NO: 261674 - DNA, 20 bp, Artificial Sequence
  Description of Artificial Sequence: Synthetic oligonucleotide
  Target: LAMA2; (-) strand; PAM type: YTN; PAM sequence: TTG
agggaggttttccctagctg

SEQ ID NO: 261675 - DNA, 20 bp, Artificial Sequence
  Description of Artificial Sequence: Synthetic oligonucleotide
  Target: LAMA2; (-) strand; PAM type: YTN; PAM sequence: CTG
agcaatggaaacagaattga

SEQ ID NO: 261676 - DNA, 20 bp, Artificial Sequence
  Description of Artificial Sequence: Synthetic oligonucleotide
  Target: LAMA2; (-) strand; PAM type: YTN; PAM sequence: TTA
aaactgagcaatggaaacag

SEQ ID NO: 261677 - DNA, 20 bp, Artificial Sequence
  Description of Artificial Sequence: Synthetic oligonucleotide
  Target: LAMA2; (-) strand; PAM type: YTN; PAM sequence: CTG
aatgaagttaaaactgagca

SEQ ID NO: 261678 - DNA, 20 bp, Artificial Sequence
  Description of Artificial Sequence: Synthetic oligonucleotide
  Target: LAMA2; (-) strand; PAM type: YTN; PAM sequence: TTA
atgaagcaggtataacaaac

SEQ ID NO: 261679 - DNA, 20 bp, Artificial Sequence
  Description of Artificial Sequence: Synthetic oligonucleotide
  Target: LAMA2; (-) strand; PAM type: YTN; PAM sequence: CTT
aatgaagcaggtataacaaa

SEQ ID NO: 261680 - DNA, 20 bp, Artificial Sequence
  Description of Artificial Sequence: Synthetic oligonucleotide
  Target: LAMA2; (-) strand; PAM type: YTN; PAM sequence: TTA
gcttaatgaagcaggtataa

SEQ ID NO: 261681 - DNA, 20 bp, Artificial Sequence
  Description of Artificial Sequence: Synthetic oligonucleotide
  Target: LAMA2; (-) strand; PAM type: YTN; PAM sequence: TTT
agcttaatgaagcaggtata

SEQ ID NO: 261682 - DNA, 20 bp, Artificial Sequence
  Description of Artificial Sequence: Synthetic oligonucleotide
  Target: LAMA2; (-) strand; PAM type: YTN; PAM sequence: TTG
tttagcttaatgaagcaggt

SEQ ID NO: 261683 - DNA, 20 bp, Artificial Sequence
  Description of Artificial Sequence: Synthetic oligonucleotide
  Target: LAMA2; (-) strand; PAM type: YTN; PAM sequence: TTT
gtttagcttaatgaagcagg

SEQ ID NO: 261684 - DNA, 20 bp, Artificial Sequence
  Description of Artificial Sequence: Synthetic oligonucleotide
  Target: LAMA2; (-) strand; PAM type: YTN; PAM sequence: CTG
tttgtttagcttaatgaagc

SEQ ID NO: 261685 - DNA, 20 bp, Artificial Sequence
  Description of Artificial Sequence: Synthetic oligonucleotide
  Target: LAMA2; (-) strand; PAM type: YTN; PAM sequence: TTG
tccatctgtttgtttagctt

SEQ ID NO: 261686 - DNA, 20 bp, Artificial Sequence
  Description of Artificial Sequence: Synthetic oligonucleotide
  Target: LAMA2; (-) strand; PAM type: YTN; PAM sequence: TTT
gtccatctgtttgtttagct

SEQ ID NO: 261687 - DNA, 20 bp, Artificial Sequence
  Description of Artificial Sequence: Synthetic oligonucleotide
  Target: LAMA2; (-) strand; PAM type: YTN; PAM sequence: TTT
tgtccatctgtttgtttagc

SEQ ID NO: 261688 - DNA, 20 bp, Artificial Sequence
  Description of Artificial Sequence: Synthetic oligonucleotide
  Target: LAMA2; (-) strand; PAM type: YTN; PAM sequence: CTG
gcaatgagattttgtccatc

SEQ ID NO: 261689 - DNA, 20 bp, Artificial Sequence
  Description of Artificial Sequence: Synthetic oligonucleotide
  Target: LAMA2; (-) strand; PAM type: YTN; PAM sequence: CTC
catgtctggcaatgagattt

SEQ ID NO: 261690 - DNA, 20 bp, Artificial Sequence
  Description of Artificial Sequence: Synthetic oligonucleotide
  Target: LAMA2; (-) strand; PAM type: YTN; PAM sequence: TTA
tcggtatgccaacaaatgca

SEQ ID NO: 261691 - DNA, 20 bp, Artificial Sequence
  Description of Artificial Sequence: Synthetic oligonucleotide
  Target: LAMA2; (-) strand; PAM type: YTN; PAM sequence: TTT
atcggtatgccaacaaatgc

SEQ ID NO: 261692 - DNA, 20 bp, Artificial Sequence
  Description of Artificial Sequence: Synthetic oligonucleotide
  Target: LAMA2; (-) strand; PAM type: YTN; PAM sequence: CTA
gaaaagcagtgtttatcggt

SEQ ID NO: 261693 - DNA, 20 bp, Artificial Sequence
  Description of Artificial Sequence: Synthetic oligonucleotide
  Target: LAMA2; (-) strand; PAM type: YTN; PAM sequence: CTC
tagaaaagcagtgtttatcg

SEQ ID NO: 261694 - DNA, 20 bp, Artificial Sequence
  Description of Artificial Sequence: Synthetic oligonucleotide
  Target: LAMA2; (-) strand; PAM type: YTN; PAM sequence: TTG
aaaataagctctagaaaagc

SEQ ID NO: 261695 - DNA, 20 bp, Artificial Sequence
  Description of Artificial Sequence: Synthetic oligonucleotide
  Target: LAMA2; (-) strand; PAM type: YTN; PAM sequence: TTG
ggttgaaaataagctctaga

SEQ ID NO: 261696 - DNA, 20 bp, Artificial Sequence
  Description of Artificial Sequence: Synthetic oligonucleotide
  Target: LAMA2; (-) strand; PAM type: YTN; PAM sequence: TTT
gggttgaaaataagctctag

SEQ ID NO: 261697 - DNA, 20 bp, Artificial Sequence
  Description of Artificial Sequence: Synthetic oligonucleotide
  Target: LAMA2; (-) strand; PAM type: YTN; PAM sequence: CTA
gaaaaaaaggtgggtttggg

SEQ ID NO: 261698 - DNA, 20 bp, Artificial Sequence
  Description of Artificial Sequence: Synthetic oligonucleotide
  Target: LAMA2; (-) strand; PAM type: YTN; PAM sequence: CTC
caccaactagaaaaaaaggt

SEQ ID NO: 261699 - DNA, 20 bp, Artificial Sequence
  Description of Artificial Sequence: Synthetic oligonucleotide
  Target: LAMA2; (-) strand; PAM type: YTN; PAM sequence: TTG
aaaatagatcatctccacca

SEQ ID NO: 261700 - DNA, 20 bp, Artificial Sequence
  Description of Artificial Sequence: Synthetic oligonucleotide
  Target: LAMA2; (-) strand; PAM type: YTN; PAM sequence: CTA
taccattgaaaatagatcat

SEQ ID NO: 261701 - DNA, 20 bp, Artificial Sequence
  Description of Artificial Sequence: Synthetic oligonucleotide
  Target: LAMA2; (-) strand; PAM type: YTN; PAM sequence: TTA
aaaaatcactataccattga

SEQ ID NO: 261702 - DNA, 20 bp, Artificial Sequence
  Description of Artificial Sequence: Synthetic oligonucleotide
  Target: LAMA2; (-) strand; PAM type: YTN; PAM sequence: TTT
aaaaaatcactataccattg

SEQ ID NO: 261703 - DNA, 20 bp, Artificial Sequence
  Description of Artificial Sequence: Synthetic oligonucleotide
  Target: LAMA2; (-) strand; PAM type: YTN; PAM sequence: TTT
taaaaaatcactataccatt

SEQ ID NO: 261704 - DNA, 20 bp, Artificial Sequence
  Description of Artificial Sequence: Synthetic oligonucleotide
  Target: LAMA2; (-) strand; PAM type: YTN; PAM sequence: TTT
ttaaaaaatcactataccat

SEQ ID NO: 261705 - DNA, 20 bp, Artificial Sequence
  Description of Artificial Sequence: Synthetic oligonucleotide
  Target: LAMA2; (-) strand; PAM type: YTN; PAM sequence: TTT
tttaaaaaatcactatacca

SEQ ID NO: 261706 - DNA, 20 bp, Artificial Sequence
  Description of Artificial Sequence: Synthetic oligonucleotide
  Target: LAMA2; (-) strand; PAM type: YTN; PAM sequence: CTA
atatattttttaaaaaatca

SEQ ID NO: 261707 - DNA, 20 bp, Artificial Sequence
  Description of Artificial Sequence: Synthetic oligonucleotide
  Target: LAMA2; (-) strand; PAM type: YTN; PAM sequence: TTA
tcgaagcaaatctaatatat

SEQ ID NO: 261708 - DNA, 20 bp, Artificial Sequence
  Description of Artificial Sequence: Synthetic oligonucleotide
  Target: LAMA2; (-) strand; PAM type: YTN; PAM sequence: CTT
atcgaagcaaatctaatata

SEQ ID NO: 261709 - DNA, 20 bp, Artificial Sequence
  Description of Artificial Sequence: Synthetic oligonucleotide
  Target: LAMA2; (-) strand; PAM type: YTN; PAM sequence: TTG
tccttatcgaagcaaatcta

SEQ ID NO: 261710 - DNA, 20 bp, Artificial Sequence
  Description of Artificial Sequence: Synthetic oligonucleotide
  Target: LAMA2; (-) strand; PAM type: YTN; PAM sequence: CTC
ccagattgtccttatcgaag

SEQ ID NO: 261711 - DNA, 20 bp, Artificial Sequence
  Description of Artificial Sequence: Synthetic oligonucleotide
  Target: LAMA2; (-) strand; PAM type: YTN; PAM sequence: CTG
ccacccctcccagattgtcc

SEQ ID NO: 261712 - DNA, 20 bp, Artificial Sequence
  Description of Artificial Sequence: Synthetic oligonucleotide
  Target: LAMA2; (-) strand; PAM type: YTN; PAM sequence: TTC
cctgccacccctcccagatt

SEQ ID NO: 261713 - DNA, 20 bp, Artificial Sequence
  Description of Artificial Sequence: Synthetic oligonucleotide
  Target: LAMA2; (-) strand; PAM type: YTN; PAM sequence: CTT
ccctgccacccctcccagat

SEQ ID NO: 261714 - DNA, 20 bp, Artificial Sequence
  Description of Artificial Sequence: Synthetic oligonucleotide
  Target: LAMA2; (-) strand; PAM type: YTN; PAM sequence: CTG
tcttccctgccacccctccc

SEQ ID NO: 261715 - DNA, 20 bp, Artificial Sequence
  Description of Artificial Sequence: Synthetic oligonucleotide
  Target: LAMA2; (-) strand; PAM type: YTN; PAM sequence: TTA
aaagaactgtcttccctgcc

SEQ ID NO: 261716 - DNA, 20 bp, Artificial Sequence
  Description of Artificial Sequence: Synthetic oligonucleotide
  Target: LAMA2; (-) strand; PAM type: YTN; PAM sequence: CTT
aaaagaactgtcttccctgc

SEQ ID NO: 261717 - DNA, 20 bp, Artificial Sequence
  Description of Artificial Sequence: Synthetic oligonucleotide
  Target: LAMA2; (-) strand; PAM type: YTN; PAM sequence: CTG
atgatgcttaaaagaactgt

SEQ ID NO: 261718 - DNA, 20 bp, Artificial Sequence
  Description of Artificial Sequence: Synthetic oligonucleotide
  Target: LAMA2; (-) strand; PAM type: YTN; PAM sequence: CTC
tgatgatgcttaaaagaact

SEQ ID NO: 261719 - DNA, 20 bp, Artificial Sequence
  Description of Artificial Sequence: Synthetic oligonucleotide
  Target: LAMA2; (-) strand; PAM type: YTN; PAM sequence: TTC
tctgatgatgcttaaaagaa

SEQ ID NO: 261720 - DNA, 20 bp, Artificial Sequence
  Description of Artificial Sequence: Synthetic oligonucleotide
  Target: LAMA2; (-) strand; PAM type: YTN; PAM sequence: TTT
ctctgatgatgcttaaaaga

SEQ ID NO: 261721 - DNA, 20 bp, Artificial Sequence
  Description of Artificial Sequence: Synthetic oligonucleotide
  Target: LAMA2; (-) strand; PAM type: YTN; PAM sequence: TTT
tctctgatgatgcttaaaag

SEQ ID NO: 261722 - DNA, 20 bp, Artificial Sequence
  Description of Artificial Sequence: Synthetic oligonucleotide
  Target: LAMA2; (-) strand; PAM type: YTN; PAM sequence: CTG
tgattttctctgatgatgct

SEQ ID NO: 261723 - DNA, 20 bp, Artificial Sequence
  Description of Artificial Sequence: Synthetic oligonucleotide
  Target: LAMA2; (-) strand; PAM type: YTN; PAM sequence: TTA
gctgtgattttctctgatga

SEQ ID NO: 261724 - DNA, 20 bp, Artificial Sequence
  Description of Artificial Sequence: Synthetic oligonucleotide
  Target: LAMA2; (-) strand; PAM type: YTN; PAM sequence: TTT
agctgtgattttctctgatg

SEQ ID NO: 261725 - DNA, 20 bp, Artificial Sequence
  Description of Artificial Sequence: Synthetic oligonucleotide
  Target: LAMA2; (-) strand; PAM type: YTN; PAM sequence: TTA
tttagctgtgattttctctg

SEQ ID NO: 261726 - DNA, 20 bp, Artificial Sequence
  Description of Artificial Sequence: Synthetic oligonucleotide
  Target: LAMA2; (-) strand; PAM type: YTN; PAM sequence: TTA
ttatttagctgtgattttct

SEQ ID NO: 261727 - DNA, 20 bp, Artificial Sequence
  Description of Artificial Sequence: Synthetic oligonucleotide
  Target: LAMA2; (-) strand; PAM type: YTN; PAM sequence: CTT
attatttagctgtgattttc

SEQ ID NO: 261728 - DNA, 20 bp, Artificial Sequence
  Description of Artificial Sequence: Synthetic oligonucleotide
  Target: LAMA2; (-) strand; PAM type: YTN; PAM sequence: TTA
taagccttattatttagctg

SEQ ID NO: 261729 - DNA, 20 bp, Artificial Sequence
  Description of Artificial Sequence: Synthetic oligonucleotide
  Target: LAMA2; (-) strand; PAM type: YTN; PAM sequence: TTT
ataagccttattatttagct

SEQ ID NO: 261730 - DNA, 20 bp, Artificial Sequence
  Description of Artificial Sequence: Synthetic oligonucleotide
  Target: LAMA2; (-) strand; PAM type: YTN; PAM sequence: TTT
tataagccttattatttagc

SEQ ID NO: 261731 - DNA, 20 bp, Artificial Sequence
  Description of Artificial Sequence: Synthetic oligonucleotide
  Target: LAMA2; (-) strand; PAM type: YTN; PAM sequence: TTT
ttataagccttattatttag

SEQ ID NO: 261732 - DNA, 20 bp, Artificial Sequence
  Description of Artificial Sequence: Synthetic oligonucleotide
  Target: LAMA2; (-) strand; PAM type: YTN; PAM sequence: TTG
gagaaatggtttttataagc

SEQ ID NO: 261733 - DNA, 20 bp, Artificial Sequence
  Description of Artificial Sequence: Synthetic oligonucleotide
  Target: LAMA2; (-) strand; PAM type: YTN; PAM sequence: TTT
ggagaaatggtttttataag

SEQ ID NO: 261734 - DNA, 20 bp, Artificial Sequence
  Description of Artificial Sequence: Synthetic oligonucleotide
  Target: LAMA2; (-) strand; PAM type: YTN; PAM sequence: TTT
tggagaaatggtttttataa

SEQ ID NO: 261735 - DNA, 20 bp, Artificial Sequence
  Description of Artificial Sequence: Synthetic oligonucleotide
  Target: LAMA2; (-) strand; PAM type: YTN; PAM sequence: TTT
ttggagaaatggtttttata

SEQ ID NO: 261736 - DNA, 20 bp, Artificial Sequence
  Description of Artificial Sequence: Synthetic oligonucleotide
  Target: LAMA2; (-) strand; PAM type: YTN; PAM sequence: TTA
atttttggagaaatggtttt

SEQ ID NO: 261737 - DNA, 20 bp, Artificial Sequence
  Description of Artificial Sequence: Synthetic oligonucleotide
  Target: LAMA2; (-) strand; PAM type: YTN; PAM sequence: TTG
cagattaatttttggagaaa

SEQ ID NO: 261738 - DNA, 20 bp, Artificial Sequence
  Description of Artificial Sequence: Synthetic oligonucleotide
  Target: LAMA2; (-) strand; PAM type: YTN; PAM sequence: CTA
gtatacagcgattgcagatt

SEQ ID NO: 261739 - DNA, 20 bp, Artificial Sequence
  Description of Artificial Sequence: Synthetic oligonucleotide
  Target: LAMA2; (-) strand; PAM type: YTN; PAM sequence: TTC
tagtatacagcgattgcaga

SEQ ID NO: 261740 - DNA, 20 bp, Artificial Sequence
  Description of Artificial Sequence: Synthetic oligonucleotide
  Target: LAMA2; (-) strand; PAM type: YTN; PAM sequence: TTT
ctagtatacagcgattgcag

SEQ ID NO: 261741 - DNA, 20 bp, Artificial Sequence
  Description of Artificial Sequence: Synthetic oligonucleotide
  Target: LAMA2; (-) strand; PAM type: YTN; PAM sequence: TTT
tctagtatacagcgattgca

SEQ ID NO: 261742 - DNA, 20 bp, Artificial Sequence
  Description of Artificial Sequence: Synthetic oligonucleotide
  Target: LAMA2; (-) strand; PAM type: YTN; PAM sequence: TTC
cacagcagtaaatatatttt

SEQ ID NO: 261743 - DNA, 20 bp, Artificial Sequence
  Description of Artificial Sequence: Synthetic oligonucleotide
  Target: LAMA2; (-) strand; PAM type: YTN; PAM sequence: CTT
ccacagcagtaaatatattt

SEQ ID NO: 261744 - DNA, 20 bp, Artificial Sequence
  Description of Artificial Sequence: Synthetic oligonucleotide
  Target: LAMA2; (-) strand; PAM type: YTN; PAM sequence: CTA
aacttccacagcagtaaata

SEQ ID NO: 261745 - DNA, 20 bp, Artificial Sequence
  Description of Artificial Sequence: Synthetic oligonucleotide
  Target: LAMA2; (-) strand; PAM type: YTN; PAM sequence: TTA
ctaaacttccacagcagtaa

SEQ ID NO: 261746 - DNA, 20 bp, Artificial Sequence
  Description of Artificial Sequence: Synthetic oligonucleotide
  Target: LAMA2; (-) strand; PAM type: YTN; PAM sequence: TTT
actaaacttccacagcagta

SEQ ID NO: 261747 - DNA, 20 bp, Artificial Sequence
  Description of Artificial Sequence: Synthetic oligonucleotide
  Target: LAMA2; (-) strand; PAM type: YTN; PAM sequence: TTT
tactaaacttccacagcagt

SEQ ID NO: 261748 - DNA, 20 bp, Artificial Sequence
  Description of Artificial Sequence: Synthetic oligonucleotide
  Target: LAMA2; (-) strand; PAM type: YTN; PAM sequence: TTG
aaattttactaaacttccac

SEQ ID NO: 261749 - DNA, 20 bp, Artificial Sequence
  Description of Artificial Sequence: Synthetic oligonucleotide
  Target: LAMA2; (-) strand; PAM type: YTN; PAM sequence: TTA
tatgtgttgaaattttacta

SEQ ID NO: 261750 - DNA, 20 bp, Artificial Sequence
  Description of Artificial Sequence: Synthetic oligonucleotide
  Target: LAMA2; (-) strand; PAM type: YTN; PAM sequence: TTT
atatgtgttgaaattttact

SEQ ID NO: 261751 - DNA, 20 bp, Artificial Sequence
  Description of Artificial Sequence: Synthetic oligonucleotide
  Target: LAMA2; (-) strand; PAM type: YTN; PAM sequence: TTG
taatgacagcgtttatatgt

SEQ ID NO: 261752 - DNA, 20 bp, Artificial Sequence
  Description of Artificial Sequence: Synthetic oligonucleotide
  Target: LAMA2; (-) strand; PAM type: YTN; PAM sequence: TTT
gtaatgacagcgtttatatg

SEQ ID NO: 261753 - DNA, 20 bp, Artificial Sequence
  Description of Artificial Sequence: Synthetic oligonucleotide
  Target: LAMA2; (-) strand; PAM type: YTN; PAM sequence: CTG
tttgtaatgacagcgtttat

SEQ ID NO: 261754 - DNA, 20 bp, Artificial Sequence
  Description of Artificial Sequence: Synthetic oligonucleotide
  Target: LAMA2; (-) strand; PAM type: YTN; PAM sequence: TTG
cacatagtcactgtttgtaa

SEQ ID NO: 261755 - DNA, 20 bp, Artificial Sequence
  Description of Artificial Sequence: Synthetic oligonucleotide
  Target: LAMA2; (-) strand; PAM type: YTN; PAM sequence: TTT
gcacatagtcactgtttgta

SEQ ID NO: 261756 - DNA, 20 bp, Artificial Sequence
  Description of Artificial Sequence: Synthetic oligonucleotide
  Target: LAMA2; (-) strand; PAM type: YTN; PAM sequence: CTG
aaatttgcacatagtcactg

SEQ ID NO: 261757 - DNA, 20 bp, Artificial Sequence
  Description of Artificial Sequence: Synthetic oligonucleotide
  Target: LAMA2; (-) strand; PAM type: YTN; PAM sequence: TTA
atgagggctgaaatttgcac

SEQ ID NO: 261758 - DNA, 20 bp, Artificial Sequence
  Description of Artificial Sequence: Synthetic oligonucleotide
  Target: LAMA2; (-) strand; PAM type: YTN; PAM sequence: TTA
accatattaatgagggctga

SEQ ID NO: 261759 - DNA, 20 bp, Artificial Sequence
  Description of Artificial Sequence: Synthetic oligonucleotide
  Target: LAMA2; (-) strand; PAM type: YTN; PAM sequence: TTT
aaccatattaatgagggctg

SEQ ID NO: 261760 - DNA, 20 bp, Artificial Sequence
  Description of Artificial Sequence: Synthetic oligonucleotide
  Target: LAMA2; (-) strand; PAM type: YTN; PAM sequence: CTA
catcatttaaccatattaat

SEQ ID NO: 261761 - DNA, 20 bp, Artificial Sequence
  Description of Artificial Sequence: Synthetic oligonucleotide
  Target: LAMA2; (-) strand; PAM type: YTN; PAM sequence: TTC
tacatcatttaaccatatta

SEQ ID NO: 261762 - DNA, 20 bp, Artificial Sequence
  Description of Artificial Sequence: Synthetic oligonucleotide
  Target: LAMA2; (-) strand; PAM type: YTN; PAM sequence: TTT
ctacatcatttaaccatatt

SEQ ID NO: 261763 - DNA, 20 bp, Artificial Sequence
  Description of Artificial Sequence: Synthetic oligonucleotide
  Target: LAMA2; (-) strand; PAM type: YTN; PAM sequence: TTT
tctacatcatttaaccatat

SEQ ID NO: 261764 - DNA, 20 bp, Artificial Sequence
  Description of Artificial Sequence: Synthetic oligonucleotide
  Target: LAMA2; (-) strand; PAM type: YTN; PAM sequence: TTT
ttctacatcatttaaccata

SEQ ID NO: 261765 - DNA, 20 bp, Artificial Sequence
  Description of Artificial Sequence: Synthetic oligonucleotide
  Target: LAMA2; (-) strand; PAM type: YTN; PAM sequence: CTT
tttctacatcatttaaccat

SEQ ID NO: 261766 - DNA, 20 bp, Artificial Sequence
  Description of Artificial Sequence: Synthetic oligonucleotide
  Target: LAMA2; (-) strand; PAM type: YTN; PAM sequence: CTC
tttttctacatcatttaacc

SEQ ID NO: 261767 - DNA, 20 bp, Artificial Sequence
  Description of Artificial Sequence: Synthetic oligonucleotide
  Target: LAMA2; (-) strand; PAM type: YTN; PAM sequence: TTG
gctctttttctacatcattt

SEQ ID NO: 261768 - DNA, 20 bp, Artificial Sequence
  Description of Artificial Sequence: Synthetic oligonucleotide
  Target: LAMA2; (-) strand; PAM type: YTN; PAM sequence: TTA
attggctctttttctacatc

SEQ ID NO: 261769 - DNA, 20 bp, Artificial Sequence
  Description of Artificial Sequence: Synthetic oligonucleotide
  Target: LAMA2; (-) strand; PAM type: YTN; PAM sequence: TTT
aattggctctttttctacat

SEQ ID NO: 261770 - DNA, 20 bp, Artificial Sequence
  Description of Artificial Sequence: Synthetic oligonucleotide
  Target: LAMA2; (-) strand; PAM type: YTN; PAM sequence: TTT
taattggctctttttctaca

SEQ ID NO: 261771 - DNA, 20 bp, Artificial Sequence
  Description of Artificial Sequence: Synthetic oligonucleotide
  Target: LAMA2; (-) strand; PAM type: YTN; PAM sequence: TTT
ttaattggctctttttctac

SEQ ID NO: 261772 - DNA, 20 bp, Artificial Sequence
  Description of Artificial Sequence: Synthetic oligonucleotide
  Target: LAMA2; (-) strand; PAM type: YTN; PAM sequence: CTT
tttaattggctctttttcta

SEQ ID NO: 261773 - DNA, 20 bp, Artificial Sequence
  Description of Artificial Sequence: Synthetic oligonucleotide
  Target: LAMA2; (-) strand; PAM type: YTN; PAM sequence: TTA
cctttttaattggctctttt

SEQ ID NO: 261774 - DNA, 20 bp, Artificial Sequence
  Description of Artificial Sequence: Synthetic oligonucleotide
  Target: LAMA2; (-) strand; PAM type: YTN; PAM sequence: TTT
acctttttaattggctcttt

SEQ ID NO: 261775 - DNA, 20 bp, Artificial Sequence
  Description of Artificial Sequence: Synthetic oligonucleotide
  Target: LAMA2; (-) strand; PAM type: YTN; PAM sequence: TTT
tacctttttaattggctctt

SEQ ID NO: 261776 - DNA, 20 bp, Artificial Sequence
  Description of Artificial Sequence: Synthetic oligonucleotide
  Target: LAMA2; (-) strand; PAM type: YTN; PAM sequence: TTT
ttacctttttaattggctct

SEQ ID NO: 261777 - DNA, 20 bp, Artificial Sequence
  Description of Artificial Sequence: Synthetic oligonucleotide
  Target: LAMA2; (-) strand; PAM type: YTN; PAM sequence: CTT
tttacctttttaattggctc

SEQ ID NO: 261778 - DNA, 20 bp, Artificial Sequence
  Description of Artificial Sequence: Synthetic oligonucleotide
  Target: LAMA2; (-) strand; PAM type: YTN; PAM sequence: CTG
aggggaaaaatcctttttac

SEQ ID NO: 261779 - DNA, 20 bp, Artificial Sequence
  Description of Artificial Sequence: Synthetic oligonucleotide
  Target: LAMA2; (-) strand; PAM type: YTN; PAM sequence: CTA
tctgaggggaaaaatccttt

SEQ ID NO: 261780 - DNA, 20 bp, Artificial Sequence
  Description of Artificial Sequence: Synthetic oligonucleotide
  Target: LAMA2; (-) strand; PAM type: YTN; PAM sequence: TTC
agaactatctgaggggaaaa

SEQ ID NO: 261781 - DNA, 20 bp, Artificial Sequence
  Description of Artificial Sequence: Synthetic oligonucleotide
  Target: LAMA2; (-) strand; PAM type: YTN; PAM sequence: TTT
cagaactatctgaggggaaa

SEQ ID NO: 261782 - DNA, 20 bp, Artificial Sequence
  Description of Artificial Sequence: Synthetic oligonucleotide
  Target: LAMA2; (-) strand; PAM type: YTN; PAM sequence: TTT
tcagaactatctgaggggaa

SEQ ID NO: 261783 - DNA, 20 bp, Artificial Sequence
  Description of Artificial Sequence: Synthetic oligonucleotide
  Target: LAMA2; (-) strand; PAM type: YTN; PAM sequence: TTT
ttcagaactatctgagggga

SEQ ID NO: 261784 - DNA, 20 bp, Artificial Sequence
  Description of Artificial Sequence: Synthetic oligonucleotide
  Target: LAMA2; (-) strand; PAM type: YTN; PAM sequence: TTG
atttttcagaactatctgag

SEQ ID NO: 261785 - DNA, 20 bp, Artificial Sequence
  Description of Artificial Sequence: Synthetic oligonucleotide
  Target: LAMA2; (-) strand; PAM type: YTN; PAM sequence: CTG
gaattgatttttcagaacta

SEQ ID NO: 261786 - DNA, 20 bp, Artificial Sequence
  Description of Artificial Sequence: Synthetic oligonucleotide
  Target: LAMA2; (-) strand; PAM type: YTN; PAM sequence: TTA
tcctggaattgatttttcag

SEQ ID NO: 261787 - DNA, 20 bp, Artificial Sequence
  Description of Artificial Sequence: Synthetic oligonucleotide
  Target: LAMA2; (-) strand; PAM type: YTN; PAM sequence: TTT
atcctggaattgatttttca

SEQ ID NO: 261788 - DNA, 20 bp, Artificial Sequence
  Description of Artificial Sequence: Synthetic oligonucleotide
  Target: LAMA2; (-) strand; PAM type: YTN; PAM sequence: CTG
catttatcctggaattgatt

SEQ ID NO: 261789 - DNA, 20 bp, Artificial Sequence
  Description of Artificial Sequence: Synthetic oligonucleotide
  Target: LAMA2; (-) strand; PAM type: YTN; PAM sequence: TTA
aactgcatttatcctggaat

SEQ ID NO: 261790 - DNA, 20 bp, Artificial Sequence
  Description of Artificial Sequence: Synthetic oligonucleotide
  Target: LAMA2; (-) strand; PAM type: YTN; PAM sequence: TTT
aaactgcatttatcctggaa

SEQ ID NO: 261791 - DNA, 20 bp, Artificial Sequence
  Description of Artificial Sequence: Synthetic oligonucleotide
  Target: LAMA2; (-) strand; PAM type: YTN; PAM sequence: CTG
acacagtttaaactgcattt

SEQ ID NO: 261792 - DNA, 20 bp, Artificial Sequence
  Description of Artificial Sequence: Synthetic oligonucleotide
  Target: LAMA2; (-) strand; PAM type: YTN; PAM sequence: CTC
tgacacagtttaaactgcat

SEQ ID NO: 261793 - DNA, 20 bp, Artificial Sequence
  Description of Artificial Sequence: Synthetic oligonucleotide
  Target: LAMA2; (-) strand; PAM type: YTN; PAM sequence: TTG
aaaagatacctctgacacag

SEQ ID NO: 261794 - DNA, 20 bp, Artificial Sequence
  Description of Artificial Sequence: Synthetic oligonucleotide
  Target: LAMA2; (-) strand; PAM type: YTN; PAM sequence: CTT
gaaaagatacctctgacaca

SEQ ID NO: 261795 - DNA, 20 bp, Artificial Sequence
  Description of Artificial Sequence: Synthetic oligonucleotide
  Target: LAMA2; (-) strand; PAM type: YTN; PAM sequence: TTA
tcttgaaaagatacctctga

SEQ ID NO: 261796 - DNA, 20 bp, Artificial Sequence
  Description of Artificial Sequence: Synthetic oligonucleotide
  Target: LAMA2; (-) strand; PAM type: YTN; PAM sequence: TTT
atcttgaaaagatacctctg

SEQ ID NO: 261797 - DNA, 20 bp, Artificial Sequence
  Description of Artificial Sequence: Synthetic oligonucleotide
  Target: LAMA2; (-) strand; PAM type: YTN; PAM sequence: TTT
tatcttgaaaagatacctct

SEQ ID NO: 261798 - DNA, 20 bp, Artificial Sequence
  Description of Artificial Sequence: Synthetic oligonucleotide
  Target: LAMA2; (-) strand; PAM type: YTN; PAM sequence: TTG
catagattttatcttgaaaa

SEQ ID NO: 261799 - DNA, 20 bp, Artificial Sequence
  Description of Artificial Sequence: Synthetic oligonucleotide
  Target: LAMA2; (-) strand; PAM type: YTN; PAM sequence: TTT
gcatagattttatcttgaaa

SEQ ID NO: 261800 - DNA, 20 bp, Artificial Sequence
  Description of Artificial Sequence: Synthetic oligonucleotide
  Target: LAMA2; (-) strand; PAM type: YTN; PAM sequence: TTT
tgcatagattttatcttgaa

SEQ ID NO: 261801 - DNA, 20 bp, Artificial Sequence
  Description of Artificial Sequence: Synthetic oligonucleotide
  Target: LAMA2; (-) strand; PAM type: YTN; PAM sequence: TTT
ttgcatagattttatcttga

SEQ ID NO: 261802 - DNA, 20 bp, Artificial Sequence
  Description of Artificial Sequence: Synthetic oligonucleotide
  Target: LAMA2; (-) strand; PAM type: YTN; PAM sequence: CTT
tttgcatagattttatcttg

SEQ ID NO: 261803 - DNA, 20 bp, Artificial Sequence
  Description of Artificial Sequence: Synthetic oligonucleotide
  Target: LAMA2; (-) strand; PAM type: YTN; PAM sequence: CTG
tccctttttgcatagatttt

SEQ ID NO: 261804 - DNA, 20 bp, Artificial Sequence
  Description of Artificial Sequence: Synthetic oligonucleotide
  Target: LAMA2; (-) strand; PAM type: YTN; PAM sequence: CTC
tgtccctttttgcatagatt

SEQ ID NO: 261805 - DNA, 20 bp, Artificial Sequence
  Description of Artificial Sequence: Synthetic oligonucleotide
  Target: LAMA2; (-) strand; PAM type: YTN; PAM sequence: TTC
ctctgtccctttttgcatag

SEQ ID NO: 261806 - DNA, 20 bp, Artificial Sequence
  Description of Artificial Sequence: Synthetic oligonucleotide
  Target: LAMA2; (-) strand; PAM type: YTN; PAM sequence: TTT
cctctgtccctttttgcata

SEQ ID NO: 261807 - DNA, 20 bp, Artificial Sequence
  Description of Artificial Sequence: Synthetic oligonucleotide
  Target: LAMA2; (-) strand; PAM type: YTN; PAM sequence: CTG
tttcctctgtccctttttgc

SEQ ID NO: 261808 - DNA, 20 bp, Artificial Sequence
  Description of Artificial Sequence: Synthetic oligonucleotide
  Target: LAMA2; (-) strand; PAM type: YTN; PAM sequence: TTC
ctgtttcctctgtccctttt

SEQ ID NO: 261809 - DNA, 20 bp, Artificial Sequence
  Description of Artificial Sequence: Synthetic oligonucleotide
  Target: LAMA2; (-) strand; PAM type: YTN; PAM sequence: CTT
cctgtttcctctgtcccttt

SEQ ID NO: 261810 - DNA, 20 bp, Artificial Sequence
  Description of Artificial Sequence: Synthetic oligonucleotide
  Target: LAMA2; (-) strand; PAM type: YTN; PAM sequence: TTA
tcttcctgtttcctctgtcc

SEQ ID NO: 261811 - DNA, 20 bp, Artificial Sequence
  Description of Artificial Sequence: Synthetic oligonucleotide
  Target: LAMA2; (-) strand; PAM type: YTN; PAM sequence: TTT
atcttcctgtttcctctgtc

SEQ ID NO: 261812 - DNA, 20 bp, Artificial Sequence
  Description of Artificial Sequence: Synthetic oligonucleotide
  Target: LAMA2; (-) strand; PAM type: YTN; PAM sequence: TTT
tatcttcctgtttcctctgt

SEQ ID NO: 261813 - DNA, 20 bp, Artificial Sequence
  Description of Artificial Sequence: Synthetic oligonucleotide
  Target: LAMA2; (-) strand; PAM type: YTN; PAM sequence: CTA
cccagattttatcttcctgt

SEQ ID NO: 261814 - DNA, 20 bp, Artificial Sequence
  Description of Artificial Sequence: Synthetic oligonucleotide
  Target: LAMA2; (-) strand; PAM type: YTN; PAM sequence: TTA
acaaccactacccagatttt

SEQ ID NO: 261815 - DNA, 20 bp, Artificial Sequence
  Description of Artificial Sequence: Synthetic oligonucleotide
  Target: LAMA2; (-) strand; PAM type: YTN; PAM sequence: TTT
aacaaccactacccagattt

SEQ ID NO: 261816 - DNA, 20 bp, Artificial Sequence
  Description of Artificial Sequence: Synthetic oligonucleotide
  Target: LAMA2; (-) strand; PAM type: YTN; PAM sequence: TTT
taacaaccactacccagatt

SEQ ID NO: 261817 - DNA, 20 bp, Artificial Sequence
  Description of Artificial Sequence: Synthetic oligonucleotide
  Target: LAMA2; (-) strand; PAM type: YTN; PAM sequence: CTC
aaggccattttaacaaccac

SEQ ID NO: 261818 - DNA, 20 bp, Artificial Sequence
  Description of Artificial Sequence: Synthetic oligonucleotide
  Target: LAMA2; (-) strand; PAM type: YTN; PAM sequence: TTC
tcaaggccattttaacaacc

SEQ ID NO: 261819 - DNA, 20 bp, Artificial Sequence
  Description of Artificial Sequence: Synthetic oligonucleotide
  Target: LAMA2; (-) strand; PAM type: YTN; PAM sequence: CTC
aattctcaaggccattttaa

SEQ ID NO: 261820 - DNA, 20 bp, Artificial Sequence
  Description of Artificial Sequence: Synthetic oligonucleotide
  Target: LAMA2; (-) strand; PAM type: YTN; PAM sequence: TTC
ctcaattctcaaggccattt

SEQ ID NO: 261821 - DNA, 20 bp, Artificial Sequence
  Description of Artificial Sequence: Synthetic oligonucleotide
  Target: LAMA2; (-) strand; PAM type: YTN; PAM sequence: TTT
cctcaattctcaaggccatt

SEQ ID NO: 261822 - DNA, 20 bp, Artificial Sequence
  Description of Artificial Sequence: Synthetic oligonucleotide
  Target: LAMA2; (-) strand; PAM type: YTN; PAM sequence: TTT
tcctcaattctcaaggccat

SEQ ID NO: 261823 - DNA, 20 bp, Artificial Sequence
  Description of Artificial Sequence: Synthetic oligonucleotide
  Target: LAMA2; (-) strand; PAM type: YTN; PAM sequence: CTG
ccattttcctcaattctcaa

SEQ ID NO: 261824 - DNA, 20 bp, Artificial Sequence
  Description of Artificial Sequence: Synthetic oligonucleotide
  Target: LAMA2; (-) strand; PAM type: YTN; PAM sequence: TTG
atggtagaaactgccatttt

SEQ ID NO: 261825 - DNA, 20 bp, Artificial Sequence
  Description of Artificial Sequence: Synthetic oligonucleotide
  Target: LAMA2; (-) strand; PAM type: YTN; PAM sequence: CTT
gatggtagaaactgccattt

SEQ ID NO: 261826 - DNA, 20 bp, Artificial Sequence
  Description of Artificial Sequence: Synthetic oligonucleotide
  Target: LAMA2; (-) strand; PAM type: YTN; PAM sequence: TTG
gccgaagcccttgatggtag

SEQ ID NO: 261827 - DNA, 20 bp, Artificial Sequence
  Description of Artificial Sequence: Synthetic oligonucleotide
  Target: LAMA2; (-) strand; PAM type: YTN; PAM sequence: CTC
ggtattggccgaagcccttg

SEQ ID NO: 261828 - DNA, 20 bp, Artificial Sequence
  Description of Artificial Sequence: Synthetic oligonucleotide
  Target: LAMA2; (-) strand; PAM type: YTN; PAM sequence: TTG
tactcggtattggccgaagc

SEQ ID NO: 261829 - DNA, 20 bp, Artificial Sequence
  Description of Artificial Sequence: Synthetic oligonucleotide
  Target: LAMA2; (-) strand; PAM type: YTN; PAM sequence: TTG
cgagatataagaatgcagca

SEQ ID NO: 261830 - DNA, 20 bp, Artificial Sequence
  Description of Artificial Sequence: Synthetic oligonucleotide
  Target: LAMA2; (-) strand; PAM type: YTN; PAM sequence: TTA
aatatatgatcataattgcg

SEQ ID NO: 261831 - DNA, 20 bp, Artificial Sequence
  Description of Artificial Sequence: Synthetic oligonucleotide
  Target: LAMA2; (-) strand; PAM type: YTN; PAM sequence: TTG
taatatatatacacacataa

SEQ ID NO: 261832 - DNA, 20 bp, Artificial Sequence
  Description of Artificial Sequence: Synthetic oligonucleotide
  Target: LAMA2; (-) strand; PAM type: YTN; PAM sequence: TTA
ttgtaatatatatacacaca

SEQ ID NO: 261833 - DNA, 20 bp, Artificial Sequence
  Description of Artificial Sequence: Synthetic oligonucleotide
  Target: LAMA2; (-) strand; PAM type: YTN; PAM sequence: TTA
tataattattgtaatatata

SEQ ID NO: 261834 - DNA, 20 bp, Artificial Sequence
  Description of Artificial Sequence: Synthetic oligonucleotide
  Target: LAMA2; (-) strand; PAM type: YTN; PAM sequence: TTT
atataattattgtaatatat

SEQ ID NO: 261835 - DNA, 20 bp, Artificial Sequence
  Description of Artificial Sequence: Synthetic oligonucleotide
  Target: LAMA2; (-) strand; PAM type: YTN; PAM sequence: TTA
aaatatcaatttatataatt

SEQ ID NO: 261836 - DNA, 20 bp, Artificial Sequence
  Description of Artificial Sequence: Synthetic oligonucleotide
  Target: LAMA2; (-) strand; PAM type: YTN; PAM sequence: CTG
taagaaataggcagcaggtt

SEQ ID NO: 261837 - DNA, 20 bp, Artificial Sequence
  Description of Artificial Sequence: Synthetic oligonucleotide
  Target: LAMA2; (-) strand; PAM type: YTN; PAM sequence: TTG
taagctgtaagaaataggca

SEQ ID NO: 261838 - DNA, 20 bp, Artificial Sequence
  Description of Artificial Sequence: Synthetic oligonucleotide
  Target: LAMA2; (-) strand; PAM type: YTN; PAM sequence: CTA
ttgtaagctgtaagaaatag

SEQ ID NO: 261839 - DNA, 20 bp, Artificial Sequence
  Description of Artificial Sequence: Synthetic oligonucleotide
  Target: LAMA2; (-) strand; PAM type: YTN; PAM sequence: TTA
aacagtggtgctattgtaag

SEQ ID NO: 261840 - DNA, 20 bp, Artificial Sequence
  Description of Artificial Sequence: Synthetic oligonucleotide
  Target: LAMA2; (-) strand; PAM type: YTN; PAM sequence: CTT
aaacagtggtgctattgtaa

SEQ ID NO: 261841 - DNA, 20 bp, Artificial Sequence
  Description of Artificial Sequence: Synthetic oligonucleotide
  Target: LAMA2; (-) strand; PAM type: YTN; PAM sequence: TTG
agtcttaaacagtggtgcta

SEQ ID NO: 261842 - DNA, 20 bp, Artificial Sequence
  Description of Artificial Sequence: Synthetic oligonucleotide
  Target: LAMA2; (-) strand; PAM type: YTN; PAM sequence: TTC
aaaagcaacataaaaacatt

SEQ ID NO: 261843 - DNA, 20 bp, Artificial Sequence
  Description of Artificial Sequence: Synthetic oligonucleotide
  Target: LAMA2; (-) strand; PAM type: YTN; PAM sequence: TTT
caaaagcaacataaaaacat

SEQ ID NO: 261844 - DNA, 20 bp, Artificial Sequence
  Description of Artificial Sequence: Synthetic oligonucleotide
  Target: LAMA2; (-) strand; PAM type: YTN; PAM sequence: CTC
atgaaaatttcaaaagcaac

SEQ ID NO: 261845 - DNA, 20 bp, Artificial Sequence
  Description of Artificial Sequence: Synthetic oligonucleotide
  Target: LAMA2; (-) strand; PAM type: YTN; PAM sequence: CTG
agcaatatgaaagactcatg

SEQ ID NO: 261846 - DNA, 20 bp, Artificial Sequence
  Description of Artificial Sequence: Synthetic oligonucleotide
  Target: LAMA2; (-) strand; PAM type: YTN; PAM sequence: CTC
tgagcaatatgaaagactca

SEQ ID NO: 261847 - DNA, 20 bp, Artificial Sequence
  Description of Artificial Sequence: Synthetic oligonucleotide
  Target: LAMA2; (-) strand; PAM type: YTN; PAM sequence: CTG
ctctgagcaatatgaaagac

SEQ ID NO: 261848 - DNA, 20 bp, Artificial Sequence
  Description of Artificial Sequence: Synthetic oligonucleotide
  Target: LAMA2; (-) strand; PAM type: YTN; PAM sequence: TTC
tgctctgagcaatatgaaag

SEQ ID NO: 261849 - DNA, 20 bp, Artificial Sequence
  Description of Artificial Sequence: Synthetic oligonucleotide
  Target: LAMA2; (-) strand; PAM type: YTN; PAM sequence: CTA
cagttctgctctgagcaata

SEQ ID NO: 261850 - DNA, 20 bp, Artificial Sequence
  Description of Artificial Sequence: Synthetic oligonucleotide
  Target: LAMA2; (-) strand; PAM type: YTN; PAM sequence: TTC
tacagttctgctctgagcaa

SEQ ID NO: 261851 - DNA, 20 bp, Artificial Sequence
  Description of Artificial Sequence: Synthetic oligonucleotide
  Target: LAMA2; (-) strand; PAM type: YTN; PAM sequence: TTT
ctacagttctgctctgagca

SEQ ID NO: 261852 - DNA, 20 bp, Artificial Sequence
  Description of Artificial Sequence: Synthetic oligonucleotide
  Target: LAMA2; (-) strand; PAM type: YTN; PAM sequence: TTT
tctacagttctgctctgagc

SEQ ID NO: 261853 - DNA, 20 bp, Artificial Sequence
  Description of Artificial Sequence: Synthetic oligonucleotide
  Target: LAMA2; (-) strand; PAM type: YTN; PAM sequence: TTA
aatgtaagtggtacattttc

SEQ ID NO: 261854 - DNA, 20 bp, Artificial Sequence
  Description of Artificial Sequence: Synthetic oligonucleotide
  Target: LAMA2; (-) strand; PAM type: YTN; PAM sequence: CTT
aaatgtaagtggtacatttt

SEQ ID NO: 261855 - DNA, 20 bp, Artificial Sequence
  Description of Artificial Sequence: Synthetic oligonucleotide
  Target: LAMA2; (-) strand; PAM type: YTN; PAM sequence: TTC
ttaaatgtaagtggtacatt

SEQ ID NO: 261856 - DNA, 20 bp, Artificial Sequence
  Description of Artificial Sequence: Synthetic oligonucleotide
  Target: LAMA2; (-) strand; PAM type: YTN; PAM sequence: TTT
cttaaatgtaagtggtacat

SEQ ID NO: 261857 - DNA, 20 bp, Artificial Sequence
  Description of Artificial Sequence: Synthetic oligonucleotide
  Target: LAMA2; (-) strand; PAM type: YTN; PAM sequence: TTG
tttcttaaatgtaagtggta

SEQ ID NO: 261858 - DNA, 20 bp, Artificial Sequence
  Description of Artificial Sequence: Synthetic oligonucleotide
  Target: LAMA2; (-) strand; PAM type: YTN; PAM sequence: CTG
tacattgtttcttaaatgta

SEQ ID NO: 261859 - DNA, 20 bp, Artificial Sequence
  Description of Artificial Sequence: Synthetic oligonucleotide
  Target: LAMA2; (-) strand; PAM type: YTN; PAM sequence: TTA
caggcgtgagccaccacgcc

SEQ ID NO: 261860 - DNA, 20 bp, Artificial Sequence
  Description of Artificial Sequence: Synthetic oligonucleotide
  Target: LAMA2; (-) strand; PAM type: YTN; PAM sequence: CTC
ccaaagtggtgggattacag

SEQ ID NO: 261861 - DNA, 20 bp, Artificial Sequence
  Description of Artificial Sequence: Synthetic oligonucleotide
  Target: LAMA2; (-) strand; PAM type: YTN; PAM sequence: CTC
ggcctcccaaagtggtggga

SEQ ID NO: 261862 - DNA, 20 bp, Artificial Sequence
  Description of Artificial Sequence: Synthetic oligonucleotide
  Target: LAMA2; (-) strand; PAM type: YTN; PAM sequence: CTC
gtgatccgcccgcctcggcc

SEQ ID NO: 261863 - DNA, 20 bp, Artificial Sequence
  Description of Artificial Sequence: Synthetic oligonucleotide
  Target: LAMA2; (-) strand; PAM type: YTN; PAM sequence: CTG
acctcgtgatccgcccgcct

SEQ ID NO: 261864 - DNA, 20 bp, Artificial Sequence
  Description of Artificial Sequence: Synthetic oligonucleotide
  Target: LAMA2; (-) strand; PAM type: YTN; PAM sequence: CTC
ctgacctcgtgatccgcccg

SEQ ID NO: 261865 - DNA, 20 bp, Artificial Sequence
  Description of Artificial Sequence: Synthetic oligonucleotide
  Target: LAMA2; (-) strand; PAM type: YTN; PAM sequence: CTC
gatctcctgacctcgtgatc

SEQ ID NO: 261866 - DNA, 20 bp, Artificial Sequence
  Description of Artificial Sequence: Synthetic oligonucleotide
  Target: LAMA2; (-) strand; PAM type: YTN; PAM sequence: TTG
tctcgatctcctgacctcgt

SEQ ID NO: 261867 - DNA, 20 bp, Artificial Sequence
  Description of Artificial Sequence: Synthetic oligonucleotide
  Target: LAMA2; (-) strand; PAM type: YTN; PAM sequence: TTA
gccaggattgtctcgatctc

SEQ ID NO: 261868 - DNA, 20 bp, Artificial Sequence
  Description of Artificial Sequence: Synthetic oligonucleotide
  Target: LAMA2; (-) strand; PAM type: YTN; PAM sequence: TTC
accgtgttagccaggattgt

SEQ ID NO: 261869 - DNA, 20 bp, Artificial Sequence
  Description of Artificial Sequence: Synthetic oligonucleotide
  Target: LAMA2; (-) strand; PAM type: YTN; PAM sequence: TTT
caccgtgttagccaggattg

SEQ ID NO: 261870 - DNA, 20 bp, Artificial Sequence
  Description of Artificial Sequence: Synthetic oligonucleotide
  Target: LAMA2; (-) strand; PAM type: YTN; PAM sequence: TTA
gtagagacggggtttcaccg

SEQ ID NO: 261871 - DNA, 20 bp, Artificial Sequence
  Description of Artificial Sequence: Synthetic oligonucleotide
  Target: LAMA2; (-) strand; PAM type: YTN; PAM sequence: TTT
agtagagacggggtttcacc

SEQ ID NO: 261872 - DNA, 20 bp, Artificial Sequence
  Description of Artificial Sequence: Synthetic oligonucleotide
  Target: LAMA2; (-) strand; PAM type: YTN; PAM sequence: TTT
tagtagagacggggtttcac

SEQ ID NO: 261873 - DNA, 20 bp, Artificial Sequence
  Description of Artificial Sequence: Synthetic oligonucleotide
  Target: LAMA2; (-) strand; PAM type: YTN; PAM sequence: TTT
ttagtagagacggggtttca

SEQ ID NO: 261874 - DNA, 20 bp, Artificial Sequence
  Description of Artificial Sequence: Synthetic oligonucleotide
  Target: LAMA2; (-) strand; PAM type: YTN; PAM sequence: TTG
tatttttagtagagacgggg

SEQ ID NO: 261875 - DNA, 20 bp, Artificial Sequence
  Description of Artificial Sequence: Synthetic oligonucleotide
  Target: LAMA2; (-) strand; PAM type: YTN; PAM sequence: TTT
gtatttttagtagagacggg

SEQ ID NO: 261876 - DNA, 20 bp, Artificial Sequence
  Description of Artificial Sequence: Synthetic oligonucleotide
  Target: LAMA2; (-) strand; PAM type: YTN; PAM sequence: TTT
tgtatttttagtagagacgg

SEQ ID NO: 261877 - DNA, 20 bp, Artificial Sequence
  Description of Artificial Sequence: Synthetic oligonucleotide
  Target: LAMA2; (-) strand; PAM type: YTN; PAM sequence: TTT
ttgtatttttagtagagacg

SEQ ID NO: 261878 - DNA, 20 bp, Artificial Sequence
  Description of Artificial Sequence: Synthetic oligonucleotide
  Target: LAMA2; (-) strand; PAM type: YTN; PAM sequence: CTA
atttttgtatttttagtaga

SEQ ID NO: 261879 - DNA, 20 bp, Artificial Sequence
  Description of Artificial Sequence: Synthetic oligonucleotide
  Target: LAMA2; (-) strand; PAM type: YTN; PAM sequence: CTA
caggcgcccgccaccgcgcc

SEQ ID NO: 261880 - DNA, 20 bp, Artificial Sequence
  Description of Artificial Sequence: Synthetic oligonucleotide
  Target: LAMA2; (-) strand; PAM type: YTN; PAM sequence: TTC
cgagtagatgggactacagg

SEQ ID NO: 261881 - DNA, 20 bp, Artificial Sequence
  Description of Artificial Sequence: Synthetic oligonucleotide
  Target: LAMA2; (-) strand; PAM type: YTN; PAM sequence: CTT
ccgagtagatgggactacag

SEQ ID NO: 261882 - DNA, 20 bp, Artificial Sequence
  Description of Artificial Sequence: Synthetic oligonucleotide
  Target: LAMA2; (-) strand; PAM type: YTN; PAM sequence: CTC
agccttccgagtagatggga

SEQ ID NO: 261883 - DNA, 20 bp, Artificial Sequence
  Description of Artificial Sequence: Synthetic oligonucleotide
  Target: LAMA2; (-) strand; PAM type: YTN; PAM sequence: CTC
cggcctcagccttccgagta

SEQ ID NO: 261884 - DNA, 20 bp, Artificial Sequence
  Description of Artificial Sequence: Synthetic oligonucleotide
  Target: LAMA2; (-) strand; PAM type: YTN; PAM sequence: TTC
tccggcctcagccttccgag

SEQ ID NO: 261885 - DNA, 20 bp, Artificial Sequence
  Description of Artificial Sequence: Synthetic oligonucleotide
  Target: LAMA2; (-) strand; PAM type: YTN; PAM sequence: TTC
acaccattctccggcctcag

SEQ ID NO: 261886 - DNA, 20 bp, Artificial Sequence
  Description of Artificial Sequence: Synthetic oligonucleotide
  Target: LAMA2; (-) strand; PAM type: YTN; PAM sequence: CTC
ccaggttcacaccattctcc

SEQ ID NO: 261887 - DNA, 20 bp, Artificial Sequence
  Description of Artificial Sequence: Synthetic oligonucleotide
  Target: LAMA2; (-) strand; PAM type: YTN; PAM sequence: CTC
cgcctcccaggttcacacca

SEQ ID NO: 261888 - DNA, 20 bp, Artificial Sequence
  Description of Artificial Sequence: Synthetic oligonucleotide
  Target: LAMA2; (-) strand; PAM type: YTN; PAM sequence: CTG
caagctccgcctcccaggtt

SEQ ID NO: 261889 - DNA, 20 bp, Artificial Sequence
  Description of Artificial Sequence: Synthetic oligonucleotide
  Target: LAMA2; (-) strand; PAM type: YTN; PAM sequence: CTC
actgcaagctccgcctccca

SEQ ID NO: 261890 - DNA, 20 bp, Artificial Sequence
  Description of Artificial Sequence: Synthetic oligonucleotide
  Target: LAMA2; (-) strand; PAM type: YTN; PAM sequence: CTG
ctcactgcaagctccgcctc

SEQ ID NO: 261891 - DNA, 20 bp, Artificial Sequence
  Description of Artificial Sequence: Synthetic oligonucleotide
  Target: LAMA2; (-) strand; PAM type: YTN; PAM sequence: CTC
tgctcactgcaagctccgcc

SEQ ID NO: 261892 - DNA, 20 bp, Artificial Sequence
  Description of Artificial Sequence: Synthetic oligonucleotide
  Target: LAMA2; (-) strand; PAM type: YTN; PAM sequence: CTA
tctctgctcactgcaagctc

SEQ ID NO: 261893 - DNA, 20 bp, Artificial Sequence
  Description of Artificial Sequence: Synthetic oligonucleotide
  Target: LAMA2; (-) strand; PAM type: YTN; PAM sequence: TTC
gcccaggccagagtgcagtg

SEQ ID NO: 261894 - DNA, 20 bp, Artificial Sequence
  Description of Artificial Sequence: Synthetic oligonucleotide
  Target: LAMA2; (-) strand; PAM type: YTN; PAM sequence: TTT
cgcccaggccagagtgcagt

SEQ ID NO: 261895 - DNA, 20 bp, Artificial Sequence
  Description of Artificial Sequence: Synthetic oligonucleotide
  Target: LAMA2; (-) strand; PAM type: YTN; PAM sequence: CTT
tcgcccaggccagagtgcag

SEQ ID NO: 261896 - DNA, 20 bp, Artificial Sequence
  Description of Artificial Sequence: Synthetic oligonucleotide
  Target: LAMA2; (-) strand; PAM type: YTN; PAM sequence: CTC
tttcgcccaggccagagtgc

SEQ ID NO: 261897 - DNA, 20 bp, Artificial Sequence
  Description of Artificial Sequence: Synthetic oligonucleotide
  Target: LAMA2; (-) strand; PAM type: YTN; PAM sequence: CTC
gctctttcgcccaggccaga

SEQ ID NO: 261898 - DNA, 20 bp, Artificial Sequence
  Description of Artificial Sequence: Synthetic oligonucleotide
  Target: LAMA2; (-) strand; PAM type: YTN; PAM sequence: TTG
agacggagtctcgctctttc

SEQ ID NO: 261899 - DNA, 20 bp, Artificial Sequence
  Description of Artificial Sequence: Synthetic oligonucleotide
  Target: LAMA2; (-) strand; PAM type: YTN; PAM sequence: TTT
gagacggagtctcgctcttt

SEQ ID NO: 261900 - DNA, 20 bp, Artificial Sequence
  Description of Artificial Sequence: Synthetic oligonucleotide
  Target: LAMA2; (-) strand; PAM type: YTN; PAM sequence: TTT
tgagacggagtctcgctctt

SEQ ID NO: 261901 - DNA, 20 bp, Artificial Sequence
  Description of Artificial Sequence: Synthetic oligonucleotide
  Target: LAMA2; (-) strand; PAM type: YTN; PAM sequence: TTT
ttgagacggagtctcgctct

SEQ ID NO: 261902 - DNA, 20 bp, Artificial Sequence
  Description of Artificial Sequence: Synthetic oligonucleotide
  Target: LAMA2; (-) strand; PAM type: YTN; PAM sequence: TTT
tttgagacggagtctcgctc

SEQ ID NO: 261903 - DNA, 20 bp, Artificial Sequence
  Description of Artificial Sequence: Synthetic oligonucleotide
  Target: LAMA2; (-) strand; PAM type: YTN; PAM sequence: TTT
ttttgagacggagtctcgct

SEQ ID NO: 261904 - DNA, 20 bp, Artificial Sequence
  Description of Artificial Sequence: Synthetic oligonucleotide
  Target: LAMA2; (-) strand; PAM type: YTN; PAM sequence: TTT
tttttgagacggagtctcgc

SEQ ID NO: 261905 - DNA, 20 bp, Artificial Sequence
  Description of Artificial Sequence: Synthetic oligonucleotide
  Target: LAMA2; (-) strand; PAM type: YTN; PAM sequence: TTT
ttttttgagacggagtctcg

SEQ ID NO: 261906 - DNA, 20 bp, Artificial Sequence
  Description of Artificial Sequence: Synthetic oligonucleotide
  Target: LAMA2; (-) strand; PAM type: YTN; PAM sequence: TTT
tttttttgagacggagtctc

SEQ ID NO: 261907 - DNA, 20 bp, Artificial Sequence
  Description of Artificial Sequence: Synthetic oligonucleotide
  Target: LAMA2; (-) strand; PAM type: YTN; PAM sequence: TTT
ttttttttgagacggagtct

SEQ ID NO: 261908 - DNA, 20 bp, Artificial Sequence
  Description of Artificial Sequence: Synthetic oligonucleotide
  Target: LAMA2; (-) strand; PAM type: YTN; PAM sequence: TTT
tttttttttgagacggagtc

SEQ ID NO: 261909 - DNA, 20 bp, Artificial Sequence
  Description of Artificial Sequence: Synthetic oligonucleotide
  Target: LAMA2; (-) strand; PAM type: YTN; PAM sequence: TTT
ttttttttttgagacggagt

SEQ ID NO: 261910 - DNA, 20 bp, Artificial Sequence
  Description of Artificial Sequence: Synthetic oligonucleotide
  Target: LAMA2; (-) strand; PAM type: YTN; PAM sequence: TTT
tttttttttttgagacggag

SEQ ID NO: 261911 - DNA, 20 bp, Artificial Sequence
  Description of Artificial Sequence: Synthetic oligonucleotide
  Target: LAMA2; (-) strand; PAM type: YTN; PAM sequence: TTT
ttttttttttttgagacgga

SEQ ID NO: 261912 - DNA, 20 bp, Artificial Sequence
  Description of Artificial Sequence: Synthetic oligonucleotide
  Target: LAMA2; (-) strand; PAM type: YTN; PAM sequence: TTT
tttttttttttttgagacgg

SEQ ID NO: 261913 - DNA, 20 bp, Artificial Sequence
  Description of Artificial Sequence: Synthetic oligonucleotide
  Target: LAMA2; (-) strand; PAM type: YTN; PAM sequence: TTT
ttttttttttttttgagacg

SEQ ID NO: 261914 - DNA, 20 bp, Artificial Sequence
  Description of Artificial Sequence: Synthetic oligonucleotide
  Target: LAMA2; (-) strand; PAM type: YTN; PAM sequence: TTT
tttttttttttttttgagac

SEQ ID NO: 261915 - DNA, 20 bp, Artificial Sequence
  Description of Artificial Sequence: Synthetic oligonucleotide
  Target: LAMA2; (-) strand; PAM type: YTN; PAM sequence: TTT
ttttttttttttttttgaga

SEQ ID NO: 261916 - DNA, 20 bp, Artificial Sequence
  Description of Artificial Sequence: Synthetic oligonucleotide
  Target: LAMA2; (-) strand; PAM type: YTN; PAM sequence: TTT
tttttttttttttttttgag

SEQ ID NO: 261917 - DNA, 20 bp, Artificial Sequence
  Description of Artificial Sequence: Synthetic oligonucleotide
  Target: LAMA2; (-) strand; PAM type: YTN; PAM sequence: TTT
ttttttttttttttttttga

SEQ ID NO: 261918 - DNA, 20 bp, Artificial Sequence
  Description of Artificial Sequence: Synthetic oligonucleotide
  Target: LAMA2; (-) strand; PAM type: YTN; PAM sequence: CTT
tttttttttttttttttttg

SEQ ID NO: 261919 - DNA, 20 bp, Artificial Sequence
  Description of Artificial Sequence: Synthetic oligonucleotide
  Target: LAMA2; (-) strand; PAM type: YTN; PAM sequence: TTG
tacttttttttttttttttt

SEQ ID NO: 261920 - DNA, 20 bp, Artificial Sequence
  Description of Artificial Sequence: Synthetic oligonucleotide
  Target: LAMA2; (-) strand; PAM type: YTN; PAM sequence: CTA
aaggtattgtactttttttt

SEQ ID NO: 261921 - DNA, 20 bp, Artificial Sequence
  Description of Artificial Sequence: Synthetic oligonucleotide
  Target: LAMA2; (-) strand; PAM type: YTN; PAM sequence: TTA
aatagatataagactaaagg

SEQ ID NO: 261922 - DNA, 20 bp, Artificial Sequence
  Description of Artificial Sequence: Synthetic oligonucleotide
  Target: LAMA2; (-) strand; PAM type: YTN; PAM sequence: TTT
aaatagatataagactaaag

SEQ ID NO: 261923 - DNA, 20 bp, Artificial Sequence
  Description of Artificial Sequence: Synthetic oligonucleotide
  Target: LAMA2; (-) strand; PAM type: YTN; PAM sequence: TTT
taaatagatataagactaaa

SEQ ID NO: 261924 - DNA, 20 bp, Artificial Sequence
  Description of Artificial Sequence: Synthetic oligonucleotide
  Target: LAMA2; (-) strand; PAM type: YTN; PAM sequence: TTT
ttaaatagatataagactaa

SEQ ID NO: 261925 - DNA, 20 bp, Artificial Sequence
  Description of Artificial Sequence: Synthetic oligonucleotide
  Target: LAMA2; (-) strand; PAM type: YTN; PAM sequence: TTA
tttttaaatagatataagac

SEQ ID NO: 261926 - DNA, 20 bp, Artificial Sequence
  Description of Artificial Sequence: Synthetic oligonucleotide
  Target: LAMA2; (-) strand; PAM type: YTN; PAM sequence: TTT
atttttaaatagatataaga

SEQ ID NO: 261927 - DNA, 20 bp, Artificial Sequence
  Description of Artificial Sequence: Synthetic oligonucleotide
  Target: LAMA2; (-) strand; PAM type: YTN; PAM sequence: CTT
tatttttaaatagatataag

SEQ ID NO: 261928 - DNA, 20 bp, Artificial Sequence
  Description of Artificial Sequence: Synthetic oligonucleotide
  Target: LAMA2; (-) strand; PAM type: YTN; PAM sequence: TTA
aaaatgctttatttttaaat

SEQ ID NO: 261929 - DNA, 20 bp, Artificial Sequence
  Description of Artificial Sequence: Synthetic oligonucleotide
  Target: LAMA2; (-) strand; PAM type: YTN; PAM sequence: TTT
aaaaatgctttatttttaaa

SEQ ID NO: 261930 - DNA, 20 bp, Artificial Sequence
  Description of Artificial Sequence: Synthetic oligonucleotide
  Target: LAMA2; (-) strand; PAM type: YTN; PAM sequence: TTT
taaaaatgctttatttttaa

SEQ ID NO: 261931 - DNA, 20 bp, Artificial Sequence
  Description of Artificial Sequence: Synthetic oligonucleotide
  Target: LAMA2; (-) strand; PAM type: YTN; PAM sequence: CTT
ttaaaaatgctttattttta

SEQ ID NO: 261932 - DNA, 20 bp, Artificial Sequence
  Description of Artificial Sequence: Synthetic oligonucleotide
  Target: LAMA2; (-) strand; PAM type: YTN; PAM sequence: TTC
atggatcttttaaaaatgct

SEQ ID NO: 261933 - DNA, 20 bp, Artificial Sequence
  Description of Artificial Sequence: Synthetic oligonucleotide
  Target: LAMA2; (-) strand; PAM type: YTN; PAM sequence: TTA
ggagttcatggatcttttaa

SEQ ID NO: 261934 - DNA, 20 bp, Artificial Sequence
  Description of Artificial Sequence: Synthetic oligonucleotide
  Target: LAMA2; (-) strand; PAM type: YTN; PAM sequence: TTG
ttaggagttcatggatcttt

SEQ ID NO: 261935 - DNA, 20 bp, Artificial Sequence
  Description of Artificial Sequence: Synthetic oligonucleotide
  Target: LAMA2; (-) strand; PAM type: YTN; PAM sequence: CTC
attgttaggagttcatggat

SEQ ID NO: 261936 - DNA, 20 bp, Artificial Sequence
  Description of Artificial Sequence: Synthetic oligonucleotide
  Target: LAMA2; (-) strand; PAM type: YTN; PAM sequence: TTA
acctcattgttaggagttca

SEQ ID NO: 261937 - DNA, 20 bp, Artificial Sequence
  Description of Artificial Sequence: Synthetic oligonucleotide
  Target: LAMA2; (-) strand; PAM type: YTN; PAM sequence: CTC
aaatggcacatgtagttaac

SEQ ID NO: 261938 - DNA, 20 bp, Artificial Sequence
  Description of Artificial Sequence: Synthetic oligonucleotide
  Target: LAMA2; (-) strand; PAM type: YTN; PAM sequence: CTC
acatctcaaatggcacatgt

SEQ ID NO: 261939 - DNA, 20 bp, Artificial Sequence
  Description of Artificial Sequence: Synthetic oligonucleotide
  Target: LAMA2; (-) strand; PAM type: YTN; PAM sequence: TTA
gactcacatctcaaatggca

SEQ ID NO: 261940 - DNA, 20 bp, Artificial Sequence
  Description of Artificial Sequence: Synthetic oligonucleotide
  Target: LAMA2; (-) strand; PAM type: YTN; PAM sequence: CTG
agtattagactcacatctca

SEQ ID NO: 261941 - DNA, 20 bp, Artificial Sequence
  Description of Artificial Sequence: Synthetic oligonucleotide
  Target: LAMA2; (-) strand; PAM type: YTN; PAM sequence: TTA
aaacaaaacagaagaacact

SEQ ID NO: 261942 - DNA, 20 bp, Artificial Sequence
  Description of Artificial Sequence: Synthetic oligonucleotide
  Target: LAMA2; (-) strand; PAM type: YTN; PAM sequence: TTT
aaaacaaaacagaagaacac

SEQ ID NO: 261943 - DNA, 20 bp, Artificial Sequence
  Description of Artificial Sequence: Synthetic oligonucleotide
  Target: LAMA2; (-) strand; PAM type: YTN; PAM sequence: TTA
aaaaatttaaaacaaaacag

SEQ ID NO: 261944 - DNA, 20 bp, Artificial Sequence
  Description of Artificial Sequence: Synthetic oligonucleotide
  Target: LAMA2; (-) strand; PAM type: YTN; PAM sequence: TTT
aaaaaatttaaaacaaaaca

SEQ ID NO: 261945 - DNA, 20 bp, Artificial Sequence
  Description of Artificial Sequence: Synthetic oligonucleotide
  Target: LAMA2; (-) strand; PAM type: YTN; PAM sequence: TTT
taaaaaatttaaaacaaaac

SEQ ID NO: 261946 - DNA, 20 bp, Artificial Sequence
  Description of Artificial Sequence: Synthetic oligonucleotide
  Target: LAMA2; (-) strand; PAM type: YTN; PAM sequence: TTT
ttaaaaaatttaaaacaaaa

SEQ ID NO: 261947 - DNA, 20 bp, Artificial Sequence
  Description of Artificial Sequence: Synthetic oligonucleotide
  Target: LAMA2; (-) strand; PAM type: YTN; PAM sequence: CTT
tttaaaaaatttaaaacaaa

SEQ ID NO: 261948 - DNA, 20 bp, Artificial Sequence
  Description of Artificial Sequence: Synthetic oligonucleotide
  Target: LAMA2; (-) strand; PAM type: YTN; PAM sequence: CTC
tttttaaaaaatttaaaaca

SEQ ID NO: 261949 - DNA, 20 bp, Artificial Sequence
  Description of Artificial Sequence: Synthetic oligonucleotide
  Target: LAMA2; (-) strand; PAM type: YTN; PAM sequence: CTG
agaatgcataacgggagcat

SEQ ID NO: 261950 - DNA, 20 bp, Artificial Sequence
  Description of Artificial Sequence: Synthetic oligonucleotide
  Target: LAMA2; (-) strand; PAM type: YTN; PAM sequence: TTA
ggggagaaatcaccctgaga

SEQ ID NO: 261951 - DNA, 20 bp, Artificial Sequence
  Description of Artificial Sequence: Synthetic oligonucleotide
  Target: LAMA2; (-) strand; PAM type: YTN; PAM sequence: TTA
taacggcaaagttaggggag

SEQ ID NO: 261952 - DNA, 20 bp, Artificial Sequence
  Description of Artificial Sequence: Synthetic oligonucleotide
  Target: LAMA2; (-) strand; PAM type: YTN; PAM sequence: TTT
ataacggcaaagttagggga

SEQ ID NO: 261953 - DNA, 20 bp, Artificial Sequence
  Description of Artificial Sequence: Synthetic oligonucleotide
  Target: LAMA2; (-) strand; PAM type: YTN; PAM sequence: CTC
agagtttataacggcaaagt

SEQ ID NO: 261954 - DNA, 20 bp, Artificial Sequence
  Description of Artificial Sequence: Synthetic oligonucleotide
  Target: LAMA2; (-) strand; PAM type: YTN; PAM sequence: CTG
aggaaagacaagagaccctc

SEQ ID NO: 261955 - DNA, 20 bp, Artificial Sequence
  Description of Artificial Sequence: Synthetic oligonucleotide
  Target: LAMA2; (-) strand; PAM type: YTN; PAM sequence: TTC
acctgaggaaagacaagaga

SEQ ID NO: 261956 - DNA, 20 bp, Artificial Sequence
  Description of Artificial Sequence: Synthetic oligonucleotide
  Target: LAMA2; (-) strand; PAM type: YTN; PAM sequence: TTC
cacattcacctgaggaaaga

SEQ ID NO: 261957 - DNA, 20 bp, Artificial Sequence
  Description of Artificial Sequence: Synthetic oligonucleotide
  Target: LAMA2; (-) strand; PAM type: YTN; PAM sequence: CTT
ccacattcacctgaggaaag

SEQ ID NO: 261958 - DNA, 20 bp, Artificial Sequence
  Description of Artificial Sequence: Synthetic oligonucleotide
  Target: LAMA2; (-) strand; PAM type: YTN; PAM sequence: CTG
tcacagtggatgccttccac

SEQ ID NO: 261959 - DNA, 20 bp, Artificial Sequence
  Description of Artificial Sequence: Synthetic oligonucleotide
  Target: LAMA2; (-) strand; PAM type: YTN; PAM sequence: TTG
ccaggccggcatctgtcaca

SEQ ID NO: 261960 - DNA, 20 bp, Artificial Sequence
  Description of Artificial Sequence: Synthetic oligonucleotide
  Target: LAMA2; (-) strand; PAM type: YTN; PAM sequence: TTT
gccaggccggcatctgtcac

SEQ ID NO: 261961 - DNA, 20 bp, Artificial Sequence
  Description of Artificial Sequence: Synthetic oligonucleotide
  Target: LAMA2; (-) strand; PAM type: YTN; PAM sequence: TTG
gcatcgagtccgaatttgcc

SEQ ID NO: 261962 - DNA, 20 bp, Artificial Sequence
  Description of Artificial Sequence: Synthetic oligonucleotide
  Target: LAMA2; (-) strand; PAM type: YTN; PAM sequence: CTT
ggcatcgagtccgaatttgc

SEQ ID NO: 261963 - DNA, 20 bp, Artificial Sequence
  Description of Artificial Sequence: Synthetic oligonucleotide
  Target: LAMA2; (-) strand; PAM type: YTN; PAM sequence: TTC
ttggcatcgagtccgaattt

SEQ ID NO: 261964 - DNA, 20 bp, Artificial Sequence
  Description of Artificial Sequence: Synthetic oligonucleotide
  Target: LAMA2; (-) strand; PAM type: YTN; PAM sequence: CTG
cagccaagtggattcttggc

SEQ ID NO: 261965 - DNA, 20 bp, Artificial Sequence
  Description of Artificial Sequence: Synthetic oligonucleotide
  Target: LAMA2; (-) strand; PAM type: YTN; PAM sequence: CTG
ctgcagccaagtggattctt

SEQ ID NO: 261966 - DNA, 20 bp, Artificial Sequence
  Description of Artificial Sequence: Synthetic oligonucleotide
  Target: LAMA2; (-) strand; PAM type: YTN; PAM sequence: CTG
ggtagtagtgccgaagcaat

SEQ ID NO: 261967 - DNA, 20 bp, Artificial Sequence
  Description of Artificial Sequence: Synthetic oligonucleotide
  Target: LAMA2; (-) strand; PAM type: YTN; PAM sequence: TTC
agagcactgggtagtagtgc

SEQ ID NO: 261968 - DNA, 20 bp, Artificial Sequence
  Description of Artificial Sequence: Synthetic oligonucleotide
  Target: LAMA2; (-) strand; PAM type: YTN; PAM sequence: CTT
cagagcactgggtagtagtg

SEQ ID NO: 261969 - DNA, 20 bp, Artificial Sequence
  Description of Artificial Sequence: Synthetic oligonucleotide
  Target: LAMA2; (-) strand; PAM type: YTN; PAM sequence: TTG
cttcagagcactgggtagta

SEQ ID NO: 261970 - DNA, 20 bp, Artificial Sequence
  Description of Artificial Sequence: Synthetic oligonucleotide
  Target: LAMA2; (-) strand; PAM type: YTN; PAM sequence: TTT
gcttcagagcactgggtagt

SEQ ID NO: 261971 - DNA, 20 bp, Artificial Sequence
  Description of Artificial Sequence: Synthetic oligonucleotide
  Target: LAMA2; (-) strand; PAM type: YTN; PAM sequence: TTT
tgcttcagagcactgggtag

SEQ ID NO: 261972 - DNA, 20 bp, Artificial Sequence
  Description of Artificial Sequence: Synthetic oligonucleotide
  Target: LAMA2; (-) strand; PAM type: YTN; PAM sequence: CTT
ttgcttcagagcactgggta

SEQ ID NO: 261973 - DNA, 20 bp, Artificial Sequence
  Description of Artificial Sequence: Synthetic oligonucleotide
  Target: LAMA2; (-) strand; PAM type: YTN; PAM sequence: CTC
acccacgtccggatcagtcc

SEQ ID NO: 261974 - DNA, 20 bp, Artificial Sequence
  Description of Artificial Sequence: Synthetic oligonucleotide
  Target: LAMA2; (-) strand; PAM type: YTN; PAM sequence: CTA
ctcacccacgtccggatcag

SEQ ID NO: 261975 - DNA, 20 bp, Artificial Sequence
  Description of Artificial Sequence: Synthetic oligonucleotide
  Target: LAMA2; (-) strand; PAM type: YTN; PAM sequence: TTC
cctactcacccacgtccgga

SEQ ID NO: 261976 - DNA, 20 bp, Artificial Sequence
  Description of Artificial Sequence: Synthetic oligonucleotide
  Target: LAMA2; (-) strand; PAM type: YTN; PAM sequence: CTC
agcagttccctactcaccca

SEQ ID NO: 261977 - DNA, 20 bp, Artificial Sequence
  Description of Artificial Sequence: Synthetic oligonucleotide
  Target: LAMA2; (-) strand; PAM type: YTN; PAM sequence: TTA
catggctcagcagttcccta

SEQ ID NO: 261978 - DNA, 20 bp, Artificial Sequence
  Description of Artificial Sequence: Synthetic oligonucleotide
  Target: LAMA2; (-) strand; PAM type: YTN; PAM sequence: TTA
taccattacatggctcagca

SEQ ID NO: 261979 - DNA, 20 bp, Artificial Sequence
  Description of Artificial Sequence: Synthetic oligonucleotide
  Target: LAMA2; (-) strand; PAM type: YTN; PAM sequence: CTA
acattataccattacatggc

SEQ ID NO: 261980 - DNA, 20 bp, Artificial Sequence
  Description of Artificial Sequence: Synthetic oligonucleotide
  Target: LAMA2; (-) strand; PAM type: YTN; PAM sequence: CTA
aaagacaccagcaggaacta

SEQ ID NO: 261981 - DNA, 20 bp, Artificial Sequence
  Description of Artificial Sequence: Synthetic oligonucleotide
  Target: LAMA2; (-) strand; PAM type: YTN; PAM sequence: CTG
actaaaagacaccagcagga

SEQ ID NO: 261982 - DNA, 20 bp, Artificial Sequence
  Description of Artificial Sequence: Synthetic oligonucleotide
  Target: LAMA2; (-) strand; PAM type: YTN; PAM sequence: CTC
agtgcctgactaaaagacac

SEQ ID NO: 261983 - DNA, 20 bp, Artificial Sequence
  Description of Artificial Sequence: Synthetic oligonucleotide
  Target: LAMA2; (-) strand; PAM type: YTN; PAM sequence: CTA
cccctcagtgcctgactaaa

SEQ ID NO: 261984 - DNA, 20 bp, Artificial Sequence
  Description of Artificial Sequence: Synthetic oligonucleotide
  Target: LAMA2; (-) strand; PAM type: YTN; PAM sequence: CTA
ctacccctcagtgcctgact

SEQ ID NO: 261985 - DNA, 20 bp, Artificial Sequence
  Description of Artificial Sequence: Synthetic oligonucleotide
  Target: LAMA2; (-) strand; PAM type: YTN; PAM sequence: TTC
tactacccctcagtgcctga

SEQ ID NO: 261986 - DNA, 20 bp, Artificial Sequence
  Description of Artificial Sequence: Synthetic oligonucleotide
  Target: LAMA2; (-) strand; PAM type: YTN; PAM sequence: TTT
ctactacccctcagtgcctg

SEQ ID NO: 261987 - DNA, 20 bp, Artificial Sequence
  Description of Artificial Sequence: Synthetic oligonucleotide
  Target: LAMA2; (-) strand; PAM type: YTN; PAM sequence: TTT
tctactacccctcagtgcct

SEQ ID NO: 261988 - DNA, 20 bp, Artificial Sequence
  Description of Artificial Sequence: Synthetic oligonucleotide
  Target: LAMA2; (-) strand; PAM type: YTN; PAM sequence: TTG
ccattttctactacccctca

SEQ ID NO: 261989 - DNA, 20 bp, Artificial Sequence
  Description of Artificial Sequence: Synthetic oligonucleotide
  Target: LAMA2; (-) strand; PAM type: YTN; PAM sequence: TTT
gccattttctactacccctc

SEQ ID NO: 261990 - DNA, 20 bp, Artificial Sequence
  Description of Artificial Sequence: Synthetic oligonucleotide
  Target: LAMA2; (-) strand; PAM type: YTN; PAM sequence: TTT
tgccattttctactacccct

SEQ ID NO: 261991 - DNA, 20 bp, Artificial Sequence
  Description of Artificial Sequence: Synthetic oligonucleotide
  Target: LAMA2; (-) strand; PAM type: YTN; PAM sequence: TTA
aatgttttgccattttctac

SEQ ID NO: 261992 - DNA, 20 bp, Artificial Sequence
  Description of Artificial Sequence: Synthetic oligonucleotide
  Target: LAMA2; (-) strand; PAM type: YTN; PAM sequence: CTT
aaatgttttgccattttcta

SEQ ID NO: 261993 - DNA, 20 bp, Artificial Sequence
  Description of Artificial Sequence: Synthetic oligonucleotide
  Target: LAMA2; (-) strand; PAM type: YTN; PAM sequence: TTA
cttaaatgttttgccatttt

SEQ ID NO: 261994 - DNA, 20 bp, Artificial Sequence
  Description of Artificial Sequence: Synthetic oligonucleotide
  Target: LAMA2; (-) strand; PAM type: YTN; PAM sequence: TTC
acagaggaaaaggttactta

SEQ ID NO: 261995 - DNA, 20 bp, Artificial Sequence
  Description of Artificial Sequence: Synthetic oligonucleotide
  Target: LAMA2; (-) strand; PAM type: YTN; PAM sequence: CTA
aatgttcacagaggaaaagg

SEQ ID NO: 261996 - DNA, 20 bp, Artificial Sequence
  Description of Artificial Sequence: Synthetic oligonucleotide
  Target: LAMA2; (-) strand; PAM type: YTN; PAM sequence: TTC
ctaaatgttcacagaggaaa

SEQ ID NO: 261997 - DNA, 20 bp, Artificial Sequence
  Description of Artificial Sequence: Synthetic oligonucleotide
  Target: LAMA2; (-) strand; PAM type: YTN; PAM sequence: CTG
ttcctaaatgttcacagagg

SEQ ID NO: 261998 - DNA, 20 bp, Artificial Sequence
  Description of Artificial Sequence: Synthetic oligonucleotide
  Target: LAMA2; (-) strand; PAM type: YTN; PAM sequence: TTG
ctgttcctaaatgttcacag

SEQ ID NO: 261999 - DNA, 20 bp, Artificial Sequence
  Description of Artificial Sequence: Synthetic oligonucleotide
  Target: LAMA2; (-) strand; PAM type: YTN; PAM sequence: TTT
gctgttcctaaatgttcaca

SEQ ID NO: 262000 - DNA, 20 bp, Artificial Sequence
  Description of Artificial Sequence: Synthetic oligonucleotide
  Target: LAMA2; (-) strand; PAM type: YTN; PAM sequence: CTT
tgctgttcctaaatgttcac

SEQ ID NO: 262001 - DNA, 20 bp, Artificial Sequence
  Description of Artificial Sequence: Synthetic oligonucleotide
  Target: LAMA2; (-) strand; PAM type: YTN; PAM sequence: CTA
atggcacgtgacccctttgc

SEQ ID NO: 262002 - DNA, 20 bp, Artificial Sequence
  Description of Artificial Sequence: Synthetic oligonucleotide
  Target: LAMA2; (-) strand; PAM type: YTN; PAM sequence: CTC
taatggcacgtgaccccttt

SEQ ID NO: 262003 - DNA, 20 bp, Artificial Sequence
  Description of Artificial Sequence: Synthetic oligonucleotide
  Target: LAMA2; (-) strand; PAM type: YTN; PAM sequence: CTC
tctaatggcacgtgacccct

SEQ ID NO: 262004 - DNA, 20 bp, Artificial Sequence
  Description of Artificial Sequence: Synthetic oligonucleotide
  Target: LAMA2; (-) strand; PAM type: YTN; PAM sequence: CTC
caactctctaatggcacgtg

SEQ ID NO: 262005 - DNA, 20 bp, Artificial Sequence
  Description of Artificial Sequence: Synthetic oligonucleotide
  Target: LAMA2; (-) strand; PAM type: YTN; PAM sequence: TTA
ctccaactctctaatggcac

SEQ ID NO: 262006 - DNA, 20 bp, Artificial Sequence
  Description of Artificial Sequence: Synthetic oligonucleotide
  Target: LAMA2; (-) strand; PAM type: YTN; PAM sequence: TTT
actccaactctctaatggca

SEQ ID NO: 262007 - DNA, 20 bp, Artificial Sequence
  Description of Artificial Sequence: Synthetic oligonucleotide
  Target: LAMA2; (-) strand; PAM type: YTN; PAM sequence: TTA
agaacaaataagaaaggcat

SEQ ID NO: 262008 - DNA, 20 bp, Artificial Sequence
  Description of Artificial Sequence: Synthetic oligonucleotide
  Target: LAMA2; (-) strand; PAM type: YTN; PAM sequence: TTT
aagaacaaataagaaaggca

SEQ ID NO: 262009 - DNA, 20 bp, Artificial Sequence
  Description of Artificial Sequence: Synthetic oligonucleotide
  Target: LAMA2; (-) strand; PAM type: YTN; PAM sequence: TTT
taagaacaaataagaaaggc

SEQ ID NO: 262010 - DNA, 20 bp, Artificial Sequence
  Description of Artificial Sequence: Synthetic oligonucleotide
  Target: LAMA2; (-) strand; PAM type: YTN; PAM sequence: CTT
ttaagaacaaataagaaagg

SEQ ID NO: 262011 - DNA, 20 bp, Artificial Sequence
  Description of Artificial Sequence: Synthetic oligonucleotide
  Target: LAMA2; (-) strand; PAM type: YTN; PAM sequence: CTA
cttttaagaacaaataagaa

SEQ ID NO: 262012 - DNA, 20 bp, Artificial Sequence
  Description of Artificial Sequence: Synthetic oligonucleotide
  Target: LAMA2; (-) strand; PAM type: YTN; PAM sequence: TTA
tcaataagtgaactactttt

SEQ ID NO: 262013 - DNA, 20 bp, Artificial Sequence
  Description of Artificial Sequence: Synthetic oligonucleotide
  Target: LAMA2; (-) strand; PAM type: YTN; PAM sequence: CTT
atcaataagtgaactacttt

SEQ ID NO: 262014 - DNA, 20 bp, Artificial Sequence
  Description of Artificial Sequence: Synthetic oligonucleotide
  Target: LAMA2; (-) strand; PAM type: YTN; PAM sequence: TTC
cttatcaataagtgaactac

SEQ ID NO: 262015 - DNA, 20 bp, Artificial Sequence
  Description of Artificial Sequence: Synthetic oligonucleotide
  Target: LAMA2; (-) strand; PAM type: YTN; PAM sequence: TTT
ccttatcaataagtgaacta

SEQ ID NO: 262016 - DNA, 20 bp, Artificial Sequence
  Description of Artificial Sequence: Synthetic oligonucleotide
  Target: LAMA2; (-) strand; PAM type: YTN; PAM sequence: CTA
tttccttatcaataagtgaa

SEQ ID NO: 262017 - DNA, 20 bp, Artificial Sequence
  Description of Artificial Sequence: Synthetic oligonucleotide
  Target: LAMA2; (-) strand; PAM type: YTN; PAM sequence: TTG
gcatctatttccttatcaat

SEQ ID NO: 262018 - DNA, 20 bp, Artificial Sequence
  Description of Artificial Sequence: Synthetic oligonucleotide
  Target: LAMA2; (-) strand; PAM type: YTN; PAM sequence: CTT
ggcatctatttccttatcaa

SEQ ID NO: 262019 - DNA, 20 bp, Artificial Sequence
  Description of Artificial Sequence: Synthetic oligonucleotide
  Target: LAMA2; (-) strand; PAM type: YTN; PAM sequence: TTC
acttggcatctatttcctta

SEQ ID NO: 262020 - DNA, 20 bp, Artificial Sequence
  Description of Artificial Sequence: Synthetic oligonucleotide
  Target: LAMA2; (-) strand; PAM type: YTN; PAM sequence: TTT
cacttggcatctatttcctt

SEQ ID NO: 262021 - DNA, 20 bp, Artificial Sequence
  Description of Artificial Sequence: Synthetic oligonucleotide
  Target: LAMA2; (-) strand; PAM type: YTN; PAM sequence: TTT
tcacttggcatctatttcct

SEQ ID NO: 262022 - DNA, 20 bp, Artificial Sequence
  Description of Artificial Sequence: Synthetic oligonucleotide
  Target: LAMA2; (-) strand; PAM type: YTN; PAM sequence: TTT
ttcacttggcatctatttcc

SEQ ID NO: 262023 - DNA, 20 bp, Artificial Sequence
  Description of Artificial Sequence: Synthetic oligonucleotide
  Target: LAMA2; (-) strand; PAM type: YTN; PAM sequence: CTT
tttcacttggcatctatttc

SEQ ID NO: 262024 - DNA, 20 bp, Artificial Sequence
  Description of Artificial Sequence: Synthetic oligonucleotide
  Target: LAMA2; (-) strand; PAM type: YTN; PAM sequence: CTC
tttttcacttggcatctatt

SEQ ID NO: 262025 - DNA, 20 bp, Artificial Sequence
  Description of Artificial Sequence: Synthetic oligonucleotide
  Target: LAMA2; (-) strand; PAM type: YTN; PAM sequence: TTC
ctctttttcacttggcatct

SEQ ID NO: 262026 - DNA, 20 bp, Artificial Sequence
  Description of Artificial Sequence: Synthetic oligonucleotide
  Target: LAMA2; (-) strand; PAM type: YTN; PAM sequence: TTC
ccggacaaggttcctctttt

SEQ ID NO: 262027 - DNA, 20 bp, Artificial Sequence
  Description of Artificial Sequence: Synthetic oligonucleotide
  Target: LAMA2; (-) strand; PAM type: YTN; PAM sequence: CTT
cccggacaaggttcctcttt

SEQ ID NO: 262028 - DNA, 20 bp, Artificial Sequence
  Description of Artificial Sequence: Synthetic oligonucleotide
  Target: LAMA2; (-) strand; PAM type: YTN; PAM sequence: CTC
aaaacataatgcttcccgga

SEQ ID NO: 262029 - DNA, 20 bp, Artificial Sequence
  Description of Artificial Sequence: Synthetic oligonucleotide
  Target: LAMA2; (-) strand; PAM type: YTN; PAM sequence: TTC
ccatctcaaaacataatgct

SEQ ID NO: 262030 - DNA, 20 bp, Artificial Sequence
  Description of Artificial Sequence: Synthetic oligonucleotide
  Target: LAMA2; (-) strand; PAM type: YTN; PAM sequence: CTT
cccatctcaaaacataatgc

SEQ ID NO: 262031 - DNA, 20 bp, Artificial Sequence
  Description of Artificial Sequence: Synthetic oligonucleotide
  Target: LAMA2; (-) strand; PAM type: YTN; PAM sequence: CTC
ttcccatctcaaaacataat

SEQ ID NO: 262032 - DNA, 20 bp, Artificial Sequence
  Description of Artificial Sequence: Synthetic oligonucleotide
  Target: LAMA2; (-) strand; PAM type: YTN; PAM sequence: CTC
actcttcccatctcaaaaca

SEQ ID NO: 262033 - DNA, 20 bp, Artificial Sequence
  Description of Artificial Sequence: Synthetic oligonucleotide
  Target: LAMA2; (-) strand; PAM type: YTN; PAM sequence: CTG
gtgccctcactcttcccatc

SEQ ID NO: 262034 - DNA, 20 bp, Artificial Sequence
  Description of Artificial Sequence: Synthetic oligonucleotide
  Target: LAMA2; (-) strand; PAM type: YTN; PAM sequence: CTC
tggtgccctcactcttccca

SEQ ID NO: 262035 - DNA, 20 bp, Artificial Sequence
  Description of Artificial Sequence: Synthetic oligonucleotide
  Target: LAMA2; (-) strand; PAM type: YTN; PAM sequence: TTC
atgctctggtgccctcactc

SEQ ID NO: 262036 - DNA, 20 bp, Artificial Sequence
  Description of Artificial Sequence: Synthetic oligonucleotide
  Target: LAMA2; (-) strand; PAM type: YTN; PAM sequence: CTC
atatcaacattcatgctctg

SEQ ID NO: 262037 - DNA, 20 bp, Artificial Sequence
  Description of Artificial Sequence: Synthetic oligonucleotide
  Target: LAMA2; (-) strand; PAM type: YTN; PAM sequence: TTA
gctcatatcaacattcatgc

SEQ ID NO: 262038 - DNA, 20 bp, Artificial Sequence
  Description of Artificial Sequence: Synthetic oligonucleotide
  Target: LAMA2; (-) strand; PAM type: YTN; PAM sequence: TTG
gtgtgttagctcatatcaac

SEQ ID NO: 262039 - DNA, 20 bp, Artificial Sequence
  Description of Artificial Sequence: Synthetic oligonucleotide
  Target: LAMA2; (-) strand; PAM type: YTN; PAM sequence: CTC
attggtgtgttagctcatat

SEQ ID NO: 262040 - DNA, 20 bp, Artificial Sequence
  Description of Artificial Sequence: Synthetic oligonucleotide
  Target: LAMA2; (-) strand; PAM type: YTN; PAM sequence: TTC
tcattggtgtgttagctcat

SEQ ID NO: 262041 - DNA, 20 bp, Artificial Sequence
  Description of Artificial Sequence: Synthetic oligonucleotide
  Target: LAMA2; (-) strand; PAM type: YTN; PAM sequence: CTG
gttctcattggtgtgttagc

SEQ ID NO: 262042 - DNA, 20 bp, Artificial Sequence
  Description of Artificial Sequence: Synthetic oligonucleotide
  Target: LAMA2; (-) strand; PAM type: YTN; PAM sequence: TTG
gaatgaatgtgtgacaagtc

SEQ ID NO: 262043 - DNA, 20 bp, Artificial Sequence
  Description of Artificial Sequence: Synthetic oligonucleotide
  Target: LAMA2; (-) strand; PAM type: YTN; PAM sequence: TTG
gttggaatgaatgtgtgaca

SEQ ID NO: 262044 - DNA, 20 bp, Artificial Sequence
  Description of Artificial Sequence: Synthetic oligonucleotide
  Target: LAMA2; (-) strand; PAM type: YTN; PAM sequence: CTA
aggttggttggaatgaatgt

SEQ ID NO: 262045 - DNA, 20 bp, Artificial Sequence
  Description of Artificial Sequence: Synthetic oligonucleotide
  Target: LAMA2; (-) strand; PAM type: YTN; PAM sequence: TTG
cctaaggttggttggaatga

SEQ ID NO: 262046 - DNA, 20 bp, Artificial Sequence
  Description of Artificial Sequence: Synthetic oligonucleotide
  Target: LAMA2; (-) strand; PAM type: YTN; PAM sequence: CTC
caaaaatcatgattgcctaa

SEQ ID NO: 262047 - DNA, 20 bp, Artificial Sequence
  Description of Artificial Sequence: Synthetic oligonucleotide
  Target: LAMA2; (-) strand; PAM type: YTN; PAM sequence: TTC
actccaaaaatcatgattgc

SEQ ID NO: 262048 - DNA, 20 bp, Artificial Sequence
  Description of Artificial Sequence: Synthetic oligonucleotide
  Target: LAMA2; (-) strand; PAM type: YTN; PAM sequence: TTT
cactccaaaaatcatgattg

SEQ ID NO: 262049 - DNA, 20 bp, Artificial Sequence
  Description of Artificial Sequence: Synthetic oligonucleotide
  Target: LAMA2; (-) strand; PAM type: YTN; PAM sequence: TTT
tcactccaaaaatcatgatt

SEQ ID NO: 262050 - DNA, 20 bp, Artificial Sequence
  Description of Artificial Sequence: Synthetic oligonucleotide
  Target: LAMA2; (-) strand; PAM type: YTN; PAM sequence: TTA
aaggaaaatgaaaaatgaac

SEQ ID NO: 262051 - DNA, 20 bp, Artificial Sequence
  Description of Artificial Sequence: Synthetic oligonucleotide
  Target: LAMA2; (-) strand; PAM type: YTN; PAM sequence: CTA
aatgtagaaagagttaaagg

SEQ ID NO: 262052 - DNA, 20 bp, Artificial Sequence
  Description of Artificial Sequence: Synthetic oligonucleotide
  Target: LAMA2; (-) strand; PAM type: YTN; PAM sequence: TTG
aatctaaatgtagaaagagt

SEQ ID NO: 262053 - DNA, 20 bp, Artificial Sequence
  Description of Artificial Sequence: Synthetic oligonucleotide
  Target: LAMA2; (-) strand; PAM type: YTN; PAM sequence: CTA
acacaaattgaatctaaatg

SEQ ID NO: 262054 - DNA, 20 bp, Artificial Sequence
  Description of Artificial Sequence: Synthetic oligonucleotide
  Target: LAMA2; (-) strand; PAM type: YTN; PAM sequence: TTC
acactaacacaaattgaatc

SEQ ID NO: 262055 - DNA, 20 bp, Artificial Sequence
  Description of Artificial Sequence: Synthetic oligonucleotide
  Target: LAMA2; (-) strand; PAM type: YTN; PAM sequence: TTT
cacactaacacaaattgaat

SEQ ID NO: 262056 - DNA, 20 bp, Artificial Sequence
  Description of Artificial Sequence: Synthetic oligonucleotide
  Target: LAMA2; (-) strand; PAM type: YTN; PAM sequence: CTT
tcacactaacacaaattgaa

SEQ ID NO: 262057 - DNA, 20 bp, Artificial Sequence
  Description of Artificial Sequence: Synthetic oligonucleotide
  Target: LAMA2; (-) strand; PAM type: YTN; PAM sequence: CTG
gagcctttcacactaacaca

SEQ ID NO: 262058 - DNA, 20 bp, Artificial Sequence
  Description of Artificial Sequence: Synthetic oligonucleotide
  Target: LAMA2; (-) strand; PAM type: YTN; PAM sequence: CTG
tggacactggagcctttcac

SEQ ID NO: 262059 - DNA, 20 bp, Artificial Sequence
  Description of Artificial Sequence: Synthetic oligonucleotide
  Target: LAMA2; (-) strand; PAM type: YTN; PAM sequence: TTC
acatagtgaaagccacaata

SEQ ID NO: 262060 - DNA, 20 bp, Artificial Sequence
  Description of Artificial Sequence: Synthetic oligonucleotide
  Target: LAMA2; (-) strand; PAM type: YTN; PAM sequence: CTA
attcacatagtgaaagccac

SEQ ID NO: 262061 - DNA, 20 bp, Artificial Sequence
  Description of Artificial Sequence: Synthetic oligonucleotide
  Target: LAMA2; (-) strand; PAM type: YTN; PAM sequence: TTG
actaattcacatagtgaaag

SEQ ID NO: 262062 - DNA, 20 bp, Artificial Sequence
  Description of Artificial Sequence: Synthetic oligonucleotide
  Target: LAMA2; (-) strand; PAM type: YTN; PAM sequence: TTT
gactaattcacatagtgaaa

SEQ ID NO: 262063 - DNA, 20 bp, Artificial Sequence
  Description of Artificial Sequence: Synthetic oligonucleotide
  Target: LAMA2; (-) strand; PAM type: YTN; PAM sequence: TTT
tgactaattcacatagtgaa

SEQ ID NO: 262064 - DNA, 20 bp, Artificial Sequence
  Description of Artificial Sequence: Synthetic oligonucleotide
  Target: LAMA2; (-) strand; PAM type: YTN; PAM sequence: TTT
ttgactaattcacatagtga

SEQ ID NO: 262065 - DNA, 20 bp, Artificial Sequence
  Description of Artificial Sequence: Synthetic oligonucleotide
  Target: LAMA2; (-) strand; PAM type: YTN; PAM sequence: CTT
tttgactaattcacatagtg

SEQ ID NO: 262066 - DNA, 20 bp, Artificial Sequence
  Description of Artificial Sequence: Synthetic oligonucleotide
  Target: LAMA2; (-) strand; PAM type: YTN; PAM sequence: CTC
acacgcagtgggcaagcatg

SEQ ID NO: 262067 - DNA, 20 bp, Artificial Sequence
  Description of Artificial Sequence: Synthetic oligonucleotide
  Target: LAMA2; (-) strand; PAM type: YTN; PAM sequence: CTC
acaagcaacagaactcacac

SEQ ID NO: 262068 - DNA, 20 bp, Artificial Sequence
  Description of Artificial Sequence: Synthetic oligonucleotide
  Target: LAMA2; (-) strand; PAM type: YTN; PAM sequence: TTC
tcacaagcaacagaactcac

SEQ ID NO: 262069 - DNA, 20 bp, Artificial Sequence
  Description of Artificial Sequence: Synthetic oligonucleotide
  Target: LAMA2; (-) strand; PAM type: YTN; PAM sequence: CTG
atgatgttctcacaagcaac

SEQ ID NO: 262070 - DNA, 20 bp, Artificial Sequence
  Description of Artificial Sequence: Synthetic oligonucleotide
  Target: LAMA2; (-) strand; PAM type: YTN; PAM sequence: TTC
tgatgatgttctcacaagca

SEQ ID NO: 262071 - DNA, 20 bp, Artificial Sequence
  Description of Artificial Sequence: Synthetic oligonucleotide
  Target: LAMA2; (-) strand; PAM type: YTN; PAM sequence: CTA
tacccattctgatgatgttc

SEQ ID NO: 262072 - DNA, 20 bp, Artificial Sequence
  Description of Artificial Sequence: Synthetic oligonucleotide
  Target: LAMA2; (-) strand; PAM type: YTN; PAM sequence: TTC
ctatacccattctgatgatg

SEQ ID NO: 262073 - DNA, 20 bp, Artificial Sequence
  Description of Artificial Sequence: Synthetic oligonucleotide
  Target: LAMA2; (-) strand; PAM type: YTN; PAM sequence: CTG
cagttcctatacccattctg

SEQ ID NO: 262074 - DNA, 20 bp, Artificial Sequence
  Description of Artificial Sequence: Synthetic oligonucleotide
  Target: LAMA2; (-) strand; PAM type: YTN; PAM sequence: CTA
tctgcagttcctatacccat

SEQ ID NO: 262075 - DNA, 20 bp, Artificial Sequence
  Description of Artificial Sequence: Synthetic oligonucleotide
  Target: LAMA2; (-) strand; PAM type: YTN; PAM sequence: CTG
catgtctatctgcagttcct

SEQ ID NO: 262076 - DNA, 20 bp, Artificial Sequence
  Description of Artificial Sequence: Synthetic oligonucleotide
  Target: LAMA2; (-) strand; PAM type: YTN; PAM sequence: TTA
cgaactgcatgtctatctgc

SEQ ID NO: 262077 - DNA, 20 bp, Artificial Sequence
  Description of Artificial Sequence: Synthetic oligonucleotide
  Target: LAMA2; (-) strand; PAM type: YTN; PAM sequence: CTA
agttacgaactgcatgtcta

SEQ ID NO: 262078 - DNA, 20 bp, Artificial Sequence
  Description of Artificial Sequence: Synthetic oligonucleotide
  Target: LAMA2; (-) strand; PAM type: YTN; PAM sequence: TTA
aaactaagttacgaactgca

SEQ ID NO: 262079 - DNA, 20 bp, Artificial Sequence
  Description of Artificial Sequence: Synthetic oligonucleotide
  Target: LAMA2; (-) strand; PAM type: YTN; PAM sequence: TTT
aaaactaagttacgaactgc

SEQ ID NO: 262080 - DNA, 20 bp, Artificial Sequence
  Description of Artificial Sequence: Synthetic oligonucleotide
  Target: LAMA2; (-) strand; PAM type: YTN; PAM sequence: CTT
taaaactaagttacgaactg

SEQ ID NO: 262081 - DNA, 20 bp, Artificial Sequence
  Description of Artificial Sequence: Synthetic oligonucleotide
  Target: LAMA2; (-) strand; PAM type: YTN; PAM sequence: TTC
tttaaaactaagttacgaac

SEQ ID NO: 262082 - DNA, 20 bp, Artificial Sequence
  Description of Artificial Sequence: Synthetic oligonucleotide
  Target: LAMA2; (-) strand; PAM type: YTN; PAM sequence: TTT
ctttaaaactaagttacgaa

SEQ ID NO: 262083 - DNA, 20 bp, Artificial Sequence
  Description of Artificial Sequence: Synthetic oligonucleotide
  Target: LAMA2; (-) strand; PAM type: YTN; PAM sequence: TTG
gacatttctttaaaactaag

SEQ ID NO: 262084 - DNA, 20 bp, Artificial Sequence
  Description of Artificial Sequence: Synthetic oligonucleotide
  Target: LAMA2; (-) strand; PAM type: YTN; PAM sequence: TTT
ggacatttctttaaaactaa

SEQ ID NO: 262085 - DNA, 20 bp, Artificial Sequence
  Description of Artificial Sequence: Synthetic oligonucleotide
  Target: LAMA2; (-) strand; PAM type: YTN; PAM sequence: CTT
tggacatttctttaaaacta

SEQ ID NO: 262086 - DNA, 20 bp, Artificial Sequence
  Description of Artificial Sequence: Synthetic oligonucleotide
  Target: LAMA2; (-) strand; PAM type: YTN; PAM sequence: TTA
cgctttggacatttctttaa

SEQ ID NO: 262087 - DNA, 20 bp, Artificial Sequence
  Description of Artificial Sequence: Synthetic oligonucleotide
  Target: LAMA2; (-) strand; PAM type: YTN; PAM sequence: TTT
acgctttggacatttcttta

SEQ ID NO: 262088 - DNA, 20 bp, Artificial Sequence
  Description of Artificial Sequence: Synthetic oligonucleotide
  Target: LAMA2; (-) strand; PAM type: YTN; PAM sequence: CTG
aatttacgctttggacattt

SEQ ID NO: 262089 - DNA, 20 bp, Artificial Sequence
  Description of Artificial Sequence: Synthetic oligonucleotide
  Target: LAMA2; (-) strand; PAM type: YTN; PAM sequence: CTG
caaggggtcaaaatacagca

SEQ ID NO: 262090 - DNA, 20 bp, Artificial Sequence
  Description of Artificial Sequence: Synthetic oligonucleotide
  Target: LAMA2; (-) strand; PAM type: YTN; PAM sequence: TTC
agagtcacctgcaaggggtc

SEQ ID NO: 262091 - DNA, 20 bp, Artificial Sequence
  Description of Artificial Sequence: Synthetic oligonucleotide
  Target: LAMA2; (-) strand; PAM type: YTN; PAM sequence: CTT
cagagtcacctgcaaggggt

SEQ ID NO: 262092 - DNA, 20 bp, Artificial Sequence
  Description of Artificial Sequence: Synthetic oligonucleotide
  Target: LAMA2; (-) strand; PAM type: YTN; PAM sequence: CTC
agccttcagagtcacctgca

SEQ ID NO: 262093 - DNA, 20 bp, Artificial Sequence
  Description of Artificial Sequence: Synthetic oligonucleotide
  Target: LAMA2; (-) strand; PAM type: YTN; PAM sequence: CTG
ctcagccttcagagtcacct

SEQ ID NO: 262094 - DNA, 20 bp, Artificial Sequence
  Description of Artificial Sequence: Synthetic oligonucleotide
  Target: LAMA2; (-) strand; PAM type: YTN; PAM sequence: CTA
ccaggggtagaatggtctgc

SEQ ID NO: 262095 - DNA, 20 bp, Artificial Sequence
  Description of Artificial Sequence: Synthetic oligonucleotide
  Target: LAMA2; (-) strand; PAM type: YTN; PAM sequence: CTC
atctaccaggggtagaatgg

SEQ ID NO: 262096 - DNA, 20 bp, Artificial Sequence
  Description of Artificial Sequence: Synthetic oligonucleotide
  Target: LAMA2; (-) strand; PAM type: YTN; PAM sequence: CTG
cagagcctcatctaccaggg

SEQ ID NO: 262097 - DNA, 20 bp, Artificial Sequence
  Description of Artificial Sequence: Synthetic oligonucleotide
  Target: LAMA2; (-) strand; PAM type: YTN; PAM sequence: TTG
gtggtcgtgtgctgcagagc

SEQ ID NO: 262098 - DNA, 20 bp, Artificial Sequence
  Description of Artificial Sequence: Synthetic oligonucleotide
  Target: LAMA2; (-) strand; PAM type: YTN; PAM sequence: CTT
ggtggtcgtgtgctgcagag

SEQ ID NO: 262099 - DNA, 20 bp, Artificial Sequence
  Description of Artificial Sequence: Synthetic oligonucleotide
  Target: LAMA2; (-) strand; PAM type: YTN; PAM sequence: TTG
aaaaacaatgcccttggtgg

SEQ ID NO: 262100 - DNA, 20 bp, Artificial Sequence
  Description of Artificial Sequence: Synthetic oligonucleotide
  Target: LAMA2; (-) strand; PAM type: YTN; PAM sequence: CTG
gatgttgaaaaacaatgccc

SEQ ID NO: 262101 - DNA, 20 bp, Artificial Sequence
  Description of Artificial Sequence: Synthetic oligonucleotide
  Target: LAMA2; (-) strand; PAM type: YTN; PAM sequence: CTC
tggatgttgaaaaacaatgc

SEQ ID NO: 262102 - DNA, 20 bp, Artificial Sequence
  Description of Artificial Sequence: Synthetic oligonucleotide
  Target: LAMA2; (-) strand; PAM type: YTN; PAM sequence: CTC
atcaggtccatgtgggcaac

SEQ ID NO: 262103 - DNA, 20 bp, Artificial Sequence
  Description of Artificial Sequence: Synthetic oligonucleotide
  Target: LAMA2; (-) strand; PAM type: YTN; PAM sequence: CTC
tcatcaggtccatgtgggca

SEQ ID NO: 262104 - DNA, 20 bp, Artificial Sequence
  Description of Artificial Sequence: Synthetic oligonucleotide
  Target: LAMA2; (-) strand; PAM type: YTN; PAM sequence: TTC
tctcatcaggtccatgtggg

SEQ ID NO: 262105 - DNA, 20 bp, Artificial Sequence
  Description of Artificial Sequence: Synthetic oligonucleotide
  Target: LAMA2; (-) strand; PAM type: YTN; PAM sequence: CTT
ctctcatcaggtccatgtgg

SEQ ID NO: 262106 - DNA, 20 bp, Artificial Sequence
  Description of Artificial Sequence: Synthetic oligonucleotide
  Target: LAMA2; (-) strand; PAM type: YTN; PAM sequence: TTC
caaatggagatcttctctca

SEQ ID NO: 262107 - DNA, 20 bp, Artificial Sequence
  Description of Artificial Sequence: Synthetic oligonucleotide
  Target: LAMA2; (-) strand; PAM type: YTN; PAM sequence: TTC
caataaaaaggttccaaatg

SEQ ID NO: 262108 - DNA, 20 bp, Artificial Sequence
  Description of Artificial Sequence: Synthetic oligonucleotide
  Target: LAMA2; (-) strand; PAM type: YTN; PAM sequence: TTT
ccaataaaaaggttccaaat

SEQ ID NO: 262109 - DNA, 20 bp, Artificial Sequence
  Description of Artificial Sequence: Synthetic oligonucleotide
  Target: LAMA2; (-) strand; PAM type: YTN; PAM sequence: CTG
gaagtttccaataaaaaggt

SEQ ID NO: 262110 - DNA, 20 bp, Artificial Sequence
  Description of Artificial Sequence: Synthetic oligonucleotide
  Target: LAMA2; (-) strand; PAM type: YTN; PAM sequence: TTC
tggaagtttccaataaaaag

SEQ ID NO: 262111 - DNA, 20 bp, Artificial Sequence
  Description of Artificial Sequence: Synthetic oligonucleotide
  Target: LAMA2; (-) strand; PAM type: YTN; PAM sequence: TTG
ttctggaagtttccaataaa

SEQ ID NO: 262112 - DNA, 20 bp, Artificial Sequence
  Description of Artificial Sequence: Synthetic oligonucleotide
  Target: LAMA2; (-) strand; PAM type: YTN; PAM sequence: TTC
aaattgttctggaagtttcc

SEQ ID NO: 262113 - DNA, 20 bp, Artificial Sequence
  Description of Artificial Sequence: Synthetic oligonucleotide
  Target: LAMA2; (-) strand; PAM type: YTN; PAM sequence: CTT
caaattgttctggaagtttc

SEQ ID NO: 262114 - DNA, 20 bp, Artificial Sequence
  Description of Artificial Sequence: Synthetic oligonucleotide
  Target: LAMA2; (-) strand; PAM type: YTN; PAM sequence: TTC
cttcaaattgttctggaagt

SEQ ID NO: 262115 - DNA, 20 bp, Artificial Sequence
  Description of Artificial Sequence: Synthetic oligonucleotide
  Target: LAMA2; (-) strand; PAM type: YTN; PAM sequence: TTT
ccttcaaattgttctggaag

SEQ ID NO: 262116 - DNA, 20 bp, Artificial Sequence
  Description of Artificial Sequence: Synthetic oligonucleotide
  Target: LAMA2; (-) strand; PAM type: YTN; PAM sequence: CTT
tccttcaaattgttctggaa

SEQ ID NO: 262117 - DNA, 20 bp, Artificial Sequence
  Description of Artificial Sequence: Synthetic oligonucleotide
  Target: LAMA2; (-) strand; PAM type: YTN; PAM sequence: TTC
tttccttcaaattgttctgg

SEQ ID NO: 262118 - DNA, 20 bp, Artificial Sequence
  Description of Artificial Sequence: Synthetic oligonucleotide
  Target: LAMA2; (-) strand; PAM type: YTN; PAM sequence: CTT
ctttccttcaaattgttctg

SEQ ID NO: 262119 - DNA, 20 bp, Artificial Sequence
  Description of Artificial Sequence: Synthetic oligonucleotide
  Target: LAMA2; (-) strand; PAM type: YTN; PAM sequence: TTA
ccttctttccttcaaattgt

SEQ ID NO: 262120 - DNA, 20 bp, Artificial Sequence
  Description of Artificial Sequence: Synthetic oligonucleotide
  Target: LAMA2; (-) strand; PAM type: YTN; PAM sequence: CTT
accttctttccttcaaattg

SEQ ID NO: 262121 - DNA, 20 bp, Artificial Sequence
  Description of Artificial Sequence: Synthetic oligonucleotide
  Target: LAMA2; (-) strand; PAM type: YTN; PAM sequence: TTG
tgcttaccttctttccttca

SEQ ID NO: 262122 - DNA, 20 bp, Artificial Sequence
  Description of Artificial Sequence: Synthetic oligonucleotide
  Target: LAMA2; (-) strand; PAM type: YTN; PAM sequence: CTT
gtgcttaccttctttccttc

SEQ ID NO: 262123 - DNA, 20 bp, Artificial Sequence
  Description of Artificial Sequence: Synthetic oligonucleotide
  Target: LAMA2; (-) strand; PAM type: YTN; PAM sequence: TTC
ttgtgcttaccttctttcct

SEQ ID NO: 262124 - DNA, 20 bp, Artificial Sequence
  Description of Artificial Sequence: Synthetic oligonucleotide
  Target: LAMA2; (-) strand; PAM type: YTN; PAM sequence: TTA
aagttcttgtgcttaccttc

SEQ ID NO: 262125 - DNA, 20 bp, Artificial Sequence
  Description of Artificial Sequence: Synthetic oligonucleotide
  Target: LAMA2; (-) strand; PAM type: YTN; PAM sequence: TTG
acattaaagttcttgtgctt

SEQ ID NO: 262126 - DNA, 20 bp, Artificial Sequence
  Description of Artificial Sequence: Synthetic oligonucleotide
  Target: LAMA2; (-) strand; PAM type: YTN; PAM sequence: CTT
gacattaaagttcttgtgct

SEQ ID NO: 262127 - DNA, 20 bp, Artificial Sequence
  Description of Artificial Sequence: Synthetic oligonucleotide
  Target: LAMA2; (-) strand; PAM type: YTN; PAM sequence: CTC
acttgacattaaagttcttg

SEQ ID NO: 262128 - DNA, 20 bp, Artificial Sequence
  Description of Artificial Sequence: Synthetic oligonucleotide
  Target: LAMA2; (-) strand; PAM type: YTN; PAM sequence: TTC
tcacttgacattaaagttct

SEQ ID NO: 262129 - DNA, 20 bp, Artificial Sequence
  Description of Artificial Sequence: Synthetic oligonucleotide
  Target: LAMA2; (-) strand; PAM type: YTN; PAM sequence: TTG
ttctcacttgacattaaagt

SEQ ID NO: 262130 - DNA, 20 bp, Artificial Sequence
  Description of Artificial Sequence: Synthetic oligonucleotide
  Target: LAMA2; (-) strand; PAM type: YTN; PAM sequence: CTT
gttctcacttgacattaaag

SEQ ID NO: 262131 - DNA, 20 bp, Artificial Sequence
  Description of Artificial Sequence: Synthetic oligonucleotide
  Target: LAMA2; (-) strand; PAM type: YTN; PAM sequence: TTA
tcttgttctcacttgacatt

SEQ ID NO: 262132 - DNA, 20 bp, Artificial Sequence
  Description of Artificial Sequence: Synthetic oligonucleotide
  Target: LAMA2; (-) strand; PAM type: YTN; PAM sequence: TTT
atcttgttctcacttgacat

SEQ ID NO: 262133 - DNA, 20 bp, Artificial Sequence
  Description of Artificial Sequence: Synthetic oligonucleotide
  Target: LAMA2; (-) strand; PAM type: YTN; PAM sequence: TTT
tatcttgttctcacttgaca

SEQ ID NO: 262134 - DNA, 20 bp, Artificial Sequence
  Description of Artificial Sequence: Synthetic oligonucleotide
  Target: LAMA2; (-) strand; PAM type: YTN; PAM sequence: CTA
aaaagattttatcttgttct

SEQ ID NO: 262135 - DNA, 20 bp, Artificial Sequence
  Description of Artificial Sequence: Synthetic oligonucleotide
  Target: LAMA2; (-) strand; PAM type: YTN; PAM sequence: TTC
taaaaagattttatcttgtt

SEQ ID NO: 262136 - DNA, 20 bp, Artificial Sequence
  Description of Artificial Sequence: Synthetic oligonucleotide
  Target: LAMA2; (-) strand; PAM type: YTN; PAM sequence: CTC
caaatggtgtgattctaaaa

SEQ ID NO: 262137 - DNA, 20 bp, Artificial Sequence
  Description of Artificial Sequence: Synthetic oligonucleotide
  Target: LAMA2; (-) strand; PAM type: YTN; PAM sequence: TTG
gataaatctccaaatggtgt

SEQ ID NO: 262138 - DNA, 20 bp, Artificial Sequence
  Description of Artificial Sequence: Synthetic oligonucleotide
  Target: LAMA2; (-) strand; PAM type: YTN; PAM sequence: CTG
acaaaataaaaagaagaatg

SEQ ID NO: 262139 - DNA, 20 bp, Artificial Sequence
  Description of Artificial Sequence: Synthetic oligonucleotide
  Target: LAMA2; (-) strand; PAM type: YTN; PAM sequence: TTG
cccccataggccatcaactg

SEQ ID NO: 262140 - DNA, 20 bp, Artificial Sequence
  Description of Artificial Sequence: Synthetic oligonucleotide
  Target: LAMA2; (-) strand; PAM type: YTN; PAM sequence: TTT
gcccccataggccatcaact

SEQ ID NO: 262141 - DNA, 20 bp, Artificial Sequence
  Description of Artificial Sequence: Synthetic oligonucleotide
  Target: LAMA2; (-) strand; PAM type: YTN; PAM sequence: TTG
agtttgcccccataggccat

SEQ ID NO: 262142 - DNA, 20 bp, Artificial Sequence
  Description of Artificial Sequence: Synthetic oligonucleotide
  Target: LAMA2; (-) strand; PAM type: YTN; PAM sequence: CTT
gagtttgcccccataggcca

SEQ ID NO: 262143 - DNA, 20 bp, Artificial Sequence
  Description of Artificial Sequence: Synthetic oligonucleotide
  Target: LAMA2; (-) strand; PAM type: YTN; PAM sequence: TTG
catacttgagtttgccccca

SEQ ID NO: 262144 - DNA, 20 bp, Artificial Sequence
  Description of Artificial Sequence: Synthetic oligonucleotide
  Target: LAMA2; (-) strand; PAM type: YTN; PAM sequence: CTC
gaaatagattgcatacttga

SEQ ID NO: 262145 - DNA, 20 bp, Artificial Sequence
  Description of Artificial Sequence: Synthetic oligonucleotide
  Target: LAMA2; (-) strand; PAM type: YTN; PAM sequence: TTC
ccgagcctcgaaatagattg

SEQ ID NO: 262146 - DNA, 20 bp, Artificial Sequence
  Description of Artificial Sequence: Synthetic oligonucleotide
  Target: LAMA2; (-) strand; PAM type: YTN; PAM sequence: CTT
cccgagcctcgaaatagatt

SEQ ID NO: 262147 - DNA, 20 bp, Artificial Sequence
  Description of Artificial Sequence: Synthetic oligonucleotide
  Target: LAMA2; (-) strand; PAM type: YTN; PAM sequence: TTC
ttcccgagcctcgaaataga

SEQ ID NO: 262148 - DNA, 20 bp, Artificial Sequence
  Description of Artificial Sequence: Synthetic oligonucleotide
  Target: LAMA2; (-) strand; PAM type: YTN; PAM sequence: TTT
cttcccgagcctcgaaatag

SEQ ID NO: 262149 - DNA, 20 bp, Artificial Sequence
  Description of Artificial Sequence: Synthetic oligonucleotide
  Target: LAMA2; (-) strand; PAM type: YTN; PAM sequence: CTG
tttcttcccgagcctcgaaa

SEQ ID NO: 262150 - DNA, 20 bp, Artificial Sequence
  Description of Artificial Sequence: Synthetic oligonucleotide
  Target: LAMA2; (-) strand; PAM type: YTN; PAM sequence: TTA
tatgtagagaaacctgtttc

SEQ ID NO: 262151 - DNA, 20 bp, Artificial Sequence
  Description of Artificial Sequence: Synthetic oligonucleotide
  Target: LAMA2; (-) strand; PAM type: YTN; PAM sequence: TTG
aggattatatgtagagaaac

SEQ ID NO: 262152 - DNA, 20 bp, Artificial Sequence
  Description of Artificial Sequence: Synthetic oligonucleotide
  Target: LAMA2; (-) strand; PAM type: YTN; PAM sequence: CTT
gaggattatatgtagagaaa

SEQ ID NO: 262153 - DNA, 20 bp, Artificial Sequence
  Description of Artificial Sequence: Synthetic oligonucleotide
  Target: LAMA2; (-) strand; PAM type: YTN; PAM sequence: CTC
gaatgatcacttgaggatta

SEQ ID NO: 262154 - DNA, 20 bp, Artificial Sequence
  Description of Artificial Sequence: Synthetic oligonucleotide
  Target: LAMA2; (-) strand; PAM type: YTN; PAM sequence: CTA
gcatgagtaggtgtcccacc

SEQ ID NO: 262155 - DNA, 20 bp, Artificial Sequence
  Description of Artificial Sequence: Synthetic oligonucleotide
  Target: LAMA2; (-) strand; PAM type: YTN; PAM sequence: TTC
tagcatgagtaggtgtccca

SEQ ID NO: 262156 - DNA, 20 bp, Artificial Sequence
  Description of Artificial Sequence: Synthetic oligonucleotide
  Target: LAMA2; (-) strand; PAM type: YTN; PAM sequence: CTG
acgataattctagcatgagt

SEQ ID NO: 262157 - DNA, 20 bp, Artificial Sequence
  Description of Artificial Sequence: Synthetic oligonucleotide
  Target: LAMA2; (-) strand; PAM type: YTN; PAM sequence: TTG
gccaatcagaggagcagcca

SEQ ID NO: 262158 - DNA, 20 bp, Artificial Sequence
  Description of Artificial Sequence: Synthetic oligonucleotide
  Target: LAMA2; (-) strand; PAM type: YTN; PAM sequence: TTG
tcaattggccaatcagagga

SEQ ID NO: 262159 - DNA, 20 bp, Artificial Sequence
  Description of Artificial Sequence: Synthetic oligonucleotide
  Target: LAMA2; (-) strand; PAM type: YTN; PAM sequence: CTT
gtcaattggccaatcagagg

SEQ ID NO: 262160 - DNA, 20 bp, Artificial Sequence
  Description of Artificial Sequence: Synthetic oligonucleotide
  Target: LAMA2; (-) strand; PAM type: YTN; PAM sequence: TTC
atgccttgtcaattggccaa

SEQ ID NO: 262161 - DNA, 20 bp, Artificial Sequence
  Description of Artificial Sequence: Synthetic oligonucleotide
  Target: LAMA2; (-) strand; PAM type: YTN; PAM sequence: TTT
catgccttgtcaattggcca

SEQ ID NO: 262162 - DNA, 20 bp, Artificial Sequence
  Description of Artificial Sequence: Synthetic oligonucleotide
  Target: LAMA2; (-) strand; PAM type: YTN; PAM sequence: TTC
aatttcatgccttgtcaatt

SEQ ID NO: 262163 - DNA, 20 bp, Artificial Sequence
  Description of Artificial Sequence: Synthetic oligonucleotide
  Target: LAMA2; (-) strand; PAM type: YTN; PAM sequence: TTT
caatttcatgccttgtcaat

SEQ ID NO: 262164 - DNA, 20 bp, Artificial Sequence
  Description of Artificial Sequence: Synthetic oligonucleotide
  Target: LAMA2; (-) strand; PAM type: YTN; PAM sequence: CTG
tcatttcaatttcatgcctt

SEQ ID NO: 262165 - DNA, 20 bp, Artificial Sequence
  Description of Artificial Sequence: Synthetic oligonucleotide
  Target: LAMA2; (-) strand; PAM type: YTN; PAM sequence: CTC
tgtcatttcaatttcatgcc

SEQ ID NO: 262166 - DNA, 20 bp, Artificial Sequence
  Description of Artificial Sequence: Synthetic oligonucleotide
  Target: LAMA2; (-) strand; PAM type: YTN; PAM sequence: TTA
cctctgtcatttcaatttca

SEQ ID NO: 262167 - DNA, 20 bp, Artificial Sequence
  Description of Artificial Sequence: Synthetic oligonucleotide
  Target: LAMA2; (-) strand; PAM type: YTN; PAM sequence: TTT
acctctgtcatttcaatttc

SEQ ID NO: 262168 - DNA, 20 bp, Artificial Sequence
  Description of Artificial Sequence: Synthetic oligonucleotide
  Target: LAMA2; (-) strand; PAM type: YTN; PAM sequence: CTT
tacctctgtcatttcaattt

SEQ ID NO: 262169 - DNA, 20 bp, Artificial Sequence
  Description of Artificial Sequence: Synthetic oligonucleotide
  Target: LAMA2; (-) strand; PAM type: YTN; PAM sequence: CTA
actttacctctgtcatttca

SEQ ID NO: 262170 - DNA, 20 bp, Artificial Sequence
  Description of Artificial Sequence: Synthetic oligonucleotide
  Target: LAMA2; (-) strand; PAM type: YTN; PAM sequence: TTG
caccaaacaatgactaactt

SEQ ID NO: 262171 - DNA, 20 bp, Artificial Sequence
  Description of Artificial Sequence: Synthetic oligonucleotide
  Target: LAMA2; (-) strand; PAM type: YTN; PAM sequence: TTT
gcaccaaacaatgactaact

SEQ ID NO: 262172 - DNA, 20 bp, Artificial Sequence
  Description of Artificial Sequence: Synthetic oligonucleotide
  Target: LAMA2; (-) strand; PAM type: YTN; PAM sequence: CTT
tgcaccaaacaatgactaac

SEQ ID NO: 262173 - DNA, 20 bp, Artificial Sequence
  Description of Artificial Sequence: Synthetic oligonucleotide
  Target: LAMA2; (-) strand; PAM type: YTN; PAM sequence: TTG
gtatctttgcaccaaacaat

SEQ ID NO: 262174 - DNA, 20 bp, Artificial Sequence
  Description of Artificial Sequence: Synthetic oligonucleotide
  Target: LAMA2; (-) strand; PAM type: YTN; PAM sequence: TTG
attggtatctttgcaccaaa

SEQ ID NO: 262175 - DNA, 20 bp, Artificial Sequence
  Description of Artificial Sequence: Synthetic oligonucleotide
  Target: LAMA2; (-) strand; PAM type: YTN; PAM sequence: CTG
aatgcaaaaccattgattgg

SEQ ID NO: 262176 - DNA, 20 bp, Artificial Sequence
  Description of Artificial Sequence: Synthetic oligonucleotide
  Target: LAMA2; (-) strand; PAM type: YTN; PAM sequence: CTA
tgacaaaactgaatgcaaaa

SEQ ID NO: 262177 - DNA, 20 bp, Artificial Sequence
  Description of Artificial Sequence: Synthetic oligonucleotide
  Target: LAMA2; (-) strand; PAM type: YTN; PAM sequence: TTA
acaagaagagaaatcactat

SEQ ID NO: 262178 - DNA, 20 bp, Artificial Sequence
  Description of Artificial Sequence: Synthetic oligonucleotide
  Target: LAMA2; (-) strand; PAM type: YTN; PAM sequence: CTG
ttaacaagaagagaaatcac

SEQ ID NO: 262179 - DNA, 20 bp, Artificial Sequence
  Description of Artificial Sequence: Synthetic oligonucleotide
  Target: LAMA2; (-) strand; PAM type: YTN; PAM sequence: TTC
tgttaacaagaagagaaatc

SEQ ID NO: 262180 - DNA, 20 bp, Artificial Sequence
  Description of Artificial Sequence: Synthetic oligonucleotide
  Target: LAMA2; (-) strand; PAM type: YTN; PAM sequence: TTT
ctgttaacaagaagagaaat

SEQ ID NO: 262181 - DNA, 20 bp, Artificial Sequence
  Description of Artificial Sequence: Synthetic oligonucleotide
  Target: LAMA2; (-) strand; PAM type: YTN; PAM sequence: CTT
tctgttaacaagaagagaaa

SEQ ID NO: 262182 - DNA, 20 bp, Artificial Sequence
  Description of Artificial Sequence: Synthetic oligonucleotide
  Target: LAMA2; (-) strand; PAM type: YTN; PAM sequence: TTC
tttctgttaacaagaagaga

SEQ ID NO: 262183 - DNA, 20 bp, Artificial Sequence
  Description of Artificial Sequence: Synthetic oligonucleotide
  Target: LAMA2; (-) strand; PAM type: YTN; PAM sequence: TTC
cattctttctgttaacaaga

SEQ ID NO: 262184 - DNA, 20 bp, Artificial Sequence
  Description of Artificial Sequence: Synthetic oligonucleotide
  Target: LAMA2; (-) strand; PAM type: YTN; PAM sequence: TTT
ccattctttctgttaacaag

SEQ ID NO: 262185 - DNA, 20 bp, Artificial Sequence
  Description of Artificial Sequence: Synthetic oligonucleotide
  Target: LAMA2; (-) strand; PAM type: YTN; PAM sequence: CTC
gaggatcatccccataatat

SEQ ID NO: 262186 - DNA, 20 bp, Artificial Sequence
  Description of Artificial Sequence: Synthetic oligonucleotide
  Target: LAMA2; (-) strand; PAM type: YTN; PAM sequence: CTA
tggactcgaggatcatcccc

SEQ ID NO: 262187 - DNA, 20 bp, Artificial Sequence
  Description of Artificial Sequence: Synthetic oligonucleotide
  Target: LAMA2; (-) strand; PAM type: YTN; PAM sequence: TTC
tatggactcgaggatcatcc

SEQ ID NO: 262188 - DNA, 20 bp, Artificial Sequence
  Description of Artificial Sequence: Synthetic oligonucleotide
  Target: LAMA2; (-) strand; PAM type: YTN; PAM sequence: CTC
gggtcacagttctatggact

SEQ ID NO: 262189 - DNA, 20 bp, Artificial Sequence
  Description of Artificial Sequence: Synthetic oligonucleotide
  Target: LAMA2; (-) strand; PAM type: YTN; PAM sequence: TTC
tcgggtcacagttctatgga

SEQ ID NO: 262190 - DNA, 20 bp, Artificial Sequence
  Description of Artificial Sequence: Synthetic oligonucleotide
  Target: LAMA2; (-) strand; PAM type: YTN; PAM sequence: CTT
ctcgggtcacagttctatgg

SEQ ID NO: 262191 - DNA, 20 bp, Artificial Sequence
  Description of Artificial Sequence: Synthetic oligonucleotide
  Target: LAMA2; (-) strand; PAM type: YTN; PAM sequence: TTG
ataagaatgtaatgaatatc

SEQ ID NO: 262192 - DNA, 20 bp, Artificial Sequence
  Description of Artificial Sequence: Synthetic oligonucleotide
  Target: LAMA2; (-) strand; PAM type: YTN; PAM sequence: TTT
gataagaatgtaatgaatat

SEQ ID NO: 262193 - DNA, 20 bp, Artificial Sequence
  Description of Artificial Sequence: Synthetic oligonucleotide
  Target: LAMA2; (-) strand; PAM type: YTN; PAM sequence: CTT
tgataagaatgtaatgaata

SEQ ID NO: 262194 - DNA, 20 bp, Artificial Sequence
  Description of Artificial Sequence: Synthetic oligonucleotide
  Target: LAMA2; (-) strand; PAM type: YTN; PAM sequence: TTC
cataagtagctttgataaga

SEQ ID NO: 262195 - DNA, 20 bp, Artificial Sequence
  Description of Artificial Sequence: Synthetic oligonucleotide
  Target: LAMA2; (-) strand; PAM type: YTN; PAM sequence: TTT
ccataagtagctttgataag

SEQ ID NO: 262196 - DNA, 20 bp, Artificial Sequence
  Description of Artificial Sequence: Synthetic oligonucleotide
  Target: LAMA2; (-) strand; PAM type: YTN; PAM sequence: TTG
tcgcatgaaatttccataag

SEQ ID NO: 262197 - DNA, 20 bp, Artificial Sequence
  Description of Artificial Sequence: Synthetic oligonucleotide
  Target: LAMA2; (-) strand; PAM type: YTN; PAM sequence: TTT
gtcgcatgaaatttccataa

SEQ ID NO: 262198 - DNA, 20 bp, Artificial Sequence
  Description of Artificial Sequence: Synthetic oligonucleotide
  Target: LAMA2; (-) strand; PAM type: YTN; PAM sequence: CTT
tgtcgcatgaaatttccata

SEQ ID NO: 262199 - DNA, 20 bp, Artificial Sequence
  Description of Artificial Sequence: Synthetic oligonucleotide
  Target: LAMA2; (-) strand; PAM type: YTN; PAM sequence: CTG
ctttgtcgcatgaaatttcc

SEQ ID NO: 262200 - DNA, 20 bp, Artificial Sequence
  Description of Artificial Sequence: Synthetic oligonucleotide
  Target: LAMA2; (-) strand; PAM type: YTN; PAM sequence: TTA
cctgctttgtcgcatgaaat

SEQ ID NO: 262201 - DNA, 20 bp, Artificial Sequence
  Description of Artificial Sequence: Synthetic oligonucleotide
  Target: LAMA2; (-) strand; PAM type: YTN; PAM sequence: TTT
acctgctttgtcgcatgaaa

SEQ ID NO: 262202 - DNA, 20 bp, Artificial Sequence
  Description of Artificial Sequence: Synthetic oligonucleotide
  Target: LAMA2; (-) strand; PAM type: YTN; PAM sequence: TTA
gagtttacctgctttgtcgc

SEQ ID NO: 262203 - DNA, 20 bp, Artificial Sequence
  Description of Artificial Sequence: Synthetic oligonucleotide
  Target: LAMA2; (-) strand; PAM type: YTN; PAM sequence: CTA
ttagagtttacctgctttgt

SEQ ID NO: 262204 - DNA, 20 bp, Artificial Sequence
  Description of Artificial Sequence: Synthetic oligonucleotide
  Target: LAMA2; (-) strand; PAM type: YTN; PAM sequence: TTC
tattagagtttacctgcttt

SEQ ID NO: 262205 - DNA, 20 bp, Artificial Sequence
  Description of Artificial Sequence: Synthetic oligonucleotide
  Target: LAMA2; (-) strand; PAM type: YTN; PAM sequence: TTT
ctattagagtttacctgctt

SEQ ID NO: 262206 - DNA, 20 bp, Artificial Sequence
  Description of Artificial Sequence: Synthetic oligonucleotide
  Target: LAMA2; (-) strand; PAM type: YTN; PAM sequence: TTT
tctattagagtttacctgct

SEQ ID NO: 262207 - DNA, 20 bp, Artificial Sequence
  Description of Artificial Sequence: Synthetic oligonucleotide
  Target: LAMA2; (-) strand; PAM type: YTN; PAM sequence: TTG
aatattttctattagagttt

SEQ ID NO: 262208 - DNA, 20 bp, Artificial Sequence
  Description of Artificial Sequence: Synthetic oligonucleotide
  Target: LAMA2; (-) strand; PAM type: YTN; PAM sequence: CTT
gaatattttctattagagtt

SEQ ID NO: 262209 - DNA, 20 bp, Artificial Sequence
  Description of Artificial Sequence: Synthetic oligonucleotide
  Target: LAMA2; (-) strand; PAM type: YTN; PAM sequence: CTA
aaataagagcttgaatattt

SEQ ID NO: 262210 - DNA, 20 bp, Artificial Sequence
  Description of Artificial Sequence: Synthetic oligonucleotide
  Target: LAMA2; (-) strand; PAM type: YTN; PAM sequence: CTC
taaaataagagcttgaatat

SEQ ID NO: 262211 - DNA, 20 bp, Artificial Sequence
  Description of Artificial Sequence: Synthetic oligonucleotide
  Target: LAMA2; (-) strand; PAM type: YTN; PAM sequence: TTA
cagactctaaaataagagct

SEQ ID NO: 262212 - DNA, 20 bp, Artificial Sequence
  Description of Artificial Sequence: Synthetic oligonucleotide
  Target: LAMA2; (-) strand; PAM type: YTN; PAM sequence: CTT
acagactctaaaataagagc

SEQ ID NO: 262213 - DNA, 20 bp, Artificial Sequence
  Description of Artificial Sequence: Synthetic oligonucleotide
  Target: LAMA2; (-) strand; PAM type: YTN; PAM sequence: TTC
cttacagactctaaaataag

SEQ ID NO: 262214 - DNA, 20 bp, Artificial Sequence
  Description of Artificial Sequence: Synthetic oligonucleotide
  Target: LAMA2; (-) strand; PAM type: YTN; PAM sequence: CTT
ccttacagactctaaaataa

SEQ ID NO: 262215 - DNA, 20 bp, Artificial Sequence
  Description of Artificial Sequence: Synthetic oligonucleotide
  Target: LAMA2; (-) strand; PAM type: YTN; PAM sequence: CTG
taggtcaataaccttcctta

SEQ ID NO: 262216 - DNA, 20 bp, Artificial Sequence
  Description of Artificial Sequence: Synthetic oligonucleotide
  Target: LAMA2; (-) strand; PAM type: YTN; PAM sequence: CTG
atatctgtaggtcaataacc

SEQ ID NO: 262217 - DNA, 20 bp, Artificial Sequence
  Description of Artificial Sequence: Synthetic oligonucleotide
  Target: LAMA2; (-) strand; PAM type: YTN; PAM sequence: TTA
tctgatatctgtaggtcaat

SEQ ID NO: 262218 - DNA, 20 bp, Artificial Sequence
  Description of Artificial Sequence: Synthetic oligonucleotide
  Target: LAMA2; (-) strand; PAM type: YTN; PAM sequence: CTT
atctgatatctgtaggtcaa

SEQ ID NO: 262219 - DNA, 20 bp, Artificial Sequence
  Description of Artificial Sequence: Synthetic oligonucleotide
  Target: LAMA2; (-) strand; PAM type: YTN; PAM sequence: TTC
ttatctgatatctgtaggtc

SEQ ID NO: 262220 - DNA, 20 bp, Artificial Sequence
  Description of Artificial Sequence: Synthetic oligonucleotide
  Target: LAMA2; (-) strand; PAM type: YTN; PAM sequence: TTT
cttatctgatatctgtaggt

SEQ ID NO: 262221 - DNA, 20 bp, Artificial Sequence
  Description of Artificial Sequence: Synthetic oligonucleotide
  Target: LAMA2; (-) strand; PAM type: YTN; PAM sequence: CTT
tcttatctgatatctgtagg

SEQ ID NO: 262222 - DNA, 20 bp, Artificial Sequence
  Description of Artificial Sequence: Synthetic oligonucleotide
  Target: LAMA2; (-) strand; PAM type: YTN; PAM sequence: TTC
caatctttcttatctgatat

SEQ ID NO: 262223 - DNA, 20 bp, Artificial Sequence
  Description of Artificial Sequence: Synthetic oligonucleotide
  Target: LAMA2; (-) strand; PAM type: YTN; PAM sequence: TTT
ccaatctttcttatctgata

SEQ ID NO: 262224 - DNA, 20 bp, Artificial Sequence
  Description of Artificial Sequence: Synthetic oligonucleotide
  Target: LAMA2; (-) strand; PAM type: YTN; PAM sequence: CTT
tccaatctttcttatctgat

SEQ ID NO: 262225 - DNA, 20 bp, Artificial Sequence
  Description of Artificial Sequence: Synthetic oligonucleotide
  Target: LAMA2; (-) strand; PAM type: YTN; PAM sequence: CTG
caaaaccaatcactttccaa

SEQ ID NO: 262226 - DNA, 20 bp, Artificial Sequence
  Description of Artificial Sequence: Synthetic oligonucleotide
  Target: LAMA2; (-) strand; PAM type: YTN; PAM sequence: TTA
tactgcaaaaccaatcactt

SEQ ID NO: 262227 - DNA, 20 bp, Artificial Sequence
  Description of Artificial Sequence: Synthetic oligonucleotide
  Target: LAMA2; (-) strand; PAM type: YTN; PAM sequence: CTA
tcattatactgcaaaaccaa

SEQ ID NO: 262228 - DNA, 20 bp, Artificial Sequence
  Description of Artificial Sequence: Synthetic oligonucleotide
  Target: LAMA2; (-) strand; PAM type: YTN; PAM sequence: TTC
tatcattatactgcaaaacc

SEQ ID NO: 262229 - DNA, 20 bp, Artificial Sequence
  Description of Artificial Sequence: Synthetic oligonucleotide
  Target: LAMA2; (-) strand; PAM type: YTN; PAM sequence: CTT
ctatcattatactgcaaaac

SEQ ID NO: 262230 - DNA, 20 bp, Artificial Sequence
  Description of Artificial Sequence: Synthetic oligonucleotide
  Target: LAMA2; (-) strand; PAM type: YTN; PAM sequence: TTA
tcttctatcattatactgca

SEQ ID NO: 262231 - DNA, 20 bp, Artificial Sequence
  Description of Artificial Sequence: Synthetic oligonucleotide
  Target: LAMA2; (-) strand; PAM type: YTN; PAM sequence: TTT
atcttctatcattatactgc

SEQ ID NO: 262232 - DNA, 20 bp, Artificial Sequence
  Description of Artificial Sequence: Synthetic oligonucleotide
  Target: LAMA2; (-) strand; PAM type: YTN; PAM sequence: CTC
catggtttatcttctatcat

SEQ ID NO: 262233 - DNA, 20 bp, Artificial Sequence
  Description of Artificial Sequence: Synthetic oligonucleotide
  Target: LAMA2; (-) strand; PAM type: YTN; PAM sequence: TTC
caggtcacagggaagcctcc

SEQ ID NO: 262234 - DNA, 20 bp, Artificial Sequence
  Description of Artificial Sequence: Synthetic oligonucleotide
  Target: LAMA2; (-) strand; PAM type: YTN; PAM sequence: CTT
ccaggtcacagggaagcctc

SEQ ID NO: 262235 - DNA, 20 bp, Artificial Sequence
  Description of Artificial Sequence: Synthetic oligonucleotide
  Target: LAMA2; (-) strand; PAM type: YTN; PAM sequence: TTC
ttccaggtcacagggaagcc

SEQ ID NO: 262236 - DNA, 20 bp, Artificial Sequence
  Description of Artificial Sequence: Synthetic oligonucleotide
  Target: LAMA2; (-) strand; PAM type: YTN; PAM sequence: CTT
cttccaggtcacagggaagc

SEQ ID NO: 262237 - DNA, 20 bp, Artificial Sequence
  Description of Artificial Sequence: Synthetic oligonucleotide
  Target: LAMA2; (-) strand; PAM type: YTN; PAM sequence: CTG
atgaatggtagtagcttctt

SEQ ID NO: 262238 - DNA, 20 bp, Artificial Sequence
  Description of Artificial Sequence: Synthetic oligonucleotide
  Target: LAMA2; (-) strand; PAM type: YTN; PAM sequence: TTC
tgatgaatggtagtagcttc

SEQ ID NO: 262239 - DNA, 20 bp, Artificial Sequence
  Description of Artificial Sequence: Synthetic oligonucleotide
  Target: LAMA2; (-) strand; PAM type: YTN; PAM sequence: TTT
ctgatgaatggtagtagctt

SEQ ID NO: 262240 - DNA, 20 bp, Artificial Sequence
  Description of Artificial Sequence: Synthetic oligonucleotide
  Target: LAMA2; (-) strand; PAM type: YTN; PAM sequence: TTT
tctgatgaatggtagtagct

SEQ ID NO: 262241 - DNA, 20 bp, Artificial Sequence
  Description of Artificial Sequence: Synthetic oligonucleotide
  Target: LAMA2; (-) strand; PAM type: YTN; PAM sequence: CTT
ttctgatgaatggtagtagc

SEQ ID NO: 262242 - DNA, 20 bp, Artificial Sequence
  Description of Artificial Sequence: Synthetic oligonucleotide
  Target: LAMA2; (-) strand; PAM type: YTN; PAM sequence: TTC
ttttctgatgaatggtagta

SEQ ID NO: 262243 - DNA, 20 bp, Artificial Sequence
  Description of Artificial Sequence: Synthetic oligonucleotide
  Target: LAMA2; (-) strand; PAM type: YTN; PAM sequence: TTT
cttttctgatgaatggtagt

SEQ ID NO: 262244 - DNA, 20 bp, Artificial Sequence
  Description of Artificial Sequence: Synthetic oligonucleotide
  Target: LAMA2; (-) strand; PAM type: YTN; PAM sequence: TTT
tcttttctgatgaatggtag

SEQ ID NO: 262245 - DNA, 20 bp, Artificial Sequence
  Description of Artificial Sequence: Synthetic oligonucleotide
  Target: LAMA2; (-) strand; PAM type: YTN; PAM sequence: TTT
ttcttttctgatgaatggta

SEQ ID NO: 262246 - DNA, 20 bp, Artificial Sequence
  Description of Artificial Sequence: Synthetic oligonucleotide
  Target: LAMA2; (-) strand; PAM type: YTN; PAM sequence: CTA
tttttcttttctgatgaatg

SEQ ID NO: 262247 - DNA, 20 bp, Artificial Sequence
  Description of Artificial Sequence: Synthetic oligonucleotide
  Target: LAMA2; (-) strand; PAM type: YTN; PAM sequence: CTC
atgctatttttcttttctga

SEQ ID NO: 262248 - DNA, 20 bp, Artificial Sequence
  Description of Artificial Sequence: Synthetic oligonucleotide
  Target: LAMA2; (-) strand; PAM type: YTN; PAM sequence: TTC
tcatgctatttttcttttct

SEQ ID NO: 262249 - DNA, 20 bp, Artificial Sequence
  Description of Artificial Sequence: Synthetic oligonucleotide
  Target: LAMA2; (-) strand; PAM type: YTN; PAM sequence: TTT
ctcatgctatttttcttttc

SEQ ID NO: 262250 - DNA, 20 bp, Artificial Sequence
  Description of Artificial Sequence: Synthetic oligonucleotide
  Target: LAMA2; (-) strand; PAM type: YTN; PAM sequence: TTA
acgtgtttctcatgctattt

SEQ ID NO: 262251 - DNA, 20 bp, Artificial Sequence
  Description of Artificial Sequence: Synthetic oligonucleotide
  Target: LAMA2; (-) strand; PAM type: YTN; PAM sequence: TTT
aacgtgtttctcatgctatt

SEQ ID NO: 262252 - DNA, 20 bp, Artificial Sequence
  Description of Artificial Sequence: Synthetic oligonucleotide
  Target: LAMA2; (-) strand; PAM type: YTN; PAM sequence: CTT
taacgtgtttctcatgctat

SEQ ID NO: 262253 - DNA, 20 bp, Artificial Sequence
  Description of Artificial Sequence: Synthetic oligonucleotide
  Target: LAMA2; (-) strand; PAM type: YTN; PAM sequence: TTC
cctttaacgtgtttctcatg

SEQ ID NO: 262254 - DNA, 20 bp, Artificial Sequence
  Description of Artificial Sequence: Synthetic oligonucleotide
  Target: LAMA2; (-) strand; PAM type: YTN; PAM sequence: TTT
ccctttaacgtgtttctcat

SEQ ID NO: 262255 - DNA, 20 bp, Artificial Sequence
  Description of Artificial Sequence: Synthetic oligonucleotide
  Target: LAMA2; (-) strand; PAM type: YTN; PAM sequence: TTT
tccctttaacgtgtttctca

SEQ ID NO: 262256 - DNA, 20 bp, Artificial Sequence
  Description of Artificial Sequence: Synthetic oligonucleotide
  Target: LAMA2; (-) strand; PAM type: YTN; PAM sequence: TTT
ttccctttaacgtgtttctc

SEQ ID NO: 262257 - DNA, 20 bp, Artificial Sequence
  Description of Artificial Sequence: Synthetic oligonucleotide
  Target: LAMA2; (-) strand; PAM type: YTN; PAM sequence: TTT
tttccctttaacgtgtttct

SEQ ID NO: 262258 - DNA, 20 bp, Artificial Sequence
  Description of Artificial Sequence: Synthetic oligonucleotide
  Target: LAMA2; (-) strand; PAM type: YTN; PAM sequence: TTT
ttttccctttaacgtgtttc

SEQ ID NO: 262259 - DNA, 20 bp, Artificial Sequence
  Description of Artificial Sequence: Synthetic oligonucleotide
  Target: LAMA2; (-) strand; PAM type: YTN; PAM sequence: TTT
tttttccctttaacgtgttt

SEQ ID NO: 262260 - DNA, 20 bp, Artificial Sequence
  Description of Artificial Sequence: Synthetic oligonucleotide
  Target: LAMA2; (-) strand; PAM type: YTN; PAM sequence: TTT
ttttttccctttaacgtgtt

SEQ ID NO: 262261 - DNA, 20 bp, Artificial Sequence
  Description of Artificial Sequence: Synthetic oligonucleotide
  Target: LAMA2; (-) strand; PAM type: YTN; PAM sequence: TTC
catatttttttttcccttta

SEQ ID NO: 262262 - DNA, 20 bp, Artificial Sequence
  Description of Artificial Sequence: Synthetic oligonucleotide
  Target: LAMA2; (-) strand; PAM type: YTN; PAM sequence: CTG
cagtgaattccatatttttt

SEQ ID NO: 262263 - DNA, 20 bp, Artificial Sequence
  Description of Artificial Sequence: Synthetic oligonucleotide
  Target: LAMA2; (-) strand; PAM type: YTN; PAM sequence: CTA
tgtctgcagtgaattccata

SEQ ID NO: 262264 - DNA, 20 bp, Artificial Sequence
  Description of Artificial Sequence: Synthetic oligonucleotide
  Target: LAMA2; (-) strand; PAM type: YTN; PAM sequence: CTC
actatgtctgcagtgaattc

SEQ ID NO: 262265 - DNA, 20 bp, Artificial Sequence
  Description of Artificial Sequence: Synthetic oligonucleotide
  Target: LAMA2; (-) strand; PAM type: YTN; PAM sequence: TTA
aactcactatgtctgcagtg

SEQ ID NO: 262266 - DNA, 20 bp, Artificial Sequence
  Description of Artificial Sequence: Synthetic oligonucleotide
  Target: LAMA2; (-) strand; PAM type: YTN; PAM sequence: CTT
aaactcactatgtctgcagt

SEQ ID NO: 262267 - DNA, 20 bp, Artificial Sequence
  Description of Artificial Sequence: Synthetic oligonucleotide
  Target: LAMA2; (-) strand; PAM type: YTN; PAM sequence: CTG
gcatcttaaactcactatgt

SEQ ID NO: 262268 - DNA, 20 bp, Artificial Sequence
  Description of Artificial Sequence: Synthetic oligonucleotide
  Target: LAMA2; (-) strand; PAM type: YTN; PAM sequence: TTA
tgactggcatcttaaactca

SEQ ID NO: 262269 - DNA, 20 bp, Artificial Sequence
  Description of Artificial Sequence: Synthetic oligonucleotide
  Target: LAMA2; (-) strand; PAM type: YTN; PAM sequence: TTT
atgactggcatcttaaactc

SEQ ID NO: 262270 - DNA, 20 bp, Artificial Sequence
  Description of Artificial Sequence: Synthetic oligonucleotide
  Target: LAMA2; (-) strand; PAM type: YTN; PAM sequence: TTG
aatttatgactggcatctta

SEQ ID NO: 262271 - DNA, 20 bp, Artificial Sequence
  Description of Artificial Sequence: Synthetic oligonucleotide
  Target: LAMA2; (-) strand; PAM type: YTN; PAM sequence: CTT
gaatttatgactggcatctt

SEQ ID NO: 262272 - DNA, 20 bp, Artificial Sequence
  Description of Artificial Sequence: Synthetic oligonucleotide
  Target: LAMA2; (-) strand; PAM type: YTN; PAM sequence: CTC
ttgaatttatgactggcatc

SEQ ID NO: 262273 - DNA, 20 bp, Artificial Sequence
  Description of Artificial Sequence: Synthetic oligonucleotide
  Target: LAMA2; (-) strand; PAM type: YTN; PAM sequence: CTA
cagtatatgatctcttgaat

SEQ ID NO: 262274 - DNA, 20 bp, Artificial Sequence
  Description of Artificial Sequence: Synthetic oligonucleotide
  Target: LAMA2; (-) strand; PAM type: YTN; PAM sequence: CTG
atctacagtatatgatctct

SEQ ID NO: 262275 - DNA, 20 bp, Artificial Sequence
  Description of Artificial Sequence: Synthetic oligonucleotide
  Target: LAMA2; (-) strand; PAM type: YTN; PAM sequence: TTA
cctgatctacagtatatgat

SEQ ID NO: 262276 - DNA, 20 bp, Artificial Sequence
  Description of Artificial Sequence: Synthetic oligonucleotide
  Target: LAMA2; (-) strand; PAM type: YTN; PAM sequence: TTT
acctgatctacagtatatga

SEQ ID NO: 262277 - DNA, 20 bp, Artificial Sequence
  Description of Artificial Sequence: Synthetic oligonucleotide
  Target: LAMA2; (-) strand; PAM type: YTN; PAM sequence: TTT
tacctgatctacagtatatg

SEQ ID NO: 262278 - DNA, 20 bp, Artificial Sequence
  Description of Artificial Sequence: Synthetic oligonucleotide
  Target: LAMA2; (-) strand; PAM type: YTN; PAM sequence: TTA
attttacctgatctacagta

SEQ ID NO: 262279 - DNA, 20 bp, Artificial Sequence
  Description of Artificial Sequence: Synthetic oligonucleotide
  Target: LAMA2; (-) strand; PAM type: YTN; PAM sequence: TTA
taccacaacagttaatttta

SEQ ID NO: 262280 - DNA, 20 bp, Artificial Sequence
  Description of Artificial Sequence: Synthetic oligonucleotide
  Target: LAMA2; (-) strand; PAM type: YTN; PAM sequence: TTT
ataccacaacagttaatttt

SEQ ID NO: 262281 - DNA, 20 bp, Artificial Sequence
  Description of Artificial Sequence: Synthetic oligonucleotide
  Target: LAMA2; (-) strand; PAM type: YTN; PAM sequence: TTA
taatccatttataccacaac

SEQ ID NO: 262282 - DNA, 20 bp, Artificial Sequence
  Description of Artificial Sequence: Synthetic oligonucleotide
  Target: LAMA2; (-) strand; PAM type: YTN; PAM sequence: TTT
ataatccatttataccacaa

SEQ ID NO: 262283 - DNA, 20 bp, Artificial Sequence
  Description of Artificial Sequence: Synthetic oligonucleotide
  Target: LAMA2; (-) strand; PAM type: YTN; PAM sequence: TTT
tataatccatttataccaca

SEQ ID NO: 262284 - DNA, 20 bp, Artificial Sequence
  Description of Artificial Sequence: Synthetic oligonucleotide
  Target: LAMA2; (-) strand; PAM type: YTN; PAM sequence: CTT
ttataatccatttataccac

SEQ ID NO: 262285 - DNA, 20 bp, Artificial Sequence
  Description of Artificial Sequence: Synthetic oligonucleotide
  Target: LAMA2; (-) strand; PAM type: YTN; PAM sequence: CTC
agcacttttataatccattt

SEQ ID NO: 262286 - DNA, 20 bp, Artificial Sequence
  Description of Artificial Sequence: Synthetic oligonucleotide
  Target: LAMA2; (-) strand; PAM type: YTN; PAM sequence: TTC
tcagcacttttataatccat

SEQ ID NO: 262287 - DNA, 20 bp, Artificial Sequence
  Description of Artificial Sequence: Synthetic oligonucleotide
  Target: LAMA2; (-) strand; PAM type: YTN; PAM sequence: TTT
ctcagcacttttataatcca

SEQ ID NO: 262288 - DNA, 20 bp, Artificial Sequence
  Description of Artificial Sequence: Synthetic oligonucleotide
  Target: LAMA2; (-) strand; PAM type: YTN; PAM sequence: CTT
tctcagcacttttataatcc

SEQ ID NO: 262289 - DNA, 20 bp, Artificial Sequence
  Description of Artificial Sequence: Synthetic oligonucleotide
  Target: LAMA2; (-) strand; PAM type: YTN; PAM sequence: CTG
atgggtgaagaggtcacttt

SEQ ID NO: 262290 - DNA, 20 bp, Artificial Sequence
  Description of Artificial Sequence: Synthetic oligonucleotide
  Target: LAMA2; (-) strand; PAM type: YTN; PAM sequence: TTC
ccctgatgggtgaagaggtc

SEQ ID NO: 262291 - DNA, 20 bp, Artificial Sequence
  Description of Artificial Sequence: Synthetic oligonucleotide
  Target: LAMA2; (-) strand; PAM type: YTN; PAM sequence: CTG
gttcccctgatgggtgaaga

SEQ ID NO: 262292 - DNA, 20 bp, Artificial Sequence
  Description of Artificial Sequence: Synthetic oligonucleotide
  Target: LAMA2; (-) strand; PAM type: YTN; PAM sequence: CTG
cctggttcccctgatgggtg

SEQ ID NO: 262293 - DNA, 20 bp, Artificial Sequence
  Description of Artificial Sequence: Synthetic oligonucleotide
  Target: LAMA2; (-) strand; PAM type: YTN; PAM sequence: TTG
gccctgcctggttcccctga

SEQ ID NO: 262294 - DNA, 20 bp, Artificial Sequence
  Description of Artificial Sequence: Synthetic oligonucleotide
  Target: LAMA2; (-) strand; PAM type: YTN; PAM sequence: CTT
ggccctgcctggttcccctg

SEQ ID NO: 262295 - DNA, 20 bp, Artificial Sequence
  Description of Artificial Sequence: Synthetic oligonucleotide
  Target: LAMA2; (-) strand; PAM type: YTN; PAM sequence: CTG
gaccaacttggccctgcctg

SEQ ID NO: 262296 - DNA, 20 bp, Artificial Sequence
  Description of Artificial Sequence: Synthetic oligonucleotide
  Target: LAMA2; (-) strand; PAM type: YTN; PAM sequence: TTG
gaggagactggaccaacttg

SEQ ID NO: 262297 - DNA, 20 bp, Artificial Sequence
  Description of Artificial Sequence: Synthetic oligonucleotide
  Target: LAMA2; (-) strand; PAM type: YTN; PAM sequence: CTC
acagttggaggagactggac

SEQ ID NO: 262298 - DNA, 20 bp, Artificial Sequence
  Description of Artificial Sequence: Synthetic oligonucleotide
  Target: LAMA2; (-) strand; PAM type: YTN; PAM sequence: TTA
gaatgctcacagttggagga

SEQ ID NO: 262299 - DNA, 20 bp, Artificial Sequence
  Description of Artificial Sequence: Synthetic oligonucleotide
  Target: LAMA2; (-) strand; PAM type: YTN; PAM sequence: CTG
gggtgaacagattagaatgc

SEQ ID NO: 262300 - DNA, 20 bp, Artificial Sequence
  Description of Artificial Sequence: Synthetic oligonucleotide
  Target: LAMA2; (-) strand; PAM type: YTN; PAM sequence: TTG
tatggcacactggggtgaac

SEQ ID NO: 262301 - DNA, 20 bp, Artificial Sequence
  Description of Artificial Sequence: Synthetic oligonucleotide
  Target: LAMA2; (-) strand; PAM type: YTN; PAM sequence: CTC
aacatgatgcatagggaaaa

SEQ ID NO: 262302 - DNA, 20 bp, Artificial Sequence
  Description of Artificial Sequence: Synthetic oligonucleotide
  Target: LAMA2; (-) strand; PAM type: YTN; PAM sequence: TTC
tcaacatgatgcatagggaa

SEQ ID NO: 262303 - DNA, 20 bp, Artificial Sequence
  Description of Artificial Sequence: Synthetic oligonucleotide
  Target: LAMA2; (-) strand; PAM type: YTN; PAM sequence: TTT
ctcaacatgatgcataggga

SEQ ID NO: 262304 - DNA, 20 bp, Artificial Sequence
  Description of Artificial Sequence: Synthetic oligonucleotide
  Target: LAMA2; (-) strand; PAM type: YTN; PAM sequence: TTC
agaatcatttctcaacatga

SEQ ID NO: 262305 - DNA, 20 bp, Artificial Sequence
  Description of Artificial Sequence: Synthetic oligonucleotide
  Target: LAMA2; (-) strand; PAM type: YTN; PAM sequence: TTC
aaagtgattcagaatcattt

SEQ ID NO: 262306 - DNA, 20 bp, Artificial Sequence
  Description of Artificial Sequence: Synthetic oligonucleotide
  Target: LAMA2; (-) strand; PAM type: YTN; PAM sequence: TTT
caaagtgattcagaatcatt

SEQ ID NO: 262307 - DNA, 20 bp, Artificial Sequence
  Description of Artificial Sequence: Synthetic oligonucleotide
  Target: LAMA2; (-) strand; PAM type: YTN; PAM sequence: TTT
tcaaagtgattcagaatcat

SEQ ID NO: 262308 - DNA, 20 bp, Artificial Sequence
  Description of Artificial Sequence: Synthetic oligonucleotide
  Target: LAMA2; (-) strand; PAM type: YTN; PAM sequence: TTT
ttcaaagtgattcagaatca

SEQ ID NO: 262309 - DNA, 20 bp, Artificial Sequence
  Description of Artificial Sequence: Synthetic oligonucleotide
  Target: LAMA2; (-) strand; PAM type: YTN; PAM sequence: TTT
tttcaaagtgattcagaatc

SEQ ID NO: 262310 - DNA, 20 bp, Artificial Sequence
  Description of Artificial Sequence: Synthetic oligonucleotide
  Target: LAMA2; (-) strand; PAM type: YTN; PAM sequence: TTT
ttttcaaagtgattcagaat

SEQ ID NO: 262311 - DNA, 20 bp, Artificial Sequence
  Description of Artificial Sequence: Synthetic oligonucleotide
  Target: LAMA2; (-) strand; PAM type: YTN; PAM sequence: CTG
tgtgatttttttcaaagtga

SEQ ID NO: 262312 - DNA, 20 bp, Artificial Sequence
  Description of Artificial Sequence: Synthetic oligonucleotide
  Target: LAMA2; (-) strand; PAM type: YTN; PAM sequence: TTC
tgtgtgatttttttcaaagt

SEQ ID NO: 262313 - DNA, 20 bp, Artificial Sequence
  Description of Artificial Sequence: Synthetic oligonucleotide
  Target: LAMA2; (-) strand; PAM type: YTN; PAM sequence: CTG
ttctgtgtgatttttttcaa

SEQ ID NO: 262314 - DNA, 20 bp, Artificial Sequence
  Description of Artificial Sequence: Synthetic oligonucleotide
  Target: LAMA2; (-) strand; PAM type: YTN; PAM sequence: TTG
ctgttctgtgtgattttttt

SEQ ID NO: 262315 - DNA, 20 bp, Artificial Sequence
  Description of Artificial Sequence: Synthetic oligonucleotide
  Target: LAMA2; (-) strand; PAM type: YTN; PAM sequence: CTT
gctgttctgtgtgatttttt

SEQ ID NO: 262316 - DNA, 20 bp, Artificial Sequence
  Description of Artificial Sequence: Synthetic oligonucleotide
  Target: LAMA2; (-) strand; PAM type: YTN; PAM sequence: TTC
ttgctgttctgtgtgatttt

SEQ ID NO: 262317 - DNA, 20 bp, Artificial Sequence
  Description of Artificial Sequence: Synthetic oligonucleotide
  Target: LAMA2; (-) strand; PAM type: YTN; PAM sequence: TTC
attcttgctgttctgtgtga

SEQ ID NO: 262318 - DNA, 20 bp, Artificial Sequence
  Description of Artificial Sequence: Synthetic oligonucleotide
  Target: LAMA2; (-) strand; PAM type: YTN; PAM sequence: TTG
cattcattcttgctgttctg

SEQ ID NO: 262319 - DNA, 20 bp, Artificial Sequence
  Description of Artificial Sequence: Synthetic oligonucleotide
  Target: LAMA2; (-) strand; PAM type: YTN; PAM sequence: TTC
gacaacattgcattcattct

SEQ ID NO: 262320 - DNA, 20 bp, Artificial Sequence
  Description of Artificial Sequence: Synthetic oligonucleotide
  Target: LAMA2; (-) strand; PAM type: YTN; PAM sequence: TTC
ccatcatgtaggttcgacaa

SEQ ID NO: 262321 - DNA, 20 bp, Artificial Sequence
  Description of Artificial Sequence: Synthetic oligonucleotide
  Target: LAMA2; (-) strand; PAM type: YTN; PAM sequence: TTG
aagtattcccatcatgtagg

SEQ ID NO: 262322 - DNA, 20 bp, Artificial Sequence
  Description of Artificial Sequence: Synthetic oligonucleotide
  Target: LAMA2; (-) strand; PAM type: YTN; PAM sequence: CTT
gaagtattcccatcatgtag

SEQ ID NO: 262323 - DNA, 20 bp, Artificial Sequence
  Description of Artificial Sequence: Synthetic oligonucleotide
  Target: LAMA2; (-) strand; PAM type: YTN; PAM sequence: CTC
ccttgaagtattcccatcat

SEQ ID NO: 262324 - DNA, 20 bp, Artificial Sequence
  Description of Artificial Sequence: Synthetic oligonucleotide
  Target: LAMA2; (-) strand; PAM type: YTN; PAM sequence: TTG
gtcataagaaaacacggaat

SEQ ID NO: 262325 - DNA, 20 bp, Artificial Sequence
  Description of Artificial Sequence: Synthetic oligonucleotide
  Target: LAMA2; (-) strand; PAM type: YTN; PAM sequence: TTT
ggtcataagaaaacacggaa

SEQ ID NO: 262326 - DNA, 20 bp, Artificial Sequence
  Description of Artificial Sequence: Synthetic oligonucleotide
  Target: LAMA2; (-) strand; PAM type: YTN; PAM sequence: TTT
tggtcataagaaaacacgga

SEQ ID NO: 262327 - DNA, 20 bp, Artificial Sequence
  Description of Artificial Sequence: Synthetic oligonucleotide
  Target: LAMA2; (-) strand; PAM type: YTN; PAM sequence: TTG
gccaattttggtcataagaa

SEQ ID NO: 262328 - DNA, 20 bp, Artificial Sequence
  Description of Artificial Sequence: Synthetic oligonucleotide
  Target: LAMA2; (-) strand; PAM type: YTN; PAM sequence: TTC
agttggccaattttggtcat

SEQ ID NO: 262329 - DNA, 20 bp, Artificial Sequence
  Description of Artificial Sequence: Synthetic oligonucleotide
  Target: LAMA2; (-) strand; PAM type: YTN; PAM sequence: TTT
cagttggccaattttggtca

SEQ ID NO: 262330 - DNA, 20 bp, Artificial Sequence
  Description of Artificial Sequence: Synthetic oligonucleotide
  Target: LAMA2; (-) strand; PAM type: YTN; PAM sequence: CTC
atttcagttggccaattttg

SEQ ID NO: 262331 - DNA, 20 bp, Artificial Sequence
  Description of Artificial Sequence: Synthetic oligonucleotide
  Target: LAMA2; (-) strand; PAM type: YTN; PAM sequence: CTA
agtgtcagacccaacaagcc

SEQ ID NO: 262332 - DNA, 20 bp, Artificial Sequence
  Description of Artificial Sequence: Synthetic oligonucleotide
  Target: LAMA2; (-) strand; PAM type: YTN; PAM sequence: TTA
ccagtgtggtcctaagtgtc

SEQ ID NO: 262333 - DNA, 20 bp, Artificial Sequence
  Description of Artificial Sequence: Synthetic oligonucleotide
  Target: LAMA2; (-) strand; PAM type: YTN; PAM sequence: CTG
agaccggtatcatgaatgtt

SEQ ID NO: 262334 - DNA, 20 bp, Artificial Sequence
  Description of Artificial Sequence: Synthetic oligonucleotide
  Target: LAMA2; (-) strand; PAM type: YTN; PAM sequence: CTG
ccccaggacactgagaccgg

SEQ ID NO: 262335 - DNA, 20 bp, Artificial Sequence
  Description of Artificial Sequence: Synthetic oligonucleotide
  Target: LAMA2; (-) strand; PAM type: YTN; PAM sequence: TTC
tgccccaggacactgagacc

SEQ ID NO: 262336 - DNA, 20 bp, Artificial Sequence
  Description of Artificial Sequence: Synthetic oligonucleotide
  Target: LAMA2; (-) strand; PAM type: YTN; PAM sequence: TTA
attctgccccaggacactga

SEQ ID NO: 262337 - DNA, 20 bp, Artificial Sequence
  Description of Artificial Sequence: Synthetic oligonucleotide
  Target: LAMA2; (-) strand; PAM type: YTN; PAM sequence: TTG
agattaattctgccccagga

SEQ ID NO: 262338 - DNA, 20 bp, Artificial Sequence
  Description of Artificial Sequence: Synthetic oligonucleotide
  Target: LAMA2; (-) strand; PAM type: YTN; PAM sequence: CTT
gagattaattctgccccagg

SEQ ID NO: 262339 - DNA, 20 bp, Artificial Sequence
  Description of Artificial Sequence: Synthetic oligonucleotide
  Target: LAMA2; (-) strand; PAM type: YTN; PAM sequence: TTA
aaagcttgagattaattctg

SEQ ID NO: 262340 - DNA, 20 bp, Artificial Sequence
  Description of Artificial Sequence: Synthetic oligonucleotide
  Target: LAMA2; (-) strand; PAM type: YTN; PAM sequence: TTT
aaaagcttgagattaattct

SEQ ID NO: 262341 - DNA, 20 bp, Artificial Sequence
  Description of Artificial Sequence: Synthetic oligonucleotide
  Target: LAMA2; (-) strand; PAM type: YTN; PAM sequence: CTT
taaaagcttgagattaattc

SEQ ID NO: 262342 - DNA, 20 bp, Artificial Sequence
  Description of Artificial Sequence: Synthetic oligonucleotide
  Target: LAMA2; (-) strand; PAM type: YTN; PAM sequence: TTC
tttaaaagcttgagattaat

SEQ ID NO: 262343 - DNA, 20 bp, Artificial Sequence
  Description of Artificial Sequence: Synthetic oligonucleotide
  Target: LAMA2; (-) strand; PAM type: YTN; PAM sequence: TTT
ctttaaaagcttgagattaa

SEQ ID NO: 262344 - DNA, 20 bp, Artificial Sequence
  Description of Artificial Sequence: Synthetic oligonucleotide
  Target: LAMA2; (-) strand; PAM type: YTN; PAM sequence: CTT
tctttaaaagcttgagatta

SEQ ID NO: 262345 - DNA, 20 bp, Artificial Sequence
  Description of Artificial Sequence: Synthetic oligonucleotide
  Target: LAMA2; (-) strand; PAM type: YTN; PAM sequence: TTC
tttctttaaaagcttgagat

SEQ ID NO: 262346 - DNA, 20 bp, Artificial Sequence
  Description of Artificial Sequence: Synthetic oligonucleotide
  Target: LAMA2; (-) strand; PAM type: YTN; PAM sequence: CTC
atgtgtcacattctttcttt

SEQ ID NO: 262347 - DNA, 20 bp, Artificial Sequence
  Description of Artificial Sequence: Synthetic oligonucleotide
  Target: LAMA2; (-) strand; PAM type: YTN; PAM sequence: TTG
ggctcatgtgtcacattctt

SEQ ID NO: 262348 - DNA, 20 bp, Artificial Sequence
  Description of Artificial Sequence: Synthetic oligonucleotide
  Target: LAMA2; (-) strand; PAM type: YTN; PAM sequence: CTC
ataatattgggctcatgtgt

SEQ ID NO: 262349 - DNA, 20 bp, Artificial Sequence
  Description of Artificial Sequence: Synthetic oligonucleotide
  Target: LAMA2; (-) strand; PAM type: YTN; PAM sequence: TTA
cactcataatattgggctca

SEQ ID NO: 262350 - DNA, 20 bp, Artificial Sequence
  Description of Artificial Sequence: Synthetic oligonucleotide
  Target: LAMA2; (-) strand; PAM type: YTN; PAM sequence: TTT
acactcataatattgggctc

SEQ ID NO: 262351 - DNA, 20 bp, Artificial Sequence
  Description of Artificial Sequence: Synthetic oligonucleotide
  Target: LAMA2; (-) strand; PAM type: YTN; PAM sequence: TTC
atggaaaataatagtttaca

SEQ ID NO: 262352 - DNA, 20 bp, Artificial Sequence
  Description of Artificial Sequence: Synthetic oligonucleotide
  Target: LAMA2; (-) strand; PAM type: YTN; PAM sequence: TTA
tattcatggaaaataatagt

SEQ ID NO: 262353 - DNA, 20 bp, Artificial Sequence
  Description of Artificial Sequence: Synthetic oligonucleotide
  Target: LAMA2; (-) strand; PAM type: YTN; PAM sequence: TTA
caattatattcatggaaaat

SEQ ID NO: 262354 - DNA, 20 bp, Artificial Sequence
  Description of Artificial Sequence: Synthetic oligonucleotide
  Target: LAMA2; (-) strand; PAM type: YTN; PAM sequence: TTT
acaattatattcatggaaaa

SEQ ID NO: 262355 - DNA, 20 bp, Artificial Sequence
  Description of Artificial Sequence: Synthetic oligonucleotide
  Target: LAMA2; (-) strand; PAM type: YTN; PAM sequence: TTT
tacaattatattcatggaaa

SEQ ID NO: 262356 - DNA, 20 bp, Artificial Sequence
  Description of Artificial Sequence: Synthetic oligonucleotide
  Target: LAMA2; (-) strand; PAM type: YTN; PAM sequence: TTT
ttacaattatattcatggaa

SEQ ID NO: 262357 - DNA, 20 bp, Artificial Sequence
  Description of Artificial Sequence: Synthetic oligonucleotide
  Target: LAMA2; (-) strand; PAM type: YTN; PAM sequence: CTT
tttacaattatattcatgga

SEQ ID NO: 262358 - DNA, 20 bp, Artificial Sequence
  Description of Artificial Sequence: Synthetic oligonucleotide
  Target: LAMA2; (-) strand; PAM type: YTN; PAM sequence: TTC
tttttacaattatattcatg

SEQ ID NO: 262359 - DNA, 20 bp, Artificial Sequence
  Description of Artificial Sequence: Synthetic oligonucleotide
  Target: LAMA2; (-) strand; PAM type: YTN; PAM sequence: CTT
ctttttacaattatattcat

SEQ ID NO: 262360 - DNA, 20 bp, Artificial Sequence
  Description of Artificial Sequence: Synthetic oligonucleotide
  Target: LAMA2; (-) strand; PAM type: YTN; PAM sequence: TTC
cttctttttacaattatatt

SEQ ID NO: 262361 - DNA, 20 bp, Artificial Sequence
  Description of Artificial Sequence: Synthetic oligonucleotide
  Target: LAMA2; (-) strand; PAM type: YTN; PAM sequence: TTA
ttccttctttttacaattat

SEQ ID NO: 262362 - DNA, 20 bp, Artificial Sequence
  Description of Artificial Sequence: Synthetic oligonucleotide
  Target: LAMA2; (-) strand; PAM type: YTN; PAM sequence: TTG
acaatatgttattccttctt

SEQ ID NO: 262363 - DNA, 20 bp, Artificial Sequence
  Description of Artificial Sequence: Synthetic oligonucleotide
  Target: LAMA2; (-) strand; PAM type: YTN; PAM sequence: TTT
gacaatatgttattccttct

SEQ ID NO: 262364 - DNA, 20 bp, Artificial Sequence
  Description of Artificial Sequence: Synthetic oligonucleotide
  Target: LAMA2; (-) strand; PAM type: YTN; PAM sequence: TTT
tgacaatatgttattccttc

SEQ ID NO: 262365 - DNA, 20 bp, Artificial Sequence
  Description of Artificial Sequence: Synthetic oligonucleotide
  Target: LAMA2; (-) strand; PAM type: YTN; PAM sequence: CTT
ttgacaatatgttattcctt

SEQ ID NO: 262366 - DNA, 20 bp, Artificial Sequence
  Description of Artificial Sequence: Synthetic oligonucleotide
  Target: LAMA2; (-) strand; PAM type: YTN; PAM sequence: TTA
cttttgacaatatgttattc

SEQ ID NO: 262367 - DNA, 20 bp, Artificial Sequence
  Description of Artificial Sequence: Synthetic oligonucleotide
  Target: LAMA2; (-) strand; PAM type: YTN; PAM sequence: TTT
acttttgacaatatgttatt

SEQ ID NO: 262368 - DNA, 20 bp, Artificial Sequence
  Description of Artificial Sequence: Synthetic oligonucleotide
  Target: LAMA2; (-) strand; PAM type: YTN; PAM sequence: TTT
tacttttgacaatatgttat

SEQ ID NO: 262369 - DNA, 20 bp, Artificial Sequence
  Description of Artificial Sequence: Synthetic oligonucleotide
  Target: LAMA2; (-) strand; PAM type: YTN; PAM sequence: TTT
ttacttttgacaatatgtta

SEQ ID NO: 262370 - DNA, 20 bp, Artificial Sequence
  Description of Artificial Sequence: Synthetic oligonucleotide
  Target: LAMA2; (-) strand; PAM type: YTN; PAM sequence: CTT
tttacttttgacaatatgtt

SEQ ID NO: 262371 - DNA, 20 bp, Artificial Sequence
  Description of Artificial Sequence: Synthetic oligonucleotide
  Target: LAMA2; (-) strand; PAM type: YTN; PAM sequence: TTA
aacaatcatctttttacttt

SEQ ID NO: 262372 - DNA, 20 bp, Artificial Sequence
  Description of Artificial Sequence: Synthetic oligonucleotide
  Target: LAMA2; (-) strand; PAM type: YTN; PAM sequence: TTC
aaattaaacaatcatctttt

SEQ ID NO: 262373 - DNA, 20 bp, Artificial Sequence
  Description of Artificial Sequence: Synthetic oligonucleotide
  Target: LAMA2; (-) strand; PAM type: YTN; PAM sequence: TTT
caaattaaacaatcatcttt

SEQ ID NO: 262374 - DNA, 20 bp, Artificial Sequence
  Description of Artificial Sequence: Synthetic oligonucleotide
  Target: LAMA2; (-) strand; PAM type: YTN; PAM sequence: CTT
tcaaattaaacaatcatctt

SEQ ID NO: 262375 - DNA, 20 bp, Artificial Sequence
  Description of Artificial Sequence: Synthetic oligonucleotide
  Target: LAMA2; (-) strand; PAM type: YTN; PAM sequence: CTC
tttcaaattaaacaatcatc

SEQ ID NO: 262376 - DNA, 20 bp, Artificial Sequence
  Description of Artificial Sequence: Synthetic oligonucleotide
  Target: LAMA2; (-) strand; PAM type: YTN; PAM sequence: CTG
taaacatactctttcaaatt

SEQ ID NO: 262377 - DNA, 20 bp, Artificial Sequence
  Description of Artificial Sequence: Synthetic oligonucleotide
  Target: LAMA2; (-) strand; PAM type: YTN; PAM sequence: TTC
tgtaaacatactctttcaaa

SEQ ID NO: 262378 - DNA, 20 bp, Artificial Sequence
  Description of Artificial Sequence: Synthetic oligonucleotide
  Target: LAMA2; (-) strand; PAM type: YTN; PAM sequence: TTC
ccatgttctgtaaacatact

SEQ ID NO: 262379 - DNA, 20 bp, Artificial Sequence
  Description of Artificial Sequence: Synthetic oligonucleotide
  Target: LAMA2; (-) strand; PAM type: YTN; PAM sequence: CTA
atccattcccatgttctgta

SEQ ID NO: 262380 - DNA, 20 bp, Artificial Sequence
  Description of Artificial Sequence: Synthetic oligonucleotide
  Target: LAMA2; (-) strand; PAM type: YTN; PAM sequence: TTA
ctaatccattcccatgttct

SEQ ID NO: 262381 - DNA, 20 bp, Artificial Sequence
  Description of Artificial Sequence: Synthetic oligonucleotide
  Target: LAMA2; (-) strand; PAM type: YTN; PAM sequence: CTC
attactaatccattcccatg

SEQ ID NO: 262382 - DNA, 20 bp, Artificial Sequence
  Description of Artificial Sequence: Synthetic oligonucleotide
  Target: LAMA2; (-) strand; PAM type: YTN; PAM sequence: TTC
ctcattactaatccattccc

SEQ ID NO: 262383 - DNA, 20 bp, Artificial Sequence
  Description of Artificial Sequence: Synthetic oligonucleotide
  Target: LAMA2; (-) strand; PAM type: YTN; PAM sequence: TTT
cctcattactaatccattcc

SEQ ID NO: 262384 - DNA, 20 bp, Artificial Sequence
  Description of Artificial Sequence: Synthetic oligonucleotide
  Target: LAMA2; (-) strand; PAM type: YTN; PAM sequence: TTT
tcctcattactaatccattc

SEQ ID NO: 262385 - DNA, 20 bp, Artificial Sequence
  Description of Artificial Sequence: Synthetic oligonucleotide
  Target: LAMA2; (-) strand; PAM type: YTN; PAM sequence: TTC
aatattttcctcattactaa

SEQ ID NO: 262386 - DNA, 20 bp, Artificial Sequence
  Description of Artificial Sequence: Synthetic oligonucleotide
  Target: LAMA2; (-) strand; PAM type: YTN; PAM sequence: TTT
caatattttcctcattacta

SEQ ID NO: 262387 - DNA, 20 bp, Artificial Sequence
  Description of Artificial Sequence: Synthetic oligonucleotide
  Target: LAMA2; (-) strand; PAM type: YTN; PAM sequence: TTA
tatttcaatattttcctcat

SEQ ID NO: 262388 - DNA, 20 bp, Artificial Sequence
  Description of Artificial Sequence: Synthetic oligonucleotide
  Target: LAMA2; (-) strand; PAM type: YTN; PAM sequence: TTT
atatttcaatattttcctca

SEQ ID NO: 262389 - DNA, 20 bp, Artificial Sequence
  Description of Artificial Sequence: Synthetic oligonucleotide
  Target: LAMA2; (-) strand; PAM type: YTN; PAM sequence: TTT
tatatttcaatattttcctc

SEQ ID NO: 262390 - DNA, 20 bp, Artificial Sequence
  Description of Artificial Sequence: Synthetic oligonucleotide
  Target: LAMA2; (-) strand; PAM type: YTN; PAM sequence: TTA
ttttatatttcaatattttc

SEQ ID NO: 262391 - DNA, 20 bp, Artificial Sequence
  Description of Artificial Sequence: Synthetic oligonucleotide
  Target: LAMA2; (-) strand; PAM type: YTN; PAM sequence: TTT
attttatatttcaatatttt

SEQ ID NO: 262392 - DNA, 20 bp, Artificial Sequence
  Description of Artificial Sequence: Synthetic oligonucleotide
  Target: LAMA2; (-) strand; PAM type: YTN; PAM sequence: CTT
tattttatatttcaatattt

SEQ ID NO: 262393 - DNA, 20 bp, Artificial Sequence
  Description of Artificial Sequence: Synthetic oligonucleotide
  Target: LAMA2; (-) strand; PAM type: YTN; PAM sequence: CTC
tttattttatatttcaatat

SEQ ID NO: 262394 - DNA, 20 bp, Artificial Sequence
  Description of Artificial Sequence: Synthetic oligonucleotide
  Target: LAMA2; (-) strand; PAM type: YTN; PAM sequence: CTC
tctttattttatatttcaat

SEQ ID NO: 262395 - DNA, 20 bp, Artificial Sequence
  Description of Artificial Sequence: Synthetic oligonucleotide
  Target: LAMA2; (-) strand; PAM type: YTN; PAM sequence: TTC
tctctttattttatatttca

SEQ ID NO: 262396 - DNA, 20 bp, Artificial Sequence
  Description of Artificial Sequence: Synthetic oligonucleotide
  Target: LAMA2; (-) strand; PAM type: YTN; PAM sequence: TTA
ttctctctttattttatatt

SEQ ID NO: 262397 - DNA, 20 bp, Artificial Sequence
  Description of Artificial Sequence: Synthetic oligonucleotide
  Target: LAMA2; (-) strand; PAM type: YTN; PAM sequence: TTA
gttattctctctttatttta

SEQ ID NO: 262398 - DNA, 20 bp, Artificial Sequence
  Description of Artificial Sequence: Synthetic oligonucleotide
  Target: LAMA2; (-) strand; PAM type: YTN; PAM sequence: CTA
ttagttattctctctttatt

SEQ ID NO: 262399 - DNA, 20 bp, Artificial Sequence
  Description of Artificial Sequence: Synthetic oligonucleotide
  Target: LAMA2; (-) strand; PAM type: YTN; PAM sequence: CTC
tattagttattctctcttta

SEQ ID NO: 262400 - DNA, 20 bp, Artificial Sequence
  Description of Artificial Sequence: Synthetic oligonucleotide
  Target: LAMA2; (-) strand; PAM type: YTN; PAM sequence: TTC
ctctattagttattctctct

SEQ ID NO: 262401 - DNA, 20 bp, Artificial Sequence
  Description of Artificial Sequence: Synthetic oligonucleotide
  Target: LAMA2; (-) strand; PAM type: YTN; PAM sequence: CTG
gttcctctattagttattct

SEQ ID NO: 262402 - DNA, 20 bp, Artificial Sequence
  Description of Artificial Sequence: Synthetic oligonucleotide
  Target: LAMA2; (-) strand; PAM type: YTN; PAM sequence: CTC
ctggttcctctattagttat

SEQ ID NO: 262403 - DNA, 20 bp, Artificial Sequence
  Description of Artificial Sequence: Synthetic oligonucleotide
  Target: LAMA2; (-) strand; PAM type: YTN; PAM sequence: CTC
aaagaatatgaccatgaggg

SEQ ID NO: 262404 - DNA, 20 bp, Artificial Sequence
  Description of Artificial Sequence: Synthetic oligonucleotide
  Target: LAMA2; (-) strand; PAM type: YTN; PAM sequence: CTA
ctcaaagaatatgaccatga

SEQ ID NO: 262405 - DNA, 20 bp, Artificial Sequence
  Description of Artificial Sequence: Synthetic oligonucleotide
  Target: LAMA2; (-) strand; PAM type: YTN; PAM sequence: TTG
gataaggtgaaccgtctact

SEQ ID NO: 262406 - DNA, 20 bp, Artificial Sequence
  Description of Artificial Sequence: Synthetic oligonucleotide
  Target: LAMA2; (-) strand; PAM type: YTN; PAM sequence: TTA
tcccattggataaggtgaac

SEQ ID NO: 262407 - DNA, 20 bp, Artificial Sequence
  Description of Artificial Sequence: Synthetic oligonucleotide
  Target: LAMA2; (-) strand; PAM type: YTN; PAM sequence: TTT
atcccattggataaggtgaa

SEQ ID NO: 262408 - DNA, 20 bp, Artificial Sequence
  Description of Artificial Sequence: Synthetic oligonucleotide
  Target: LAMA2; (-) strand; PAM type: YTN; PAM sequence: TTT
tatcccattggataaggtga

SEQ ID NO: 262409 - DNA, 20 bp, Artificial Sequence
  Description of Artificial Sequence: Synthetic oligonucleotide
  Target: LAMA2; (-) strand; PAM type: YTN; PAM sequence: CTC
attttatcccattggataag

SEQ ID NO: 262410 - DNA, 20 bp, Artificial Sequence
  Description of Artificial Sequence: Synthetic oligonucleotide
  Target: LAMA2; (-) strand; PAM type: YTN; PAM sequence: TTC
tcattttatcccattggata

SEQ ID NO: 262411 - DNA, 20 bp, Artificial Sequence
  Description of Artificial Sequence: Synthetic oligonucleotide
  Target: LAMA2; (-) strand; PAM type: YTN; PAM sequence: TTT
ctcattttatcccattggat

SEQ ID NO: 262412 - DNA, 20 bp, Artificial Sequence
  Description of Artificial Sequence: Synthetic oligonucleotide
  Target: LAMA2; (-) strand; PAM type: YTN; PAM sequence: CTG
tatgatttctcattttatcc

SEQ ID NO: 262413 - DNA, 20 bp, Artificial Sequence
  Description of Artificial Sequence: Synthetic oligonucleotide
  Target: LAMA2; (-) strand; PAM type: YTN; PAM sequence: CTA
aatctgtatgatttctcatt

SEQ ID NO: 262414 - DNA, 20 bp, Artificial Sequence
  Description of Artificial Sequence: Synthetic oligonucleotide
  Target: LAMA2; (-) strand; PAM type: YTN; PAM sequence: TTA
cctaaatctgtatgatttct

SEQ ID NO: 262415 - DNA, 20 bp, Artificial Sequence
  Description of Artificial Sequence: Synthetic oligonucleotide
  Target: LAMA2; (-) strand; PAM type: YTN; PAM sequence: CTT
acctaaatctgtatgatttc

SEQ ID NO: 262416 - DNA, 20 bp, Artificial Sequence
  Description of Artificial Sequence: Synthetic oligonucleotide
  Target: LAMA2; (-) strand; PAM type: YTN; PAM sequence: CTC
catggtatgaaacttaccta

SEQ ID NO: 262417 - DNA, 20 bp, Artificial Sequence
  Description of Artificial Sequence: Synthetic oligonucleotide
  Target: LAMA2; (-) strand; PAM type: YTN; PAM sequence: CTG
cctccatggtatgaaactta

SEQ ID NO: 262418 - DNA, 20 bp, Artificial Sequence
  Description of Artificial Sequence: Synthetic oligonucleotide
  Target: LAMA2; (-) strand; PAM type: YTN; PAM sequence: TTC
tgcctccatggtatgaaact

SEQ ID NO: 262419 - DNA, 20 bp, Artificial Sequence
  Description of Artificial Sequence: Synthetic oligonucleotide
  Target: LAMA2; (-) strand; PAM type: YTN; PAM sequence: TTT
ctgcctccatggtatgaaac

SEQ ID NO: 262420 - DNA, 20 bp, Artificial Sequence
  Description of Artificial Sequence: Synthetic oligonucleotide
  Target: LAMA2; (-) strand; PAM type: YTN; PAM sequence: CTT
tctgcctccatggtatgaaa

SEQ ID NO: 262421 - DNA, 20 bp, Artificial Sequence
  Description of Artificial Sequence: Synthetic oligonucleotide
  Target: LAMA2; (-) strand; PAM type: YTN; PAM sequence: TTC
aactttctgcctccatggta

SEQ ID NO: 262422 - DNA, 20 bp, Artificial Sequence
  Description of Artificial Sequence: Synthetic oligonucleotide
  Target: LAMA2; (-) strand; PAM type: YTN; PAM sequence: CTC
agttcaactttctgcctcca

SEQ ID NO: 262423 - DNA, 20 bp, Artificial Sequence
  Description of Artificial Sequence: Synthetic oligonucleotide
  Target: LAMA2; (-) strand; PAM type: YTN; PAM sequence: CTA
tatgaactcagttcaacttt

SEQ ID NO: 262424 - DNA, 20 bp, Artificial Sequence
  Description of Artificial Sequence: Synthetic oligonucleotide
  Target: LAMA2; (-) strand; PAM type: YTN; PAM sequence: CTC
ctatatgaactcagttcaac

SEQ ID NO: 262425 - DNA, 20 bp, Artificial Sequence
  Description of Artificial Sequence: Synthetic oligonucleotide
  Target: LAMA2; (-) strand; PAM type: YTN; PAM sequence: TTG
aggtctcctatatgaactca

SEQ ID NO: 262426 - DNA, 20 bp, Artificial Sequence
  Description of Artificial Sequence: Synthetic oligonucleotide
  Target: LAMA2; (-) strand; PAM type: YTN; PAM sequence: CTG
acatgaaagagaaattgagg

SEQ ID NO: 262427 - DNA, 20 bp, Artificial Sequence
  Description of Artificial Sequence: Synthetic oligonucleotide
  Target: LAMA2; (-) strand; PAM type: YTN; PAM sequence: CTC
atagaatgtaacagagactg

SEQ ID NO: 262428 - DNA, 20 bp, Artificial Sequence
  Description of Artificial Sequence: Synthetic oligonucleotide
  Target: LAMA2; (-) strand; PAM type: YTN; PAM sequence: TTC
tcatagaatgtaacagagac

SEQ ID NO: 262429 - DNA, 20 bp, Artificial Sequence
  Description of Artificial Sequence: Synthetic oligonucleotide
  Target: LAMA2; (-) strand; PAM type: YTN; PAM sequence: CTA
tattctcatagaatgtaaca

SEQ ID NO: 262430 - DNA, 20 bp, Artificial Sequence
  Description of Artificial Sequence: Synthetic oligonucleotide
  Target: LAMA2; (-) strand; PAM type: YTN; PAM sequence: TTC
tatattctcatagaatgtaa

SEQ ID NO: 262431 - DNA, 20 bp, Artificial Sequence
  Description of Artificial Sequence: Synthetic oligonucleotide
  Target: LAMA2; (-) strand; PAM type: YTN; PAM sequence: TTA
caaacatatatcgattctat

SEQ ID NO: 262432 - DNA, 20 bp, Artificial Sequence
  Description of Artificial Sequence: Synthetic oligonucleotide
  Target: LAMA2; (-) strand; PAM type: YTN; PAM sequence: TTT
acaaacatatatcgattcta

SEQ ID NO: 262433 - DNA, 20 bp, Artificial Sequence
  Description of Artificial Sequence: Synthetic oligonucleotide
  Target: LAMA2; (-) strand; PAM type: YTN; PAM sequence: CTA
tttacaaacatatatcgatt

SEQ ID NO: 262434 - DNA, 20 bp, Artificial Sequence
  Description of Artificial Sequence: Synthetic oligonucleotide
  Target: LAMA2; (-) strand; PAM type: YTN; PAM sequence: TTA
tataagactatttacaaaca

SEQ ID NO: 262435 - DNA, 20 bp, Artificial Sequence
  Description of Artificial Sequence: Synthetic oligonucleotide
  Target: LAMA2; (-) strand; PAM type: YTN; PAM sequence: TTA
ttatataagactatttacaa

SEQ ID NO: 262436 - DNA, 20 bp, Artificial Sequence
  Description of Artificial Sequence: Synthetic oligonucleotide
  Target: LAMA2; (-) strand; PAM type: YTN; PAM sequence: TTT
attatataagactatttaca

SEQ ID NO: 262437 - DNA, 20 bp, Artificial Sequence
  Description of Artificial Sequence: Synthetic oligonucleotide
  Target: LAMA2; (-) strand; PAM type: YTN; PAM sequence: CTA
ataatttattatataagact

SEQ ID NO: 262438 - DNA, 20 bp, Artificial Sequence
  Description of Artificial Sequence: Synthetic oligonucleotide
  Target: LAMA2; (-) strand; PAM type: YTN; PAM sequence: CTA
ggcaggtctaataatttatt

SEQ ID NO: 262439 - DNA, 20 bp, Artificial Sequence
  Description of Artificial Sequence: Synthetic oligonucleotide
  Target: LAMA2; (-) strand; PAM type: YTN; PAM sequence: TTC
ctaggcaggtctaataattt

SEQ ID NO: 262440 - DNA, 20 bp, Artificial Sequence
  Description of Artificial Sequence: Synthetic oligonucleotide
  Target: LAMA2; (-) strand; PAM type: YTN; PAM sequence: TTT
cctaggcaggtctaataatt

SEQ ID NO: 262441 - DNA, 20 bp, Artificial Sequence
  Description of Artificial Sequence: Synthetic oligonucleotide
  Target: LAMA2; (-) strand; PAM type: YTN; PAM sequence: CTT
tcctaggcaggtctaataat

SEQ ID NO: 262442 - DNA, 20 bp, Artificial Sequence
  Description of Artificial Sequence: Synthetic oligonucleotide
  Target: LAMA2; (-) strand; PAM type: YTN; PAM sequence: TTG
ctttcctaggcaggtctaat

SEQ ID NO: 262443 - DNA, 20 bp, Artificial Sequence
  Description of Artificial Sequence: Synthetic oligonucleotide
  Target: LAMA2; (-) strand; PAM type: YTN; PAM sequence: TTT
gctttcctaggcaggtctaa

SEQ ID NO: 262444 - DNA, 20 bp, Artificial Sequence
  Description of Artificial Sequence: Synthetic oligonucleotide
  Target: LAMA2; (-) strand; PAM type: YTN; PAM sequence: TTT
tgctttcctaggcaggtcta

SEQ ID NO: 262445 - DNA, 20 bp, Artificial Sequence
  Description of Artificial Sequence: Synthetic oligonucleotide
  Target: LAMA2; (-) strand; PAM type: YTN; PAM sequence: CTG
ttttgctttcctaggcaggt

SEQ ID NO: 262446 - DNA, 20 bp, Artificial Sequence
  Description of Artificial Sequence: Synthetic oligonucleotide
  Target: LAMA2; (-) strand; PAM type: YTN; PAM sequence: TTC
tgttttgctttcctaggcag

SEQ ID NO: 262447 - DNA, 20 bp, Artificial Sequence
  Description of Artificial Sequence: Synthetic oligonucleotide
  Target: LAMA2; (-) strand; PAM type: YTN; PAM sequence: TTT
ctgttttgctttcctaggca

SEQ ID NO: 262448 - DNA, 20 bp, Artificial Sequence
  Description of Artificial Sequence: Synthetic oligonucleotide
  Target: LAMA2; (-) strand; PAM type: YTN; PAM sequence: TTT
tctgttttgctttcctaggc

SEQ ID NO: 262449 - DNA, 20 bp, Artificial Sequence
  Description of Artificial Sequence: Synthetic oligonucleotide
  Target: LAMA2; (-) strand; PAM type: YTN; PAM sequence: TTT
ttctgttttgctttcctagg

SEQ ID NO: 262450 - DNA, 20 bp, Artificial Sequence
  Description of Artificial Sequence: Synthetic oligonucleotide
  Target: LAMA2; (-) strand; PAM type: YTN; PAM sequence: TTC
ataatttttctgttttgctt

SEQ ID NO: 262451 - DNA, 20 bp, Artificial Sequence
  Description of Artificial Sequence: Synthetic oligonucleotide
  Target: LAMA2; (-) strand; PAM type: YTN; PAM sequence: CTT
cataatttttctgttttgct

SEQ ID NO: 262452 - DNA, 20 bp, Artificial Sequence
  Description of Artificial Sequence: Synthetic oligonucleotide
  Target: LAMA2; (-) strand; PAM type: YTN; PAM sequence: TTG
agagacttcataatttttct

SEQ ID NO: 262453 - DNA, 20 bp, Artificial Sequence
  Description of Artificial Sequence: Synthetic oligonucleotide
  Target: LAMA2; (-) strand; PAM type: YTN; PAM sequence: TTG
gccattgagagacttcataa

SEQ ID NO: 262454 - DNA, 20 bp, Artificial Sequence
  Description of Artificial Sequence: Synthetic oligonucleotide
  Target: LAMA2; (-) strand; PAM type: YTN; PAM sequence: TTA
gttggccattgagagacttc

SEQ ID NO: 262455 - DNA, 20 bp, Artificial Sequence
  Description of Artificial Sequence: Synthetic oligonucleotide
  Target: LAMA2; (-) strand; PAM type: YTN; PAM sequence: TTC
attagttggccattgagaga

SEQ ID NO: 262456 - DNA, 20 bp, Artificial Sequence
  Description of Artificial Sequence: Synthetic oligonucleotide
  Target: LAMA2; (-) strand; PAM type: YTN; PAM sequence: TTA
tattcattagttggccattg

SEQ ID NO: 262457 - DNA, 20 bp, Artificial Sequence
  Description of Artificial Sequence: Synthetic oligonucleotide
  Target: LAMA2; (-) strand; PAM type: YTN; PAM sequence: TTT
atattcattagttggccatt

SEQ ID NO: 262458 - DNA, 20 bp, Artificial Sequence
  Description of Artificial Sequence: Synthetic oligonucleotide
  Target: LAMA2; (-) strand; PAM type: YTN; PAM sequence: TTT
tatattcattagttggccat

SEQ ID NO: 262459 - DNA, 20 bp, Artificial Sequence
  Description of Artificial Sequence: Synthetic oligonucleotide
  Target: LAMA2; (-) strand; PAM type: YTN; PAM sequence: TTT
ttatattcattagttggcca

SEQ ID NO: 262460 - DNA, 20 bp, Artificial Sequence
  Description of Artificial Sequence: Synthetic oligonucleotide
  Target: LAMA2; (-) strand; PAM type: YTN; PAM sequence: TTG
aaaaatagtatttttatatt

SEQ ID NO: 262461 - DNA, 20 bp, Artificial Sequence
  Description of Artificial Sequence: Synthetic oligonucleotide
  Target: LAMA2; (-) strand; PAM type: YTN; PAM sequence: TTT
gaaaaatagtatttttatat

SEQ ID NO: 262462 - DNA, 20 bp, Artificial Sequence
  Description of Artificial Sequence: Synthetic oligonucleotide
  Target: LAMA2; (-) strand; PAM type: YTN; PAM sequence: TTC
cagtataaacatttgaaaaa

SEQ ID NO: 262463 - DNA, 20 bp, Artificial Sequence
  Description of Artificial Sequence: Synthetic oligonucleotide
  Target: LAMA2; (-) strand; PAM type: YTN; PAM sequence: TTA
ttccagtataaacatttgaa

SEQ ID NO: 262464 - DNA, 20 bp, Artificial Sequence
  Description of Artificial Sequence: Synthetic oligonucleotide
  Target: LAMA2; (-) strand; PAM type: YTN; PAM sequence: CTT
attccagtataaacatttga

SEQ ID NO: 262465 - DNA, 20 bp, Artificial Sequence
  Description of Artificial Sequence: Synthetic oligonucleotide
  Target: LAMA2; (-) strand; PAM type: YTN; PAM sequence: TTG
tgtgcttattccagtataaa

SEQ ID NO: 262466 - DNA, 20 bp, Artificial Sequence
  Description of Artificial Sequence: Synthetic oligonucleotide
  Target: LAMA2; (-) strand; PAM type: YTN; PAM sequence: CTT
gtgtgcttattccagtataa

SEQ ID NO: 262467 - DNA, 20 bp, Artificial Sequence
  Description of Artificial Sequence: Synthetic oligonucleotide
  Target: LAMA2; (-) strand; PAM type: YTN; PAM sequence: CTG
tcttgtgtgcttattccagt

SEQ ID NO: 262468 - DNA, 20 bp, Artificial Sequence
  Description of Artificial Sequence: Synthetic oligonucleotide
  Target: LAMA2; (-) strand; PAM type: YTN; PAM sequence: CTG
ctgtcttgtgtgcttattcc

SEQ ID NO: 262469 - DNA, 20 bp, Artificial Sequence
  Description of Artificial Sequence: Synthetic oligonucleotide
  Target: LAMA2; (-) strand; PAM type: YTN; PAM sequence: TTC
tgctgtcttgtgtgcttatt

SEQ ID NO: 262470 - DNA, 20 bp, Artificial Sequence
  Description of Artificial Sequence: Synthetic oligonucleotide
  Target: LAMA2; (-) strand; PAM type: YTN; PAM sequence: TTT
ctgctgtcttgtgtgcttat

SEQ ID NO: 262471 - DNA, 20 bp, Artificial Sequence
  Description of Artificial Sequence: Synthetic oligonucleotide
  Target: LAMA2; (-) strand; PAM type: YTN; PAM sequence: TTT
tctgctgtcttgtgtgctta

SEQ ID NO: 262472 - DNA, 20 bp, Artificial Sequence
  Description of Artificial Sequence: Synthetic oligonucleotide
  Target: LAMA2; (-) strand; PAM type: YTN; PAM sequence: CTG
catgaaataaaaggttttct

SEQ ID NO: 262473 - DNA, 20 bp, Artificial Sequence
  Description of Artificial Sequence: Synthetic oligonucleotide
  Target: LAMA2; (-) strand; PAM type: YTN; PAM sequence: TTC
tgcatgaaataaaaggtttt

SEQ ID NO: 262474 - DNA, 20 bp, Artificial Sequence
  Description of Artificial Sequence: Synthetic oligonucleotide
  Target: LAMA2; (-) strand; PAM type: YTN; PAM sequence: CTT
ctgcatgaaataaaaggttt

SEQ ID NO: 262475 - DNA, 20 bp, Artificial Sequence
  Description of Artificial Sequence: Synthetic oligonucleotide
  Target: LAMA2; (-) strand; PAM type: YTN; PAM sequence: TTA
tggatcttctgcatgaaata

SEQ ID NO: 262476 - DNA, 20 bp, Artificial Sequence
  Description of Artificial Sequence: Synthetic oligonucleotide
  Target: LAMA2; (-) strand; PAM type: YTN; PAM sequence: CTA
catcaatcagaaaagcatta

SEQ ID NO: 262477 - DNA, 20 bp, Artificial Sequence
  Description of Artificial Sequence: Synthetic oligonucleotide
  Target: LAMA2; (-) strand; PAM type: YTN; PAM sequence: CTC
tacatcaatcagaaaagcat

SEQ ID NO: 262478 - DNA, 20 bp, Artificial Sequence
  Description of Artificial Sequence: Synthetic oligonucleotide
  Target: LAMA2; (-) strand; PAM type: YTN; PAM sequence: CTA
aaagtctctacatcaatcag

SEQ ID NO: 262479 - DNA, 20 bp, Artificial Sequence
  Description of Artificial Sequence: Synthetic oligonucleotide
  Target: LAMA2; (-) strand; PAM type: YTN; PAM sequence: TTA
ctaaaagtctctacatcaat

SEQ ID NO: 262480 - DNA, 20 bp, Artificial Sequence
  Description of Artificial Sequence: Synthetic oligonucleotide
  Target: LAMA2; (-) strand; PAM type: YTN; PAM sequence: TTT
actaaaagtctctacatcaa

SEQ ID NO: 262481 - DNA, 20 bp, Artificial Sequence
  Description of Artificial Sequence: Synthetic oligonucleotide
  Target: LAMA2; (-) strand; PAM type: YTN; PAM sequence: TTT
tactaaaagtctctacatca

SEQ ID NO: 262482 - DNA, 20 bp, Artificial Sequence
  Description of Artificial Sequence: Synthetic oligonucleotide
  Target: LAMA2; (-) strand; PAM type: YTN; PAM sequence: CTT
ttactaaaagtctctacatc

SEQ ID NO: 262483 - DNA, 20 bp, Artificial Sequence
  Description of Artificial Sequence: Synthetic oligonucleotide
  Target: LAMA2; (-) strand; PAM type: YTN; PAM sequence: CTC
ttttactaaaagtctctaca

SEQ ID NO: 262484 - DNA, 20 bp, Artificial Sequence
  Description of Artificial Sequence: Synthetic oligonucleotide
  Target: LAMA2; (-) strand; PAM type: YTN; PAM sequence: TTA
ctcttttactaaaagtctct

SEQ ID NO: 262485 - DNA, 20 bp, Artificial Sequence
  Description of Artificial Sequence: Synthetic oligonucleotide
  Target: LAMA2; (-) strand; PAM type: YTN; PAM sequence: TTT
actcttttactaaaagtctc

SEQ ID NO: 262486 - DNA, 20 bp, Artificial Sequence
  Description of Artificial Sequence: Synthetic oligonucleotide
  Target: LAMA2; (-) strand; PAM type: YTN; PAM sequence: TTA
atttactcttttactaaaag

SEQ ID NO: 262487 - DNA, 20 bp, Artificial Sequence
  Description of Artificial Sequence: Synthetic oligonucleotide
  Target: LAMA2; (-) strand; PAM type: YTN; PAM sequence: CTT
aatttactcttttactaaaa

SEQ ID NO: 262488 - DNA, 20 bp, Artificial Sequence
  Description of Artificial Sequence: Synthetic oligonucleotide
  Target: LAMA2; (-) strand; PAM type: YTN; PAM sequence: TTG
gtccttaatttactctttta

SEQ ID NO: 262489 - DNA, 20 bp, Artificial Sequence
  Description of Artificial Sequence: Synthetic oligonucleotide
  Target: LAMA2; (-) strand; PAM type: YTN; PAM sequence: TTT
ggtccttaatttactctttt

SEQ ID NO: 262490 - DNA, 20 bp, Artificial Sequence
  Description of Artificial Sequence: Synthetic oligonucleotide
  Target: LAMA2; (-) strand; PAM type: YTN; PAM sequence: TTT
tggtccttaatttactcttt

SEQ ID NO: 262491 - DNA, 20 bp, Artificial Sequence
  Description of Artificial Sequence: Synthetic oligonucleotide
  Target: LAMA2; (-) strand; PAM type: YTN; PAM sequence: TTA
tagtgagaaatatcaaaagg

SEQ ID NO: 262492 - DNA, 20 bp, Artificial Sequence
  Description of Artificial Sequence: Synthetic oligonucleotide
  Target: LAMA2; (-) strand; PAM type: YTN; PAM sequence: CTG
ttatagtgagaaatatcaaa

SEQ ID NO: 262493 - DNA, 20 bp, Artificial Sequence
  Description of Artificial Sequence: Synthetic oligonucleotide
  Target: LAMA2; (-) strand; PAM type: YTN; PAM sequence: CTC
ctgttatagtgagaaatatc

SEQ ID NO: 262494 - DNA, 20 bp, Artificial Sequence
  Description of Artificial Sequence: Synthetic oligonucleotide
  Target: LAMA2; (-) strand; PAM type: YTN; PAM sequence: TTC
atataaaaataatctcctgt

SEQ ID NO: 262495 - DNA, 20 bp, Artificial Sequence
  Description of Artificial Sequence: Synthetic oligonucleotide
  Target: LAMA2; (-) strand; PAM type: YTN; PAM sequence: TTT
catataaaaataatctcctg

SEQ ID NO: 262496 - DNA, 20 bp, Artificial Sequence
  Description of Artificial Sequence: Synthetic oligonucleotide
  Target: LAMA2; (-) strand; PAM type: YTN; PAM sequence: TTA
tttcatataaaaataatctc

SEQ ID NO: 262497 - DNA, 20 bp, Artificial Sequence
  Description of Artificial Sequence: Synthetic oligonucleotide
  Target: LAMA2; (-) strand; PAM type: YTN; PAM sequence: TTA
ttatttcatataaaaataat

SEQ ID NO: 262498 - DNA, 20 bp, Artificial Sequence
  Description of Artificial Sequence: Synthetic oligonucleotide
  Target: LAMA2; (-) strand; PAM type: YTN; PAM sequence: TTT
attatttcatataaaaataa

SEQ ID NO: 262499 - DNA, 20 bp, Artificial Sequence
  Description of Artificial Sequence: Synthetic oligonucleotide
  Target: LAMA2; (-) strand; PAM type: YTN; PAM sequence: TTT
tattatttcatataaaaata

SEQ ID NO: 262500 - DNA, 20 bp, Artificial Sequence
  Description of Artificial Sequence: Synthetic oligonucleotide
  Target: LAMA2; (-) strand; PAM type: YTN; PAM sequence: TTT
ttattatttcatataaaaat

SEQ ID NO: 262501 - DNA, 20 bp, Artificial Sequence
  Description of Artificial Sequence: Synthetic oligonucleotide
  Target: LAMA2; (-) strand; PAM type: YTN; PAM sequence: TTT
tttattatttcatataaaaa

SEQ ID NO: 262502 - DNA, 20 bp, Artificial Sequence
  Description of Artificial Sequence: Synthetic oligonucleotide
  Target: LAMA2; (-) strand; PAM type: YTN; PAM sequence: TTT
ttttattatttcatataaaa

SEQ ID NO: 262503 - DNA, 20 bp, Artificial Sequence
  Description of Artificial Sequence: Synthetic oligonucleotide
  Target: LAMA2; (-) strand; PAM type: YTN; PAM sequence: TTT
tttttattatttcatataaa

SEQ ID NO: 262504 - DNA, 20 bp, Artificial Sequence
  Description of Artificial Sequence: Synthetic oligonucleotide
  Target: LAMA2; (-) strand; PAM type: YTN; PAM sequence: TTA
agtatattttttttattatt

SEQ ID NO: 262505 - DNA, 20 bp, Artificial Sequence
  Description of Artificial Sequence: Synthetic oligonucleotide
  Target: LAMA2; (-) strand; PAM type: YTN; PAM sequence: TTT
aagtatattttttttattat

SEQ ID NO: 262506 - DNA, 20 bp, Artificial Sequence
  Description of Artificial Sequence: Synthetic oligonucleotide
  Target: LAMA2; (-) strand; PAM type: YTN; PAM sequence: TTT
taagtatattttttttatta

SEQ ID NO: 262507 - DNA, 20 bp, Artificial Sequence
  Description of Artificial Sequence: Synthetic oligonucleotide
  Target: LAMA2; (-) strand; PAM type: YTN; PAM sequence: TTT
ttaagtatattttttttatt

SEQ ID NO: 262508 - DNA, 20 bp, Artificial Sequence
  Description of Artificial Sequence: Synthetic oligonucleotide
  Target: LAMA2; (-) strand; PAM type: YTN; PAM sequence: TTT
tttaagtatattttttttat

SEQ ID NO: 262509 - DNA, 20 bp, Artificial Sequence
  Description of Artificial Sequence: Synthetic oligonucleotide
  Target: LAMA2; (-) strand; PAM type: YTN; PAM sequence: TTA
acagtatagataacagcgtt

SEQ ID NO: 262510 - DNA, 20 bp, Artificial Sequence
  Description of Artificial Sequence: Synthetic oligonucleotide
  Target: LAMA2; (-) strand; PAM type: YTN; PAM sequence: CTA
aaataattaacagtatagat

SEQ ID NO: 262511 - DNA, 20 bp, Artificial Sequence
  Description of Artificial Sequence: Synthetic oligonucleotide
  Target: LAMA2; (-) strand; PAM type: YTN; PAM sequence: TTC
taaaataattaacagtatag

SEQ ID NO: 262512 - DNA, 20 bp, Artificial Sequence
  Description of Artificial Sequence: Synthetic oligonucleotide
  Target: LAMA2; (-) strand; PAM type: YTN; PAM sequence: TTA
catgtgatattctaaaataa

SEQ ID NO: 262513 - DNA, 20 bp, Artificial Sequence
  Description of Artificial Sequence: Synthetic oligonucleotide
  Target: LAMA2; (-) strand; PAM type: YTN; PAM sequence: TTT
acatgtgatattctaaaata

SEQ ID NO: 262514 - DNA, 20 bp, Artificial Sequence
  Description of Artificial Sequence: Synthetic oligonucleotide
  Target: LAMA2; (-) strand; PAM type: YTN; PAM sequence: CTA
atttacatgtgatattctaa

SEQ ID NO: 262515 - DNA, 20 bp, Artificial Sequence
  Description of Artificial Sequence: Synthetic oligonucleotide
  Target: LAMA2; (-) strand; PAM type: YTN; PAM sequence: CTG
ccacctaatttacatgtgat

SEQ ID NO: 262516 - DNA, 20 bp, Artificial Sequence
  Description of Artificial Sequence: Synthetic oligonucleotide
  Target: LAMA2; (-) strand; PAM type: YTN; PAM sequence: TTC
tgccacctaatttacatgtg

SEQ ID NO: 262517 - DNA, 20 bp, Artificial Sequence
  Description of Artificial Sequence: Synthetic oligonucleotide
  Target: LAMA2; (-) strand; PAM type: YTN; PAM sequence: CTT
ctgccacctaatttacatgt

SEQ ID NO: 262518 - DNA, 20 bp, Artificial Sequence
  Description of Artificial Sequence: Synthetic oligonucleotide
  Target: LAMA2; (-) strand; PAM type: YTN; PAM sequence: CTA
tggcttctgccacctaattt

SEQ ID NO: 262519 - DNA, 20 bp, Artificial Sequence
  Description of Artificial Sequence: Synthetic oligonucleotide
  Target: LAMA2; (-) strand; PAM type: YTN; PAM sequence: CTG
ctatggcttctgccacctaa

SEQ ID NO: 262520 - DNA, 20 bp, Artificial Sequence
  Description of Artificial Sequence: Synthetic oligonucleotide
  Target: LAMA2; (-) strand; PAM type: YTN; PAM sequence: CTA
agacatgcaaatctgctatg

SEQ ID NO: 262521 - DNA, 20 bp, Artificial Sequence
  Description of Artificial Sequence: Synthetic oligonucleotide
  Target: LAMA2; (-) strand; PAM type: YTN; PAM sequence: TTC
taagacatgcaaatctgcta

SEQ ID NO: 262522 - DNA, 20 bp, Artificial Sequence
  Description of Artificial Sequence: Synthetic oligonucleotide
  Target: LAMA2; (-) strand; PAM type: YTN; PAM sequence: TTT
ctaagacatgcaaatctgct

SEQ ID NO: 262523 - DNA, 20 bp, Artificial Sequence
  Description of Artificial Sequence: Synthetic oligonucleotide
  Target: LAMA2; (-) strand; PAM type: YTN; PAM sequence: TTT
tctaagacatgcaaatctgc

SEQ ID NO: 262524 - DNA, 20 bp, Artificial Sequence
  Description of Artificial Sequence: Synthetic oligonucleotide
  Target: LAMA2; (-) strand; PAM type: YTN; PAM sequence: CTA
ttttctaagacatgcaaatc

SEQ ID NO: 262525 - DNA, 20 bp, Artificial Sequence
  Description of Artificial Sequence: Synthetic oligonucleotide
  Target: LAMA2; (-) strand; PAM type: YTN; PAM sequence: CTG
ctattttctaagacatgcaa

SEQ ID NO: 262526 - DNA, 20 bp, Artificial Sequence
  Description of Artificial Sequence: Synthetic oligonucleotide
  Target: LAMA2; (-) strand; PAM type: YTN; PAM sequence: TTA
cctgctattttctaagacat

SEQ ID NO: 262527 - DNA, 20 bp, Artificial Sequence
  Description of Artificial Sequence: Synthetic oligonucleotide
  Target: LAMA2; (-) strand; PAM type: YTN; PAM sequence: CTC
acgaaattacctgctatttt

SEQ ID NO: 262528 - DNA, 20 bp, Artificial Sequence
  Description of Artificial Sequence: Synthetic oligonucleotide
  Target: LAMA2; (-) strand; PAM type: YTN; PAM sequence: TTG
caaactcacgaaattacctg

SEQ ID NO: 262529 - DNA, 20 bp, Artificial Sequence
  Description of Artificial Sequence: Synthetic oligonucleotide
  Target: LAMA2; (-) strand; PAM type: YTN; PAM sequence: TTT
gcaaactcacgaaattacct

SEQ ID NO: 262530 - DNA, 20 bp, Artificial Sequence
  Description of Artificial Sequence: Synthetic oligonucleotide
  Target: LAMA2; (-) strand; PAM type: YTN; PAM sequence: CTA
tttgcaaactcacgaaatta

SEQ ID NO: 262531 - DNA, 20 bp, Artificial Sequence
  Description of Artificial Sequence: Synthetic oligonucleotide
  Target: LAMA2; (-) strand; PAM type: YTN; PAM sequence: TTG
caaaataatctatttgcaaa

SEQ ID NO: 262532 - DNA, 20 bp, Artificial Sequence
  Description of Artificial Sequence: Synthetic oligonucleotide
  Target: LAMA2; (-) strand; PAM type: YTN; PAM sequence: TTT
gcaaaataatctatttgcaa

SEQ ID NO: 262533 - DNA, 20 bp, Artificial Sequence
  Description of Artificial Sequence: Synthetic oligonucleotide
  Target: LAMA2; (-) strand; PAM type: YTN; PAM sequence: CTG
cagtacagaaccatttgcaa

SEQ ID NO: 262534 - DNA, 20 bp, Artificial Sequence
  Description of Artificial Sequence: Synthetic oligonucleotide
  Target: LAMA2; (-) strand; PAM type: YTN; PAM sequence: TTA
ctgcagtacagaaccatttg

SEQ ID NO: 262535 - DNA, 20 bp, Artificial Sequence
  Description of Artificial Sequence: Synthetic oligonucleotide
  Target: LAMA2; (-) strand; PAM type: YTN; PAM sequence: TTT
actgcagtacagaaccattt

SEQ ID NO: 262536 - DNA, 20 bp, Artificial Sequence
  Description of Artificial Sequence: Synthetic oligonucleotide
  Target: LAMA2; (-) strand; PAM type: YTN; PAM sequence: TTT
tactgcagtacagaaccatt

SEQ ID NO: 262537 - DNA, 20 bp, Artificial Sequence
  Description of Artificial Sequence: Synthetic oligonucleotide
  Target: LAMA2; (-) strand; PAM type: YTN; PAM sequence: CTT
ttactgcagtacagaaccat

SEQ ID NO: 262538 - DNA, 20 bp, Artificial Sequence
  Description of Artificial Sequence: Synthetic oligonucleotide
  Target: LAMA2; (-) strand; PAM type: YTN; PAM sequence: CTC
ttttactgcagtacagaacc

SEQ ID NO: 262539 - DNA, 20 bp, Artificial Sequence
  Description of Artificial Sequence: Synthetic oligonucleotide
  Target: LAMA2; (-) strand; PAM type: YTN; PAM sequence: CTA
ccaaactcttttactgcagt

SEQ ID NO: 262540 - DNA, 20 bp, Artificial Sequence
  Description of Artificial Sequence: Synthetic oligonucleotide
  Target: LAMA2; (-) strand; PAM type: YTN; PAM sequence: TTA
ctaccaaactcttttactgc

SEQ ID NO: 262541 - DNA, 20 bp, Artificial Sequence
  Description of Artificial Sequence: Synthetic oligonucleotide
  Target: LAMA2; (-) strand; PAM type: YTN; PAM sequence: TTT
actaccaaactcttttactg

SEQ ID NO: 262542 - DNA, 20 bp, Artificial Sequence
  Description of Artificial Sequence: Synthetic oligonucleotide
  Target: LAMA2; (-) strand; PAM type: YTN; PAM sequence: CTG
tttactaccaaactctttta

SEQ ID NO: 262543 - DNA, 20 bp, Artificial Sequence
  Description of Artificial Sequence: Synthetic oligonucleotide
  Target: LAMA2; (-) strand; PAM type: YTN; PAM sequence: TTC
tgtttactaccaaactcttt

SEQ ID NO: 262544 - DNA, 20 bp, Artificial Sequence
  Description of Artificial Sequence: Synthetic oligonucleotide
  Target: LAMA2; (-) strand; PAM type: YTN; PAM sequence: CTA
acaagatgttctgtttacta

SEQ ID NO: 262545 - DNA, 20 bp, Artificial Sequence
  Description of Artificial Sequence: Synthetic oligonucleotide
  Target: LAMA2; (-) strand; PAM type: YTN; PAM sequence: TTC
cactaacaagatgttctgtt

SEQ ID NO: 262546 - DNA, 20 bp, Artificial Sequence
  Description of Artificial Sequence: Synthetic oligonucleotide
  Target: LAMA2; (-) strand; PAM type: YTN; PAM sequence: CTA
tcagttccactaacaagatg

SEQ ID NO: 262547 - DNA, 20 bp, Artificial Sequence
  Description of Artificial Sequence: Synthetic oligonucleotide
  Target: LAMA2; (-) strand; PAM type: YTN; PAM sequence: TTC
tatcagttccactaacaaga

SEQ ID NO: 262548 - DNA, 20 bp, Artificial Sequence
  Description of Artificial Sequence: Synthetic oligonucleotide
  Target: LAMA2; (-) strand; PAM type: YTN; PAM sequence: TTT
ctatcagttccactaacaag

SEQ ID NO: 262549 - DNA, 20 bp, Artificial Sequence
  Description of Artificial Sequence: Synthetic oligonucleotide
  Target: LAMA2; (-) strand; PAM type: YTN; PAM sequence: TTG
tttctatcagttccactaac

SEQ ID NO: 262550 - DNA, 20 bp, Artificial Sequence
  Description of Artificial Sequence: Synthetic oligonucleotide
  Target: LAMA2; (-) strand; PAM type: YTN; PAM sequence: TTA
aagatgaatgacaatattgt

SEQ ID NO: 262551 - DNA, 20 bp, Artificial Sequence
  Description of Artificial Sequence: Synthetic oligonucleotide
  Target: LAMA2; (-) strand; PAM type: YTN; PAM sequence: TTG
gtgtgagagaagcaaagaaa

SEQ ID NO: 262552 - DNA, 20 bp, Artificial Sequence
  Description of Artificial Sequence: Synthetic oligonucleotide
  Target: LAMA2; (-) strand; PAM type: YTN; PAM sequence: TTG
gtgaggtatgtaaaacagtg

SEQ ID NO: 262553 - DNA, 20 bp, Artificial Sequence
  Description of Artificial Sequence: Synthetic oligonucleotide
  Target: LAMA2; (-) strand; PAM type: YTN; PAM sequence: TTT
ggtgaggtatgtaaaacagt

SEQ ID NO: 262554 - DNA, 20 bp, Artificial Sequence
  Description of Artificial Sequence: Synthetic oligonucleotide
  Target: LAMA2; (-) strand; PAM type: YTN; PAM sequence: CTC
atttggtgaggtatgtaaaa

SEQ ID NO: 262555 - DNA, 20 bp, Artificial Sequence
  Description of Artificial Sequence: Synthetic oligonucleotide
  Target: LAMA2; (-) strand; PAM type: YTN; PAM sequence: TTA
aaccaaaagatctcatttgg

SEQ ID NO: 262556 - DNA, 20 bp, Artificial Sequence
  Description of Artificial Sequence: Synthetic oligonucleotide
  Target: LAMA2; (-) strand; PAM type: YTN; PAM sequence: CTT
aaaccaaaagatctcatttg

SEQ ID NO: 262557 - DNA, 20 bp, Artificial Sequence
  Description of Artificial Sequence: Synthetic oligonucleotide
  Target: LAMA2; (-) strand; PAM type: YTN; PAM sequence: TTC
aaaaaaacggtcacttaaac

SEQ ID NO: 262558 - DNA, 20 bp, Artificial Sequence
  Description of Artificial Sequence: Synthetic oligonucleotide
  Target: LAMA2; (-) strand; PAM type: YTN; PAM sequence: TTT
caaaaaaacggtcacttaaa

SEQ ID NO: 262559 - DNA, 20 bp, Artificial Sequence
  Description of Artificial Sequence: Synthetic oligonucleotide
  Target: LAMA2; (-) strand; PAM type: YTN; PAM sequence: CTA
aagtttcaaaaaaacggtca

SEQ ID NO: 262560 - DNA, 20 bp, Artificial Sequence
  Description of Artificial Sequence: Synthetic oligonucleotide
  Target: LAMA2; (-) strand; PAM type: YTN; PAM sequence: TTC
taaagtttcaaaaaaacggt

SEQ ID NO: 262561 - DNA, 20 bp, Artificial Sequence
  Description of Artificial Sequence: Synthetic oligonucleotide
  Target: LAMA2; (-) strand; PAM type: YTN; PAM sequence: TTA
ggaaaaatgtattctaaagt

SEQ ID NO: 262562 - DNA, 20 bp, Artificial Sequence
  Description of Artificial Sequence: Synthetic oligonucleotide
  Target: LAMA2; (-) strand; PAM type: YTN; PAM sequence: CTG
agattaggaaaaatgtattc

SEQ ID NO: 262563 - DNA, 20 bp, Artificial Sequence
  Description of Artificial Sequence: Synthetic oligonucleotide
  Target: LAMA2; (-) strand; PAM type: YTN; PAM sequence: TTA
ctgagattaggaaaaatgta

SEQ ID NO: 262564 - DNA, 20 bp, Artificial Sequence
  Description of Artificial Sequence: Synthetic oligonucleotide
  Target: LAMA2; (-) strand; PAM type: YTN; PAM sequence: TTT
actgagattaggaaaaatgt

SEQ ID NO: 262565 - DNA, 20 bp, Artificial Sequence
  Description of Artificial Sequence: Synthetic oligonucleotide
  Target: LAMA2; (-) strand; PAM type: YTN; PAM sequence: TTT
tactgagattaggaaaaatg

SEQ ID NO: 262566 - DNA, 20 bp, Artificial Sequence
  Description of Artificial Sequence: Synthetic oligonucleotide
  Target: LAMA2; (-) strand; PAM type: YTN; PAM sequence: TTT
ttactgagattaggaaaaat

SEQ ID NO: 262567 - DNA, 20 bp, Artificial Sequence
  Description of Artificial Sequence: Synthetic oligonucleotide
  Target: LAMA2; (-) strand; PAM type: YTN; PAM sequence: CTA
tgaccccagtttttactgag

SEQ ID NO: 262568 - DNA, 20 bp, Artificial Sequence
  Description of Artificial Sequence: Synthetic oligonucleotide
  Target: LAMA2; (-) strand; PAM type: YTN; PAM sequence: TTG
tgagactatgaccccagttt

SEQ ID NO: 262569 - DNA, 20 bp, Artificial Sequence
  Description of Artificial Sequence: Synthetic oligonucleotide
  Target: LAMA2; (-) strand; PAM type: YTN; PAM sequence: TTA
gcattgtgagactatgaccc

SEQ ID NO: 262570 - DNA, 20 bp, Artificial Sequence
  Description of Artificial Sequence: Synthetic oligonucleotide
  Target: LAMA2; (-) strand; PAM type: YTN; PAM sequence: CTT
agcattgtgagactatgacc

SEQ ID NO: 262571 - DNA, 20 bp, Artificial Sequence
  Description of Artificial Sequence: Synthetic oligonucleotide
  Target: LAMA2; (-) strand; PAM type: YTN; PAM sequence: TTC
ttagcattgtgagactatga

SEQ ID NO: 262572 - DNA, 20 bp, Artificial Sequence
  Description of Artificial Sequence: Synthetic oligonucleotide
  Target: LAMA2; (-) strand; PAM type: YTN; PAM sequence: TTG
ttcttagcattgtgagacta

SEQ ID NO: 262573 - DNA, 20 bp, Artificial Sequence
  Description of Artificial Sequence: Synthetic oligonucleotide
  Target: LAMA2; (-) strand; PAM type: YTN; PAM sequence: TTT
gttcttagcattgtgagact

SEQ ID NO: 262574 - DNA, 20 bp, Artificial Sequence
  Description of Artificial Sequence: Synthetic oligonucleotide
  Target: LAMA2; (-) strand; PAM type: YTN; PAM sequence: TTA
tttgttcttagcattgtgag

SEQ ID NO: 262575 - DNA, 20 bp, Artificial Sequence
  Description of Artificial Sequence: Synthetic oligonucleotide
  Target: LAMA2; (-) strand; PAM type: YTN; PAM sequence: TTT
atttgttcttagcattgtga

SEQ ID NO: 262576 - DNA, 20 bp, Artificial Sequence
  Description of Artificial Sequence: Synthetic oligonucleotide
  Target: LAMA2; (-) strand; PAM type: YTN; PAM sequence: CTT
tatttgttcttagcattgtg

SEQ ID NO: 262577 - DNA, 20 bp, Artificial Sequence
  Description of Artificial Sequence: Synthetic oligonucleotide
  Target: LAMA2; (-) strand; PAM type: YTN; PAM sequence: CTG
atgacagctttatttgttct

SEQ ID NO: 262578 - DNA, 20 bp, Artificial Sequence
  Description of Artificial Sequence: Synthetic oligonucleotide
  Target: LAMA2; (-) strand; PAM type: YTN; PAM sequence: TTA
caaaatcaaatgctgatgac

SEQ ID NO: 262579 - DNA, 20 bp, Artificial Sequence
  Description of Artificial Sequence: Synthetic oligonucleotide
  Target: LAMA2; (-) strand; PAM type: YTN; PAM sequence: CTT
acaaaatcaaatgctgatga

SEQ ID NO: 262580 - DNA, 20 bp, Artificial Sequence
  Description of Artificial Sequence: Synthetic oligonucleotide
  Target: LAMA2; (-) strand; PAM type: YTN; PAM sequence: CTG
ccttacaaaatcaaatgctg

SEQ ID NO: 262581 - DNA, 20 bp, Artificial Sequence
  Description of Artificial Sequence: Synthetic oligonucleotide
  Target: LAMA2; (-) strand; PAM type: YTN; PAM sequence: TTC
cactgccttacaaaatcaaa

SEQ ID NO: 262582 - DNA, 20 bp, Artificial Sequence
  Description of Artificial Sequence: Synthetic oligonucleotide
  Target: LAMA2; (-) strand; PAM type: YTN; PAM sequence: TTG
ccacaattccactgccttac

SEQ ID NO: 262583 - DNA, 20 bp, Artificial Sequence
  Description of Artificial Sequence: Synthetic oligonucleotide
  Target: LAMA2; (-) strand; PAM type: YTN; PAM sequence: TTT
gccacaattccactgcctta

SEQ ID NO: 262584 - DNA, 20 bp, Artificial Sequence
  Description of Artificial Sequence: Synthetic oligonucleotide
  Target: LAMA2; (-) strand; PAM type: YTN; PAM sequence: CTT
tgccacaattccactgcctt

SEQ ID NO: 262585 - DNA, 20 bp, Artificial Sequence
  Description of Artificial Sequence: Synthetic oligonucleotide
  Target: LAMA2; (-) strand; PAM type: YTN; PAM sequence: TTA
aaaacctttgccacaattcc

SEQ ID NO: 262586 - DNA, 20 bp, Artificial Sequence
  Description of Artificial Sequence: Synthetic oligonucleotide
  Target: LAMA2; (-) strand; PAM type: YTN; PAM sequence: TTT
aaaaacctttgccacaattc

SEQ ID NO: 262587 - DNA, 20 bp, Artificial Sequence
  Description of Artificial Sequence: Synthetic oligonucleotide
  Target: LAMA2; (-) strand; PAM type: YTN; PAM sequence: TTT
taaaaacctttgccacaatt

SEQ ID NO: 262588 - DNA, 20 bp, Artificial Sequence
  Description of Artificial Sequence: Synthetic oligonucleotide
  Target: LAMA2; (-) strand; PAM type: YTN; PAM sequence: CTT
ttaaaaacctttgccacaat

SEQ ID NO: 262589 - DNA, 20 bp, Artificial Sequence
  Description of Artificial Sequence: Synthetic oligonucleotide
  Target: LAMA2; (-) strand; PAM type: YTN; PAM sequence: TTC
aaaccttttaaaaacctttg

SEQ ID NO: 262590 - DNA, 20 bp, Artificial Sequence
  Description of Artificial Sequence: Synthetic oligonucleotide
  Target: LAMA2; (-) strand; PAM type: YTN; PAM sequence: CTA
ttcaaaccttttaaaaacct

SEQ ID NO: 262591 - DNA, 20 bp, Artificial Sequence
  Description of Artificial Sequence: Synthetic oligonucleotide
  Target: LAMA2; (-) strand; PAM type: YTN; PAM sequence: TTA
gggggactattcaaaccttt

SEQ ID NO: 262592 - DNA, 20 bp, Artificial Sequence
  Description of Artificial Sequence: Synthetic oligonucleotide
  Target: LAMA2; (-) strand; PAM type: YTN; PAM sequence: TTT
agggggactattcaaacctt

SEQ ID NO: 262593 - DNA, 20 bp, Artificial Sequence
  Description of Artificial Sequence: Synthetic oligonucleotide
  Target: LAMA2; (-) strand; PAM type: YTN; PAM sequence: CTT
tagggggactattcaaacct

SEQ ID NO: 262594 - DNA, 20 bp, Artificial Sequence
  Description of Artificial Sequence: Synthetic oligonucleotide
  Target: LAMA2; (-) strand; PAM type: YTN; PAM sequence: TTA
ctttagggggactattcaaa

SEQ ID NO: 262595 - DNA, 20 bp, Artificial Sequence
  Description of Artificial Sequence: Synthetic oligonucleotide
  Target: LAMA2; (-) strand; PAM type: YTN; PAM sequence: TTA
attactttagggggactatt

SEQ ID NO: 262596 - DNA, 20 bp, Artificial Sequence
  Description of Artificial Sequence: Synthetic oligonucleotide
  Target: LAMA2; (-) strand; PAM type: YTN; PAM sequence: TTT
aattactttagggggactat

SEQ ID NO: 262597 - DNA, 20 bp, Artificial Sequence
  Description of Artificial Sequence: Synthetic oligonucleotide
  Target: LAMA2; (-) strand; PAM type: YTN; PAM sequence: TTT
taattactttagggggacta

SEQ ID NO: 262598 - DNA, 20 bp, Artificial Sequence
  Description of Artificial Sequence: Synthetic oligonucleotide
  Target: LAMA2; (-) strand; PAM type: YTN; PAM sequence: TTA
ttttaattactttaggggga

SEQ ID NO: 262599 - DNA, 20 bp, Artificial Sequence
  Description of Artificial Sequence: Synthetic oligonucleotide
  Target: LAMA2; (-) strand; PAM type: YTN; PAM sequence: TTG
aataaataaagatacaaggt

SEQ ID NO: 262600 - DNA, 20 bp, Artificial Sequence
  Description of Artificial Sequence: Synthetic oligonucleotide
  Target: LAMA2; (-) strand; PAM type: YTN; PAM sequence: TTA
taattgaataaataaagata

SEQ ID NO: 262601 - DNA, 20 bp, Artificial Sequence
  Description of Artificial Sequence: Synthetic oligonucleotide
  Target: LAMA2; (-) strand; PAM type: YTN; PAM sequence: TTT
ataattgaataaataaagat

SEQ ID NO: 262602 - DNA, 20 bp, Artificial Sequence
  Description of Artificial Sequence: Synthetic oligonucleotide
  Target: LAMA2; (-) strand; PAM type: YTN; PAM sequence: TTA
aatttataattgaataaata

SEQ ID NO: 262603 - DNA, 20 bp, Artificial Sequence
  Description of Artificial Sequence: Synthetic oligonucleotide
  Target: LAMA2; (-) strand; PAM type: YTN; PAM sequence: TTT
aaatttataattgaataaat

SEQ ID NO: 262604 - DNA, 20 bp, Artificial Sequence
  Description of Artificial Sequence: Synthetic oligonucleotide
  Target: LAMA2; (-) strand; PAM type: YTN; PAM sequence: TTG
agatttaaatttataattga

SEQ ID NO: 262605 - DNA, 20 bp, Artificial Sequence
  Description of Artificial Sequence: Synthetic oligonucleotide
  Target: LAMA2; (-) strand; PAM type: YTN; PAM sequence: TTT
gagatttaaatttataattg

SEQ ID NO: 262606 - DNA, 20 bp, Artificial Sequence
  Description of Artificial Sequence: Synthetic oligonucleotide
  Target: LAMA2; (-) strand; PAM type: YTN; PAM sequence: TTT
tgagatttaaatttataatt

SEQ ID NO: 262607 - DNA, 20 bp, Artificial Sequence
  Description of Artificial Sequence: Synthetic oligonucleotide
  Target: LAMA2; (-) strand; PAM type: YTN; PAM sequence: CTT
ttgagatttaaatttataat

SEQ ID NO: 262608 - DNA, 20 bp, Artificial Sequence
  Description of Artificial Sequence: Synthetic oligonucleotide
  Target: LAMA2; (-) strand; PAM type: YTN; PAM sequence: CTG
cttttgagatttaaatttat

SEQ ID NO: 262609 - DNA, 20 bp, Artificial Sequence
  Description of Artificial Sequence: Synthetic oligonucleotide
  Target: LAMA2; (-) strand; PAM type: YTN; PAM sequence: CTC
tgcttttgagatttaaattt

SEQ ID NO: 262610 - DNA, 20 bp, Artificial Sequence
  Description of Artificial Sequence: Synthetic oligonucleotide
  Target: LAMA2; (-) strand; PAM type: YTN; PAM sequence: CTC
tctgcttttgagatttaaat

SEQ ID NO: 262611 - DNA, 20 bp, Artificial Sequence
  Description of Artificial Sequence: Synthetic oligonucleotide
  Target: LAMA2; (-) strand; PAM type: YTN; PAM sequence: TTA
aactctctgcttttgagatt

SEQ ID NO: 262612 - DNA, 20 bp, Artificial Sequence
  Description of Artificial Sequence: Synthetic oligonucleotide
  Target: LAMA2; (-) strand; PAM type: YTN; PAM sequence: CTT
aaactctctgcttttgagat

SEQ ID NO: 262613 - DNA, 20 bp, Artificial Sequence
  Description of Artificial Sequence: Synthetic oligonucleotide
  Target: LAMA2; (-) strand; PAM type: YTN; PAM sequence: CTC
ttaaactctctgcttttgag

SEQ ID NO: 262614 - DNA, 20 bp, Artificial Sequence
  Description of Artificial Sequence: Synthetic oligonucleotide
  Target: LAMA2; (-) strand; PAM type: YTN; PAM sequence: CTC
aaacagaatataaactctta

SEQ ID NO: 262615 - DNA, 20 bp, Artificial Sequence
  Description of Artificial Sequence: Synthetic oligonucleotide
  Target: LAMA2; (-) strand; PAM type: YTN; PAM sequence: TTC
aaacctcaaacagaatataa

SEQ ID NO: 262616 - DNA, 20 bp, Artificial Sequence
  Description of Artificial Sequence: Synthetic oligonucleotide
  Target: LAMA2; (-) strand; PAM type: YTN; PAM sequence: CTG
atacaatgtacaaagttcaa

SEQ ID NO: 262617 - DNA, 20 bp, Artificial Sequence
  Description of Artificial Sequence: Synthetic oligonucleotide
  Target: LAMA2; (-) strand; PAM type: YTN; PAM sequence: TTA
taaaaggaaacaaaagcaaa

SEQ ID NO: 262618 - DNA, 20 bp, Artificial Sequence
  Description of Artificial Sequence: Synthetic oligonucleotide
  Target: LAMA2; (-) strand; PAM type: YTN; PAM sequence: TTT
ataaaaggaaacaaaagcaa

SEQ ID NO: 262619 - DNA, 20 bp, Artificial Sequence
  Description of Artificial Sequence: Synthetic oligonucleotide
  Target: LAMA2; (-) strand; PAM type: YTN; PAM sequence: CTT
tataaaaggaaacaaaagca

SEQ ID NO: 262620 - DNA, 20 bp, Artificial Sequence
  Description of Artificial Sequence: Synthetic oligonucleotide
  Target: LAMA2; (-) strand; PAM type: YTN; PAM sequence: TTA
aactttataaaaggaaacaa

SEQ ID NO: 262621 - DNA, 20 bp, Artificial Sequence
  Description of Artificial Sequence: Synthetic oligonucleotide
  Target: LAMA2; (-) strand; PAM type: YTN; PAM sequence: TTA
aattaaactttataaaagga

SEQ ID NO: 262622 - DNA, 20 bp, Artificial Sequence
  Description of Artificial Sequence: Synthetic oligonucleotide
  Target: LAMA2; (-) strand; PAM type: YTN; PAM sequence: CTT
aaattaaactttataaaagg

SEQ ID NO: 262623 - DNA, 20 bp, Artificial Sequence
  Description of Artificial Sequence: Synthetic oligonucleotide
  Target: LAMA2; (-) strand; PAM type: YTN; PAM sequence: TTC
cttaaattaaactttataaa

SEQ ID NO: 262624 - DNA, 20 bp, Artificial Sequence
  Description of Artificial Sequence: Synthetic oligonucleotide
  Target: LAMA2; (-) strand; PAM type: YTN; PAM sequence: TTT
ccttaaattaaactttataa

SEQ ID NO: 262625 - DNA, 20 bp, Artificial Sequence
  Description of Artificial Sequence: Synthetic oligonucleotide
  Target: LAMA2; (-) strand; PAM type: YTN; PAM sequence: CTA
tttccttaaattaaacttta

SEQ ID NO: 262626 - DNA, 20 bp, Artificial Sequence
  Description of Artificial Sequence: Synthetic oligonucleotide
  Target: LAMA2; (-) strand; PAM type: YTN; PAM sequence: TTG
ctatttccttaaattaaact

SEQ ID NO: 262627 - DNA, 20 bp, Artificial Sequence
  Description of Artificial Sequence: Synthetic oligonucleotide
  Target: LAMA2; (-) strand; PAM type: YTN; PAM sequence: CTG
aaatgcaaaagttgctattt

SEQ ID NO: 262628 - DNA, 20 bp, Artificial Sequence
  Description of Artificial Sequence: Synthetic oligonucleotide
  Target: LAMA2; (-) strand; PAM type: YTN; PAM sequence: CTA
ctgaaatgcaaaagttgcta

SEQ ID NO: 262629 - DNA, 20 bp, Artificial Sequence
  Description of Artificial Sequence: Synthetic oligonucleotide
  Target: LAMA2; (-) strand; PAM type: YTN; PAM sequence: TTA
aataactactgaaatgcaaa

SEQ ID NO: 262630 - DNA, 20 bp, Artificial Sequence
  Description of Artificial Sequence: Synthetic oligonucleotide
  Target: LAMA2; (-) strand; PAM type: YTN; PAM sequence: TTT
aaataactactgaaatgcaa

SEQ ID NO: 262631 - DNA, 20 bp, Artificial Sequence
  Description of Artificial Sequence: Synthetic oligonucleotide
  Target: LAMA2; (-) strand; PAM type: YTN; PAM sequence: TTC
catttaaataactactgaaa

SEQ ID NO: 262632 - DNA, 20 bp, Artificial Sequence
  Description of Artificial Sequence: Synthetic oligonucleotide
  Target: LAMA2; (-) strand; PAM type: YTN; PAM sequence: CTT
ccatttaaataactactgaa

SEQ ID NO: 262633 - DNA, 20 bp, Artificial Sequence
  Description of Artificial Sequence: Synthetic oligonucleotide
  Target: LAMA2; (-) strand; PAM type: YTN; PAM sequence: CTC
cagcttccatttaaataact

SEQ ID NO: 262634 - DNA, 20 bp, Artificial Sequence
  Description of Artificial Sequence: Synthetic oligonucleotide
  Target: LAMA2; (-) strand; PAM type: YTN; PAM sequence: TTG
gccaaactccagcttccatt

SEQ ID NO: 262635 - DNA, 20 bp, Artificial Sequence
  Description of Artificial Sequence: Synthetic oligonucleotide
  Target: LAMA2; (-) strand; PAM type: YTN; PAM sequence: TTT
ggccaaactccagcttccat

SEQ ID NO: 262636 - DNA, 20 bp, Artificial Sequence
  Description of Artificial Sequence: Synthetic oligonucleotide
  Target: LAMA2; (-) strand; PAM type: YTN; PAM sequence: TTG
catcagggatttggccaaac

SEQ ID NO: 262637 - DNA, 20 bp, Artificial Sequence
  Description of Artificial Sequence: Synthetic oligonucleotide
  Target: LAMA2; (-) strand; PAM type: YTN; PAM sequence: TTG
attgcatcagggatttggcc

SEQ ID NO: 262638 - DNA, 20 bp, Artificial Sequence
  Description of Artificial Sequence: Synthetic oligonucleotide
  Target: LAMA2; (-) strand; PAM type: YTN; PAM sequence: TTT
gattgcatcagggatttggc

SEQ ID NO: 262639 - DNA, 20 bp, Artificial Sequence
  Description of Artificial Sequence: Synthetic oligonucleotide
  Target: LAMA2; (-) strand; PAM type: YTN; PAM sequence: CTT
tgattgcatcagggatttgg

SEQ ID NO: 262640 - DNA, 20 bp, Artificial Sequence
  Description of Artificial Sequence: Synthetic oligonucleotide
  Target: LAMA2; (-) strand; PAM type: YTN; PAM sequence: TTA
gagagcaatggctttgattg

SEQ ID NO: 262641 - DNA, 20 bp, Artificial Sequence
  Description of Artificial Sequence: Synthetic oligonucleotide
  Target: LAMA2; (-) strand; PAM type: YTN; PAM sequence: TTC
aggggattagagagcaatgg

SEQ ID NO: 262642 - DNA, 20 bp, Artificial Sequence
  Description of Artificial Sequence: Synthetic oligonucleotide
  Target: LAMA2; (-) strand; PAM type: YTN; PAM sequence: TTT
caggggattagagagcaatg

SEQ ID NO: 262643 - DNA, 20 bp, Artificial Sequence
  Description of Artificial Sequence: Synthetic oligonucleotide
  Target: LAMA2; (-) strand; PAM type: YTN; PAM sequence: TTT
tcaggggattagagagcaat

SEQ ID NO: 262644 - DNA, 20 bp, Artificial Sequence
  Description of Artificial Sequence: Synthetic oligonucleotide
  Target: LAMA2; (-) strand; PAM type: YTN; PAM sequence: TTT
ttcaggggattagagagcaa

SEQ ID NO: 262645 - DNA, 20 bp, Artificial Sequence
  Description of Artificial Sequence: Synthetic oligonucleotide
  Target: LAMA2; (-) strand; PAM type: YTN; PAM sequence: TTT
tttcaggggattagagagca

SEQ ID NO: 262646 - DNA, 20 bp, Artificial Sequence
  Description of Artificial Sequence: Synthetic oligonucleotide
  Target: LAMA2; (-) strand; PAM type: YTN; PAM sequence: TTT
ttttcaggggattagagagc

SEQ ID NO: 262647 - DNA, 20 bp, Artificial Sequence
  Description of Artificial Sequence: Synthetic oligonucleotide
  Target: LAMA2; (-) strand; PAM type: YTN; PAM sequence: TTT
tttttcaggggattagagag

SEQ ID NO: 262648 - DNA, 20 bp, Artificial Sequence
  Description of Artificial Sequence: Synthetic oligonucleotide
  Target: LAMA2; (-) strand; PAM type: YTN; PAM sequence: TTT
ttttttcaggggattagaga

SEQ ID NO: 262649 - DNA, 20 bp, Artificial Sequence
  Description of Artificial Sequence: Synthetic oligonucleotide
  Target: LAMA2; (-) strand; PAM type: YTN; PAM sequence: TTT
tttttttcaggggattagag

SEQ ID NO: 262650 - DNA, 20 bp, Artificial Sequence
  Description of Artificial Sequence: Synthetic oligonucleotide
  Target: LAMA2; (-) strand; PAM type: YTN; PAM sequence: CTG
caatacaccatttttttttt

SEQ ID NO: 262651 - DNA, 20 bp, Artificial Sequence
  Description of Artificial Sequence: Synthetic oligonucleotide
  Target: LAMA2; (-) strand; PAM type: YTN; PAM sequence: TTC
tgcaatacaccatttttttt

SEQ ID NO: 262652 - DNA, 20 bp, Artificial Sequence
  Description of Artificial Sequence: Synthetic oligonucleotide
  Target: LAMA2; (-) strand; PAM type: YTN; PAM sequence: TTT
ctgcaatacaccattttttt

SEQ ID NO: 262653 - DNA, 20 bp, Artificial Sequence
  Description of Artificial Sequence: Synthetic oligonucleotide
  Target: LAMA2; (-) strand; PAM type: YTN; PAM sequence: TTG
aatggcagcaacaacaaata

SEQ ID NO: 262654 - DNA, 20 bp, Artificial Sequence
  Description of Artificial Sequence: Synthetic oligonucleotide
  Target: LAMA2; (-) strand; PAM type: YTN; PAM sequence: CTT
gaatggcagcaacaacaaat

SEQ ID NO: 262655 - DNA, 20 bp, Artificial Sequence
  Description of Artificial Sequence: Synthetic oligonucleotide
  Target: LAMA2; (-) strand; PAM type: YTN; PAM sequence: TTA
caaatcaagtgaagcttgaa

SEQ ID NO: 262656 - DNA, 20 bp, Artificial Sequence
  Description of Artificial Sequence: Synthetic oligonucleotide
  Target: LAMA2; (-) strand; PAM type: YTN; PAM sequence: TTT
acaaatcaagtgaagcttga

SEQ ID NO: 262657 - DNA, 20 bp, Artificial Sequence
  Description of Artificial Sequence: Synthetic oligonucleotide
  Target: LAMA2; (-) strand; PAM type: YTN; PAM sequence: TTG
cacatgaatgcacataacag

SEQ ID NO: 262658 - DNA, 20 bp, Artificial Sequence
  Description of Artificial Sequence: Synthetic oligonucleotide
  Target: LAMA2; (-) strand; PAM type: YTN; PAM sequence: CTT
gcacatgaatgcacataaca

SEQ ID NO: 262659 - DNA, 20 bp, Artificial Sequence
  Description of Artificial Sequence: Synthetic oligonucleotide
  Target: LAMA2; (-) strand; PAM type: YTN; PAM sequence: CTC
ttgcacatgaatgcacataa

SEQ ID NO: 262660 - DNA, 20 bp, Artificial Sequence
  Description of Artificial Sequence: Synthetic oligonucleotide
  Target: LAMA2; (-) strand; PAM type: YTN; PAM sequence: TTC
tcttgcacatgaatgcacat

SEQ ID NO: 262661 - DNA, 20 bp, Artificial Sequence
  Description of Artificial Sequence: Synthetic oligonucleotide
  Target: LAMA2; (-) strand; PAM type: YTN; PAM sequence: TTT
ctcttgcacatgaatgcaca

SEQ ID NO: 262662 - DNA, 20 bp, Artificial Sequence
  Description of Artificial Sequence: Synthetic oligonucleotide
  Target: LAMA2; (-) strand; PAM type: YTN; PAM sequence: CTT
tctcttgcacatgaatgcac

SEQ ID NO: 262663 - DNA, 20 bp, Artificial Sequence
  Description of Artificial Sequence: Synthetic oligonucleotide
  Target: LAMA2; (-) strand; PAM type: YTN; PAM sequence: CTC
ctttctcttgcacatgaatg

SEQ ID NO: 262664 - DNA, 20 bp, Artificial Sequence
  Description of Artificial Sequence: Synthetic oligonucleotide
  Target: LAMA2; (-) strand; PAM type: YTN; PAM sequence: TTC
tcctttctcttgcacatgaa

SEQ ID NO: 262665 - DNA, 20 bp, Artificial Sequence
  Description of Artificial Sequence: Synthetic oligonucleotide
  Target: LAMA2; (-) strand; PAM type: YTN; PAM sequence: TTC
attctcctttctcttgcaca

SEQ ID NO: 262666 - DNA, 20 bp, Artificial Sequence
  Description of Artificial Sequence: Synthetic oligonucleotide
  Target: LAMA2; (-) strand; PAM type: YTN; PAM sequence: CTT
cattctcctttctcttgcac

SEQ ID NO: 262667 - DNA, 20 bp, Artificial Sequence
  Description of Artificial Sequence: Synthetic oligonucleotide
  Target: LAMA2; (-) strand; PAM type: YTN; PAM sequence: CTG
gcttcattctcctttctctt

SEQ ID NO: 262668 - DNA, 20 bp, Artificial Sequence
  Description of Artificial Sequence: Synthetic oligonucleotide
  Target: LAMA2; (-) strand; PAM type: YTN; PAM sequence: CTA
ctggcttcattctcctttct

SEQ ID NO: 262669 - DNA, 20 bp, Artificial Sequence
  Description of Artificial Sequence: Synthetic oligonucleotide
  Target: LAMA2; (-) strand; PAM type: YTN; PAM sequence: TTA
tagcccgaggagctactggc

SEQ ID NO: 262670 - DNA, 20 bp, Artificial Sequence
  Description of Artificial Sequence: Synthetic oligonucleotide
  Target: LAMA2; (-) strand; PAM type: YTN; PAM sequence: TTT
atagcccgaggagctactgg

SEQ ID NO: 262671 - DNA, 20 bp, Artificial Sequence
  Description of Artificial Sequence: Synthetic oligonucleotide
  Target: LAMA2; (-) strand; PAM type: YTN; PAM sequence: TTT
tatagcccgaggagctactg

SEQ ID NO: 262672 - DNA, 20 bp, Artificial Sequence
  Description of Artificial Sequence: Synthetic oligonucleotide
  Target: LAMA2; (-) strand; PAM type: YTN; PAM sequence: CTC
catggaattttatagcccga

SEQ ID NO: 262673 - DNA, 20 bp, Artificial Sequence
  Description of Artificial Sequence: Synthetic oligonucleotide
  Target: LAMA2; (-) strand; PAM type: YTN; PAM sequence: TTG
gcatctccatggaattttat

SEQ ID NO: 262674 - DNA, 20 bp, Artificial Sequence
  Description of Artificial Sequence: Synthetic oligonucleotide
  Target: LAMA2; (-) strand; PAM type: YTN; PAM sequence: TTG
cattggcatctccatggaat

SEQ ID NO: 262675 - DNA, 20 bp, Artificial Sequence
  Description of Artificial Sequence: Synthetic oligonucleotide
  Target: LAMA2; (-) strand; PAM type: YTN; PAM sequence: TTT
gcattggcatctccatggaa

SEQ ID NO: 262676 - DNA, 20 bp, Artificial Sequence
  Description of Artificial Sequence: Synthetic oligonucleotide
  Target: LAMA2; (-) strand; PAM type: YTN; PAM sequence: CTT
tgcattggcatctccatgga

SEQ ID NO: 262677 - DNA, 20 bp, Artificial Sequence
  Description of Artificial Sequence: Synthetic oligonucleotide
  Target: LAMA2; (-) strand; PAM type: YTN; PAM sequence: CTG
tgggagtaagaaggtaactt

SEQ ID NO: 262678 - DNA, 20 bp, Artificial Sequence
  Description of Artificial Sequence: Synthetic oligonucleotide
  Target: LAMA2; (-) strand; PAM type: YTN; PAM sequence: CTC
tgtgggagtaagaaggtaac

SEQ ID NO: 262679 - DNA, 20 bp, Artificial Sequence
  Description of Artificial Sequence: Synthetic oligonucleotide
  Target: LAMA2; (-) strand; PAM type: YTN; PAM sequence: CTC
tctgtgggagtaagaaggta

SEQ ID NO: 262680 - DNA, 20 bp, Artificial Sequence
  Description of Artificial Sequence: Synthetic oligonucleotide
  Target: LAMA2; (-) strand; PAM type: YTN; PAM sequence: CTG
ggctctctgtgggagtaaga

SEQ ID NO: 262681 - DNA, 20 bp, Artificial Sequence
  Description of Artificial Sequence: Synthetic oligonucleotide
  Target: LAMA2; (-) strand; PAM type: YTN; PAM sequence: CTC
tgggctctctgtgggagtaa

SEQ ID NO: 262682 - DNA, 20 bp, Artificial Sequence
  Description of Artificial Sequence: Synthetic oligonucleotide
  Target: LAMA2; (-) strand; PAM type: YTN; PAM sequence: TTC
tctgggctctctgtgggagt

SEQ ID NO: 262683 - DNA, 20 bp, Artificial Sequence
  Description of Artificial Sequence: Synthetic oligonucleotide
  Target: LAMA2; (-) strand; PAM type: YTN; PAM sequence: TTA
tgttctctgggctctctgtg

SEQ ID NO: 262684 - DNA, 20 bp, Artificial Sequence
  Description of Artificial Sequence: Synthetic oligonucleotide
  Target: LAMA2; (-) strand; PAM type: YTN; PAM sequence: CTT
atgttctctgggctctctgt

SEQ ID NO: 262685 - DNA, 20 bp, Artificial Sequence
  Description of Artificial Sequence: Synthetic oligonucleotide
  Target: LAMA2; (-) strand; PAM type: YTN; PAM sequence: CTC
ccttatgttctctgggctct

SEQ ID NO: 262686 - DNA, 20 bp, Artificial Sequence
  Description of Artificial Sequence: Synthetic oligonucleotide
  Target: LAMA2; (-) strand; PAM type: YTN; PAM sequence: TTC
tcccttatgttctctgggct

SEQ ID NO: 262687 - DNA, 20 bp, Artificial Sequence
  Description of Artificial Sequence: Synthetic oligonucleotide
  Target: LAMA2; (-) strand; PAM type: YTN; PAM sequence: CTT
ctcccttatgttctctgggc

SEQ ID NO: 262688 - DNA, 20 bp, Artificial Sequence
  Description of Artificial Sequence: Synthetic oligonucleotide
  Target: LAMA2; (-) strand; PAM type: YTN; PAM sequence: CTG
caagaaaaacttctccctta

SEQ ID NO: 262689 - DNA, 20 bp, Artificial Sequence
  Description of Artificial Sequence: Synthetic oligonucleotide
  Target: LAMA2; (-) strand; PAM type: YTN; PAM sequence: TTC
tgcaagaaaaacttctccct

SEQ ID NO: 262690 - DNA, 20 bp, Artificial Sequence
  Description of Artificial Sequence: Synthetic oligonucleotide
  Target: LAMA2; (-) strand; PAM type: YTN; PAM sequence: CTT
ctgcaagaaaaacttctccc

SEQ ID NO: 262691 - DNA, 20 bp, Artificial Sequence
  Description of Artificial Sequence: Synthetic oligonucleotide
  Target: LAMA2; (-) strand; PAM type: YTN; PAM sequence: CTC
cccttctgcaagaaaaactt

SEQ ID NO: 262692 - DNA, 20 bp, Artificial Sequence
  Description of Artificial Sequence: Synthetic oligonucleotide
  Target: LAMA2; (-) strand; PAM type: YTN; PAM sequence: CTG
taagcaaaccactccccttc

SEQ ID NO: 262693 - DNA, 20 bp, Artificial Sequence
  Description of Artificial Sequence: Synthetic oligonucleotide
  Target: LAMA2; (-) strand; PAM type: YTN; PAM sequence: CTG
taagtacacacagtggtggt

SEQ ID NO: 262694 - DNA, 20 bp, Artificial Sequence
  Description of Artificial Sequence: Synthetic oligonucleotide
  Target: LAMA2; (-) strand; PAM type: YTN; PAM sequence: CTC
cctgtaagtacacacagtgg

SEQ ID NO: 262695 - DNA, 20 bp, Artificial Sequence
  Description of Artificial Sequence: Synthetic oligonucleotide
  Target: LAMA2; (-) strand; PAM type: YTN; PAM sequence: CTG
ctccctgtaagtacacacag

SEQ ID NO: 262696 - DNA, 20 bp, Artificial Sequence
  Description of Artificial Sequence: Synthetic oligonucleotide
  Target: LAMA2; (-) strand; PAM type: YTN; PAM sequence: CTC
tgctccctgtaagtacacac

SEQ ID NO: 262697 - DNA, 20 bp, Artificial Sequence
  Description of Artificial Sequence: Synthetic oligonucleotide
  Target: LAMA2; (-) strand; PAM type: YTN; PAM sequence: CTC
tctgctccctgtaagtacac

SEQ ID NO: 262698 - DNA, 20 bp, Artificial Sequence
  Description of Artificial Sequence: Synthetic oligonucleotide
  Target: LAMA2; (-) strand; PAM type: YTN; PAM sequence: TTC
actctctgctccctgtaagt

SEQ ID NO: 262699 - DNA, 20 bp, Artificial Sequence
  Description of Artificial Sequence: Synthetic oligonucleotide
  Target: LAMA2; (-) strand; PAM type: YTN; PAM sequence: TTT
cactctctgctccctgtaag

SEQ ID NO: 262700 - DNA, 20 bp, Artificial Sequence
  Description of Artificial Sequence: Synthetic oligonucleotide
  Target: LAMA2; (-) strand; PAM type: YTN; PAM sequence: TTC
aggtttcactctctgctccc

SEQ ID NO: 262701 - DNA, 20 bp, Artificial Sequence
  Description of Artificial Sequence: Synthetic oligonucleotide
  Target: LAMA2; (-) strand; PAM type: YTN; PAM sequence: TTA
aaattcaggtttcactctct

SEQ ID NO: 262702 - DNA, 20 bp, Artificial Sequence
  Description of Artificial Sequence: Synthetic oligonucleotide
  Target: LAMA2; (-) strand; PAM type: YTN; PAM sequence: TTC
aattaaaattcaggtttcac

SEQ ID NO: 262703 - DNA, 20 bp, Artificial Sequence
  Description of Artificial Sequence: Synthetic oligonucleotide
  Target: LAMA2; (-) strand; PAM type: YTN; PAM sequence: TTG
atgaaacacacattcaatta

SEQ ID NO: 262704 - DNA, 20 bp, Artificial Sequence
  Description of Artificial Sequence: Synthetic oligonucleotide
  Target: LAMA2; (-) strand; PAM type: YTN; PAM sequence: CTT
gatgaaacacacattcaatt

SEQ ID NO: 262705 - DNA, 20 bp, Artificial Sequence
  Description of Artificial Sequence: Synthetic oligonucleotide
  Target: LAMA2; (-) strand; PAM type: YTN; PAM sequence: TTG
gtcttgatgaaacacacatt

SEQ ID NO: 262706 - DNA, 20 bp, Artificial Sequence
  Description of Artificial Sequence: Synthetic oligonucleotide
  Target: LAMA2; (-) strand; PAM type: YTN; PAM sequence: CTG
aagattggtcttgatgaaac

SEQ ID NO: 262707 - DNA, 20 bp, Artificial Sequence
  Description of Artificial Sequence: Synthetic oligonucleotide
  Target: LAMA2; (-) strand; PAM type: YTN; PAM sequence: CTC
tgaagattggtcttgatgaa

SEQ ID NO: 262708 - DNA, 20 bp, Artificial Sequence
  Description of Artificial Sequence: Synthetic oligonucleotide
  Target: LAMA2; (-) strand; PAM type: YTN; PAM sequence: CTG
cactctgaagattggtcttg

SEQ ID NO: 262709 - DNA, 20 bp, Artificial Sequence
  Description of Artificial Sequence: Synthetic oligonucleotide
  Target: LAMA2; (-) strand; PAM type: YTN; PAM sequence: TTG
taatctgcactctgaagatt

SEQ ID NO: 262710 - DNA, 20 bp, Artificial Sequence
  Description of Artificial Sequence: Synthetic oligonucleotide
  Target: LAMA2; (-) strand; PAM type: YTN; PAM sequence: CTA
gcattgtaatctgcactctg

SEQ ID NO: 262711 - DNA, 20 bp, Artificial Sequence
  Description of Artificial Sequence: Synthetic oligonucleotide
  Target: LAMA2; (-) strand; PAM type: YTN; PAM sequence: TTG
ctagcattgtaatctgcact

SEQ ID NO: 262712 - DNA, 20 bp, Artificial Sequence
  Description of Artificial Sequence: Synthetic oligonucleotide
  Target: LAMA2; (-) strand; PAM type: YTN; PAM sequence: TTT
gctagcattgtaatctgcac

SEQ ID NO: 262713 - DNA, 20 bp, Artificial Sequence
  Description of Artificial Sequence: Synthetic oligonucleotide
  Target: LAMA2; (-) strand; PAM type: YTN; PAM sequence: CTT
tgctagcattgtaatctgca

SEQ ID NO: 262714 - DNA, 20 bp, Artificial Sequence
  Description of Artificial Sequence: Synthetic oligonucleotide
  Target: LAMA2; (-) strand; PAM type: YTN; PAM sequence: TTC
tttgctagcattgtaatctg

SEQ ID NO: 262715 - DNA, 20 bp, Artificial Sequence
  Description of Artificial Sequence: Synthetic oligonucleotide
  Target: LAMA2; (-) strand; PAM type: YTN; PAM sequence: TTA
tgaatgcatgttctttgcta

SEQ ID NO: 262716 - DNA, 20 bp, Artificial Sequence
  Description of Artificial Sequence: Synthetic oligonucleotide
  Target: LAMA2; (-) strand; PAM type: YTN; PAM sequence: CTG
aattatgaatgcatgttctt

SEQ ID NO: 262717 - DNA, 20 bp, Artificial Sequence
  Description of Artificial Sequence: Synthetic oligonucleotide
  Target: LAMA2; (-) strand; PAM type: YTN; PAM sequence: TTG
aaactgaattatgaatgcat

SEQ ID NO: 262718 - DNA, 20 bp, Artificial Sequence
  Description of Artificial Sequence: Synthetic oligonucleotide
  Target: LAMA2; (-) strand; PAM type: YTN; PAM sequence: TTA
ttgaaactgaattatgaatg

SEQ ID NO: 262719 - DNA, 20 bp, Artificial Sequence
  Description of Artificial Sequence: Synthetic oligonucleotide
  Target: LAMA2; (-) strand; PAM type: YTN; PAM sequence: TTT
attgaaactgaattatgaat

SEQ ID NO: 262720 - DNA, 20 bp, Artificial Sequence
  Description of Artificial Sequence: Synthetic oligonucleotide
  Target: LAMA2; (-) strand; PAM type: YTN; PAM sequence: TTT
tattgaaactgaattatgaa

SEQ ID NO: 262721 - DNA, 20 bp, Artificial Sequence
  Description of Artificial Sequence: Synthetic oligonucleotide
  Target: LAMA2; (-) strand; PAM type: YTN; PAM sequence: TTA
taacaagcataggtaggttt

SEQ ID NO: 262722 - DNA, 20 bp, Artificial Sequence
  Description of Artificial Sequence: Synthetic oligonucleotide
  Target: LAMA2; (-) strand; PAM type: YTN; PAM sequence: TTT
ataacaagcataggtaggtt

SEQ ID NO: 262723 - DNA, 20 bp, Artificial Sequence
  Description of Artificial Sequence: Synthetic oligonucleotide
  Target: LAMA2; (-) strand; PAM type: YTN; PAM sequence: CTT
tataacaagcataggtaggt

SEQ ID NO: 262724 - DNA, 20 bp, Artificial Sequence
  Description of Artificial Sequence: Synthetic oligonucleotide
  Target: LAMA2; (-) strand; PAM type: YTN; PAM sequence: TTG
agtcataaactttataacaa

SEQ ID NO: 262725 - DNA, 20 bp, Artificial Sequence
  Description of Artificial Sequence: Synthetic oligonucleotide
  Target: LAMA2; (-) strand; PAM type: YTN; PAM sequence: TTT
gagtcataaactttataaca

SEQ ID NO: 262726 - DNA, 20 bp, Artificial Sequence
  Description of Artificial Sequence: Synthetic oligonucleotide
  Target: LAMA2; (-) strand; PAM type: YTN; PAM sequence: TTA
aggagtttgagtcataaact

SEQ ID NO: 262727 - DNA, 20 bp, Artificial Sequence
  Description of Artificial Sequence: Synthetic oligonucleotide
  Target: LAMA2; (-) strand; PAM type: YTN; PAM sequence: TTT
aaggagtttgagtcataaac

SEQ ID NO: 262728 - DNA, 20 bp, Artificial Sequence
  Description of Artificial Sequence: Synthetic oligonucleotide
  Target: LAMA2; (-) strand; PAM type: YTN; PAM sequence: CTC
caggagtttaaggagtttga

SEQ ID NO: 262729 - DNA, 20 bp, Artificial Sequence
  Description of Artificial Sequence: Synthetic oligonucleotide
  Target: LAMA2; (-) strand; PAM type: YTN; PAM sequence: TTA
cctccaggagtttaaggagt

SEQ ID NO: 262730 - DNA, 20 bp, Artificial Sequence
  Description of Artificial Sequence: Synthetic oligonucleotide
  Target: LAMA2; (-) strand; PAM type: YTN; PAM sequence: TTC
aaataaaagttacctccagg

SEQ ID NO: 262731 - DNA, 20 bp, Artificial Sequence
  Description of Artificial Sequence: Synthetic oligonucleotide
  Target: LAMA2; (-) strand; PAM type: YTN; PAM sequence: CTT
caaataaaagttacctccag

SEQ ID NO: 262732 - DNA, 20 bp, Artificial Sequence
  Description of Artificial Sequence: Synthetic oligonucleotide
  Target: LAMA2; (-) strand; PAM type: YTN; PAM sequence: TTG
cttcaaataaaagttacctc

SEQ ID NO: 262733 - DNA, 20 bp, Artificial Sequence
  Description of Artificial Sequence: Synthetic oligonucleotide
  Target: LAMA2; (-) strand; PAM type: YTN; PAM sequence: TTT
gcttcaaataaaagttacct

SEQ ID NO: 262734 - DNA, 20 bp, Artificial Sequence
  Description of Artificial Sequence: Synthetic oligonucleotide
  Target: LAMA2; (-) strand; PAM type: YTN; PAM sequence: TTT
tgcttcaaataaaagttacc

SEQ ID NO: 262735 - DNA, 20 bp, Artificial Sequence
  Description of Artificial Sequence: Synthetic oligonucleotide
  Target: LAMA2; (-) strand; PAM type: YTN; PAM sequence: TTA
aaatgtgacaatgaatagtt

SEQ ID NO: 262736 - DNA, 20 bp, Artificial Sequence
  Description of Artificial Sequence: Synthetic oligonucleotide
  Target: LAMA2; (-) strand; PAM type: YTN; PAM sequence: TTT
aaaatgtgacaatgaatagt

SEQ ID NO: 262737 - DNA, 20 bp, Artificial Sequence
  Description of Artificial Sequence: Synthetic oligonucleotide
  Target: LAMA2; (-) strand; PAM type: YTN; PAM sequence: CTT
taaaatgtgacaatgaatag

SEQ ID NO: 262738 - DNA, 20 bp, Artificial Sequence
  Description of Artificial Sequence: Synthetic oligonucleotide
  Target: LAMA2; (-) strand; PAM type: YTN; PAM sequence: TTG
ggaaataaactttaaaatgt

SEQ ID NO: 262739 - DNA, 20 bp, Artificial Sequence
  Description of Artificial Sequence: Synthetic oligonucleotide
  Target: LAMA2; (-) strand; PAM type: YTN; PAM sequence: TTT
gggaaataaactttaaaatg

SEQ ID NO: 262740 - DNA, 20 bp, Artificial Sequence
  Description of Artificial Sequence: Synthetic oligonucleotide
  Target: LAMA2; (-) strand; PAM type: YTN; PAM sequence: CTG
gtaacacaaacatgtttggg

SEQ ID NO: 262741 - DNA, 20 bp, Artificial Sequence
  Description of Artificial Sequence: Synthetic oligonucleotide
  Target: LAMA2; (-) strand; PAM type: YTN; PAM sequence: CTA
actggtaacacaaacatgtt

SEQ ID NO: 262742 - DNA, 20 bp, Artificial Sequence
  Description of Artificial Sequence: Synthetic oligonucleotide
  Target: LAMA2; (-) strand; PAM type: YTN; PAM sequence: TTA
tgatggactaactggtaaca

SEQ ID NO: 262743 - DNA, 20 bp, Artificial Sequence
  Description of Artificial Sequence: Synthetic oligonucleotide
  Target: LAMA2; (-) strand; PAM type: YTN; PAM sequence: TTT
atgatggactaactggtaac

SEQ ID NO: 262744 - DNA, 20 bp, Artificial Sequence
  Description of Artificial Sequence: Synthetic oligonucleotide
  Target: LAMA2; (-) strand; PAM type: YTN; PAM sequence: TTT
tatgatggactaactggtaa

SEQ ID NO: 262745 - DNA, 20 bp, Artificial Sequence
  Description of Artificial Sequence: Synthetic oligonucleotide
  Target: LAMA2; (-) strand; PAM type: YTN; PAM sequence: CTA
ttttatgatggactaactgg

SEQ ID NO: 262746 - DNA, 20 bp, Artificial Sequence
  Description of Artificial Sequence: Synthetic oligonucleotide
  Target: LAMA2; (-) strand; PAM type: YTN; PAM sequence: CTG
ggactattttatgatggact

SEQ ID NO: 262747 - DNA, 20 bp, Artificial Sequence
  Description of Artificial Sequence: Synthetic oligonucleotide
  Target: LAMA2; (-) strand; PAM type: YTN; PAM sequence: TTA
aaaaataaatgtagtccata

SEQ ID NO: 262748 - DNA, 20 bp, Artificial Sequence
  Description of Artificial Sequence: Synthetic oligonucleotide
  Target: LAMA2; (-) strand; PAM type: YTN; PAM sequence: TTC
attaaaaaataaatgtagtc

SEQ ID NO: 262749 - DNA, 20 bp, Artificial Sequence
  Description of Artificial Sequence: Synthetic oligonucleotide
  Target: LAMA2; (-) strand; PAM type: YTN; PAM sequence: TTT
cattaaaaaataaatgtagt

SEQ ID NO: 262750 - DNA, 20 bp, Artificial Sequence
  Description of Artificial Sequence: Synthetic oligonucleotide
  Target: LAMA2; (-) strand; PAM type: YTN; PAM sequence: TTT
tcattaaaaaataaatgtag

SEQ ID NO: 262751 - DNA, 20 bp, Artificial Sequence
  Description of Artificial Sequence: Synthetic oligonucleotide
  Target: LAMA2; (-) strand; PAM type: YTN; PAM sequence: CTT
ttcattaaaaaataaatgta

SEQ ID NO: 262752 - DNA, 20 bp, Artificial Sequence
  Description of Artificial Sequence: Synthetic oligonucleotide
  Target: LAMA2; (-) strand; PAM type: YTN; PAM sequence: TTA
atacccttttcattaaaaaa

SEQ ID NO: 262753 - DNA, 20 bp, Artificial Sequence
  Description of Artificial Sequence: Synthetic oligonucleotide
  Target: LAMA2; (-) strand; PAM type: YTN; PAM sequence: TTG
aaaataacatattaataccc

SEQ ID NO: 262754 - DNA, 20 bp, Artificial Sequence
  Description of Artificial Sequence: Synthetic oligonucleotide
  Target: LAMA2; (-) strand; PAM type: YTN; PAM sequence: TTG
aaaagaaaatcataattgaa

SEQ ID NO: 262755 - DNA, 20 bp, Artificial Sequence
  Description of Artificial Sequence: Synthetic oligonucleotide
  Target: LAMA2; (-) strand; PAM type: YTN; PAM sequence: TTA
taattgaaaagaaaatcata

SEQ ID NO: 262756 - DNA, 20 bp, Artificial Sequence
  Description of Artificial Sequence: Synthetic oligonucleotide
  Target: LAMA2; (-) strand; PAM type: YTN; PAM sequence: CTG
atggtgaaatagtcattata

SEQ ID NO: 262757 - DNA, 20 bp, Artificial Sequence
  Description of Artificial Sequence: Synthetic oligonucleotide
  Target: LAMA2; (-) strand; PAM type: YTN; PAM sequence: TTC
tgatggtgaaatagtcatta

SEQ ID NO: 262758 - DNA, 20 bp, Artificial Sequence
  Description of Artificial Sequence: Synthetic oligonucleotide
  Target: LAMA2; (-) strand; PAM type: YTN; PAM sequence: TTT
ctgatggtgaaatagtcatt

SEQ ID NO: 262759 - DNA, 20 bp, Artificial Sequence
  Description of Artificial Sequence: Synthetic oligonucleotide
  Target: LAMA2; (-) strand; PAM type: YTN; PAM sequence: TTT
tctgatggtgaaatagtcat

SEQ ID NO: 262760 - DNA, 20 bp, Artificial Sequence
  Description of Artificial Sequence: Synthetic oligonucleotide
  Target: LAMA2; (-) strand; PAM type: YTN; PAM sequence: CTT
ttctgatggtgaaatagtca

SEQ ID NO: 262761 - DNA, 20 bp, Artificial Sequence
  Description of Artificial Sequence: Synthetic oligonucleotide
  Target: LAMA2; (-) strand; PAM type: YTN; PAM sequence: CTC
accttttctgatggtgaaat

SEQ ID NO: 262762 - DNA, 20 bp, Artificial Sequence
  Description of Artificial Sequence: Synthetic oligonucleotide
  Target: LAMA2; (-) strand; PAM type: YTN; PAM sequence: TTA
actcaccttttctgatggtg

SEQ ID NO: 262763 - DNA, 20 bp, Artificial Sequence
  Description of Artificial Sequence: Synthetic oligonucleotide
  Target: LAMA2; (-) strand; PAM type: YTN; PAM sequence: CTT
aactcaccttttctgatggt

SEQ ID NO: 262764 - DNA, 20 bp, Artificial Sequence
  Description of Artificial Sequence: Synthetic oligonucleotide
  Target: LAMA2; (-) strand; PAM type: YTN; PAM sequence: TTC
aagtaacttaactcaccttt

SEQ ID NO: 262765 - DNA, 20 bp, Artificial Sequence
  Description of Artificial Sequence: Synthetic oligonucleotide
  Target: LAMA2; (-) strand; PAM type: YTN; PAM sequence: CTT
caagtaacttaactcacctt

SEQ ID NO: 262766 - DNA, 20 bp, Artificial Sequence
  Description of Artificial Sequence: Synthetic oligonucleotide
  Target: LAMA2; (-) strand; PAM type: YTN; PAM sequence: TTC
cttcaagtaacttaactcac

SEQ ID NO: 262767 - DNA, 20 bp, Artificial Sequence
  Description of Artificial Sequence: Synthetic oligonucleotide
  Target: LAMA2; (-) strand; PAM type: YTN; PAM sequence: TTA
aataattccttcaagtaact

SEQ ID NO: 262768 - DNA, 20 bp, Artificial Sequence
  Description of Artificial Sequence: Synthetic oligonucleotide
  Target: LAMA2; (-) strand; PAM type: YTN; PAM sequence: TTA
ttaaataattccttcaagta

SEQ ID NO: 262769 - DNA, 20 bp, Artificial Sequence
  Description of Artificial Sequence: Synthetic oligonucleotide
  Target: LAMA2; (-) strand; PAM type: YTN; PAM sequence: TTT
attaaataattccttcaagt

SEQ ID NO: 262770 - DNA, 20 bp, Artificial Sequence
  Description of Artificial Sequence: Synthetic oligonucleotide
  Target: LAMA2; (-) strand; PAM type: YTN; PAM sequence: CTT
tattaaataattccttcaag

SEQ ID NO: 262771 - DNA, 20 bp, Artificial Sequence
  Description of Artificial Sequence: Synthetic oligonucleotide
  Target: LAMA2; (-) strand; PAM type: YTN; PAM sequence: TTA
actttattaaataattcctt

SEQ ID NO: 262772 - DNA, 20 bp, Artificial Sequence
  Description of Artificial Sequence: Synthetic oligonucleotide
  Target: LAMA2; (-) strand; PAM type: YTN; PAM sequence: CTT
aactttattaaataattcct

SEQ ID NO: 262773 - DNA, 20 bp, Artificial Sequence
  Description of Artificial Sequence: Synthetic oligonucleotide
  Target: LAMA2; (-) strand; PAM type: YTN; PAM sequence: TTC
ttaactttattaaataattc

SEQ ID NO: 262774 - DNA, 20 bp, Artificial Sequence
  Description of Artificial Sequence: Synthetic oligonucleotide
  Target: LAMA2; (-) strand; PAM type: YTN; PAM sequence: TTT
cttaactttattaaataatt

SEQ ID NO: 262775 - DNA, 20 bp, Artificial Sequence
  Description of Artificial Sequence: Synthetic oligonucleotide
  Target: LAMA2; (-) strand; PAM type: YTN; PAM sequence: TTT
tcttaactttattaaataat

SEQ ID NO: 262776 - DNA, 20 bp, Artificial Sequence
  Description of Artificial Sequence: Synthetic oligonucleotide
  Target: LAMA2; (-) strand; PAM type: YTN; PAM sequence: TTC
aaaataatattttcttaact

SEQ ID NO: 262777 - DNA, 20 bp, Artificial Sequence
  Description of Artificial Sequence: Synthetic oligonucleotide
  Target: LAMA2; (-) strand; PAM type: YTN; PAM sequence: TTT
caaaataatattttcttaac

SEQ ID NO: 262778 - DNA, 20 bp, Artificial Sequence
  Description of Artificial Sequence: Synthetic oligonucleotide
  Target: LAMA2; (-) strand; PAM type: YTN; PAM sequence: CTG
aggataatgtttcaaaataa

SEQ ID NO: 262779 - DNA, 20 bp, Artificial Sequence
  Description of Artificial Sequence: Synthetic oligonucleotide
  Target: LAMA2; (-) strand; PAM type: YTN; PAM sequence: TTC
tgaggataatgtttcaaaat

SEQ ID NO: 262780 - DNA, 20 bp, Artificial Sequence
  Description of Artificial Sequence: Synthetic oligonucleotide
  Target: LAMA2; (-) strand; PAM type: YTN; PAM sequence: TTT
ctgaggataatgtttcaaaa

SEQ ID NO: 262781 - DNA, 20 bp, Artificial Sequence
  Description of Artificial Sequence: Synthetic oligonucleotide
  Target: LAMA2; (-) strand; PAM type: YTN; PAM sequence: CTT
tctgaggataatgtttcaaa

SEQ ID NO: 262782 - DNA, 20 bp, Artificial Sequence
  Description of Artificial Sequence: Synthetic oligonucleotide
  Target: LAMA2; (-) strand; PAM type: YTN; PAM sequence: TTC
tttctgaggataatgtttca

SEQ ID NO: 262783 - DNA, 20 bp, Artificial Sequence
  Description of Artificial Sequence: Synthetic oligonucleotide
  Target: LAMA2; (-) strand; PAM type: YTN; PAM sequence: TTT
ctttctgaggataatgtttc

SEQ ID NO: 262784 - DNA, 20 bp, Artificial Sequence
  Description of Artificial Sequence: Synthetic oligonucleotide
  Target: LAMA2; (-) strand; PAM type: YTN; PAM sequence: TTG
atttctttctgaggataatg

SEQ ID NO: 262785 - DNA, 20 bp, Artificial Sequence
  Description of Artificial Sequence: Synthetic oligonucleotide
  Target: LAMA2; (-) strand; PAM type: YTN; PAM sequence: CTA
ataatattgatttctttctg

SEQ ID NO: 262786 - DNA, 20 bp, Artificial Sequence
  Description of Artificial Sequence: Synthetic oligonucleotide
  Target: LAMA2; (-) strand; PAM type: YTN; PAM sequence: CTA
gaaaataatgatcacgcata

SEQ ID NO: 262787 - DNA, 20 bp, Artificial Sequence
  Description of Artificial Sequence: Synthetic oligonucleotide
  Target: LAMA2; (-) strand; PAM type: YTN; PAM sequence: TTA
gaaaaccacctagaaaataa

SEQ ID NO: 262788 - DNA, 20 bp, Artificial Sequence
  Description of Artificial Sequence: Synthetic oligonucleotide
  Target: LAMA2; (-) strand; PAM type: YTN; PAM sequence: TTT
agaaaaccacctagaaaata

SEQ ID NO: 262789 - DNA, 20 bp, Artificial Sequence
  Description of Artificial Sequence: Synthetic oligonucleotide
  Target: LAMA2; (-) strand; PAM type: YTN; PAM sequence: CTT
tagaaaaccacctagaaaat

SEQ ID NO: 262790 - DNA, 20 bp, Artificial Sequence
  Description of Artificial Sequence: Synthetic oligonucleotide
  Target: LAMA2; (-) strand; PAM type: YTN; PAM sequence: TTC
aggaactttagaaaaccacc

SEQ ID NO: 262791 - DNA, 20 bp, Artificial Sequence
  Description of Artificial Sequence: Synthetic oligonucleotide
  Target: LAMA2; (-) strand; PAM type: YTN; PAM sequence: TTT
caggaactttagaaaaccac

SEQ ID NO: 262792 - DNA, 20 bp, Artificial Sequence
  Description of Artificial Sequence: Synthetic oligonucleotide
  Target: LAMA2; (-) strand; PAM type: YTN; PAM sequence: CTT
tcaggaactttagaaaacca

SEQ ID NO: 262793 - DNA, 20 bp, Artificial Sequence
  Description of Artificial Sequence: Synthetic oligonucleotide
  Target: LAMA2; (-) strand; PAM type: YTN; PAM sequence: CTG
aatgacctttcaggaacttt

SEQ ID NO: 262794 - DNA, 20 bp, Artificial Sequence
  Description of Artificial Sequence: Synthetic oligonucleotide
  Target: LAMA2; (-) strand; PAM type: YTN; PAM sequence: CTC
tgaatgacctttcaggaact

SEQ ID NO: 262795 - DNA, 20 bp, Artificial Sequence
  Description of Artificial Sequence: Synthetic oligonucleotide
  Target: LAMA2; (-) strand; PAM type: YTN; PAM sequence: TTC
ccaatgctctgaatgacctt

SEQ ID NO: 262796 - DNA, 20 bp, Artificial Sequence
  Description of Artificial Sequence: Synthetic oligonucleotide
  Target: LAMA2; (-) strand; PAM type: YTN; PAM sequence: CTT
cccaatgctctgaatgacct

SEQ ID NO: 262797 - DNA, 20 bp, Artificial Sequence
  Description of Artificial Sequence: Synthetic oligonucleotide
  Target: LAMA2; (-) strand; PAM type: YTN; PAM sequence: TTC
ttcccaatgctctgaatgac

SEQ ID NO: 262798 - DNA, 20 bp, Artificial Sequence
  Description of Artificial Sequence: Synthetic oligonucleotide
  Target: LAMA2; (-) strand; PAM type: YTN; PAM sequence: CTT
cttcccaatgctctgaatga

SEQ ID NO: 262799 - DNA, 20 bp, Artificial Sequence
  Description of Artificial Sequence: Synthetic oligonucleotide
  Target: LAMA2; (-) strand; PAM type: YTN; PAM sequence: TTC
ttcttcccaatgctctgaat

SEQ ID NO: 262800 - DNA, 20 bp, Artificial Sequence
  Description of Artificial Sequence: Synthetic oligonucleotide
  Target: LAMA2; (-) strand; PAM type: YTN; PAM sequence: TTT
cttcttcccaatgctctgaa

SEQ ID NO: 262801 - DNA, 20 bp, Artificial Sequence
  Description of Artificial Sequence: Synthetic oligonucleotide
  Target: LAMA2; (-) strand; PAM type: YTN; PAM sequence: CTA
tcccaaatttcttcttccca

SEQ ID NO: 262802 - DNA, 20 bp, Artificial Sequence
  Description of Artificial Sequence: Synthetic oligonucleotide
  Target: LAMA2; (-) strand; PAM type: YTN; PAM sequence: CTA
ctatcccaaatttcttcttc

SEQ ID NO: 262803 - DNA, 20 bp, Artificial Sequence
  Description of Artificial Sequence: Synthetic oligonucleotide
  Target: LAMA2; (-) strand; PAM type: YTN; PAM sequence: TTA
ctactatcccaaatttcttc

SEQ ID NO: 262804 - DNA, 20 bp, Artificial Sequence
  Description of Artificial Sequence: Synthetic oligonucleotide
  Target: LAMA2; (-) strand; PAM type: YTN; PAM sequence: TTT
actactatcccaaatttctt

SEQ ID NO: 262805 - DNA, 20 bp, Artificial Sequence
  Description of Artificial Sequence: Synthetic oligonucleotide
  Target: LAMA2; (-) strand; PAM type: YTN; PAM sequence: TTG
aatttactactatcccaaat

SEQ ID NO: 262806 - DNA, 20 bp, Artificial Sequence
  Description of Artificial Sequence: Synthetic oligonucleotide
  Target: LAMA2; (-) strand; PAM type: YTN; PAM sequence: TTT
gaatttactactatcccaaa

SEQ ID NO: 262807 - DNA, 20 bp, Artificial Sequence
  Description of Artificial Sequence: Synthetic oligonucleotide
  Target: LAMA2; (-) strand; PAM type: YTN; PAM sequence: CTT
tgaatttactactatcccaa

SEQ ID NO: 262808 - DNA, 20 bp, Artificial Sequence
  Description of Artificial Sequence: Synthetic oligonucleotide
  Target: LAMA2; (-) strand; PAM type: YTN; PAM sequence: TTG
ctttgaatttactactatcc

SEQ ID NO: 262809 - DNA, 20 bp, Artificial Sequence
  Description of Artificial Sequence: Synthetic oligonucleotide
  Target: LAMA2; (-) strand; PAM type: YTN; PAM sequence: CTG
gtgaaattgctttgaattta

SEQ ID NO: 262810 - DNA, 20 bp, Artificial Sequence
  Description of Artificial Sequence: Synthetic oligonucleotide
  Target: LAMA2; (-) strand; PAM type: YTN; PAM sequence: TTC
gtacaggcactggtgaaatt

SEQ ID NO: 262811 - DNA, 20 bp, Artificial Sequence
  Description of Artificial Sequence: Synthetic oligonucleotide
  Target: LAMA2; (-) strand; PAM type: YTN; PAM sequence: TTT
cgtacaggcactggtgaaat

SEQ ID NO: 262812 - DNA, 20 bp, Artificial Sequence
  Description of Artificial Sequence: Synthetic oligonucleotide
  Target: LAMA2; (-) strand; PAM type: YTN; PAM sequence: TTA
tttcgtacaggcactggtga

SEQ ID NO: 262813 - DNA, 20 bp, Artificial Sequence
  Description of Artificial Sequence: Synthetic oligonucleotide
  Target: LAMA2; (-) strand; PAM type: YTN; PAM sequence: TTC
aattatttcgtacaggcact

SEQ ID NO: 262814 - DNA, 20 bp, Artificial Sequence
  Description of Artificial Sequence: Synthetic oligonucleotide
  Target: LAMA2; (-) strand; PAM type: YTN; PAM sequence: TTC
cccattcaattatttcgtac

SEQ ID NO: 262815 - DNA, 20 bp, Artificial Sequence
  Description of Artificial Sequence: Synthetic oligonucleotide
  Target: LAMA2; (-) strand; PAM type: YTN; PAM sequence: TTG
caaacagacaacccaaggtc

SEQ ID NO: 262816 - DNA, 20 bp, Artificial Sequence
  Description of Artificial Sequence: Synthetic oligonucleotide
  Target: LAMA2; (-) strand; PAM type: YTN; PAM sequence: CTT
gcaaacagacaacccaaggt

SEQ ID NO: 262817 - DNA, 20 bp, Artificial Sequence
  Description of Artificial Sequence: Synthetic oligonucleotide
  Target: LAMA2; (-) strand; PAM type: YTN; PAM sequence: TTC
ttgcaaacagacaacccaag

SEQ ID NO: 262818 - DNA, 20 bp, Artificial Sequence
  Description of Artificial Sequence: Synthetic oligonucleotide
  Target: LAMA2; (-) strand; PAM type: YTN; PAM sequence: TTA
tattcttgcaaacagacaac

SEQ ID NO: 262819 - DNA, 20 bp, Artificial Sequence
  Description of Artificial Sequence: Synthetic oligonucleotide
  Target: LAMA2; (-) strand; PAM type: YTN; PAM sequence: TTT
atattcttgcaaacagacaa

SEQ ID NO: 262820 - DNA, 20 bp, Artificial Sequence
  Description of Artificial Sequence: Synthetic oligonucleotide
  Target: LAMA2; (-) strand; PAM type: YTN; PAM sequence: TTA
gacatttatattcttgcaaa

SEQ ID NO: 262821 - DNA, 20 bp, Artificial Sequence
  Description of Artificial Sequence: Synthetic oligonucleotide
  Target: LAMA2; (-) strand; PAM type: YTN; PAM sequence: TTA
attagacatttatattcttg

SEQ ID NO: 262822 - DNA, 20 bp, Artificial Sequence
  Description of Artificial Sequence: Synthetic oligonucleotide
  Target: LAMA2; (-) strand; PAM type: YTN; PAM sequence: TTC
aggtagacacggccaattaa

SEQ ID NO: 262823 - DNA, 20 bp, Artificial Sequence
  Description of Artificial Sequence: Synthetic oligonucleotide
  Target: LAMA2; (-) strand; PAM type: YTN; PAM sequence: CTT
caggtagacacggccaatta

SEQ ID NO: 262824 - DNA, 20 bp, Artificial Sequence
  Description of Artificial Sequence: Synthetic oligonucleotide
  Target: LAMA2; (-) strand; PAM type: YTN; PAM sequence: TTA
aaatgtgagtggcttcaggt

SEQ ID NO: 262825 - DNA, 20 bp, Artificial Sequence
  Description of Artificial Sequence: Synthetic oligonucleotide
  Target: LAMA2; (-) strand; PAM type: YTN; PAM sequence: TTT
aaaatgtgagtggcttcagg

SEQ ID NO: 262826 - DNA, 20 bp, Artificial Sequence
  Description of Artificial Sequence: Synthetic oligonucleotide
  Target: LAMA2; (-) strand; PAM type: YTN; PAM sequence: TTT
taaaatgtgagtggcttcag

SEQ ID NO: 262827 - DNA, 20 bp, Artificial Sequence
  Description of Artificial Sequence: Synthetic oligonucleotide
  Target: LAMA2; (-) strand; PAM type: YTN; PAM sequence: TTT
ttaaaatgtgagtggcttca

SEQ ID NO: 262828 - DNA, 20 bp, Artificial Sequence
  Description of Artificial Sequence: Synthetic oligonucleotide
  Target: LAMA2; (-) strand; PAM type: YTN; PAM sequence: CTT
tttaaaatgtgagtggcttc

SEQ ID NO: 262829 - DNA, 20 bp, Artificial Sequence
  Description of Artificial Sequence: Synthetic oligonucleotide
  Target: LAMA2; (-) strand; PAM type: YTN; PAM sequence: TTC
cccccactttttaaaatgtg

SEQ ID NO: 262830 - DNA, 20 bp, Artificial Sequence
  Description of Artificial Sequence: Synthetic oligonucleotide
  Target: LAMA2; (-) strand; PAM type: YTN; PAM sequence: TTA
taaagatattccccccactt

SEQ ID NO: 262831 - DNA, 20 bp, Artificial Sequence
  Description of Artificial Sequence: Synthetic oligonucleotide
  Target: LAMA2; (-) strand; PAM type: YTN; PAM sequence: TTA
ttataaagatattcccccca

SEQ ID NO: 262832 - DNA, 20 bp, Artificial Sequence
  Description of Artificial Sequence: Synthetic oligonucleotide
  Target: LAMA2; (-) strand; PAM type: YTN; PAM sequence: TTG
aaaagttattataaagatat

SEQ ID NO: 262833 - DNA, 20 bp, Artificial Sequence
  Description of Artificial Sequence: Synthetic oligonucleotide
  Target: LAMA2; (-) strand; PAM type: YTN; PAM sequence: CTG
ttgaaaagttattataaaga

SEQ ID NO: 262834 - DNA, 20 bp, Artificial Sequence
  Description of Artificial Sequence: Synthetic oligonucleotide
  Target: LAMA2; (-) strand; PAM type: YTN; PAM sequence: CTG
atatcctgttgaaaagttat

SEQ ID NO: 262835 - DNA, 20 bp, Artificial Sequence
  Description of Artificial Sequence: Synthetic oligonucleotide
  Target: LAMA2; (-) strand; PAM type: YTN; PAM sequence: TTG
gatgtctgatatcctgttga

SEQ ID NO: 262836 - DNA, 20 bp, Artificial Sequence
  Description of Artificial Sequence: Synthetic oligonucleotide
  Target: LAMA2; (-) strand; PAM type: YTN; PAM sequence: TTA
gtatattggatgtctgatat

SEQ ID NO: 262837 - DNA, 20 bp, Artificial Sequence
  Description of Artificial Sequence: Synthetic oligonucleotide
  Target: LAMA2; (-) strand; PAM type: YTN; PAM sequence: TTT
agtatattggatgtctgata

SEQ ID NO: 262838 - DNA, 20 bp, Artificial Sequence
  Description of Artificial Sequence: Synthetic oligonucleotide
  Target: LAMA2; (-) strand; PAM type: YTN; PAM sequence: TTC
acataaatcataagaagttt

SEQ ID NO: 262839 - DNA, 20 bp, Artificial Sequence
  Description of Artificial Sequence: Synthetic oligonucleotide
  Target: LAMA2; (-) strand; PAM type: YTN; PAM sequence: TTA
gcaaaatattcacataaatc

SEQ ID NO: 262840 - DNA, 20 bp, Artificial Sequence
  Description of Artificial Sequence: Synthetic oligonucleotide
  Target: LAMA2; (-) strand; PAM type: YTN; PAM sequence: TTA
agagtacatattagcaaaat

SEQ ID NO: 262841 - DNA, 20 bp, Artificial Sequence
  Description of Artificial Sequence: Synthetic oligonucleotide
  Target: LAMA2; (-) strand; PAM type: YTN; PAM sequence: CTC
aaatgttaagagtacatatt

SEQ ID NO: 262842 - DNA, 20 bp, Artificial Sequence
  Description of Artificial Sequence: Synthetic oligonucleotide
  Target: LAMA2; (-) strand; PAM type: YTN; PAM sequence: TTC
ctcaaatgttaagagtacat

SEQ ID NO: 262843 - DNA, 20 bp, Artificial Sequence
  Description of Artificial Sequence: Synthetic oligonucleotide
  Target: LAMA2; (-) strand; PAM type: YTN; PAM sequence: CTT
cctcaaatgttaagagtaca

SEQ ID NO: 262844 - DNA, 20 bp, Artificial Sequence
  Description of Artificial Sequence: Synthetic oligonucleotide
  Target: LAMA2; (-) strand; PAM type: YTN; PAM sequence: TTG
cttcctcaaatgttaagagt

SEQ ID NO: 262845 - DNA, 20 bp, Artificial Sequence
  Description of Artificial Sequence: Synthetic oligonucleotide
  Target: LAMA2; (-) strand; PAM type: YTN; PAM sequence: TTT
gcttcctcaaatgttaagag

SEQ ID NO: 262846 - DNA, 20 bp, Artificial Sequence
  Description of Artificial Sequence: Synthetic oligonucleotide
  Target: LAMA2; (-) strand; PAM type: YTN; PAM sequence: TTT
tgcttcctcaaatgttaaga

SEQ ID NO: 262847 - DNA, 20 bp, Artificial Sequence
  Description of Artificial Sequence: Synthetic oligonucleotide
  Target: LAMA2; (-) strand; PAM type: YTN; PAM sequence: TTT
ttgcttcctcaaatgttaag

SEQ ID NO: 262848 - DNA, 20 bp, Artificial Sequence
  Description of Artificial Sequence: Synthetic oligonucleotide
  Target: LAMA2; (-) strand; PAM type: YTN; PAM sequence: TTG
catttttgcttcctcaaatg

SEQ ID NO: 262849 - DNA, 20 bp, Artificial Sequence
  Description of Artificial Sequence: Synthetic oligonucleotide
  Target: LAMA2; (-) strand; PAM type: YTN; PAM sequence: CTA
atattgcatttttgcttcct

SEQ ID NO: 262850 - DNA, 20 bp, Artificial Sequence
  Description of Artificial Sequence: Synthetic oligonucleotide
  Target: LAMA2; (-) strand; PAM type: YTN; PAM sequence: CTC
atgtaccaaatcctaatatt

SEQ ID NO: 262851 - DNA, 20 bp, Artificial Sequence
  Description of Artificial Sequence: Synthetic oligonucleotide
  Target: LAMA2; (-) strand; PAM type: YTN; PAM sequence: CTG
gggctcatgtaccaaatcct

SEQ ID NO: 262852 - DNA, 20 bp, Artificial Sequence
  Description of Artificial Sequence: Synthetic oligonucleotide
  Target: LAMA2; (-) strand; PAM type: YTN; PAM sequence: TTC
tggggctcatgtaccaaatc

SEQ ID NO: 262853 - DNA, 20 bp, Artificial Sequence
  Description of Artificial Sequence: Synthetic oligonucleotide
  Target: LAMA2; (-) strand; PAM type: YTN; PAM sequence: TTT
ctggggctcatgtaccaaat

SEQ ID NO: 262854 - DNA, 20 bp, Artificial Sequence
  Description of Artificial Sequence: Synthetic oligonucleotide
  Target: LAMA2; (-) strand; PAM type: YTN; PAM sequence: TTA
aatttctggggctcatgtac

SEQ ID NO: 262855 - DNA, 20 bp, Artificial Sequence
  Description of Artificial Sequence: Synthetic oligonucleotide
  Target: LAMA2; (-) strand; PAM type: YTN; PAM sequence: TTT
aaatttctggggctcatgta

SEQ ID NO: 262856 - DNA, 20 bp, Artificial Sequence
  Description of Artificial Sequence: Synthetic oligonucleotide
  Target: LAMA2; (-) strand; PAM type: YTN; PAM sequence: CTG
tttaaatttctggggctcat

SEQ ID NO: 262857 - DNA, 20 bp, Artificial Sequence
  Description of Artificial Sequence: Synthetic oligonucleotide
  Target: LAMA2; (-) strand; PAM type: YTN; PAM sequence: TTG
aagctgtttaaatttctggg

SEQ ID NO: 262858 - DNA, 20 bp, Artificial Sequence
  Description of Artificial Sequence: Synthetic oligonucleotide
  Target: LAMA2; (-) strand; PAM type: YTN; PAM sequence: TTT
gaagctgtttaaatttctgg

SEQ ID NO: 262859 - DNA, 20 bp, Artificial Sequence
  Description of Artificial Sequence: Synthetic oligonucleotide
  Target: LAMA2; (-) strand; PAM type: YTN; PAM sequence: TTT
tgaagctgtttaaatttctg

SEQ ID NO: 262860 - DNA, 20 bp, Artificial Sequence
  Description of Artificial Sequence: Synthetic oligonucleotide
  Target: LAMA2; (-) strand; PAM type: YTN; PAM sequence: TTG
ttttgaagctgtttaaattt

SEQ ID NO: 262861 - DNA, 20 bp, Artificial Sequence
  Description of Artificial Sequence: Synthetic oligonucleotide
  Target: LAMA2; (-) strand; PAM type: YTN; PAM sequence: TTA
acattgttttgaagctgttt

SEQ ID NO: 262862 - DNA, 20 bp, Artificial Sequence
  Description of Artificial Sequence: Synthetic oligonucleotide
  Target: LAMA2; (-) strand; PAM type: YTN; PAM sequence: TTA
aatcaagataattaacattg

SEQ ID NO: 262863 - DNA, 20 bp, Artificial Sequence
  Description of Artificial Sequence: Synthetic oligonucleotide
  Target: LAMA2; (-) strand; PAM type: YTN; PAM sequence: TTG
tgggatgattaaatcaagat

SEQ ID NO: 262864 - DNA, 20 bp, Artificial Sequence
  Description of Artificial Sequence: Synthetic oligonucleotide
  Target: LAMA2; (-) strand; PAM type: YTN; PAM sequence: TTG
atacatagataagttgtggg

SEQ ID NO: 262865 - DNA, 20 bp, Artificial Sequence
  Description of Artificial Sequence: Synthetic oligonucleotide
  Target: LAMA2; (-) strand; PAM type: YTN; PAM sequence: TTT
gatacatagataagttgtgg

SEQ ID NO: 262866 - DNA, 20 bp, Artificial Sequence
  Description of Artificial Sequence: Synthetic oligonucleotide
  Target: LAMA2; (-) strand; PAM type: YTN; PAM sequence: TTT
tgatacatagataagttgtg

SEQ ID NO: 262867 - DNA, 20 bp, Artificial Sequence
  Description of Artificial Sequence: Synthetic oligonucleotide
  Target: LAMA2; (-) strand; PAM type: YTN; PAM sequence: TTA
aacaatgtgatattttgata

SEQ ID NO: 262868 - DNA, 20 bp, Artificial Sequence
  Description of Artificial Sequence: Synthetic oligonucleotide
  Target: LAMA2; (-) strand; PAM type: YTN; PAM sequence: TTT
aaacaatgtgatattttgat

SEQ ID NO: 262869 - DNA, 20 bp, Artificial Sequence
  Description of Artificial Sequence: Synthetic oligonucleotide
  Target: LAMA2; (-) strand; PAM type: YTN; PAM sequence: TTA
tttaaacaatgtgatatttt

SEQ ID NO: 262870 - DNA, 20 bp, Artificial Sequence
  Description of Artificial Sequence: Synthetic oligonucleotide
  Target: LAMA2; (-) strand; PAM type: YTN; PAM sequence: TTT
atttaaacaatgtgatattt

SEQ ID NO: 262871 - DNA, 20 bp, Artificial Sequence
  Description of Artificial Sequence: Synthetic oligonucleotide
  Target: LAMA2; (-) strand; PAM type: YTN; PAM sequence: CTA
tatttatttaaacaatgtga

SEQ ID NO: 262872 - DNA, 20 bp, Artificial Sequence
  Description of Artificial Sequence: Synthetic oligonucleotide
  Target: LAMA2; (-) strand; PAM type: YTN; PAM sequence: TTC
aagggtcaactatatttatt

SEQ ID NO: 262873 - DNA, 20 bp, Artificial Sequence
  Description of Artificial Sequence: Synthetic oligonucleotide
  Target: LAMA2; (-) strand; PAM type: YTN; PAM sequence: TTG
ttcaagggtcaactatattt

SEQ ID NO: 262874 - DNA, 20 bp, Artificial Sequence
  Description of Artificial Sequence: Synthetic oligonucleotide
  Target: LAMA2; (-) strand; PAM type: YTN; PAM sequence: CTA
accaccatgttgttcaaggg

SEQ ID NO: 262875 - DNA, 20 bp, Artificial Sequence
  Description of Artificial Sequence: Synthetic oligonucleotide
  Target: LAMA2; (-) strand; PAM type: YTN; PAM sequence: CTC
ctaaccaccatgttgttcaa

SEQ ID NO: 262876 - DNA, 20 bp, Artificial Sequence
  Description of Artificial Sequence: Synthetic oligonucleotide
  Target: LAMA2; (-) strand; PAM type: YTN; PAM sequence: TTG
atgctcctaaccaccatgtt

SEQ ID NO: 262877 - DNA, 20 bp, Artificial Sequence
  Description of Artificial Sequence: Synthetic oligonucleotide
  Target: LAMA2; (-) strand; PAM type: YTN; PAM sequence: CTG
catgaggtggggttgatgct

SEQ ID NO: 262878 - DNA, 20 bp, Artificial Sequence
  Description of Artificial Sequence: Synthetic oligonucleotide
  Target: LAMA2; (-) strand; PAM type: YTN; PAM sequence: CTG
actgcatgaggtggggttga

SEQ ID NO: 262879 - DNA, 20 bp, Artificial Sequence
  Description of Artificial Sequence: Synthetic oligonucleotide
  Target: LAMA2; (-) strand; PAM type: YTN; PAM sequence: TTC
tgactgcatgaggtggggtt

SEQ ID NO: 262880 - DNA, 20 bp, Artificial Sequence
  Description of Artificial Sequence: Synthetic oligonucleotide
  Target: LAMA2; (-) strand; PAM type: YTN; PAM sequence: TTT
ctgactgcatgaggtggggt

SEQ ID NO: 262881 - DNA, 20 bp, Artificial Sequence
  Description of Artificial Sequence: Synthetic oligonucleotide
  Target: LAMA2; (-) strand; PAM type: YTN; PAM sequence: TTA
tatgtggatttctgactgca

SEQ ID NO: 262882 - DNA, 20 bp, Artificial Sequence
  Description of Artificial Sequence: Synthetic oligonucleotide
  Target: LAMA2; (-) strand; PAM type: YTN; PAM sequence: TTG
aaggtatcaaaagttatatg

SEQ ID NO: 262883 - DNA, 20 bp, Artificial Sequence
  Description of Artificial Sequence: Synthetic oligonucleotide
  Target: LAMA2; (-) strand; PAM type: YTN; PAM sequence: TTT
gaaggtatcaaaagttatat

SEQ ID NO: 262884 - DNA, 20 bp, Artificial Sequence
  Description of Artificial Sequence: Synthetic oligonucleotide
  Target: LAMA2; (-) strand; PAM type: YTN; PAM sequence: TTT
tgaaggtatcaaaagttata

SEQ ID NO: 262885 - DNA, 20 bp, Artificial Sequence
  Description of Artificial Sequence: Synthetic oligonucleotide
  Target: LAMA2; (-) strand; PAM type: YTN; PAM sequence: TTA
agttttgaaggtatcaaaag

SEQ ID NO: 262886 - DNA, 20 bp, Artificial Sequence
  Description of Artificial Sequence: Synthetic oligonucleotide
  Target: LAMA2; (-) strand; PAM type: YTN; PAM sequence: TTA
gtagttaagttttgaaggta

SEQ ID NO: 262887 - DNA, 20 bp, Artificial Sequence
  Description of Artificial Sequence: Synthetic oligonucleotide
  Target: LAMA2; (-) strand; PAM type: YTN; PAM sequence: CTA
ttagtagttaagttttgaag

SEQ ID NO: 262888 - DNA, 20 bp, Artificial Sequence
  Description of Artificial Sequence: Synthetic oligonucleotide
  Target: LAMA2; (-) strand; PAM type: YTN; PAM sequence: TTC
aacaggaggctattagtagt

SEQ ID NO: 262889 - DNA, 20 bp, Artificial Sequence
  Description of Artificial Sequence: Synthetic oligonucleotide
  Target: LAMA2; (-) strand; PAM type: YTN; PAM sequence: CTG
ttcaacaggaggctattagt

SEQ ID NO: 262890 - DNA, 20 bp, Artificial Sequence
  Description of Artificial Sequence: Synthetic oligonucleotide
  Target: LAMA2; (-) strand; PAM type: YTN; PAM sequence: TTC
tgttcaacaggaggctatta

SEQ ID NO: 262891 - DNA, 20 bp, Artificial Sequence
  Description of Artificial Sequence: Synthetic oligonucleotide
  Target: LAMA2; (-) strand; PAM type: YTN; PAM sequence: CTT
ctgttcaacaggaggctatt

SEQ ID NO: 262892 - DNA, 20 bp, Artificial Sequence
  Description of Artificial Sequence: Synthetic oligonucleotide
  Target: LAMA2; (-) strand; PAM type: YTN; PAM sequence: TTA
tcagtatggcttctgttcaa

SEQ ID NO: 262893 - DNA, 20 bp, Artificial Sequence
  Description of Artificial Sequence: Synthetic oligonucleotide
  Target: LAMA2; (-) strand; PAM type: YTN; PAM sequence: CTA
tgttatcagtatggcttctg

SEQ ID NO: 262894 - DNA, 20 bp, Artificial Sequence
  Description of Artificial Sequence: Synthetic oligonucleotide
  Target: LAMA2; (-) strand; PAM type: YTN; PAM sequence: CTA
ctatgttatcagtatggctt

SEQ ID NO: 262895 - DNA, 20 bp, Artificial Sequence
  Description of Artificial Sequence: Synthetic oligonucleotide
  Target: LAMA2; (-) strand; PAM type: YTN; PAM sequence: TTA
atctactatgttatcagtat

SEQ ID NO: 262896 - DNA, 20 bp, Artificial Sequence
  Description of Artificial Sequence: Synthetic oligonucleotide
  Target: LAMA2; (-) strand; PAM type: YTN; PAM sequence: TTA
taagaatacaatatataata

SEQ ID NO: 262897 - DNA, 20 bp, Artificial Sequence
  Description of Artificial Sequence: Synthetic oligonucleotide
  Target: LAMA2; (-) strand; PAM type: YTN; PAM sequence: TTA
ttataagaatacaatatata

SEQ ID NO: 262898 - DNA, 20 bp, Artificial Sequence
  Description of Artificial Sequence: Synthetic oligonucleotide
  Target: LAMA2; (-) strand; PAM type: YTN; PAM sequence: TTT
attataagaatacaatatat

SEQ ID NO: 262899 - DNA, 20 bp, Artificial Sequence
  Description of Artificial Sequence: Synthetic oligonucleotide
  Target: LAMA2; (-) strand; PAM type: YTN; PAM sequence: CTT
tattataagaatacaatata

SEQ ID NO: 262900 - DNA, 20 bp, Artificial Sequence
  Description of Artificial Sequence: Synthetic oligonucleotide
  Target: LAMA2; (-) strand; PAM type: YTN; PAM sequence: CTC
actttattataagaatacaa

SEQ ID NO: 262901 - DNA, 20 bp, Artificial Sequence
  Description of Artificial Sequence: Synthetic oligonucleotide
  Target: LAMA2; (-) strand; PAM type: YTN; PAM sequence: CTA
gctcactttattataagaat

SEQ ID NO: 262902 - DNA, 20 bp, Artificial Sequence
  Description of Artificial Sequence: Synthetic oligonucleotide
  Target: LAMA2; (-) strand; PAM type: YTN; PAM sequence: CTC
tagctcactttattataaga

SEQ ID NO: 262903 - DNA, 20 bp, Artificial Sequence
  Description of Artificial Sequence: Synthetic oligonucleotide
  Target: LAMA2; (-) strand; PAM type: YTN; PAM sequence: TTC
tctagctcactttattataa

SEQ ID NO: 262904 - DNA, 20 bp, Artificial Sequence
  Description of Artificial Sequence: Synthetic oligonucleotide
  Target: LAMA2; (-) strand; PAM type: YTN; PAM sequence: TTT
ctctagctcactttattata

SEQ ID NO: 262905 - DNA, 20 bp, Artificial Sequence
  Description of Artificial Sequence: Synthetic oligonucleotide
  Target: LAMA2; (-) strand; PAM type: YTN; PAM sequence: TTT
tctctagctcactttattat

SEQ ID NO: 262906 - DNA, 20 bp, Artificial Sequence
  Description of Artificial Sequence: Synthetic oligonucleotide
  Target: LAMA2; (-) strand; PAM type: YTN; PAM sequence: CTT
ttctctagctcactttatta

SEQ ID NO: 262907 - DNA, 20 bp, Artificial Sequence
  Description of Artificial Sequence: Synthetic oligonucleotide
  Target: LAMA2; (-) strand; PAM type: YTN; PAM sequence: TTC
ttttctctagctcactttat

SEQ ID NO: 262908 - DNA, 20 bp, Artificial Sequence
  Description of Artificial Sequence: Synthetic oligonucleotide
  Target: LAMA2; (-) strand; PAM type: YTN; PAM sequence: TTT
cttttctctagctcacttta

SEQ ID NO: 262909 - DNA, 20 bp, Artificial Sequence
  Description of Artificial Sequence: Synthetic oligonucleotide
  Target: LAMA2; (-) strand; PAM type: YTN; PAM sequence: TTT
tcttttctctagctcacttt

SEQ ID NO: 262910 - DNA, 20 bp, Artificial Sequence
  Description of Artificial Sequence: Synthetic oligonucleotide
  Target: LAMA2; (-) strand; PAM type: YTN; PAM sequence: TTA
ataacattttcttttctcta

SEQ ID NO: 262911 - DNA, 20 bp, Artificial Sequence
  Description of Artificial Sequence: Synthetic oligonucleotide
  Target: LAMA2; (-) strand; PAM type: YTN; PAM sequence: CTT
aataacattttcttttctct

SEQ ID NO: 262912 - DNA, 20 bp, Artificial Sequence
  Description of Artificial Sequence: Synthetic oligonucleotide
  Target: LAMA2; (-) strand; PAM type: YTN; PAM sequence: TTC
ttaataacattttcttttct

SEQ ID NO: 262913 - DNA, 20 bp, Artificial Sequence
  Description of Artificial Sequence: Synthetic oligonucleotide
  Target: LAMA2; (-) strand; PAM type: YTN; PAM sequence: TTT
cttaataacattttcttttc

SEQ ID NO: 262914 - DNA, 20 bp, Artificial Sequence
  Description of Artificial Sequence: Synthetic oligonucleotide
  Target: LAMA2; (-) strand; PAM type: YTN; PAM sequence: CTT
tcttaataacattttctttt

SEQ ID NO: 262915 - DNA, 20 bp, Artificial Sequence
  Description of Artificial Sequence: Synthetic oligonucleotide
  Target: LAMA2; (-) strand; PAM type: YTN; PAM sequence: TTA
ctttcttaataacattttct

SEQ ID NO: 262916 - DNA, 20 bp, Artificial Sequence
  Description of Artificial Sequence: Synthetic oligonucleotide
  Target: LAMA2; (-) strand; PAM type: YTN; PAM sequence: TTA
ttactttcttaataacattt

SEQ ID NO: 262917 - DNA, 20 bp, Artificial Sequence
  Description of Artificial Sequence: Synthetic oligonucleotide
  Target: LAMA2; (-) strand; PAM type: YTN; PAM sequence: CTT
attactttcttaataacatt

SEQ ID NO: 262918 - DNA, 20 bp, Artificial Sequence
  Description of Artificial Sequence: Synthetic oligonucleotide
  Target: LAMA2; (-) strand; PAM type: YTN; PAM sequence: CTG
agcccagcccttattacttt

SEQ ID NO: 262919 - DNA, 20 bp, Artificial Sequence
  Description of Artificial Sequence: Synthetic oligonucleotide
  Target: LAMA2; (-) strand; PAM type: YTN; PAM sequence: TTA
caggcatgagccactgagcc

SEQ ID NO: 262920 - DNA, 20 bp, Artificial Sequence
  Description of Artificial Sequence: Synthetic oligonucleotide
  Target: LAMA2; (-) strand; PAM type: YTN; PAM sequence: CTG
ggattacaggcatgagccac

SEQ ID NO: 262921 - DNA, 20 bp, Artificial Sequence
  Description of Artificial Sequence: Synthetic oligonucleotide
  Target: LAMA2; (-) strand; PAM type: YTN; PAM sequence: CTC
ccgaagtgctgggattacag

SEQ ID NO: 262922 - DNA, 20 bp, Artificial Sequence
  Description of Artificial Sequence: Synthetic oligonucleotide
  Target: LAMA2; (-) strand; PAM type: YTN; PAM sequence: TTG
gcctcccgaagtgctgggat

SEQ ID NO: 262923 - DNA, 20 bp, Artificial Sequence
  Description of Artificial Sequence: Synthetic oligonucleotide
  Target: LAMA2; (-) strand; PAM type: YTN; PAM sequence: TTT
ggcctcccgaagtgctggga

SEQ ID NO: 262924 - DNA, 20 bp, Artificial Sequence
  Description of Artificial Sequence: Synthetic oligonucleotide
  Target: LAMA2; (-) strand; PAM type: YTN; PAM sequence: CTT
tggcctcccgaagtgctggg

SEQ ID NO: 262925 - DNA, 20 bp, Artificial Sequence
  Description of Artificial Sequence: Synthetic oligonucleotide
  Target: LAMA2; (-) strand; PAM type: YTN; PAM sequence: CTG
ctttggcctcccgaagtgct

SEQ ID NO: 262926 - DNA, 20 bp, Artificial Sequence
  Description of Artificial Sequence: Synthetic oligonucleotide
  Target: LAMA2; (-) strand; PAM type: YTN; PAM sequence: CTG
cctgctttggcctcccgaag

SEQ ID NO: 262927 - DNA, 20 bp, Artificial Sequence
  Description of Artificial Sequence: Synthetic oligonucleotide
  Target: LAMA2; (-) strand; PAM type: YTN; PAM sequence: CTC
aagtgatctgcctgctttgg

SEQ ID NO: 262928 - DNA, 20 bp, Artificial Sequence
  Description of Artificial Sequence: Synthetic oligonucleotide
  Target: LAMA2; (-) strand; PAM type: YTN; PAM sequence: TTG
acctcaagtgatctgcctgc

SEQ ID NO: 262929 - DNA, 20 bp, Artificial Sequence
  Description of Artificial Sequence: Synthetic oligonucleotide
  Target: LAMA2; (-) strand; PAM type: YTN; PAM sequence: CTG
ttgacctcaagtgatctgcc

SEQ ID NO: 262930 - DNA, 20 bp, Artificial Sequence
  Description of Artificial Sequence: Synthetic oligonucleotide
  Target: LAMA2; (-) strand; PAM type: YTN; PAM sequence: TTG
aactgttgacctcaagtgat

SEQ ID NO: 262931 - DNA, 20 bp, Artificial Sequence
  Description of Artificial Sequence: Synthetic oligonucleotide
  Target: LAMA2; (-) strand; PAM type: YTN; PAM sequence: CTT
gaactgttgacctcaagtga

SEQ ID NO: 262932 - DNA, 20 bp, Artificial Sequence
  Description of Artificial Sequence: Synthetic oligonucleotide
  Target: LAMA2; (-) strand; PAM type: YTN; PAM sequence: CTG
gtcttgaactgttgacctca

SEQ ID NO: 262933 - DNA, 20 bp, Artificial Sequence
  Description of Artificial Sequence: Synthetic oligonucleotide
  Target: LAMA2; (-) strand; PAM type: YTN; PAM sequence: TTG
gccaggctggtcttgaactg

SEQ ID NO: 262934 - DNA, 20 bp, Artificial Sequence
  Description of Artificial Sequence: Synthetic oligonucleotide
  Target: LAMA2; (-) strand; PAM type: YTN; PAM sequence: TTC
atcatgttggccaggctggt

SEQ ID NO: 262935 - DNA, 20 bp, Artificial Sequence
  Description of Artificial Sequence: Synthetic oligonucleotide
  Target: LAMA2; (-) strand; PAM type: YTN; PAM sequence: TTT
catcatgttggccaggctgg

SEQ ID NO: 262936 - DNA, 20 bp, Artificial Sequence
  Description of Artificial Sequence: Synthetic oligonucleotide
  Target: LAMA2; (-) strand; PAM type: YTN; PAM sequence: CTG
ggtttcatcatgttggccag

SEQ ID NO: 262937 - DNA, 20 bp, Artificial Sequence
  Description of Artificial Sequence: Synthetic oligonucleotide
  Target: LAMA2; (-) strand; PAM type: YTN; PAM sequence: TTA
gtagaaactgggtttcatca

SEQ ID NO: 262938 - DNA, 20 bp, Artificial Sequence
  Description of Artificial Sequence: Synthetic oligonucleotide
  Target: LAMA2; (-) strand; PAM type: YTN; PAM sequence: TTT
agtagaaactgggtttcatc

SEQ ID NO: 262939 - DNA, 20 bp, Artificial Sequence
  Description of Artificial Sequence: Synthetic oligonucleotide
  Target: LAMA2; (-) strand; PAM type: YTN; PAM sequence: TTT
tagtagaaactgggtttcat

SEQ ID NO: 262940 - DNA, 20 bp, Artificial Sequence
  Description of Artificial Sequence: Synthetic oligonucleotide
  Target: LAMA2; (-) strand; PAM type: YTN; PAM sequence: TTT
ttagtagaaactgggtttca

SEQ ID NO: 262941 - DNA, 20 bp, Artificial Sequence
  Description of Artificial Sequence: Synthetic oligonucleotide
  Target: LAMA2; (-) strand; PAM type: YTN; PAM sequence: TTG
tatttttagtagaaactggg

SEQ ID NO: 262942 - DNA, 20 bp, Artificial Sequence
  Description of Artificial Sequence: Synthetic oligonucleotide
  Target: LAMA2; (-) strand; PAM type: YTN; PAM sequence: TTA
ttgtatttttagtagaaact

SEQ ID NO: 262943 - DNA, 20 bp, Artificial Sequence
  Description of Artificial Sequence: Synthetic oligonucleotide
  Target: LAMA2; (-) strand; PAM type: YTN; PAM sequence: CTA
attattgtatttttagtaga

SEQ ID NO: 262944 - DNA, 20 bp, Artificial Sequence
  Description of Artificial Sequence: Synthetic oligonucleotide
  Target: LAMA2; (-) strand; PAM type: YTN; PAM sequence: TTA
caggtgtgcaacaccacgcc

SEQ ID NO: 262945 - DNA, 20 bp, Artificial Sequence
  Description of Artificial Sequence: Synthetic oligonucleotide
  Target: LAMA2; (-) strand; PAM type: YTN; PAM sequence: CTG
ggattacaggtgtgcaacac

SEQ ID NO: 262946 - DNA, 20 bp, Artificial Sequence
  Description of Artificial Sequence: Synthetic oligonucleotide
  Target: LAMA2; (-) strand; PAM type: YTN; PAM sequence: CTG
agtagctgggattacaggtg

SEQ ID NO: 262947 - DNA, 20 bp, Artificial Sequence
  Description of Artificial Sequence: Synthetic oligonucleotide
  Target: LAMA2; (-) strand; PAM type: YTN; PAM sequence: CTC
ctgagtagctgggattacag

SEQ ID NO: 262948 - DNA, 20 bp, Artificial Sequence
  Description of Artificial Sequence: Synthetic oligonucleotide
  Target: LAMA2; (-) strand; PAM type: YTN; PAM sequence: CTC
agcctcctgagtagctggga

SEQ ID NO: 262949 - DNA, 20 bp, Artificial Sequence
  Description of Artificial Sequence: Synthetic oligonucleotide
  Target: LAMA2; (-) strand; PAM type: YTN; PAM sequence: CTG
cctcagcctcctgagtagct

SEQ ID NO: 262950 - DNA, 20 bp, Artificial Sequence
  Description of Artificial Sequence: Synthetic oligonucleotide
  Target: LAMA2; (-) strand; PAM type: YTN; PAM sequence: CTC
ctgcctcagcctcctgagta

SEQ ID NO: 262951 - DNA, 20 bp, Artificial Sequence
  Description of Artificial Sequence: Synthetic oligonucleotide
  Target: LAMA2; (-) strand; PAM type: YTN; PAM sequence: TTC
tcctgcctcagcctcctgag

SEQ ID NO: 262952 - DNA, 20 bp, Artificial Sequence
  Description of Artificial Sequence: Synthetic oligonucleotide
  Target: LAMA2; (-) strand; PAM type: YTN; PAM sequence: TTC
aagtgattctcctgcctcag

SEQ ID NO: 262953 - DNA, 20 bp, Artificial Sequence
  Description of Artificial Sequence: Synthetic oligonucleotide
  Target: LAMA2; (-) strand; PAM type: YTN; PAM sequence: CTA
ccaggttcaagtgattctcc

SEQ ID NO: 262954 - DNA, 20 bp, Artificial Sequence
  Description of Artificial Sequence: Synthetic oligonucleotide
  Target: LAMA2; (-) strand; PAM type: YTN; PAM sequence: CTC
cgcctaccaggttcaagtga

SEQ ID NO: 262955 - DNA, 20 bp, Artificial Sequence
  Description of Artificial Sequence: Synthetic oligonucleotide
  Target: LAMA2; (-) strand; PAM type: YTN; PAM sequence: CTA
caacctccgcctaccaggtt

SEQ ID NO: 262956 - DNA, 20 bp, Artificial Sequence
  Description of Artificial Sequence: Synthetic oligonucleotide
  Target: LAMA2; (-) strand; PAM type: YTN; PAM sequence: CTC
actacaacctccgcctacca

SEQ ID NO: 262957 - DNA, 20 bp, Artificial Sequence
  Description of Artificial Sequence: Synthetic oligonucleotide
  Target: LAMA2; (-) strand; PAM type: YTN; PAM sequence: TTG
gctcactacaacctccgcct

SEQ ID NO: 262958 - DNA, 20 bp, Artificial Sequence
  Description of Artificial Sequence: Synthetic oligonucleotide
  Target: LAMA2; (-) strand; PAM type: YTN; PAM sequence: CTT
ggctcactacaacctccgcc

SEQ ID NO: 262959 - DNA, 20 bp, Artificial Sequence
  Description of Artificial Sequence: Synthetic oligonucleotide
  Target: LAMA2; (-) strand; PAM type: YTN; PAM sequence: CTG
gagtgtagtggcataatctt

SEQ ID NO: 262960 - DNA, 20 bp, Artificial Sequence
  Description of Artificial Sequence: Synthetic oligonucleotide
  Target: LAMA2; (-) strand; PAM type: YTN; PAM sequence: CTG
tcacccaggctggagtgtag

SEQ ID NO: 262961 - DNA, 20 bp, Artificial Sequence
  Description of Artificial Sequence: Synthetic oligonucleotide
  Target: LAMA2; (-) strand; PAM type: YTN; PAM sequence: CTC
tgtcacccaggctggagtgt

SEQ ID NO: 262962 - DNA, 20 bp, Artificial Sequence
  Description of Artificial Sequence: Synthetic oligonucleotide
  Target: LAMA2; (-) strand; PAM type: YTN; PAM sequence: CTC
actctgtcacccaggctgga

SEQ ID NO: 262963 - DNA, 20 bp, Artificial Sequence
  Description of Artificial Sequence: Synthetic oligonucleotide
  Target: LAMA2; (-) strand; PAM type: YTN; PAM sequence: TTG
agacagagtctcactctgtc

SEQ ID NO: 262964 - DNA, 20 bp, Artificial Sequence
  Description of Artificial Sequence: Synthetic oligonucleotide
  Target: LAMA2; (-) strand; PAM type: YTN; PAM sequence: TTT
gagacagagtctcactctgt

SEQ ID NO: 262965 - DNA, 20 bp, Artificial Sequence
  Description of Artificial Sequence: Synthetic oligonucleotide
  Target: LAMA2; (-) strand; PAM type: YTN; PAM sequence: TTA
tttgagacagagtctcactc

SEQ ID NO: 262966 - DNA, 20 bp, Artificial Sequence
  Description of Artificial Sequence: Synthetic oligonucleotide
  Target: LAMA2; (-) strand; PAM type: YTN; PAM sequence: TTT
atttgagacagagtctcact

SEQ ID NO: 262967 - DNA, 20 bp, Artificial Sequence
  Description of Artificial Sequence: Synthetic oligonucleotide
  Target: LAMA2; (-) strand; PAM type: YTN; PAM sequence: TTA
tttatttgagacagagtctc

SEQ ID NO: 262968 - DNA, 20 bp, Artificial Sequence
  Description of Artificial Sequence: Synthetic oligonucleotide
  Target: LAMA2; (-) strand; PAM type: YTN; PAM sequence: TTT
atttatttgagacagagtct

SEQ ID NO: 262969 - DNA, 20 bp, Artificial Sequence
  Description of Artificial Sequence: Synthetic oligonucleotide
  Target: LAMA2; (-) strand; PAM type: YTN; PAM sequence: TTA
tttatttatttgagacagag

SEQ ID NO: 262970 - DNA, 20 bp, Artificial Sequence
  Description of Artificial Sequence: Synthetic oligonucleotide
  Target: LAMA2; (-) strand; PAM type: YTN; PAM sequence: TTT
atttatttatttgagacaga

SEQ ID NO: 262971 - DNA, 20 bp, Artificial Sequence
  Description of Artificial Sequence: Synthetic oligonucleotide
  Target: LAMA2; (-) strand; PAM type: YTN; PAM sequence: TTA
tttatttatttatttgagac

SEQ ID NO: 262972 - DNA, 20 bp, Artificial Sequence
  Description of Artificial Sequence: Synthetic oligonucleotide
  Target: LAMA2; (-) strand; PAM type: YTN; PAM sequence: TTT
atttatttatttatttgaga

SEQ ID NO: 262973 - DNA, 20 bp, Artificial Sequence
  Description of Artificial Sequence: Synthetic oligonucleotide
  Target: LAMA2; (-) strand; PAM type: YTN; PAM sequence: TTA
tttatttatttatttatttg

SEQ ID NO: 262974 - DNA, 20 bp, Artificial Sequence
  Description of Artificial Sequence: Synthetic oligonucleotide
  Target: LAMA2; (-) strand; PAM type: YTN; PAM sequence: TTT
atttatttatttatttattt

SEQ ID NO: 262975 - DNA, 20 bp, Artificial Sequence
  Description of Artificial Sequence: Synthetic oligonucleotide
  Target: LAMA2; (-) strand; PAM type: YTN; PAM sequence: TTA
tttatttatttatttattta

SEQ ID NO: 262976 - DNA, 20 bp, Artificial Sequence
  Description of Artificial Sequence: Synthetic oligonucleotide
  Target: LAMA2; (-) strand; PAM type: YTN; PAM sequence: TTT
atttatttatttatttattt

SEQ ID NO: 262977 - DNA, 20 bp, Artificial Sequence
  Description of Artificial Sequence: Synthetic oligonucleotide
  Target: LAMA2; (-) strand; PAM type: YTN; PAM sequence: TTT
tatttatttatttatttatt

SEQ ID NO: 262978 - DNA, 20 bp, Artificial Sequence
  Description of Artificial Sequence: Synthetic oligonucleotide
  Target: LAMA2; (-) strand; PAM type: YTN; PAM sequence: TTT
ttatttatttatttatttat

SEQ ID NO: 262979 - DNA, 20 bp, Artificial Sequence
  Description of Artificial Sequence: Synthetic oligonucleotide
  Target: LAMA2; (-) strand; PAM type: YTN; PAM sequence: CTT
tttatttatttatttattta

SEQ ID NO: 262980 - DNA, 20 bp, Artificial Sequence
  Description of Artificial Sequence: Synthetic oligonucleotide
  Target: LAMA2; (-) strand; PAM type: YTN; PAM sequence: TTC
tttttatttatttatttatt

SEQ ID NO: 262981 - DNA, 20 bp, Artificial Sequence
  Description of Artificial Sequence: Synthetic oligonucleotide
  Target: LAMA2; (-) strand; PAM type: YTN; PAM sequence: TTT
ctttttatttatttatttat

SEQ ID NO: 262982 - DNA, 20 bp, Artificial Sequence
  Description of Artificial Sequence: Synthetic oligonucleotide
  Target: LAMA2; (-) strand; PAM type: YTN; PAM sequence: TTT
tctttttatttatttattta

SEQ ID NO: 262983 - DNA, 20 bp, Artificial Sequence
  Description of Artificial Sequence: Synthetic oligonucleotide
  Target: LAMA2; (-) strand; PAM type: YTN; PAM sequence: TTT
ttctttttatttatttattt

SEQ ID NO: 262984 - DNA, 20 bp, Artificial Sequence
  Description of Artificial Sequence: Synthetic oligonucleotide
  Target: LAMA2; (-) strand; PAM type: YTN; PAM sequence: TTT
tttctttttatttatttatt

SEQ ID NO: 262985 - DNA, 20 bp, Artificial Sequence
  Description of Artificial Sequence: Synthetic oligonucleotide
  Target: LAMA2; (-) strand; PAM type: YTN; PAM sequence: TTT
ttttctttttatttatttat

SEQ ID NO: 262986 - DNA, 20 bp, Artificial Sequence
  Description of Artificial Sequence: Synthetic oligonucleotide
  Target: LAMA2; (-) strand; PAM type: YTN; PAM sequence: TTT
tttttctttttatttattta

SEQ ID NO: 262987 - DNA, 20 bp, Artificial Sequence
  Description of Artificial Sequence: Synthetic oligonucleotide
  Target: LAMA2; (-) strand; PAM type: YTN; PAM sequence: TTT
ttttttctttttatttattt

SEQ ID NO: 262988 - DNA, 20 bp, Artificial Sequence
  Description of Artificial Sequence: Synthetic oligonucleotide
  Target: LAMA2; (-) strand; PAM type: YTN; PAM sequence: TTT
tttttttctttttatttatt

SEQ ID NO: 262989 - DNA, 20 bp, Artificial Sequence
  Description of Artificial Sequence: Synthetic oligonucleotide
  Target: LAMA2; (-) strand; PAM type: YTN; PAM sequence: TTT
ttttttttctttttatttat

SEQ ID NO: 262990 - DNA, 20 bp, Artificial Sequence
  Description of Artificial Sequence: Synthetic oligonucleotide
  Target: LAMA2; (-) strand; PAM type: YTN; PAM sequence: CTT
tttttttttctttttattta

SEQ ID NO: 262991 - DNA, 20 bp, Artificial Sequence
  Description of Artificial Sequence: Synthetic oligonucleotide
  Target: LAMA2; (-) strand; PAM type: YTN; PAM sequence: TTC
tttttttttttctttttatt

SEQ ID NO: 262992 - DNA, 20 bp, Artificial Sequence
  Description of Artificial Sequence: Synthetic oligonucleotide
  Target: LAMA2; (-) strand; PAM type: YTN; PAM sequence: TTT
ctttttttttttctttttat

SEQ ID NO: 262993 - DNA, 20 bp, Artificial Sequence
  Description of Artificial Sequence: Synthetic oligonucleotide
  Target: LAMA2; (-) strand; PAM type: YTN; PAM sequence: TTT
tctttttttttttcttttta

SEQ ID NO: 262994 - DNA, 20 bp, Artificial Sequence
  Description of Artificial Sequence: Synthetic oligonucleotide
  Target: LAMA2; (-) strand; PAM type: YTN; PAM sequence: CTT
ttctttttttttttcttttt

SEQ ID NO: 262995 - DNA, 20 bp, Artificial Sequence
  Description of Artificial Sequence: Synthetic oligonucleotide
  Target: LAMA2; (-) strand; PAM type: YTN; PAM sequence: TTC
ttttctttttttttttcttt

SEQ ID NO: 262996 - DNA, 20 bp, Artificial Sequence
  Description of Artificial Sequence: Synthetic oligonucleotide
  Target: LAMA2; (-) strand; PAM type: YTN; PAM sequence: CTA
ttcttttctttttttttttc

SEQ ID NO: 262997 - DNA, 20 bp, Artificial Sequence
  Description of Artificial Sequence: Synthetic oligonucleotide
  Target: LAMA2; (-) strand; PAM type: YTN; PAM sequence: TTC
ctattcttttcttttttttt

SEQ ID NO: 262998 - DNA, 20 bp, Artificial Sequence
  Description of Artificial Sequence: Synthetic oligonucleotide
  Target: LAMA2; (-) strand; PAM type: YTN; PAM sequence: CTT
cctattcttttctttttttt

SEQ ID NO: 262999 - DNA, 20 bp, Artificial Sequence
  Description of Artificial Sequence: Synthetic oligonucleotide
  Target: LAMA2; (-) strand; PAM type: YTN; PAM sequence: CTC
ttcctattcttttctttttt

SEQ ID NO: 263000 - DNA, 20 bp, Artificial Sequence
  Description of Artificial Sequence: Synthetic oligonucleotide
  Target: LAMA2; (-) strand; PAM type: YTN; PAM sequence: TTG
ctcttcctattcttttcttt

SEQ ID NO: 263001 - DNA, 20 bp, Artificial Sequence
  Description of Artificial Sequence: Synthetic oligonucleotide
  Target: LAMA2; (-) strand; PAM type: YTN; PAM sequence: TTT
gctcttcctattcttttctt

SEQ ID NO: 263002 - DNA, 20 bp, Artificial Sequence
  Description of Artificial Sequence: Synthetic oligonucleotide
  Target: LAMA2; (-) strand; PAM type: YTN; PAM sequence: TTA
atatatttgctcttcctatt

SEQ ID NO: 263003 - DNA, 20 bp, Artificial Sequence
  Description of Artificial Sequence: Synthetic oligonucleotide
  Target: LAMA2; (-) strand; PAM type: YTN; PAM sequence: CTT
aatatatttgctcttcctat

SEQ ID NO: 263004 - DNA, 20 bp, Artificial Sequence
  Description of Artificial Sequence: Synthetic oligonucleotide
  Target: LAMA2; (-) strand; PAM type: YTN; PAM sequence: TTC
cacttaatatatttgctctt

SEQ ID NO: 263005 - DNA, 20 bp, Artificial Sequence
  Description of Artificial Sequence: Synthetic oligonucleotide
  Target: LAMA2; (-) strand; PAM type: YTN; PAM sequence: CTT
ccacttaatatatttgctct

SEQ ID NO: 263006 - DNA, 20 bp, Artificial Sequence
  Description of Artificial Sequence: Synthetic oligonucleotide
  Target: LAMA2; (-) strand; PAM type: YTN; PAM sequence: TTA
caatgatccacttccactta

SEQ ID NO: 263007 - DNA, 20 bp, Artificial Sequence
  Description of Artificial Sequence: Synthetic oligonucleotide
  Target: LAMA2; (-) strand; PAM type: YTN; PAM sequence: TTT
acaatgatccacttccactt

SEQ ID NO: 263008 - DNA, 20 bp, Artificial Sequence
  Description of Artificial Sequence: Synthetic oligonucleotide
  Target: LAMA2; (-) strand; PAM type: YTN; PAM sequence: CTT
tacaatgatccacttccact

SEQ ID NO: 263009 - DNA, 20 bp, Artificial Sequence
  Description of Artificial Sequence: Synthetic oligonucleotide
  Target: LAMA2; (-) strand; PAM type: YTN; PAM sequence: CTC
aaaatgaagacaacgaggat

SEQ ID NO: 263010 - DNA, 20 bp, Artificial Sequence
  Description of Artificial Sequence: Synthetic oligonucleotide
  Target: LAMA2; (-) strand; PAM type: YTN; PAM sequence: CTG
ctcaaaatgaagacaacgag

SEQ ID NO: 263011 - DNA, 20 bp, Artificial Sequence
  Description of Artificial Sequence: Synthetic oligonucleotide
  Target: LAMA2; (-) strand; PAM type: YTN; PAM sequence: TTA
gtctgctcaaaatgaagaca

SEQ ID NO: 263012 - DNA, 20 bp, Artificial Sequence
  Description of Artificial Sequence: Synthetic oligonucleotide
  Target: LAMA2; (-) strand; PAM type: YTN; PAM sequence: TTT
agtctgctcaaaatgaagac

SEQ ID NO: 263013 - DNA, 20 bp, Artificial Sequence
  Description of Artificial Sequence: Synthetic oligonucleotide
  Target: LAMA2; (-) strand; PAM type: YTN; PAM sequence: CTT
tagtctgctcaaaatgaaga

SEQ ID NO: 263014 - DNA, 20 bp, Artificial Sequence
  Description of Artificial Sequence: Synthetic oligonucleotide
  Target: LAMA2; (-) strand; PAM type: YTN; PAM sequence: CTC
tttagtctgctcaaaatgaa

SEQ ID NO: 263015 - DNA, 20 bp, Artificial Sequence
  Description of Artificial Sequence: Synthetic oligonucleotide
  Target: LAMA2; (-) strand; PAM type: YTN; PAM sequence: CTC
ctctttagtctgctcaaaat

SEQ ID NO: 263016 - DNA, 20 bp, Artificial Sequence
  Description of Artificial Sequence: Synthetic oligonucleotide
  Target: LAMA2; (-) strand; PAM type: YTN; PAM sequence: CTC
ctcctctttagtctgctcaa

SEQ ID NO: 263017 - DNA, 20 bp, Artificial Sequence
  Description of Artificial Sequence: Synthetic oligonucleotide
  Target: LAMA2; (-) strand; PAM type: YTN; PAM sequence: TTC
ctcctcctctttagtctgct

SEQ ID NO: 263018 - DNA, 20 bp, Artificial Sequence
  Description of Artificial Sequence: Synthetic oligonucleotide
  Target: LAMA2; (-) strand; PAM type: YTN; PAM sequence: CTT
cctcctcctctttagtctgc

SEQ ID NO: 263019 - DNA, 20 bp, Artificial Sequence
  Description of Artificial Sequence: Synthetic oligonucleotide
  Target: LAMA2; (-) strand; PAM type: YTN; PAM sequence: TTC
ttcctcctcctctttagtct

SEQ ID NO: 263020 - DNA, 20 bp, Artificial Sequence
  Description of Artificial Sequence: Synthetic oligonucleotide
  Target: LAMA2; (-) strand; PAM type: YTN; PAM sequence: CTT
cttcctcctcctctttagtc

SEQ ID NO: 263021 - DNA, 20 bp, Artificial Sequence
  Description of Artificial Sequence: Synthetic oligonucleotide
  Target: LAMA2; (-) strand; PAM type: YTN; PAM sequence: CTC
ttcttcctcctcctctttag

SEQ ID NO: 263022 - DNA, 20 bp, Artificial Sequence
  Description of Artificial Sequence: Synthetic oligonucleotide
  Target: LAMA2; (-) strand; PAM type: YTN; PAM sequence: CTC
ctcttcttcctcctcctctt

SEQ ID NO: 263023 - DNA, 20 bp, Artificial Sequence
  Description of Artificial Sequence: Synthetic oligonucleotide
  Target: LAMA2; (-) strand; PAM type: YTN; PAM sequence: CTA
cccagagatagcaggaccaa

SEQ ID NO: 263024 - DNA, 20 bp, Artificial Sequence
  Description of Artificial Sequence: Synthetic oligonucleotide
  Target: LAMA2; (-) strand; PAM type: YTN; PAM sequence: CTG
ctacccagagatagcaggac

SEQ ID NO: 263025 - DNA, 20 bp, Artificial Sequence
  Description of Artificial Sequence: Synthetic oligonucleotide
  Target: LAMA2; (-) strand; PAM type: YTN; PAM sequence: TTC
cacgtctgctacccagagat

SEQ ID NO: 263026 - DNA, 20 bp, Artificial Sequence
  Description of Artificial Sequence: Synthetic oligonucleotide
  Target: LAMA2; (-) strand; PAM type: YTN; PAM sequence: CTT
ccacgtctgctacccagaga

SEQ ID NO: 263027 - DNA, 20 bp, Artificial Sequence
  Description of Artificial Sequence: Synthetic oligonucleotide
  Target: LAMA2; (-) strand; PAM type: YTN; PAM sequence: TTC
ttccacgtctgctacccaga

SEQ ID NO: 263028 - DNA, 20 bp, Artificial Sequence
  Description of Artificial Sequence: Synthetic oligonucleotide
  Target: LAMA2; (-) strand; PAM type: YTN; PAM sequence: TTT
cttccacgtctgctacccag

SEQ ID NO: 263029 - DNA, 20 bp, Artificial Sequence
  Description of Artificial Sequence: Synthetic oligonucleotide
  Target: LAMA2; (-) strand; PAM type: YTN; PAM sequence: TTT
tcttccacgtctgctaccca

SEQ ID NO: 263030 - DNA, 20 bp, Artificial Sequence
  Description of Artificial Sequence: Synthetic oligonucleotide
  Target: LAMA2; (-) strand; PAM type: YTN; PAM sequence: TTG
tacggggattttcttccacg

SEQ ID NO: 263031 - DNA, 20 bp, Artificial Sequence
  Description of Artificial Sequence: Synthetic oligonucleotide
  Target: LAMA2; (-) strand; PAM type: YTN; PAM sequence: CTT
gtacggggattttcttccac

SEQ ID NO: 263032 - DNA, 20 bp, Artificial Sequence
  Description of Artificial Sequence: Synthetic oligonucleotide
  Target: LAMA2; (-) strand; PAM type: YTN; PAM sequence: TTC
acttgtacggggattttctt

SEQ ID NO: 263033 - DNA, 20 bp, Artificial Sequence
  Description of Artificial Sequence: Synthetic oligonucleotide
  Target: LAMA2; (-) strand; PAM type: YTN; PAM sequence: CTG
catgggttcacttgtacggg

SEQ ID NO: 263034 - DNA, 20 bp, Artificial Sequence
  Description of Artificial Sequence: Synthetic oligonucleotide
  Target: LAMA2; (-) strand; PAM type: YTN; PAM sequence: TTG
aactgcatgggttcacttgt

SEQ ID NO: 263035 - DNA, 20 bp, Artificial Sequence
  Description of Artificial Sequence: Synthetic oligonucleotide
  Target: LAMA2; (-) strand; PAM type: YTN; PAM sequence: CTT
gaactgcatgggttcacttg

SEQ ID NO: 263036 - DNA, 20 bp, Artificial Sequence
  Description of Artificial Sequence: Synthetic oligonucleotide
  Target: LAMA2; (-) strand; PAM type: YTN; PAM sequence: TTG
aacaatatgggcttgaactg

SEQ ID NO: 263037 - DNA, 20 bp, Artificial Sequence
  Description of Artificial Sequence: Synthetic oligonucleotide
  Target: LAMA2; (-) strand; PAM type: YTN; PAM sequence: CTT
gaacaatatgggcttgaact

SEQ ID NO: 263038 - DNA, 20 bp, Artificial Sequence
  Description of Artificial Sequence: Synthetic oligonucleotide
  Target: LAMA2; (-) strand; PAM type: YTN; PAM sequence: TTG
acccttgaacaatatgggct

SEQ ID NO: 263039 - DNA, 20 bp, Artificial Sequence
  Description of Artificial Sequence: Synthetic oligonucleotide
  Target: LAMA2; (-) strand; PAM type: YTN; PAM sequence: TTG
tacataagttgacccttgaa

SEQ ID NO: 263040 - DNA, 20 bp, Artificial Sequence
  Description of Artificial Sequence: Synthetic oligonucleotide
  Target: LAMA2; (-) strand; PAM type: YTN; PAM sequence: TTG
acaaataataattgtacata

SEQ ID NO: 263041 - DNA, 20 bp, Artificial Sequence
  Description of Artificial Sequence: Synthetic oligonucleotide
  Target: LAMA2; (-) strand; PAM type: YTN; PAM sequence: TTA
attgacaaataataattgta

SEQ ID NO: 263042 - DNA, 20 bp, Artificial Sequence
  Description of Artificial Sequence: Synthetic oligonucleotide
  Target: LAMA2; (-) strand; PAM type: YTN; PAM sequence: TTT
aattgacaaataataattgt

SEQ ID NO: 263043 - DNA, 20 bp, Artificial Sequence
  Description of Artificial Sequence: Synthetic oligonucleotide
  Target: LAMA2; (-) strand; PAM type: YTN; PAM sequence: TTT
taattgacaaataataattg

SEQ ID NO: 263044 - DNA, 20 bp, Artificial Sequence
  Description of Artificial Sequence: Synthetic oligonucleotide
  Target: LAMA2; (-) strand; PAM type: YTN; PAM sequence: TTT
ttaattgacaaataataatt

SEQ ID NO: 263045 - DNA, 20 bp, Artificial Sequence
  Description of Artificial Sequence: Synthetic oligonucleotide
  Target: LAMA2; (-) strand; PAM type: YTN; PAM sequence: TTG
tttttaattgacaaataata

SEQ ID NO: 263046 - DNA, 20 bp, Artificial Sequence
  Description of Artificial Sequence: Synthetic oligonucleotide
  Target: LAMA2; (-) strand; PAM type: YTN; PAM sequence: TTT
gtttttaattgacaaataat

SEQ ID NO: 263047 - DNA, 20 bp, Artificial Sequence
  Description of Artificial Sequence: Synthetic oligonucleotide
  Target: LAMA2; (-) strand; PAM type: YTN; PAM sequence: TTT
tgtttttaattgacaaataa

SEQ ID NO: 263048 - DNA, 20 bp, Artificial Sequence
  Description of Artificial Sequence: Synthetic oligonucleotide
  Target: LAMA2; (-) strand; PAM type: YTN; PAM sequence: TTT
ttgtttttaattgacaaata

SEQ ID NO: 263049 - DNA, 20 bp, Artificial Sequence
  Description of Artificial Sequence: Synthetic oligonucleotide
  Target: LAMA2; (-) strand; PAM type: YTN; PAM sequence: CTT
tttgtttttaattgacaaat

SEQ ID NO: 263050 - DNA, 20 bp, Artificial Sequence
  Description of Artificial Sequence: Synthetic oligonucleotide
  Target: LAMA2; (-) strand; PAM type: YTN; PAM sequence: TTG
tctttttgtttttaattgac

SEQ ID NO: 263051 - DNA, 20 bp, Artificial Sequence
  Description of Artificial Sequence: Synthetic oligonucleotide
  Target: LAMA2; (-) strand; PAM type: YTN; PAM sequence: CTA
ttgtctttttgtttttaatt

SEQ ID NO: 263052 - DNA, 20 bp, Artificial Sequence
  Description of Artificial Sequence: Synthetic oligonucleotide
  Target: LAMA2; (-) strand; PAM type: YTN; PAM sequence: TTC
tattgtctttttgtttttaa

SEQ ID NO: 263053 - DNA, 20 bp, Artificial Sequence
  Description of Artificial Sequence: Synthetic oligonucleotide
  Target: LAMA2; (-) strand; PAM type: YTN; PAM sequence: CTC
aagtatgttctattgtcttt

SEQ ID NO: 263054 - DNA, 20 bp, Artificial Sequence
  Description of Artificial Sequence: Synthetic oligonucleotide
  Target: LAMA2; (-) strand; PAM type: YTN; PAM sequence: TTG
tcaacctcaagtatgttcta

SEQ ID NO: 263055 - DNA, 20 bp, Artificial Sequence
  Description of Artificial Sequence: Synthetic oligonucleotide
  Target: LAMA2; (-) strand; PAM type: YTN; PAM sequence: TTT
gtcaacctcaagtatgttct

SEQ ID NO: 263056 - DNA, 20 bp, Artificial Sequence
  Description of Artificial Sequence: Synthetic oligonucleotide
  Target: LAMA2; (-) strand; PAM type: YTN; PAM sequence: TTT
tgtcaacctcaagtatgttc

SEQ ID NO: 263057 - DNA, 20 bp, Artificial Sequence
  Description of Artificial Sequence: Synthetic oligonucleotide
  Target: LAMA2; (-) strand; PAM type: YTN; PAM sequence: TTT
ttgtcaacctcaagtatgtt

SEQ ID NO: 263058 - DNA, 20 bp, Artificial Sequence
  Description of Artificial Sequence: Synthetic oligonucleotide
  Target: LAMA2; (-) strand; PAM type: YTN; PAM sequence: CTC
acgtttttgtcaacctcaag

SEQ ID NO: 263059 - DNA, 20 bp, Artificial Sequence
  Description of Artificial Sequence: Synthetic oligonucleotide
  Target: LAMA2; (-) strand; PAM type: YTN; PAM sequence: TTC
tcacgtttttgtcaacctca

SEQ ID NO: 263060 - DNA, 20 bp, Artificial Sequence
  Description of Artificial Sequence: Synthetic oligonucleotide
  Target: LAMA2; (-) strand; PAM type: YTN; PAM sequence: CTT
ctcacgtttttgtcaacctc

SEQ ID NO: 263061 - DNA, 20 bp, Artificial Sequence
  Description of Artificial Sequence: Synthetic oligonucleotide
  Target: LAMA2; (-) strand; PAM type: YTN; PAM sequence: CTA
cagcaatatccttctcacgt

SEQ ID NO: 263062 - DNA, 20 bp, Artificial Sequence
  Description of Artificial Sequence: Synthetic oligonucleotide
  Target: LAMA2; (-) strand; PAM type: YTN; PAM sequence: CTA
gtaaacaatcaatcctacag

SEQ ID NO: 263063 - DNA, 20 bp, Artificial Sequence
  Description of Artificial Sequence: Synthetic oligonucleotide
  Target: LAMA2; (-) strand; PAM type: YTN; PAM sequence: TTA
agatcacctagtaaacaatc

SEQ ID NO: 263064 - DNA, 20 bp, Artificial Sequence
  Description of Artificial Sequence: Synthetic oligonucleotide
  Target: LAMA2; (-) strand; PAM type: YTN; PAM sequence: CTA
tgacagtcagttaagatcac

SEQ ID NO: 263065 - DNA, 20 bp, Artificial Sequence
  Description of Artificial Sequence: Synthetic oligonucleotide
  Target: LAMA2; (-) strand; PAM type: YTN; PAM sequence: TTA
ctatgacagtcagttaagat

SEQ ID NO: 263066 - DNA, 20 bp, Artificial Sequence
  Description of Artificial Sequence: Synthetic oligonucleotide
  Target: LAMA2; (-) strand; PAM type: YTN; PAM sequence: TTA
gattactatgacagtcagtt

SEQ ID NO: 263067 - DNA, 20 bp, Artificial Sequence
  Description of Artificial Sequence: Synthetic oligonucleotide
  Target: LAMA2; (-) strand; PAM type: YTN; PAM sequence: CTT
agattactatgacagtcagt

SEQ ID NO: 263068 - DNA, 20 bp, Artificial Sequence
  Description of Artificial Sequence: Synthetic oligonucleotide
  Target: LAMA2; (-) strand; PAM type: YTN; PAM sequence: CTA
gaaacagcgagaatgtactt

SEQ ID NO: 263069 - DNA, 20 bp, Artificial Sequence
  Description of Artificial Sequence: Synthetic oligonucleotide
  Target: LAMA2; (-) strand; PAM type: YTN; PAM sequence: TTC
agaaatcctagaaacagcga

SEQ ID NO: 263070 - DNA, 20 bp, Artificial Sequence
  Description of Artificial Sequence: Synthetic oligonucleotide
  Target: LAMA2; (-) strand; PAM type: YTN; PAM sequence: TTT
cagaaatcctagaaacagcg

SEQ ID NO: 263071 - DNA, 20 bp, Artificial Sequence
  Description of Artificial Sequence: Synthetic oligonucleotide
  Target: LAMA2; (-) strand; PAM type: YTN; PAM sequence: TTG
agatttcagaaatcctagaa

SEQ ID NO: 263072 - DNA, 20 bp, Artificial Sequence
  Description of Artificial Sequence: Synthetic oligonucleotide
  Target: LAMA2; (-) strand; PAM type: YTN; PAM sequence: CTC
cattgagatttcagaaatcc

SEQ ID NO: 263073 - DNA, 20 bp, Artificial Sequence
  Description of Artificial Sequence: Synthetic oligonucleotide
  Target: LAMA2; (-) strand; PAM type: YTN; PAM sequence: CTA
cctccattgagatttcagaa

SEQ ID NO: 263074 - DNA, 20 bp, Artificial Sequence
  Description of Artificial Sequence: Synthetic oligonucleotide
  Target: LAMA2; (-) strand; PAM type: YTN; PAM sequence: TTC
agctacctccattgagattt

SEQ ID NO: 263075 - DNA, 20 bp, Artificial Sequence
  Description of Artificial Sequence: Synthetic oligonucleotide
  Target: LAMA2; (-) strand; PAM type: YTN; PAM sequence: TTG
ttcagctacctccattgaga

SEQ ID NO: 263076 - DNA, 20 bp, Artificial Sequence
  Description of Artificial Sequence: Synthetic oligonucleotide
  Target: LAMA2; (-) strand; PAM type: YTN; PAM sequence: CTT
gttcagctacctccattgag

SEQ ID NO: 263077 - DNA, 20 bp, Artificial Sequence
  Description of Artificial Sequence: Synthetic oligonucleotide
  Target: LAMA2; (-) strand; PAM type: YTN; PAM sequence: TTC
cacgtccttgttcagctacc

SEQ ID NO: 263078 - DNA, 20 bp, Artificial Sequence
  Description of Artificial Sequence: Synthetic oligonucleotide
  Target: LAMA2; (-) strand; PAM type: YTN; PAM sequence: TTG
ttccacgtccttgttcagct

SEQ ID NO: 263079 - DNA, 20 bp, Artificial Sequence
  Description of Artificial Sequence: Synthetic oligonucleotide
  Target: LAMA2; (-) strand; PAM type: YTN; PAM sequence: TTG
ttgttccacgtccttgttca

SEQ ID NO: 263080 - DNA, 20 bp, Artificial Sequence
  Description of Artificial Sequence: Synthetic oligonucleotide
  Target: LAMA2; (-) strand; PAM type: YTN; PAM sequence: CTG
gaggagtcattgttgttcca

SEQ ID NO: 263081 - DNA, 20 bp, Artificial Sequence
  Description of Artificial Sequence: Synthetic oligonucleotide
  Target: LAMA2; (-) strand; PAM type: YTN; PAM sequence: TTC
aatcaagtcagctggaggag

SEQ ID NO: 263082 - DNA, 20 bp, Artificial Sequence
  Description of Artificial Sequence: Synthetic oligonucleotide
  Target: LAMA2; (-) strand; PAM type: YTN; PAM sequence: TTT
caatcaagtcagctggagga

SEQ ID NO: 263083 - DNA, 20 bp, Artificial Sequence
  Description of Artificial Sequence: Synthetic oligonucleotide
  Target: LAMA2; (-) strand; PAM type: YTN; PAM sequence: TTT
tcaatcaagtcagctggagg

SEQ ID NO: 263084 - DNA, 20 bp, Artificial Sequence
  Description of Artificial Sequence: Synthetic oligonucleotide
  Target: LAMA2; (-) strand; PAM type: YTN; PAM sequence: TTT
ttcaatcaagtcagctggag

SEQ ID NO: 263085 - DNA, 20 bp, Artificial Sequence
  Description of Artificial Sequence: Synthetic oligonucleotide
  Target: LAMA2; (-) strand; PAM type: YTN; PAM sequence: CTC
acaggacaggccagaatagc

SEQ ID NO: 263086 - DNA, 20 bp, Artificial Sequence
  Description of Artificial Sequence: Synthetic oligonucleotide
  Target: LAMA2; (-) strand; PAM type: YTN; PAM sequence: TTA
cctcacaggacaggccagaa

SEQ ID NO: 263087 - DNA, 20 bp, Artificial Sequence
  Description of Artificial Sequence: Synthetic oligonucleotide
  Target: LAMA2; (-) strand; PAM type: YTN; PAM sequence: CTT
acctcacaggacaggccaga

SEQ ID NO: 263088 - DNA, 20 bp, Artificial Sequence
  Description of Artificial Sequence: Synthetic oligonucleotide
  Target: LAMA2; (-) strand; PAM type: YTN; PAM sequence: TTA
gtaggaggtagcttacctca

SEQ ID NO: 263089 - DNA, 20 bp, Artificial Sequence
  Description of Artificial Sequence: Synthetic oligonucleotide
  Target: LAMA2; (-) strand; PAM type: YTN; PAM sequence: TTA
agcaggttagtaggaggtag

SEQ ID NO: 263090 - DNA, 20 bp, Artificial Sequence
  Description of Artificial Sequence: Synthetic oligonucleotide
  Target: LAMA2; (-) strand; PAM type: YTN; PAM sequence: TTG
agattaagcaggttagtagg

SEQ ID NO: 263091 - DNA, 20 bp, Artificial Sequence
  Description of Artificial Sequence: Synthetic oligonucleotide
  Target: LAMA2; (-) strand; PAM type: YTN; PAM sequence: CTT
gagattaagcaggttagtag

SEQ ID NO: 263092 - DNA, 20 bp, Artificial Sequence
  Description of Artificial Sequence: Synthetic oligonucleotide
  Target: LAMA2; (-) strand; PAM type: YTN; PAM sequence: CTG
aagtgacttgagattaagca

SEQ ID NO: 263093 - DNA, 20 bp, Artificial Sequence
  Description of Artificial Sequence: Synthetic oligonucleotide
  Target: LAMA2; (-) strand; PAM type: YTN; PAM sequence: CTC
ctgaagtgacttgagattaa

SEQ ID NO: 263094 - DNA, 20 bp, Artificial Sequence
  Description of Artificial Sequence: Synthetic oligonucleotide
  Target: LAMA2; (-) strand; PAM type: YTN; PAM sequence: TTA
gctcctgaagtgacttgaga

SEQ ID NO: 263095 - DNA, 20 bp, Artificial Sequence
  Description of Artificial Sequence: Synthetic oligonucleotide
  Target: LAMA2; (-) strand; PAM type: YTN; PAM sequence: TTT
agctcctgaagtgacttgag

SEQ ID NO: 263096 - DNA, 20 bp, Artificial Sequence
  Description of Artificial Sequence: Synthetic oligonucleotide
  Target: LAMA2; (-) strand; PAM type: YTN; PAM sequence: TTC
catttagctcctgaagtgac

SEQ ID NO: 263097 - DNA, 20 bp, Artificial Sequence
  Description of Artificial Sequence: Synthetic oligonucleotide
  Target: LAMA2; (-) strand; PAM type: YTN; PAM sequence: TTT
ccatttagctcctgaagtga

SEQ ID NO: 263098 - DNA, 20 bp, Artificial Sequence
  Description of Artificial Sequence: Synthetic oligonucleotide
  Target: LAMA2; (-) strand; PAM type: YTN; PAM sequence: CTG
ggagtatttccatttagctc

SEQ ID NO: 263099 - DNA, 20 bp, Artificial Sequence
  Description of Artificial Sequence: Synthetic oligonucleotide
  Target: LAMA2; (-) strand; PAM type: YTN; PAM sequence: TTC
tgggagtatttccatttagc

SEQ ID NO: 263100 - DNA, 20 bp, Artificial Sequence
  Description of Artificial Sequence: Synthetic oligonucleotide
  Target: LAMA2; (-) strand; PAM type: YTN; PAM sequence: CTT
ctgggagtatttccatttag

SEQ ID NO: 263101 - DNA, 20 bp, Artificial Sequence
  Description of Artificial Sequence: Synthetic oligonucleotide
  Target: LAMA2; (-) strand; PAM type: YTN; PAM sequence: TTA
agaatatgtatgcagtaaag

SEQ ID NO: 263102 - DNA, 20 bp, Artificial Sequence
  Description of Artificial Sequence: Synthetic oligonucleotide
  Target: LAMA2; (-) strand; PAM type: YTN; PAM sequence: TTA
aataaaatagattaagaata

SEQ ID NO: 263103 - DNA, 20 bp, Artificial Sequence
  Description of Artificial Sequence: Synthetic oligonucleotide
  Target: LAMA2; (-) strand; PAM type: YTN; PAM sequence: CTG
tgagtggaagattaaataaa

SEQ ID NO: 263104 - DNA, 20 bp, Artificial Sequence
  Description of Artificial Sequence: Synthetic oligonucleotide
  Target: LAMA2; (-) strand; PAM type: YTN; PAM sequence: CTC
acactgtgagtggaagatta

SEQ ID NO: 263105 - DNA, 20 bp, Artificial Sequence
  Description of Artificial Sequence: Synthetic oligonucleotide
  Target: LAMA2; (-) strand; PAM type: YTN; PAM sequence: CTG
tgtctcacactgtgagtgga

SEQ ID NO: 263106 - DNA, 20 bp, Artificial Sequence
  Description of Artificial Sequence: Synthetic oligonucleotide
  Target: LAMA2; (-) strand; PAM type: YTN; PAM sequence: TTG
ccactgtgtctcacactgtg

SEQ ID NO: 263107 - DNA, 20 bp, Artificial Sequence
  Description of Artificial Sequence: Synthetic oligonucleotide
  Target: LAMA2; (-) strand; PAM type: YTN; PAM sequence: CTT
gccactgtgtctcacactgt

SEQ ID NO: 263108 - DNA, 20 bp, Artificial Sequence
  Description of Artificial Sequence: Synthetic oligonucleotide
  Target: LAMA2; (-) strand; PAM type: YTN; PAM sequence: CTC
ttgccactgtgtctcacact

SEQ ID NO: 263109 - DNA, 20 bp, Artificial Sequence
  Description of Artificial Sequence: Synthetic oligonucleotide
  Target: LAMA2; (-) strand; PAM type: YTN; PAM sequence: TTA
tcctcttgccactgtgtctc

SEQ ID NO: 263110 - DNA, 20 bp, Artificial Sequence
  Description of Artificial Sequence: Synthetic oligonucleotide
  Target: LAMA2; (-) strand; PAM type: YTN; PAM sequence: CTA
aatatcaataacattatcct

SEQ ID NO: 263111 - DNA, 20 bp, Artificial Sequence
  Description of Artificial Sequence: Synthetic oligonucleotide
  Target: LAMA2; (-) strand; PAM type: YTN; PAM sequence: TTG
tactaaatatcaataacatt

SEQ ID NO: 263112 - DNA, 20 bp, Artificial Sequence
  Description of Artificial Sequence: Synthetic oligonucleotide
  Target: LAMA2; (-) strand; PAM type: YTN; PAM sequence: TTT
gtactaaatatcaataacat

SEQ ID NO: 263113 - DNA, 20 bp, Artificial Sequence
  Description of Artificial Sequence: Synthetic oligonucleotide
  Target: LAMA2; (-) strand; PAM type: YTN; PAM sequence: TTC
aggtatgatttgtactaaat

SEQ ID NO: 263114 - DNA, 20 bp, Artificial Sequence
  Description of Artificial Sequence: Synthetic oligonucleotide
  Target: LAMA2; (-) strand; PAM type: YTN; PAM sequence: CTT
caggtatgatttgtactaaa

SEQ ID NO: 263115 - DNA, 20 bp, Artificial Sequence
  Description of Artificial Sequence: Synthetic oligonucleotide
  Target: LAMA2; (-) strand; PAM type: YTN; PAM sequence: TTC
ccttcaggtatgatttgtac

SEQ ID NO: 263116 - DNA, 20 bp, Artificial Sequence
  Description of Artificial Sequence: Synthetic oligonucleotide
  Target: LAMA2; (-) strand; PAM type: YTN; PAM sequence: TTT
cccttcaggtatgatttgta

SEQ ID NO: 263117 - DNA, 20 bp, Artificial Sequence
  Description of Artificial Sequence: Synthetic oligonucleotide
  Target: LAMA2; (-) strand; PAM type: YTN; PAM sequence: CTA
tttcccttcaggtatgattt

SEQ ID NO: 263118 - DNA, 20 bp, Artificial Sequence
  Description of Artificial Sequence: Synthetic oligonucleotide
  Target: LAMA2; (-) strand; PAM type: YTN; PAM sequence: TTG
atcaactatttcccttcagg

SEQ ID NO: 263119 - DNA, 20 bp, Artificial Sequence
  Description of Artificial Sequence: Synthetic oligonucleotide
  Target: LAMA2; (-) strand; PAM type: YTN; PAM sequence: TTT
gatcaactatttcccttcag

SEQ ID NO: 263120 - DNA, 20 bp, Artificial Sequence
  Description of Artificial Sequence: Synthetic oligonucleotide
  Target: LAMA2; (-) strand; PAM type: YTN; PAM sequence: TTT
tgatcaactatttcccttca

SEQ ID NO: 263121 - DNA, 20 bp, Artificial Sequence
  Description of Artificial Sequence: Synthetic oligonucleotide
  Target: LAMA2; (-) strand; PAM type: YTN; PAM sequence: TTT
ttgatcaactatttcccttc

SEQ ID NO: 263122 - DNA, 20 bp, Artificial Sequence
  Description of Artificial Sequence: Synthetic oligonucleotide
  Target: LAMA2; (-) strand; PAM type: YTN; PAM sequence: TTA
aatttttgatcaactatttc

SEQ ID NO: 263123 - DNA, 20 bp, Artificial Sequence
  Description of Artificial Sequence: Synthetic oligonucleotide
  Target: LAMA2; (-) strand; PAM type: YTN; PAM sequence: TTT
aaatttttgatcaactattt

SEQ ID NO: 263124 - DNA, 20 bp, Artificial Sequence
  Description of Artificial Sequence: Synthetic oligonucleotide
  Target: LAMA2; (-) strand; PAM type: YTN; PAM sequence: CTT
taaatttttgatcaactatt

SEQ ID NO: 263125 - DNA, 20 bp, Artificial Sequence
  Description of Artificial Sequence: Synthetic oligonucleotide
  Target: LAMA2; (-) strand; PAM type: YTN; PAM sequence: TTC
acaaatctttaaatttttga

SEQ ID NO: 263126 - DNA, 20 bp, Artificial Sequence
  Description of Artificial Sequence: Synthetic oligonucleotide
  Target: LAMA2; (-) strand; PAM type: YTN; PAM sequence: TTT
cacaaatctttaaatttttg

SEQ ID NO: 263127 - DNA, 20 bp, Artificial Sequence
  Description of Artificial Sequence: Synthetic oligonucleotide
  Target: LAMA2; (-) strand; PAM type: YTN; PAM sequence: TTT
tcacaaatctttaaattttt

SEQ ID NO: 263128 - DNA, 20 bp, Artificial Sequence
  Description of Artificial Sequence: Synthetic oligonucleotide
  Target: LAMA2; (-) strand; PAM type: YTN; PAM sequence: TTA
aatattttcacaaatcttta

SEQ ID NO: 263129 - DNA, 20 bp, Artificial Sequence
  Description of Artificial Sequence: Synthetic oligonucleotide
  Target: LAMA2; (-) strand; PAM type: YTN; PAM sequence: TTG
ttaaatattttcacaaatct

SEQ ID NO: 263130 - DNA, 20 bp, Artificial Sequence
  Description of Artificial Sequence: Synthetic oligonucleotide
  Target: LAMA2; (-) strand; PAM type: YTN; PAM sequence: CTG
attgttaaatattttcacaa

SEQ ID NO: 263131 - DNA, 20 bp, Artificial Sequence
  Description of Artificial Sequence: Synthetic oligonucleotide
  Target: LAMA2; (-) strand; PAM type: YTN; PAM sequence: TTC
ctgattgttaaatattttca

SEQ ID NO: 263132 - DNA, 20 bp, Artificial Sequence
  Description of Artificial Sequence: Synthetic oligonucleotide
  Target: LAMA2; (-) strand; PAM type: YTN; PAM sequence: TTA
attcctgattgttaaatatt

SEQ ID NO: 263133 - DNA, 20 bp, Artificial Sequence
  Description of Artificial Sequence: Synthetic oligonucleotide
  Target: LAMA2; (-) strand; PAM type: YTN; PAM sequence: CTT
aattcctgattgttaaatat

SEQ ID NO: 263134 - DNA, 20 bp, Artificial Sequence
  Description of Artificial Sequence: Synthetic oligonucleotide
  Target: LAMA2; (-) strand; PAM type: YTN; PAM sequence: TTC
ttaattcctgattgttaaat

SEQ ID NO: 263135 - DNA, 20 bp, Artificial Sequence
  Description of Artificial Sequence: Synthetic oligonucleotide
  Target: LAMA2; (-) strand; PAM type: YTN; PAM sequence: TTA
aaacattcttaattcctgat

SEQ ID NO: 263136 - DNA, 20 bp, Artificial Sequence
  Description of Artificial Sequence: Synthetic oligonucleotide
  Target: LAMA2; (-) strand; PAM type: YTN; PAM sequence: TTA
ttaaaacattcttaattcct

SEQ ID NO: 263137 - DNA, 20 bp, Artificial Sequence
  Description of Artificial Sequence: Synthetic oligonucleotide
  Target: LAMA2; (-) strand; PAM type: YTN; PAM sequence: CTT
attaaaacattcttaattcc

SEQ ID NO: 263138 - DNA, 20 bp, Artificial Sequence
  Description of Artificial Sequence: Synthetic oligonucleotide
  Target: LAMA2; (-) strand; PAM type: YTN; PAM sequence: CTA
taataaataggcttattaaa

SEQ ID NO: 263139 - DNA, 20 bp, Artificial Sequence
  Description of Artificial Sequence: Synthetic oligonucleotide
  Target: LAMA2; (-) strand; PAM type: YTN; PAM sequence: TTC
agaagtggtccaagaaaata

SEQ ID NO: 263140 - DNA, 20 bp, Artificial Sequence
  Description of Artificial Sequence: Synthetic oligonucleotide
  Target: LAMA2; (-) strand; PAM type: YTN; PAM sequence: CTT
cagaagtggtccaagaaaat

SEQ ID NO: 263141 - DNA, 20 bp, Artificial Sequence
  Description of Artificial Sequence: Synthetic oligonucleotide
  Target: LAMA2; (-) strand; PAM type: YTN; PAM sequence: CTC
ttcagaagtggtccaagaaa

SEQ ID NO: 263142 - DNA, 20 bp, Artificial Sequence
  Description of Artificial Sequence: Synthetic oligonucleotide
  Target: LAMA2; (-) strand; PAM type: YTN; PAM sequence: CTA
actcttcagaagtggtccaa

SEQ ID NO: 263143 - DNA, 20 bp, Artificial Sequence
  Description of Artificial Sequence: Synthetic oligonucleotide
  Target: LAMA2; (-) strand; PAM type: YTN; PAM sequence: CTC
taactcttcagaagtggtcc

SEQ ID NO: 263144 - DNA, 20 bp, Artificial Sequence
  Description of Artificial Sequence: Synthetic oligonucleotide
  Target: LAMA2; (-) strand; PAM type: YTN; PAM sequence: TTA
aatgtctctaactcttcaga

SEQ ID NO: 263145 - DNA, 20 bp, Artificial Sequence
  Description of Artificial Sequence: Synthetic oligonucleotide
  Target: LAMA2; (-) strand; PAM type: YTN; PAM sequence: TTT
aaatgtctctaactcttcag

SEQ ID NO: 263146 - DNA, 20 bp, Artificial Sequence
  Description of Artificial Sequence: Synthetic oligonucleotide
  Target: LAMA2; (-) strand; PAM type: YTN; PAM sequence: TTG
cagtttaaatgtctctaact

SEQ ID NO: 263147 - DNA, 20 bp, Artificial Sequence
  Description of Artificial Sequence: Synthetic oligonucleotide
  Target: LAMA2; (-) strand; PAM type: YTN; PAM sequence: CTA
atcattgcagtttaaatgtc

SEQ ID NO: 263148 - DNA, 20 bp, Artificial Sequence
  Description of Artificial Sequence: Synthetic oligonucleotide
  Target: LAMA2; (-) strand; PAM type: YTN; PAM sequence: CTC
ctaatcattgcagtttaaat

SEQ ID NO: 263149 - DNA, 20 bp, Artificial Sequence
  Description of Artificial Sequence: Synthetic oligonucleotide
  Target: LAMA2; (-) strand; PAM type: YTN; PAM sequence: CTA
tctcctaatcattgcagttt

SEQ ID NO: 263150 - DNA, 20 bp, Artificial Sequence
  Description of Artificial Sequence: Synthetic oligonucleotide
  Target: LAMA2; (-) strand; PAM type: YTN; PAM sequence: TTC
aaaacccagtataatcctat

SEQ ID NO: 263151 - DNA, 20 bp, Artificial Sequence
  Description of Artificial Sequence: Synthetic oligonucleotide
  Target: LAMA2; (-) strand; PAM type: YTN; PAM sequence: TTT
caaaacccagtataatccta

SEQ ID NO: 263152 - DNA, 20 bp, Artificial Sequence
  Description of Artificial Sequence: Synthetic oligonucleotide
  Target: LAMA2; (-) strand; PAM type: YTN; PAM sequence: TTT
tcaaaacccagtataatcct

SEQ ID NO: 263153 - DNA, 20 bp, Artificial Sequence
  Description of Artificial Sequence: Synthetic oligonucleotide
  Target: LAMA2; (-) strand; PAM type: YTN; PAM sequence: CTA
tataaaaatattttcaaaac

SEQ ID NO: 263154 - DNA, 20 bp, Artificial Sequence
  Description of Artificial Sequence: Synthetic oligonucleotide
  Target: LAMA2; (-) strand; PAM type: YTN; PAM sequence: TTC
tatataaaaatattttcaaa

SEQ ID NO: 263155 - DNA, 20 bp, Artificial Sequence
  Description of Artificial Sequence: Synthetic oligonucleotide
  Target: LAMA2; (-) strand; PAM type: YTN; PAM sequence: TTG
tcgtgttctatataaaaata

SEQ ID NO: 263156 - DNA, 20 bp, Artificial Sequence
  Description of Artificial Sequence: Synthetic oligonucleotide
  Target: LAMA2; (-) strand; PAM type: YTN; PAM sequence: TTT
gtcgtgttctatataaaaat

SEQ ID NO: 263157 - DNA, 20 bp, Artificial Sequence
  Description of Artificial Sequence: Synthetic oligonucleotide
  Target: LAMA2; (-) strand; PAM type: YTN; PAM sequence: TTT
tgtcgtgttctatataaaaa

SEQ ID NO: 263158 - DNA, 20 bp, Artificial Sequence
  Description of Artificial Sequence: Synthetic oligonucleotide
  Target: LAMA2; (-) strand; PAM type: YTN; PAM sequence: TTA
gtgtacaagttttgtcgtgt

SEQ ID NO: 263159 - DNA, 20 bp, Artificial Sequence
  Description of Artificial Sequence: Synthetic oligonucleotide
  Target: LAMA2; (-) strand; PAM type: YTN; PAM sequence: TTT
agtgtacaagttttgtcgtg

SEQ ID NO: 263160 - DNA, 20 bp, Artificial Sequence
  Description of Artificial Sequence: Synthetic oligonucleotide
  Target: LAMA2; (-) strand; PAM type: YTN; PAM sequence: CTA
tttagtgtacaagttttgtc

SEQ ID NO: 263161 - DNA, 20 bp, Artificial Sequence
  Description of Artificial Sequence: Synthetic oligonucleotide
  Target: LAMA2; (-) strand; PAM type: YTN; PAM sequence: CTG
ctatttagtgtacaagtttt

SEQ ID NO: 263162 - DNA, 20 bp, Artificial Sequence
  Description of Artificial Sequence: Synthetic oligonucleotide
  Target: LAMA2; (-) strand; PAM type: YTN; PAM sequence: TTA
aagggaacagcctgctattt

SEQ ID NO: 263163 - DNA, 20 bp, Artificial Sequence
  Description of Artificial Sequence: Synthetic oligonucleotide
  Target: LAMA2; (-) strand; PAM type: YTN; PAM sequence: TTA
tgttaaagggaacagcctgc

SEQ ID NO: 263164 - DNA, 20 bp, Artificial Sequence
  Description of Artificial Sequence: Synthetic oligonucleotide
  Target: LAMA2; (-) strand; PAM type: YTN; PAM sequence: CTT
atgttaaagggaacagcctg

SEQ ID NO: 263165 - DNA, 20 bp, Artificial Sequence
  Description of Artificial Sequence: Synthetic oligonucleotide
  Target: LAMA2; (-) strand; PAM type: YTN; PAM sequence: CTG
agaagcttatgttaaaggga

SEQ ID NO: 263166 - DNA, 20 bp, Artificial Sequence
  Description of Artificial Sequence: Synthetic oligonucleotide
  Target: LAMA2; (-) strand; PAM type: YTN; PAM sequence: TTC
cctgagaagcttatgttaaa

SEQ ID NO: 263167 - DNA, 20 bp, Artificial Sequence
  Description of Artificial Sequence: Synthetic oligonucleotide
  Target: LAMA2; (-) strand; PAM type: YTN; PAM sequence: TTT
ccctgagaagcttatgttaa

SEQ ID NO: 263168 - DNA, 20 bp, Artificial Sequence
  Description of Artificial Sequence: Synthetic oligonucleotide
  Target: LAMA2; (-) strand; PAM type: YTN; PAM sequence: TTG
gaacaaagatatgtttccct

SEQ ID NO: 263169 - DNA, 20 bp, Artificial Sequence
  Description of Artificial Sequence: Synthetic oligonucleotide
  Target: LAMA2; (-) strand; PAM type: YTN; PAM sequence: CTG
ttggaacaaagatatgtttc

SEQ ID NO: 263170 - DNA, 20 bp, Artificial Sequence
  Description of Artificial Sequence: Synthetic oligonucleotide
  Target: LAMA2; (-) strand; PAM type: YTN; PAM sequence: CTC
atagcagcactgttggaaca

SEQ ID NO: 263171 - DNA, 20 bp, Artificial Sequence
  Description of Artificial Sequence: Synthetic oligonucleotide
  Target: LAMA2; (-) strand; PAM type: YTN; PAM sequence: CTG
taatgactcatagcagcact

SEQ ID NO: 263172 - DNA, 20 bp, Artificial Sequence
  Description of Artificial Sequence: Synthetic oligonucleotide
  Target: LAMA2; (-) strand; PAM type: YTN; PAM sequence: TTA
taactgtaatgactcatagc

SEQ ID NO: 263173 - DNA, 20 bp, Artificial Sequence
  Description of Artificial Sequence: Synthetic oligonucleotide
  Target: LAMA2; (-) strand; PAM type: YTN; PAM sequence: TTT
ataactgtaatgactcatag

SEQ ID NO: 263174 - DNA, 20 bp, Artificial Sequence
  Description of Artificial Sequence: Synthetic oligonucleotide
  Target: LAMA2; (-) strand; PAM type: YTN; PAM sequence: TTT
tataactgtaatgactcata

SEQ ID NO: 263175 - DNA, 20 bp, Artificial Sequence
  Description of Artificial Sequence: Synthetic oligonucleotide
  Target: LAMA2; (-) strand; PAM type: YTN; PAM sequence: TTA
aaatgtaaaaaaaaaagata

SEQ ID NO: 263176 - DNA, 20 bp, Artificial Sequence
  Description of Artificial Sequence: Synthetic oligonucleotide
  Target: LAMA2; (-) strand; PAM type: YTN; PAM sequence: TTT
aaaatgtaaaaaaaaaagat

SEQ ID NO: 263177 - DNA, 20 bp, Artificial Sequence
  Description of Artificial Sequence: Synthetic oligonucleotide
  Target: LAMA2; (-) strand; PAM type: YTN; PAM sequence: TTT
taaaatgtaaaaaaaaaaga

SEQ ID NO: 263178 - DNA, 20 bp, Artificial Sequence
  Description of Artificial Sequence: Synthetic oligonucleotide
  Target: LAMA2; (-) strand; PAM type: YTN; PAM sequence: CTT
ttaaaatgtaaaaaaaaaag

SEQ ID NO: 263179 - DNA, 20 bp, Artificial Sequence
  Description of Artificial Sequence: Synthetic oligonucleotide
  Target: LAMA2; (-) strand; PAM type: YTN; PAM sequence: TTA
cttttaaaatgtaaaaaaaa

SEQ ID NO: 263180 - DNA, 20 bp, Artificial Sequence
  Description of Artificial Sequence: Synthetic oligonucleotide
  Target: LAMA2; (-) strand; PAM type: YTN; PAM sequence: TTA
aaattacttttaaaatgtaa

SEQ ID NO: 263181 - DNA, 20 bp, Artificial Sequence
  Description of Artificial Sequence: Synthetic oligonucleotide
  Target: LAMA2; (-) strand; PAM type: YTN; PAM sequence: TTT
aaaattacttttaaaatgta

SEQ ID NO: 263182 - DNA, 20 bp, Artificial Sequence
  Description of Artificial Sequence: Synthetic oligonucleotide
  Target: LAMA2; (-) strand; PAM type: YTN; PAM sequence: TTT
taaaattacttttaaaatgt

SEQ ID NO: 263183 - DNA, 20 bp, Artificial Sequence
  Description of Artificial Sequence: Synthetic oligonucleotide
  Target: LAMA2; (-) strand; PAM type: YTN; PAM sequence: TTG
aaaagcagttttaaaattac

SEQ ID NO: 263184 - DNA, 20 bp, Artificial Sequence
  Description of Artificial Sequence: Synthetic oligonucleotide
  Target: LAMA2; (-) strand; PAM type: YTN; PAM sequence: TTA
ttgaaaagcagttttaaaat

SEQ ID NO: 263185 - DNA, 20 bp, Artificial Sequence
  Description of Artificial Sequence: Synthetic oligonucleotide
  Target: LAMA2; (-) strand; PAM type: YTN; PAM sequence: TTT
attgaaaagcagttttaaaa

SEQ ID NO: 263186 - DNA, 20 bp, Artificial Sequence
  Description of Artificial Sequence: Synthetic oligonucleotide
  Target: LAMA2; (-) strand; PAM type: YTN; PAM sequence: CTC
agcaagtttattgaaaagca

SEQ ID NO: 263187 - DNA, 20 bp, Artificial Sequence
  Description of Artificial Sequence: Synthetic oligonucleotide
  Target: LAMA2; (-) strand; PAM type: YTN; PAM sequence: TTG
aaggcagacaagagaatatc

SEQ ID NO: 263188 - DNA, 20 bp, Artificial Sequence
  Description of Artificial Sequence: Synthetic oligonucleotide
  Target: LAMA2; (-) strand; PAM type: YTN; PAM sequence: CTT
gaaggcagacaagagaatat

SEQ ID NO: 263189 - DNA, 20 bp, Artificial Sequence
  Description of Artificial Sequence: Synthetic oligonucleotide
  Target: LAMA2; (-) strand; PAM type: YTN; PAM sequence: TTG
acaatcttgaaggcagacaa

SEQ ID NO: 263190 - DNA, 20 bp, Artificial Sequence
  Description of Artificial Sequence: Synthetic oligonucleotide
  Target: LAMA2; (-) strand; PAM type: YTN; PAM sequence: TTT
gacaatcttgaaggcagaca

SEQ ID NO: 263191 - DNA, 20 bp, Artificial Sequence
  Description of Artificial Sequence: Synthetic oligonucleotide
  Target: LAMA2; (-) strand; PAM type: YTN; PAM sequence: CTA
agaaatttgacaatcttgaa

SEQ ID NO: 263192 - DNA, 20 bp, Artificial Sequence
  Description of Artificial Sequence: Synthetic oligonucleotide
  Target: LAMA2; (-) strand; PAM type: YTN; PAM sequence: TTA
gatcctaagaaatttgacaa

SEQ ID NO: 263193 - DNA, 20 bp, Artificial Sequence
  Description of Artificial Sequence: Synthetic oligonucleotide
  Target: LAMA2; (-) strand; PAM type: YTN; PAM sequence: TTA
tagaaattagatcctaagaa

SEQ ID NO: 263194 - DNA, 20 bp, Artificial Sequence
  Description of Artificial Sequence: Synthetic oligonucleotide
  Target: LAMA2; (-) strand; PAM type: YTN; PAM sequence: TTC
acaattatagaaattagatc

SEQ ID NO: 263195 - DNA, 20 bp, Artificial Sequence
  Description of Artificial Sequence: Synthetic oligonucleotide
  Target: LAMA2; (-) strand; PAM type: YTN; PAM sequence: TTT
cacaattatagaaattagat

SEQ ID NO: 263196 - DNA, 20 bp, Artificial Sequence
  Description of Artificial Sequence: Synthetic oligonucleotide
  Target: LAMA2; (-) strand; PAM type: YTN; PAM sequence: TTA
atatttcacaattatagaaa

SEQ ID NO: 263197 - DNA, 20 bp, Artificial Sequence
  Description of Artificial Sequence: Synthetic oligonucleotide
  Target: LAMA2; (-) strand; PAM type: YTN; PAM sequence: CTA
ttaatatttcacaattatag

SEQ ID NO: 263198 - DNA, 20 bp, Artificial Sequence
  Description of Artificial Sequence: Synthetic oligonucleotide
  Target: LAMA2; (-) strand; PAM type: YTN; PAM sequence: TTC
ctattaatatttcacaatta

SEQ ID NO: 263199 - DNA, 20 bp, Artificial Sequence
  Description of Artificial Sequence: Synthetic oligonucleotide
  Target: LAMA2; (-) strand; PAM type: YTN; PAM sequence: CTG
ttcctattaatatttcacaa

SEQ ID NO: 263200 - DNA, 20 bp, Artificial Sequence
  Description of Artificial Sequence: Synthetic oligonucleotide
  Target: LAMA2; (-) strand; PAM type: YTN; PAM sequence: TTA
agtcgtactgttcctattaa

SEQ ID NO: 263201 - DNA, 20 bp, Artificial Sequence
  Description of Artificial Sequence: Synthetic oligonucleotide
  Target: LAMA2; (-) strand; PAM type: YTN; PAM sequence: CTT
aagtcgtactgttcctatta

SEQ ID NO: 263202 - DNA, 20 bp, Artificial Sequence
  Description of Artificial Sequence: Synthetic oligonucleotide
  Target: LAMA2; (-) strand; PAM type: YTN; PAM sequence: CTC
ccttaagtcgtactgttcct

SEQ ID NO: 263203 - DNA, 20 bp, Artificial Sequence
  Description of Artificial Sequence: Synthetic oligonucleotide
  Target: LAMA2; (-) strand; PAM type: YTN; PAM sequence: TTC
cacctcccttaagtcgtact

SEQ ID NO: 263204 - DNA, 20 bp, Artificial Sequence
  Description of Artificial Sequence: Synthetic oligonucleotide
  Target: LAMA2; (-) strand; PAM type: YTN; PAM sequence: TTC
attccacctcccttaagtcg

SEQ ID NO: 263205 - DNA, 20 bp, Artificial Sequence
  Description of Artificial Sequence: Synthetic oligonucleotide
  Target: LAMA2; (-) strand; PAM type: YTN; PAM sequence: CTA
ttcattccacctcccttaag

SEQ ID NO: 263206 - DNA, 20 bp, Artificial Sequence
  Description of Artificial Sequence: Synthetic oligonucleotide
  Target: LAMA2; (-) strand; PAM type: YTN; PAM sequence: CTC
atctattcattccacctccc

SEQ ID NO: 263207 - DNA, 20 bp, Artificial Sequence
  Description of Artificial Sequence: Synthetic oligonucleotide
  Target: LAMA2; (-) strand; PAM type: YTN; PAM sequence: TTC
tcatctattcattccacctc

SEQ ID NO: 263208 - DNA, 20 bp, Artificial Sequence
  Description of Artificial Sequence: Synthetic oligonucleotide
  Target: LAMA2; (-) strand; PAM type: YTN; PAM sequence: TTT
ctcatctattcattccacct

SEQ ID NO: 263209 - DNA, 20 bp, Artificial Sequence
  Description of Artificial Sequence: Synthetic oligonucleotide
  Target: LAMA2; (-) strand; PAM type: YTN; PAM sequence: TTC
aaacccaggccagtttctca

SEQ ID NO: 263210 - DNA, 20 bp, Artificial Sequence
  Description of Artificial Sequence: Synthetic oligonucleotide
  Target: LAMA2; (-) strand; PAM type: YTN; PAM sequence: CTG
tatggtgaagtcgagattca

SEQ ID NO: 263211 - DNA, 20 bp, Artificial Sequence
  Description of Artificial Sequence: Synthetic oligonucleotide
  Target: LAMA2; (-) strand; PAM type: YTN; PAM sequence: TTA
ctgtatggtgaagtcgagat

SEQ ID NO: 263212 - DNA, 20 bp, Artificial Sequence
  Description of Artificial Sequence: Synthetic oligonucleotide
  Target: LAMA2; (-) strand; PAM type: YTN; PAM sequence: CTT
actgtatggtgaagtcgaga

SEQ ID NO: 263213 - DNA, 20 bp, Artificial Sequence
  Description of Artificial Sequence: Synthetic oligonucleotide
  Target: LAMA2; (-) strand; PAM type: YTN; PAM sequence: CTC
aggcttactgtatggtgaag

SEQ ID NO: 263214 - DNA, 20 bp, Artificial Sequence
  Description of Artificial Sequence: Synthetic oligonucleotide
  Target: LAMA2; (-) strand; PAM type: YTN; PAM sequence: CTA
aagaggtgtagcacccagtg

SEQ ID NO: 263215 - DNA, 20 bp, Artificial Sequence
  Description of Artificial Sequence: Synthetic oligonucleotide
  Target: LAMA2; (-) strand; PAM type: YTN; PAM sequence: CTA
aagcctaaagaggtgtagca

SEQ ID NO: 263216 - DNA, 20 bp, Artificial Sequence
  Description of Artificial Sequence: Synthetic oligonucleotide
  Target: LAMA2; (-) strand; PAM type: YTN; PAM sequence: CTG
ctaaagcctaaagaggtgta

SEQ ID NO: 263217 - DNA, 20 bp, Artificial Sequence
  Description of Artificial Sequence: Synthetic oligonucleotide
  Target: LAMA2; (-) strand; PAM type: YTN; PAM sequence: TTA
cctgctaaagcctaaagagg

SEQ ID NO: 263218 - DNA, 20 bp, Artificial Sequence
  Description of Artificial Sequence: Synthetic oligonucleotide
  Target: LAMA2; (-) strand; PAM type: YTN; PAM sequence: TTT
acctgctaaagcctaaagag

SEQ ID NO: 263219 - DNA, 20 bp, Artificial Sequence
  Description of Artificial Sequence: Synthetic oligonucleotide
  Target: LAMA2; (-) strand; PAM type: YTN; PAM sequence: TTG
gtgtttacctgctaaagcct

SEQ ID NO: 263220 - DNA, 20 bp, Artificial Sequence
  Description of Artificial Sequence: Synthetic oligonucleotide
  Target: LAMA2; (-) strand; PAM type: YTN; PAM sequence: CTT
ggtgtttacctgctaaagcc

SEQ ID NO: 263221 - DNA, 20 bp, Artificial Sequence
  Description of Artificial Sequence: Synthetic oligonucleotide
  Target: LAMA2; (-) strand; PAM type: YTN; PAM sequence: CTC
agggacttggtgtttacctg

SEQ ID NO: 263222 - DNA, 20 bp, Artificial Sequence
  Description of Artificial Sequence: Synthetic oligonucleotide
  Target: LAMA2; (-) strand; PAM type: YTN; PAM sequence: TTA
ctcagggacttggtgtttac

SEQ ID NO: 263223 - DNA, 20 bp, Artificial Sequence
  Description of Artificial Sequence: Synthetic oligonucleotide
  Target: LAMA2; (-) strand; PAM type: YTN; PAM sequence: CTG
cgggagaggtgaaagtgtag

SEQ ID NO: 263224 - DNA, 20 bp, Artificial Sequence
  Description of Artificial Sequence: Synthetic oligonucleotide
  Target: LAMA2; (-) strand; PAM type: YTN; PAM sequence: CTG
tggggtctgcgggagaggtg

SEQ ID NO: 263225 - DNA, 20 bp, Artificial Sequence
  Description of Artificial Sequence: Synthetic oligonucleotide
  Target: LAMA2; (-) strand; PAM type: YTN; PAM sequence: TTC
agactgtggggtctgcggga

SEQ ID NO: 263226 - DNA, 20 bp, Artificial Sequence
  Description of Artificial Sequence: Synthetic oligonucleotide
  Target: LAMA2; (-) strand; PAM type: YTN; PAM sequence: CTT
cagactgtggggtctgcggg

SEQ ID NO: 263227 - DNA, 20 bp, Artificial Sequence
  Description of Artificial Sequence: Synthetic oligonucleotide
  Target: LAMA2; (-) strand; PAM type: YTN; PAM sequence: CTG
gaggccccatgcatgccagg

SEQ ID NO: 263228 - DNA, 20 bp, Artificial Sequence
  Description of Artificial Sequence: Synthetic oligonucleotide
  Target: LAMA2; (-) strand; PAM type: YTN; PAM sequence: CTG
gagcagtcctggaggcccca

SEQ ID NO: 263229 - DNA, 20 bp, Artificial Sequence
  Description of Artificial Sequence: Synthetic oligonucleotide
  Target: LAMA2; (-) strand; PAM type: YTN; PAM sequence: CTG
tagggctggagcagtcctgg

SEQ ID NO: 263230 - DNA, 20 bp, Artificial Sequence
  Description of Artificial Sequence: Synthetic oligonucleotide
  Target: LAMA2; (-) strand; PAM type: YTN; PAM sequence: CTA
atgagaaagaatcccagctg

SEQ ID NO: 263231 - DNA, 20 bp, Artificial Sequence
  Description of Artificial Sequence: Synthetic oligonucleotide
  Target: LAMA2; (-) strand; PAM type: YTN; PAM sequence: CTG
actaatgagaaagaatccca

SEQ ID NO: 263232 - DNA, 20 bp, Artificial Sequence
  Description of Artificial Sequence: Synthetic oligonucleotide
  Target: LAMA2; (-) strand; PAM type: YTN; PAM sequence: CTG
tgagcaccagccagcctgac

SEQ ID NO: 263233 - DNA, 20 bp, Artificial Sequence
  Description of Artificial Sequence: Synthetic oligonucleotide
  Target: LAMA2; (-) strand; PAM type: YTN; PAM sequence: CTG
gtatgctgtgagcaccagcc

SEQ ID NO: 263234 - DNA, 20 bp, Artificial Sequence
  Description of Artificial Sequence: Synthetic oligonucleotide
  Target: LAMA2; (-) strand; PAM type: YTN; PAM sequence: CTA
actggtatgctgtgagcacc

SEQ ID NO: 263235 - DNA, 20 bp, Artificial Sequence
  Description of Artificial Sequence: Synthetic oligonucleotide
  Target: LAMA2; (-) strand; PAM type: YTN; PAM sequence: TTA
ataatatctaactggtatgc

SEQ ID NO: 263236 - DNA, 20 bp, Artificial Sequence
  Description of Artificial Sequence: Synthetic oligonucleotide
  Target: LAMA2; (-) strand; PAM type: YTN; PAM sequence: TTT
aataatatctaactggtatg

SEQ ID NO: 263237 - DNA, 20 bp, Artificial Sequence
  Description of Artificial Sequence: Synthetic oligonucleotide
  Target: LAMA2; (-) strand; PAM type: YTN; PAM sequence: CTG
taggtgagggagatttaata

SEQ ID NO: 263238 - DNA, 20 bp, Artificial Sequence
  Description of Artificial Sequence: Synthetic oligonucleotide
  Target: LAMA2; (-) strand; PAM type: YTN; PAM sequence: CTC
aggctgtaggtgagggagat

SEQ ID NO: 263239 - DNA, 20 bp, Artificial Sequence
  Description of Artificial Sequence: Synthetic oligonucleotide
  Target: LAMA2; (-) strand; PAM type: YTN; PAM sequence: TTC
ataagactcaggctgtaggt

SEQ ID NO: 263240 - DNA, 20 bp, Artificial Sequence
  Description of Artificial Sequence: Synthetic oligonucleotide
  Target: LAMA2; (-) strand; PAM type: YTN; PAM sequence: CTT
cataagactcaggctgtagg

SEQ ID NO: 263241 - DNA, 20 bp, Artificial Sequence
  Description of Artificial Sequence: Synthetic oligonucleotide
  Target: LAMA2; (-) strand; PAM type: YTN; PAM sequence: TTA
gtcttcataagactcaggct

SEQ ID NO: 263242 - DNA, 20 bp, Artificial Sequence
  Description of Artificial Sequence: Synthetic oligonucleotide
  Target: LAMA2; (-) strand; PAM type: YTN; PAM sequence: TTT
agtcttcataagactcaggc

SEQ ID NO: 263243 - DNA, 20 bp, Artificial Sequence
  Description of Artificial Sequence: Synthetic oligonucleotide
  Target: LAMA2; (-) strand; PAM type: YTN; PAM sequence: CTC
atttagtcttcataagactc

SEQ ID NO: 263244 - DNA, 20 bp, Artificial Sequence
  Description of Artificial Sequence: Synthetic oligonucleotide
  Target: LAMA2; (-) strand; PAM type: YTN; PAM sequence: TTA
acagctcatttagtcttcat

SEQ ID NO: 263245 - DNA, 20 bp, Artificial Sequence
  Description of Artificial Sequence: Synthetic oligonucleotide
  Target: LAMA2; (-) strand; PAM type: YTN; PAM sequence: TTA
acattaacagctcatttagt

SEQ ID NO: 263246 - DNA, 20 bp, Artificial Sequence
  Description of Artificial Sequence: Synthetic oligonucleotide
  Target: LAMA2; (-) strand; PAM type: YTN; PAM sequence: CTT
aacattaacagctcatttag

SEQ ID NO: 263247 - DNA, 20 bp, Artificial Sequence
  Description of Artificial Sequence: Synthetic oligonucleotide
  Target: LAMA2; (-) strand; PAM type: YTN; PAM sequence: CTG
tgatgaatccttaacattaa

SEQ ID NO: 263248 - DNA, 20 bp, Artificial Sequence
  Description of Artificial Sequence: Synthetic oligonucleotide
  Target: LAMA2; (-) strand; PAM type: YTN; PAM sequence: CTA
cacaccaggtgctgtgatga

SEQ ID NO: 263249 - DNA, 20 bp, Artificial Sequence
  Description of Artificial Sequence: Synthetic oligonucleotide
  Target: LAMA2; (-) strand; PAM type: YTN; PAM sequence: TTA
catcatctacacaccaggtg

SEQ ID NO: 263250 - DNA, 20 bp, Artificial Sequence
  Description of Artificial Sequence: Synthetic oligonucleotide
  Target: LAMA2; (-) strand; PAM type: YTN; PAM sequence: CTT
acatcatctacacaccaggt

SEQ ID NO: 263251 - DNA, 20 bp, Artificial Sequence
  Description of Artificial Sequence: Synthetic oligonucleotide
  Target: LAMA2; (-) strand; PAM type: YTN; PAM sequence: TTA
accatcaaaacttacatcat

SEQ ID NO: 263252 - DNA, 20 bp, Artificial Sequence
  Description of Artificial Sequence: Synthetic oligonucleotide
  Target: LAMA2; (-) strand; PAM type: YTN; PAM sequence: TTA
ataataatattaaccatcaa

SEQ ID NO: 263253 - DNA, 20 bp, Artificial Sequence
  Description of Artificial Sequence: Synthetic oligonucleotide
  Target: LAMA2; (-) strand; PAM type: YTN; PAM sequence: TTA
cattaataataatattaacc

SEQ ID NO: 263254 - DNA, 20 bp, Artificial Sequence
  Description of Artificial Sequence: Synthetic oligonucleotide
  Target: LAMA2; (-) strand; PAM type: YTN; PAM sequence: CTA
gtgattacattaataataat

SEQ ID NO: 263255 - DNA, 20 bp, Artificial Sequence
  Description of Artificial Sequence: Synthetic oligonucleotide
  Target: LAMA2; (-) strand; PAM type: YTN; PAM sequence: CTG
aatcaatacatgggtatata

SEQ ID NO: 263256 - DNA, 20 bp, Artificial Sequence
  Description of Artificial Sequence: Synthetic oligonucleotide
  Target: LAMA2; (-) strand; PAM type: YTN; PAM sequence: TTA
taactgaatcaatacatggg

SEQ ID NO: 263257 - DNA, 20 bp, Artificial Sequence
  Description of Artificial Sequence: Synthetic oligonucleotide
  Target: LAMA2; (-) strand; PAM type: YTN; PAM sequence: TTT
ataactgaatcaatacatgg

SEQ ID NO: 263258 - DNA, 20 bp, Artificial Sequence
  Description of Artificial Sequence: Synthetic oligonucleotide
  Target: LAMA2; (-) strand; PAM type: YTN; PAM sequence: TTA
tttataactgaatcaataca

SEQ ID NO: 263259 - DNA, 20 bp, Artificial Sequence
  Description of Artificial Sequence: Synthetic oligonucleotide
  Target: LAMA2; (-) strand; PAM type: YTN; PAM sequence: TTA
caaaataagatgtataaaat

SEQ ID NO: 263260 - DNA, 20 bp, Artificial Sequence
  Description of Artificial Sequence: Synthetic oligonucleotide
  Target: LAMA2; (-) strand; PAM type: YTN; PAM sequence: TTT
acaaaataagatgtataaaa

SEQ ID NO: 263261 - DNA, 20 bp, Artificial Sequence
  Description of Artificial Sequence: Synthetic oligonucleotide
  Target: LAMA2; (-) strand; PAM type: YTN; PAM sequence: CTA
tttacaaaataagatgtata

SEQ ID NO: 263262 - DNA, 20 bp, Artificial Sequence
  Description of Artificial Sequence: Synthetic oligonucleotide
  Target: LAMA2; (-) strand; PAM type: YTN; PAM sequence: CTC
aaatcctatttacaaaataa

SEQ ID NO: 263263 - DNA, 20 bp, Artificial Sequence
  Description of Artificial Sequence: Synthetic oligonucleotide
  Target: LAMA2; (-) strand; PAM type: YTN; PAM sequence: TTC
tcaaatcctatttacaaaat

SEQ ID NO: 263264 - DNA, 20 bp, Artificial Sequence
  Description of Artificial Sequence: Synthetic oligonucleotide
  Target: LAMA2; (-) strand; PAM type: YTN; PAM sequence: CTT
ctcaaatcctatttacaaaa

SEQ ID NO: 263265 - DNA, 20 bp, Artificial Sequence
  Description of Artificial Sequence: Synthetic oligonucleotide
  Target: LAMA2; (-) strand; PAM type: YTN; PAM sequence: TTA
atacaacttctcaaatccta

SEQ ID NO: 263266 - DNA, 20 bp, Artificial Sequence
  Description of Artificial Sequence: Synthetic oligonucleotide
  Target: LAMA2; (-) strand; PAM type: YTN; PAM sequence: CTT
aatacaacttctcaaatcct

SEQ ID NO: 263267 - DNA, 20 bp, Artificial Sequence
  Description of Artificial Sequence: Synthetic oligonucleotide
  Target: LAMA2; (-) strand; PAM type: YTN; PAM sequence: CTC
atgtaccatacttaatacaa

SEQ ID NO: 263268 - DNA, 20 bp, Artificial Sequence
  Description of Artificial Sequence: Synthetic oligonucleotide
  Target: LAMA2; (-) strand; PAM type: YTN; PAM sequence: CTG
tctcatgtaccatacttaat

SEQ ID NO: 263269 - DNA, 20 bp, Artificial Sequence
  Description of Artificial Sequence: Synthetic oligonucleotide
  Target: LAMA2; (-) strand; PAM type: YTN; PAM sequence: CTA
gtggaatcatctgtctcatg

SEQ ID NO: 263270 - DNA, 20 bp, Artificial Sequence
  Description of Artificial Sequence: Synthetic oligonucleotide
  Target: LAMA2; (-) strand; PAM type: YTN; PAM sequence: TTG
acctagtggaatcatctgtc

SEQ ID NO: 263271 - DNA, 20 bp, Artificial Sequence
  Description of Artificial Sequence: Synthetic oligonucleotide
  Target: LAMA2; (-) strand; PAM type: YTN; PAM sequence: TTT
gacctagtggaatcatctgt

SEQ ID NO: 263272 - DNA, 20 bp, Artificial Sequence
  Description of Artificial Sequence: Synthetic oligonucleotide
  Target: LAMA2; (-) strand; PAM type: YTN; PAM sequence: TTT
tgacctagtggaatcatctg

SEQ ID NO: 263273 - DNA, 20 bp, Artificial Sequence
  Description of Artificial Sequence: Synthetic oligonucleotide
  Target: LAMA2; (-) strand; PAM type: YTN; PAM sequence: TTC
agttttgacctagtggaatc

SEQ ID NO: 263274 - DNA, 20 bp, Artificial Sequence
  Description of Artificial Sequence: Synthetic oligonucleotide
  Target: LAMA2; (-) strand; PAM type: YTN; PAM sequence: CTT
cagttttgacctagtggaat

SEQ ID NO: 263275 - DNA, 20 bp, Artificial Sequence
  Description of Artificial Sequence: Synthetic oligonucleotide
  Target: LAMA2; (-) strand; PAM type: YTN; PAM sequence: TTG
cacttcagttttgacctagt

SEQ ID NO: 263276 - DNA, 20 bp, Artificial Sequence
  Description of Artificial Sequence: Synthetic oligonucleotide
  Target: LAMA2; (-) strand; PAM type: YTN; PAM sequence: TTA
agttgcacttcagttttgac

SEQ ID NO: 263277 - DNA, 20 bp, Artificial Sequence
  Description of Artificial Sequence: Synthetic oligonucleotide
  Target: LAMA2; (-) strand; PAM type: YTN; PAM sequence: TTT
aagttgcacttcagttttga

SEQ ID NO: 263278 - DNA, 20 bp, Artificial Sequence
  Description of Artificial Sequence: Synthetic oligonucleotide
  Target: LAMA2; (-) strand; PAM type: YTN; PAM sequence: TTT
taagttgcacttcagttttg

SEQ ID NO: 263279 - DNA, 20 bp, Artificial Sequence
  Description of Artificial Sequence: Synthetic oligonucleotide
  Target: LAMA2; (-) strand; PAM type: YTN; PAM sequence: TTT
ttaagttgcacttcagtttt

SEQ ID NO: 263280 - DNA, 20 bp, Artificial Sequence
  Description of Artificial Sequence: Synthetic oligonucleotide
  Target: LAMA2; (-) strand; PAM type: YTN; PAM sequence: TTA
tttttaagttgcacttcagt

SEQ ID NO: 263281 - DNA, 20 bp, Artificial Sequence
  Description of Artificial Sequence: Synthetic oligonucleotide
  Target: LAMA2; (-) strand; PAM type: YTN; PAM sequence: CTC
attatttttaagttgcactt

SEQ ID NO: 263282 - DNA, 20 bp, Artificial Sequence
  Description of Artificial Sequence: Synthetic oligonucleotide
  Target: LAMA2; (-) strand; PAM type: YTN; PAM sequence: CTC
aagaaatgtatactcattat

SEQ ID NO: 263283 - DNA, 20 bp, Artificial Sequence
  Description of Artificial Sequence: Synthetic oligonucleotide
  Target: LAMA2; (-) strand; PAM type: YTN; PAM sequence: CTC
tcaagaaatgtatactcatt

SEQ ID NO: 263284 - DNA, 20 bp, Artificial Sequence
  Description of Artificial Sequence: Synthetic oligonucleotide
  Target: LAMA2; (-) strand; PAM type: YTN; PAM sequence: TTC
atgatgccatgtccctctca

SEQ ID NO: 263285 - DNA, 20 bp, Artificial Sequence
  Description of Artificial Sequence: Synthetic oligonucleotide
  Target: LAMA2; (-) strand; PAM type: YTN; PAM sequence: TTT
catgatgccatgtccctctc

SEQ ID NO: 263286 - DNA, 20 bp, Artificial Sequence
  Description of Artificial Sequence: Synthetic oligonucleotide
  Target: LAMA2; (-) strand; PAM type: YTN; PAM sequence: TTT
tcatgatgccatgtccctct

SEQ ID NO: 263287 - DNA, 20 bp, Artificial Sequence
  Description of Artificial Sequence: Synthetic oligonucleotide
  Target: LAMA2; (-) strand; PAM type: YTN; PAM sequence: CTT
ttcatgatgccatgtccctc

SEQ ID NO: 263288 - DNA, 20 bp, Artificial Sequence
  Description of Artificial Sequence: Synthetic oligonucleotide
  Target: LAMA2; (-) strand; PAM type: YTN; PAM sequence: TTC
ttttcatgatgccatgtccc

SEQ ID NO: 263289 - DNA, 20 bp, Artificial Sequence
  Description of Artificial Sequence: Synthetic oligonucleotide
  Target: LAMA2; (-) strand; PAM type: YTN; PAM sequence: TTT
cttttcatgatgccatgtcc

SEQ ID NO: 263290 - DNA, 20 bp, Artificial Sequence
  Description of Artificial Sequence: Synthetic oligonucleotide
  Target: LAMA2; (-) strand; PAM type: YTN; PAM sequence: TTT
tcttttcatgatgccatgtc

SEQ ID NO: 263291 - DNA, 20 bp, Artificial Sequence
  Description of Artificial Sequence: Synthetic oligonucleotide
  Target: LAMA2; (-) strand; PAM type: YTN; PAM sequence: TTT
ttcttttcatgatgccatgt

SEQ ID NO: 263292 - DNA, 20 bp, Artificial Sequence
  Description of Artificial Sequence: Synthetic oligonucleotide
  Target: LAMA2; (-) strand; PAM type: YTN; PAM sequence: CTT
tttcttttcatgatgccatg

SEQ ID NO: 263293 - DNA, 20 bp, Artificial Sequence
  Description of Artificial Sequence: Synthetic oligonucleotide
  Target: LAMA2; (-) strand; PAM type: YTN; PAM sequence: TTC
ctttttcttttcatgatgcc

SEQ ID NO: 263294 - DNA, 20 bp, Artificial Sequence
  Description of Artificial Sequence: Synthetic oligonucleotide
  Target: LAMA2; (-) strand; PAM type: YTN; PAM sequence: CTG
aaaccaaattcctttttctt

SEQ ID NO: 263295 - DNA, 20 bp, Artificial Sequence
  Description of Artificial Sequence: Synthetic oligonucleotide
  Target: LAMA2; (-) strand; PAM type: YTN; PAM sequence: TTC
actgaaaccaaattcctttt

SEQ ID NO: 263296 - DNA, 20 bp, Artificial Sequence
  Description of Artificial Sequence: Synthetic oligonucleotide
  Target: LAMA2; (-) strand; PAM type: YTN; PAM sequence: CTA
ggtaggattcactgaaacca

SEQ ID NO: 263297 - DNA, 20 bp, Artificial Sequence
  Description of Artificial Sequence: Synthetic oligonucleotide
  Target: LAMA2; (-) strand; PAM type: YTN; PAM sequence: CTG
tccaagtagtgcagctaggt

SEQ ID NO: 263298 - DNA, 20 bp, Artificial Sequence
  Description of Artificial Sequence: Synthetic oligonucleotide
  Target: LAMA2; (-) strand; PAM type: YTN; PAM sequence: TTA
gcaaaaacagagcaagtaac

SEQ ID NO: 263299 - DNA, 20 bp, Artificial Sequence
  Description of Artificial Sequence: Synthetic oligonucleotide
  Target: LAMA2; (-) strand; PAM type: YTN; PAM sequence: TTT
agcaaaaacagagcaagtaa

SEQ ID NO: 263300 - DNA, 20 bp, Artificial Sequence
  Description of Artificial Sequence: Synthetic oligonucleotide
  Target: LAMA2; (-) strand; PAM type: YTN; PAM sequence: TTA
ggatgtataggtaaaaaccc

SEQ ID NO: 263301 - DNA, 20 bp, Artificial Sequence
  Description of Artificial Sequence: Synthetic oligonucleotide
  Target: LAMA2; (-) strand; PAM type: YTN; PAM sequence: CTT
aggatgtataggtaaaaacc

SEQ ID NO: 263302 - DNA, 20 bp, Artificial Sequence
  Description of Artificial Sequence: Synthetic oligonucleotide
  Target: LAMA2; (-) strand; PAM type: YTN; PAM sequence: TTA
aatcaatccttaggatgtat

SEQ ID NO: 263303 - DNA, 20 bp, Artificial Sequence
  Description of Artificial Sequence: Synthetic oligonucleotide
  Target: LAMA2; (-) strand; PAM type: YTN; PAM sequence: TTT
aaatcaatccttaggatgta

SEQ ID NO: 263304 - DNA, 20 bp, Artificial Sequence
  Description of Artificial Sequence: Synthetic oligonucleotide
  Target: LAMA2; (-) strand; PAM type: YTN; PAM sequence: TTC
catttaaatcaatccttagg

SEQ ID NO: 263305 - DNA, 20 bp, Artificial Sequence
  Description of Artificial Sequence: Synthetic oligonucleotide
  Target: LAMA2; (-) strand; PAM type: YTN; PAM sequence: TTT
ccatttaaatcaatccttag

SEQ ID NO: 263306 - DNA, 20 bp, Artificial Sequence
  Description of Artificial Sequence: Synthetic oligonucleotide
  Target: LAMA2; (-) strand; PAM type: YTN; PAM sequence: TTC
acacatacgtttccatttaa

SEQ ID NO: 263307 - DNA, 20 bp, Artificial Sequence
  Description of Artificial Sequence: Synthetic oligonucleotide
  Target: LAMA2; (-) strand; PAM type: YTN; PAM sequence: TTT
cacacatacgtttccattta

SEQ ID NO: 263308 - DNA, 20 bp, Artificial Sequence
  Description of Artificial Sequence: Synthetic oligonucleotide
  Target: LAMA2; (-) strand; PAM type: YTN; PAM sequence: TTT
tcacacatacgtttccattt

SEQ ID NO: 263309 - DNA, 20 bp, Artificial Sequence
  Description of Artificial Sequence: Synthetic oligonucleotide
  Target: LAMA2; (-) strand; PAM type: YTN; PAM sequence: TTG
taaagggattttcacacata

SEQ ID NO: 263310 - DNA, 20 bp, Artificial Sequence
  Description of Artificial Sequence: Synthetic oligonucleotide
  Target: LAMA2; (-) strand; PAM type: YTN; PAM sequence: TTT
gtaaagggattttcacacat

SEQ ID NO: 263311 - DNA, 20 bp, Artificial Sequence
  Description of Artificial Sequence: Synthetic oligonucleotide
  Target: LAMA2; (-) strand; PAM type: YTN; PAM sequence: CTG
aatggcatgtcagtttgtaa

SEQ ID NO: 263312 - DNA, 20 bp, Artificial Sequence
  Description of Artificial Sequence: Synthetic oligonucleotide
  Target: LAMA2; (-) strand; PAM type: YTN; PAM sequence: CTA
agctgaatggcatgtcagtt

SEQ ID NO: 263313 - DNA, 20 bp, Artificial Sequence
  Description of Artificial Sequence: Synthetic oligonucleotide
  Target: LAMA2; (-) strand; PAM type: YTN; PAM sequence: CTA
tatggaatccatgtgatggt

SEQ ID NO: 263314 - DNA, 20 bp, Artificial Sequence
  Description of Artificial Sequence: Synthetic oligonucleotide
  Target: LAMA2; (-) strand; PAM type: YTN; PAM sequence: TTG
aactatatggaatccatgtg

SEQ ID NO: 263315 - DNA, 20 bp, Artificial Sequence
  Description of Artificial Sequence: Synthetic oligonucleotide
  Target: LAMA2; (-) strand; PAM type: YTN; PAM sequence: CTT
gaactatatggaatccatgt

SEQ ID NO: 263316 - DNA, 20 bp, Artificial Sequence
  Description of Artificial Sequence: Synthetic oligonucleotide
  Target: LAMA2; (-) strand; PAM type: YTN; PAM sequence: TTC
cttgaactatatggaatcca

SEQ ID NO: 263317 - DNA, 20 bp, Artificial Sequence
  Description of Artificial Sequence: Synthetic oligonucleotide
  Target: LAMA2; (-) strand; PAM type: YTN; PAM sequence: TTT
ccttgaactatatggaatcc

SEQ ID NO: 263318 - DNA, 20 bp, Artificial Sequence
  Description of Artificial Sequence: Synthetic oligonucleotide
  Target: LAMA2; (-) strand; PAM type: YTN; PAM sequence: TTT
tccttgaactatatggaatc

SEQ ID NO: 263319 - DNA, 20 bp, Artificial Sequence
  Description of Artificial Sequence: Synthetic oligonucleotide
  Target: LAMA2; (-) strand; PAM type: YTN; PAM sequence: TTT
ttccttgaactatatggaat

SEQ ID NO: 263320 - DNA, 20 bp, Artificial Sequence
  Description of Artificial Sequence: Synthetic oligonucleotide
  Target: LAMA2; (-) strand; PAM type: YTN; PAM sequence: CTT
tttccttgaactatatggaa

SEQ ID NO: 263321 - DNA, 20 bp, Artificial Sequence
  Description of Artificial Sequence: Synthetic oligonucleotide
  Target: LAMA2; (-) strand; PAM type: YTN; PAM sequence: TTA
taaactttttccttgaacta

SEQ ID NO: 263322 - DNA, 20 bp, Artificial Sequence
  Description of Artificial Sequence: Synthetic oligonucleotide
  Target: LAMA2; (-) strand; PAM type: YTN; PAM sequence: TTT
ataaactttttccttgaact

SEQ ID NO: 263323 - DNA, 20 bp, Artificial Sequence
  Description of Artificial Sequence: Synthetic oligonucleotide
  Target: LAMA2; (-) strand; PAM type: YTN; PAM sequence: TTT
tataaactttttccttgaac

SEQ ID NO: 263324 - DNA, 20 bp, Artificial Sequence
  Description of Artificial Sequence: Synthetic oligonucleotide
  Target: LAMA2; (-) strand; PAM type: YTN; PAM sequence: TTA
ttttataaactttttccttg

SEQ ID NO: 263325 - DNA, 20 bp, Artificial Sequence
  Description of Artificial Sequence: Synthetic oligonucleotide
  Target: LAMA2; (-) strand; PAM type: YTN; PAM sequence: TTG
cagttattttataaactttt

SEQ ID NO: 263326 - DNA, 20 bp, Artificial Sequence
  Description of Artificial Sequence: Synthetic oligonucleotide
  Target: LAMA2; (-) strand; PAM type: YTN; PAM sequence: TTA
agcatgtgtcacaaaacagt

SEQ ID NO: 263327 - DNA, 20 bp, Artificial Sequence
  Description of Artificial Sequence: Synthetic oligonucleotide
  Target: LAMA2; (-) strand; PAM type: YTN; PAM sequence: TTT
aagcatgtgtcacaaaacag

SEQ ID NO: 263328 - DNA, 20 bp, Artificial Sequence
  Description of Artificial Sequence: Synthetic oligonucleotide
  Target: LAMA2; (-) strand; PAM type: YTN; PAM sequence: TTT
taagcatgtgtcacaaaaca

SEQ ID NO: 263329 - DNA, 20 bp, Artificial Sequence
  Description of Artificial Sequence: Synthetic oligonucleotide
  Target: LAMA2; (-) strand; PAM type: YTN; PAM sequence: TTC
agagaagtcacaggaaagag

SEQ ID NO: 263330 - DNA, 20 bp, Artificial Sequence
  Description of Artificial Sequence: Synthetic oligonucleotide
  Target: LAMA2; (-) strand; PAM type: YTN; PAM sequence: CTT
cagagaagtcacaggaaaga

SEQ ID NO: 263331 - DNA, 20 bp, Artificial Sequence
  Description of Artificial Sequence: Synthetic oligonucleotide
  Target: LAMA2; (-) strand; PAM type: YTN; PAM sequence: TTG
cccttcagagaagtcacagg

SEQ ID NO: 263332 - DNA, 20 bp, Artificial Sequence
  Description of Artificial Sequence: Synthetic oligonucleotide
  Target: LAMA2; (-) strand; PAM type: YTN; PAM sequence: CTC
aaaatggacacatgtaaata

SEQ ID NO: 263333 - DNA, 20 bp, Artificial Sequence
  Description of Artificial Sequence: Synthetic oligonucleotide
  Target: LAMA2; (-) strand; PAM type: YTN; PAM sequence: TTA
gctcaaaatggacacatgta

SEQ ID NO: 263334 - DNA, 20 bp, Artificial Sequence
  Description of Artificial Sequence: Synthetic oligonucleotide
  Target: LAMA2; (-) strand; PAM type: YTN; PAM sequence: TTA
ttagctcaaaatggacacat

SEQ ID NO: 263335 - DNA, 20 bp, Artificial Sequence
  Description of Artificial Sequence: Synthetic oligonucleotide
  Target: LAMA2; (-) strand; PAM type: YTN; PAM sequence: TTT
attagctcaaaatggacaca

SEQ ID NO: 263336 - DNA, 20 bp, Artificial Sequence
  Description of Artificial Sequence: Synthetic oligonucleotide
  Target: LAMA2; (-) strand; PAM type: YTN; PAM sequence: TTA
tttattagctcaaaatggac

SEQ ID NO: 263337 - DNA, 20 bp, Artificial Sequence
  Description of Artificial Sequence: Synthetic oligonucleotide
  Target: LAMA2; (-) strand; PAM type: YTN; PAM sequence: TTG
attatttattagctcaaaat

SEQ ID NO: 263338 - DNA, 20 bp, Artificial Sequence
  Description of Artificial Sequence: Synthetic oligonucleotide
  Target: LAMA2; (-) strand; PAM type: YTN; PAM sequence: CTT
gattatttattagctcaaaa

SEQ ID NO: 263339 - DNA, 20 bp, Artificial Sequence
  Description of Artificial Sequence: Synthetic oligonucleotide
  Target: LAMA2; (-) strand; PAM type: YTN; PAM sequence: TTA
cttgattatttattagctca

SEQ ID NO: 263340 - DNA, 20 bp, Artificial Sequence
  Description of Artificial Sequence: Synthetic oligonucleotide
  Target: LAMA2; (-) strand; PAM type: YTN; PAM sequence: TTA
ataaggagatggattacttg

SEQ ID NO: 263341 - DNA, 20 bp, Artificial Sequence
  Description of Artificial Sequence: Synthetic oligonucleotide
  Target: LAMA2; (-) strand; PAM type: YTN; PAM sequence: TTT
aataaggagatggattactt

SEQ ID NO: 263342 - DNA, 20 bp, Artificial Sequence
  Description of Artificial Sequence: Synthetic oligonucleotide
  Target: LAMA2; (-) strand; PAM type: YTN; PAM sequence: CTA
gtgtgtgtataaatagatgt

SEQ ID NO: 263343 - DNA, 20 bp, Artificial Sequence
  Description of Artificial Sequence: Synthetic oligonucleotide
  Target: LAMA2; (-) strand; PAM type: YTN; PAM sequence: TTA
ctagtgtgtgtataaataga

SEQ ID NO: 263344 - DNA, 20 bp, Artificial Sequence
  Description of Artificial Sequence: Synthetic oligonucleotide
  Target: LAMA2; (-) strand; PAM type: YTN; PAM sequence: TTT
actagtgtgtgtataaatag

SEQ ID NO: 263345 - DNA, 20 bp, Artificial Sequence
  Description of Artificial Sequence: Synthetic oligonucleotide
  Target: LAMA2; (-) strand; PAM type: YTN; PAM sequence: TTA
ccagtataagtttactagtg

SEQ ID NO: 263346 - DNA, 20 bp, Artificial Sequence
  Description of Artificial Sequence: Synthetic oligonucleotide
  Target: LAMA2; (-) strand; PAM type: YTN; PAM sequence: CTT
accagtataagtttactagt

SEQ ID NO: 263347 - DNA, 20 bp, Artificial Sequence
  Description of Artificial Sequence: Synthetic oligonucleotide
  Target: LAMA2; (-) strand; PAM type: YTN; PAM sequence: CTG
tataagcagtgcttaccagt

SEQ ID NO: 263348 - DNA, 20 bp, Artificial Sequence
  Description of Artificial Sequence: Synthetic oligonucleotide
  Target: LAMA2; (-) strand; PAM type: YTN; PAM sequence: TTA
ctgtataagcagtgcttacc

SEQ ID NO: 263349 - DNA, 20 bp, Artificial Sequence
  Description of Artificial Sequence: Synthetic oligonucleotide
  Target: LAMA2; (-) strand; PAM type: YTN; PAM sequence: CTT
actgtataagcagtgcttac

SEQ ID NO: 263350 - DNA, 20 bp, Artificial Sequence
  Description of Artificial Sequence: Synthetic oligonucleotide
  Target: LAMA2; (-) strand; PAM type: YTN; PAM sequence: TTG
gaaagagcagtgcttactgt

SEQ ID NO: 263351 - DNA, 20 bp, Artificial Sequence
  Description of Artificial Sequence: Synthetic oligonucleotide
  Target: LAMA2; (-) strand; PAM type: YTN; PAM sequence: CTA
tgtgtacatatgtatattgg

SEQ ID NO: 263352 - DNA, 20 bp, Artificial Sequence
  Description of Artificial Sequence: Synthetic oligonucleotide
  Target: LAMA2; (-) strand; PAM type: YTN; PAM sequence: TTC
acccatacactatgtgtaca

SEQ ID NO: 263353 - DNA, 20 bp, Artificial Sequence
  Description of Artificial Sequence: Synthetic oligonucleotide
  Target: LAMA2; (-) strand; PAM type: YTN; PAM sequence: TTT
cacccatacactatgtgtac

SEQ ID NO: 263354 - DNA, 20 bp, Artificial Sequence
  Description of Artificial Sequence: Synthetic oligonucleotide
  Target: LAMA2; (-) strand; PAM type: YTN; PAM sequence: TTT
tcacccatacactatgtgta

SEQ ID NO: 263355 - DNA, 20 bp, Artificial Sequence
  Description of Artificial Sequence: Synthetic oligonucleotide
  Target: LAMA2; (-) strand; PAM type: YTN; PAM sequence: CTC
agttttcacccatacactat

SEQ ID NO: 263356 - DNA, 20 bp, Artificial Sequence
  Description of Artificial Sequence: Synthetic oligonucleotide
  Target: LAMA2; (-) strand; PAM type: YTN; PAM sequence: TTC
atatgtgccacacagtctca

SEQ ID NO: 263357 - DNA, 20 bp, Artificial Sequence
  Description of Artificial Sequence: Synthetic oligonucleotide
  Target: LAMA2; (-) strand; PAM type: YTN; PAM sequence: TTT
catatgtgccacacagtctc

SEQ ID NO: 263358 - DNA, 20 bp, Artificial Sequence
  Description of Artificial Sequence: Synthetic oligonucleotide
  Target: LAMA2; (-) strand; PAM type: YTN; PAM sequence: CTC
atttcatatgtgccacacag

SEQ ID NO: 263359 - DNA, 20 bp, Artificial Sequence
  Description of Artificial Sequence: Synthetic oligonucleotide
  Target: LAMA2; (-) strand; PAM type: YTN; PAM sequence: CTG
gaaaggtcactcatttcata

SEQ ID NO: 263360 - DNA, 20 bp, Artificial Sequence
  Description of Artificial Sequence: Synthetic oligonucleotide
  Target: LAMA2; (-) strand; PAM type: YTN; PAM sequence: CTC
actggaaaggtcactcattt

SEQ ID NO: 263361 - DNA, 20 bp, Artificial Sequence
  Description of Artificial Sequence: Synthetic oligonucleotide
  Target: LAMA2; (-) strand; PAM type: YTN; PAM sequence: TTC
aatgctcactggaaaggtca

SEQ ID NO: 263362 - DNA, 20 bp, Artificial Sequence
  Description of Artificial Sequence: Synthetic oligonucleotide
  Target: LAMA2; (-) strand; PAM type: YTN; PAM sequence: CTT
caatgctcactggaaaggtc

SEQ ID NO: 263363 - DNA, 20 bp, Artificial Sequence
  Description of Artificial Sequence: Synthetic oligonucleotide
  Target: LAMA2; (-) strand; PAM type: YTN; PAM sequence: TTA
aaatcttcaatgctcactgg

SEQ ID NO: 263364 - DNA, 20 bp, Artificial Sequence
  Description of Artificial Sequence: Synthetic oligonucleotide
  Target: LAMA2; (-) strand; PAM type: YTN; PAM sequence: TTT
aaaatcttcaatgctcactg

SEQ ID NO: 263365 - DNA, 20 bp, Artificial Sequence
  Description of Artificial Sequence: Synthetic oligonucleotide
  Target: LAMA2; (-) strand; PAM type: YTN; PAM sequence: TTT
taaaatcttcaatgctcact

SEQ ID NO: 263366 - DNA, 20 bp, Artificial Sequence
  Description of Artificial Sequence: Synthetic oligonucleotide
  Target: LAMA2; (-) strand; PAM type: YTN; PAM sequence: CTC
cattttaaaatcttcaatgc

SEQ ID NO: 263367 - DNA, 20 bp, Artificial Sequence
  Description of Artificial Sequence: Synthetic oligonucleotide
  Target: LAMA2; (-) strand; PAM type: YTN; PAM sequence: CTG
tcctccattttaaaatcttc

SEQ ID NO: 263368 - DNA, 20 bp, Artificial Sequence
  Description of Artificial Sequence: Synthetic oligonucleotide
  Target: LAMA2; (-) strand; PAM type: YTN; PAM sequence: TTC
tgtcctccattttaaaatct

SEQ ID NO: 263369 - DNA, 20 bp, Artificial Sequence
  Description of Artificial Sequence: Synthetic oligonucleotide
  Target: LAMA2; (-) strand; PAM type: YTN; PAM sequence: TTT
ctgtcctccattttaaaatc

SEQ ID NO: 263370 - DNA, 20 bp, Artificial Sequence
  Description of Artificial Sequence: Synthetic oligonucleotide
  Target: LAMA2; (-) strand; PAM type: YTN; PAM sequence: CTT
tctgtcctccattttaaaat

SEQ ID NO: 263371 - DNA, 20 bp, Artificial Sequence
  Description of Artificial Sequence: Synthetic oligonucleotide
  Target: LAMA2; (-) strand; PAM type: YTN; PAM sequence: TTC
tttctgtcctccattttaaa

SEQ ID NO: 263372 - DNA, 20 bp, Artificial Sequence
  Description of Artificial Sequence: Synthetic oligonucleotide
  Target: LAMA2; (-) strand; PAM type: YTN; PAM sequence: CTC
acattctttctgtcctccat

SEQ ID NO: 263373 - DNA, 20 bp, Artificial Sequence
  Description of Artificial Sequence: Synthetic oligonucleotide
  Target: LAMA2; (-) strand; PAM type: YTN; PAM sequence: CTA
gaaaaatctcacattctttc

SEQ ID NO: 263374 - DNA, 20 bp, Artificial Sequence
  Description of Artificial Sequence: Synthetic oligonucleotide
  Target: LAMA2; (-) strand; PAM type: YTN; PAM sequence: TTG
tctagaaaaatctcacattc

SEQ ID NO: 263375 - DNA, 20 bp, Artificial Sequence
  Description of Artificial Sequence: Synthetic oligonucleotide
  Target: LAMA2; (-) strand; PAM type: YTN; PAM sequence: CTT
gtctagaaaaatctcacatt

SEQ ID NO: 263376 - DNA, 20 bp, Artificial Sequence
  Description of Artificial Sequence: Synthetic oligonucleotide
  Target: LAMA2; (-) strand; PAM type: YTN; PAM sequence: CTC
ttgtctagaaaaatctcaca

SEQ ID NO: 263377 - DNA, 20 bp, Artificial Sequence
  Description of Artificial Sequence: Synthetic oligonucleotide
  Target: LAMA2; (-) strand; PAM type: YTN; PAM sequence: TTC
catctcttgtctagaaaaat

SEQ ID NO: 263378 - DNA, 20 bp, Artificial Sequence
  Description of Artificial Sequence: Synthetic oligonucleotide
  Target: LAMA2; (-) strand; PAM type: YTN; PAM sequence: CTG
ggataaaggaaattccatct

SEQ ID NO: 263379 - DNA, 20 bp, Artificial Sequence
  Description of Artificial Sequence: Synthetic oligonucleotide
  Target: LAMA2; (-) strand; PAM type: YTN; PAM sequence: CTA
cctgggataaaggaaattcc

SEQ ID NO: 263380 - DNA, 20 bp, Artificial Sequence
  Description of Artificial Sequence: Synthetic oligonucleotide
  Target: LAMA2; (-) strand; PAM type: YTN; PAM sequence: TTA
aaagtaaaaccaaacgctac

SEQ ID NO: 263381 - DNA, 20 bp, Artificial Sequence
  Description of Artificial Sequence: Synthetic oligonucleotide
  Target: LAMA2; (-) strand; PAM type: YTN; PAM sequence: TTG
atcaagtgcacacagttaaa

SEQ ID NO: 263382 - DNA, 20 bp, Artificial Sequence
  Description of Artificial Sequence: Synthetic oligonucleotide
  Target: LAMA2; (-) strand; PAM type: YTN; PAM sequence: TTA
agagcattgatcaagtgcac

SEQ ID NO: 263383 - DNA, 20 bp, Artificial Sequence
  Description of Artificial Sequence: Synthetic oligonucleotide
  Target: LAMA2; (-) strand; PAM type: YTN; PAM sequence: CTA
cagcaattaagagcattgat

SEQ ID NO: 263384 - DNA, 20 bp, Artificial Sequence
  Description of Artificial Sequence: Synthetic oligonucleotide
  Target: LAMA2; (-) strand; PAM type: YTN; PAM sequence: CTA
tataataacgaaggtctaca

SEQ ID NO: 263385 - DNA, 20 bp, Artificial Sequence
  Description of Artificial Sequence: Synthetic oligonucleotide
  Target: LAMA2; (-) strand; PAM type: YTN; PAM sequence: TTG
gatagctatataataacgaa

SEQ ID NO: 263386 - DNA, 20 bp, Artificial Sequence
  Description of Artificial Sequence: Synthetic oligonucleotide
  Target: LAMA2; (-) strand; PAM type: YTN; PAM sequence: TTA
tagattggatagctatataa

SEQ ID NO: 263387 - DNA, 20 bp, Artificial Sequence
  Description of Artificial Sequence: Synthetic oligonucleotide
  Target: LAMA2; (-) strand; PAM type: YTN; PAM sequence: TTT
atagattggatagctatata

SEQ ID NO: 263388 - DNA, 20 bp, Artificial Sequence
  Description of Artificial Sequence: Synthetic oligonucleotide
  Target: LAMA2; (-) strand; PAM type: YTN; PAM sequence: TTT
tatagattggatagctatat

SEQ ID NO: 263389 - DNA, 20 bp, Artificial Sequence
  Description of Artificial Sequence: Synthetic oligonucleotide
  Target: LAMA2; (-) strand; PAM type: YTN; PAM sequence: CTG
tcattttatagattggatag

SEQ ID NO: 263390 - DNA, 20 bp, Artificial Sequence
  Description of Artificial Sequence: Synthetic oligonucleotide
  Target: LAMA2; (-) strand; PAM type: YTN; PAM sequence: CTC
aatctgtcattttatagatt

SEQ ID NO: 263391 - DNA, 20 bp, Artificial Sequence
  Description of Artificial Sequence: Synthetic oligonucleotide
  Target: LAMA2; (-) strand; PAM type: YTN; PAM sequence: TTC
aactcaatctgtcattttat

SEQ ID NO: 263392 - DNA, 20 bp, Artificial Sequence
  Description of Artificial Sequence: Synthetic oligonucleotide
  Target: LAMA2; (-) strand; PAM type: YTN; PAM sequence: CTT
caactcaatctgtcatttta

SEQ ID NO: 263393 - DNA, 20 bp, Artificial Sequence
  Description of Artificial Sequence: Synthetic oligonucleotide
  Target: LAMA2; (-) strand; PAM type: YTN; PAM sequence: TTA
gaacttcaactcaatctgtc

SEQ ID NO: 263394 - DNA, 20 bp, Artificial Sequence
  Description of Artificial Sequence: Synthetic oligonucleotide
  Target: LAMA2; (-) strand; PAM type: YTN; PAM sequence: TTT
agaacttcaactcaatctgt

SEQ ID NO: 263395 - DNA, 20 bp, Artificial Sequence
  Description of Artificial Sequence: Synthetic oligonucleotide
  Target: LAMA2; (-) strand; PAM type: YTN; PAM sequence: TTT
tagaacttcaactcaatctg

SEQ ID NO: 263396 - DNA, 20 bp, Artificial Sequence
  Description of Artificial Sequence: Synthetic oligonucleotide
  Target: LAMA2; (-) strand; PAM type: YTN; PAM sequence: TTG
cagaatcagagaattttaga

SEQ ID NO: 263397 - DNA, 20 bp, Artificial Sequence
  Description of Artificial Sequence: Synthetic oligonucleotide
  Target: LAMA2; (-) strand; PAM type: YTN; PAM sequence: CTA
tagcaaaataatattgcaga

SEQ ID NO: 263398 - DNA, 20 bp, Artificial Sequence
  Description of Artificial Sequence: Synthetic oligonucleotide
  Target: LAMA2; (-) strand; PAM type: YTN; PAM sequence: TTC
tatagcaaaataatattgca

SEQ ID NO: 263399 - DNA, 20 bp, Artificial Sequence
  Description of Artificial Sequence: Synthetic oligonucleotide
  Target: LAMA2; (-) strand; PAM type: YTN; PAM sequence: TTT
ctatagcaaaataatattgc

SEQ ID NO: 263400 - DNA, 20 bp, Artificial Sequence
  Description of Artificial Sequence: Synthetic oligonucleotide
  Target: LAMA2; (-) strand; PAM type: YTN; PAM sequence: TTT
tctatagcaaaataatattg

SEQ ID NO: 263401 - DNA, 20 bp, Artificial Sequence
  Description of Artificial Sequence: Synthetic oligonucleotide
  Target: LAMA2; (-) strand; PAM type: YTN; PAM sequence: TTA
cagaatattttctatagcaa

SEQ ID NO: 263402 - DNA, 20 bp, Artificial Sequence
  Description of Artificial Sequence: Synthetic oligonucleotide
  Target: LAMA2; (-) strand; PAM type: YTN; PAM sequence: CTT
acagaatattttctatagca

SEQ ID NO: 263403 - DNA, 20 bp, Artificial Sequence
  Description of Artificial Sequence: Synthetic oligonucleotide
  Target: LAMA2; (-) strand; PAM type: YTN; PAM sequence: CTA
cttacagaatattttctata

SEQ ID NO: 263404 - DNA, 20 bp, Artificial Sequence
  Description of Artificial Sequence: Synthetic oligonucleotide
  Target: LAMA2; (-) strand; PAM type: YTN; PAM sequence: TTG
actacttacagaatattttc

SEQ ID NO: 263405 - DNA, 20 bp, Artificial Sequence
  Description of Artificial Sequence: Synthetic oligonucleotide
  Target: LAMA2; (-) strand; PAM type: YTN; PAM sequence: CTT
gactacttacagaatatttt

SEQ ID NO: 263406 - DNA, 20 bp, Artificial Sequence
  Description of Artificial Sequence: Synthetic oligonucleotide
  Target: LAMA2; (-) strand; PAM type: YTN; PAM sequence: CTA
aaggtcaaccttgactactt

SEQ ID NO: 263407 - DNA, 20 bp, Artificial Sequence
  Description of Artificial Sequence: Synthetic oligonucleotide
  Target: LAMA2; (-) strand; PAM type: YTN; PAM sequence: TTC
aagatatctaaaggtcaacc

SEQ ID NO: 263408 - DNA, 20 bp, Artificial Sequence
  Description of Artificial Sequence: Synthetic oligonucleotide
  Target: LAMA2; (-) strand; PAM type: YTN; PAM sequence: CTT
caagatatctaaaggtcaac

SEQ ID NO: 263409 - DNA, 20 bp, Artificial Sequence
  Description of Artificial Sequence: Synthetic oligonucleotide
  Target: LAMA2; (-) strand; PAM type: YTN; PAM sequence: CTC
ttcaagatatctaaaggtca

SEQ ID NO: 263410 - DNA, 20 bp, Artificial Sequence
  Description of Artificial Sequence: Synthetic oligonucleotide
  Target: LAMA2; (-) strand; PAM type: YTN; PAM sequence: TTC
tcttcaagatatctaaaggt

SEQ ID NO: 263411 - DNA, 20 bp, Artificial Sequence
  Description of Artificial Sequence: Synthetic oligonucleotide
  Target: LAMA2; (-) strand; PAM type: YTN; PAM sequence: CTT
ctcttcaagatatctaaagg

SEQ ID NO: 263412 - DNA, 20 bp, Artificial Sequence
  Description of Artificial Sequence: Synthetic oligonucleotide
  Target: LAMA2; (-) strand; PAM type: YTN; PAM sequence: CTG
taataaccttctcttcaaga

SEQ ID NO: 263413 - DNA, 20 bp, Artificial Sequence
  Description of Artificial Sequence: Synthetic oligonucleotide
  Target: LAMA2; (-) strand; PAM type: YTN; PAM sequence: TTC
aaataaatgcagaaaaatat

SEQ ID NO: 263414 - DNA, 20 bp, Artificial Sequence
  Description of Artificial Sequence: Synthetic oligonucleotide
  Target: LAMA2; (-) strand; PAM type: YTN; PAM sequence: TTT
caaataaatgcagaaaaata

SEQ ID NO: 263415 - DNA, 20 bp, Artificial Sequence
  Description of Artificial Sequence: Synthetic oligonucleotide
  Target: LAMA2; (-) strand; PAM type: YTN; PAM sequence: TTA
tttcaaataaatgcagaaaa

SEQ ID NO: 263416 - DNA, 20 bp, Artificial Sequence
  Description of Artificial Sequence: Synthetic oligonucleotide
  Target: LAMA2; (-) strand; PAM type: YTN; PAM sequence: TTC
acaagtgaacagtattattt

SEQ ID NO: 263417 - DNA, 20 bp, Artificial Sequence
  Description of Artificial Sequence: Synthetic oligonucleotide
  Target: LAMA2; (-) strand; PAM type: YTN; PAM sequence: TTG
ttcacaagtgaacagtatta

SEQ ID NO: 263418 - DNA, 20 bp, Artificial Sequence
  Description of Artificial Sequence: Synthetic oligonucleotide
  Target: LAMA2; (-) strand; PAM type: YTN; PAM sequence: TTT
gttcacaagtgaacagtatt

SEQ ID NO: 263419 - DNA, 20 bp, Artificial Sequence
  Description of Artificial Sequence: Synthetic oligonucleotide
  Target: LAMA2; (-) strand; PAM type: YTN; PAM sequence: TTT
tgttcacaagtgaacagtat

SEQ ID NO: 263420 - DNA, 20 bp, Artificial Sequence
  Description of Artificial Sequence: Synthetic oligonucleotide
  Target: LAMA2; (-) strand; PAM type: YTN; PAM sequence: TTT
ttgttcacaagtgaacagta

SEQ ID NO: 263421 - DNA, 20 bp, Artificial Sequence
  Description of Artificial Sequence: Synthetic oligonucleotide
  Target: LAMA2; (-) strand; PAM type: YTN; PAM sequence: CTA
acatttttgttcacaagtga

SEQ ID NO: 263422 - DNA, 20 bp, Artificial Sequence
  Description of Artificial Sequence: Synthetic oligonucleotide
  Target: LAMA2; (-) strand; PAM type: YTN; PAM sequence: CTA
ctaacatttttgttcacaag

SEQ ID NO: 263423 - DNA, 20 bp, Artificial Sequence
  Description of Artificial Sequence: Synthetic oligonucleotide
  Target: LAMA2; (-) strand; PAM type: YTN; PAM sequence: TTC
tactaacatttttgttcaca

SEQ ID NO: 263424 - DNA, 20 bp, Artificial Sequence
  Description of Artificial Sequence: Synthetic oligonucleotide
  Target: LAMA2; (-) strand; PAM type: YTN; PAM sequence: CTA
ttctactaacatttttgttc

SEQ ID NO: 263425 - DNA, 20 bp, Artificial Sequence
  Description of Artificial Sequence: Synthetic oligonucleotide
  Target: LAMA2; (-) strand; PAM type: YTN; PAM sequence: TTG
ctattctactaacatttttg

SEQ ID NO: 263426 - DNA, 20 bp, Artificial Sequence
  Description of Artificial Sequence: Synthetic oligonucleotide
  Target: LAMA2; (-) strand; PAM type: YTN; PAM sequence: TTT
gctattctactaacattttt

SEQ ID NO: 263427 - DNA, 20 bp, Artificial Sequence
  Description of Artificial Sequence: Synthetic oligonucleotide
  Target: LAMA2; (-) strand; PAM type: YTN; PAM sequence: TTG
catgaaaataatttgctatt

SEQ ID NO: 263428 - DNA, 20 bp, Artificial Sequence
  Description of Artificial Sequence: Synthetic oligonucleotide
  Target: LAMA2; (-) strand; PAM type: YTN; PAM sequence: TTG
gttgcatgaaaataatttgc

SEQ ID NO: 263429 - DNA, 20 bp, Artificial Sequence
  Description of Artificial Sequence: Synthetic oligonucleotide
  Target: LAMA2; (-) strand; PAM type: YTN; PAM sequence: TTA
aatccagaatggaaggttgg

SEQ ID NO: 263430 - DNA, 20 bp, Artificial Sequence
  Description of Artificial Sequence: Synthetic oligonucleotide
  Target: LAMA2; (-) strand; PAM type: YTN; PAM sequence: TTT
aaatccagaatggaaggttg

SEQ ID NO: 263431 - DNA, 20 bp, Artificial Sequence
  Description of Artificial Sequence: Synthetic oligonucleotide
  Target: LAMA2; (-) strand; PAM type: YTN; PAM sequence: TTT
taaatccagaatggaaggtt

SEQ ID NO: 263432 - DNA, 20 bp, Artificial Sequence
  Description of Artificial Sequence: Synthetic oligonucleotide
  Target: LAMA2; (-) strand; PAM type: YTN; PAM sequence: TTA
acattttaaatccagaatgg

SEQ ID NO: 263433 - DNA, 20 bp, Artificial Sequence
  Description of Artificial Sequence: Synthetic oligonucleotide
  Target: LAMA2; (-) strand; PAM type: YTN; PAM sequence: TTT
aacattttaaatccagaatg

SEQ ID NO: 263434 - DNA, 20 bp, Artificial Sequence
  Description of Artificial Sequence: Synthetic oligonucleotide
  Target: LAMA2; (-) strand; PAM type: YTN; PAM sequence: TTT
taacattttaaatccagaat

SEQ ID NO: 263435 - DNA, 20 bp, Artificial Sequence
  Description of Artificial Sequence: Synthetic oligonucleotide
  Target: LAMA2; (-) strand; PAM type: YTN; PAM sequence: TTT
ttaacattttaaatccagaa

SEQ ID NO: 263436 - DNA, 20 bp, Artificial Sequence
  Description of Artificial Sequence: Synthetic oligonucleotide
  Target: LAMA2; (-) strand; PAM type: YTN; PAM sequence: CTA
tcaatcatatgaagaaaggt

SEQ ID NO: 263437 - DNA, 20 bp, Artificial Sequence
  Description of Artificial Sequence: Synthetic oligonucleotide
  Target: LAMA2; (-) strand; PAM type: YTN; PAM sequence: TTC
aaaaagtctatcaatcatat

SEQ ID NO: 263438 - DNA, 20 bp, Artificial Sequence
  Description of Artificial Sequence: Synthetic oligonucleotide
  Target: LAMA2; (-) strand; PAM type: YTN; PAM sequence: CTA
ttcaaaaagtctatcaatca

SEQ ID NO: 263439 - DNA, 20 bp, Artificial Sequence
  Description of Artificial Sequence: Synthetic oligonucleotide
  Target: LAMA2; (-) strand; PAM type: YTN; PAM sequence: TTG
aatgtactattcaaaaagtc

SEQ ID NO: 263440 - DNA, 20 bp, Artificial Sequence
  Description of Artificial Sequence: Synthetic oligonucleotide
  Target: LAMA2; (-) strand; PAM type: YTN; PAM sequence: TTT
gaatgtactattcaaaaagt

SEQ ID NO: 263441 - DNA, 20 bp, Artificial Sequence
  Description of Artificial Sequence: Synthetic oligonucleotide
  Target: LAMA2; (-) strand; PAM type: YTN; PAM sequence: TTA
atgggaaagcatgtatttga

SEQ ID NO: 263442 - DNA, 20 bp, Artificial Sequence
  Description of Artificial Sequence: Synthetic oligonucleotide
  Target: LAMA2; (-) strand; PAM type: YTN; PAM sequence: CTC
aaattaatgggaaagcatgt

SEQ ID NO: 263443 - DNA, 20 bp, Artificial Sequence
  Description of Artificial Sequence: Synthetic oligonucleotide
  Target: LAMA2; (-) strand; PAM type: YTN; PAM sequence: TTC
atataatgatggaaaatgac

SEQ ID NO: 263444 - DNA, 20 bp, Artificial Sequence
  Description of Artificial Sequence: Synthetic oligonucleotide
  Target: LAMA2; (-) strand; PAM type: YTN; PAM sequence: TTT
catataatgatggaaaatga

SEQ ID NO: 263445 - DNA, 20 bp, Artificial Sequence
  Description of Artificial Sequence: Synthetic oligonucleotide
  Target: LAMA2; (-) strand; PAM type: YTN; PAM sequence: TTT
tcatataatgatggaaaatg

SEQ ID NO: 263446 - DNA, 20 bp, Artificial Sequence
  Description of Artificial Sequence: Synthetic oligonucleotide
  Target: LAMA2; (-) strand; PAM type: YTN; PAM sequence: TTA
cattttcatataatgatgga

SEQ ID NO: 263447 - DNA, 20 bp, Artificial Sequence
  Description of Artificial Sequence: Synthetic oligonucleotide
  Target: LAMA2; (-) strand; PAM type: YTN; PAM sequence: TTT
acattttcatataatgatgg

SEQ ID NO: 263448 - DNA, 20 bp, Artificial Sequence
  Description of Artificial Sequence: Synthetic oligonucleotide
  Target: LAMA2; (-) strand; PAM type: YTN; PAM sequence: CTC
atttacattttcatataatg

SEQ ID NO: 263449 - DNA, 20 bp, Artificial Sequence
  Description of Artificial Sequence: Synthetic oligonucleotide
  Target: LAMA2; (-) strand; PAM type: YTN; PAM sequence: TTG
tgctcatttacattttcata

SEQ ID NO: 263450 - DNA, 20 bp, Artificial Sequence
  Description of Artificial Sequence: Synthetic oligonucleotide
  Target: LAMA2; (-) strand; PAM type: YTN; PAM sequence: TTT
gtgctcatttacattttcat

SEQ ID NO: 263451 - DNA, 20 bp, Artificial Sequence
  Description of Artificial Sequence: Synthetic oligonucleotide
  Target: LAMA2; (-) strand; PAM type: YTN; PAM sequence: TTA
tttgtgctcatttacatttt

SEQ ID NO: 263452 - DNA, 20 bp, Artificial Sequence
  Description of Artificial Sequence: Synthetic oligonucleotide
  Target: LAMA2; (-) strand; PAM type: YTN; PAM sequence: TTT
atttgtgctcatttacattt

SEQ ID NO: 263453 - DNA, 20 bp, Artificial Sequence
  Description of Artificial Sequence: Synthetic oligonucleotide
  Target: LAMA2; (-) strand; PAM type: YTN; PAM sequence: TTT
tatttgtgctcatttacatt

SEQ ID NO: 263454 - DNA, 20 bp, Artificial Sequence
  Description of Artificial Sequence: Synthetic oligonucleotide
  Target: LAMA2; (-) strand; PAM type: YTN; PAM sequence: TTG
ttttatttgtgctcatttac

SEQ ID NO: 263455 - DNA, 20 bp, Artificial Sequence
  Description of Artificial Sequence: Synthetic oligonucleotide
  Target: LAMA2; (-) strand; PAM type: YTN; PAM sequence: TTT
gttttatttgtgctcattta

SEQ ID NO: 263456 - DNA, 20 bp, Artificial Sequence
  Description of Artificial Sequence: Synthetic oligonucleotide
  Target: LAMA2; (-) strand; PAM type: YTN; PAM sequence: TTA
tcatttgttttatttgtgct

SEQ ID NO: 263457 - DNA, 20 bp, Artificial Sequence
  Description of Artificial Sequence: Synthetic oligonucleotide
  Target: LAMA2; (-) strand; PAM type: YTN; PAM sequence: TTT
atcatttgttttatttgtgc

SEQ ID NO: 263458 - DNA, 20 bp, Artificial Sequence
  Description of Artificial Sequence: Synthetic oligonucleotide
  Target: LAMA2; (-) strand; PAM type: YTN; PAM sequence: TTC
atttatcatttgttttattt

SEQ ID NO: 263459 - DNA, 20 bp, Artificial Sequence
  Description of Artificial Sequence: Synthetic oligonucleotide
  Target: LAMA2; (-) strand; PAM type: YTN; PAM sequence: TTT
catttatcatttgttttatt

SEQ ID NO: 263460 - DNA, 20 bp, Artificial Sequence
  Description of Artificial Sequence: Synthetic oligonucleotide
  Target: LAMA2; (-) strand; PAM type: YTN; PAM sequence: TTT
tcatttatcatttgttttat

SEQ ID NO: 263461 - DNA, 20 bp, Artificial Sequence
  Description of Artificial Sequence: Synthetic oligonucleotide
  Target: LAMA2; (-) strand; PAM type: YTN; PAM sequence: TTG
attttcatttatcatttgtt

SEQ ID NO: 263462 - DNA, 20 bp, Artificial Sequence
  Description of Artificial Sequence: Synthetic oligonucleotide
  Target: LAMA2; (-) strand; PAM type: YTN; PAM sequence: CTT
gattttcatttatcatttgt

SEQ ID NO: 263463 - DNA, 20 bp, Artificial Sequence
  Description of Artificial Sequence: Synthetic oligonucleotide
  Target: LAMA2; (-) strand; PAM type: YTN; PAM sequence: TTC
ttgattttcatttatcattt

SEQ ID NO: 263464 - DNA, 20 bp, Artificial Sequence
  Description of Artificial Sequence: Synthetic oligonucleotide
  Target: LAMA2; (-) strand; PAM type: YTN; PAM sequence: TTT
cttgattttcatttatcatt

SEQ ID NO: 263465 - DNA, 20 bp, Artificial Sequence
  Description of Artificial Sequence: Synthetic oligonucleotide
  Target: LAMA2; (-) strand; PAM type: YTN; PAM sequence: TTT
tcttgattttcatttatcat

SEQ ID NO: 263466 - DNA, 20 bp, Artificial Sequence
  Description of Artificial Sequence: Synthetic oligonucleotide
  Target: LAMA2; (-) strand; PAM type: YTN; PAM sequence: TTT
ttcttgattttcatttatca

SEQ ID NO: 263467 - DNA, 20 bp, Artificial Sequence
  Description of Artificial Sequence: Synthetic oligonucleotide
  Target: LAMA2; (-) strand; PAM type: YTN; PAM sequence: TTA
gtttttcttgattttcattt

SEQ ID NO: 263468 - DNA, 20 bp, Artificial Sequence
  Description of Artificial Sequence: Synthetic oligonucleotide
  Target: LAMA2; (-) strand; PAM type: YTN; PAM sequence: CTT
agtttttcttgattttcatt

SEQ ID NO: 263469 - DNA, 20 bp, Artificial Sequence
  Description of Artificial Sequence: Synthetic oligonucleotide
  Target: LAMA2; (-) strand; PAM type: YTN; PAM sequence: TTC
ttagtttttcttgattttca

SEQ ID NO: 263470 - DNA, 20 bp, Artificial Sequence
  Description of Artificial Sequence: Synthetic oligonucleotide
  Target: LAMA2; (-) strand; PAM type: YTN; PAM sequence: TTG
tacatattcttagtttttct

SEQ ID NO: 263471 - DNA, 20 bp, Artificial Sequence
  Description of Artificial Sequence: Synthetic oligonucleotide
  Target: LAMA2; (-) strand; PAM type: YTN; PAM sequence: TTT
gtacatattcttagtttttc

SEQ ID NO: 263472 - DNA, 20 bp, Artificial Sequence
  Description of Artificial Sequence: Synthetic oligonucleotide
  Target: LAMA2; (-) strand; PAM type: YTN; PAM sequence: CTA
atgcagatgacaatttgtac

SEQ ID NO: 263473 - DNA, 20 bp, Artificial Sequence
  Description of Artificial Sequence: Synthetic oligonucleotide
  Target: LAMA2; (-) strand; PAM type: YTN; PAM sequence: TTA
agtgaaagtcatgggacggt

SEQ ID NO: 263474 - DNA, 20 bp, Artificial Sequence
  Description of Artificial Sequence: Synthetic oligonucleotide
  Target: LAMA2; (-) strand; PAM type: YTN; PAM sequence: CTT
aagtgaaagtcatgggacgg

SEQ ID NO: 263475 - DNA, 20 bp, Artificial Sequence
  Description of Artificial Sequence: Synthetic oligonucleotide
  Target: LAMA2; (-) strand; PAM type: YTN; PAM sequence: CTG
taaatagatgcttaagtgaa

SEQ ID NO: 263476 - DNA, 20 bp, Artificial Sequence
  Description of Artificial Sequence: Synthetic oligonucleotide
  Target: LAMA2; (-) strand; PAM type: YTN; PAM sequence: CTG
tctgtaaatagatgcttaag

SEQ ID NO: 263477 - DNA, 20 bp, Artificial Sequence
  Description of Artificial Sequence: Synthetic oligonucleotide
  Target: LAMA2; (-) strand; PAM type: YTN; PAM sequence: TTA
ctgtctgtaaatagatgctt

SEQ ID NO: 263478 - DNA, 20 bp, Artificial Sequence
  Description of Artificial Sequence: Synthetic oligonucleotide
  Target: LAMA2; (-) strand; PAM type: YTN; PAM sequence: CTG
caattactgtctgtaaatag

SEQ ID NO: 263479 - DNA, 20 bp, Artificial Sequence
  Description of Artificial Sequence: Synthetic oligonucleotide
  Target: LAMA2; (-) strand; PAM type: YTN; PAM sequence: TTA
ctgcaattactgtctgtaaa

SEQ ID NO: 263480 - DNA, 20 bp, Artificial Sequence
  Description of Artificial Sequence: Synthetic oligonucleotide
  Target: LAMA2; (-) strand; PAM type: YTN; PAM sequence: CTA
agatattactgcaattactg

SEQ ID NO: 263481 - DNA, 20 bp, Artificial Sequence
  Description of Artificial Sequence: Synthetic oligonucleotide
  Target: LAMA2; (-) strand; PAM type: YTN; PAM sequence: CTA
ctaagatattactgcaatta

SEQ ID NO: 263482 - DNA, 20 bp, Artificial Sequence
  Description of Artificial Sequence: Synthetic oligonucleotide
  Target: LAMA2; (-) strand; PAM type: YTN; PAM sequence: CTC
tactaagatattactgcaat

SEQ ID NO: 263483 - DNA, 20 bp, Artificial Sequence
  Description of Artificial Sequence: Synthetic oligonucleotide
  Target: LAMA2; (-) strand; PAM type: YTN; PAM sequence: CTC
tctactaagatattactgca

SEQ ID NO: 263484 - DNA, 20 bp, Artificial Sequence
  Description of Artificial Sequence: Synthetic oligonucleotide
  Target: LAMA2; (-) strand; PAM type: YTN; PAM sequence: CTG
taatctctctactaagatat

SEQ ID NO: 263485 - DNA, 20 bp, Artificial Sequence
  Description of Artificial Sequence: Synthetic oligonucleotide
  Target: LAMA2; (-) strand; PAM type: YTN; PAM sequence: CTC
tgtaatctctctactaagat

SEQ ID NO: 263486 - DNA, 20 bp, Artificial Sequence
  Description of Artificial Sequence: Synthetic oligonucleotide
  Target: LAMA2; (-) strand; PAM type: YTN; PAM sequence: TTA
tctctgtaatctctctacta

SEQ ID NO: 263487 - DNA, 20 bp, Artificial Sequence
  Description of Artificial Sequence: Synthetic oligonucleotide
  Target: LAMA2; (-) strand; PAM type: YTN; PAM sequence: TTT
atctctgtaatctctctact

SEQ ID NO: 263488 - DNA, 20 bp, Artificial Sequence
  Description of Artificial Sequence: Synthetic oligonucleotide
  Target: LAMA2; (-) strand; PAM type: YTN; PAM sequence: CTT
tatctctgtaatctctctac

SEQ ID NO: 263489 - DNA, 20 bp, Artificial Sequence
  Description of Artificial Sequence: Synthetic oligonucleotide
  Target: LAMA2; (-) strand; PAM type: YTN; PAM sequence: TTA
tgagagataggtctttatct

SEQ ID NO: 263490 - DNA, 20 bp, Artificial Sequence
  Description of Artificial Sequence: Synthetic oligonucleotide
  Target: LAMA2; (-) strand; PAM type: YTN; PAM sequence: TTA
ttatgagagataggtcttta

SEQ ID NO: 263491 - DNA, 20 bp, Artificial Sequence
  Description of Artificial Sequence: Synthetic oligonucleotide
  Target: LAMA2; (-) strand; PAM type: YTN; PAM sequence: TTC
aggtacattattatgagaga

SEQ ID NO: 263492 - DNA, 20 bp, Artificial Sequence
  Description of Artificial Sequence: Synthetic oligonucleotide
  Target: LAMA2; (-) strand; PAM type: YTN; PAM sequence: CTT
caggtacattattatgagag

SEQ ID NO: 263493 - DNA, 20 bp, Artificial Sequence
  Description of Artificial Sequence: Synthetic oligonucleotide
  Target: LAMA2; (-) strand; PAM type: YTN; PAM sequence: TTG
tggaaaacacttcaggtaca

SEQ ID NO: 263494 - DNA, 20 bp, Artificial Sequence
  Description of Artificial Sequence: Synthetic oligonucleotide
  Target: LAMA2; (-) strand; PAM type: YTN; PAM sequence: TTA
gaggccatgggttgtggaaa

SEQ ID NO: 263495 - DNA, 20 bp, Artificial Sequence
  Description of Artificial Sequence: Synthetic oligonucleotide
  Target: LAMA2; (-) strand; PAM type: YTN; PAM sequence: TTA
taaataagaggtataatgga

SEQ ID NO: 263496 - DNA, 20 bp, Artificial Sequence
  Description of Artificial Sequence: Synthetic oligonucleotide
  Target: LAMA2; (-) strand; PAM type: YTN; PAM sequence: TTA
ggaatcaagatgaattataa

SEQ ID NO: 263497 - DNA, 20 bp, Artificial Sequence
  Description of Artificial Sequence: Synthetic oligonucleotide
  Target: LAMA2; (-) strand; PAM type: YTN; PAM sequence: CTT
aggaatcaagatgaattata

SEQ ID NO: 263498 - DNA, 20 bp, Artificial Sequence
  Description of Artificial Sequence: Synthetic oligonucleotide
  Target: LAMA2; (-) strand; PAM type: YTN; PAM sequence: TTA
cacttaggaatcaagatgaa

SEQ ID NO: 263499 - DNA, 20 bp, Artificial Sequence
  Description of Artificial Sequence: Synthetic oligonucleotide
  Target: LAMA2; (-) strand; PAM type: YTN; PAM sequence: CTG
ggtaattacacttaggaatc

SEQ ID NO: 263500 - DNA, 20 bp, Artificial Sequence
  Description of Artificial Sequence: Synthetic oligonucleotide
  Target: LAMA2; (-) strand; PAM type: YTN; PAM sequence: TTA
tgcctgggtaattacactta

SEQ ID NO: 263501 - DNA, 20 bp, Artificial Sequence
  Description of Artificial Sequence: Synthetic oligonucleotide
  Target: LAMA2; (-) strand; PAM type: YTN; PAM sequence: TTT
atgcctgggtaattacactt

SEQ ID NO: 263502 - DNA, 20 bp, Artificial Sequence
  Description of Artificial Sequence: Synthetic oligonucleotide
  Target: LAMA2; (-) strand; PAM type: YTN; PAM sequence: TTT
tatgcctgggtaattacact

SEQ ID NO: 263503 - DNA, 20 bp, Artificial Sequence
  Description of Artificial Sequence: Synthetic oligonucleotide
  Target: LAMA2; (-) strand; PAM type: YTN; PAM sequence: TTG
atgataagattttatgcctg

SEQ ID NO: 263504 - DNA, 20 bp, Artificial Sequence
  Description of Artificial Sequence: Synthetic oligonucleotide
  Target: LAMA2; (-) strand; PAM type: YTN; PAM sequence: TTT
gatgataagattttatgcct

SEQ ID NO: 263505 - DNA, 20 bp, Artificial Sequence
  Description of Artificial Sequence: Synthetic oligonucleotide
  Target: LAMA2; (-) strand; PAM type: YTN; PAM sequence: CTT
tgatgataagattttatgcc

SEQ ID NO: 263506 - DNA, 20 bp, Artificial Sequence
  Description of Artificial Sequence: Synthetic oligonucleotide
  Target: LAMA2; (-) strand; PAM type: YTN; PAM sequence: TTG
ctttgatgataagattttat

SEQ ID NO: 263507 - DNA, 20 bp, Artificial Sequence
  Description of Artificial Sequence: Synthetic oligonucleotide
  Target: LAMA2; (-) strand; PAM type: YTN; PAM sequence: CTT
gctttgatgataagatttta

SEQ ID NO: 263508 - DNA, 20 bp, Artificial Sequence
  Description of Artificial Sequence: Synthetic oligonucleotide
  Target: LAMA2; (-) strand; PAM type: YTN; PAM sequence: CTC
ttgctttgatgataagattt

SEQ ID NO: 263509 - DNA, 20 bp, Artificial Sequence
  Description of Artificial Sequence: Synthetic oligonucleotide
  Target: LAMA2; (-) strand; PAM type: YTN; PAM sequence: TTA
gctcttgctttgatgataag

SEQ ID NO: 263510 - DNA, 20 bp, Artificial Sequence
  Description of Artificial Sequence: Synthetic oligonucleotide
  Target: LAMA2; (-) strand; PAM type: YTN; PAM sequence: CTT
agctcttgctttgatgataa

SEQ ID NO: 263511 - DNA, 20 bp, Artificial Sequence
  Description of Artificial Sequence: Synthetic oligonucleotide
  Target: LAMA2; (-) strand; PAM type: YTN; PAM sequence: CTG
cccttagctcttgctttgat

SEQ ID NO: 263512 - DNA, 20 bp, Artificial Sequence
  Description of Artificial Sequence: Synthetic oligonucleotide
  Target: LAMA2; (-) strand; PAM type: YTN; PAM sequence: TTC
aaaactgcccttagctcttg

SEQ ID NO: 263513 - DNA, 20 bp, Artificial Sequence
  Description of Artificial Sequence: Synthetic oligonucleotide
  Target: LAMA2; (-) strand; PAM type: YTN; PAM sequence: TTT
caaaactgcccttagctctt

SEQ ID NO: 263514 - DNA, 20 bp, Artificial Sequence
  Description of Artificial Sequence: Synthetic oligonucleotide
  Target: LAMA2; (-) strand; PAM type: YTN; PAM sequence: TTA
tttcaaaactgcccttagct

SEQ ID NO: 263515 - DNA, 20 bp, Artificial Sequence
  Description of Artificial Sequence: Synthetic oligonucleotide
  Target: LAMA2; (-) strand; PAM type: YTN; PAM sequence: CTG
gaatgggatgtattatttca

SEQ ID NO: 263516 - DNA, 20 bp, Artificial Sequence
  Description of Artificial Sequence: Synthetic oligonucleotide
  Target: LAMA2; (-) strand; PAM type: YTN; PAM sequence: TTA
ctggaatgggatgtattatt

SEQ ID NO: 263517 - DNA, 20 bp, Artificial Sequence
  Description of Artificial Sequence: Synthetic oligonucleotide
  Target: LAMA2; (-) strand; PAM type: YTN; PAM sequence: TTC
atgacccaaagcatatgtta

SEQ ID NO: 263518 - DNA, 20 bp, Artificial Sequence
  Description of Artificial Sequence: Synthetic oligonucleotide
  Target: LAMA2; (-) strand; PAM type: YTN; PAM sequence: TTG
tgtattcatgacccaaagca

SEQ ID NO: 263519 - DNA, 20 bp, Artificial Sequence
  Description of Artificial Sequence: Synthetic oligonucleotide
  Target: LAMA2; (-) strand; PAM type: YTN; PAM sequence: TTT
gtgtattcatgacccaaagc

SEQ ID NO: 263520 - DNA, 20 bp, Artificial Sequence
  Description of Artificial Sequence: Synthetic oligonucleotide
  Target: LAMA2; (-) strand; PAM type: YTN; PAM sequence: CTT
tgtgtattcatgacccaaag

SEQ ID NO: 263521 - DNA, 20 bp, Artificial Sequence
  Description of Artificial Sequence: Synthetic oligonucleotide
  Target: LAMA2; (-) strand; PAM type: YTN; PAM sequence: CTG
ctttgtgtattcatgaccca

SEQ ID NO: 263522 - DNA, 20 bp, Artificial Sequence
  Description of Artificial Sequence: Synthetic oligonucleotide
  Target: LAMA2; (-) strand; PAM type: YTN; PAM sequence: TTG
tagaggaactgctttgtgta

SEQ ID NO: 263523 - DNA, 20 bp, Artificial Sequence
  Description of Artificial Sequence: Synthetic oligonucleotide
  Target: LAMA2; (-) strand; PAM type: YTN; PAM sequence: TTG
taaaaatattgtagaggaac

SEQ ID NO: 263524 - DNA, 20 bp, Artificial Sequence
  Description of Artificial Sequence: Synthetic oligonucleotide
  Target: LAMA2; (-) strand; PAM type: YTN; PAM sequence: TTT
gtaaaaatattgtagaggaa

SEQ ID NO: 263525 - DNA, 20 bp, Artificial Sequence
  Description of Artificial Sequence: Synthetic oligonucleotide
  Target: LAMA2; (-) strand; PAM type: YTN; PAM sequence: TTT
tgtaaaaatattgtagagga

SEQ ID NO: 263526 - DNA, 20 bp, Artificial Sequence
  Description of Artificial Sequence: Synthetic oligonucleotide
  Target: LAMA2; (-) strand; PAM type: YTN; PAM sequence: CTA
tacattttgtaaaaatattg

SEQ ID NO: 263527 - DNA, 20 bp, Artificial Sequence
  Description of Artificial Sequence: Synthetic oligonucleotide
  Target: LAMA2; (-) strand; PAM type: YTN; PAM sequence: CTA
gaatactatacattttgtaa

SEQ ID NO: 263528 - DNA, 20 bp, Artificial Sequence
  Description of Artificial Sequence: Synthetic oligonucleotide
  Target: LAMA2; (-) strand; PAM type: YTN; PAM sequence: CTC
tagaatactatacattttgt

SEQ ID NO: 263529 - DNA, 20 bp, Artificial Sequence
  Description of Artificial Sequence: Synthetic oligonucleotide
  Target: LAMA2; (-) strand; PAM type: YTN; PAM sequence: CTG
tagatgcagatgtctctaga

SEQ ID NO: 263530 - DNA, 20 bp, Artificial Sequence
  Description of Artificial Sequence: Synthetic oligonucleotide
  Target: LAMA2; (-) strand; PAM type: YTN; PAM sequence: TTG
tggataaaaacatgaaataa

SEQ ID NO: 263531 - DNA, 20 bp, Artificial Sequence
  Description of Artificial Sequence: Synthetic oligonucleotide
  Target: LAMA2; (-) strand; PAM type: YTN; PAM sequence: TTG
caaccatattgtggataaaa

SEQ ID NO: 263532 - DNA, 20 bp, Artificial Sequence
  Description of Artificial Sequence: Synthetic oligonucleotide
  Target: LAMA2; (-) strand; PAM type: YTN; PAM sequence: CTT
gcaaccatattgtggataaa

SEQ ID NO: 263533 - DNA, 20 bp, Artificial Sequence
  Description of Artificial Sequence: Synthetic oligonucleotide
  Target: LAMA2; (-) strand; PAM type: YTN; PAM sequence: TTA
cttgcaaccatattgtggat

SEQ ID NO: 263534 - DNA, 20 bp, Artificial Sequence
  Description of Artificial Sequence: Synthetic oligonucleotide
  Target: LAMA2; (-) strand; PAM type: YTN; PAM sequence: TTT
acttgcaaccatattgtgga

SEQ ID NO: 263535 - DNA, 20 bp, Artificial Sequence
  Description of Artificial Sequence: Synthetic oligonucleotide
  Target: LAMA2; (-) strand; PAM type: YTN; PAM sequence: TTG
tttacttgcaaccatattgt

SEQ ID NO: 263536 - DNA, 20 bp, Artificial Sequence
  Description of Artificial Sequence: Synthetic oligonucleotide
  Target: LAMA2; (-) strand; PAM type: YTN; PAM sequence: TTT
gtttacttgcaaccatattg

SEQ ID NO: 263537 - DNA, 20 bp, Artificial Sequence
  Description of Artificial Sequence: Synthetic oligonucleotide
  Target: LAMA2; (-) strand; PAM type: YTN; PAM sequence: TTT
tgtttacttgcaaccatatt

SEQ ID NO: 263538 - DNA, 20 bp, Artificial Sequence
  Description of Artificial Sequence: Synthetic oligonucleotide
  Target: LAMA2; (-) strand; PAM type: YTN; PAM sequence: TTA
attttgtttacttgcaacca

SEQ ID NO: 263539 - DNA, 20 bp, Artificial Sequence
  Description of Artificial Sequence: Synthetic oligonucleotide
  Target: LAMA2; (-) strand; PAM type: YTN; PAM sequence: CTT
aattttgtttacttgcaacc

SEQ ID NO: 263540 - DNA, 20 bp, Artificial Sequence
  Description of Artificial Sequence: Synthetic oligonucleotide
  Target: LAMA2; (-) strand; PAM type: YTN; PAM sequence: CTG
atacttaattttgtttactt

SEQ ID NO: 263541 - DNA, 20 bp, Artificial Sequence
  Description of Artificial Sequence: Synthetic oligonucleotide
  Target: LAMA2; (-) strand; PAM type: YTN; PAM sequence: TTA
gcagtaactgatacttaatt

SEQ ID NO: 263542 - DNA, 20 bp, Artificial Sequence
  Description of Artificial Sequence: Synthetic oligonucleotide
  Target: LAMA2; (-) strand; PAM type: YTN; PAM sequence: TTT
agcagtaactgatacttaat

SEQ ID NO: 263543 - DNA, 20 bp, Artificial Sequence
  Description of Artificial Sequence: Synthetic oligonucleotide
  Target: LAMA2; (-) strand; PAM type: YTN; PAM sequence: TTT
tagcagtaactgatacttaa

SEQ ID NO: 263544 - DNA, 20 bp, Artificial Sequence
  Description of Artificial Sequence: Synthetic oligonucleotide
  Target: LAMA2; (-) strand; PAM type: YTN; PAM sequence: CTA
tattttagcagtaactgata

SEQ ID NO: 263545 - DNA, 20 bp, Artificial Sequence
  Description of Artificial Sequence: Synthetic oligonucleotide
  Target: LAMA2; (-) strand; PAM type: YTN; PAM sequence: CTG
gctatattttagcagtaact

SEQ ID NO: 263546 - DNA, 20 bp, Artificial Sequence
  Description of Artificial Sequence: Synthetic oligonucleotide
  Target: LAMA2; (-) strand; PAM type: YTN; PAM sequence: TTA
caactggctatattttagca

SEQ ID NO: 263547 - DNA, 20 bp, Artificial Sequence
  Description of Artificial Sequence: Synthetic oligonucleotide
  Target: LAMA2; (-) strand; PAM type: YTN; PAM sequence: TTT
acaactggctatattttagc

SEQ ID NO: 263548 - DNA, 20 bp, Artificial Sequence
  Description of Artificial Sequence: Synthetic oligonucleotide
  Target: LAMA2; (-) strand; PAM type: YTN; PAM sequence: CTT
tacaactggctatattttag

SEQ ID NO: 263549 - DNA, 20 bp, Artificial Sequence
  Description of Artificial Sequence: Synthetic oligonucleotide
  Target: LAMA2; (-) strand; PAM type: YTN; PAM sequence: CTA
agagtctttacaactggcta

SEQ ID NO: 263550 - DNA, 20 bp, Artificial Sequence
  Description of Artificial Sequence: Synthetic oligonucleotide
  Target: LAMA2; (-) strand; PAM type: YTN; PAM sequence: CTG
tcataacagtgcaggtaaca

SEQ ID NO: 263551 - DNA, 20 bp, Artificial Sequence
  Description of Artificial Sequence: Synthetic oligonucleotide
  Target: LAMA2; (-) strand; PAM type: YTN; PAM sequence: CTG
cactgtcataacagtgcagg

SEQ ID NO: 263552 - DNA, 20 bp, Artificial Sequence
  Description of Artificial Sequence: Synthetic oligonucleotide
  Target: LAMA2; (-) strand; PAM type: YTN; PAM sequence: TTA
atgaccaggcctgcactgtc

SEQ ID NO: 263553 - DNA, 20 bp, Artificial Sequence
  Description of Artificial Sequence: Synthetic oligonucleotide
  Target: LAMA2; (-) strand; PAM type: YTN; PAM sequence: TTT
aatgaccaggcctgcactgt

SEQ ID NO: 263554 - DNA, 20 bp, Artificial Sequence
  Description of Artificial Sequence: Synthetic oligonucleotide
  Target: LAMA2; (-) strand; PAM type: YTN; PAM sequence: TTT
taatgaccaggcctgcactg

SEQ ID NO: 263555 - DNA, 20 bp, Artificial Sequence
  Description of Artificial Sequence: Synthetic oligonucleotide
  Target: LAMA2; (-) strand; PAM type: YTN; PAM sequence: TTT
ttaatgaccaggcctgcact

SEQ ID NO: 263556 - DNA, 20 bp, Artificial Sequence
  Description of Artificial Sequence: Synthetic oligonucleotide
  Target: LAMA2; (-) strand; PAM type: YTN; PAM sequence: CTA
acatttttaatgaccaggcc

SEQ ID NO: 263557 - DNA, 20 bp, Artificial Sequence
  Description of Artificial Sequence: Synthetic oligonucleotide
  Target: LAMA2; (-) strand; PAM type: YTN; PAM sequence: CTA
aaactaacatttttaatgac

SEQ ID NO: 263558 - DNA, 20 bp, Artificial Sequence
  Description of Artificial Sequence: Synthetic oligonucleotide
  Target: LAMA2; (-) strand; PAM type: YTN; PAM sequence: TTC
taaaactaacatttttaatg

SEQ ID NO: 263559 - DNA, 20 bp, Artificial Sequence
  Description of Artificial Sequence: Synthetic oligonucleotide
  Target: LAMA2; (-) strand; PAM type: YTN; PAM sequence: TTT
ctaaaactaacatttttaat

SEQ ID NO: 263560 - DNA, 20 bp, Artificial Sequence
  Description of Artificial Sequence: Synthetic oligonucleotide
  Target: LAMA2; (-) strand; PAM type: YTN; PAM sequence: TTA
ggcatttctaaaactaacat

SEQ ID NO: 263561 - DNA, 20 bp, Artificial Sequence
  Description of Artificial Sequence: Synthetic oligonucleotide
  Target: LAMA2; (-) strand; PAM type: YTN; PAM sequence: TTA
taataattaggcatttctaa

SEQ ID NO: 263562 - DNA, 20 bp, Artificial Sequence
  Description of Artificial Sequence: Synthetic oligonucleotide
  Target: LAMA2; (-) strand; PAM type: YTN; PAM sequence: CTG
caaatagtaaattataataa

SEQ ID NO: 263563 - DNA, 20 bp, Artificial Sequence
  Description of Artificial Sequence: Synthetic oligonucleotide
  Target: LAMA2; (-) strand; PAM type: YTN; PAM sequence: TTC
tgcaaatagtaaattataat

SEQ ID NO: 263564 - DNA, 20 bp, Artificial Sequence
  Description of Artificial Sequence: Synthetic oligonucleotide
  Target: LAMA2; (-) strand; PAM type: YTN; PAM sequence: CTT
ctgcaaatagtaaattataa

SEQ ID NO: 263565 - DNA, 20 bp, Artificial Sequence
  Description of Artificial Sequence: Synthetic oligonucleotide
  Target: LAMA2; (-) strand; PAM type: YTN; PAM sequence: CTG
gccccttctgcaaatagtaa

SEQ ID NO: 263566 - DNA, 20 bp, Artificial Sequence
  Description of Artificial Sequence: Synthetic oligonucleotide
  Target: LAMA2; (-) strand; PAM type: YTN; PAM sequence: CTG
aaggtaatctggccccttct

SEQ ID NO: 263567 - DNA, 20 bp, Artificial Sequence
  Description of Artificial Sequence: Synthetic oligonucleotide
  Target: LAMA2; (-) strand; PAM type: YTN; PAM sequence: CTC
ctgaaggtaatctggcccct

SEQ ID NO: 263568 - DNA, 20 bp, Artificial Sequence
  Description of Artificial Sequence: Synthetic oligonucleotide
  Target: LAMA2; (-) strand; PAM type: YTN; PAM sequence: TTG
actcctgaaggtaatctggc

SEQ ID NO: 263569 - DNA, 20 bp, Artificial Sequence
  Description of Artificial Sequence: Synthetic oligonucleotide
  Target: LAMA2; (-) strand; PAM type: YTN; PAM sequence: TTT
gactcctgaaggtaatctgg

SEQ ID NO: 263570 - DNA, 20 bp, Artificial Sequence
  Description of Artificial Sequence: Synthetic oligonucleotide
  Target: LAMA2; (-) strand; PAM type: YTN; PAM sequence: TTG
tttgactcctgaaggtaatc

SEQ ID NO: 263571 - DNA, 20 bp, Artificial Sequence
  Description of Artificial Sequence: Synthetic oligonucleotide
  Target: LAMA2; (-) strand; PAM type: YTN; PAM sequence: TTT
gtttgactcctgaaggtaat

SEQ ID NO: 263572 - DNA, 20 bp, Artificial Sequence
  Description of Artificial Sequence: Synthetic oligonucleotide
  Target: LAMA2; (-) strand; PAM type: YTN; PAM sequence: CTT
tgtttgactcctgaaggtaa

SEQ ID NO: 263573 - DNA, 20 bp, Artificial Sequence
  Description of Artificial Sequence: Synthetic oligonucleotide
  Target: LAMA2; (-) strand; PAM type: YTN; PAM sequence: CTG
gtgaggaaatggtgtccttt

SEQ ID NO: 263574 - DNA, 20 bp, Artificial Sequence
  Description of Artificial Sequence: Synthetic oligonucleotide
  Target: LAMA2; (-) strand; PAM type: YTN; PAM sequence: CTC
caacaccaagaaatctggtg

SEQ ID NO: 263575 - DNA, 20 bp, Artificial Sequence
  Description of Artificial Sequence: Synthetic oligonucleotide
  Target: LAMA2; (-) strand; PAM type: YTN; PAM sequence: CTC
aatggctccaacaccaagaa

SEQ ID NO: 263576 - DNA, 20 bp, Artificial Sequence
  Description of Artificial Sequence: Synthetic oligonucleotide
  Target: LAMA2; (-) strand; PAM type: YTN; PAM sequence: TTA
aataaagtataacaaactca

SEQ ID NO: 263577 - DNA, 20 bp, Artificial Sequence
  Description of Artificial Sequence: Synthetic oligonucleotide
  Target: LAMA2; (-) strand; PAM type: YTN; PAM sequence: CTC
aaagacaggttaaataaagt

SEQ ID NO: 263578 - DNA, 20 bp, Artificial Sequence
  Description of Artificial Sequence: Synthetic oligonucleotide
  Target: LAMA2; (-) strand; PAM type: YTN; PAM sequence: TTA
atgtcactcaaagacaggtt

SEQ ID NO: 263579 - DNA, 20 bp, Artificial Sequence
  Description of Artificial Sequence: Synthetic oligonucleotide
  Target: LAMA2; (-) strand; PAM type: YTN; PAM sequence: TTT
aatgtcactcaaagacaggt

SEQ ID NO: 263580 - DNA, 20 bp, Artificial Sequence
  Description of Artificial Sequence: Synthetic oligonucleotide
  Target: LAMA2; (-) strand; PAM type: YTN; PAM sequence: CTA
tatttaatgtcactcaaaga

SEQ ID NO: 263581 - DNA, 20 bp, Artificial Sequence
  Description of Artificial Sequence: Synthetic oligonucleotide
  Target: LAMA2; (-) strand; PAM type: YTN; PAM sequence: TTG
ggcaataacctatatttaat

SEQ ID NO: 263582 - DNA, 20 bp, Artificial Sequence
  Description of Artificial Sequence: Synthetic oligonucleotide
  Target: LAMA2; (-) strand; PAM type: YTN; PAM sequence: TTT
gggcaataacctatatttaa

SEQ ID NO: 263583 - DNA, 20 bp, Artificial Sequence
  Description of Artificial Sequence: Synthetic oligonucleotide
  Target: LAMA2; (-) strand; PAM type: YTN; PAM sequence: TTA
ggtcagtttgggcaataacc

SEQ ID NO: 263584 - DNA, 20 bp, Artificial Sequence
  Description of Artificial Sequence: Synthetic oligonucleotide
  Target: LAMA2; (-) strand; PAM type: YTN; PAM sequence: TTT
aggtcagtttgggcaataac

SEQ ID NO: 263585 - DNA, 20 bp, Artificial Sequence
  Description of Artificial Sequence: Synthetic oligonucleotide
  Target: LAMA2; (-) strand; PAM type: YTN; PAM sequence: CTC
agtttaggtcagtttgggca

SEQ ID NO: 263586 - DNA, 20 bp, Artificial Sequence
  Description of Artificial Sequence: Synthetic oligonucleotide
  Target: LAMA2; (-) strand; PAM type: YTN; PAM sequence: CTG
cataaagctcagtttaggtc

SEQ ID NO: 263587 - DNA, 20 bp, Artificial Sequence
  Description of Artificial Sequence: Synthetic oligonucleotide
  Target: LAMA2; (-) strand; PAM type: YTN; PAM sequence: TTC
aactgcataaagctcagttt

SEQ ID NO: 263588 - DNA, 20 bp, Artificial Sequence
  Description of Artificial Sequence: Synthetic oligonucleotide
  Target: LAMA2; (-) strand; PAM type: YTN; PAM sequence: TTT
caactgcataaagctcagtt

SEQ ID NO: 263589 - DNA, 20 bp, Artificial Sequence
  Description of Artificial Sequence: Synthetic oligonucleotide
  Target: LAMA2; (-) strand; PAM type: YTN; PAM sequence: CTT
tcaactgcataaagctcagt

SEQ ID NO: 263590 - DNA, 20 bp, Artificial Sequence
  Description of Artificial Sequence: Synthetic oligonucleotide
  Target: LAMA2; (-) strand; PAM type: YTN; PAM sequence: CTG
catataacctttcaactgca

SEQ ID NO: 263591 - DNA, 20 bp, Artificial Sequence
  Description of Artificial Sequence: Synthetic oligonucleotide
  Target: LAMA2; (-) strand; PAM type: YTN; PAM sequence: TTA
agaaagaaagtcataagtaa

SEQ ID NO: 263592 - DNA, 20 bp, Artificial Sequence
  Description of Artificial Sequence: Synthetic oligonucleotide
  Target: LAMA2; (-) strand; PAM type: YTN; PAM sequence: TTT
aagaaagaaagtcataagta

SEQ ID NO: 263593 - DNA, 20 bp, Artificial Sequence
  Description of Artificial Sequence: Synthetic oligonucleotide
  Target: LAMA2; (-) strand; PAM type: YTN; PAM sequence: TTC
catatttaagaaagaaagtc

SEQ ID NO: 263594 - DNA, 20 bp, Artificial Sequence
  Description of Artificial Sequence: Synthetic oligonucleotide
  Target: LAMA2; (-) strand; PAM type: YTN; PAM sequence: TTT
ccatatttaagaaagaaagt

SEQ ID NO: 263595 - DNA, 20 bp, Artificial Sequence
  Description of Artificial Sequence: Synthetic oligonucleotide
  Target: LAMA2; (-) strand; PAM type: YTN; PAM sequence: TTT
tccatatttaagaaagaaag

SEQ ID NO: 263596 - DNA, 20 bp, Artificial Sequence
  Description of Artificial Sequence: Synthetic oligonucleotide
  Target: LAMA2; (-) strand; PAM type: YTN; PAM sequence: CTG
aatattttccatatttaaga

SEQ ID NO: 263597 - DNA, 20 bp, Artificial Sequence
  Description of Artificial Sequence: Synthetic oligonucleotide
  Target: LAMA2; (-) strand; PAM type: YTN; PAM sequence: CTG
cacacgcaaggctgaatatt

SEQ ID NO: 263598 - DNA, 20 bp, Artificial Sequence
  Description of Artificial Sequence: Synthetic oligonucleotide
  Target: LAMA2; (-) strand; PAM type: YTN; PAM sequence: CTG
cagagagctgcacacgcaag

SEQ ID NO: 263599 - DNA, 20 bp, Artificial Sequence
  Description of Artificial Sequence: Synthetic oligonucleotide
  Target: LAMA2; (-) strand; PAM type: YTN; PAM sequence: TTA
ctgcagagagctgcacacgc

SEQ ID NO: 263600 - DNA, 20 bp, Artificial Sequence
  Description of Artificial Sequence: Synthetic oligonucleotide
  Target: LAMA2; (-) strand; PAM type: YTN; PAM sequence: TTC
cgtattactgcagagagctg

SEQ ID NO: 263601 - DNA, 20 bp, Artificial Sequence
  Description of Artificial Sequence: Synthetic oligonucleotide
  Target: LAMA2; (-) strand; PAM type: YTN; PAM sequence: TTT
ccgtattactgcagagagct

SEQ ID NO: 263602 - DNA, 20 bp, Artificial Sequence
  Description of Artificial Sequence: Synthetic oligonucleotide
  Target: LAMA2; (-) strand; PAM type: YTN; PAM sequence: CTG
atttccgtattactgcagag

SEQ ID NO: 263603 - DNA, 20 bp, Artificial Sequence
  Description of Artificial Sequence: Synthetic oligonucleotide
  Target: LAMA2; (-) strand; PAM type: YTN; PAM sequence: TTC
tgatttccgtattactgcag

SEQ ID NO: 263604 - DNA, 20 bp, Artificial Sequence
  Description of Artificial Sequence: Synthetic oligonucleotide
  Target: LAMA2; (-) strand; PAM type: YTN; PAM sequence: TTT
ctgatttccgtattactgca

SEQ ID NO: 263605 - DNA, 20 bp, Artificial Sequence
  Description of Artificial Sequence: Synthetic oligonucleotide
  Target: LAMA2; (-) strand; PAM type: YTN; PAM sequence: TTG
acaaatttctgatttccgta

SEQ ID NO: 263606 - DNA, 20 bp, Artificial Sequence
  Description of Artificial Sequence: Synthetic oligonucleotide
  Target: LAMA2; (-) strand; PAM type: YTN; PAM sequence: CTA
gagatcattgacaaatttct

SEQ ID NO: 263607 - DNA, 20 bp, Artificial Sequence
  Description of Artificial Sequence: Synthetic oligonucleotide
  Target: LAMA2; (-) strand; PAM type: YTN; PAM sequence: CTA
tcaaaacatgacctagagat

SEQ ID NO: 263608 - DNA, 20 bp, Artificial Sequence
  Description of Artificial Sequence: Synthetic oligonucleotide
  Target: LAMA2; (-) strand; PAM type: YTN; PAM sequence: CTG
aaactatcaaaacatgacct

SEQ ID NO: 263609 - DNA, 20 bp, Artificial Sequence
  Description of Artificial Sequence: Synthetic oligonucleotide
  Target: LAMA2; (-) strand; PAM type: YTN; PAM sequence: TTA
aaatatgggaagacaggata

SEQ ID NO: 263610 - DNA, 20 bp, Artificial Sequence
  Description of Artificial Sequence: Synthetic oligonucleotide
  Target: LAMA2; (-) strand; PAM type: YTN; PAM sequence: TTT
aaaatatgggaagacaggat

SEQ ID NO: 263611 - DNA, 20 bp, Artificial Sequence
  Description of Artificial Sequence: Synthetic oligonucleotide
  Target: LAMA2; (-) strand; PAM type: YTN; PAM sequence: TTT
taaaatatgggaagacagga

SEQ ID NO: 263612 - DNA, 20 bp, Artificial Sequence
  Description of Artificial Sequence: Synthetic oligonucleotide
  Target: LAMA2; (-) strand; PAM type: YTN; PAM sequence: CTT
ttaaaatatgggaagacagg

SEQ ID NO: 263613 - DNA, 20 bp, Artificial Sequence
  Description of Artificial Sequence: Synthetic oligonucleotide
  Target: LAMA2; (-) strand; PAM type: YTN; PAM sequence: CTA
aagcccttttaaaatatggg

SEQ ID NO: 263614 - DNA, 20 bp, Artificial Sequence
  Description of Artificial Sequence: Synthetic oligonucleotide
  Target: LAMA2; (-) strand; PAM type: YTN; PAM sequence: CTG
caagcctaaagcccttttaa

SEQ ID NO: 263615 - DNA, 20 bp, Artificial Sequence
  Description of Artificial Sequence: Synthetic oligonucleotide
  Target: LAMA2; (-) strand; PAM type: YTN; PAM sequence: TTC
aactgcaagcctaaagccct

SEQ ID NO: 263616 - DNA, 20 bp, Artificial Sequence
  Description of Artificial Sequence: Synthetic oligonucleotide
  Target: LAMA2; (-) strand; PAM type: YTN; PAM sequence: CTG
agtggcgatccaatagacac

SEQ ID NO: 263617 - DNA, 20 bp, Artificial Sequence
  Description of Artificial Sequence: Synthetic oligonucleotide
  Target: LAMA2; (-) strand; PAM type: YTN; PAM sequence: TTC
tgagtggcgatccaatagac

SEQ ID NO: 263618 - DNA, 20 bp, Artificial Sequence
  Description of Artificial Sequence: Synthetic oligonucleotide
  Target: LAMA2; (-) strand; PAM type: YTN; PAM sequence: CTT
ctgagtggcgatccaataga

SEQ ID NO: 263619 - DNA, 20 bp, Artificial Sequence
  Description of Artificial Sequence: Synthetic oligonucleotide
  Target: LAMA2; (-) strand; PAM type: YTN; PAM sequence: TTA
atagccacaagggacagctt

SEQ ID NO: 263620 - DNA, 20 bp, Artificial Sequence
  Description of Artificial Sequence: Synthetic oligonucleotide
  Target: LAMA2; (-) strand; PAM type: YTN; PAM sequence: TTT
aatagccacaagggacagct

SEQ ID NO: 263621 - DNA, 20 bp, Artificial Sequence
  Description of Artificial Sequence: Synthetic oligonucleotide
  Target: LAMA2; (-) strand; PAM type: YTN; PAM sequence: TTT
taatagccacaagggacagc

SEQ ID NO: 263622 - DNA, 20 bp, Artificial Sequence
  Description of Artificial Sequence: Synthetic oligonucleotide
  Target: LAMA2; (-) strand; PAM type: YTN; PAM sequence: TTA
aaaaaatcagttttaatagc

SEQ ID NO: 263623 - DNA, 20 bp, Artificial Sequence
  Description of Artificial Sequence: Synthetic oligonucleotide
  Target: LAMA2; (-) strand; PAM type: YTN; PAM sequence: TTT
aaaaaaatcagttttaatag

SEQ ID NO: 263624 - DNA, 20 bp, Artificial Sequence
  Description of Artificial Sequence: Synthetic oligonucleotide
  Target: LAMA2; (-) strand; PAM type: YTN; PAM sequence: TTG
gagatttaaaaaaatcagtt

SEQ ID NO: 263625 - DNA, 20 bp, Artificial Sequence
  Description of Artificial Sequence: Synthetic oligonucleotide
  Target: LAMA2; (-) strand; PAM type: YTN; PAM sequence: TTT
ggagatttaaaaaaatcagt

SEQ ID NO: 263626 - DNA, 20 bp, Artificial Sequence
  Description of Artificial Sequence: Synthetic oligonucleotide
  Target: LAMA2; (-) strand; PAM type: YTN; PAM sequence: TTA
tttggagatttaaaaaaatc

SEQ ID NO: 263627 - DNA, 20 bp, Artificial Sequence
  Description of Artificial Sequence: Synthetic oligonucleotide
  Target: LAMA2; (-) strand; PAM type: YTN; PAM sequence: TTG
acgataggtataaattattt

SEQ ID NO: 263628 - DNA, 20 bp, Artificial Sequence
  Description of Artificial Sequence: Synthetic oligonucleotide
  Target: LAMA2; (-) strand; PAM type: YTN; PAM sequence: TTA
tgtgttgacgataggtataa

SEQ ID NO: 263629 - DNA, 20 bp, Artificial Sequence
  Description of Artificial Sequence: Synthetic oligonucleotide
  Target: LAMA2; (-) strand; PAM type: YTN; PAM sequence: TTT
atgtgttgacgataggtata

SEQ ID NO: 263630 - DNA, 20 bp, Artificial Sequence
  Description of Artificial Sequence: Synthetic oligonucleotide
  Target: LAMA2; (-) strand; PAM type: YTN; PAM sequence: CTT
tatgtgttgacgataggtat

SEQ ID NO: 263631 - DNA, 20 bp, Artificial Sequence
  Description of Artificial Sequence: Synthetic oligonucleotide
  Target: LAMA2; (-) strand; PAM type: YTN; PAM sequence: TTG
ggctttatgtgttgacgata

SEQ ID NO: 263632 - DNA, 20 bp, Artificial Sequence
  Description of Artificial Sequence: Synthetic oligonucleotide
  Target: LAMA2; (-) strand; PAM type: YTN; PAM sequence: TTT
gggctttatgtgttgacgat

SEQ ID NO: 263633 - DNA, 20 bp, Artificial Sequence
  Description of Artificial Sequence: Synthetic oligonucleotide
  Target: LAMA2; (-) strand; PAM type: YTN; PAM sequence: TTT
tgggctttatgtgttgacga

SEQ ID NO: 263634 - DNA, 20 bp, Artificial Sequence
  Description of Artificial Sequence: Synthetic oligonucleotide
  Target: LAMA2; (-) strand; PAM type: YTN; PAM sequence: CTT
ttgggctttatgtgttgacg

SEQ ID NO: 263635 - DNA, 20 bp, Artificial Sequence
  Description of Artificial Sequence: Synthetic oligonucleotide
  Target: LAMA2; (-) strand; PAM type: YTN; PAM sequence: TTG
ccttttgggctttatgtgtt

SEQ ID NO: 263636 - DNA, 20 bp, Artificial Sequence
  Description of Artificial Sequence: Synthetic oligonucleotide
  Target: LAMA2; (-) strand; PAM type: YTN; PAM sequence: TTT
gccttttgggctttatgtgt

SEQ ID NO: 263637 - DNA, 20 bp, Artificial Sequence
  Description of Artificial Sequence: Synthetic oligonucleotide
  Target: LAMA2; (-) strand; PAM type: YTN; PAM sequence: TTT
tgccttttgggctttatgtg

SEQ ID NO: 263638 - DNA, 20 bp, Artificial Sequence
  Description of Artificial Sequence: Synthetic oligonucleotide
  Target: LAMA2; (-) strand; PAM type: YTN; PAM sequence: TTC
acattttgccttttgggctt

SEQ ID NO: 263639 - DNA, 20 bp, Artificial Sequence
  Description of Artificial Sequence: Synthetic oligonucleotide
  Target: LAMA2; (-) strand; PAM type: YTN; PAM sequence: TTT
cacattttgccttttgggct

SEQ ID NO: 263640 - DNA, 20 bp, Artificial Sequence
  Description of Artificial Sequence: Synthetic oligonucleotide
  Target: LAMA2; (-) strand; PAM type: YTN; PAM sequence: TTT
tcacattttgccttttgggc

SEQ ID NO: 263641 - DNA, 20 bp, Artificial Sequence
  Description of Artificial Sequence: Synthetic oligonucleotide
  Target: LAMA2; (-) strand; PAM type: YTN; PAM sequence: CTA
ttttcacattttgccttttg

SEQ ID NO: 263642 - DNA, 20 bp, Artificial Sequence
  Description of Artificial Sequence: Synthetic oligonucleotide
  Target: LAMA2; (-) strand; PAM type: YTN; PAM sequence: CTA
agactattttcacattttgc

SEQ ID NO: 263643 - DNA, 20 bp, Artificial Sequence
  Description of Artificial Sequence: Synthetic oligonucleotide
  Target: LAMA2; (-) strand; PAM type: YTN; PAM sequence: CTG
gtgtgcaacagaagtgataa

SEQ ID NO: 263644 - DNA, 20 bp, Artificial Sequence
  Description of Artificial Sequence: Synthetic oligonucleotide
  Target: LAMA2; (-) strand; PAM type: YTN; PAM sequence: CTC
tggtgtgcaacagaagtgat

SEQ ID NO: 263645 - DNA, 20 bp, Artificial Sequence
  Description of Artificial Sequence: Synthetic oligonucleotide
  Target: LAMA2; (-) strand; PAM type: YTN; PAM sequence: TTG
ggtctctggtgtgcaacaga

SEQ ID NO: 263646 - DNA, 20 bp, Artificial Sequence
  Description of Artificial Sequence: Synthetic oligonucleotide
  Target: LAMA2; (-) strand; PAM type: YTN; PAM sequence: TTT
gggtctctggtgtgcaacag

SEQ ID NO: 263647 - DNA, 20 bp, Artificial Sequence
  Description of Artificial Sequence: Synthetic oligonucleotide
  Target: LAMA2; (-) strand; PAM type: YTN; PAM sequence: CTT
tgggtctctggtgtgcaaca

SEQ ID NO: 263648 - DNA, 20 bp, Artificial Sequence
  Description of Artificial Sequence: Synthetic oligonucleotide
  Target: LAMA2; (-) strand; PAM type: YTN; PAM sequence: CTG
tacatgaaaacagagacttt

SEQ ID NO: 263649 - DNA, 20 bp, Artificial Sequence
  Description of Artificial Sequence: Synthetic oligonucleotide
  Target: LAMA2; (-) strand; PAM type: YTN; PAM sequence: TTG
tctgtacatgaaaacagaga

SEQ ID NO: 263650 - DNA, 20 bp, Artificial Sequence
  Description of Artificial Sequence: Synthetic oligonucleotide
  Target: LAMA2; (-) strand; PAM type: YTN; PAM sequence: CTT
gtctgtacatgaaaacagag

SEQ ID NO: 263651 - DNA, 20 bp, Artificial Sequence
  Description of Artificial Sequence: Synthetic oligonucleotide
  Target: LAMA2; (-) strand; PAM type: YTN; PAM sequence: CTC
aacacttgtctgtacatgaa

SEQ ID NO: 263652 - DNA, 20 bp, Artificial Sequence
  Description of Artificial Sequence: Synthetic oligonucleotide
  Target: LAMA2; (-) strand; PAM type: YTN; PAM sequence: TTC
ctcaacacttgtctgtacat

SEQ ID NO: 263653 - DNA, 20 bp, Artificial Sequence
  Description of Artificial Sequence: Synthetic oligonucleotide
  Target: LAMA2; (-) strand; PAM type: YTN; PAM sequence: TTA
cccatgccatgttcctcaac

SEQ ID NO: 263654 - DNA, 20 bp, Artificial Sequence
  Description of Artificial Sequence: Synthetic oligonucleotide
  Target: LAMA2; (-) strand; PAM type: YTN; PAM sequence: CTT
acccatgccatgttcctcaa

SEQ ID NO: 263655 - DNA, 20 bp, Artificial Sequence
  Description of Artificial Sequence: Synthetic oligonucleotide
  Target: LAMA2; (-) strand; PAM type: YTN; PAM sequence: TTA
taacataacttacccatgcc

SEQ ID NO: 263656 - DNA, 20 bp, Artificial Sequence
  Description of Artificial Sequence: Synthetic oligonucleotide
  Target: LAMA2; (-) strand; PAM type: YTN; PAM sequence: TTG
taaacaaaattataacataa

SEQ ID NO: 263657 - DNA, 20 bp, Artificial Sequence
  Description of Artificial Sequence: Synthetic oligonucleotide
  Target: LAMA2; (-) strand; PAM type: YTN; PAM sequence: TTT
gtaaacaaaattataacata

SEQ ID NO: 263658 - DNA, 20 bp, Artificial Sequence
  Description of Artificial Sequence: Synthetic oligonucleotide
  Target: LAMA2; (-) strand; PAM type: YTN; PAM sequence: TTA
tatttgtaaacaaaattata

SEQ ID NO: 263659 - DNA, 20 bp, Artificial Sequence
  Description of Artificial Sequence: Synthetic oligonucleotide
  Target: LAMA2; (-) strand; PAM type: YTN; PAM sequence: TTA
ggttatatttgtaaacaaaa

SEQ ID NO: 263660 - DNA, 20 bp, Artificial Sequence
  Description of Artificial Sequence: Synthetic oligonucleotide
  Target: LAMA2; (-) strand; PAM type: YTN; PAM sequence: TTT
aggttatatttgtaaacaaa

SEQ ID NO: 263661 - DNA, 20 bp, Artificial Sequence
  Description of Artificial Sequence: Synthetic oligonucleotide
  Target: LAMA2; (-) strand; PAM type: YTN; PAM sequence: TTT
taggttatatttgtaaacaa

SEQ ID NO: 263662 - DNA, 20 bp, Artificial Sequence
  Description of Artificial Sequence: Synthetic oligonucleotide
  Target: LAMA2; (-) strand; PAM type: YTN; PAM sequence: TTG
ttttaggttatatttgtaaa

SEQ ID NO: 263663 - DNA, 20 bp, Artificial Sequence
  Description of Artificial Sequence: Synthetic oligonucleotide
  Target: LAMA2; (-) strand; PAM type: YTN; PAM sequence: CTA
aaaataaagataccatgatt

SEQ ID NO: 263664 - DNA, 20 bp, Artificial Sequence
  Description of Artificial Sequence: Synthetic oligonucleotide
  Target: LAMA2; (-) strand; PAM type: YTN; PAM sequence: CTG
gaaataaactaaaaataaag

SEQ ID NO: 263665 - DNA, 20 bp, Artificial Sequence
  Description of Artificial Sequence: Synthetic oligonucleotide
  Target: LAMA2; (-) strand; PAM type: YTN; PAM sequence: TTG
ctggaaataaactaaaaata

SEQ ID NO: 263666 - DNA, 20 bp, Artificial Sequence
  Description of Artificial Sequence: Synthetic oligonucleotide
  Target: LAMA2; (-) strand; PAM type: YTN; PAM sequence: TTT
gctggaaataaactaaaaat

SEQ ID NO: 263667 - DNA, 20 bp, Artificial Sequence
  Description of Artificial Sequence: Synthetic oligonucleotide
  Target: LAMA2; (-) strand; PAM type: YTN; PAM sequence: CTA
tgtttgctggaaataaacta

SEQ ID NO: 263668 - DNA, 20 bp, Artificial Sequence
  Description of Artificial Sequence: Synthetic oligonucleotide
  Target: LAMA2; (-) strand; PAM type: YTN; PAM sequence: TTC
tatgtttgctggaaataaac

SEQ ID NO: 263669 - DNA, 20 bp, Artificial Sequence
  Description of Artificial Sequence: Synthetic oligonucleotide
  Target: LAMA2; (-) strand; PAM type: YTN; PAM sequence: TTT
ctatgtttgctggaaataaa

SEQ ID NO: 263670 - DNA, 20 bp, Artificial Sequence
  Description of Artificial Sequence: Synthetic oligonucleotide
  Target: LAMA2; (-) strand; PAM type: YTN; PAM sequence: TTT
tctatgtttgctggaaataa

SEQ ID NO: 263671 - DNA, 20 bp, Artificial Sequence
  Description of Artificial Sequence: Synthetic oligonucleotide
  Target: LAMA2; (-) strand; PAM type: YTN; PAM sequence: TTT
ttctatgtttgctggaaata

SEQ ID NO: 263672 - DNA, 20 bp, Artificial Sequence
  Description of Artificial Sequence: Synthetic oligonucleotide
  Target: LAMA2; (-) strand; PAM type: YTN; PAM sequence: TTT
tttctatgtttgctggaaat

SEQ ID NO: 263673 - DNA, 20 bp, Artificial Sequence
  Description of Artificial Sequence: Synthetic oligonucleotide
  Target: LAMA2; (-) strand; PAM type: YTN; PAM sequence: CTC
aaatagttttttctatgttt

SEQ ID NO: 263674 - DNA, 20 bp, Artificial Sequence
  Description of Artificial Sequence: Synthetic oligonucleotide
  Target: LAMA2; (-) strand; PAM type: YTN; PAM sequence: CTA
tctcaaatagttttttctat

SEQ ID NO: 263675 - DNA, 20 bp, Artificial Sequence
  Description of Artificial Sequence: Synthetic oligonucleotide
  Target: LAMA2; (-) strand; PAM type: YTN; PAM sequence: CTC
tatctcaaatagttttttct

SEQ ID NO: 263676 - DNA, 20 bp, Artificial Sequence
  Description of Artificial Sequence: Synthetic oligonucleotide
  Target: LAMA2; (-) strand; PAM type: YTN; PAM sequence: TTC
tctatctcaaatagtttttt

SEQ ID NO: 263677 - DNA, 20 bp, Artificial Sequence
  Description of Artificial Sequence: Synthetic oligonucleotide
  Target: LAMA2; (-) strand; PAM type: YTN; PAM sequence: TTT
ctctatctcaaatagttttt

SEQ ID NO: 263678 - DNA, 20 bp, Artificial Sequence
  Description of Artificial Sequence: Synthetic oligonucleotide
  Target: LAMA2; (-) strand; PAM type: YTN; PAM sequence: TTG
tcatacataaatcaataggt

SEQ ID NO: 263679 - DNA, 20 bp, Artificial Sequence
  Description of Artificial Sequence: Synthetic oligonucleotide
  Target: LAMA2; (-) strand; PAM type: YTN; PAM sequence: TTA
ataattgtcatacataaatc

SEQ ID NO: 263680 - DNA, 20 bp, Artificial Sequence
  Description of Artificial Sequence: Synthetic oligonucleotide
  Target: LAMA2; (-) strand; PAM type: YTN; PAM sequence: TTT
aataattgtcatacataaat

SEQ ID NO: 263681 - DNA, 20 bp, Artificial Sequence
  Description of Artificial Sequence: Synthetic oligonucleotide
  Target: LAMA2; (-) strand; PAM type: YTN; PAM sequence: TTG
agataaagcatgtttaataa

SEQ ID NO: 263682 - DNA, 20 bp, Artificial Sequence
  Description of Artificial Sequence: Synthetic oligonucleotide
  Target: LAMA2; (-) strand; PAM type: YTN; PAM sequence: CTT
gagataaagcatgtttaata

SEQ ID NO: 263683 - DNA, 20 bp, Artificial Sequence
  Description of Artificial Sequence: Synthetic oligonucleotide
  Target: LAMA2; (-) strand; PAM type: YTN; PAM sequence: TTA
cttgagataaagcatgttta

SEQ ID NO: 263684 - DNA, 20 bp, Artificial Sequence
  Description of Artificial Sequence: Synthetic oligonucleotide
  Target: LAMA2; (-) strand; PAM type: YTN; PAM sequence: CTG
aggattacttgagataaagc

SEQ ID NO: 263685 - DNA, 20 bp, Artificial Sequence
  Description of Artificial Sequence: Synthetic oligonucleotide
  Target: LAMA2; (-) strand; PAM type: YTN; PAM sequence: TTC
atagggtggatctgaggatt

SEQ ID NO: 263686 - DNA, 20 bp, Artificial Sequence
  Description of Artificial Sequence: Synthetic oligonucleotide
  Target: LAMA2; (-) strand; PAM type: YTN; PAM sequence: TTT
catagggtggatctgaggat

SEQ ID NO: 263687 - DNA, 20 bp, Artificial Sequence
  Description of Artificial Sequence: Synthetic oligonucleotide
  Target: LAMA2; (-) strand; PAM type: YTN; PAM sequence: TTT
tcatagggtggatctgagga

SEQ ID NO: 263688 - DNA, 20 bp, Artificial Sequence
  Description of Artificial Sequence: Synthetic oligonucleotide
  Target: LAMA2; (-) strand; PAM type: YTN; PAM sequence: CTT
ttcatagggtggatctgagg

SEQ ID NO: 263689 - DNA, 20 bp, Artificial Sequence
  Description of Artificial Sequence: Synthetic oligonucleotide
  Target: LAMA2; (-) strand; PAM type: YTN; PAM sequence: CTG
cttttcatagggtggatctg

SEQ ID NO: 263690 - DNA, 20 bp, Artificial Sequence
  Description of Artificial Sequence: Synthetic oligonucleotide
  Target: LAMA2; (-) strand; PAM type: YTN; PAM sequence: TTC
tgcttttcatagggtggatc

SEQ ID NO: 263691 - DNA, 20 bp, Artificial Sequence
  Description of Artificial Sequence: Synthetic oligonucleotide
  Target: LAMA2; (-) strand; PAM type: YTN; PAM sequence: CTC
aatcaatggtaggttctgct

SEQ ID NO: 263692 - DNA, 20 bp, Artificial Sequence
  Description of Artificial Sequence: Synthetic oligonucleotide
  Target: LAMA2; (-) strand; PAM type: YTN; PAM sequence: TTA
ggaagtgtacaggagatagt

SEQ ID NO: 263693 - DNA, 20 bp, Artificial Sequence
  Description of Artificial Sequence: Synthetic oligonucleotide
  Target: LAMA2; (-) strand; PAM type: YTN; PAM sequence: CTG
tattaggaagtgtacaggag

SEQ ID NO: 263694 - DNA, 20 bp, Artificial Sequence
  Description of Artificial Sequence: Synthetic oligonucleotide
  Target: LAMA2; (-) strand; PAM type: YTN; PAM sequence: TTG
gtgtaactgtattaggaagt

SEQ ID NO: 263695 - DNA, 20 bp, Artificial Sequence
  Description of Artificial Sequence: Synthetic oligonucleotide
  Target: LAMA2; (-) strand; PAM type: YTN; PAM sequence: TTA
tagtcgatgatgttggtgta

SEQ ID NO: 263696 - DNA, 20 bp, Artificial Sequence
  Description of Artificial Sequence: Synthetic oligonucleotide
  Target: LAMA2; (-) strand; PAM type: YTN; PAM sequence: CTC
acccgtaaaatggggatcat

SEQ ID NO: 263697 - DNA, 20 bp, Artificial Sequence
  Description of Artificial Sequence: Synthetic oligonucleotide
  Target: LAMA2; (-) strand; PAM type: YTN; PAM sequence: CTC
tcacccgtaaaatggggatc

SEQ ID NO: 263698 - DNA, 20 bp, Artificial Sequence
  Description of Artificial Sequence: Synthetic oligonucleotide
  Target: LAMA2; (-) strand; PAM type: YTN; PAM sequence: TTC
tctcacccgtaaaatgggga

SEQ ID NO: 263699 - DNA, 20 bp, Artificial Sequence
  Description of Artificial Sequence: Synthetic oligonucleotide
  Target: LAMA2; (-) strand; PAM type: YTN; PAM sequence: CTC
aattctctcacccgtaaaat

SEQ ID NO: 263700 - DNA, 20 bp, Artificial Sequence
  Description of Artificial Sequence: Synthetic oligonucleotide
  Target: LAMA2; (-) strand; PAM type: YTN; PAM sequence: CTG
tgtaggtgtgtgatcatggg

SEQ ID NO: 263701 - DNA, 20 bp, Artificial Sequence
  Description of Artificial Sequence: Synthetic oligonucleotide
  Target: LAMA2; (-) strand; PAM type: YTN; PAM sequence: TTG
ctgtgtaggtgtgtgatcat

SEQ ID NO: 263702 - DNA, 20 bp, Artificial Sequence
  Description of Artificial Sequence: Synthetic oligonucleotide
  Target: LAMA2; (-) strand; PAM type: YTN; PAM sequence: TTG
aattgctgtgtaggtgtgtg

SEQ ID NO: 263703 - DNA, 20 bp, Artificial Sequence
  Description of Artificial Sequence: Synthetic oligonucleotide
  Target: LAMA2; (-) strand; PAM type: YTN; PAM sequence: TTT
gaattgctgtgtaggtgtgt

SEQ ID NO: 263704 - DNA, 20 bp, Artificial Sequence
  Description of Artificial Sequence: Synthetic oligonucleotide
  Target: LAMA2; (-) strand; PAM type: YTN; PAM sequence: TTG
aggtttgaattgctgtgtag

SEQ ID NO: 263705 - DNA, 20 bp, Artificial Sequence
  Description of Artificial Sequence: Synthetic oligonucleotide
  Target: LAMA2; (-) strand; PAM type: YTN; PAM sequence: TTC
attgaggtttgaattgctgt

SEQ ID NO: 263706 - DNA, 20 bp, Artificial Sequence
  Description of Artificial Sequence: Synthetic oligonucleotide
  Target: LAMA2; (-) strand; PAM type: YTN; PAM sequence: TTG
gaaacagattcattgaggtt

SEQ ID NO: 263707 - DNA, 20 bp, Artificial Sequence
  Description of Artificial Sequence: Synthetic oligonucleotide
  Target: LAMA2; (-) strand; PAM type: YTN; PAM sequence: TTT
ggaaacagattcattgaggt

SEQ ID NO: 263708 - DNA, 20 bp, Artificial Sequence
  Description of Artificial Sequence: Synthetic oligonucleotide
  Target: LAMA2; (-) strand; PAM type: YTN; PAM sequence: TTT
tggaaacagattcattgagg

SEQ ID NO: 263709 - DNA, 20 bp, Artificial Sequence
  Description of Artificial Sequence: Synthetic oligonucleotide
  Target: LAMA2; (-) strand; PAM type: YTN; PAM sequence: CTA
ggttttggaaacagattcat

SEQ ID NO: 263710 - DNA, 20 bp, Artificial Sequence
  Description of Artificial Sequence: Synthetic oligonucleotide
  Target: LAMA2; (-) strand; PAM type: YTN; PAM sequence: TTA
cctaggttttggaaacagat

SEQ ID NO: 263711 - DNA, 20 bp, Artificial Sequence
  Description of Artificial Sequence: Synthetic oligonucleotide
  Target: LAMA2; (-) strand; PAM type: YTN; PAM sequence: TTT
acctaggttttggaaacaga

SEQ ID NO: 263712 - DNA, 20 bp, Artificial Sequence
  Description of Artificial Sequence: Synthetic oligonucleotide
  Target: LAMA2; (-) strand; PAM type: YTN; PAM sequence: TTG
agtacaagtttacctaggtt

SEQ ID NO: 263713 - DNA, 20 bp, Artificial Sequence
  Description of Artificial Sequence: Synthetic oligonucleotide
  Target: LAMA2; (-) strand; PAM type: YTN; PAM sequence: CTG
cataatataatagttgagta

SEQ ID NO: 263714 - DNA, 20 bp, Artificial Sequence
  Description of Artificial Sequence: Synthetic oligonucleotide
  Target: LAMA2; (-) strand; PAM type: YTN; PAM sequence: TTA
agcagcacatgactgcataa

SEQ ID NO: 263715 - DNA, 20 bp, Artificial Sequence
  Description of Artificial Sequence: Synthetic oligonucleotide
  Target: LAMA2; (-) strand; PAM type: YTN; PAM sequence: CTG
tcgttaagcagcacatgact

SEQ ID NO: 263716 - DNA, 20 bp, Artificial Sequence
  Description of Artificial Sequence: Synthetic oligonucleotide
  Target: LAMA2; (-) strand; PAM type: YTN; PAM sequence: CTC
agaacgtatccctgtcgtta

SEQ ID NO: 263717 - DNA, 20 bp, Artificial Sequence
  Description of Artificial Sequence: Synthetic oligonucleotide
  Target: LAMA2; (-) strand; PAM type: YTN; PAM sequence: TTC
tcagaacgtatccctgtcgt

SEQ ID NO: 263718 - DNA, 20 bp, Artificial Sequence
  Description of Artificial Sequence: Synthetic oligonucleotide
  Target: LAMA2; (-) strand; PAM type: YTN; PAM sequence: TTT
ctcagaacgtatccctgtcg

SEQ ID NO: 263719 - DNA, 20 bp, Artificial Sequence
  Description of Artificial Sequence: Synthetic oligonucleotide
  Target: LAMA2; (-) strand; PAM type: YTN; PAM sequence: CTA
acgacacatttctcagaacg

SEQ ID NO: 263720 - DNA, 20 bp, Artificial Sequence
  Description of Artificial Sequence: Synthetic oligonucleotide
  Target: LAMA2; (-) strand; PAM type: YTN; PAM sequence: TTG
cacaatgaggagatcaccta

SEQ ID NO: 263721 - DNA, 20 bp, Artificial Sequence
  Description of Artificial Sequence: Synthetic oligonucleotide
  Target: LAMA2; (-) strand; PAM type: YTN; PAM sequence: TTT
gcacaatgaggagatcacct

SEQ ID NO: 263722 - DNA, 20 bp, Artificial Sequence
  Description of Artificial Sequence: Synthetic oligonucleotide
  Target: LAMA2; (-) strand; PAM type: YTN; PAM sequence: CTA
tgatgtttgcacaatgagga

SEQ ID NO: 263723 - DNA, 20 bp, Artificial Sequence
  Description of Artificial Sequence: Synthetic oligonucleotide
  Target: LAMA2; (-) strand; PAM type: YTN; PAM sequence: CTC
tatgatgtttgcacaatgag

SEQ ID NO: 263724 - DNA, 20 bp, Artificial Sequence
  Description of Artificial Sequence: Synthetic oligonucleotide
  Target: LAMA2; (-) strand; PAM type: YTN; PAM sequence: TTG
tgtatgtacactctatgatg

SEQ ID NO: 263725 - DNA, 20 bp, Artificial Sequence
  Description of Artificial Sequence: Synthetic oligonucleotide
  Target: LAMA2; (-) strand; PAM type: YTN; PAM sequence: TTT
gtgtatgtacactctatgat

SEQ ID NO: 263726 - DNA, 20 bp, Artificial Sequence
  Description of Artificial Sequence: Synthetic oligonucleotide
  Target: LAMA2; (-) strand; PAM type: YTN; PAM sequence: TTA
ggtttgtgtatgtacactct

SEQ ID NO: 263727 - DNA, 20 bp, Artificial Sequence
  Description of Artificial Sequence: Synthetic oligonucleotide
  Target: LAMA2; (-) strand; PAM type: YTN; PAM sequence: TTT
aggtttgtgtatgtacactc

SEQ ID NO: 263728 - DNA, 20 bp, Artificial Sequence
  Description of Artificial Sequence: Synthetic oligonucleotide
  Target: LAMA2; (-) strand; PAM type: YTN; PAM sequence: CTA
caccatttaggtttgtgtat

SEQ ID NO: 263729 - DNA, 20 bp, Artificial Sequence
  Description of Artificial Sequence: Synthetic oligonucleotide
  Target: LAMA2; (-) strand; PAM type: YTN; PAM sequence: CTA
ggtgtgtagtaggctacacc

SEQ ID NO: 263730 - DNA, 20 bp, Artificial Sequence
  Description of Artificial Sequence: Synthetic oligonucleotide
  Target: LAMA2; (-) strand; PAM type: YTN; PAM sequence: CTA
tcccatgtagcctaggtgtg

SEQ ID NO: 263731 - DNA, 20 bp, Artificial Sequence
  Description of Artificial Sequence: Synthetic oligonucleotide
  Target: LAMA2; (-) strand; PAM type: YTN; PAM sequence: CTA
ggagcaacaggctatcccat

SEQ ID NO: 263732 - DNA, 20 bp, Artificial Sequence
  Description of Artificial Sequence: Synthetic oligonucleotide
  Target: LAMA2; (-) strand; PAM type: YTN; PAM sequence: CTG
tagcctaggagcaacaggct

SEQ ID NO: 263733 - DNA, 20 bp, Artificial Sequence
  Description of Artificial Sequence: Synthetic oligonucleotide
  Target: LAMA2; (-) strand; PAM type: YTN; PAM sequence: CTG
tgcaggtctgtagcctagga

SEQ ID NO: 263734 - DNA, 20 bp, Artificial Sequence
  Description of Artificial Sequence: Synthetic oligonucleotide
  Target: LAMA2; (-) strand; PAM type: YTN; PAM sequence: TTC
agtaccaataacatgctgtg

SEQ ID NO: 263735 - DNA, 20 bp, Artificial Sequence
  Description of Artificial Sequence: Synthetic oligonucleotide
  Target: LAMA2; (-) strand; PAM type: YTN; PAM sequence: CTG
tattcagtaccaataacatg

SEQ ID NO: 263736 - DNA, 20 bp, Artificial Sequence
  Description of Artificial Sequence: Synthetic oligonucleotide
  Target: LAMA2; (-) strand; PAM type: YTN; PAM sequence: CTA
ctgtattcagtaccaataac

SEQ ID NO: 263737 - DNA, 20 bp, Artificial Sequence
  Description of Artificial Sequence: Synthetic oligonucleotide
  Target: LAMA2; (-) strand; PAM type: YTN; PAM sequence: TTG
cctactgtattcagtaccaa

SEQ ID NO: 263738 - DNA, 20 bp, Artificial Sequence
  Description of Artificial Sequence: Synthetic oligonucleotide
  Target: LAMA2; (-) strand; PAM type: YTN; PAM sequence: TTA
caattgcctactgtattcag

SEQ ID NO: 263739 - DNA, 20 bp, Artificial Sequence
  Description of Artificial Sequence: Synthetic oligonucleotide
  Target: LAMA2; (-) strand; PAM type: YTN; PAM sequence: TTA
tgttacaattgcctactgta

SEQ ID NO: 263740 - DNA, 20 bp, Artificial Sequence
  Description of Artificial Sequence: Synthetic oligonucleotide
  Target: LAMA2; (-) strand; PAM type: YTN; PAM sequence: TTA
ccattatgttacaattgcct

SEQ ID NO: 263741 - DNA, 20 bp, Artificial Sequence
  Description of Artificial Sequence: Synthetic oligonucleotide
  Target: LAMA2; (-) strand; PAM type: YTN; PAM sequence: CTT
accattatgttacaattgcc

SEQ ID NO: 263742 - DNA, 20 bp, Artificial Sequence
  Description of Artificial Sequence: Synthetic oligonucleotide
  Target: LAMA2; (-) strand; PAM type: YTN; PAM sequence: TTA
gatatgcaaatacttaccat

SEQ ID NO: 263743 - DNA, 20 bp, Artificial Sequence
  Description of Artificial Sequence: Synthetic oligonucleotide
  Target: LAMA2; (-) strand; PAM type: YTN; PAM sequence: TTT
agatatgcaaatacttacca

SEQ ID NO: 263744 - DNA, 20 bp, Artificial Sequence
  Description of Artificial Sequence: Synthetic oligonucleotide
  Target: LAMA2; (-) strand; PAM type: YTN; PAM sequence: TTA
aatatgtttagatatgcaaa

SEQ ID NO: 263745 - DNA, 20 bp, Artificial Sequence
  Description of Artificial Sequence: Synthetic oligonucleotide
  Target: LAMA2; (-) strand; PAM type: YTN; PAM sequence: TTT
aaatatgtttagatatgcaa

SEQ ID NO: 263746 - DNA, 20 bp, Artificial Sequence
  Description of Artificial Sequence: Synthetic oligonucleotide
  Target: LAMA2; (-) strand; PAM type: YTN; PAM sequence: CTA
tgtttaaatatgtttagata

SEQ ID NO: 263747 - DNA, 20 bp, Artificial Sequence
  Description of Artificial Sequence: Synthetic oligonucleotide
  Target: LAMA2; (-) strand; PAM type: YTN; PAM sequence: TTG
ctatgtttaaatatgtttag

SEQ ID NO: 263748 - DNA, 20 bp, Artificial Sequence
  Description of Artificial Sequence: Synthetic oligonucleotide
  Target: LAMA2; (-) strand; PAM type: YTN; PAM sequence: TTT
gctatgtttaaatatgttta

SEQ ID NO: 263749 - DNA, 20 bp, Artificial Sequence
  Description of Artificial Sequence: Synthetic oligonucleotide
  Target: LAMA2; (-) strand; PAM type: YTN; PAM sequence: CTT
tgctatgtttaaatatgttt

SEQ ID NO: 263750 - DNA, 20 bp, Artificial Sequence
  Description of Artificial Sequence: Synthetic oligonucleotide
  Target: LAMA2; (-) strand; PAM type: YTN; PAM sequence: TTA
atgtacctttgctatgttta

SEQ ID NO: 263751 - DNA, 20 bp, Artificial Sequence
  Description of Artificial Sequence: Synthetic oligonucleotide
  Target: LAMA2; (-) strand; PAM type: YTN; PAM sequence: TTT
aatgtacctttgctatgttt

SEQ ID NO: 263752 - DNA, 20 bp, Artificial Sequence
  Description of Artificial Sequence: Synthetic oligonucleotide
  Target: LAMA2; (-) strand; PAM type: YTN; PAM sequence: TTT
taatgtacctttgctatgtt

SEQ ID NO: 263753 - DNA, 20 bp, Artificial Sequence
  Description of Artificial Sequence: Synthetic oligonucleotide
  Target: LAMA2; (-) strand; PAM type: YTN; PAM sequence: TTT
ttaatgtacctttgctatgt

SEQ ID NO: 263754 - DNA, 20 bp, Artificial Sequence
  Description of Artificial Sequence: Synthetic oligonucleotide
  Target: LAMA2; (-) strand; PAM type: YTN; PAM sequence: CTA
tatttttaatgtacctttgc

SEQ ID NO: 263755 - DNA, 20 bp, Artificial Sequence
  Description of Artificial Sequence: Synthetic oligonucleotide
  Target: LAMA2; (-) strand; PAM type: YTN; PAM sequence: TTA
taaaactatatttttaatgt

SEQ ID NO: 263756 - DNA, 20 bp, Artificial Sequence
  Description of Artificial Sequence: Synthetic oligonucleotide
  Target: LAMA2; (-) strand; PAM type: YTN; PAM sequence: TTG
gtcaatgataggaccatgtg

SEQ ID NO: 263757 - DNA, 20 bp, Artificial Sequence
  Description of Artificial Sequence: Synthetic oligonucleotide
  Target: LAMA2; (-) strand; PAM type: YTN; PAM sequence: TTT
ggtcaatgataggaccatgt

SEQ ID NO: 263758 - DNA, 20 bp, Artificial Sequence
  Description of Artificial Sequence: Synthetic oligonucleotide
  Target: LAMA2; (-) strand; PAM type: YTN; PAM sequence: TTT
tggtcaatgataggaccatg

SEQ ID NO: 263759 - DNA, 20 bp, Artificial Sequence
  Description of Artificial Sequence: Synthetic oligonucleotide
  Target: LAMA2; (-) strand; PAM type: YTN; PAM sequence: CTG
cataatgacattttggtcaa

SEQ ID NO: 263760 - DNA, 20 bp, Artificial Sequence
  Description of Artificial Sequence: Synthetic oligonucleotide
  Target: LAMA2; (-) strand; PAM type: YTN; PAM sequence: CTG
ctgcataatgacattttggt

SEQ ID NO: 263761 - DNA, 20 bp, Artificial Sequence
  Description of Artificial Sequence: Synthetic oligonucleotide
  Target: LAMA2; (-) strand; PAM type: YTN; PAM sequence: TTG
tacagtcatgtgctgctgca

SEQ ID NO: 263762 - DNA, 20 bp, Artificial Sequence
  Description of Artificial Sequence: Synthetic oligonucleotide
  Target: LAMA2; (-) strand; PAM type: YTN; PAM sequence: CTG
gaatgtaggaatattgtaca

SEQ ID NO: 263763 - DNA, 20 bp, Artificial Sequence
  Description of Artificial Sequence: Synthetic oligonucleotide
  Target: LAMA2; (-) strand; PAM type: YTN; PAM sequence: CTC
acctggaatgtaggaatatt

SEQ ID NO: 263764 - DNA, 20 bp, Artificial Sequence
  Description of Artificial Sequence: Synthetic oligonucleotide
  Target: LAMA2; (-) strand; PAM type: YTN; PAM sequence: TTC
ctcacctggaatgtaggaat

SEQ ID NO: 263765 - DNA, 20 bp, Artificial Sequence
  Description of Artificial Sequence: Synthetic oligonucleotide
  Target: LAMA2; (-) strand; PAM type: YTN; PAM sequence: TTT
cctcacctggaatgtaggaa

SEQ ID NO: 263766 - DNA, 20 bp, Artificial Sequence
  Description of Artificial Sequence: Synthetic oligonucleotide
  Target: LAMA2; (-) strand; PAM type: YTN; PAM sequence: TTG
gtttcctcacctggaatgta

SEQ ID NO: 263767 - DNA, 20 bp, Artificial Sequence
  Description of Artificial Sequence: Synthetic oligonucleotide
  Target: LAMA2; (-) strand; PAM type: YTN; PAM sequence: CTT
ggtttcctcacctggaatgt

SEQ ID NO: 263768 - DNA, 20 bp, Artificial Sequence
  Description of Artificial Sequence: Synthetic oligonucleotide
  Target: LAMA2; (-) strand; PAM type: YTN; PAM sequence: CTG
tgtgccttggtttcctcacc

SEQ ID NO: 263769 - DNA, 20 bp, Artificial Sequence
  Description of Artificial Sequence: Synthetic oligonucleotide
  Target: LAMA2; (-) strand; PAM type: YTN; PAM sequence: CTG
aatactgtgtgccttggttt

SEQ ID NO: 263770 - DNA, 20 bp, Artificial Sequence
  Description of Artificial Sequence: Synthetic oligonucleotide
  Target: LAMA2; (-) strand; PAM type: YTN; PAM sequence: TTC
tgaatactgtgtgccttggt

SEQ ID NO: 263771 - DNA, 20 bp, Artificial Sequence
  Description of Artificial Sequence: Synthetic oligonucleotide
  Target: LAMA2; (-) strand; PAM type: YTN; PAM sequence: TTG
tatgtagtaaggttctgaat

SEQ ID NO: 263772 - DNA, 20 bp, Artificial Sequence
  Description of Artificial Sequence: Synthetic oligonucleotide
  Target: LAMA2; (-) strand; PAM type: YTN; PAM sequence: TTT
gtatgtagtaaggttctgaa

SEQ ID NO: 263773 - DNA, 20 bp, Artificial Sequence
  Description of Artificial Sequence: Synthetic oligonucleotide
  Target: LAMA2; (-) strand; PAM type: YTN; PAM sequence: CTT
tgtatgtagtaaggttctga

SEQ ID NO: 263774 - DNA, 20 bp, Artificial Sequence
  Description of Artificial Sequence: Synthetic oligonucleotide
  Target: LAMA2; (-) strand; PAM type: YTN; PAM sequence: TTC
accactttgtatgtagtaag

SEQ ID NO: 263775 - DNA, 20 bp, Artificial Sequence
  Description of Artificial Sequence: Synthetic oligonucleotide
  Target: LAMA2; (-) strand; PAM type: YTN; PAM sequence: TTT
caccactttgtatgtagtaa

SEQ ID NO: 263776 - DNA, 20 bp, Artificial Sequence
  Description of Artificial Sequence: Synthetic oligonucleotide
  Target: LAMA2; (-) strand; PAM type: YTN; PAM sequence: CTG
tttcaccactttgtatgtag

SEQ ID NO: 263777 - DNA, 20 bp, Artificial Sequence
  Description of Artificial Sequence: Synthetic oligonucleotide
  Target: LAMA2; (-) strand; PAM type: YTN; PAM sequence: TTC
ctgtttcaccactttgtatg

SEQ ID NO: 263778 - DNA, 20 bp, Artificial Sequence
  Description of Artificial Sequence: Synthetic oligonucleotide
  Target: LAMA2; (-) strand; PAM type: YTN; PAM sequence: TTA
attcctgtttcaccactttg

SEQ ID NO: 263779 - DNA, 20 bp, Artificial Sequence
  Description of Artificial Sequence: Synthetic oligonucleotide
  Target: LAMA2; (-) strand; PAM type: YTN; PAM sequence: TTT
aattcctgtttcaccacttt

SEQ ID NO: 263780 - DNA, 20 bp, Artificial Sequence
  Description of Artificial Sequence: Synthetic oligonucleotide
  Target: LAMA2; (-) strand; PAM type: YTN; PAM sequence: TTG
caatcaggcagacccgagtt

SEQ ID NO: 263781 - DNA, 20 bp, Artificial Sequence
  Description of Artificial Sequence: Synthetic oligonucleotide
  Target: LAMA2; (-) strand; PAM type: YTN; PAM sequence: TTT
gcaatcaggcagacccgagt

SEQ ID NO: 263782 - DNA, 20 bp, Artificial Sequence
  Description of Artificial Sequence: Synthetic oligonucleotide
  Target: LAMA2; (-) strand; PAM type: YTN; PAM sequence: TTT
tgcaatcaggcagacccgag

SEQ ID NO: 263783 - DNA, 20 bp, Artificial Sequence
  Description of Artificial Sequence: Synthetic oligonucleotide
  Target: LAMA2; (-) strand; PAM type: YTN; PAM sequence: TTG
catggattttgcaatcaggc

SEQ ID NO: 263784 - DNA, 20 bp, Artificial Sequence
  Description of Artificial Sequence: Synthetic oligonucleotide
  Target: LAMA2; (-) strand; PAM type: YTN; PAM sequence: TTT
gcatggattttgcaatcagg

SEQ ID NO: 263785 - DNA, 20 bp, Artificial Sequence
  Description of Artificial Sequence: Synthetic oligonucleotide
  Target: LAMA2; (-) strand; PAM type: YTN; PAM sequence: CTT
tgcatggattttgcaatcag

SEQ ID NO: 263786 - DNA, 20 bp, Artificial Sequence
  Description of Artificial Sequence: Synthetic oligonucleotide
  Target: LAMA2; (-) strand; PAM type: YTN; PAM sequence: TTG
tatctttgcatggattttgc

SEQ ID NO: 263787 - DNA, 20 bp, Artificial Sequence
  Description of Artificial Sequence: Synthetic oligonucleotide
  Target: LAMA2; (-) strand; PAM type: YTN; PAM sequence: CTT
gtatctttgcatggattttg

SEQ ID NO: 263788 - DNA, 20 bp, Artificial Sequence
  Description of Artificial Sequence: Synthetic oligonucleotide
  Target: LAMA2; (-) strand; PAM type: YTN; PAM sequence: CTA
tcttgtatctttgcatggat

SEQ ID NO: 263789 - DNA, 20 bp, Artificial Sequence
  Description of Artificial Sequence: Synthetic oligonucleotide
  Target: LAMA2; (-) strand; PAM type: YTN; PAM sequence: CTC
tatcttgtatctttgcatgg

SEQ ID NO: 263790 - DNA, 20 bp, Artificial Sequence
  Description of Artificial Sequence: Synthetic oligonucleotide
  Target: LAMA2; (-) strand; PAM type: YTN; PAM sequence: CTC
ataaaaacactctatcttgt

SEQ ID NO: 263791 - DNA, 20 bp, Artificial Sequence
  Description of Artificial Sequence: Synthetic oligonucleotide
  Target: LAMA2; (-) strand; PAM type: YTN; PAM sequence: CTG
gagctcataaaaacactcta

SEQ ID NO: 263792 - DNA, 20 bp, Artificial Sequence
  Description of Artificial Sequence: Synthetic oligonucleotide
  Target: LAMA2; (-) strand; PAM type: YTN; PAM sequence: TTG
tgctggagctcataaaaaca

SEQ ID NO: 263793 - DNA, 20 bp, Artificial Sequence
  Description of Artificial Sequence: Synthetic oligonucleotide
  Target: LAMA2; (-) strand; PAM type: YTN; PAM sequence: CTT
gtgctggagctcataaaaac

SEQ ID NO: 263794 - DNA, 20 bp, Artificial Sequence
  Description of Artificial Sequence: Synthetic oligonucleotide
  Target: LAMA2; (-) strand; PAM type: YTN; PAM sequence: TTA
gtaataaaaatagatgcttg

SEQ ID NO: 263795 - DNA, 20 bp, Artificial Sequence
  Description of Artificial Sequence: Synthetic oligonucleotide
  Target: LAMA2; (-) strand; PAM type: YTN; PAM sequence: TTT
agtaataaaaatagatgctt

SEQ ID NO: 263796 - DNA, 20 bp, Artificial Sequence
  Description of Artificial Sequence: Synthetic oligonucleotide
  Target: LAMA2; (-) strand; PAM type: YTN; PAM sequence: TTC
agagtttagtaataaaaata

SEQ ID NO: 263797 - DNA, 20 bp, Artificial Sequence
  Description of Artificial Sequence: Synthetic oligonucleotide
  Target: LAMA2; (-) strand; PAM type: YTN; PAM sequence: CTT
cagagtttagtaataaaaat

SEQ ID NO: 263798 - DNA, 20 bp, Artificial Sequence
  Description of Artificial Sequence: Synthetic oligonucleotide
  Target: LAMA2; (-) strand; PAM type: YTN; PAM sequence: TTC
ttcagagtttagtaataaaa

SEQ ID NO: 263799 - DNA, 20 bp, Artificial Sequence
  Description of Artificial Sequence: Synthetic oligonucleotide
  Target: LAMA2; (-) strand; PAM type: YTN; PAM sequence: TTT
cttcagagtttagtaataaa

SEQ ID NO: 263800 - DNA, 20 bp, Artificial Sequence
  Description of Artificial Sequence: Synthetic oligonucleotide
  Target: LAMA2; (-) strand; PAM type: YTN; PAM sequence: CTT
tcttcagagtttagtaataa

SEQ ID NO: 263801 - DNA, 20 bp, Artificial Sequence
  Description of Artificial Sequence: Synthetic oligonucleotide
  Target: LAMA2; (-) strand; PAM type: YTN; PAM sequence: TTC
tttcttcagagtttagtaat

SEQ ID NO: 263802 - DNA, 20 bp, Artificial Sequence
  Description of Artificial Sequence: Synthetic oligonucleotide
  Target: LAMA2; (-) strand; PAM type: YTN; PAM sequence: TTT
ctttcttcagagtttagtaa

SEQ ID NO: 263803 - DNA, 20 bp, Artificial Sequence
  Description of Artificial Sequence: Synthetic oligonucleotide
  Target: LAMA2; (-) strand; PAM type: YTN; PAM sequence: CTT
tctttcttcagagtttagta

SEQ ID NO: 263804 - DNA, 20 bp, Artificial Sequence
  Description of Artificial Sequence: Synthetic oligonucleotide
  Target: LAMA2; (-) strand; PAM type: YTN; PAM sequence: CTC
ctttctttcttcagagttta

SEQ ID NO: 263805 - DNA, 20 bp, Artificial Sequence
  Description of Artificial Sequence: Synthetic oligonucleotide
  Target: LAMA2; (-) strand; PAM type: YTN; PAM sequence: CTG
cgctcctttctttcttcaga

SEQ ID NO: 263806 - DNA, 20 bp, Artificial Sequence
  Description of Artificial Sequence: Synthetic oligonucleotide
  Target: LAMA2; (-) strand; PAM type: YTN; PAM sequence: CTG
cacactgcgctcctttcttt

SEQ ID NO: 263807 - DNA, 20 bp, Artificial Sequence
  Description of Artificial Sequence: Synthetic oligonucleotide
  Target: LAMA2; (-) strand; PAM type: YTN; PAM sequence: CTC
agggctgcacactgcgctcc

SEQ ID NO: 263808 - DNA, 20 bp, Artificial Sequence
  Description of Artificial Sequence: Synthetic oligonucleotide
  Target: LAMA2; (-) strand; PAM type: YTN; PAM sequence: CTA
ggctcagggctgcacactgc

SEQ ID NO: 263809 - DNA, 20 bp, Artificial Sequence
  Description of Artificial Sequence: Synthetic oligonucleotide
  Target: LAMA2; (-) strand; PAM type: YTN; PAM sequence: CTA
tcctaggctcagggctgcac

SEQ ID NO: 263810 - DNA, 20 bp, Artificial Sequence
  Description of Artificial Sequence: Synthetic oligonucleotide
  Target: LAMA2; (-) strand; PAM type: YTN; PAM sequence: CTA
tcctatcctaggctcagggc

SEQ ID NO: 263811 - DNA, 20 bp, Artificial Sequence
  Description of Artificial Sequence: Synthetic oligonucleotide
  Target: LAMA2; (-) strand; PAM type: YTN; PAM sequence: CTG
tagagacctatcctatccta

SEQ ID NO: 263812 - DNA, 20 bp, Artificial Sequence
  Description of Artificial Sequence: Synthetic oligonucleotide
  Target: LAMA2; (-) strand; PAM type: YTN; PAM sequence: TTA
cacaaaaatgtgggagggta

SEQ ID NO: 263813 - DNA, 20 bp, Artificial Sequence
  Description of Artificial Sequence: Synthetic oligonucleotide
  Target: LAMA2; (-) strand; PAM type: YTN; PAM sequence: TTT
acacaaaaatgtgggagggt

SEQ ID NO: 263814 - DNA, 20 bp, Artificial Sequence
  Description of Artificial Sequence: Synthetic oligonucleotide
  Target: LAMA2; (-) strand; PAM type: YTN; PAM sequence: TTA
aatttacacaaaaatgtggg

SEQ ID NO: 263815 - DNA, 20 bp, Artificial Sequence
  Description of Artificial Sequence: Synthetic oligonucleotide
  Target: LAMA2; (-) strand; PAM type: YTN; PAM sequence: TTA
gattaaatttacacaaaaat

SEQ ID NO: 263816 - DNA, 20 bp, Artificial Sequence
  Description of Artificial Sequence: Synthetic oligonucleotide
  Target: LAMA2; (-) strand; PAM type: YTN; PAM sequence: TTC
atcaaaaaattagattaaat

SEQ ID NO: 263817 - DNA, 20 bp, Artificial Sequence
  Description of Artificial Sequence: Synthetic oligonucleotide
  Target: LAMA2; (-) strand; PAM type: YTN; PAM sequence: TTT
catcaaaaaattagattaaa

SEQ ID NO: 263818 - DNA, 20 bp, Artificial Sequence
  Description of Artificial Sequence: Synthetic oligonucleotide
  Target: LAMA2; (-) strand; PAM type: YTN; PAM sequence: TTG
tttcatcaaaaaattagatt

SEQ ID NO: 263819 - DNA, 20 bp, Artificial Sequence
  Description of Artificial Sequence: Synthetic oligonucleotide
  Target: LAMA2; (-) strand; PAM type: YTN; PAM sequence: TTC
ataatatattgtttcatcaa

SEQ ID NO: 263820 - DNA, 20 bp, Artificial Sequence
  Description of Artificial Sequence: Synthetic oligonucleotide
  Target: LAMA2; (-) strand; PAM type: YTN; PAM sequence: TTT
cataatatattgtttcatca

SEQ ID NO: 263821 - DNA, 20 bp, Artificial Sequence
  Description of Artificial Sequence: Synthetic oligonucleotide
  Target: LAMA2; (-) strand; PAM type: YTN; PAM sequence: TTT
tcataatatattgtttcatc

SEQ ID NO: 263822 - DNA, 20 bp, Artificial Sequence
  Description of Artificial Sequence: Synthetic oligonucleotide
  Target: LAMA2; (-) strand; PAM type: YTN; PAM sequence: TTA
ttttcataatatattgtttc

SEQ ID NO: 263823 - DNA, 20 bp, Artificial Sequence
  Description of Artificial Sequence: Synthetic oligonucleotide
  Target: LAMA2; (-) strand; PAM type: YTN; PAM sequence: TTT
attttcataatatattgttt

SEQ ID NO: 263824 - DNA, 20 bp, Artificial Sequence
  Description of Artificial Sequence: Synthetic oligonucleotide
  Target: LAMA2; (-) strand; PAM type: YTN; PAM sequence: TTA
atttattttcataatatatt

SEQ ID NO: 263825 - DNA, 20 bp, Artificial Sequence
  Description of Artificial Sequence: Synthetic oligonucleotide
  Target: LAMA2; (-) strand; PAM type: YTN; PAM sequence: TTT
aatttattttcataatatat

SEQ ID NO: 263826 - DNA, 20 bp, Artificial Sequence
  Description of Artificial Sequence: Synthetic oligonucleotide
  Target: LAMA2; (-) strand; PAM type: YTN; PAM sequence: CTT
taatttattttcataatata

SEQ ID NO: 263827 - DNA, 20 bp, Artificial Sequence
  Description of Artificial Sequence: Synthetic oligonucleotide
  Target: LAMA2; (-) strand; PAM type: YTN; PAM sequence: CTA
tctttaatttattttcataa

SEQ ID NO: 263828 - DNA, 20 bp, Artificial Sequence
  Description of Artificial Sequence: Synthetic oligonucleotide
  Target: LAMA2; (-) strand; PAM type: YTN; PAM sequence: CTC
gtctatctttaatttatttt

SEQ ID NO: 263829 - DNA, 20 bp, Artificial Sequence
  Description of Artificial Sequence: Synthetic oligonucleotide
  Target: LAMA2; (-) strand; PAM type: YTN; PAM sequence: CTC
tcgtctatctttaatttatt

SEQ ID NO: 263830 - DNA, 20 bp, Artificial Sequence
  Description of Artificial Sequence: Synthetic oligonucleotide
  Target: LAMA2; (-) strand; PAM type: YTN; PAM sequence: CTG
ctctcgtctatctttaattt

SEQ ID NO: 263831 - DNA, 20 bp, Artificial Sequence
  Description of Artificial Sequence: Synthetic oligonucleotide
  Target: LAMA2; (-) strand; PAM type: YTN; PAM sequence: TTC
tgctctcgtctatctttaat

SEQ ID NO: 263832 - DNA, 20 bp, Artificial Sequence
  Description of Artificial Sequence: Synthetic oligonucleotide
  Target: LAMA2; (-) strand; PAM type: YTN; PAM sequence: CTT
ctgctctcgtctatctttaa

SEQ ID NO: 263833 - DNA, 20 bp, Artificial Sequence
  Description of Artificial Sequence: Synthetic oligonucleotide
  Target: LAMA2; (-) strand; PAM type: YTN; PAM sequence: TTC
ttctgctctcgtctatcttt

SEQ ID NO: 263834 - DNA, 20 bp, Artificial Sequence
  Description of Artificial Sequence: Synthetic oligonucleotide
  Target: LAMA2; (-) strand; PAM type: YTN; PAM sequence: TTT
cttctgctctcgtctatctt

SEQ ID NO: 263835 - DNA, 20 bp, Artificial Sequence
  Description of Artificial Sequence: Synthetic oligonucleotide
  Target: LAMA2; (-) strand; PAM type: YTN; PAM sequence: TTT
tcttctgctctcgtctatct

SEQ ID NO: 263836 - DNA, 20 bp, Artificial Sequence
  Description of Artificial Sequence: Synthetic oligonucleotide
  Target: LAMA2; (-) strand; PAM type: YTN; PAM sequence: CTC
aattttcttctgctctcgtc

SEQ ID NO: 263837 - DNA, 20 bp, Artificial Sequence
  Description of Artificial Sequence: Synthetic oligonucleotide
  Target: LAMA2; (-) strand; PAM type: YTN; PAM sequence: TTC
atggctcaattttcttctgc

SEQ ID NO: 263838 - DNA, 20 bp, Artificial Sequence
  Description of Artificial Sequence: Synthetic oligonucleotide
  Target: LAMA2; (-) strand; PAM type: YTN; PAM sequence: TTA
ttcatggctcaattttcttc

SEQ ID NO: 263839 - DNA, 20 bp, Artificial Sequence
  Description of Artificial Sequence: Synthetic oligonucleotide
  Target: LAMA2; (-) strand; PAM type: YTN; PAM sequence: TTG
aaattattcatggctcaatt

SEQ ID NO: 263840 - DNA, 20 bp, Artificial Sequence
  Description of Artificial Sequence: Synthetic oligonucleotide
  Target: LAMA2; (-) strand; PAM type: YTN; PAM sequence: CTG
ttgaaattattcatggctca

SEQ ID NO: 263841 - DNA, 20 bp, Artificial Sequence
  Description of Artificial Sequence: Synthetic oligonucleotide
  Target: LAMA2; (-) strand; PAM type: YTN; PAM sequence: TTC
cccactgttgaaattattca

SEQ ID NO: 263842 - DNA, 20 bp, Artificial Sequence
  Description of Artificial Sequence: Synthetic oligonucleotide
  Target: LAMA2; (-) strand; PAM type: YTN; PAM sequence: CTT
ccccactgttgaaattattc

SEQ ID NO: 263843 - DNA, 20 bp, Artificial Sequence
  Description of Artificial Sequence: Synthetic oligonucleotide
  Target: LAMA2; (-) strand; PAM type: YTN; PAM sequence: CTC
ttccccactgttgaaattat

SEQ ID NO: 263844 - DNA, 20 bp, Artificial Sequence
  Description of Artificial Sequence: Synthetic oligonucleotide
  Target: LAMA2; (-) strand; PAM type: YTN; PAM sequence: TTC
tcttccccactgttgaaatt

SEQ ID NO: 263845 - DNA, 20 bp, Artificial Sequence
  Description of Artificial Sequence: Synthetic oligonucleotide
  Target: LAMA2; (-) strand; PAM type: YTN; PAM sequence: TTC
caaagttctcttccccactg

SEQ ID NO: 263846 - DNA, 20 bp, Artificial Sequence
  Description of Artificial Sequence: Synthetic oligonucleotide
  Target: LAMA2; (-) strand; PAM type: YTN; PAM sequence: TTT
ccaaagttctcttccccact

SEQ ID NO: 263847 - DNA, 20 bp, Artificial Sequence
  Description of Artificial Sequence: Synthetic oligonucleotide
  Target: LAMA2; (-) strand; PAM type: YTN; PAM sequence: TTT
tccaaagttctcttccccac

SEQ ID NO: 263848 - DNA, 20 bp, Artificial Sequence
  Description of Artificial Sequence: Synthetic oligonucleotide
  Target: LAMA2; (-) strand; PAM type: YTN; PAM sequence: CTT
ttccaaagttctcttcccca

SEQ ID NO: 263849 - DNA, 20 bp, Artificial Sequence
  Description of Artificial Sequence: Synthetic oligonucleotide
  Target: LAMA2; (-) strand; PAM type: YTN; PAM sequence: TTA
aacttttccaaagttctctt

SEQ ID NO: 263850 - DNA, 20 bp, Artificial Sequence
  Description of Artificial Sequence: Synthetic oligonucleotide
  Target: LAMA2; (-) strand; PAM type: YTN; PAM sequence: TTT
aaacttttccaaagttctct

SEQ ID NO: 263851 - DNA, 20 bp, Artificial Sequence
  Description of Artificial Sequence: Synthetic oligonucleotide
  Target: LAMA2; (-) strand; PAM type: YTN; PAM sequence: CTA
atttaaacttttccaaagtt

SEQ ID NO: 263852 - DNA, 20 bp, Artificial Sequence
  Description of Artificial Sequence: Synthetic oligonucleotide
  Target: LAMA2; (-) strand; PAM type: YTN; PAM sequence: CTC
taatttaaacttttccaaag

SEQ ID NO: 263853 - DNA, 20 bp, Artificial Sequence
  Description of Artificial Sequence: Synthetic oligonucleotide
  Target: LAMA2; (-) strand; PAM type: YTN; PAM sequence: CTA
ctctaatttaaacttttcca

SEQ ID NO: 263854 - DNA, 20 bp, Artificial Sequence
  Description of Artificial Sequence: Synthetic oligonucleotide
  Target: LAMA2; (-) strand; PAM type: YTN; PAM sequence: TTC
tactctaatttaaacttttc

SEQ ID NO: 263855 - DNA, 20 bp, Artificial Sequence
  Description of Artificial Sequence: Synthetic oligonucleotide
  Target: LAMA2; (-) strand; PAM type: YTN; PAM sequence: TTT
ctactctaatttaaactttt

SEQ ID NO: 263856 - DNA, 20 bp, Artificial Sequence
  Description of Artificial Sequence: Synthetic oligonucleotide
  Target: LAMA2; (-) strand; PAM type: YTN; PAM sequence: TTA
cccatttctactctaattta

SEQ ID NO: 263857 - DNA, 20 bp, Artificial Sequence
  Description of Artificial Sequence: Synthetic oligonucleotide
  Target: LAMA2; (-) strand; PAM type: YTN; PAM sequence: CTT
acccatttctactctaattt

SEQ ID NO: 263858 - DNA, 20 bp, Artificial Sequence
  Description of Artificial Sequence: Synthetic oligonucleotide
  Target: LAMA2; (-) strand; PAM type: YTN; PAM sequence: CTC
ttacccatttctactctaat

SEQ ID NO: 263859 - DNA, 20 bp, Artificial Sequence
  Description of Artificial Sequence: Synthetic oligonucleotide
  Target: LAMA2; (-) strand; PAM type: YTN; PAM sequence: CTC
ctcttacccatttctactct

SEQ ID NO: 263860 - DNA, 20 bp, Artificial Sequence
  Description of Artificial Sequence: Synthetic oligonucleotide
  Target: LAMA2; (-) strand; PAM type: YTN; PAM sequence: CTG
agctcctcttacccatttct

SEQ ID NO: 263861 - DNA, 20 bp, Artificial Sequence
  Description of Artificial Sequence: Synthetic oligonucleotide
  Target: LAMA2; (-) strand; PAM type: YTN; PAM sequence: TTC
ctgagctcctcttacccatt

SEQ ID NO: 263862 - DNA, 20 bp, Artificial Sequence
  Description of Artificial Sequence: Synthetic oligonucleotide
  Target: LAMA2; (-) strand; PAM type: YTN; PAM sequence: TTT
cctgagctcctcttacccat

SEQ ID NO: 263863 - DNA, 20 bp, Artificial Sequence
  Description of Artificial Sequence: Synthetic oligonucleotide
  Target: LAMA2; (-) strand; PAM type: YTN; PAM sequence: CTT
tcctgagctcctcttaccca

SEQ ID NO: 263864 - DNA, 20 bp, Artificial Sequence
  Description of Artificial Sequence: Synthetic oligonucleotide
  Target: LAMA2; (-) strand; PAM type: YTN; PAM sequence: TTA
aagaaaagcaaataaatact

SEQ ID NO: 263865 - DNA, 20 bp, Artificial Sequence
  Description of Artificial Sequence: Synthetic oligonucleotide
  Target: LAMA2; (-) strand; PAM type: YTN; PAM sequence: CTG
gaacacaatggggaattaaa

SEQ ID NO: 263866 - DNA, 20 bp, Artificial Sequence
  Description of Artificial Sequence: Synthetic oligonucleotide
  Target: LAMA2; (-) strand; PAM type: YTN; PAM sequence: TTC
tggaacacaatggggaatta

SEQ ID NO: 263867 - DNA, 20 bp, Artificial Sequence
  Description of Artificial Sequence: Synthetic oligonucleotide
  Target: LAMA2; (-) strand; PAM type: YTN; PAM sequence: TTT
ctggaacacaatggggaatt

SEQ ID NO: 263868 - DNA, 20 bp, Artificial Sequence
  Description of Artificial Sequence: Synthetic oligonucleotide
  Target: LAMA2; (-) strand; PAM type: YTN; PAM sequence: CTT
tctggaacacaatggggaat

SEQ ID NO: 263869 - DNA, 20 bp, Artificial Sequence
  Description of Artificial Sequence: Synthetic oligonucleotide
  Target: LAMA2; (-) strand; PAM type: YTN; PAM sequence: CTA
aaatcctttctggaacacaa

SEQ ID NO: 263870 - DNA, 20 bp, Artificial Sequence
  Description of Artificial Sequence: Synthetic oligonucleotide
  Target: LAMA2; (-) strand; PAM type: YTN; PAM sequence: TTG
agtcccatctaaaatccttt

SEQ ID NO: 263871 - DNA, 20 bp, Artificial Sequence
  Description of Artificial Sequence: Synthetic oligonucleotide
  Target: LAMA2; (-) strand; PAM type: YTN; PAM sequence: TTT
gagtcccatctaaaatcctt

SEQ ID NO: 263872 - DNA, 20 bp, Artificial Sequence
  Description of Artificial Sequence: Synthetic oligonucleotide
  Target: LAMA2; (-) strand; PAM type: YTN; PAM sequence: TTT
tgagtcccatctaaaatcct

SEQ ID NO: 263873 - DNA, 20 bp, Artificial Sequence
  Description of Artificial Sequence: Synthetic oligonucleotide
  Target: LAMA2; (-) strand; PAM type: YTN; PAM sequence: TTT
ttgagtcccatctaaaatcc

SEQ ID NO: 263874 - DNA, 20 bp, Artificial Sequence
  Description of Artificial Sequence: Synthetic oligonucleotide
  Target: LAMA2; (-) strand; PAM type: YTN; PAM sequence: CTT
tttgagtcccatctaaaatc

SEQ ID NO: 263875 - DNA, 20 bp, Artificial Sequence
  Description of Artificial Sequence: Synthetic oligonucleotide
  Target: LAMA2; (-) strand; PAM type: YTN; PAM sequence: TTA
ctttttgagtcccatctaaa

SEQ ID NO: 263876 - DNA, 20 bp, Artificial Sequence
  Description of Artificial Sequence: Synthetic oligonucleotide
  Target: LAMA2; (-) strand; PAM type: YTN; PAM sequence: TTG
gaagcaaaaaagttactttt

SEQ ID NO: 263877 - DNA, 20 bp, Artificial Sequence
  Description of Artificial Sequence: Synthetic oligonucleotide
  Target: LAMA2; (-) strand; PAM type: YTN; PAM sequence: TTG
gaattggaagcaaaaaagtt

SEQ ID NO: 263878 - DNA, 20 bp, Artificial Sequence
  Description of Artificial Sequence: Synthetic oligonucleotide
  Target: LAMA2; (-) strand; PAM type: YTN; PAM sequence: TTA
tgttggaattggaagcaaaa

SEQ ID NO: 263879 - DNA, 20 bp, Artificial Sequence
  Description of Artificial Sequence: Synthetic oligonucleotide
  Target: LAMA2; (-) strand; PAM type: YTN; PAM sequence: TTG
tgagaatgattatgttggaa

SEQ ID NO: 263880 - DNA, 20 bp, Artificial Sequence
  Description of Artificial Sequence: Synthetic oligonucleotide
  Target: LAMA2; (-) strand; PAM type: YTN; PAM sequence: TTT
gtgagaatgattatgttgga

SEQ ID NO: 263881 - DNA, 20 bp, Artificial Sequence
  Description of Artificial Sequence: Synthetic oligonucleotide
  Target: LAMA2; (-) strand; PAM type: YTN; PAM sequence: CTG
agacaaaagtttgtgagaat

SEQ ID NO: 263882 - DNA, 20 bp, Artificial Sequence
  Description of Artificial Sequence: Synthetic oligonucleotide
  Target: LAMA2; (-) strand; PAM type: YTN; PAM sequence: TTG
gtgaactgagacaaaagttt

SEQ ID NO: 263883 - DNA, 20 bp, Artificial Sequence
  Description of Artificial Sequence: Synthetic oligonucleotide
  Target: LAMA2; (-) strand; PAM type: YTN; PAM sequence: CTT
ggtgaactgagacaaaagtt

SEQ ID NO: 263884 - DNA, 20 bp, Artificial Sequence
  Description of Artificial Sequence: Synthetic oligonucleotide
  Target: LAMA2; (-) strand; PAM type: YTN; PAM sequence: CTC
ttggtgaactgagacaaaag

SEQ ID NO: 263885 - DNA, 20 bp, Artificial Sequence
  Description of Artificial Sequence: Synthetic oligonucleotide
  Target: LAMA2; (-) strand; PAM type: YTN; PAM sequence: TTC
ctcttggtgaactgagacaa

SEQ ID NO: 263886 - DNA, 20 bp, Artificial Sequence
  Description of Artificial Sequence: Synthetic oligonucleotide
  Target: LAMA2; (-) strand; PAM type: YTN; PAM sequence: TTT
cctcttggtgaactgagaca

SEQ ID NO: 263887 - DNA, 20 bp, Artificial Sequence
  Description of Artificial Sequence: Synthetic oligonucleotide
  Target: LAMA2; (-) strand; PAM type: YTN; PAM sequence: TTT
tcctcttggtgaactgagac

SEQ ID NO: 263888 - DNA, 20 bp, Artificial Sequence
  Description of Artificial Sequence: Synthetic oligonucleotide
  Target: LAMA2; (-) strand; PAM type: YTN; PAM sequence: TTT
ttcctcttggtgaactgaga

SEQ ID NO: 263889 - DNA, 20 bp, Artificial Sequence
  Description of Artificial Sequence: Synthetic oligonucleotide
  Target: LAMA2; (-) strand; PAM type: YTN; PAM sequence: TTG
aatgtttttcctcttggtga

SEQ ID NO: 263890 - DNA, 20 bp, Artificial Sequence
  Description of Artificial Sequence: Synthetic oligonucleotide
  Target: LAMA2; (-) strand; PAM type: YTN; PAM sequence: TTG
tcaatattgaatgtttttcc

SEQ ID NO: 263891 - DNA, 20 bp, Artificial Sequence
  Description of Artificial Sequence: Synthetic oligonucleotide
  Target: LAMA2; (-) strand; PAM type: YTN; PAM sequence: TTT
gtcaatattgaatgtttttc

SEQ ID NO: 263892 - DNA, 20 bp, Artificial Sequence
  Description of Artificial Sequence: Synthetic oligonucleotide
  Target: LAMA2; (-) strand; PAM type: YTN; PAM sequence: TTA
gggtgtttgtcaatattgaa

SEQ ID NO: 263893 - DNA, 20 bp, Artificial Sequence
  Description of Artificial Sequence: Synthetic oligonucleotide
  Target: LAMA2; (-) strand; PAM type: YTN; PAM sequence: TTT
agggtgtttgtcaatattga

SEQ ID NO: 263894 - DNA, 20 bp, Artificial Sequence
  Description of Artificial Sequence: Synthetic oligonucleotide
  Target: LAMA2; (-) strand; PAM type: YTN; PAM sequence: TTT
tagggtgtttgtcaatattg

SEQ ID NO: 263895 - DNA, 20 bp, Artificial Sequence
  Description of Artificial Sequence: Synthetic oligonucleotide
  Target: LAMA2; (-) strand; PAM type: YTN; PAM sequence: TTT
ttagggtgtttgtcaatatt

SEQ ID NO: 263896 - DNA, 20 bp, Artificial Sequence
  Description of Artificial Sequence: Synthetic oligonucleotide
  Target: LAMA2; (-) strand; PAM type: YTN; PAM sequence: TTA
aataatttttagggtgtttg

SEQ ID NO: 263897 - DNA, 20 bp, Artificial Sequence
  Description of Artificial Sequence: Synthetic oligonucleotide
  Target: LAMA2; (-) strand; PAM type: YTN; PAM sequence: TTT
aaataatttttagggtgttt

SEQ ID NO: 263898 - DNA, 20 bp, Artificial Sequence
  Description of Artificial Sequence: Synthetic oligonucleotide
  Target: LAMA2; (-) strand; PAM type: YTN; PAM sequence: TTC
aatttaaataatttttaggg

SEQ ID NO: 263899 - DNA, 20 bp, Artificial Sequence
  Description of Artificial Sequence: Synthetic oligonucleotide
  Target: LAMA2; (-) strand; PAM type: YTN; PAM sequence: TTT
caatttaaataatttttagg

SEQ ID NO: 263900 - DNA, 20 bp, Artificial Sequence
  Description of Artificial Sequence: Synthetic oligonucleotide
  Target: LAMA2; (-) strand; PAM type: YTN; PAM sequence: CTT
tcaatttaaataatttttag

SEQ ID NO: 263901 - DNA, 20 bp, Artificial Sequence
  Description of Artificial Sequence: Synthetic oligonucleotide
  Target: LAMA2; (-) strand; PAM type: YTN; PAM sequence: TTC
tttcaatttaaataattttt

SEQ ID NO: 263902 - DNA, 20 bp, Artificial Sequence
  Description of Artificial Sequence: Synthetic oligonucleotide
  Target: LAMA2; (-) strand; PAM type: YTN; PAM sequence: CTA
ttctttcaatttaaataatt

SEQ ID NO: 263903 - DNA, 20 bp, Artificial Sequence
  Description of Artificial Sequence: Synthetic oligonucleotide
  Target: LAMA2; (-) strand; PAM type: YTN; PAM sequence: TTG
cactattctttcaatttaaa

SEQ ID NO: 263904 - DNA, 20 bp, Artificial Sequence
  Description of Artificial Sequence: Synthetic oligonucleotide
  Target: LAMA2; (-) strand; PAM type: YTN; PAM sequence: TTT
gcactattctttcaatttaa

SEQ ID NO: 263905 - DNA, 20 bp, Artificial Sequence
  Description of Artificial Sequence: Synthetic oligonucleotide
  Target: LAMA2; (-) strand; PAM type: YTN; PAM sequence: TTT
tgcactattctttcaattta

SEQ ID NO: 263906 - DNA, 20 bp, Artificial Sequence
  Description of Artificial Sequence: Synthetic oligonucleotide
  Target: LAMA2; (-) strand; PAM type: YTN; PAM sequence: TTA
ttttgcactattctttcaat

SEQ ID NO: 263907 - DNA, 20 bp, Artificial Sequence
  Description of Artificial Sequence: Synthetic oligonucleotide
  Target: LAMA2; (-) strand; PAM type: YTN; PAM sequence: TTG
attattttgcactattcttt

SEQ ID NO: 263908 - DNA, 20 bp, Artificial Sequence
  Description of Artificial Sequence: Synthetic oligonucleotide
  Target: LAMA2; (-) strand; PAM type: YTN; PAM sequence: CTT
gattattttgcactattctt

SEQ ID NO: 263909 - DNA, 20 bp, Artificial Sequence
  Description of Artificial Sequence: Synthetic oligonucleotide
  Target: LAMA2; (-) strand; PAM type: YTN; PAM sequence: TTC
cttgattattttgcactatt

SEQ ID NO: 263910 - DNA, 20 bp, Artificial Sequence
  Description of Artificial Sequence: Synthetic oligonucleotide
  Target: LAMA2; (-) strand; PAM type: YTN; PAM sequence: TTT
ccttgattattttgcactat

SEQ ID NO: 263911 - DNA, 20 bp, Artificial Sequence
  Description of Artificial Sequence: Synthetic oligonucleotide
  Target: LAMA2; (-) strand; PAM type: YTN; PAM sequence: TTT
tccttgattattttgcacta

SEQ ID NO: 263912 - DNA, 20 bp, Artificial Sequence
  Description of Artificial Sequence: Synthetic oligonucleotide
  Target: LAMA2; (-) strand; PAM type: YTN; PAM sequence: CTT
ttccttgattattttgcact

SEQ ID NO: 263913 - DNA, 20 bp, Artificial Sequence
  Description of Artificial Sequence: Synthetic oligonucleotide
  Target: LAMA2; (-) strand; PAM type: YTN; PAM sequence: CTC
ttttccttgattattttgca

SEQ ID NO: 263914 - DNA, 20 bp, Artificial Sequence
  Description of Artificial Sequence: Synthetic oligonucleotide
  Target: LAMA2; (-) strand; PAM type: YTN; PAM sequence: CTC
tcttttccttgattattttg

SEQ ID NO: 263915 - DNA, 20 bp, Artificial Sequence
  Description of Artificial Sequence: Synthetic oligonucleotide
  Target: LAMA2; (-) strand; PAM type: YTN; PAM sequence: TTC
tctcttttccttgattattt

SEQ ID NO: 263916 - DNA, 20 bp, Artificial Sequence
  Description of Artificial Sequence: Synthetic oligonucleotide
  Target: LAMA2; (-) strand; PAM type: YTN; PAM sequence: TTA
aaaaaaaaaacagaaattct

SEQ ID NO: 263917 - DNA, 20 bp, Artificial Sequence
  Description of Artificial Sequence: Synthetic oligonucleotide
  Target: LAMA2; (-) strand; PAM type: YTN; PAM sequence: TTT
aaaaaaaaaaacagaaattc

SEQ ID NO: 263918 - DNA, 20 bp, Artificial Sequence
  Description of Artificial Sequence: Synthetic oligonucleotide
  Target: LAMA2; (-) strand; PAM type: YTN; PAM sequence: TTT
taaaaaaaaaaacagaaatt

SEQ ID NO: 263919 - DNA, 20 bp, Artificial Sequence
  Description of Artificial Sequence: Synthetic oligonucleotide
  Target: LAMA2; (-) strand; PAM type: YTN; PAM sequence: TTT
ttaaaaaaaaaaacagaaat

SEQ ID NO: 263920 - DNA, 20 bp, Artificial Sequence
  Description of Artificial Sequence: Synthetic oligonucleotide
  Target: LAMA2; (-) strand; PAM type: YTN; PAM sequence: TTT
tttaaaaaaaaaaacagaaa

SEQ ID NO: 263921 - DNA, 20 bp, Artificial Sequence
  Description of Artificial Sequence: Synthetic oligonucleotide
  Target: LAMA2; (-) strand; PAM type: YTN; PAM sequence: TTT
ttttaaaaaaaaaaacagaa

SEQ ID NO: 263922 - DNA, 20 bp, Artificial Sequence
  Description of Artificial Sequence: Synthetic oligonucleotide
  Target: LAMA2; (-) strand; PAM type: YTN; PAM sequence: TTT
tttttaaaaaaaaaaacaga

SEQ ID NO: 263923 - DNA, 20 bp, Artificial Sequence
  Description of Artificial Sequence: Synthetic oligonucleotide
  Target: LAMA2; (-) strand; PAM type: YTN; PAM sequence: CTG
ttttttttaaaaaaaaaaac

SEQ ID NO: 263924 - DNA, 20 bp, Artificial Sequence
  Description of Artificial Sequence: Synthetic oligonucleotide
  Target: LAMA2; (-) strand; PAM type: YTN; PAM sequence: TTA
aaacgtgctgttttttttaa

SEQ ID NO: 263925 - DNA, 20 bp, Artificial Sequence
  Description of Artificial Sequence: Synthetic oligonucleotide
  Target: LAMA2; (-) strand; PAM type: YTN; PAM sequence: CTT
aaaacgtgctgtttttttta

SEQ ID NO: 263926 - DNA, 20 bp, Artificial Sequence
  Description of Artificial Sequence: Synthetic oligonucleotide
  Target: LAMA2; (-) strand; PAM type: YTN; PAM sequence: TTA
gaaacttaaaacgtgctgtt

SEQ ID NO: 263927 - DNA, 20 bp, Artificial Sequence
  Description of Artificial Sequence: Synthetic oligonucleotide
  Target: LAMA2; (-) strand; PAM type: YTN; PAM sequence: TTG
acaacgcaaagattagaaac

SEQ ID NO: 263928 - DNA, 20 bp, Artificial Sequence
  Description of Artificial Sequence: Synthetic oligonucleotide
  Target: LAMA2; (-) strand; PAM type: YTN; PAM sequence: TTT
gacaacgcaaagattagaaa

SEQ ID NO: 263929 - DNA, 20 bp, Artificial Sequence
  Description of Artificial Sequence: Synthetic oligonucleotide
  Target: LAMA2; (-) strand; PAM type: YTN; PAM sequence: CTA
tgaggtagcaaaagagagag

SEQ ID NO: 263930 - DNA, 20 bp, Artificial Sequence
  Description of Artificial Sequence: Synthetic oligonucleotide
  Target: LAMA2; (-) strand; PAM type: YTN; PAM sequence: TTC
tatgaggtagcaaaagagag

SEQ ID NO: 263931 - DNA, 20 bp, Artificial Sequence
  Description of Artificial Sequence: Synthetic oligonucleotide
  Target: LAMA2; (-) strand; PAM type: YTN; PAM sequence: TTT
ctatgaggtagcaaaagaga

SEQ ID NO: 263932 - DNA, 20 bp, Artificial Sequence
  Description of Artificial Sequence: Synthetic oligonucleotide
  Target: LAMA2; (-) strand; PAM type: YTN; PAM sequence: TTA
aatttctatgaggtagcaaa

SEQ ID NO: 263933 - DNA, 20 bp, Artificial Sequence
  Description of Artificial Sequence: Synthetic oligonucleotide
  Target: LAMA2; (-) strand; PAM type: YTN; PAM sequence: CTG
atggattaaatttctatgag

SEQ ID NO: 263934 - DNA, 20 bp, Artificial Sequence
  Description of Artificial Sequence: Synthetic oligonucleotide
  Target: LAMA2; (-) strand; PAM type: YTN; PAM sequence: TTC
gtatcctgatggattaaatt

SEQ ID NO: 263935 - DNA, 20 bp, Artificial Sequence
  Description of Artificial Sequence: Synthetic oligonucleotide
  Target: LAMA2; (-) strand; PAM type: YTN; PAM sequence: TTT
cgtatcctgatggattaaat

SEQ ID NO: 263936 - DNA, 20 bp, Artificial Sequence
  Description of Artificial Sequence: Synthetic oligonucleotide
  Target: LAMA2; (-) strand; PAM type: YTN; PAM sequence: TTA
tttcgtatcctgatggatta

SEQ ID NO: 263937 - DNA, 20 bp, Artificial Sequence
  Description of Artificial Sequence: Synthetic oligonucleotide
  Target: LAMA2; (-) strand; PAM type: YTN; PAM sequence: TTT
atttcgtatcctgatggatt

SEQ ID NO: 263938 - DNA, 20 bp, Artificial Sequence
  Description of Artificial Sequence: Synthetic oligonucleotide
  Target: LAMA2; (-) strand; PAM type: YTN; PAM sequence: TTG
atttatttcgtatcctgatg

SEQ ID NO: 263939 - DNA, 20 bp, Artificial Sequence
  Description of Artificial Sequence: Synthetic oligonucleotide
  Target: LAMA2; (-) strand; PAM type: YTN; PAM sequence: TTT
gatttatttcgtatcctgat

SEQ ID NO: 263940 - DNA, 20 bp, Artificial Sequence
  Description of Artificial Sequence: Synthetic oligonucleotide
  Target: LAMA2; (-) strand; PAM type: YTN; PAM sequence: TTT
tgatttatttcgtatcctga

SEQ ID NO: 263941 - DNA, 20 bp, Artificial Sequence
  Description of Artificial Sequence: Synthetic oligonucleotide
  Target: LAMA2; (-) strand; PAM type: YTN; PAM sequence: TTA
gttttgatttatttcgtatc

SEQ ID NO: 263942 - DNA, 20 bp, Artificial Sequence
  Description of Artificial Sequence: Synthetic oligonucleotide
  Target: LAMA2; (-) strand; PAM type: YTN; PAM sequence: TTA
gattagttttgatttatttc

SEQ ID NO: 263943 - DNA, 20 bp, Artificial Sequence
  Description of Artificial Sequence: Synthetic oligonucleotide
  Target: LAMA2; (-) strand; PAM type: YTN; PAM sequence: TTT
agattagttttgatttattt

SEQ ID NO: 263944 - DNA, 20 bp, Artificial Sequence
  Description of Artificial Sequence: Synthetic oligonucleotide
  Target: LAMA2; (-) strand; PAM type: YTN; PAM sequence: TTT
tagattagttttgatttatt

SEQ ID NO: 263945 - DNA, 20 bp, Artificial Sequence
  Description of Artificial Sequence: Synthetic oligonucleotide
  Target: LAMA2; (-) strand; PAM type: YTN; PAM sequence: TTA
acattttagattagttttga

SEQ ID NO: 263946 - DNA, 20 bp, Artificial Sequence
  Description of Artificial Sequence: Synthetic oligonucleotide
  Target: LAMA2; (-) strand; PAM type: YTN; PAM sequence: TTT
aacattttagattagttttg

SEQ ID NO: 263947 - DNA, 20 bp, Artificial Sequence
  Description of Artificial Sequence: Synthetic oligonucleotide
  Target: LAMA2; (-) strand; PAM type: YTN; PAM sequence: TTT
taacattttagattagtttt

SEQ ID NO: 263948 - DNA, 20 bp, Artificial Sequence
  Description of Artificial Sequence: Synthetic oligonucleotide
  Target: LAMA2; (-) strand; PAM type: YTN; PAM sequence: TTC
agttttaacattttagatta

SEQ ID NO: 263949 - DNA, 20 bp, Artificial Sequence
  Description of Artificial Sequence: Synthetic oligonucleotide
  Target: LAMA2; (-) strand; PAM type: YTN; PAM sequence: TTT
cagttttaacattttagatt

SEQ ID NO: 263950 - DNA, 20 bp, Artificial Sequence
  Description of Artificial Sequence: Synthetic oligonucleotide
  Target: LAMA2; (-) strand; PAM type: YTN; PAM sequence: CTT
tcagttttaacattttagat

SEQ ID NO: 263951 - DNA, 20 bp, Artificial Sequence
  Description of Artificial Sequence: Synthetic oligonucleotide
  Target: LAMA2; (-) strand; PAM type: YTN; PAM sequence: CTA
aagtgtctttcagttttaac

SEQ ID NO: 263952 - DNA, 20 bp, Artificial Sequence
  Description of Artificial Sequence: Synthetic oligonucleotide
  Target: LAMA2; (-) strand; PAM type: YTN; PAM sequence: TTC
taaagtgtctttcagtttta

SEQ ID NO: 263953 - DNA, 20 bp, Artificial Sequence
  Description of Artificial Sequence: Synthetic oligonucleotide
  Target: LAMA2; (-) strand; PAM type: YTN; PAM sequence: CTT
ctaaagtgtctttcagtttt

SEQ ID NO: 263954 - DNA, 20 bp, Artificial Sequence
  Description of Artificial Sequence: Synthetic oligonucleotide
  Target: LAMA2; (-) strand; PAM type: YTN; PAM sequence: CTC
agatgacttctaaagtgtct

SEQ ID NO: 263955 - DNA, 20 bp, Artificial Sequence
  Description of Artificial Sequence: Synthetic oligonucleotide
  Target: LAMA2; (-) strand; PAM type: YTN; PAM sequence: TTA
actcagatgacttctaaagt

SEQ ID NO: 263956 - DNA, 20 bp, Artificial Sequence
  Description of Artificial Sequence: Synthetic oligonucleotide
  Target: LAMA2; (-) strand; PAM type: YTN; PAM sequence: CTC
atcccacaaatgagtaggtt

SEQ ID NO: 263957 - DNA, 20 bp, Artificial Sequence
  Description of Artificial Sequence: Synthetic oligonucleotide
  Target: LAMA2; (-) strand; PAM type: YTN; PAM sequence: TTC
ctcatcccacaaatgagtag

SEQ ID NO: 263958 - DNA, 20 bp, Artificial Sequence
  Description of Artificial Sequence: Synthetic oligonucleotide
  Target: LAMA2; (-) strand; PAM type: YTN; PAM sequence: TTT
cctcatcccacaaatgagta

SEQ ID NO: 263959 - DNA, 20 bp, Artificial Sequence
  Description of Artificial Sequence: Synthetic oligonucleotide
  Target: LAMA2; (-) strand; PAM type: YTN; PAM sequence: TTG
agacccagtttcctcatccc

SEQ ID NO: 263960 - DNA, 20 bp, Artificial Sequence
  Description of Artificial Sequence: Synthetic oligonucleotide
  Target: LAMA2; (-) strand; PAM type: YTN; PAM sequence: TTT
gagacccagtttcctcatcc

SEQ ID NO: 263961 - DNA, 20 bp, Artificial Sequence
  Description of Artificial Sequence: Synthetic oligonucleotide
  Target: LAMA2; (-) strand; PAM type: YTN; PAM sequence: CTT
tgagacccagtttcctcatc

SEQ ID NO: 263962 - DNA, 20 bp, Artificial Sequence
  Description of Artificial Sequence: Synthetic oligonucleotide
  Target: LAMA2; (-) strand; PAM type: YTN; PAM sequence: TTA
ctttgagacccagtttcctc

SEQ ID NO: 263963 - DNA, 20 bp, Artificial Sequence
  Description of Artificial Sequence: Synthetic oligonucleotide
  Target: LAMA2; (-) strand; PAM type: YTN; PAM sequence: CTG
agagatatgggcaagttact

SEQ ID NO: 263964 - DNA, 20 bp, Artificial Sequence
  Description of Artificial Sequence: Synthetic oligonucleotide
  Target: LAMA2; (-) strand; PAM type: YTN; PAM sequence: TTG
tctgagagatatgggcaagt

SEQ ID NO: 263965 - DNA, 20 bp, Artificial Sequence
  Description of Artificial Sequence: Synthetic oligonucleotide
  Target: LAMA2; (-) strand; PAM type: YTN; PAM sequence: TTT
gtctgagagatatgggcaag

SEQ ID NO: 263966 - DNA, 20 bp, Artificial Sequence
  Description of Artificial Sequence: Synthetic oligonucleotide
  Target: LAMA2; (-) strand; PAM type: YTN; PAM sequence: TTT
tgtctgagagatatgggcaa

SEQ ID NO: 263967 - DNA, 20 bp, Artificial Sequence
  Description of Artificial Sequence: Synthetic oligonucleotide
  Target: LAMA2; (-) strand; PAM type: YTN; PAM sequence: TTA
gttttgtctgagagatatgg

SEQ ID NO: 263968 - DNA, 20 bp, Artificial Sequence
  Description of Artificial Sequence: Synthetic oligonucleotide
  Target: LAMA2; (-) strand; PAM type: YTN; PAM sequence: TTA
tgttagttttgtctgagaga

SEQ ID NO: 263969 - DNA, 20 bp, Artificial Sequence
  Description of Artificial Sequence: Synthetic oligonucleotide
  Target: LAMA2; (-) strand; PAM type: YTN; PAM sequence: TTT
atgttagttttgtctgagag

SEQ ID NO: 263970 - DNA, 20 bp, Artificial Sequence
  Description of Artificial Sequence: Synthetic oligonucleotide
  Target: LAMA2; (-) strand; PAM type: YTN; PAM sequence: TTT
tatgttagttttgtctgaga

SEQ ID NO: 263971 - DNA, 20 bp, Artificial Sequence
  Description of Artificial Sequence: Synthetic oligonucleotide
  Target: LAMA2; (-) strand; PAM type: YTN; PAM sequence: TTG
attttatgttagttttgtct

SEQ ID NO: 263972 - DNA, 20 bp, Artificial Sequence
  Description of Artificial Sequence: Synthetic oligonucleotide
  Target: LAMA2; (-) strand; PAM type: YTN; PAM sequence: CTT
gattttatgttagttttgtc

SEQ ID NO: 263973 - DNA, 20 bp, Artificial Sequence
  Description of Artificial Sequence: Synthetic oligonucleotide
  Target: LAMA2; (-) strand; PAM type: YTN; PAM sequence: CTA
taaaaggaatgaatagggaa

SEQ ID NO: 263974 - DNA, 20 bp, Artificial Sequence
  Description of Artificial Sequence: Synthetic oligonucleotide
  Target: LAMA2; (-) strand; PAM type: YTN; PAM sequence: TTG
gtactataaaaggaatgaat

SEQ ID NO: 263975 - DNA, 20 bp, Artificial Sequence
  Description of Artificial Sequence: Synthetic oligonucleotide
  Target: LAMA2; (-) strand; PAM type: YTN; PAM sequence: CTT
ggtactataaaaggaatgaa

SEQ ID NO: 263976 - DNA, 20 bp, Artificial Sequence
  Description of Artificial Sequence: Synthetic oligonucleotide
  Target: LAMA2; (-) strand; PAM type: YTN; PAM sequence: CTC
cttggtactataaaaggaat

SEQ ID NO: 263977 - DNA, 20 bp, Artificial Sequence
  Description of Artificial Sequence: Synthetic oligonucleotide
  Target: LAMA2; (-) strand; PAM type: YTN; PAM sequence: CTC
aaaaaaataaataaatacat

SEQ ID NO: 263978 - DNA, 20 bp, Artificial Sequence
  Description of Artificial Sequence: Synthetic oligonucleotide
  Target: LAMA2; (-) strand; PAM type: YTN; PAM sequence: CTC
catctcaaaaaaataaataa

SEQ ID NO: 263979 - DNA, 20 bp, Artificial Sequence
  Description of Artificial Sequence: Synthetic oligonucleotide
  Target: LAMA2; (-) strand; PAM type: YTN; PAM sequence: CTG
agtgacaaagcgagactcca

SEQ ID NO: 263980 - DNA, 20 bp, Artificial Sequence
  Description of Artificial Sequence: Synthetic oligonucleotide
  Target: LAMA2; (-) strand; PAM type: YTN; PAM sequence: CTC
cagcctgagtgacaaagcga

SEQ ID NO: 263981 - DNA, 20 bp, Artificial Sequence
  Description of Artificial Sequence: Synthetic oligonucleotide
  Target: LAMA2; (-) strand; PAM type: YTN; PAM sequence: CTG
cactccagcctgagtgacaa

SEQ ID NO: 263982 - DNA, 20 bp, Artificial Sequence
  Description of Artificial Sequence: Synthetic oligonucleotide
  Target: LAMA2; (-) strand; PAM type: YTN; PAM sequence: CTG
gccactgcactccagcctga

SEQ ID NO: 263983 - DNA, 20 bp, Artificial Sequence
  Description of Artificial Sequence: Synthetic oligonucleotide
  Target: LAMA2; (-) strand; PAM type: YTN; PAM sequence: CTG
agatctggccactgcactcc

SEQ ID NO: 263984 - DNA, 20 bp, Artificial Sequence
  Description of Artificial Sequence: Synthetic oligonucleotide
  Target: LAMA2; (-) strand; PAM type: YTN; PAM sequence: TTG
cagtaagctgagatctggcc

SEQ ID NO: 263985 - DNA, 20 bp, Artificial Sequence
  Description of Artificial Sequence: Synthetic oligonucleotide
  Target: LAMA2; (-) strand; PAM type: YTN; PAM sequence: CTG
ggaagtggaggttgcagtaa

SEQ ID NO: 263986 - DNA, 20 bp, Artificial Sequence
  Description of Artificial Sequence: Synthetic oligonucleotide
  Target: LAMA2; (-) strand; PAM type: YTN; PAM sequence: TTG
aacctgggaagtggaggttg

SEQ ID NO: 263987 - DNA, 20 bp, Artificial Sequence
  Description of Artificial Sequence: Synthetic oligonucleotide
  Target: LAMA2; (-) strand; PAM type: YTN; PAM sequence: CTT
gaacctgggaagtggaggtt

SEQ ID NO: 263988 - DNA, 20 bp, Artificial Sequence
  Description of Artificial Sequence: Synthetic oligonucleotide
  Target: LAMA2; (-) strand; PAM type: YTN; PAM sequence: CTG
aggcacgagcatcgcttgaa

SEQ ID NO: 263989 - DNA, 20 bp, Artificial Sequence
  Description of Artificial Sequence: Synthetic oligonucleotide
  Target: LAMA2; (-) strand; PAM type: YTN; PAM sequence: CTG
gaggctgaggcacgagcatc

SEQ ID NO: 263990 - DNA, 20 bp, Artificial Sequence
  Description of Artificial Sequence: Synthetic oligonucleotide
  Target: LAMA2; (-) strand; PAM type: YTN; PAM sequence: CTC
tggaggctgaggcacgagca

SEQ ID NO: 263991 - DNA, 20 bp, Artificial Sequence
  Description of Artificial Sequence: Synthetic oligonucleotide
  Target: LAMA2; (-) strand; PAM type: YTN; PAM sequence: CTA
ctctggaggctgaggcacga

SEQ ID NO: 263992 - DNA, 20 bp, Artificial Sequence
  Description of Artificial Sequence: Synthetic oligonucleotide
  Target: LAMA2; (-) strand; PAM type: YTN; PAM sequence: CTG
tagtcccaactactctggag

SEQ ID NO: 263993 - DNA, 20 bp, Artificial Sequence
  Description of Artificial Sequence: Synthetic oligonucleotide
  Target: LAMA2; (-) strand; PAM type: YTN; PAM sequence: TTA
gccaggcgtggtgatgcgtg

SEQ ID NO: 263994 - DNA, 20 bp, Artificial Sequence
  Description of Artificial Sequence: Synthetic oligonucleotide
  Target: LAMA2; (-) strand; PAM type: YTN; PAM sequence: CTA
aaaatacaaaaattagccag

SEQ ID NO: 263995 - DNA, 20 bp, Artificial Sequence
  Description of Artificial Sequence: Synthetic oligonucleotide
  Target: LAMA2; (-) strand; PAM type: YTN; PAM sequence: TTG
actaaaaatacaaaaattag

SEQ ID NO: 263996 - DNA, 20 bp, Artificial Sequence
  Description of Artificial Sequence: Synthetic oligonucleotide
  Target: LAMA2; (-) strand; PAM type: YTN; PAM sequence: CTT
gactaaaaatacaaaaatta

SEQ ID NO: 263997 - DNA, 20 bp, Artificial Sequence
  Description of Artificial Sequence: Synthetic oligonucleotide
  Target: LAMA2; (-) strand; PAM type: YTN; PAM sequence: CTG
gccaacatggtgaaaccatg

SEQ ID NO: 263998 - DNA, 20 bp, Artificial Sequence
  Description of Artificial Sequence: Synthetic oligonucleotide
  Target: LAMA2; (-) strand; PAM type: YTN; PAM sequence: TTC
cagaccagcctggccaacat

SEQ ID NO: 263999 - DNA, 20 bp, Artificial Sequence
  Description of Artificial Sequence: Synthetic oligonucleotide
  Target: LAMA2; (-) strand; PAM type: YTN; PAM sequence: TTG
aggtcaggagttccagacca

SEQ ID NO: 264000 - DNA, 20 bp, Artificial Sequence
  Description of Artificial Sequence: Synthetic oligonucleotide
  Target: LAMA2; (-) strand; PAM type: YTN; PAM sequence: CTT
gaggtcaggagttccagacc

SEQ ID NO: 264001 - DNA, 20 bp, Artificial Sequence
  Description of Artificial Sequence: Synthetic oligonucleotide
  Target: LAMA2; (-) strand; PAM type: YTN; PAM sequence: TTA
cttgaggtcaggagttccag

SEQ ID NO: 264002 - DNA, 20 bp, Artificial Sequence
  Description of Artificial Sequence: Synthetic oligonucleotide
  Target: LAMA2; (-) strand; PAM type: YTN; PAM sequence: CTG
gattacttgaggtcaggagt

SEQ ID NO: 264003 - DNA, 20 bp, Artificial Sequence
  Description of Artificial Sequence: Synthetic oligonucleotide
  Target: LAMA2; (-) strand; PAM type: YTN; PAM sequence: CTG
aggtggctggattacttgag

SEQ ID NO: 264004 - DNA, 20 bp, Artificial Sequence
  Description of Artificial Sequence: Synthetic oligonucleotide
  Target: LAMA2; (-) strand; PAM type: YTN; PAM sequence: TTG
ggaggctgaggtggctggat

SEQ ID NO: 264005 - DNA, 20 bp, Artificial Sequence
  Description of Artificial Sequence: Synthetic oligonucleotide
  Target: LAMA2; (-) strand; PAM type: YTN; PAM sequence: TTT
gggaggctgaggtggctgga

SEQ ID NO: 264006 - DNA, 20 bp, Artificial Sequence
  Description of Artificial Sequence: Synthetic oligonucleotide
  Target: LAMA2; (-) strand; PAM type: YTN; PAM sequence: TTT
tgggaggctgaggtggctgg

SEQ ID NO: 264007 - DNA, 20 bp, Artificial Sequence
  Description of Artificial Sequence: Synthetic oligonucleotide
  Target: LAMA2; (-) strand; PAM type: YTN; PAM sequence: CTG
taatcccagcattttgggag

SEQ ID NO: 264008 - DNA, 20 bp, Artificial Sequence
  Description of Artificial Sequence: Synthetic oligonucleotide
  Target: LAMA2; (-) strand; PAM type: YTN; PAM sequence: CTC
acgcctgtaatcccagcatt

SEQ ID NO: 264009 - DNA, 20 bp, Artificial Sequence
  Description of Artificial Sequence: Synthetic oligonucleotide
  Target: LAMA2; (-) strand; PAM type: YTN; PAM sequence: TTA
aaagggcacatggaaaaggc

SEQ ID NO: 264010 - DNA, 20 bp, Artificial Sequence
  Description of Artificial Sequence: Synthetic oligonucleotide
  Target: LAMA2; (-) strand; PAM type: YTN; PAM sequence: TTT
aaaagggcacatggaaaagg

SEQ ID NO: 264011 - DNA, 20 bp, Artificial Sequence
  Description of Artificial Sequence: Synthetic oligonucleotide
  Target: LAMA2; (-) strand; PAM type: YTN; PAM sequence: TTG
tgtatgtgtgcatttaaaag

SEQ ID NO: 264012 - DNA, 20 bp, Artificial Sequence
  Description of Artificial Sequence: Synthetic oligonucleotide
  Target: LAMA2; (-) strand; PAM type: YTN; PAM sequence: CTG
ttgtgtatgtgtgcatttaa

SEQ ID NO: 264013 - DNA, 20 bp, Artificial Sequence
  Description of Artificial Sequence: Synthetic oligonucleotide
  Target: LAMA2; (-) strand; PAM type: YTN; PAM sequence: CTC
tgttgtgtatgtgtgcattt

SEQ ID NO: 264014 - DNA, 20 bp, Artificial Sequence
  Description of Artificial Sequence: Synthetic oligonucleotide
  Target: LAMA2; (-) strand; PAM type: YTN; PAM sequence: TTC
tctgttgtgtatgtgtgcat

SEQ ID NO: 264015 - DNA, 20 bp, Artificial Sequence
  Description of Artificial Sequence: Synthetic oligonucleotide
  Target: LAMA2; (-) strand; PAM type: YTN; PAM sequence: TTA
ttctctgttgtgtatgtgtg

SEQ ID NO: 264016 - DNA, 20 bp, Artificial Sequence
  Description of Artificial Sequence: Synthetic oligonucleotide
  Target: LAMA2; (-) strand; PAM type: YTN; PAM sequence: CTT
attctctgttgtgtatgtgt

SEQ ID NO: 264017 - DNA, 20 bp, Artificial Sequence
  Description of Artificial Sequence: Synthetic oligonucleotide
  Target: LAMA2; (-) strand; PAM type: YTN; PAM sequence: CTC
cttattctctgttgtgtatg

SEQ ID NO: 264018 - DNA, 20 bp, Artificial Sequence
  Description of Artificial Sequence: Synthetic oligonucleotide
  Target: LAMA2; (-) strand; PAM type: YTN; PAM sequence: CTG
gcaagctccttattctctgt

SEQ ID NO: 264019 - DNA, 20 bp, Artificial Sequence
  Description of Artificial Sequence: Synthetic oligonucleotide
  Target: LAMA2; (-) strand; PAM type: YTN; PAM sequence: TTA
gagcgcagcgtcactggcaa

SEQ ID NO: 264020 - DNA, 20 bp, Artificial Sequence
  Description of Artificial Sequence: Synthetic oligonucleotide
  Target: LAMA2; (-) strand; PAM type: YTN; PAM sequence: CTA
acagacaattagagcgcagc

SEQ ID NO: 264021 - DNA, 20 bp, Artificial Sequence
  Description of Artificial Sequence: Synthetic oligonucleotide
  Target: LAMA2; (-) strand; PAM type: YTN; PAM sequence: TTA
gaaaagtctaacagacaatt

SEQ ID NO: 264022 - DNA, 20 bp, Artificial Sequence
  Description of Artificial Sequence: Synthetic oligonucleotide
  Target: LAMA2; (-) strand; PAM type: YTN; PAM sequence: CTT
agaaaagtctaacagacaat

SEQ ID NO: 264023 - DNA, 20 bp, Artificial Sequence
  Description of Artificial Sequence: Synthetic oligonucleotide
  Target: LAMA2; (-) strand; PAM type: YTN; PAM sequence: CTC
ttagaaaagtctaacagaca

SEQ ID NO: 264024 - DNA, 20 bp, Artificial Sequence
  Description of Artificial Sequence: Synthetic oligonucleotide
  Target: LAMA2; (-) strand; PAM type: YTN; PAM sequence: TTA
aaactcttagaaaagtctaa

SEQ ID NO: 264025 - DNA, 20 bp, Artificial Sequence
  Description of Artificial Sequence: Synthetic oligonucleotide
  Target: LAMA2; (-) strand; PAM type: YTN; PAM sequence: TTT
aaaactcttagaaaagtcta

SEQ ID NO: 264026 - DNA, 20 bp, Artificial Sequence
  Description of Artificial Sequence: Synthetic oligonucleotide
  Target: LAMA2; (-) strand; PAM type: YTN; PAM sequence: TTT
taaaactcttagaaaagtct

SEQ ID NO: 264027 - DNA, 20 bp, Artificial Sequence
  Description of Artificial Sequence: Synthetic oligonucleotide
  Target: LAMA2; (-) strand; PAM type: YTN; PAM sequence: TTG
ttttaaaactcttagaaaag

SEQ ID NO: 264028 - DNA, 20 bp, Artificial Sequence
  Description of Artificial Sequence: Synthetic oligonucleotide
  Target: LAMA2; (-) strand; PAM type: YTN; PAM sequence: TTT
gttttaaaactcttagaaaa

SEQ ID NO: 264029 - DNA, 20 bp, Artificial Sequence
  Description of Artificial Sequence: Synthetic oligonucleotide
  Target: LAMA2; (-) strand; PAM type: YTN; PAM sequence: TTG
aggcccgagtttgttttaaa

SEQ ID NO: 264030 - DNA, 20 bp, Artificial Sequence
  Description of Artificial Sequence: Synthetic oligonucleotide
  Target: LAMA2; (-) strand; PAM type: YTN; PAM sequence: CTG
ggggagagttgaggcccgag

SEQ ID NO: 264031 - DNA, 20 bp, Artificial Sequence
  Description of Artificial Sequence: Synthetic oligonucleotide
  Target: LAMA2; (-) strand; PAM type: YTN; PAM sequence: CTC
tgggggagagttgaggcccg

SEQ ID NO: 264032 - DNA, 20 bp, Artificial Sequence
  Description of Artificial Sequence: Synthetic oligonucleotide
  Target: LAMA2; (-) strand; PAM type: YTN; PAM sequence: TTC
ctctgggggagagttgaggc

SEQ ID NO: 264033 - DNA, 20 bp, Artificial Sequence
  Description of Artificial Sequence: Synthetic oligonucleotide
  Target: LAMA2; (-) strand; PAM type: YTN; PAM sequence: CTA
gaggaggtggagtcaattcc

SEQ ID NO: 264034 - DNA, 20 bp, Artificial Sequence
  Description of Artificial Sequence: Synthetic oligonucleotide
  Target: LAMA2; (-) strand; PAM type: YTN; PAM sequence: CTG
tggtccggtccagccctaga

SEQ ID NO: 264035 - DNA, 20 bp, Artificial Sequence
  Description of Artificial Sequence: Synthetic oligonucleotide
  Target: LAMA2; (-) strand; PAM type: YTN; PAM sequence: CTG
acacaatagacaagcgccca

SEQ ID NO: 264036 - DNA, 20 bp, Artificial Sequence
  Description of Artificial Sequence: Synthetic oligonucleotide
  Target: LAMA2; (-) strand; PAM type: YTN; PAM sequence: TTC
cccgacaggcagcctgacac

SEQ ID NO: 264037 - DNA, 20 bp, Artificial Sequence
  Description of Artificial Sequence: Synthetic oligonucleotide
  Target: LAMA2; (-) strand; PAM type: YTN; PAM sequence: TTT
ccccgacaggcagcctgaca

SEQ ID NO: 264038 - DNA, 20 bp, Artificial Sequence
  Description of Artificial Sequence: Synthetic oligonucleotide
  Target: LAMA2; (-) strand; PAM type: YTN; PAM sequence: TTT
tccccgacaggcagcctgac

SEQ ID NO: 264039 - DNA, 20 bp, Artificial Sequence
  Description of Artificial Sequence: Synthetic oligonucleotide
  Target: LAMA2; (-) strand; PAM type: YTN; PAM sequence: CTG
tggttttccccgacaggcag

SEQ ID NO: 264040 - DNA, 20 bp, Artificial Sequence
  Description of Artificial Sequence: Synthetic oligonucleotide
  Target: LAMA2; (-) strand; PAM type: YTN; PAM sequence: TTA
ctgtggttttccccgacagg

SEQ ID NO: 264041 - DNA, 20 bp, Artificial Sequence
  Description of Artificial Sequence: Synthetic oligonucleotide
  Target: LAMA2; (-) strand; PAM type: YTN; PAM sequence: CTA
ttactgtggttttccccgac

SEQ ID NO: 264042 - DNA, 20 bp, Artificial Sequence
  Description of Artificial Sequence: Synthetic oligonucleotide
  Target: LAMA2; (-) strand; PAM type: YTN; PAM sequence: TTC
ctattactgtggttttcccc

SEQ ID NO: 264043 - DNA, 20 bp, Artificial Sequence
  Description of Artificial Sequence: Synthetic oligonucleotide
  Target: LAMA2; (-) strand; PAM type: YTN; PAM sequence: TTT
cctattactgtggttttccc

SEQ ID NO: 264044 - DNA, 20 bp, Artificial Sequence
  Description of Artificial Sequence: Synthetic oligonucleotide
  Target: LAMA2; (-) strand; PAM type: YTN; PAM sequence: TTT
tcctattactgtggttttcc

SEQ ID NO: 264045 - DNA, 20 bp, Artificial Sequence
  Description of Artificial Sequence: Synthetic oligonucleotide
  Target: LAMA2; (-) strand; PAM type: YTN; PAM sequence: TTT
ttcctattactgtggttttc

SEQ ID NO: 264046 - DNA, 20 bp, Artificial Sequence
  Description of Artificial Sequence: Synthetic oligonucleotide
  Target: LAMA2; (-) strand; PAM type: YTN; PAM sequence: CTA
acgcacaacacatttttcct

SEQ ID NO: 264047 - DNA, 20 bp, Artificial Sequence
  Description of Artificial Sequence: Synthetic oligonucleotide
  Target: LAMA2; (-) strand; PAM type: YTN; PAM sequence: CTC
taacgcacaacacatttttc

SEQ ID NO: 264048 - DNA, 20 bp, Artificial Sequence
  Description of Artificial Sequence: Synthetic oligonucleotide
  Target: LAMA2; (-) strand; PAM type: YTN; PAM sequence: CTA
ctctaacgcacaacacattt

SEQ ID NO: 264049 - DNA, 20 bp, Artificial Sequence
  Description of Artificial Sequence: Synthetic oligonucleotide
  Target: LAMA2; (-) strand; PAM type: YTN; PAM sequence: CTA
aggtgaagtctactctaacg

SEQ ID NO: 264050 - DNA, 20 bp, Artificial Sequence
  Description of Artificial Sequence: Synthetic oligonucleotide
  Target: LAMA2; (-) strand; PAM type: YTN; PAM sequence: TTG
taggtccaaatgtgaaggcg

SEQ ID NO: 264051 - DNA, 20 bp, Artificial Sequence
  Description of Artificial Sequence: Synthetic oligonucleotide
  Target: LAMA2; (-) strand; PAM type: YTN; PAM sequence: TTA
gcgttgtaggtccaaatgtg

SEQ ID NO: 264052 - DNA, 20 bp, Artificial Sequence
  Description of Artificial Sequence: Synthetic oligonucleotide
  Target: LAMA2; (-) strand; PAM type: YTN; PAM sequence: TTT
agcgttgtaggtccaaatgt

SEQ ID NO: 264053 - DNA, 20 bp, Artificial Sequence
  Description of Artificial Sequence: Synthetic oligonucleotide
  Target: LAMA2; (-) strand; PAM type: YTN; PAM sequence: TTG
tacagtttagcgttgtaggt

SEQ ID NO: 264054 - DNA, 20 bp, Artificial Sequence
  Description of Artificial Sequence: Synthetic oligonucleotide
  Target: LAMA2; (-) strand; PAM type: YTN; PAM sequence: CTC
atcgaggaattgtacagttt

SEQ ID NO: 264055 - DNA, 20 bp, Artificial Sequence
  Description of Artificial Sequence: Synthetic oligonucleotide
  Target: LAMA2; (-) strand; PAM type: YTN; PAM sequence: CTC
ctcatcgaggaattgtacag

SEQ ID NO: 264056 - DNA, 20 bp, Artificial Sequence
  Description of Artificial Sequence: Synthetic oligonucleotide
  Target: LAMA2; (-) strand; PAM type: YTN; PAM sequence: TTA
gaagaaaaagaaacacaaga

SEQ ID NO: 264057 - DNA, 20 bp, Artificial Sequence
  Description of Artificial Sequence: Synthetic oligonucleotide
  Target: LAMA2; (-) strand; PAM type: YTN; PAM sequence: CTT
agaagaaaaagaaacacaag

SEQ ID NO: 264058 - DNA, 20 bp, Artificial Sequence
  Description of Artificial Sequence: Synthetic oligonucleotide
  Target: LAMA2; (-) strand; PAM type: YTN; PAM sequence: TTA
aaataaatcttagaagaaaa

SEQ ID NO: 264059 - DNA, 20 bp, Artificial Sequence
  Description of Artificial Sequence: Synthetic oligonucleotide
  Target: LAMA2; (-) strand; PAM type: YTN; PAM sequence: TTT
aaaataaatcttagaagaaa

SEQ ID NO: 264060 - DNA, 20 bp, Artificial Sequence
  Description of Artificial Sequence: Synthetic oligonucleotide
  Target: LAMA2; (-) strand; PAM type: YTN; PAM sequence: CTC
aaacaaaagtttaaaataaa

SEQ ID NO: 264061 - DNA, 20 bp, Artificial Sequence
  Description of Artificial Sequence: Synthetic oligonucleotide
  Target: LAMA2; (-) strand; PAM type: YTN; PAM sequence: TTG
aagctcaaacaaaagtttaa

SEQ ID NO: 264062 - DNA, 20 bp, Artificial Sequence
  Description of Artificial Sequence: Synthetic oligonucleotide
  Target: LAMA2; (-) strand; PAM type: YTN; PAM sequence: CTT
gaagctcaaacaaaagttta

SEQ ID NO: 264063 - DNA, 20 bp, Artificial Sequence
  Description of Artificial Sequence: Synthetic oligonucleotide
  Target: LAMA2; (-) strand; PAM type: YTN; PAM sequence: TTC
cttgaagctcaaacaaaagt

SEQ ID NO: 264064 - DNA, 20 bp, Artificial Sequence
  Description of Artificial Sequence: Synthetic oligonucleotide
  Target: LAMA2; (-) strand; PAM type: YTN; PAM sequence: TTT
ccttgaagctcaaacaaaag

SEQ ID NO: 264065 - DNA, 20 bp, Artificial Sequence
  Description of Artificial Sequence: Synthetic oligonucleotide
  Target: LAMA2; (-) strand; PAM type: YTN; PAM sequence: TTG
agaggaagtttccttgaagc

SEQ ID NO: 264066 - DNA, 20 bp, Artificial Sequence
  Description of Artificial Sequence: Synthetic oligonucleotide
  Target: LAMA2; (-) strand; PAM type: YTN; PAM sequence: TTG
tgtaaaaaatcacacaaatt

SEQ ID NO: 264067 - DNA, 20 bp, Artificial Sequence
  Description of Artificial Sequence: Synthetic oligonucleotide
  Target: LAMA2; (-) strand; PAM type: YTN; PAM sequence: TTT
gtgtaaaaaatcacacaaat

SEQ ID NO: 264068 - DNA, 20 bp, Artificial Sequence
  Description of Artificial Sequence: Synthetic oligonucleotide
  Target: LAMA2; (-) strand; PAM type: YTN; PAM sequence: CTG
taaaaatttgtgtaaaaaat

SEQ ID NO: 264069 - DNA, 20 bp, Artificial Sequence
  Description of Artificial Sequence: Synthetic oligonucleotide
  Target: LAMA2; (-) strand; PAM type: YTN; PAM sequence: CTG
tctgtaaaaatttgtgtaaa

SEQ ID NO: 264070 - DNA, 20 bp, Artificial Sequence
  Description of Artificial Sequence: Synthetic oligonucleotide
  Target: LAMA2; (-) strand; PAM type: YTN; PAM sequence: TTA
ctgtctgtaaaaatttgtgt

SEQ ID NO: 264071 - DNA, 20 bp, Artificial Sequence
  Description of Artificial Sequence: Synthetic oligonucleotide
  Target: LAMA2; (-) strand; PAM type: YTN; PAM sequence: CTG
taattactgtctgtaaaaat

SEQ ID NO: 264072 - DNA, 20 bp, Artificial Sequence
  Description of Artificial Sequence: Synthetic oligonucleotide
  Target: LAMA2; (-) strand; PAM type: YTN; PAM sequence: TTA
ctgtaattactgtctgtaaa

SEQ ID NO: 264073 - DNA, 20 bp, Artificial Sequence
  Description of Artificial Sequence: Synthetic oligonucleotide
  Target: LAMA2; (-) strand; PAM type: YTN; PAM sequence: TTA
ttactgtaattactgtctgt

SEQ ID NO: 264074 - DNA, 20 bp, Artificial Sequence
  Description of Artificial Sequence: Synthetic oligonucleotide
  Target: LAMA2; (-) strand; PAM type: YTN; PAM sequence: CTA
agttattactgtaattactg

SEQ ID NO: 264075 - DNA, 20 bp, Artificial Sequence
  Description of Artificial Sequence: Synthetic oligonucleotide
  Target: LAMA2; (-) strand; PAM type: YTN; PAM sequence: CTA
ctaagttattactgtaatta

SEQ ID NO: 264076 - DNA, 20 bp, Artificial Sequence
  Description of Artificial Sequence: Synthetic oligonucleotide
  Target: LAMA2; (-) strand; PAM type: YTN; PAM sequence: CTC
tactaagttattactgtaat

SEQ ID NO: 264077 - DNA, 20 bp, Artificial Sequence
  Description of Artificial Sequence: Synthetic oligonucleotide
  Target: LAMA2; (-) strand; PAM type: YTN; PAM sequence: CTC
tctactaagttattactgta

SEQ ID NO: 264078 - DNA, 20 bp, Artificial Sequence
  Description of Artificial Sequence: Synthetic oligonucleotide
  Target: LAMA2; (-) strand; PAM type: YTN; PAM sequence: CTG
taatctctctactaagttat

SEQ ID NO: 264079 - DNA, 20 bp, Artificial Sequence
  Description of Artificial Sequence: Synthetic oligonucleotide
  Target: LAMA2; (-) strand; PAM type: YTN; PAM sequence: CTC
tgtaatctctctactaagtt

SEQ ID NO: 264080 - DNA, 20 bp, Artificial Sequence
  Description of Artificial Sequence: Synthetic oligonucleotide
  Target: LAMA2; (-) strand; PAM type: YTN; PAM sequence: TTA
tctctgtaatctctctacta

SEQ ID NO: 264081 - DNA, 20 bp, Artificial Sequence
  Description of Artificial Sequence: Synthetic oligonucleotide
  Target: LAMA2; (-) strand; PAM type: YTN; PAM sequence: TTT
atctctgtaatctctctact

SEQ ID NO: 264082 - DNA, 20 bp, Artificial Sequence
  Description of Artificial Sequence: Synthetic oligonucleotide
  Target: LAMA2; (-) strand; PAM type: YTN; PAM sequence: CTT
tatctctgtaatctctctac

SEQ ID NO: 264083 - DNA, 20 bp, Artificial Sequence
  Description of Artificial Sequence: Synthetic oligonucleotide
  Target: LAMA2; (-) strand; PAM type: YTN; PAM sequence: CTA
tgagagataggactttatct

SEQ ID NO: 264084 - DNA, 20 bp, Artificial Sequence
  Description of Artificial Sequence: Synthetic oligonucleotide
  Target: LAMA2; (-) strand; PAM type: YTN; PAM sequence: TTA
ctatgagagataggacttta

SEQ ID NO: 264085 - DNA, 20 bp, Artificial Sequence
  Description of Artificial Sequence: Synthetic oligonucleotide
  Target: LAMA2; (-) strand; PAM type: YTN; PAM sequence: CTA
ggtgcatgcatgtgtgttac

SEQ ID NO: 264086 - DNA, 20 bp, Artificial Sequence
  Description of Artificial Sequence: Synthetic oligonucleotide
  Target: LAMA2; (-) strand; PAM type: YTN; PAM sequence: TTG
ctaggtgcatgcatgtgtgt

SEQ ID NO: 264087 - DNA, 20 bp, Artificial Sequence
  Description of Artificial Sequence: Synthetic oligonucleotide
  Target: LAMA2; (-) strand; PAM type: YTN; PAM sequence: CTT
gctaggtgcatgcatgtgtg

SEQ ID NO: 264088 - DNA, 20 bp, Artificial Sequence
  Description of Artificial Sequence: Synthetic oligonucleotide
  Target: LAMA2; (-) strand; PAM type: YTN; PAM sequence: TTG
acatacttgctaggtgcatg

SEQ ID NO: 264089 - DNA, 20 bp, Artificial Sequence
  Description of Artificial Sequence: Synthetic oligonucleotide
  Target: LAMA2; (-) strand; PAM type: YTN; PAM sequence: TTA
ttgacatacttgctaggtgc

SEQ ID NO: 264090 - DNA, 20 bp, Artificial Sequence
  Description of Artificial Sequence: Synthetic oligonucleotide
  Target: LAMA2; (-) strand; PAM type: YTN; PAM sequence: TTG
tgttattgacatacttgcta

SEQ ID NO: 264091 - DNA, 20 bp, Artificial Sequence
  Description of Artificial Sequence: Synthetic oligonucleotide
  Target: LAMA2; (-) strand; PAM type: YTN; PAM sequence: TTG
ttgtgttattgacatacttg

SEQ ID NO: 264092 - DNA, 20 bp, Artificial Sequence
  Description of Artificial Sequence: Synthetic oligonucleotide
  Target: LAMA2; (-) strand; PAM type: YTN; PAM sequence: TTA
tatatatataaaattgttgt

SEQ ID NO: 264093 - DNA, 20 bp, Artificial Sequence
  Description of Artificial Sequence: Synthetic oligonucleotide
  Target: LAMA2; (-) strand; PAM type: YTN; PAM sequence: TTA
tatatataatatataaaata

SEQ ID NO: 264094 - DNA, 20 bp, Artificial Sequence
  Description of Artificial Sequence: Synthetic oligonucleotide
  Target: LAMA2; (-) strand; PAM type: YTN; PAM sequence: TTA
tatatataaattatatatat

SEQ ID NO: 264095 - DNA, 20 bp, Artificial Sequence
  Description of Artificial Sequence: Synthetic oligonucleotide
  Target: LAMA2; (-) strand; PAM type: YTN; PAM sequence: TTA
tatattatatatataaatta

SEQ ID NO: 264096 - DNA, 20 bp, Artificial Sequence
  Description of Artificial Sequence: Synthetic oligonucleotide
  Target: LAMA2; (-) strand; PAM type: YTN; PAM sequence: TTA
tatatatataatatataaat

SEQ ID NO: 264097 - DNA, 20 bp, Artificial Sequence
  Description of Artificial Sequence: Synthetic oligonucleotide
  Target: LAMA2; (-) strand; PAM type: YTN; PAM sequence: TTA
attatatatatataatatat

SEQ ID NO: 264098 - DNA, 20 bp, Artificial Sequence
  Description of Artificial Sequence: Synthetic oligonucleotide
  Target: LAMA2; (-) strand; PAM type: YTN; PAM sequence: TTG
aatatatatattaattatat

SEQ ID NO: 264099 - DNA, 20 bp, Artificial Sequence
  Description of Artificial Sequence: Synthetic oligonucleotide
  Target: LAMA2; (-) strand; PAM type: YTN; PAM sequence: CTT
gaatatatatattaattata

SEQ ID NO: 264100 - DNA, 20 bp, Artificial Sequence
  Description of Artificial Sequence: Synthetic oligonucleotide
  Target: LAMA2; (-) strand; PAM type: YTN; PAM sequence: TTC
atccttgaatatatatatta

SEQ ID NO: 264101 - DNA, 20 bp, Artificial Sequence
  Description of Artificial Sequence: Synthetic oligonucleotide
  Target: LAMA2; (-) strand; PAM type: YTN; PAM sequence: TTT
catccttgaatatatatatt

SEQ ID NO: 264102 - DNA, 20 bp, Artificial Sequence
  Description of Artificial Sequence: Synthetic oligonucleotide
  Target: LAMA2; (-) strand; PAM type: YTN; PAM sequence: CTG
tgcatggatttcatccttga

SEQ ID NO: 264103 - DNA, 20 bp, Artificial Sequence
  Description of Artificial Sequence: Synthetic oligonucleotide
  Target: LAMA2; (-) strand; PAM type: YTN; PAM sequence: TTC
tgtgcatggatttcatcctt

SEQ ID NO: 264104 - DNA, 20 bp, Artificial Sequence
  Description of Artificial Sequence: Synthetic oligonucleotide
  Target: LAMA2; (-) strand; PAM type: YTN; PAM sequence: TTT
ctgtgcatggatttcatcct

SEQ ID NO: 264105 - DNA, 20 bp, Artificial Sequence
  Description of Artificial Sequence: Synthetic oligonucleotide
  Target: LAMA2; (-) strand; PAM type: YTN; PAM sequence: TTT
tctgtgcatggatttcatcc

SEQ ID NO: 264106 - DNA, 20 bp, Artificial Sequence
  Description of Artificial Sequence: Synthetic oligonucleotide
  Target: LAMA2; (-) strand; PAM type: YTN; PAM sequence: CTG
gattttctgtgcatggattt

SEQ ID NO: 264107 - DNA, 20 bp, Artificial Sequence
  Description of Artificial Sequence: Synthetic oligonucleotide
  Target: LAMA2; (-) strand; PAM type: YTN; PAM sequence: CTG
aataaaactggattttctgt

SEQ ID NO: 264108 - DNA, 20 bp, Artificial Sequence
  Description of Artificial Sequence: Synthetic oligonucleotide
  Target: LAMA2; (-) strand; PAM type: YTN; PAM sequence: CTG
accactgaataaaactggat

SEQ ID NO: 264109 - DNA, 20 bp, Artificial Sequence
  Description of Artificial Sequence: Synthetic oligonucleotide
  Target: LAMA2; (-) strand; PAM type: YTN; PAM sequence: TTA
gcaagctgaccactgaataa

SEQ ID NO: 264110 - DNA, 20 bp, Artificial Sequence
  Description of Artificial Sequence: Synthetic oligonucleotide
  Target: LAMA2; (-) strand; PAM type: YTN; PAM sequence: TTT
agcaagctgaccactgaata

SEQ ID NO: 264111 - DNA, 20 bp, Artificial Sequence
  Description of Artificial Sequence: Synthetic oligonucleotide
  Target: LAMA2; (-) strand; PAM type: YTN; PAM sequence: CTT
tagcaagctgaccactgaat

SEQ ID NO: 264112 - DNA, 20 bp, Artificial Sequence
  Description of Artificial Sequence: Synthetic oligonucleotide
  Target: LAMA2; (-) strand; PAM type: YTN; PAM sequence: TTC
tttagcaagctgaccactga

SEQ ID NO: 264113 - DNA, 20 bp, Artificial Sequence
  Description of Artificial Sequence: Synthetic oligonucleotide
  Target: LAMA2; (-) strand; PAM type: YTN; PAM sequence: TTC
caattctttagcaagctgac

SEQ ID NO: 264114 - DNA, 20 bp, Artificial Sequence
  Description of Artificial Sequence: Synthetic oligonucleotide
  Target: LAMA2; (-) strand; PAM type: YTN; PAM sequence: TTA
ttccaattctttagcaagct

SEQ ID NO: 264115 - DNA, 20 bp, Artificial Sequence
  Description of Artificial Sequence: Synthetic oligonucleotide
  Target: LAMA2; (-) strand; PAM type: YTN; PAM sequence: TTC
atagtgtgggttattccaat

SEQ ID NO: 264116 - DNA, 20 bp, Artificial Sequence
  Description of Artificial Sequence: Synthetic oligonucleotide
  Target: LAMA2; (-) strand; PAM type: YTN; PAM sequence: TTA
aaagtggttcatagtgtggg

SEQ ID NO: 264117 - DNA, 20 bp, Artificial Sequence
  Description of Artificial Sequence: Synthetic oligonucleotide
  Target: LAMA2; (-) strand; PAM type: YTN; PAM sequence: TTT
aaaagtggttcatagtgtgg

SEQ ID NO: 264118 - DNA, 20 bp, Artificial Sequence
  Description of Artificial Sequence: Synthetic oligonucleotide
  Target: LAMA2; (-) strand; PAM type: YTN; PAM sequence: CTA
tttaaaagtggttcatagtg

SEQ ID NO: 264119 - DNA, 20 bp, Artificial Sequence
  Description of Artificial Sequence: Synthetic oligonucleotide
  Target: LAMA2; (-) strand; PAM type: YTN; PAM sequence: CTG
aagaaataaaccaagatcta

SEQ ID NO: 264120 - DNA, 20 bp, Artificial Sequence
  Description of Artificial Sequence: Synthetic oligonucleotide
  Target: LAMA2; (-) strand; PAM type: YTN; PAM sequence: TTA
agcataactgaagaaataaa

SEQ ID NO: 264121 - DNA, 20 bp, Artificial Sequence
  Description of Artificial Sequence: Synthetic oligonucleotide
  Target: LAMA2; (-) strand; PAM type: YTN; PAM sequence: TTT
aagcataactgaagaaataa

SEQ ID NO: 264122 - DNA, 20 bp, Artificial Sequence
  Description of Artificial Sequence: Synthetic oligonucleotide
  Target: LAMA2; (-) strand; PAM type: YTN; PAM sequence: TTA
gtttaagcataactgaagaa

SEQ ID NO: 264123 - DNA, 20 bp, Artificial Sequence
  Description of Artificial Sequence: Synthetic oligonucleotide
  Target: LAMA2; (-) strand; PAM type: YTN; PAM sequence: TTG
aagaattagtttaagcataa

SEQ ID NO: 264124 - DNA, 20 bp, Artificial Sequence
  Description of Artificial Sequence: Synthetic oligonucleotide
  Target: LAMA2; (-) strand; PAM type: YTN; PAM sequence: CTG
gaaatgatggttgaagaatt

SEQ ID NO: 264125 - DNA, 20 bp, Artificial Sequence
  Description of Artificial Sequence: Synthetic oligonucleotide
  Target: LAMA2; (-) strand; PAM type: YTN; PAM sequence: TTG
aataagtcctggaaatgatg

SEQ ID NO: 264126 - DNA, 20 bp, Artificial Sequence
  Description of Artificial Sequence: Synthetic oligonucleotide
  Target: LAMA2; (-) strand; PAM type: YTN; PAM sequence: TTA
ttgaataagtcctggaaatg

SEQ ID NO: 264127 - DNA, 20 bp, Artificial Sequence
  Description of Artificial Sequence: Synthetic oligonucleotide
  Target: LAMA2; (-) strand; PAM type: YTN; PAM sequence: TTA
ttattgaataagtcctggaa

SEQ ID NO: 264128 - DNA, 20 bp, Artificial Sequence
  Description of Artificial Sequence: Synthetic oligonucleotide
  Target: LAMA2; (-) strand; PAM type: YTN; PAM sequence: TTG
ccattattattgaataagtc

SEQ ID NO: 264129 - DNA, 20 bp, Artificial Sequence
  Description of Artificial Sequence: Synthetic oligonucleotide
  Target: LAMA2; (-) strand; PAM type: YTN; PAM sequence: TTT
gccattattattgaataagt

SEQ ID NO: 264130 - DNA, 20 bp, Artificial Sequence
  Description of Artificial Sequence: Synthetic oligonucleotide
  Target: LAMA2; (-) strand; PAM type: YTN; PAM sequence: TTT
tgccattattattgaataag

SEQ ID NO: 264131 - DNA, 20 bp, Artificial Sequence
  Description of Artificial Sequence: Synthetic oligonucleotide
  Target: LAMA2; (-) strand; PAM type: YTN; PAM sequence: TTT
ttgccattattattgaataa

SEQ ID NO: 264132 - DNA, 20 bp, Artificial Sequence
  Description of Artificial Sequence: Synthetic oligonucleotide
  Target: LAMA2; (-) strand; PAM type: YTN; PAM sequence: TTC
atttttgccattattattga

SEQ ID NO: 264133 - DNA, 20 bp, Artificial Sequence
  Description of Artificial Sequence: Synthetic oligonucleotide
  Target: LAMA2; (-) strand; PAM type: YTN; PAM sequence: TTA
aaaagcaaggttcatttttg

SEQ ID NO: 264134 - DNA, 20 bp, Artificial Sequence
  Description of Artificial Sequence: Synthetic oligonucleotide
  Target: LAMA2; (-) strand; PAM type: YTN; PAM sequence: TTT
aaaaagcaaggttcattttt

SEQ ID NO: 264135 - DNA, 20 bp, Artificial Sequence
  Description of Artificial Sequence: Synthetic oligonucleotide
  Target: LAMA2; (-) strand; PAM type: YTN; PAM sequence: TTA
tttaaaaagcaaggttcatt

SEQ ID NO: 264136 - DNA, 20 bp, Artificial Sequence
  Description of Artificial Sequence: Synthetic oligonucleotide
  Target: LAMA2; (-) strand; PAM type: YTN; PAM sequence: TTA
tacatattatttaaaaagca

SEQ ID NO: 264137 - DNA, 20 bp, Artificial Sequence
  Description of Artificial Sequence: Synthetic oligonucleotide
  Target: LAMA2; (-) strand; PAM type: YTN; PAM sequence: TTT
atacatattatttaaaaagc

SEQ ID NO: 264138 - DNA, 20 bp, Artificial Sequence
  Description of Artificial Sequence: Synthetic oligonucleotide
  Target: LAMA2; (-) strand; PAM type: YTN; PAM sequence: TTA
ataaagtttatacatattat

SEQ ID NO: 264139 - DNA, 20 bp, Artificial Sequence
  Description of Artificial Sequence: Synthetic oligonucleotide
  Target: LAMA2; (-) strand; PAM type: YTN; PAM sequence: TTT
aataaagtttatacatatta

SEQ ID NO: 264140 - DNA, 20 bp, Artificial Sequence
  Description of Artificial Sequence: Synthetic oligonucleotide
  Target: LAMA2; (-) strand; PAM type: YTN; PAM sequence: TTA
tggtggacataatcatataa

SEQ ID NO: 264141 - DNA, 20 bp, Artificial Sequence
  Description of Artificial Sequence: Synthetic oligonucleotide
  Target: LAMA2; (-) strand; PAM type: YTN; PAM sequence: CTT
atggtggacataatcatata

SEQ ID NO: 264142 - DNA, 20 bp, Artificial Sequence
  Description of Artificial Sequence: Synthetic oligonucleotide
  Target: LAMA2; (-) strand; PAM type: YTN; PAM sequence: TTG
tcttatggtggacataatca

SEQ ID NO: 264143 - DNA, 20 bp, Artificial Sequence
  Description of Artificial Sequence: Synthetic oligonucleotide
  Target: LAMA2; (-) strand; PAM type: YTN; PAM sequence: TTT
gtcttatggtggacataatc

SEQ ID NO: 264144 - DNA, 20 bp, Artificial Sequence
  Description of Artificial Sequence: Synthetic oligonucleotide
  Target: LAMA2; (-) strand; PAM type: YTN; PAM sequence: TTA
tttgtcttatggtggacata

SEQ ID NO: 264145 - DNA, 20 bp, Artificial Sequence
  Description of Artificial Sequence: Synthetic oligonucleotide
  Target: LAMA2; (-) strand; PAM type: YTN; PAM sequence: CTT
atttgtcttatggtggacat

SEQ ID NO: 264146 - DNA, 20 bp, Artificial Sequence
  Description of Artificial Sequence: Synthetic oligonucleotide
  Target: LAMA2; (-) strand; PAM type: YTN; PAM sequence: TTG
agtcttatttgtcttatggt

SEQ ID NO: 264147 - DNA, 20 bp, Artificial Sequence
  Description of Artificial Sequence: Synthetic oligonucleotide
  Target: LAMA2; (-) strand; PAM type: YTN; PAM sequence: TTT
gagtcttatttgtcttatgg

SEQ ID NO: 264148 - DNA, 20 bp, Artificial Sequence
  Description of Artificial Sequence: Synthetic oligonucleotide
  Target: LAMA2; (-) strand; PAM type: YTN; PAM sequence: TTT
tgagtcttatttgtcttatg

SEQ ID NO: 264149 - DNA, 20 bp, Artificial Sequence
  Description of Artificial Sequence: Synthetic oligonucleotide
  Target: LAMA2; (-) strand; PAM type: YTN; PAM sequence: CTA
ttttgagtcttatttgtctt

SEQ ID NO: 264150 - DNA, 20 bp, Artificial Sequence
  Description of Artificial Sequence: Synthetic oligonucleotide
  Target: LAMA2; (-) strand; PAM type: YTN; PAM sequence: TTC
aaactattttgagtcttatt

SEQ ID NO: 264151 - DNA, 20 bp, Artificial Sequence
  Description of Artificial Sequence: Synthetic oligonucleotide
  Target: LAMA2; (-) strand; PAM type: YTN; PAM sequence: CTG
agaatagtattcaaactatt

SEQ ID NO: 264152 - DNA, 20 bp, Artificial Sequence
  Description of Artificial Sequence: Synthetic oligonucleotide
  Target: LAMA2; (-) strand; PAM type: YTN; PAM sequence: CTG
ataaaactgagaatagtatt

SEQ ID NO: 264153 - DNA, 20 bp, Artificial Sequence
  Description of Artificial Sequence: Synthetic oligonucleotide
  Target: LAMA2; (-) strand; PAM type: YTN; PAM sequence: TTG
agcaagctgataaaactgag

SEQ ID NO: 264154 - DNA, 20 bp, Artificial Sequence
  Description of Artificial Sequence: Synthetic oligonucleotide
  Target: LAMA2; (-) strand; PAM type: YTN; PAM sequence: TTT
gagcaagctgataaaactga

SEQ ID NO: 264155 - DNA, 20 bp, Artificial Sequence
  Description of Artificial Sequence: Synthetic oligonucleotide
  Target: LAMA2; (-) strand; PAM type: YTN; PAM sequence: CTT
tgagcaagctgataaaactg

SEQ ID NO: 264156 - DNA, 20 bp, Artificial Sequence
  Description of Artificial Sequence: Synthetic oligonucleotide
  Target: LAMA2; (-) strand; PAM type: YTN; PAM sequence: TTA
ataatgtcccaactttgagc

SEQ ID NO: 264157 - DNA, 20 bp, Artificial Sequence
  Description of Artificial Sequence: Synthetic oligonucleotide
  Target: LAMA2; (-) strand; PAM type: YTN; PAM sequence: TTT
aataatgtcccaactttgag

SEQ ID NO: 264158 - DNA, 20 bp, Artificial Sequence
  Description of Artificial Sequence: Synthetic oligonucleotide
  Target: LAMA2; (-) strand; PAM type: YTN; PAM sequence: CTA
atgagatttaataatgtccc

SEQ ID NO: 264159 - DNA, 20 bp, Artificial Sequence
  Description of Artificial Sequence: Synthetic oligonucleotide
  Target: LAMA2; (-) strand; PAM type: YTN; PAM sequence: TTC
taatgagatttaataatgtc

SEQ ID NO: 264160 - DNA, 20 bp, Artificial Sequence
  Description of Artificial Sequence: Synthetic oligonucleotide
  Target: LAMA2; (-) strand; PAM type: YTN; PAM sequence: CTA
aaataaattctaatgagatt

SEQ ID NO: 264161 - DNA, 20 bp, Artificial Sequence
  Description of Artificial Sequence: Synthetic oligonucleotide
  Target: LAMA2; (-) strand; PAM type: YTN; PAM sequence: TTA
tcacagcctaaaataaattc

SEQ ID NO: 264162 - DNA, 20 bp, Artificial Sequence
  Description of Artificial Sequence: Synthetic oligonucleotide
  Target: LAMA2; (-) strand; PAM type: YTN; PAM sequence: TTT
atcacagcctaaaataaatt

SEQ ID NO: 264163 - DNA, 20 bp, Artificial Sequence
  Description of Artificial Sequence: Synthetic oligonucleotide
  Target: LAMA2; (-) strand; PAM type: YTN; PAM sequence: TTT
tatcacagcctaaaataaat

SEQ ID NO: 264164 - DNA, 20 bp, Artificial Sequence
  Description of Artificial Sequence: Synthetic oligonucleotide
  Target: LAMA2; (-) strand; PAM type: YTN; PAM sequence: CTT
ttatcacagcctaaaataaa

SEQ ID NO: 264165 - DNA, 20 bp, Artificial Sequence
  Description of Artificial Sequence: Synthetic oligonucleotide
  Target: LAMA2; (-) strand; PAM type: YTN; PAM sequence: CTG
cttttatcacagcctaaaat

SEQ ID NO: 264166 - DNA, 20 bp, Artificial Sequence
  Description of Artificial Sequence: Synthetic oligonucleotide
  Target: LAMA2; (-) strand; PAM type: YTN; PAM sequence: CTC
tgcttttatcacagcctaaa

SEQ ID NO: 264167 - DNA, 20 bp, Artificial Sequence
  Description of Artificial Sequence: Synthetic oligonucleotide
  Target: LAMA2; (-) strand; PAM type: YTN; PAM sequence: CTC
tctgcttttatcacagccta

SEQ ID NO: 264168 - DNA, 20 bp, Artificial Sequence
  Description of Artificial Sequence: Synthetic oligonucleotide
  Target: LAMA2; (-) strand; PAM type: YTN; PAM sequence: TTA
atcaagagactctctgcttt

SEQ ID NO: 264169 - DNA, 20 bp, Artificial Sequence
  Description of Artificial Sequence: Synthetic oligonucleotide
  Target: LAMA2; (-) strand; PAM type: YTN; PAM sequence: CTT
aatcaagagactctctgctt

SEQ ID NO: 264170 - DNA, 20 bp, Artificial Sequence
  Description of Artificial Sequence: Synthetic oligonucleotide
  Target: LAMA2; (-) strand; PAM type: YTN; PAM sequence: TTA
agcacttaatcaagagactc

SEQ ID NO: 264171 - DNA, 20 bp, Artificial Sequence
  Description of Artificial Sequence: Synthetic oligonucleotide
  Target: LAMA2; (-) strand; PAM type: YTN; PAM sequence: TTC
aattaagcacttaatcaaga

SEQ ID NO: 264172 - DNA, 20 bp, Artificial Sequence
  Description of Artificial Sequence: Synthetic oligonucleotide
  Target: LAMA2; (-) strand; PAM type: YTN; PAM sequence: CTT
caattaagcacttaatcaag

SEQ ID NO: 264173 - DNA, 20 bp, Artificial Sequence
  Description of Artificial Sequence: Synthetic oligonucleotide
  Target: LAMA2; (-) strand; PAM type: YTN; PAM sequence: TTG
gataatgcaaaagtacttca

SEQ ID NO: 264174 - DNA, 20 bp, Artificial Sequence
  Description of Artificial Sequence: Synthetic oligonucleotide
  Target: LAMA2; (-) strand; PAM type: YTN; PAM sequence: TTT
ggataatgcaaaagtacttc

SEQ ID NO: 264175 - DNA, 20 bp, Artificial Sequence
  Description of Artificial Sequence: Synthetic oligonucleotide
  Target: LAMA2; (-) strand; PAM type: YTN; PAM sequence: TTG
atttggataatgcaaaagta

SEQ ID NO: 264176 - DNA, 20 bp, Artificial Sequence
  Description of Artificial Sequence: Synthetic oligonucleotide
  Target: LAMA2; (-) strand; PAM type: YTN; PAM sequence: TTT
gatttggataatgcaaaagt

SEQ ID NO: 264177 - DNA, 20 bp, Artificial Sequence
  Description of Artificial Sequence: Synthetic oligonucleotide
  Target: LAMA2; (-) strand; PAM type: YTN; PAM sequence: TTT
tgatttggataatgcaaaag

SEQ ID NO: 264178 - DNA, 20 bp, Artificial Sequence
  Description of Artificial Sequence: Synthetic oligonucleotide
  Target: LAMA2; (-) strand; PAM type: YTN; PAM sequence: TTA
ttttgatttggataatgcaa

SEQ ID NO: 264179 - DNA, 20 bp, Artificial Sequence
  Description of Artificial Sequence: Synthetic oligonucleotide
  Target: LAMA2; (-) strand; PAM type: YTN; PAM sequence: TTT
attttgatttggataatgca

SEQ ID NO: 264180 - DNA, 20 bp, Artificial Sequence
  Description of Artificial Sequence: Synthetic oligonucleotide
  Target: LAMA2; (-) strand; PAM type: YTN; PAM sequence: TTG
tttattttgatttggataat

SEQ ID NO: 264181 - DNA, 20 bp, Artificial Sequence
  Description of Artificial Sequence: Synthetic oligonucleotide
  Target: LAMA2; (-) strand; PAM type: YTN; PAM sequence: CTT
gtttattttgatttggataa

SEQ ID NO: 264182 - DNA, 20 bp, Artificial Sequence
  Description of Artificial Sequence: Synthetic oligonucleotide
  Target: LAMA2; (-) strand; PAM type: YTN; PAM sequence: CTC
cttgtttattttgatttgga

SEQ ID NO: 264183 - DNA, 20 bp, Artificial Sequence
  Description of Artificial Sequence: Synthetic oligonucleotide
  Target: LAMA2; (-) strand; PAM type: YTN; PAM sequence: CTA
gcaccctccttgtttatttt

SEQ ID NO: 264184 - DNA, 20 bp, Artificial Sequence
  Description of Artificial Sequence: Synthetic oligonucleotide
  Target: LAMA2; (-) strand; PAM type: YTN; PAM sequence: TTA
atagctagcaccctccttgt

SEQ ID NO: 264185 - DNA, 20 bp, Artificial Sequence
  Description of Artificial Sequence: Synthetic oligonucleotide
  Target: LAMA2; (-) strand; PAM type: YTN; PAM sequence: CTT
aatagctagcaccctccttg

SEQ ID NO: 264186 - DNA, 20 bp, Artificial Sequence
  Description of Artificial Sequence: Synthetic oligonucleotide
  Target: LAMA2; (-) strand; PAM type: YTN; PAM sequence: CTA
gcttaatagctagcaccctc

SEQ ID NO: 264187 - DNA, 20 bp, Artificial Sequence
  Description of Artificial Sequence: Synthetic oligonucleotide
  Target: LAMA2; (-) strand; PAM type: YTN; PAM sequence: TTA
aaaagatctagcttaatagc

SEQ ID NO: 264188 - DNA, 20 bp, Artificial Sequence
  Description of Artificial Sequence: Synthetic oligonucleotide
  Target: LAMA2; (-) strand; PAM type: YTN; PAM sequence: CTT
aaaaagatctagcttaatag

SEQ ID NO: 264189 - DNA, 20 bp, Artificial Sequence
  Description of Artificial Sequence: Synthetic oligonucleotide
  Target: LAMA2; (-) strand; PAM type: YTN; PAM sequence: CTC
cttaaaaagatctagcttaa

SEQ ID NO: 264190 - DNA, 20 bp, Artificial Sequence
  Description of Artificial Sequence: Synthetic oligonucleotide
  Target: LAMA2; (-) strand; PAM type: YTN; PAM sequence: CTA
gacagtccagagacaaatat

SEQ ID NO: 264191 - DNA, 20 bp, Artificial Sequence
  Description of Artificial Sequence: Synthetic oligonucleotide
  Target: LAMA2; (-) strand; PAM type: YTN; PAM sequence: CTG
gcctagacagtccagagaca

SEQ ID NO: 264192 - DNA, 20 bp, Artificial Sequence
  Description of Artificial Sequence: Synthetic oligonucleotide
  Target: LAMA2; (-) strand; PAM type: YTN; PAM sequence: TTC
tggcctagacagtccagaga

SEQ ID NO: 264193 - DNA, 20 bp, Artificial Sequence
  Description of Artificial Sequence: Synthetic oligonucleotide
  Target: LAMA2; (-) strand; PAM type: YTN; PAM sequence: TTG
gttctggcctagacagtcca

SEQ ID NO: 264194 - DNA, 20 bp, Artificial Sequence
  Description of Artificial Sequence: Synthetic oligonucleotide
  Target: LAMA2; (-) strand; PAM type: YTN; PAM sequence: TTT
ggttctggcctagacagtcc

SEQ ID NO: 264195 - DNA, 20 bp, Artificial Sequence
  Description of Artificial Sequence: Synthetic oligonucleotide
  Target: LAMA2; (-) strand; PAM type: YTN; PAM sequence: CTT
tggttctggcctagacagtc

SEQ ID NO: 264196 - DNA, 20 bp, Artificial Sequence
  Description of Artificial Sequence: Synthetic oligonucleotide
  Target: LAMA2; (-) strand; PAM type: YTN; PAM sequence: CTC
cacatccctttggttctggc

SEQ ID NO: 264197 - DNA, 20 bp, Artificial Sequence
  Description of Artificial Sequence: Synthetic oligonucleotide
  Target: LAMA2; (-) strand; PAM type: YTN; PAM sequence: CTA
gtacctccacatccctttgg

SEQ ID NO: 264198 - DNA, 20 bp, Artificial Sequence
  Description of Artificial Sequence: Synthetic oligonucleotide
  Target: LAMA2; (-) strand; PAM type: YTN; PAM sequence: TTC
tagtacctccacatcccttt

SEQ ID NO: 264199 - DNA, 20 bp, Artificial Sequence
  Description of Artificial Sequence: Synthetic oligonucleotide
  Target: LAMA2; (-) strand; PAM type: YTN; PAM sequence: TTT
ctagtacctccacatccctt

SEQ ID NO: 264200 - DNA, 20 bp, Artificial Sequence
  Description of Artificial Sequence: Synthetic oligonucleotide
  Target: LAMA2; (-) strand; PAM type: YTN; PAM sequence: CTT
tctagtacctccacatccct

SEQ ID NO: 264201 - DNA, 20 bp, Artificial Sequence
  Description of Artificial Sequence: Synthetic oligonucleotide
  Target: LAMA2; (-) strand; PAM type: YTN; PAM sequence: TTA
agaactttctagtacctcca

SEQ ID NO: 264202 - DNA, 20 bp, Artificial Sequence
  Description of Artificial Sequence: Synthetic oligonucleotide
  Target: LAMA2; (-) strand; PAM type: YTN; PAM sequence: CTA
agccagaaaaaatatcagat

SEQ ID NO: 264203 - DNA, 20 bp, Artificial Sequence
  Description of Artificial Sequence: Synthetic oligonucleotide
  Target: LAMA2; (-) strand; PAM type: YTN; PAM sequence: CTG
actaagccagaaaaaatatc

SEQ ID NO: 264204 - DNA, 20 bp, Artificial Sequence
  Description of Artificial Sequence: Synthetic oligonucleotide
  Target: LAMA2; (-) strand; PAM type: YTN; PAM sequence: TTG
ctgactaagccagaaaaaat

SEQ ID NO: 264205 - DNA, 20 bp, Artificial Sequence
  Description of Artificial Sequence: Synthetic oligonucleotide
  Target: LAMA2; (-) strand; PAM type: YTN; PAM sequence: TTG
atgaaagaaaagtgattgct

SEQ ID NO: 264206 - DNA, 20 bp, Artificial Sequence
  Description of Artificial Sequence: Synthetic oligonucleotide
  Target: LAMA2; (-) strand; PAM type: YTN; PAM sequence: TTA
tgcccattgatgaaagaaaa

SEQ ID NO: 264207 - DNA, 20 bp, Artificial Sequence
  Description of Artificial Sequence: Synthetic oligonucleotide
  Target: LAMA2; (-) strand; PAM type: YTN; PAM sequence: CTT
atgcccattgatgaaagaaa

SEQ ID NO: 264208 - DNA, 20 bp, Artificial Sequence
  Description of Artificial Sequence: Synthetic oligonucleotide
  Target: LAMA2; (-) strand; PAM type: YTN; PAM sequence: TTA
aaaatcttatgcccattgat

SEQ ID NO: 264209 - DNA, 20 bp, Artificial Sequence
  Description of Artificial Sequence: Synthetic oligonucleotide
  Target: LAMA2; (-) strand; PAM type: YTN; PAM sequence: CTT
aaaaatcttatgcccattga

SEQ ID NO: 264210 - DNA, 20 bp, Artificial Sequence
  Description of Artificial Sequence: Synthetic oligonucleotide
  Target: LAMA2; (-) strand; PAM type: YTN; PAM sequence: TTC
acttaaaaatcttatgccca

SEQ ID NO: 264211 - DNA, 20 bp, Artificial Sequence
  Description of Artificial Sequence: Synthetic oligonucleotide
  Target: LAMA2; (-) strand; PAM type: YTN; PAM sequence: TTT
cacttaaaaatcttatgccc

SEQ ID NO: 264212 - DNA, 20 bp, Artificial Sequence
  Description of Artificial Sequence: Synthetic oligonucleotide
  Target: LAMA2; (-) strand; PAM type: YTN; PAM sequence: TTT
tcacttaaaaatcttatgcc

SEQ ID NO: 264213 - DNA, 20 bp, Artificial Sequence
  Description of Artificial Sequence: Synthetic oligonucleotide
  Target: LAMA2; (-) strand; PAM type: YTN; PAM sequence: TTT
ttcacttaaaaatcttatgc

SEQ ID NO: 264214 - DNA, 20 bp, Artificial Sequence
  Description of Artificial Sequence: Synthetic oligonucleotide
  Target: LAMA2; (-) strand; PAM type: YTN; PAM sequence: TTT
tttcacttaaaaatcttatg

SEQ ID NO: 264215 - DNA, 20 bp, Artificial Sequence
  Description of Artificial Sequence: Synthetic oligonucleotide
  Target: LAMA2; (-) strand; PAM type: YTN; PAM sequence: TTT
ttttcacttaaaaatcttat

SEQ ID NO: 264216 - DNA, 20 bp, Artificial Sequence
  Description of Artificial Sequence: Synthetic oligonucleotide
  Target: LAMA2; (-) strand; PAM type: YTN; PAM sequence: TTT
tttttcacttaaaaatctta

SEQ ID NO: 264217 - DNA, 20 bp, Artificial Sequence
  Description of Artificial Sequence: Synthetic oligonucleotide
  Target: LAMA2; (-) strand; PAM type: YTN; PAM sequence: TTT
ttttttcacttaaaaatctt

SEQ ID NO: 264218 - DNA, 20 bp, Artificial Sequence
  Description of Artificial Sequence: Synthetic oligonucleotide
  Target: LAMA2; (-) strand; PAM type: YTN; PAM sequence: TTT
tttttttcacttaaaaatct

SEQ ID NO: 264219 - DNA, 20 bp, Artificial Sequence
  Description of Artificial Sequence: Synthetic oligonucleotide
  Target: LAMA2; (-) strand; PAM type: YTN; PAM sequence: TTT
ttttttttcacttaaaaatc

SEQ ID NO: 264220 - DNA, 20 bp, Artificial Sequence
  Description of Artificial Sequence: Synthetic oligonucleotide
  Target: LAMA2; (-) strand; PAM type: YTN; PAM sequence: TTA
agtagaatttttttttttca

SEQ ID NO: 264221 - DNA, 20 bp, Artificial Sequence
  Description of Artificial Sequence: Synthetic oligonucleotide
  Target: LAMA2; (-) strand; PAM type: YTN; PAM sequence: TTG
gttaagtagaattttttttt

SEQ ID NO: 264222 - DNA, 20 bp, Artificial Sequence
  Description of Artificial Sequence: Synthetic oligonucleotide
  Target: LAMA2; (-) strand; PAM type: YTN; PAM sequence: CTT
ggttaagtagaatttttttt

SEQ ID NO: 264223 - DNA, 20 bp, Artificial Sequence
  Description of Artificial Sequence: Synthetic oligonucleotide
  Target: LAMA2; (-) strand; PAM type: YTN; PAM sequence: TTA
ccaccttggttaagtagaat

SEQ ID NO: 264224 - DNA, 20 bp, Artificial Sequence
  Description of Artificial Sequence: Synthetic oligonucleotide
  Target: LAMA2; (-) strand; PAM type: YTN; PAM sequence: TTT
accaccttggttaagtagaa

SEQ ID NO: 264225 - DNA, 20 bp, Artificial Sequence
  Description of Artificial Sequence: Synthetic oligonucleotide
  Target: LAMA2; (-) strand; PAM type: YTN; PAM sequence: TTT
taccaccttggttaagtaga

SEQ ID NO: 264226 - DNA, 20 bp, Artificial Sequence
  Description of Artificial Sequence: Synthetic oligonucleotide
  Target: LAMA2; (-) strand; PAM type: YTN; PAM sequence: CTA
ttttaccaccttggttaagt

SEQ ID NO: 264227 - DNA, 20 bp, Artificial Sequence
  Description of Artificial Sequence: Synthetic oligonucleotide
  Target: LAMA2; (-) strand; PAM type: YTN; PAM sequence: TTA
caaggggactattttaccac

SEQ ID NO: 264228 - DNA, 20 bp, Artificial Sequence
  Description of Artificial Sequence: Synthetic oligonucleotide
  Target: LAMA2; (-) strand; PAM type: YTN; PAM sequence: TTC
aaatcccatggagaattaca

SEQ ID NO: 264229 - DNA, 20 bp, Artificial Sequence
  Description of Artificial Sequence: Synthetic oligonucleotide
  Target: LAMA2; (-) strand; PAM type: YTN; PAM sequence: TTT
caaatcccatggagaattac

SEQ ID NO: 264230 - DNA, 20 bp, Artificial Sequence
  Description of Artificial Sequence: Synthetic oligonucleotide
  Target: LAMA2; (-) strand; PAM type: YTN; PAM sequence: TTT
tcaaatcccatggagaatta

SEQ ID NO: 264231 - DNA, 20 bp, Artificial Sequence
  Description of Artificial Sequence: Synthetic oligonucleotide
  Target: LAMA2; (-) strand; PAM type: YTN; PAM sequence: TTT
ttcaaatcccatggagaatt

SEQ ID NO: 264232 - DNA, 20 bp, Artificial Sequence
  Description of Artificial Sequence: Synthetic oligonucleotide
  Target: LAMA2; (-) strand; PAM type: YTN; PAM sequence: TTA
tgaataaaaggtaggagtca

SEQ ID NO: 264233 - DNA, 20 bp, Artificial Sequence
  Description of Artificial Sequence: Synthetic oligonucleotide
  Target: LAMA2; (-) strand; PAM type: YTN; PAM sequence: TTT
atgaataaaaggtaggagtc

SEQ ID NO: 264234 - DNA, 20 bp, Artificial Sequence
  Description of Artificial Sequence: Synthetic oligonucleotide
  Target: LAMA2; (-) strand; PAM type: YTN; PAM sequence: TTG
atttatgaataaaaggtagg

SEQ ID NO: 264235 - DNA, 20 bp, Artificial Sequence
  Description of Artificial Sequence: Synthetic oligonucleotide
  Target: LAMA2; (-) strand; PAM type: YTN; PAM sequence: CTT
gatttatgaataaaaggtag

SEQ ID NO: 264236 - DNA, 20 bp, Artificial Sequence
  Description of Artificial Sequence: Synthetic oligonucleotide
  Target: LAMA2; (-) strand; PAM type: YTN; PAM sequence: TTG
cttgatttatgaataaaagg

SEQ ID NO: 264237 - DNA, 20 bp, Artificial Sequence
  Description of Artificial Sequence: Synthetic oligonucleotide
  Target: LAMA2; (-) strand; PAM type: YTN; PAM sequence: CTG
cagacattgcttgatttatg

SEQ ID NO: 264238 - DNA, 20 bp, Artificial Sequence
  Description of Artificial Sequence: Synthetic oligonucleotide
  Target: LAMA2; (-) strand; PAM type: YTN; PAM sequence: CTC
atgcatagctgcagacattg

SEQ ID NO: 264239 - DNA, 20 bp, Artificial Sequence
  Description of Artificial Sequence: Synthetic oligonucleotide
  Target: LAMA2; (-) strand; PAM type: YTN; PAM sequence: CTC
ctcatgcatagctgcagaca

SEQ ID NO: 264240 - DNA, 20 bp, Artificial Sequence
  Description of Artificial Sequence: Synthetic oligonucleotide
  Target: LAMA2; (-) strand; PAM type: YTN; PAM sequence: CTC
tcctcatgcatagctgcaga

SEQ ID NO: 264241 - DNA, 20 bp, Artificial Sequence
  Description of Artificial Sequence: Synthetic oligonucleotide
  Target: LAMA2; (-) strand; PAM type: YTN; PAM sequence: CTC
agtcctctcctcatgcatag

SEQ ID NO: 264242 - DNA, 20 bp, Artificial Sequence
  Description of Artificial Sequence: Synthetic oligonucleotide
  Target: LAMA2; (-) strand; PAM type: YTN; PAM sequence: TTC
aggctcagtcctctcctcat

SEQ ID NO: 264243 - DNA, 20 bp, Artificial Sequence
  Description of Artificial Sequence: Synthetic oligonucleotide
  Target: LAMA2; (-) strand; PAM type: YTN; PAM sequence: TTT
caggctcagtcctctcctca

SEQ ID NO: 264244 - DNA, 20 bp, Artificial Sequence
  Description of Artificial Sequence: Synthetic oligonucleotide
  Target: LAMA2; (-) strand; PAM type: YTN; PAM sequence: TTG
tgtttcaggctcagtcctct

SEQ ID NO: 264245 - DNA, 20 bp, Artificial Sequence
  Description of Artificial Sequence: Synthetic oligonucleotide
  Target: LAMA2; (-) strand; PAM type: YTN; PAM sequence: CTT
gtgtttcaggctcagtcctc

SEQ ID NO: 264246 - DNA, 20 bp, Artificial Sequence
  Description of Artificial Sequence: Synthetic oligonucleotide
  Target: LAMA2; (-) strand; PAM type: YTN; PAM sequence: CTG
gcacgaagatgaaaaccgtc

SEQ ID NO: 264247 - DNA, 20 bp, Artificial Sequence
  Description of Artificial Sequence: Synthetic oligonucleotide
  Target: LAMA2; (-) strand; PAM type: YTN; PAM sequence: CTC
tggcacgaagatgaaaaccg

SEQ ID NO: 264248 - DNA, 20 bp, Artificial Sequence
  Description of Artificial Sequence: Synthetic oligonucleotide
  Target: LAMA2; (-) strand; PAM type: YTN; PAM sequence: CTG
gaaggtagtccacagctctg

SEQ ID NO: 264249 - DNA, 20 bp, Artificial Sequence
  Description of Artificial Sequence: Synthetic oligonucleotide
  Target: LAMA2; (-) strand; PAM type: YTN; PAM sequence: TTC
tggaaggtagtccacagctc

SEQ ID NO: 264250 - DNA, 20 bp, Artificial Sequence
  Description of Artificial Sequence: Synthetic oligonucleotide
  Target: LAMA2; (-) strand; PAM type: YTN; PAM sequence: TTT
ctggaaggtagtccacagct

SEQ ID NO: 264251 - DNA, 20 bp, Artificial Sequence
  Description of Artificial Sequence: Synthetic oligonucleotide
  Target: LAMA2; (-) strand; PAM type: YTN; PAM sequence: CTT
tctggaaggtagtccacagc

SEQ ID NO: 264252 - DNA, 20 bp, Artificial Sequence
  Description of Artificial Sequence: Synthetic oligonucleotide
  Target: LAMA2; (-) strand; PAM type: YTN; PAM sequence: CTG
gctttctggaaggtagtcca

SEQ ID NO: 264253 - DNA, 20 bp, Artificial Sequence
  Description of Artificial Sequence: Synthetic oligonucleotide
  Target: LAMA2; (-) strand; PAM type: YTN; PAM sequence: CTC
tggctttctggaaggtagtc

SEQ ID NO: 264254 - DNA, 20 bp, Artificial Sequence
  Description of Artificial Sequence: Synthetic oligonucleotide
  Target: LAMA2; (-) strand; PAM type: YTN; PAM sequence: TTA
tgaaaatgtatcaacaaaca

SEQ ID NO: 264255 - DNA, 20 bp, Artificial Sequence
  Description of Artificial Sequence: Synthetic oligonucleotide
  Target: LAMA2; (-) strand; PAM type: YTN; PAM sequence: TTA
ttatgaaaatgtatcaacaa

SEQ ID NO: 264256 - DNA, 20 bp, Artificial Sequence
  Description of Artificial Sequence: Synthetic oligonucleotide
  Target: LAMA2; (-) strand; PAM type: YTN; PAM sequence: TTT
attatgaaaatgtatcaaca

SEQ ID NO: 264257 - DNA, 20 bp, Artificial Sequence
  Description of Artificial Sequence: Synthetic oligonucleotide
  Target: LAMA2; (-) strand; PAM type: YTN; PAM sequence: TTG
ggtttattatgaaaatgtat

SEQ ID NO: 264258 - DNA, 20 bp, Artificial Sequence
  Description of Artificial Sequence: Synthetic oligonucleotide
  Target: LAMA2; (-) strand; PAM type: YTN; PAM sequence: TTT
gggtttattatgaaaatgta

SEQ ID NO: 264259 - DNA, 20 bp, Artificial Sequence
  Description of Artificial Sequence: Synthetic oligonucleotide
  Target: LAMA2; (-) strand; PAM type: YTN; PAM sequence: TTC
atttgggtttattatgaaaa

SEQ ID NO: 264260 - DNA, 20 bp, Artificial Sequence
  Description of Artificial Sequence: Synthetic oligonucleotide
  Target: LAMA2; (-) strand; PAM type: YTN; PAM sequence: CTT
catttgggtttattatgaaa

SEQ ID NO: 264261 - DNA, 20 bp, Artificial Sequence
  Description of Artificial Sequence: Synthetic oligonucleotide
  Target: LAMA2; (-) strand; PAM type: YTN; PAM sequence: TTC
catcttcatttgggtttatt

SEQ ID NO: 264262 - DNA, 20 bp, Artificial Sequence
  Description of Artificial Sequence: Synthetic oligonucleotide
  Target: LAMA2; (-) strand; PAM type: YTN; PAM sequence: CTT
ccatcttcatttgggtttat

SEQ ID NO: 264263 - DNA, 20 bp, Artificial Sequence
  Description of Artificial Sequence: Synthetic oligonucleotide
  Target: LAMA2; (-) strand; PAM type: YTN; PAM sequence: CTG
acatatgcaaaatcaagact

SEQ ID NO: 264264 - DNA, 20 bp, Artificial Sequence
  Description of Artificial Sequence: Synthetic oligonucleotide
  Target: LAMA2; (-) strand; PAM type: YTN; PAM sequence: CTA
gtgaagctgacatatgcaaa

SEQ ID NO: 264265 - DNA, 20 bp, Artificial Sequence
  Description of Artificial Sequence: Synthetic oligonucleotide
  Target: LAMA2; (-) strand; PAM type: YTN; PAM sequence: TTC
tagtgaagctgacatatgca

SEQ ID NO: 264266 - DNA, 20 bp, Artificial Sequence
  Description of Artificial Sequence: Synthetic oligonucleotide
  Target: LAMA2; (-) strand; PAM type: YTN; PAM sequence: CTT
ctagtgaagctgacatatgc

SEQ ID NO: 264267 - DNA, 20 bp, Artificial Sequence
  Description of Artificial Sequence: Synthetic oligonucleotide
  Target: LAMA2; (-) strand; PAM type: YTN; PAM sequence: CTG
aaagcaaacagaaaacttct

SEQ ID NO: 264268 - DNA, 20 bp, Artificial Sequence
  Description of Artificial Sequence: Synthetic oligonucleotide
  Target: LAMA2; (-) strand; PAM type: YTN; PAM sequence: TTG
caataaaaatctgaaagcaa

SEQ ID NO: 264269 - DNA, 20 bp, Artificial Sequence
  Description of Artificial Sequence: Synthetic oligonucleotide
  Target: LAMA2; (-) strand; PAM type: YTN; PAM sequence: TTT
gcaataaaaatctgaaagca

SEQ ID NO: 264270 - DNA, 20 bp, Artificial Sequence
  Description of Artificial Sequence: Synthetic oligonucleotide
  Target: LAMA2; (-) strand; PAM type: YTN; PAM sequence: TTT
tgcaataaaaatctgaaagc

SEQ ID NO: 264271 - DNA, 20 bp, Artificial Sequence
  Description of Artificial Sequence: Synthetic oligonucleotide
  Target: LAMA2; (-) strand; PAM type: YTN; PAM sequence: TTT
ttgcaataaaaatctgaaag

SEQ ID NO: 264272 - DNA, 20 bp, Artificial Sequence
  Description of Artificial Sequence: Synthetic oligonucleotide
  Target: LAMA2; (-) strand; PAM type: YTN; PAM sequence: CTT
tttgcaataaaaatctgaaa

SEQ ID NO: 264273 - DNA, 20 bp, Artificial Sequence
  Description of Artificial Sequence: Synthetic oligonucleotide
  Target: LAMA2; (-) strand; PAM type: YTN; PAM sequence: TTC
tttttgcaataaaaatctga

SEQ ID NO: 264274 - DNA, 20 bp, Artificial Sequence
  Description of Artificial Sequence: Synthetic oligonucleotide
  Target: LAMA2; (-) strand; PAM type: YTN; PAM sequence: TTT
ctttttgcaataaaaatctg

SEQ ID NO: 264275 - DNA, 20 bp, Artificial Sequence
  Description of Artificial Sequence: Synthetic oligonucleotide
  Target: LAMA2; (-) strand; PAM type: YTN; PAM sequence: TTT
tctttttgcaataaaaatct

SEQ ID NO: 264276 - DNA, 20 bp, Artificial Sequence
  Description of Artificial Sequence: Synthetic oligonucleotide
  Target: LAMA2; (-) strand; PAM type: YTN; PAM sequence: TTT
ttctttttgcaataaaaatc

SEQ ID NO: 264277 - DNA, 20 bp, Artificial Sequence
  Description of Artificial Sequence: Synthetic oligonucleotide
  Target: LAMA2; (-) strand; PAM type: YTN; PAM sequence: TTT
tttctttttgcaataaaaat

SEQ ID NO: 264278 - DNA, 20 bp, Artificial Sequence
  Description of Artificial Sequence: Synthetic oligonucleotide
  Target: LAMA2; (-) strand; PAM type: YTN; PAM sequence: TTT
ttttctttttgcaataaaaa

SEQ ID NO: 264279 - DNA, 20 bp, Artificial Sequence
  Description of Artificial Sequence: Synthetic oligonucleotide
  Target: LAMA2; (-) strand; PAM type: YTN; PAM sequence: CTG
atataatttttttctttttg

SEQ ID NO: 264280 - DNA, 20 bp, Artificial Sequence
  Description of Artificial Sequence: Synthetic oligonucleotide
  Target: LAMA2; (-) strand; PAM type: YTN; PAM sequence: TTC
cctgatataatttttttctt

SEQ ID NO: 264281 - DNA, 20 bp, Artificial Sequence
  Description of Artificial Sequence: Synthetic oligonucleotide
  Target: LAMA2; (-) strand; PAM type: YTN; PAM sequence: TTT
ccctgatataatttttttct

SEQ ID NO: 264282 - DNA, 20 bp, Artificial Sequence
  Description of Artificial Sequence: Synthetic oligonucleotide
  Target: LAMA2; (-) strand; PAM type: YTN; PAM sequence: CTT
tccctgatataatttttttc

SEQ ID NO: 264283 - DNA, 20 bp, Artificial Sequence
  Description of Artificial Sequence: Synthetic oligonucleotide
  Target: LAMA2; (-) strand; PAM type: YTN; PAM sequence: TTA
tctttccctgatataatttt

SEQ ID NO: 264284 - DNA, 20 bp, Artificial Sequence
  Description of Artificial Sequence: Synthetic oligonucleotide
  Target: LAMA2; (-) strand; PAM type: YTN; PAM sequence: TTT
atctttccctgatataattt

SEQ ID NO: 264285 - DNA, 20 bp, Artificial Sequence
  Description of Artificial Sequence: Synthetic oligonucleotide
  Target: LAMA2; (-) strand; PAM type: YTN; PAM sequence: TTA
gaccaccaataaaatttatc

SEQ ID NO: 264286 - DNA, 20 bp, Artificial Sequence
  Description of Artificial Sequence: Synthetic oligonucleotide
  Target: LAMA2; (-) strand; PAM type: YTN; PAM sequence: CTA
ttagaccaccaataaaattt

SEQ ID NO: 264287 - DNA, 20 bp, Artificial Sequence
  Description of Artificial Sequence: Synthetic oligonucleotide
  Target: LAMA2; (-) strand; PAM type: YTN; PAM sequence: TTG
cgactattagaccaccaata

SEQ ID NO: 264288 - DNA, 20 bp, Artificial Sequence
  Description of Artificial Sequence: Synthetic oligonucleotide
  Target: LAMA2; (-) strand; PAM type: YTN; PAM sequence: CTT
gcgactattagaccaccaat

SEQ ID NO: 264289 - DNA, 20 bp, Artificial Sequence
  Description of Artificial Sequence: Synthetic oligonucleotide
  Target: LAMA2; (-) strand; PAM type: YTN; PAM sequence: CTG
tacatgtcttgcgactatta

SEQ ID NO: 264290 - DNA, 20 bp, Artificial Sequence
  Description of Artificial Sequence: Synthetic oligonucleotide
  Target: LAMA2; (-) strand; PAM type: YTN; PAM sequence: CTA
taaaagtaagaaatccaaaa

SEQ ID NO: 264291 - DNA, 20 bp, Artificial Sequence
  Description of Artificial Sequence: Synthetic oligonucleotide
  Target: LAMA2; (-) strand; PAM type: YTN; PAM sequence: TTA
aagactataaaagtaagaaa

SEQ ID NO: 264292 - DNA, 20 bp, Artificial Sequence
  Description of Artificial Sequence: Synthetic oligonucleotide
  Target: LAMA2; (-) strand; PAM type: YTN; PAM sequence: TTT
aaagactataaaagtaagaa

SEQ ID NO: 264293 - DNA, 20 bp, Artificial Sequence
  Description of Artificial Sequence: Synthetic oligonucleotide
  Target: LAMA2; (-) strand; PAM type: YTN; PAM sequence: CTG
atataatttaaagactataa

SEQ ID NO: 264294 - DNA, 20 bp, Artificial Sequence
  Description of Artificial Sequence: Synthetic oligonucleotide
  Target: LAMA2; (-) strand; PAM type: YTN; PAM sequence: TTA
tactgatataatttaaagac

SEQ ID NO: 264295 - DNA, 20 bp, Artificial Sequence
  Description of Artificial Sequence: Synthetic oligonucleotide
  Target: LAMA2; (-) strand; PAM type: YTN; PAM sequence: TTT
atactgatataatttaaaga

SEQ ID NO: 264296 - DNA, 20 bp, Artificial Sequence
  Description of Artificial Sequence: Synthetic oligonucleotide
  Target: LAMA2; (-) strand; PAM type: YTN; PAM sequence: TTA
tttatactgatataatttaa

SEQ ID NO: 264297 - DNA, 20 bp, Artificial Sequence
  Description of Artificial Sequence: Synthetic oligonucleotide
  Target: LAMA2; (-) strand; PAM type: YTN; PAM sequence: TTA
tggatgcattatttatactg

SEQ ID NO: 264298 - DNA, 20 bp, Artificial Sequence
  Description of Artificial Sequence: Synthetic oligonucleotide
  Target: LAMA2; (-) strand; PAM type: YTN; PAM sequence: CTA
aataaaaagtgttatggatg

SEQ ID NO: 264299 - DNA, 20 bp, Artificial Sequence
  Description of Artificial Sequence: Synthetic oligonucleotide
  Target: LAMA2; (-) strand; PAM type: YTN; PAM sequence: CTA
gcaaatgtccaatgaaacac

SEQ ID NO: 264300 - DNA, 20 bp, Artificial Sequence
  Description of Artificial Sequence: Synthetic oligonucleotide
  Target: LAMA2; (-) strand; PAM type: YTN; PAM sequence: TTG
atggataactagcaaatgtc

SEQ ID NO: 264301 - DNA, 20 bp, Artificial Sequence
  Description of Artificial Sequence: Synthetic oligonucleotide
  Target: LAMA2; (-) strand; PAM type: YTN; PAM sequence: CTT
gatggataactagcaaatgt

SEQ ID NO: 264302 - DNA, 20 bp, Artificial Sequence
  Description of Artificial Sequence: Synthetic oligonucleotide
  Target: LAMA2; (-) strand; PAM type: YTN; PAM sequence: CTG
tgcttgatggataactagca

SEQ ID NO: 264303 - DNA, 20 bp, Artificial Sequence
  Description of Artificial Sequence: Synthetic oligonucleotide
  Target: LAMA2; (-) strand; PAM type: YTN; PAM sequence: TTA
ctgtgcttgatggataacta

SEQ ID NO: 264304 - DNA, 20 bp, Artificial Sequence
  Description of Artificial Sequence: Synthetic oligonucleotide
  Target: LAMA2; (-) strand; PAM type: YTN; PAM sequence: TTT
actgtgcttgatggataact

SEQ ID NO: 264305 - DNA, 20 bp, Artificial Sequence
  Description of Artificial Sequence: Synthetic oligonucleotide
  Target: LAMA2; (-) strand; PAM type: YTN; PAM sequence: TTT
tactgtgcttgatggataac

SEQ ID NO: 264306 - DNA, 20 bp, Artificial Sequence
  Description of Artificial Sequence: Synthetic oligonucleotide
  Target: LAMA2; (-) strand; PAM type: YTN; PAM sequence: CTT
ttactgtgcttgatggataa

SEQ ID NO: 264307 - DNA, 20 bp, Artificial Sequence
  Description of Artificial Sequence: Synthetic oligonucleotide
  Target: LAMA2; (-) strand; PAM type: YTN; PAM sequence: CTG
cttttactgtgcttgatgga

SEQ ID NO: 264308 - DNA, 20 bp, Artificial Sequence
  Description of Artificial Sequence: Synthetic oligonucleotide
  Target: LAMA2; (-) strand; PAM type: YTN; PAM sequence: CTA
aaatctgcttttactgtgct

SEQ ID NO: 264309 - DNA, 20 bp, Artificial Sequence
  Description of Artificial Sequence: Synthetic oligonucleotide
  Target: LAMA2; (-) strand; PAM type: YTN; PAM sequence: TTA
acacctaaaatctgctttta

SEQ ID NO: 264310 - DNA, 20 bp, Artificial Sequence
  Description of Artificial Sequence: Synthetic oligonucleotide
  Target: LAMA2; (-) strand; PAM type: YTN; PAM sequence: TTT
aacacctaaaatctgctttt

SEQ ID NO: 264311 - DNA, 20 bp, Artificial Sequence
  Description of Artificial Sequence: Synthetic oligonucleotide
  Target: LAMA2; (-) strand; PAM type: YTN; PAM sequence: CTT
taacacctaaaatctgcttt

SEQ ID NO: 264312 - DNA, 20 bp, Artificial Sequence
  Description of Artificial Sequence: Synthetic oligonucleotide
  Target: LAMA2; (-) strand; PAM type: YTN; PAM sequence: TTC
caatgtctttaacacctaaa

SEQ ID NO: 264313 - DNA, 20 bp, Artificial Sequence
  Description of Artificial Sequence: Synthetic oligonucleotide
  Target: LAMA2; (-) strand; PAM type: YTN; PAM sequence: TTG
tcatatggaataaagataat

SEQ ID NO: 264314 - DNA, 20 bp, Artificial Sequence
  Description of Artificial Sequence: Synthetic oligonucleotide
  Target: LAMA2; (-) strand; PAM type: YTN; PAM sequence: TTA
aataacattgtcatatggaa

SEQ ID NO: 264315 - DNA, 20 bp, Artificial Sequence
  Description of Artificial Sequence: Synthetic oligonucleotide
  Target: LAMA2; (-) strand; PAM type: YTN; PAM sequence: TTT
aaataacattgtcatatgga

SEQ ID NO: 264316 - DNA, 20 bp, Artificial Sequence
  Description of Artificial Sequence: Synthetic oligonucleotide
  Target: LAMA2; (-) strand; PAM type: YTN; PAM sequence: TTT
taaataacattgtcatatgg

SEQ ID NO: 264317 - DNA, 20 bp, Artificial Sequence
  Description of Artificial Sequence: Synthetic oligonucleotide
  Target: LAMA2; (-) strand; PAM type: YTN; PAM sequence: TTT
ttaaataacattgtcatatg

SEQ ID NO: 264318 - DNA, 20 bp, Artificial Sequence
  Description of Artificial Sequence: Synthetic oligonucleotide
  Target: LAMA2; (-) strand; PAM type: YTN; PAM sequence: TTG
tttttaaataacattgtcat

SEQ ID NO: 264319 - DNA, 20 bp, Artificial Sequence
  Description of Artificial Sequence: Synthetic oligonucleotide
  Target: LAMA2; (-) strand; PAM type: YTN; PAM sequence: TTT
gtttttaaataacattgtca

SEQ ID NO: 264320 - DNA, 20 bp, Artificial Sequence
  Description of Artificial Sequence: Synthetic oligonucleotide
  Target: LAMA2; (-) strand; PAM type: YTN; PAM sequence: TTG
aaaaagatgtttgtttttaa

SEQ ID NO: 264321 - DNA, 20 bp, Artificial Sequence
  Description of Artificial Sequence: Synthetic oligonucleotide
  Target: LAMA2; (-) strand; PAM type: YTN; PAM sequence: CTT
gaaaaagatgtttgttttta

SEQ ID NO: 264322 - DNA, 20 bp, Artificial Sequence
  Description of Artificial Sequence: Synthetic oligonucleotide
  Target: LAMA2; (-) strand; PAM type: YTN; PAM sequence: TTC
ttgaaaaagatgtttgtttt

SEQ ID NO: 264323 - DNA, 20 bp, Artificial Sequence
  Description of Artificial Sequence: Synthetic oligonucleotide
  Target: LAMA2; (-) strand; PAM type: YTN; PAM sequence: TTT
cttgaaaaagatgtttgttt

SEQ ID NO: 264324 - DNA, 20 bp, Artificial Sequence
  Description of Artificial Sequence: Synthetic oligonucleotide
  Target: LAMA2; (-) strand; PAM type: YTN; PAM sequence: TTT
tcttgaaaaagatgtttgtt

SEQ ID NO: 264325 - DNA, 20 bp, Artificial Sequence
  Description of Artificial Sequence: Synthetic oligonucleotide
  Target: LAMA2; (-) strand; PAM type: YTN; PAM sequence: TTT
ttcttgaaaaagatgtttgt

SEQ ID NO: 264326 - DNA, 20 bp, Artificial Sequence
  Description of Artificial Sequence: Synthetic oligonucleotide
  Target: LAMA2; (-) strand; PAM type: YTN; PAM sequence: CTC
caaagagtatttttcttgaa

SEQ ID NO: 264327 - DNA, 20 bp, Artificial Sequence
  Description of Artificial Sequence: Synthetic oligonucleotide
  Target: LAMA2; (-) strand; PAM type: YTN; PAM sequence: CTG
aaaaagctccaaagagtatt

SEQ ID NO: 264328 - DNA, 20 bp, Artificial Sequence
  Description of Artificial Sequence: Synthetic oligonucleotide
  Target: LAMA2; (-) strand; PAM type: YTN; PAM sequence: TTC
agcctgaaaaagctccaaag

SEQ ID NO: 264329 - DNA, 20 bp, Artificial Sequence
  Description of Artificial Sequence: Synthetic oligonucleotide
  Target: LAMA2; (-) strand; PAM type: YTN; PAM sequence: TTG
tagatacaattcagcctgaa

SEQ ID NO: 264330 - DNA, 20 bp, Artificial Sequence
  Description of Artificial Sequence: Synthetic oligonucleotide
  Target: LAMA2; (-) strand; PAM type: YTN; PAM sequence: TTT
gtagatacaattcagcctga

SEQ ID NO: 264331 - DNA, 20 bp, Artificial Sequence
  Description of Artificial Sequence: Synthetic oligonucleotide
  Target: LAMA2; (-) strand; PAM type: YTN; PAM sequence: TTA
tttgtagatacaattcagcc

SEQ ID NO: 264332 - DNA, 20 bp, Artificial Sequence
  Description of Artificial Sequence: Synthetic oligonucleotide
  Target: LAMA2; (-) strand; PAM type: YTN; PAM sequence: TTT
atttgtagatacaattcagc

SEQ ID NO: 264333 - DNA, 20 bp, Artificial Sequence
  Description of Artificial Sequence: Synthetic oligonucleotide
  Target: LAMA2; (-) strand; PAM type: YTN; PAM sequence: TTT
tatttgtagatacaattcag

SEQ ID NO: 264334 - DNA, 20 bp, Artificial Sequence
  Description of Artificial Sequence: Synthetic oligonucleotide
  Target: LAMA2; (-) strand; PAM type: YTN; PAM sequence: CTT
ttatttgtagatacaattca

SEQ ID NO: 264335 - DNA, 20 bp, Artificial Sequence
  Description of Artificial Sequence: Synthetic oligonucleotide
  Target: LAMA2; (-) strand; PAM type: YTN; PAM sequence: TTA
accaaggaaagcttttattt

SEQ ID NO: 264336 - DNA, 20 bp, Artificial Sequence
  Description of Artificial Sequence: Synthetic oligonucleotide
  Target: LAMA2; (-) strand; PAM type: YTN; PAM sequence: TTT
aaccaaggaaagcttttatt

SEQ ID NO: 264337 - DNA, 20 bp, Artificial Sequence
  Description of Artificial Sequence: Synthetic oligonucleotide
  Target: LAMA2; (-) strand; PAM type: YTN; PAM sequence: TTT
taaccaaggaaagcttttat

SEQ ID NO: 264338 - DNA, 20 bp, Artificial Sequence
  Description of Artificial Sequence: Synthetic oligonucleotide
  Target: LAMA2; (-) strand; PAM type: YTN; PAM sequence: TTC
gggcggcatccatgtgtaat

SEQ ID NO: 264339 - DNA, 20 bp, Artificial Sequence
  Description of Artificial Sequence: Synthetic oligonucleotide
  Target: LAMA2; (-) strand; PAM type: YTN; PAM sequence: CTC
caaggtgttcgggcggcatc

SEQ ID NO: 264340 - DNA, 20 bp, Artificial Sequence
  Description of Artificial Sequence: Synthetic oligonucleotide
  Target: LAMA2; (-) strand; PAM type: YTN; PAM sequence: CTG
gtctccaaggtgttcgggcg

SEQ ID NO: 264341 - DNA, 20 bp, Artificial Sequence
  Description of Artificial Sequence: Synthetic oligonucleotide
  Target: LAMA2; (-) strand; PAM type: YTN; PAM sequence: TTC
ctggtctccaaggtgttcgg

SEQ ID NO: 264342 - DNA, 20 bp, Artificial Sequence
  Description of Artificial Sequence: Synthetic oligonucleotide
  Target: LAMA2; (-) strand; PAM type: YTN; PAM sequence: CTT
cctggtctccaaggtgttcg

SEQ ID NO: 264343 - DNA, 20 bp, Artificial Sequence
  Description of Artificial Sequence: Synthetic oligonucleotide
  Target: LAMA2; (-) strand; PAM type: YTN; PAM sequence: TTC
ttcctggtctccaaggtgtt

SEQ ID NO: 264344 - DNA, 20 bp, Artificial Sequence
  Description of Artificial Sequence: Synthetic oligonucleotide
  Target: LAMA2; (-) strand; PAM type: YTN; PAM sequence: TTT
cttcctggtctccaaggtgt

SEQ ID NO: 264345 - DNA, 20 bp, Artificial Sequence
  Description of Artificial Sequence: Synthetic oligonucleotide
  Target: LAMA2; (-) strand; PAM type: YTN; PAM sequence: TTA
atgtgtatttcttcctggtc

SEQ ID NO: 264346 - DNA, 20 bp, Artificial Sequence
  Description of Artificial Sequence: Synthetic oligonucleotide
  Target: LAMA2; (-) strand; PAM type: YTN; PAM sequence: CTT
aatgtgtatttcttcctggt

SEQ ID NO: 264347 - DNA, 20 bp, Artificial Sequence
  Description of Artificial Sequence: Synthetic oligonucleotide
  Target: LAMA2; (-) strand; PAM type: YTN; PAM sequence: TTG
atacttaatgtgtatttctt

SEQ ID NO: 264348 - DNA, 20 bp, Artificial Sequence
  Description of Artificial Sequence: Synthetic oligonucleotide
  Target: LAMA2; (-) strand; PAM type: YTN; PAM sequence: TTT
gatacttaatgtgtatttct

SEQ ID NO: 264349 - DNA, 20 bp, Artificial Sequence
  Description of Artificial Sequence: Synthetic oligonucleotide
  Target: LAMA2; (-) strand; PAM type: YTN; PAM sequence: TTT
tgatacttaatgtgtatttc

SEQ ID NO: 264350 - DNA, 20 bp, Artificial Sequence
  Description of Artificial Sequence: Synthetic oligonucleotide
  Target: LAMA2; (-) strand; PAM type: YTN; PAM sequence: TTA
caaacgcaagtgccgatttt

SEQ ID NO: 264351 - DNA, 20 bp, Artificial Sequence
  Description of Artificial Sequence: Synthetic oligonucleotide
  Target: LAMA2; (-) strand; PAM type: YTN; PAM sequence: CTT
acaaacgcaagtgccgattt

SEQ ID NO: 264352 - DNA, 20 bp, Artificial Sequence
  Description of Artificial Sequence: Synthetic oligonucleotide
  Target: LAMA2; (-) strand; PAM type: YTN; PAM sequence: CTG
cggcaggggcaacatcactt

SEQ ID NO: 264353 - DNA, 20 bp, Artificial Sequence
  Description of Artificial Sequence: Synthetic oligonucleotide
  Target: LAMA2; (-) strand; PAM type: YTN; PAM sequence: TTC
ccccacctgcggcaggggca

SEQ ID NO: 264354 - DNA, 20 bp, Artificial Sequence
  Description of Artificial Sequence: Synthetic oligonucleotide
  Target: LAMA2; (-) strand; PAM type: YTN; PAM sequence: CTT
cccccacctgcggcaggggc

SEQ ID NO: 264355 - DNA, 20 bp, Artificial Sequence
  Description of Artificial Sequence: Synthetic oligonucleotide
  Target: LAMA2; (-) strand; PAM type: YTN; PAM sequence: CTG
gccttcccccacctgcggca

SEQ ID NO: 264356 - DNA, 20 bp, Artificial Sequence
  Description of Artificial Sequence: Synthetic oligonucleotide
  Target: LAMA2; (-) strand; PAM type: YTN; PAM sequence: CTG
caaagacagactggccttcc

SEQ ID NO: 264357 - DNA, 20 bp, Artificial Sequence
  Description of Artificial Sequence: Synthetic oligonucleotide
  Target: LAMA2; (-) strand; PAM type: YTN; PAM sequence: TTC
agtggctgcaaagacagact

SEQ ID NO: 264358 - DNA, 20 bp, Artificial Sequence
  Description of Artificial Sequence: Synthetic oligonucleotide
  Target: LAMA2; (-) strand; PAM type: YTN; PAM sequence: CTT
cagtggctgcaaagacagac

SEQ ID NO: 264359 - DNA, 20 bp, Artificial Sequence
  Description of Artificial Sequence: Synthetic oligonucleotide
  Target: LAMA2; (-) strand; PAM type: YTN; PAM sequence: CTC
ttcagtggctgcaaagacag

SEQ ID NO: 264360 - DNA, 20 bp, Artificial Sequence
  Description of Artificial Sequence: Synthetic oligonucleotide
  Target: LAMA2; (-) strand; PAM type: YTN; PAM sequence: TTG
agctcttcagtggctgcaaa

SEQ ID NO: 264361 - DNA, 20 bp, Artificial Sequence
  Description of Artificial Sequence: Synthetic oligonucleotide
  Target: LAMA2; (-) strand; PAM type: YTN; PAM sequence: CTT
gagctcttcagtggctgcaa

SEQ ID NO: 264362 - DNA, 20 bp, Artificial Sequence
  Description of Artificial Sequence: Synthetic oligonucleotide
  Target: LAMA2; (-) strand; PAM type: YTN; PAM sequence: TTA
gcaacgcttgagctcttcag

SEQ ID NO: 264363 - DNA, 20 bp, Artificial Sequence
  Description of Artificial Sequence: Synthetic oligonucleotide
  Target: LAMA2; (-) strand; PAM type: YTN; PAM sequence: CTG
cattagcaacgcttgagctc

SEQ ID NO: 264364 - DNA, 20 bp, Artificial Sequence
  Description of Artificial Sequence: Synthetic oligonucleotide
  Target: LAMA2; (-) strand; PAM type: YTN; PAM sequence: TTA
gaaatactgcattagcaacg

SEQ ID NO: 264365 - DNA, 20 bp, Artificial Sequence
  Description of Artificial Sequence: Synthetic oligonucleotide
  Target: LAMA2; (-) strand; PAM type: YTN; PAM sequence: TTA
ggacagcaaagttagaaata

SEQ ID NO: 264366 - DNA, 20 bp, Artificial Sequence
  Description of Artificial Sequence: Synthetic oligonucleotide
  Target: LAMA2; (-) strand; PAM type: YTN; PAM sequence: CTG
aaagaaaaggaagccaatta

SEQ ID NO: 264367 - DNA, 20 bp, Artificial Sequence
  Description of Artificial Sequence: Synthetic oligonucleotide
  Target: LAMA2; (-) strand; PAM type: YTN; PAM sequence: TTG
agaacgcagtcgataaaatc

SEQ ID NO: 264368 - DNA, 20 bp, Artificial Sequence
  Description of Artificial Sequence: Synthetic oligonucleotide
  Target: LAMA2; (-) strand; PAM type: YTN; PAM sequence: CTG
gttgagaacgcagtcgataa

SEQ ID NO: 264369 - DNA, 20 bp, Artificial Sequence
  Description of Artificial Sequence: Synthetic oligonucleotide
  Target: LAMA2; (-) strand; PAM type: YTN; PAM sequence: TTG
gtccaggggtgcggccacct

SEQ ID NO: 264370 - DNA, 20 bp, Artificial Sequence
  Description of Artificial Sequence: Synthetic oligonucleotide
  Target: LAMA2; (-) strand; PAM type: YTN; PAM sequence: TTG
acatggaacacaggtgccca

SEQ ID NO: 264371 - DNA, 20 bp, Artificial Sequence
  Description of Artificial Sequence: Synthetic oligonucleotide
  Target: LAMA2; (-) strand; PAM type: YTN; PAM sequence: TTA
cattgacatggaacacaggt

SEQ ID NO: 264372 - DNA, 20 bp, Artificial Sequence
  Description of Artificial Sequence: Synthetic oligonucleotide
  Target: LAMA2; (-) strand; PAM type: YTN; PAM sequence: CTG
tgtccattacattgacatgg

SEQ ID NO: 264373 - DNA, 20 bp, Artificial Sequence
  Description of Artificial Sequence: Synthetic oligonucleotide
  Target: LAMA2; (-) strand; PAM type: YTN; PAM sequence: CTG
ctgtgtccattacattgaca

SEQ ID NO: 264374 - DNA, 20 bp, Artificial Sequence
  Description of Artificial Sequence: Synthetic oligonucleotide
  Target: LAMA2; (-) strand; PAM type: YTN; PAM sequence: TTC
agggtcacacaggctgctgt

SEQ ID NO: 264375 - DNA, 20 bp, Artificial Sequence
  Description of Artificial Sequence: Synthetic oligonucleotide
  Target: LAMA2; (-) strand; PAM type: YTN; PAM sequence: TTT
cagggtcacacaggctgctg

SEQ ID NO: 264376 - DNA, 20 bp, Artificial Sequence
  Description of Artificial Sequence: Synthetic oligonucleotide
  Target: LAMA2; (-) strand; PAM type: YTN; PAM sequence: CTG
gcatatcgatgtttcagggt

SEQ ID NO: 264377 - DNA, 20 bp, Artificial Sequence
  Description of Artificial Sequence: Synthetic oligonucleotide
  Target: LAMA2; (-) strand; PAM type: YTN; PAM sequence: CTA
cctggcatatcgatgtttca

SEQ ID NO: 264378 - DNA, 20 bp, Artificial Sequence
  Description of Artificial Sequence: Synthetic oligonucleotide
  Target: LAMA2; (-) strand; PAM type: YTN; PAM sequence: CTC
agaggactacctggcatatc

SEQ ID NO: 264379 - DNA, 20 bp, Artificial Sequence
  Description of Artificial Sequence: Synthetic oligonucleotide
  Target: LAMA2; (-) strand; PAM type: YTN; PAM sequence: TTC
aaggaaggctcagaggacta

SEQ ID NO: 264380 - DNA, 20 bp, Artificial Sequence
  Description of Artificial Sequence: Synthetic oligonucleotide
  Target: LAMA2; (-) strand; PAM type: YTN; PAM sequence: TTG
ttcaaggaaggctcagagga

SEQ ID NO: 264381 - DNA, 20 bp, Artificial Sequence
  Description of Artificial Sequence: Synthetic oligonucleotide
  Target: LAMA2; (-) strand; PAM type: YTN; PAM sequence: CTT
gttcaaggaaggctcagagg

SEQ ID NO: 264382 - DNA, 20 bp, Artificial Sequence
  Description of Artificial Sequence: Synthetic oligonucleotide
  Target: LAMA2; (-) strand; PAM type: YTN; PAM sequence: CTG
agcatgtgtaaagaggaatg

SEQ ID NO: 264383 - DNA, 20 bp, Artificial Sequence
  Description of Artificial Sequence: Synthetic oligonucleotide
  Target: LAMA2; (-) strand; PAM type: YTN; PAM sequence: CTG
catgcagatgctgagcatgt

SEQ ID NO: 264384 - DNA, 20 bp, Artificial Sequence
  Description of Artificial Sequence: Synthetic oligonucleotide
  Target: LAMA2; (-) strand; PAM type: YTN; PAM sequence: CTC
tgcatgcagatgctgagcat

SEQ ID NO: 264385 - DNA, 20 bp, Artificial Sequence
  Description of Artificial Sequence: Synthetic oligonucleotide
  Target: LAMA2; (-) strand; PAM type: YTN; PAM sequence: CTG
gcctctgcatgcagatgctg

SEQ ID NO: 264386 - DNA, 20 bp, Artificial Sequence
  Description of Artificial Sequence: Synthetic oligonucleotide
  Target: LAMA2; (-) strand; PAM type: YTN; PAM sequence: TTA
gctggcctctgcatgcagat

SEQ ID NO: 264387 - DNA, 20 bp, Artificial Sequence
  Description of Artificial Sequence: Synthetic oligonucleotide
  Target: LAMA2; (-) strand; PAM type: YTN; PAM sequence: TTT
agctggcctctgcatgcaga

SEQ ID NO: 264388 - DNA, 20 bp, Artificial Sequence
  Description of Artificial Sequence: Synthetic oligonucleotide
  Target: LAMA2; (-) strand; PAM type: YTN; PAM sequence: TTA
cagtttagctggcctctgca

SEQ ID NO: 264389 - DNA, 20 bp, Artificial Sequence
  Description of Artificial Sequence: Synthetic oligonucleotide
  Target: LAMA2; (-) strand; PAM type: YTN; PAM sequence: CTT
acagtttagctggcctctgc

SEQ ID NO: 264390 - DNA, 20 bp, Artificial Sequence
  Description of Artificial Sequence: Synthetic oligonucleotide
  Target: LAMA2; (-) strand; PAM type: YTN; PAM sequence: TTC
ccttacagtttagctggcct

SEQ ID NO: 264391 - DNA, 20 bp, Artificial Sequence
  Description of Artificial Sequence: Synthetic oligonucleotide
  Target: LAMA2; (-) strand; PAM type: YTN; PAM sequence: TTG
cattcccttacagtttagct

SEQ ID NO: 264392 - DNA, 20 bp, Artificial Sequence
  Description of Artificial Sequence: Synthetic oligonucleotide
  Target: LAMA2; (-) strand; PAM type: YTN; PAM sequence: TTC
acacacacagttgcattccc

SEQ ID NO: 264393 - DNA, 20 bp, Artificial Sequence
  Description of Artificial Sequence: Synthetic oligonucleotide
  Target: LAMA2; (-) strand; PAM type: YTN; PAM sequence: TTT
cacacacacagttgcattcc

SEQ ID NO: 264394 - DNA, 20 bp, Artificial Sequence
  Description of Artificial Sequence: Synthetic oligonucleotide
  Target: LAMA2; (-) strand; PAM type: YTN; PAM sequence: TTA
tttcacacacacagttgcat

SEQ ID NO: 264395 - DNA, 20 bp, Artificial Sequence
  Description of Artificial Sequence: Synthetic oligonucleotide
  Target: LAMA2; (-) strand; PAM type: YTN; PAM sequence: TTT
atttcacacacacagttgca

SEQ ID NO: 264396 - DNA, 20 bp, Artificial Sequence
  Description of Artificial Sequence: Synthetic oligonucleotide
  Target: LAMA2; (-) strand; PAM type: YTN; PAM sequence: TTT
tatttcacacacacagttgc

SEQ ID NO: 264397 - DNA, 20 bp, Artificial Sequence
  Description of Artificial Sequence: Synthetic oligonucleotide
  Target: LAMA2; (-) strand; PAM type: YTN; PAM sequence: TTA
catattttatttcacacaca

SEQ ID NO: 264398 - DNA, 20 bp, Artificial Sequence
  Description of Artificial Sequence: Synthetic oligonucleotide
  Target: LAMA2; (-) strand; PAM type: YTN; PAM sequence: CTT
acatattttatttcacacac

SEQ ID NO: 264399 - DNA, 20 bp, Artificial Sequence
  Description of Artificial Sequence: Synthetic oligonucleotide
  Target: LAMA2; (-) strand; PAM type: YTN; PAM sequence: TTC
ccttacatattttatttcac

SEQ ID NO: 264400 - DNA, 20 bp, Artificial Sequence
  Description of Artificial Sequence: Synthetic oligonucleotide
  Target: LAMA2; (-) strand; PAM type: YTN; PAM sequence: TTT
cccttacatattttatttca

SEQ ID NO: 264401 - DNA, 20 bp, Artificial Sequence
  Description of Artificial Sequence: Synthetic oligonucleotide
  Target: LAMA2; (-) strand; PAM type: YTN; PAM sequence: TTT
tcccttacatattttatttc

SEQ ID NO: 264402 - DNA, 20 bp, Artificial Sequence
  Description of Artificial Sequence: Synthetic oligonucleotide
  Target: LAMA2; (-) strand; PAM type: YTN; PAM sequence: TTT
ttcccttacatattttattt

SEQ ID NO: 264403 - DNA, 20 bp, Artificial Sequence
  Description of Artificial Sequence: Synthetic oligonucleotide
  Target: LAMA2; (-) strand; PAM type: YTN; PAM sequence: CTT
tttcccttacatattttatt

SEQ ID NO: 264404 - DNA, 20 bp, Artificial Sequence
  Description of Artificial Sequence: Synthetic oligonucleotide
  Target: LAMA2; (-) strand; PAM type: YTN; PAM sequence: CTG
tgaatatctttttcccttac

SEQ ID NO: 264405 - DNA, 20 bp, Artificial Sequence
  Description of Artificial Sequence: Synthetic oligonucleotide
  Target: LAMA2; (-) strand; PAM type: YTN; PAM sequence: TTA
aaatgcagaatctgtgaata

SEQ ID NO: 264406 - DNA, 20 bp, Artificial Sequence
  Description of Artificial Sequence: Synthetic oligonucleotide
  Target: LAMA2; (-) strand; PAM type: YTN; PAM sequence: TTT
aaaatgcagaatctgtgaat

SEQ ID NO: 264407 - DNA, 20 bp, Artificial Sequence
  Description of Artificial Sequence: Synthetic oligonucleotide
  Target: LAMA2; (-) strand; PAM type: YTN; PAM sequence: TTT
taaaatgcagaatctgtgaa

SEQ ID NO: 264408 - DNA, 20 bp, Artificial Sequence
  Description of Artificial Sequence: Synthetic oligonucleotide
  Target: LAMA2; (-) strand; PAM type: YTN; PAM sequence: TTT
ttaaaatgcagaatctgtga

SEQ ID NO: 264409 - DNA, 20 bp, Artificial Sequence
  Description of Artificial Sequence: Synthetic oligonucleotide
  Target: LAMA2; (-) strand; PAM type: YTN; PAM sequence: CTT
tttaaaatgcagaatctgtg

SEQ ID NO: 264410 - DNA, 20 bp, Artificial Sequence
  Description of Artificial Sequence: Synthetic oligonucleotide
  Target: LAMA2; (-) strand; PAM type: YTN; PAM sequence: TTA
ctttttaaaatgcagaatct

SEQ ID NO: 264411 - DNA, 20 bp, Artificial Sequence
  Description of Artificial Sequence: Synthetic oligonucleotide
  Target: LAMA2; (-) strand; PAM type: YTN; PAM sequence: CTT
actttttaaaatgcagaatc

SEQ ID NO: 264412 - DNA, 20 bp, Artificial Sequence
  Description of Artificial Sequence: Synthetic oligonucleotide
  Target: LAMA2; (-) strand; PAM type: YTN; PAM sequence: TTC
cttactttttaaaatgcaga

SEQ ID NO: 264413 - DNA, 20 bp, Artificial Sequence
  Description of Artificial Sequence: Synthetic oligonucleotide
  Target: LAMA2; (-) strand; PAM type: YTN; PAM sequence: TTT
ccttactttttaaaatgcag

SEQ ID NO: 264414 - DNA, 20 bp, Artificial Sequence
  Description of Artificial Sequence: Synthetic oligonucleotide
  Target: LAMA2; (-) strand; PAM type: YTN; PAM sequence: TTT
tccttactttttaaaatgca

SEQ ID NO: 264415 - DNA, 20 bp, Artificial Sequence
  Description of Artificial Sequence: Synthetic oligonucleotide
  Target: LAMA2; (-) strand; PAM type: YTN; PAM sequence: TTT
ttccttactttttaaaatgc

SEQ ID NO: 264416 - DNA, 20 bp, Artificial Sequence
  Description of Artificial Sequence: Synthetic oligonucleotide
  Target: LAMA2; (-) strand; PAM type: YTN; PAM sequence: TTT
tttccttactttttaaaatg

SEQ ID NO: 264417 - DNA, 20 bp, Artificial Sequence
  Description of Artificial Sequence: Synthetic oligonucleotide
  Target: LAMA2; (-) strand; PAM type: YTN; PAM sequence: TTA
ttttttccttactttttaaa

SEQ ID NO: 264418 - DNA, 20 bp, Artificial Sequence
  Description of Artificial Sequence: Synthetic oligonucleotide
  Target: LAMA2; (-) strand; PAM type: YTN; PAM sequence: CTC
ccagttattttttccttact

SEQ ID NO: 264419 - DNA, 20 bp, Artificial Sequence
  Description of Artificial Sequence: Synthetic oligonucleotide
  Target: LAMA2; (-) strand; PAM type: YTN; PAM sequence: TTC
tcccagttattttttcctta

SEQ ID NO: 264420 - DNA, 20 bp, Artificial Sequence
  Description of Artificial Sequence: Synthetic oligonucleotide
  Target: LAMA2; (-) strand; PAM type: YTN; PAM sequence: CTC
agtggttctcccagttattt

SEQ ID NO: 264421 - DNA, 20 bp, Artificial Sequence
  Description of Artificial Sequence: Synthetic oligonucleotide
  Target: LAMA2; (-) strand; PAM type: YTN; PAM sequence: TTG
acatgctcagtggttctccc

SEQ ID NO: 264422 - DNA, 20 bp, Artificial Sequence
  Description of Artificial Sequence: Synthetic oligonucleotide
  Target: LAMA2; (-) strand; PAM type: YTN; PAM sequence: CTT
gacatgctcagtggttctcc

SEQ ID NO: 264423 - DNA, 20 bp, Artificial Sequence
  Description of Artificial Sequence: Synthetic oligonucleotide
  Target: LAMA2; (-) strand; PAM type: YTN; PAM sequence: TTC
ttgacatgctcagtggttct

SEQ ID NO: 264424 - DNA, 20 bp, Artificial Sequence
  Description of Artificial Sequence: Synthetic oligonucleotide
  Target: LAMA2; (-) strand; PAM type: YTN; PAM sequence: TTT
cttgacatgctcagtggttc

SEQ ID NO: 264425 - DNA, 20 bp, Artificial Sequence
  Description of Artificial Sequence: Synthetic oligonucleotide
  Target: LAMA2; (-) strand; PAM type: YTN; PAM sequence: CTA
tttcttgacatgctcagtgg

SEQ ID NO: 264426 - DNA, 20 bp, Artificial Sequence
  Description of Artificial Sequence: Synthetic oligonucleotide
  Target: LAMA2; (-) strand; PAM type: YTN; PAM sequence: TTC
tatttcttgacatgctcagt

SEQ ID NO: 264427 - DNA, 20 bp, Artificial Sequence
  Description of Artificial Sequence: Synthetic oligonucleotide
  Target: LAMA2; (-) strand; PAM type: YTN; PAM sequence: CTA
aaattctatttcttgacatg

SEQ ID NO: 264428 - DNA, 20 bp, Artificial Sequence
  Description of Artificial Sequence: Synthetic oligonucleotide
  Target: LAMA2; (-) strand; PAM type: YTN; PAM sequence: CTG
ctaaaattctatttcttgac

SEQ ID NO: 264429 - DNA, 20 bp, Artificial Sequence
  Description of Artificial Sequence: Synthetic oligonucleotide
  Target: LAMA2; (-) strand; PAM type: YTN; PAM sequence: CTA
agatgctgctaaaattctat

SEQ ID NO: 264430 - DNA, 20 bp, Artificial Sequence
  Description of Artificial Sequence: Synthetic oligonucleotide
  Target: LAMA2; (-) strand; PAM type: YTN; PAM sequence: TTC
taagatgctgctaaaattct

SEQ ID NO: 264431 - DNA, 20 bp, Artificial Sequence
  Description of Artificial Sequence: Synthetic oligonucleotide
  Target: LAMA2; (-) strand; PAM type: YTN; PAM sequence: CTT
ctaagatgctgctaaaattc

SEQ ID NO: 264432 - DNA, 20 bp, Artificial Sequence
  Description of Artificial Sequence: Synthetic oligonucleotide
  Target: LAMA2; (-) strand; PAM type: YTN; PAM sequence: CTC
ttctaagatgctgctaaaat

SEQ ID NO: 264433 - DNA, 20 bp, Artificial Sequence
  Description of Artificial Sequence: Synthetic oligonucleotide
  Target: LAMA2; (-) strand; PAM type: YTN; PAM sequence: CTG
gtgctcttctaagatgctgc

SEQ ID NO: 264434 - DNA, 20 bp, Artificial Sequence
  Description of Artificial Sequence: Synthetic oligonucleotide
  Target: LAMA2; (-) strand; PAM type: YTN; PAM sequence: TTC
tggtgctcttctaagatgct

SEQ ID NO: 264435 - DNA, 20 bp, Artificial Sequence
  Description of Artificial Sequence: Synthetic oligonucleotide
  Target: LAMA2; (-) strand; PAM type: YTN; PAM sequence: CTT
ctggtgctcttctaagatgc

SEQ ID NO: 264436 - DNA, 20 bp, Artificial Sequence
  Description of Artificial Sequence: Synthetic oligonucleotide
  Target: LAMA2; (-) strand; PAM type: YTN; PAM sequence: TTA
aataggtatgtcttctggtg

SEQ ID NO: 264437 - DNA, 20 bp, Artificial Sequence
  Description of Artificial Sequence: Synthetic oligonucleotide
  Target: LAMA2; (-) strand; PAM type: YTN; PAM sequence: TTT
aaataggtatgtcttctggt

SEQ ID NO: 264438 - DNA, 20 bp, Artificial Sequence
  Description of Artificial Sequence: Synthetic oligonucleotide
  Target: LAMA2; (-) strand; PAM type: YTN; PAM sequence: TTT
taaataggtatgtcttctgg

SEQ ID NO: 264439 - DNA, 20 bp, Artificial Sequence
  Description of Artificial Sequence: Synthetic oligonucleotide
  Target: LAMA2; (-) strand; PAM type: YTN; PAM sequence: TTT
ttaaataggtatgtcttctg

SEQ ID NO: 264440 - DNA, 20 bp, Artificial Sequence
  Description of Artificial Sequence: Synthetic oligonucleotide
  Target: LAMA2; (-) strand; PAM type: YTN; PAM sequence: TTA
taagaaaataatcagaaaaa

SEQ ID NO: 264441 - DNA, 20 bp, Artificial Sequence
  Description of Artificial Sequence: Synthetic oligonucleotide
  Target: LAMA2; (-) strand; PAM type: YTN; PAM sequence: TTT
ataagaaaataatcagaaaa

SEQ ID NO: 264442 - DNA, 20 bp, Artificial Sequence
  Description of Artificial Sequence: Synthetic oligonucleotide
  Target: LAMA2; (-) strand; PAM type: YTN; PAM sequence: TTA
tttataagaaaataatcaga

SEQ ID NO: 264443 - DNA, 20 bp, Artificial Sequence
  Description of Artificial Sequence: Synthetic oligonucleotide
  Target: LAMA2; (-) strand; PAM type: YTN; PAM sequence: TTT
atttataagaaaataatcag

SEQ ID NO: 264444 - DNA, 20 bp, Artificial Sequence
  Description of Artificial Sequence: Synthetic oligonucleotide
  Target: LAMA2; (-) strand; PAM type: YTN; PAM sequence: TTA
tagaaagtttatttataaga

SEQ ID NO: 264445 - DNA, 20 bp, Artificial Sequence
  Description of Artificial Sequence: Synthetic oligonucleotide
  Target: LAMA2; (-) strand; PAM type: YTN; PAM sequence: TTT
atagaaagtttatttataag

SEQ ID NO: 264446 - DNA, 20 bp, Artificial Sequence
  Description of Artificial Sequence: Synthetic oligonucleotide
  Target: LAMA2; (-) strand; PAM type: YTN; PAM sequence: TTT
tatagaaagtttatttataa

SEQ ID NO: 264447 - DNA, 20 bp, Artificial Sequence
  Description of Artificial Sequence: Synthetic oligonucleotide
  Target: LAMA2; (-) strand; PAM type: YTN; PAM sequence: TTC
caaattttatagaaagttta

SEQ ID NO: 264448 - DNA, 20 bp, Artificial Sequence
  Description of Artificial Sequence: Synthetic oligonucleotide
  Target: LAMA2; (-) strand; PAM type: YTN; PAM sequence: TTT
ccaaattttatagaaagttt

SEQ ID NO: 264449 - DNA, 20 bp, Artificial Sequence
  Description of Artificial Sequence: Synthetic oligonucleotide
  Target: LAMA2; (-) strand; PAM type: YTN; PAM sequence: CTG
taatttccaaattttataga

SEQ ID NO: 264450 - DNA, 20 bp, Artificial Sequence
  Description of Artificial Sequence: Synthetic oligonucleotide
  Target: LAMA2; (-) strand; PAM type: YTN; PAM sequence: TTC
tgtaatttccaaattttata

SEQ ID NO: 264451 - DNA, 20 bp, Artificial Sequence
  Description of Artificial Sequence: Synthetic oligonucleotide
  Target: LAMA2; (-) strand; PAM type: YTN; PAM sequence: TTT
ctgtaatttccaaattttat

SEQ ID NO: 264452 - DNA, 20 bp, Artificial Sequence
  Description of Artificial Sequence: Synthetic oligonucleotide
  Target: LAMA2; (-) strand; PAM type: YTN; PAM sequence: TTT
tctgtaatttccaaatttta

SEQ ID NO: 264453 - DNA, 20 bp, Artificial Sequence
  Description of Artificial Sequence: Synthetic oligonucleotide
  Target: LAMA2; (-) strand; PAM type: YTN; PAM sequence: CTT
ttctgtaatttccaaatttt

SEQ ID NO: 264454 - DNA, 20 bp, Artificial Sequence
  Description of Artificial Sequence: Synthetic oligonucleotide
  Target: LAMA2; (-) strand; PAM type: YTN; PAM sequence: TTC
ttttctgtaatttccaaatt

SEQ ID NO: 264455 - DNA, 20 bp, Artificial Sequence
  Description of Artificial Sequence: Synthetic oligonucleotide
  Target: LAMA2; (-) strand; PAM type: YTN; PAM sequence: TTA
attcttttctgtaatttcca

SEQ ID NO: 264456 - DNA, 20 bp, Artificial Sequence
  Description of Artificial Sequence: Synthetic oligonucleotide
  Target: LAMA2; (-) strand; PAM type: YTN; PAM sequence: CTT
aattcttttctgtaatttcc

SEQ ID NO: 264457 - DNA, 20 bp, Artificial Sequence
  Description of Artificial Sequence: Synthetic oligonucleotide
  Target: LAMA2; (-) strand; PAM type: YTN; PAM sequence: TTC
ttaattcttttctgtaattt

SEQ ID NO: 264458 - DNA, 20 bp, Artificial Sequence
  Description of Artificial Sequence: Synthetic oligonucleotide
  Target: LAMA2; (-) strand; PAM type: YTN; PAM sequence: CTT
cttaattcttttctgtaatt

SEQ ID NO: 264459 - DNA, 20 bp, Artificial Sequence
  Description of Artificial Sequence: Synthetic oligonucleotide
  Target: LAMA2; (-) strand; PAM type: YTN; PAM sequence: TTC
ttcttaattcttttctgtaa

SEQ ID NO: 264460 - DNA, 20 bp, Artificial Sequence
  Description of Artificial Sequence: Synthetic oligonucleotide
  Target: LAMA2; (-) strand; PAM type: YTN; PAM sequence: TTT
cttcttaattcttttctgta

SEQ ID NO: 264461 - DNA, 20 bp, Artificial Sequence
  Description of Artificial Sequence: Synthetic oligonucleotide
  Target: LAMA2; (-) strand; PAM type: YTN; PAM sequence: TTT
tcttcttaattcttttctgt

SEQ ID NO: 264462 - DNA, 20 bp, Artificial Sequence
  Description of Artificial Sequence: Synthetic oligonucleotide
  Target: LAMA2; (-) strand; PAM type: YTN; PAM sequence: TTT
ttcttcttaattcttttctg

SEQ ID NO: 264463 - DNA, 20 bp, Artificial Sequence
  Description of Artificial Sequence: Synthetic oligonucleotide
  Target: LAMA2; (-) strand; PAM type: YTN; PAM sequence: TTT
tttcttcttaattcttttct

SEQ ID NO: 264464 - DNA, 20 bp, Artificial Sequence
  Description of Artificial Sequence: Synthetic oligonucleotide
  Target: LAMA2; (-) strand; PAM type: YTN; PAM sequence: TTG
ggtgaattttttcttcttaa

SEQ ID NO: 264465 - DNA, 20 bp, Artificial Sequence
  Description of Artificial Sequence: Synthetic oligonucleotide
  Target: LAMA2; (-) strand; PAM type: YTN; PAM sequence: TTT
gggtgaattttttcttctta

SEQ ID NO: 264466 - DNA, 20 bp, Artificial Sequence
  Description of Artificial Sequence: Synthetic oligonucleotide
  Target: LAMA2; (-) strand; PAM type: YTN; PAM sequence: TTT
tgggtgaattttttcttctt

SEQ ID NO: 264467 - DNA, 20 bp, Artificial Sequence
  Description of Artificial Sequence: Synthetic oligonucleotide
  Target: LAMA2; (-) strand; PAM type: YTN; PAM sequence: TTG
cattttgggtgaattttttc

SEQ ID NO: 264468 - DNA, 20 bp, Artificial Sequence
  Description of Artificial Sequence: Synthetic oligonucleotide
  Target: LAMA2; (-) strand; PAM type: YTN; PAM sequence: TTA
tgttgcattttgggtgaatt

SEQ ID NO: 264469 - DNA, 20 bp, Artificial Sequence
  Description of Artificial Sequence: Synthetic oligonucleotide
  Target: LAMA2; (-) strand; PAM type: YTN; PAM sequence: TTA
aaatgttatgttgcattttg

SEQ ID NO: 264470 - DNA, 20 bp, Artificial Sequence
  Description of Artificial Sequence: Synthetic oligonucleotide
  Target: LAMA2; (-) strand; PAM type: YTN; PAM sequence: TTA
aaacattaaaatgttatgtt

SEQ ID NO: 264471 - DNA, 20 bp, Artificial Sequence
  Description of Artificial Sequence: Synthetic oligonucleotide
  Target: LAMA2; (-) strand; PAM type: YTN; PAM sequence: CTT
aaaacattaaaatgttatgt

SEQ ID NO: 264472 - DNA, 20 bp, Artificial Sequence
  Description of Artificial Sequence: Synthetic oligonucleotide
  Target: LAMA2; (-) strand; PAM type: YTN; PAM sequence: TTG
gtgggaaatacttaaaacat

SEQ ID NO: 264473 - DNA, 20 bp, Artificial Sequence
  Description of Artificial Sequence: Synthetic oligonucleotide
  Target: LAMA2; (-) strand; PAM type: YTN; PAM sequence: TTC
ataaacacatgtaaaaattg

SEQ ID NO: 264474 - DNA, 20 bp, Artificial Sequence
  Description of Artificial Sequence: Synthetic oligonucleotide
  Target: LAMA2; (-) strand; PAM type: YTN; PAM sequence: TTA
ttcataaacacatgtaaaaa

SEQ ID NO: 264475 - DNA, 20 bp, Artificial Sequence
  Description of Artificial Sequence: Synthetic oligonucleotide
  Target: LAMA2; (-) strand; PAM type: YTN; PAM sequence: CTT
attcataaacacatgtaaaa

SEQ ID NO: 264476 - DNA, 20 bp, Artificial Sequence
  Description of Artificial Sequence: Synthetic oligonucleotide
  Target: LAMA2; (-) strand; PAM type: YTN; PAM sequence: TTA
tataaatcttattcataaac

SEQ ID NO: 264477 - DNA, 20 bp, Artificial Sequence
  Description of Artificial Sequence: Synthetic oligonucleotide
  Target: LAMA2; (-) strand; PAM type: YTN; PAM sequence: CTG
catccatggtgttatataaa

SEQ ID NO: 264478 - DNA, 20 bp, Artificial Sequence
  Description of Artificial Sequence: Synthetic oligonucleotide
  Target: LAMA2; (-) strand; PAM type: YTN; PAM sequence: CTC
atgataggtaaaaatgtaaa

SEQ ID NO: 264479 - DNA, 20 bp, Artificial Sequence
  Description of Artificial Sequence: Synthetic oligonucleotide
  Target: LAMA2; (-) strand; PAM type: YTN; PAM sequence: CTA
acaacataatacaacctcat

SEQ ID NO: 264480 - DNA, 20 bp, Artificial Sequence
  Description of Artificial Sequence: Synthetic oligonucleotide
  Target: LAMA2; (-) strand; PAM type: YTN; PAM sequence: TTA
aataatatctaacaacataa

SEQ ID NO: 264481 - DNA, 20 bp, Artificial Sequence
  Description of Artificial Sequence: Synthetic oligonucleotide
  Target: LAMA2; (-) strand; PAM type: YTN; PAM sequence: TTT
aaataatatctaacaacata

SEQ ID NO: 264482 - DNA, 20 bp, Artificial Sequence
  Description of Artificial Sequence: Synthetic oligonucleotide
  Target: LAMA2; (-) strand; PAM type: YTN; PAM sequence: TTT
taaataatatctaacaacat

SEQ ID NO: 264483 - DNA, 20 bp, Artificial Sequence
  Description of Artificial Sequence: Synthetic oligonucleotide
  Target: LAMA2; (-) strand; PAM type: YTN; PAM sequence: TTA
tgggacatccaaacaaagat

SEQ ID NO: 264484 - DNA, 20 bp, Artificial Sequence
  Description of Artificial Sequence: Synthetic oligonucleotide
  Target: LAMA2; (-) strand; PAM type: YTN; PAM sequence: CTA
agggaaatgggtaaattatg

SEQ ID NO: 264485 - DNA, 20 bp, Artificial Sequence
  Description of Artificial Sequence: Synthetic oligonucleotide
  Target: LAMA2; (-) strand; PAM type: YTN; PAM sequence: TTC
taagggaaatgggtaaatta

SEQ ID NO: 264486 - DNA, 20 bp, Artificial Sequence
  Description of Artificial Sequence: Synthetic oligonucleotide
  Target: LAMA2; (-) strand; PAM type: YTN; PAM sequence: CTC
aattctaagggaaatgggta

SEQ ID NO: 264487 - DNA, 20 bp, Artificial Sequence
  Description of Artificial Sequence: Synthetic oligonucleotide
  Target: LAMA2; (-) strand; PAM type: YTN; PAM sequence: CTA
cctcaattctaagggaaatg

SEQ ID NO: 264488 - DNA, 20 bp, Artificial Sequence
  Description of Artificial Sequence: Synthetic oligonucleotide
  Target: LAMA2; (-) strand; PAM type: YTN; PAM sequence: CTA
atgcagatggtggtagagag

SEQ ID NO: 264489 - DNA, 20 bp, Artificial Sequence
  Description of Artificial Sequence: Synthetic oligonucleotide
  Target: LAMA2; (-) strand; PAM type: YTN; PAM sequence: TTC
taatgcagatggtggtagag

SEQ ID NO: 264490 - DNA, 20 bp, Artificial Sequence
  Description of Artificial Sequence: Synthetic oligonucleotide
  Target: LAMA2; (-) strand; PAM type: YTN; PAM sequence: TTG
ttctaatgcagatggtggta

SEQ ID NO: 264491 - DNA, 20 bp, Artificial Sequence
  Description of Artificial Sequence: Synthetic oligonucleotide
  Target: LAMA2; (-) strand; PAM type: YTN; PAM sequence: CTG
attgttctaatgcagatggt

SEQ ID NO: 264492 - DNA, 20 bp, Artificial Sequence
  Description of Artificial Sequence: Synthetic oligonucleotide
  Target: LAMA2; (-) strand; PAM type: YTN; PAM sequence: TTC
tgattgttctaatgcagatg

SEQ ID NO: 264493 - DNA, 20 bp, Artificial Sequence
  Description of Artificial Sequence: Synthetic oligonucleotide
  Target: LAMA2; (-) strand; PAM type: YTN; PAM sequence: TTG
ttctgattgttctaatgcag

SEQ ID NO: 264494 - DNA, 20 bp, Artificial Sequence
  Description of Artificial Sequence: Synthetic oligonucleotide
  Target: LAMA2; (-) strand; PAM type: YTN; PAM sequence: CTA
cgataaaaagggtggaacac

SEQ ID NO: 264495 - DNA, 20 bp, Artificial Sequence
  Description of Artificial Sequence: Synthetic oligonucleotide
  Target: LAMA2; (-) strand; PAM type: YTN; PAM sequence: TTA
cagtgactacgataaaaagg

SEQ ID NO: 264496 - DNA, 20 bp, Artificial Sequence
  Description of Artificial Sequence: Synthetic oligonucleotide
  Target: LAMA2; (-) strand; PAM type: YTN; PAM sequence: CTT
acagtgactacgataaaaag

SEQ ID NO: 264497 - DNA, 20 bp, Artificial Sequence
  Description of Artificial Sequence: Synthetic oligonucleotide
  Target: LAMA2; (-) strand; PAM type: YTN; PAM sequence: TTC
ttacagtgactacgataaaa

SEQ ID NO: 264498 - DNA, 20 bp, Artificial Sequence
  Description of Artificial Sequence: Synthetic oligonucleotide
  Target: LAMA2; (-) strand; PAM type: YTN; PAM sequence: TTT
cttacagtgactacgataaa

SEQ ID NO: 264499 - DNA, 20 bp, Artificial Sequence
  Description of Artificial Sequence: Synthetic oligonucleotide
  Target: LAMA2; (-) strand; PAM type: YTN; PAM sequence: CTG
aatttcttacagtgactacg

SEQ ID NO: 264500 - DNA, 20 bp, Artificial Sequence
  Description of Artificial Sequence: Synthetic oligonucleotide
  Target: LAMA2; (-) strand; PAM type: YTN; PAM sequence: TTG
agggacaagtggtgacaggg

SEQ ID NO: 264501 - DNA, 20 bp, Artificial Sequence
  Description of Artificial Sequence: Synthetic oligonucleotide
  Target: LAMA2; (-) strand; PAM type: YTN; PAM sequence: CTT
gagggacaagtggtgacagg

SEQ ID NO: 264502 - DNA, 20 bp, Artificial Sequence
  Description of Artificial Sequence: Synthetic oligonucleotide
  Target: LAMA2; (-) strand; PAM type: YTN; PAM sequence: TTA
cagcttgagggacaagtggt

SEQ ID NO: 264503 - DNA, 20 bp, Artificial Sequence
  Description of Artificial Sequence: Synthetic oligonucleotide
  Target: LAMA2; (-) strand; PAM type: YTN; PAM sequence: CTG
tgggcagattacagcttgag

SEQ ID NO: 264504 - DNA, 20 bp, Artificial Sequence
  Description of Artificial Sequence: Synthetic oligonucleotide
  Target: LAMA2; (-) strand; PAM type: YTN; PAM sequence: TTA
acaaagatgagctgtgggca

SEQ ID NO: 264505 - DNA, 20 bp, Artificial Sequence
  Description of Artificial Sequence: Synthetic oligonucleotide
  Target: LAMA2; (-) strand; PAM type: YTN; PAM sequence: CTT
aacaaagatgagctgtgggc

SEQ ID NO: 264506 - DNA, 20 bp, Artificial Sequence
  Description of Artificial Sequence: Synthetic oligonucleotide
  Target: LAMA2; (-) strand; PAM type: YTN; PAM sequence: TTC
agaaggtgagcagaggtggg

SEQ ID NO: 264507 - DNA, 20 bp, Artificial Sequence
  Description of Artificial Sequence: Synthetic oligonucleotide
  Target: LAMA2; (-) strand; PAM type: YTN; PAM sequence: TTT
cagaaggtgagcagaggtgg

SEQ ID NO: 264508 - DNA, 20 bp, Artificial Sequence
  Description of Artificial Sequence: Synthetic oligonucleotide
  Target: LAMA2; (-) strand; PAM type: YTN; PAM sequence: CTC
agtagaatggtttcagaagg

SEQ ID NO: 264509 - DNA, 20 bp, Artificial Sequence
  Description of Artificial Sequence: Synthetic oligonucleotide
  Target: LAMA2; (-) strand; PAM type: YTN; PAM sequence: TTC
cacaaggctcagtagaatgg

SEQ ID NO: 264510 - DNA, 20 bp, Artificial Sequence
  Description of Artificial Sequence: Synthetic oligonucleotide
  Target: LAMA2; (-) strand; PAM type: YTN; PAM sequence: TTG
accatgagttccacaaggct

SEQ ID NO: 264511 - DNA, 20 bp, Artificial Sequence
  Description of Artificial Sequence: Synthetic oligonucleotide
  Target: LAMA2; (-) strand; PAM type: YTN; PAM sequence: TTT
gaccatgagttccacaaggc

SEQ ID NO: 264512 - DNA, 20 bp, Artificial Sequence
  Description of Artificial Sequence: Synthetic oligonucleotide
  Target: LAMA2; (-) strand; PAM type: YTN; PAM sequence: TTT
tgaccatgagttccacaagg

SEQ ID NO: 264513 - DNA, 20 bp, Artificial Sequence
  Description of Artificial Sequence: Synthetic oligonucleotide
  Target: LAMA2; (-) strand; PAM type: YTN; PAM sequence: CTG
ttttgaccatgagttccaca

SEQ ID NO: 264514 - DNA, 20 bp, Artificial Sequence
  Description of Artificial Sequence: Synthetic oligonucleotide
  Target: LAMA2; (-) strand; PAM type: YTN; PAM sequence: TTG
cctgttttgaccatgagttc

SEQ ID NO: 264515 - DNA, 20 bp, Artificial Sequence
  Description of Artificial Sequence: Synthetic oligonucleotide
  Target: LAMA2; (-) strand; PAM type: YTN; PAM sequence: TTT
gcctgttttgaccatgagtt

SEQ ID NO: 264516 - DNA, 20 bp, Artificial Sequence
  Description of Artificial Sequence: Synthetic oligonucleotide
  Target: LAMA2; (-) strand; PAM type: YTN; PAM sequence: TTT
tgcctgttttgaccatgagt

SEQ ID NO: 264517 - DNA, 20 bp, Artificial Sequence
  Description of Artificial Sequence: Synthetic oligonucleotide
  Target: LAMA2; (-) strand; PAM type: YTN; PAM sequence: CTG
cggggtattttgcctgtttt

SEQ ID NO: 264518 - DNA, 20 bp, Artificial Sequence
  Description of Artificial Sequence: Synthetic oligonucleotide
  Target: LAMA2; (-) strand; PAM type: YTN; PAM sequence: TTC
tgcggggtattttgcctgtt

SEQ ID NO: 264519 - DNA, 20 bp, Artificial Sequence
  Description of Artificial Sequence: Synthetic oligonucleotide
  Target: LAMA2; (-) strand; PAM type: YTN; PAM sequence: CTG
agggaagaggaggattctgc

SEQ ID NO: 264520 - DNA, 20 bp, Artificial Sequence
  Description of Artificial Sequence: Synthetic oligonucleotide
  Target: LAMA2; (-) strand; PAM type: YTN; PAM sequence: TTC
agtcagagcatgatgaagag

SEQ ID NO: 264521 - DNA, 20 bp, Artificial Sequence
  Description of Artificial Sequence: Synthetic oligonucleotide
  Target: LAMA2; (-) strand; PAM type: YTN; PAM sequence: TTT
cagtcagagcatgatgaaga

SEQ ID NO: 264522 - DNA, 20 bp, Artificial Sequence
  Description of Artificial Sequence: Synthetic oligonucleotide
  Target: LAMA2; (-) strand; PAM type: YTN; PAM sequence: TTG
ggtttcagtcagagcatgat

SEQ ID NO: 264523 - DNA, 20 bp, Artificial Sequence
  Description of Artificial Sequence: Synthetic oligonucleotide
  Target: LAMA2; (-) strand; PAM type: YTN; PAM sequence: CTG
ccggggtagcagcatgcaaa

SEQ ID NO: 264524 - DNA, 20 bp, Artificial Sequence
  Description of Artificial Sequence: Synthetic oligonucleotide
  Target: LAMA2; (-) strand; PAM type: YTN; PAM sequence: TTA
agagggctgccggggtagca

SEQ ID NO: 264525 - DNA, 20 bp, Artificial Sequence
  Description of Artificial Sequence: Synthetic oligonucleotide
  Target: LAMA2; (-) strand; PAM type: YTN; PAM sequence: CTT
aagagggctgccggggtagc

SEQ ID NO: 264526 - DNA, 20 bp, Artificial Sequence
  Description of Artificial Sequence: Synthetic oligonucleotide
  Target: LAMA2; (-) strand; PAM type: YTN; PAM sequence: CTC
cttaagagggctgccggggt

SEQ ID NO: 264527 - DNA, 20 bp, Artificial Sequence
  Description of Artificial Sequence: Synthetic oligonucleotide
  Target: LAMA2; (-) strand; PAM type: YTN; PAM sequence: CTA
ctccttaagagggctgccgg

SEQ ID NO: 264528 - DNA, 20 bp, Artificial Sequence
  Description of Artificial Sequence: Synthetic oligonucleotide
  Target: LAMA2; (-) strand; PAM type: YTN; PAM sequence: CTC
aggggaaaaaaaaaacaaaa

SEQ ID NO: 264529 - DNA, 20 bp, Artificial Sequence
  Description of Artificial Sequence: Synthetic oligonucleotide
  Target: LAMA2; (-) strand; PAM type: YTN; PAM sequence: CTG
cacgacagagtgagtcagca

SEQ ID NO: 264530 - DNA, 20 bp, Artificial Sequence
  Description of Artificial Sequence: Synthetic oligonucleotide
  Target: LAMA2; (-) strand; PAM type: YTN; PAM sequence: CTC
cagcctgcacgacagagtga

SEQ ID NO: 264531 - DNA, 20 bp, Artificial Sequence
  Description of Artificial Sequence: Synthetic oligonucleotide
  Target: LAMA2; (-) strand; PAM type: YTN; PAM sequence: CTG
ccctccagcctgcacgacag

SEQ ID NO: 264532 - DNA, 20 bp, Artificial Sequence
  Description of Artificial Sequence: Synthetic oligonucleotide
  Target: LAMA2; (-) strand; PAM type: YTN; PAM sequence: TTG
cagtgagccaggatcgccac

SEQ ID NO: 264533 - DNA, 20 bp, Artificial Sequence
  Description of Artificial Sequence: Synthetic oligonucleotide
  Target: LAMA2; (-) strand; PAM type: YTN; PAM sequence: TTG
aacccgggagtcggaggttg

SEQ ID NO: 264534 - DNA, 20 bp, Artificial Sequence
  Description of Artificial Sequence: Synthetic oligonucleotide
  Target: LAMA2; (-) strand; PAM type: YTN; PAM sequence: CTT
gaacccgggagtcggaggtt

SEQ ID NO: 264535 - DNA, 20 bp, Artificial Sequence
  Description of Artificial Sequence: Synthetic oligonucleotide
  Target: LAMA2; (-) strand; PAM type: YTN; PAM sequence: CTG
aggcatgagaatcacttgaa

SEQ ID NO: 264536 - DNA, 20 bp, Artificial Sequence
  Description of Artificial Sequence: Synthetic oligonucleotide
  Target: LAMA2; (-) strand; PAM type: YTN; PAM sequence: CTC
aggaggctgaggcatgagaa

SEQ ID NO: 264537 - DNA, 20 bp, Artificial Sequence
  Description of Artificial Sequence: Synthetic oligonucleotide
  Target: LAMA2; (-) strand; PAM type: YTN; PAM sequence: CTA
ctcaggaggctgaggcatga

SEQ ID NO: 264538 - DNA, 20 bp, Artificial Sequence
  Description of Artificial Sequence: Synthetic oligonucleotide
  Target: LAMA2; (-) strand; PAM type: YTN; PAM sequence: CTG
tagtcccagctactcaggag

SEQ ID NO: 264539 - DNA, 20 bp, Artificial Sequence
  Description of Artificial Sequence: Synthetic oligonucleotide
  Target: LAMA2; (-) strand; PAM type: YTN; PAM sequence: CTA
aaaataaaaaaaatatccag

SEQ ID NO: 264540 - DNA, 20 bp, Artificial Sequence
  Description of Artificial Sequence: Synthetic oligonucleotide
  Target: LAMA2; (-) strand; PAM type: YTN; PAM sequence: CTA
ctaaaaataaaaaaaatatc

SEQ ID NO: 264541 - DNA, 20 bp, Artificial Sequence
  Description of Artificial Sequence: Synthetic oligonucleotide
  Target: LAMA2; (-) strand; PAM type: YTN; PAM sequence: CTC
tactaaaaataaaaaaaata

SEQ ID NO: 264542 - DNA, 20 bp, Artificial Sequence
  Description of Artificial Sequence: Synthetic oligonucleotide
  Target: LAMA2; (-) strand; PAM type: YTN; PAM sequence: CTA
gacaacatggtgaaaccccg

SEQ ID NO: 264543 - DNA, 20 bp, Artificial Sequence
  Description of Artificial Sequence: Synthetic oligonucleotide
  Target: LAMA2; (-) strand; PAM type: YTN; PAM sequence: TTC
gagaccagcctagacaacat

SEQ ID NO: 264544 - DNA, 20 bp, Artificial Sequence
  Description of Artificial Sequence: Synthetic oligonucleotide
  Target: LAMA2; (-) strand; PAM type: YTN; PAM sequence: TTA
ggagttcgagaccagcctag

SEQ ID NO: 264545 - DNA, 20 bp, Artificial Sequence
  Description of Artificial Sequence: Synthetic oligonucleotide
  Target: LAMA2; (-) strand; PAM type: YTN; PAM sequence: CTG
aggttaggagttcgagacca

SEQ ID NO: 264546 - DNA, 20 bp, Artificial Sequence
  Description of Artificial Sequence: Synthetic oligonucleotide
  Target: LAMA2; (-) strand; PAM type: YTN; PAM sequence: TTA
cctgaggttaggagttcgag

SEQ ID NO: 264547 - DNA, 20 bp, Artificial Sequence
  Description of Artificial Sequence: Synthetic oligonucleotide
  Target: LAMA2; (-) strand; PAM type: YTN; PAM sequence: TTG
ggaggccaaggtgggtggat

SEQ ID NO: 264548 - DNA, 20 bp, Artificial Sequence
  Description of Artificial Sequence: Synthetic oligonucleotide
  Target: LAMA2; (-) strand; PAM type: YTN; PAM sequence: TTT
gggaggccaaggtgggtgga

SEQ ID NO: 264549 - DNA, 20 bp, Artificial Sequence
  Description of Artificial Sequence: Synthetic oligonucleotide
  Target: LAMA2; (-) strand; PAM type: YTN; PAM sequence: CTT
tgggaggccaaggtgggtgg

SEQ ID NO: 264550 - DNA, 20 bp, Artificial Sequence
  Description of Artificial Sequence: Synthetic oligonucleotide
  Target: LAMA2; (-) strand; PAM type: YTN; PAM sequence: CTG
taatcccagcactttgggag

SEQ ID NO: 264551 - DNA, 20 bp, Artificial Sequence
  Description of Artificial Sequence: Synthetic oligonucleotide
  Target: LAMA2; (-) strand; PAM type: YTN; PAM sequence: CTC
atgcctgtaatcccagcact

SEQ ID NO: 264552 - DNA, 20 bp, Artificial Sequence
  Description of Artificial Sequence: Synthetic oligonucleotide
  Target: LAMA2; (-) strand; PAM type: YTN; PAM sequence: CTG
ggcatggtggctcatgcctg

SEQ ID NO: 264553 - DNA, 20 bp, Artificial Sequence
  Description of Artificial Sequence: Synthetic oligonucleotide
  Target: LAMA2; (-) strand; PAM type: YTN; PAM sequence: CTG
cagctgggcatggtggctca

SEQ ID NO: 264554 - DNA, 20 bp, Artificial Sequence
  Description of Artificial Sequence: Synthetic oligonucleotide
  Target: LAMA2; (-) strand; PAM type: YTN; PAM sequence: CTC
aggggaatgaagggagtgaa

SEQ ID NO: 264555 - DNA, 20 bp, Artificial Sequence
  Description of Artificial Sequence: Synthetic oligonucleotide
  Target: LAMA2; (-) strand; PAM type: YTN; PAM sequence: TTC
agactcaggggaatgaaggg

SEQ ID NO: 264556 - DNA, 20 bp, Artificial Sequence
  Description of Artificial Sequence: Synthetic oligonucleotide
  Target: LAMA2; (-) strand; PAM type: YTN; PAM sequence: CTT
cagactcaggggaatgaagg

SEQ ID NO: 264557 - DNA, 20 bp, Artificial Sequence
  Description of Artificial Sequence: Synthetic oligonucleotide
  Target: LAMA2; (-) strand; PAM type: YTN; PAM sequence: CTG
cccccaccttcagactcagg

SEQ ID NO: 264558 - DNA, 20 bp, Artificial Sequence
  Description of Artificial Sequence: Synthetic oligonucleotide
  Target: LAMA2; (-) strand; PAM type: YTN; PAM sequence: CTG
gcagcgaggagcaggaaaac

SEQ ID NO: 264559 - DNA, 20 bp, Artificial Sequence
  Description of Artificial Sequence: Synthetic oligonucleotide
  Target: LAMA2; (-) strand; PAM type: YTN; PAM sequence: CTG
atgtagaggaggatggataa

SEQ ID NO: 264560 - DNA, 20 bp, Artificial Sequence
  Description of Artificial Sequence: Synthetic oligonucleotide
  Target: LAMA2; (-) strand; PAM type: YTN; PAM sequence: TTG
tggaccctgatgtagaggag

SEQ ID NO: 264561 - DNA, 20 bp, Artificial Sequence
  Description of Artificial Sequence: Synthetic oligonucleotide
  Target: LAMA2; (-) strand; PAM type: YTN; PAM sequence: CTG
tggcccaggggttgtggacc

SEQ ID NO: 264562 - DNA, 20 bp, Artificial Sequence
  Description of Artificial Sequence: Synthetic oligonucleotide
  Target: LAMA2; (-) strand; PAM type: YTN; PAM sequence: CTC
ctgtggcccaggggttgtgg

SEQ ID NO: 264563 - DNA, 20 bp, Artificial Sequence
  Description of Artificial Sequence: Synthetic oligonucleotide
  Target: LAMA2; (-) strand; PAM type: YTN; PAM sequence: CTA
aaaggccacggaccaatatc

SEQ ID NO: 264564 - DNA, 20 bp, Artificial Sequence
  Description of Artificial Sequence: Synthetic oligonucleotide
  Target: LAMA2; (-) strand; PAM type: YTN; PAM sequence: TTC
taaaaggccacggaccaata

SEQ ID NO: 264565 - DNA, 20 bp, Artificial Sequence
  Description of Artificial Sequence: Synthetic oligonucleotide
  Target: LAMA2; (-) strand; PAM type: YTN; PAM sequence: TTT
ctaaaaggccacggaccaat

SEQ ID NO: 264566 - DNA, 20 bp, Artificial Sequence
  Description of Artificial Sequence: Synthetic oligonucleotide
  Target: LAMA2; (-) strand; PAM type: YTN; PAM sequence: CTG
gtttctaaaaggccacggac

SEQ ID NO: 264567 - DNA, 20 bp, Artificial Sequence
  Description of Artificial Sequence: Synthetic oligonucleotide
  Target: LAMA2; (-) strand; PAM type: YTN; PAM sequence: CTG
tgtggtctggtttctaaaag

SEQ ID NO: 264568 - DNA, 20 bp, Artificial Sequence
  Description of Artificial Sequence: Synthetic oligonucleotide
  Target: LAMA2; (-) strand; PAM type: YTN; PAM sequence: CTG
ctgtgtggtctggtttctaa

SEQ ID NO: 264569 - DNA, 20 bp, Artificial Sequence
  Description of Artificial Sequence: Synthetic oligonucleotide
  Target: LAMA2; (-) strand; PAM type: YTN; PAM sequence: CTC
ctgctgtgtggtctggtttc

SEQ ID NO: 264570 - DNA, 20 bp, Artificial Sequence
  Description of Artificial Sequence: Synthetic oligonucleotide
  Target: LAMA2; (-) strand; PAM type: YTN; PAM sequence: TTG
cctcctgctgtgtggtctgg

SEQ ID NO: 264571 - DNA, 20 bp, Artificial Sequence
  Description of Artificial Sequence: Synthetic oligonucleotide
  Target: LAMA2; (-) strand; PAM type: YTN; PAM sequence: CTT
gcctcctgctgtgtggtctg

SEQ ID NO: 264572 - DNA, 20 bp, Artificial Sequence
  Description of Artificial Sequence: Synthetic oligonucleotide
  Target: LAMA2; (-) strand; PAM type: YTN; PAM sequence: CTG
cttgcctcctgctgtgtggt

SEQ ID NO: 264573 - DNA, 20 bp, Artificial Sequence
  Description of Artificial Sequence: Synthetic oligonucleotide
  Target: LAMA2; (-) strand; PAM type: YTN; PAM sequence: CTG
ctgcttgcctcctgctgtgt

SEQ ID NO: 264574 - DNA, 20 bp, Artificial Sequence
  Description of Artificial Sequence: Synthetic oligonucleotide
  Target: LAMA2; (-) strand; PAM type: YTN; PAM sequence: TTG
cctgctgcttgcctcctgct

SEQ ID NO: 264575 - DNA, 20 bp, Artificial Sequence
  Description of Artificial Sequence: Synthetic oligonucleotide
  Target: LAMA2; (-) strand; PAM type: YTN; PAM sequence: TTT
gcctgctgcttgcctcctgc

SEQ ID NO: 264576 - DNA, 20 bp, Artificial Sequence
  Description of Artificial Sequence: Synthetic oligonucleotide
  Target: LAMA2; (-) strand; PAM type: YTN; PAM sequence: CTT
tgcctgctgcttgcctcctg

SEQ ID NO: 264577 - DNA, 20 bp, Artificial Sequence
  Description of Artificial Sequence: Synthetic oligonucleotide
  Target: LAMA2; (-) strand; PAM type: YTN; PAM sequence: CTC
ctttgcctgctgcttgcctc

SEQ ID NO: 264578 - DNA, 20 bp, Artificial Sequence
  Description of Artificial Sequence: Synthetic oligonucleotide
  Target: LAMA2; (-) strand; PAM type: YTN; PAM sequence: TTG
ctcctttgcctgctgcttgc

SEQ ID NO: 264579 - DNA, 20 bp, Artificial Sequence
  Description of Artificial Sequence: Synthetic oligonucleotide
  Target: LAMA2; (-) strand; PAM type: YTN; PAM sequence: CTT
gctcctttgcctgctgcttg

SEQ ID NO: 264580 - DNA, 20 bp, Artificial Sequence
  Description of Artificial Sequence: Synthetic oligonucleotide
  Target: LAMA2; (-) strand; PAM type: YTN; PAM sequence: CTG
cgcttgctcctttgcctgct

SEQ ID NO: 264581 - DNA, 20 bp, Artificial Sequence
  Description of Artificial Sequence: Synthetic oligonucleotide
  Target: LAMA2; (-) strand; PAM type: YTN; PAM sequence: CTA
atgaagctgcgcttgctcct

SEQ ID NO: 264582 - DNA, 20 bp, Artificial Sequence
  Description of Artificial Sequence: Synthetic oligonucleotide
  Target: LAMA2; (-) strand; PAM type: YTN; PAM sequence: CTG
taaatgctaatgaagctgcg

SEQ ID NO: 264583 - DNA, 20 bp, Artificial Sequence
  Description of Artificial Sequence: Synthetic oligonucleotide
  Target: LAMA2; (-) strand; PAM type: YTN; PAM sequence: CTC
aggcagtacagtaataccag

SEQ ID NO: 264584 - DNA, 20 bp, Artificial Sequence
  Description of Artificial Sequence: Synthetic oligonucleotide
  Target: LAMA2; (-) strand; PAM type: YTN; PAM sequence: CTG
acaggaggtggagctcaggc

SEQ ID NO: 264585 - DNA, 20 bp, Artificial Sequence
  Description of Artificial Sequence: Synthetic oligonucleotide
  Target: LAMA2; (-) strand; PAM type: YTN; PAM sequence: CTG
atctgacaggaggtggagct

SEQ ID NO: 264586 - DNA, 20 bp, Artificial Sequence
  Description of Artificial Sequence: Synthetic oligonucleotide
  Target: LAMA2; (-) strand; PAM type: YTN; PAM sequence: CTC
tgatctgacaggaggtggag

SEQ ID NO: 264587 - DNA, 20 bp, Artificial Sequence
  Description of Artificial Sequence: Synthetic oligonucleotide
  Target: LAMA2; (-) strand; PAM type: YTN; PAM sequence: CTG
tctctgatctgacaggaggt

SEQ ID NO: 264588 - DNA, 20 bp, Artificial Sequence
  Description of Artificial Sequence: Synthetic oligonucleotide
  Target: LAMA2; (-) strand; PAM type: YTN; PAM sequence: CTA
atgctgtctctgatctgaca

SEQ ID NO: 264589 - DNA, 20 bp, Artificial Sequence
  Description of Artificial Sequence: Synthetic oligonucleotide
  Target: LAMA2; (-) strand; PAM type: YTN; PAM sequence: CTA
tgagaatctaatgctgtctc

SEQ ID NO: 264590 - DNA, 20 bp, Artificial Sequence
  Description of Artificial Sequence: Synthetic oligonucleotide
  Target: LAMA2; (-) strand; PAM type: YTN; PAM sequence: CTC
ctatgagaatctaatgctgt

SEQ ID NO: 264591 - DNA, 20 bp, Artificial Sequence
  Description of Artificial Sequence: Synthetic oligonucleotide
  Target: LAMA2; (-) strand; PAM type: YTN; PAM sequence: TTG
tgctcctatgagaatctaat

SEQ ID NO: 264592 - DNA, 20 bp, Artificial Sequence
  Description of Artificial Sequence: Synthetic oligonucleotide
  Target: LAMA2; (-) strand; PAM type: YTN; PAM sequence: TTT
gtgctcctatgagaatctaa

SEQ ID NO: 264593 - DNA, 20 bp, Artificial Sequence
  Description of Artificial Sequence: Synthetic oligonucleotide
  Target: LAMA2; (-) strand; PAM type: YTN; PAM sequence: TTC
acaatagggtttgtgctcct

SEQ ID NO: 264594 - DNA, 20 bp, Artificial Sequence
  Description of Artificial Sequence: Synthetic oligonucleotide
  Target: LAMA2; (-) strand; PAM type: YTN; PAM sequence: CTC
acatgtgcagttcacaatag

SEQ ID NO: 264595 - DNA, 20 bp, Artificial Sequence
  Description of Artificial Sequence: Synthetic oligonucleotide
  Target: LAMA2; (-) strand; PAM type: YTN; PAM sequence: CTA
gatccctcacatgtgcagtt

SEQ ID NO: 264596 - DNA, 20 bp, Artificial Sequence
  Description of Artificial Sequence: Synthetic oligonucleotide
  Target: LAMA2; (-) strand; PAM type: YTN; PAM sequence: CTC
aggagcgcacaacctagatc

SEQ ID NO: 264597 - DNA, 20 bp, Artificial Sequence
  Description of Artificial Sequence: Synthetic oligonucleotide
  Target: LAMA2; (-) strand; PAM type: YTN; PAM sequence: TTC
tcaggagcgcacaacctaga

SEQ ID NO: 264598 - DNA, 20 bp, Artificial Sequence
  Description of Artificial Sequence: Synthetic oligonucleotide
  Target: LAMA2; (-) strand; PAM type: YTN; PAM sequence: TTA
gattctcaggagcgcacaac

SEQ ID NO: 264599 - DNA, 20 bp, Artificial Sequence
  Description of Artificial Sequence: Synthetic oligonucleotide
  Target: LAMA2; (-) strand; PAM type: YTN; PAM sequence: TTG
atcatcaggcattagattct

SEQ ID NO: 264600 - DNA, 20 bp, Artificial Sequence
  Description of Artificial Sequence: Synthetic oligonucleotide
  Target: LAMA2; (-) strand; PAM type: YTN; PAM sequence: TTG
gggtgatgggagacagtgac

SEQ ID NO: 264601 - DNA, 20 bp, Artificial Sequence
  Description of Artificial Sequence: Synthetic oligonucleotide
  Target: LAMA2; (-) strand; PAM type: YTN; PAM sequence: CTT
ggggtgatgggagacagtga

SEQ ID NO: 264602 - DNA, 20 bp, Artificial Sequence
  Description of Artificial Sequence: Synthetic oligonucleotide
  Target: LAMA2; (-) strand; PAM type: YTN; PAM sequence: CTA
gatagtcccatcttggggtg

SEQ ID NO: 264603 - DNA, 20 bp, Artificial Sequence
  Description of Artificial Sequence: Synthetic oligonucleotide
  Target: LAMA2; (-) strand; PAM type: YTN; PAM sequence: CTG
caactagatagtcccatctt

SEQ ID NO: 264604 - DNA, 20 bp, Artificial Sequence
  Description of Artificial Sequence: Synthetic oligonucleotide
  Target: LAMA2; (-) strand; PAM type: YTN; PAM sequence: TTC
ctgcaactagatagtcccat

SEQ ID NO: 264605 - DNA, 20 bp, Artificial Sequence
  Description of Artificial Sequence: Synthetic oligonucleotide
  Target: LAMA2; (-) strand; PAM type: YTN; PAM sequence: TTT
cctgcaactagatagtccca

SEQ ID NO: 264606 - DNA, 20 bp, Artificial Sequence
  Description of Artificial Sequence: Synthetic oligonucleotide
  Target: LAMA2; (-) strand; PAM type: YTN; PAM sequence: TTT
tcctgcaactagatagtccc

SEQ ID NO: 264607 - DNA, 20 bp, Artificial Sequence
  Description of Artificial Sequence: Synthetic oligonucleotide
  Target: LAMA2; (-) strand; PAM type: YTN; PAM sequence: TTG
ttttcctgcaactagatagt

SEQ ID NO: 264608 - DNA, 20 bp, Artificial Sequence
  Description of Artificial Sequence: Synthetic oligonucleotide
  Target: LAMA2; (-) strand; PAM type: YTN; PAM sequence: CTT
gttttcctgcaactagatag

SEQ ID NO: 264609 - DNA, 20 bp, Artificial Sequence
  Description of Artificial Sequence: Synthetic oligonucleotide
  Target: LAMA2; (-) strand; PAM type: YTN; PAM sequence: CTA
agcttgttttcctgcaacta

SEQ ID NO: 264610 - DNA, 20 bp, Artificial Sequence
  Description of Artificial Sequence: Synthetic oligonucleotide
  Target: LAMA2; (-) strand; PAM type: YTN; PAM sequence: CTC
accataacatagaatcagtg

SEQ ID NO: 264611 - DNA, 20 bp, Artificial Sequence
  Description of Artificial Sequence: Synthetic oligonucleotide
  Target: LAMA2; (-) strand; PAM type: YTN; PAM sequence: TTA
tacaactcaccataacatag

SEQ ID NO: 264612 - DNA, 20 bp, Artificial Sequence
  Description of Artificial Sequence: Synthetic oligonucleotide
  Target: LAMA2; (-) strand; PAM type: YTN; PAM sequence: TTG
taatatataatgaaataatt

SEQ ID NO: 264613 - DNA, 20 bp, Artificial Sequence
  Description of Artificial Sequence: Synthetic oligonucleotide
  Target: LAMA2; (-) strand; PAM type: YTN; PAM sequence: TTA
cattgtaatatataatgaaa

SEQ ID NO: 264614 - DNA, 20 bp, Artificial Sequence
  Description of Artificial Sequence: Synthetic oligonucleotide
  Target: LAMA2; (-) strand; PAM type: YTN; PAM sequence: TTA
ttacattgtaatatataatg

SEQ ID NO: 264615 - DNA, 20 bp, Artificial Sequence
  Description of Artificial Sequence: Synthetic oligonucleotide
  Target: LAMA2; (-) strand; PAM type: YTN; PAM sequence: TTA
ttattacattgtaatatata

SEQ ID NO: 264616 - DNA, 20 bp, Artificial Sequence
  Description of Artificial Sequence: Synthetic oligonucleotide
  Target: LAMA2; (-) strand; PAM type: YTN; PAM sequence: CTA
ttattattacattgtaatat

SEQ ID NO: 264617 - DNA, 20 bp, Artificial Sequence
  Description of Artificial Sequence: Synthetic oligonucleotide
  Target: LAMA2; (-) strand; PAM type: YTN; PAM sequence: CTA
tctattattattacattgta

SEQ ID NO: 264618 - DNA, 20 bp, Artificial Sequence
  Description of Artificial Sequence: Synthetic oligonucleotide
  Target: LAMA2; (-) strand; PAM type: YTN; PAM sequence: TTA
ctatctattattattacatt

SEQ ID NO: 264619 - DNA, 20 bp, Artificial Sequence
  Description of Artificial Sequence: Synthetic oligonucleotide
  Target: LAMA2; (-) strand; PAM type: YTN; PAM sequence: TTA
ttactatctattattattac

SEQ ID NO: 264620 - DNA, 20 bp, Artificial Sequence
  Description of Artificial Sequence: Synthetic oligonucleotide
  Target: LAMA2; (-) strand; PAM type: YTN; PAM sequence: TTA
ttattactatctattattat

SEQ ID NO: 264621 - DNA, 20 bp, Artificial Sequence
  Description of Artificial Sequence: Synthetic oligonucleotide
  Target: LAMA2; (-) strand; PAM type: YTN; PAM sequence: TTA
ttattattactatctattat

SEQ ID NO: 264622 - DNA, 20 bp, Artificial Sequence
  Description of Artificial Sequence: Synthetic oligonucleotide
  Target: LAMA2; (-) strand; PAM type: YTN; PAM sequence: CTA
ttattattattactatctat

SEQ ID NO: 264623 - DNA, 20 bp, Artificial Sequence
  Description of Artificial Sequence: Synthetic oligonucleotide
  Target: LAMA2; (-) strand; PAM type: YTN; PAM sequence: TTA
tctattattattattactat

SEQ ID NO: 264624 - DNA, 20 bp, Artificial Sequence
  Description of Artificial Sequence: Synthetic oligonucleotide
  Target: LAMA2; (-) strand; PAM type: YTN; PAM sequence: TTA
ttatctattattattattac

SEQ ID NO: 264625 - DNA, 20 bp, Artificial Sequence
  Description of Artificial Sequence: Synthetic oligonucleotide
  Target: LAMA2; (-) strand; PAM type: YTN; PAM sequence: TTT
attatctattattattatta

SEQ ID NO: 264626 - DNA, 20 bp, Artificial Sequence
  Description of Artificial Sequence: Synthetic oligonucleotide
  Target: LAMA2; (-) strand; PAM type: YTN; PAM sequence: CTT
tattatctattattattatt

SEQ ID NO: 264627 - DNA, 20 bp, Artificial Sequence
  Description of Artificial Sequence: Synthetic oligonucleotide
  Target: LAMA2; (-) strand; PAM type: YTN; PAM sequence: CTG
tgcactttattatctattat

SEQ ID NO: 264628 - DNA, 20 bp, Artificial Sequence
  Description of Artificial Sequence: Synthetic oligonucleotide
  Target: LAMA2; (-) strand; PAM type: YTN; PAM sequence: TTA
ctgtgcactttattatctat

SEQ ID NO: 264629 - DNA, 20 bp, Artificial Sequence
  Description of Artificial Sequence: Synthetic oligonucleotide
  Target: LAMA2; (-) strand; PAM type: YTN; PAM sequence: TTT
actgtgcactttattatcta

SEQ ID NO: 264630 - DNA, 20 bp, Artificial Sequence
  Description of Artificial Sequence: Synthetic oligonucleotide
  Target: LAMA2; (-) strand; PAM type: YTN; PAM sequence: TTA
tatttactgtgcactttatt

SEQ ID NO: 264631 - DNA, 20 bp, Artificial Sequence
  Description of Artificial Sequence: Synthetic oligonucleotide
  Target: LAMA2; (-) strand; PAM type: YTN; PAM sequence: TTG
tgatgatgcaagcatgttat

SEQ ID NO: 264632 - DNA, 20 bp, Artificial Sequence
  Description of Artificial Sequence: Synthetic oligonucleotide
  Target: LAMA2; (-) strand; PAM type: YTN; PAM sequence: TTT
gtgatgatgcaagcatgtta

SEQ ID NO: 264633 - DNA, 20 bp, Artificial Sequence
  Description of Artificial Sequence: Synthetic oligonucleotide
  Target: LAMA2; (-) strand; PAM type: YTN; PAM sequence: TTT
tgtgatgatgcaagcatgtt

SEQ ID NO: 264634 - DNA, 20 bp, Artificial Sequence
  Description of Artificial Sequence: Synthetic oligonucleotide
  Target: LAMA2; (-) strand; PAM type: YTN; PAM sequence: TTG
ggggatggttttgtgatgat

SEQ ID NO: 264635 - DNA, 20 bp, Artificial Sequence
  Description of Artificial Sequence: Synthetic oligonucleotide
  Target: LAMA2; (-) strand; PAM type: YTN; PAM sequence: CTA
ggattgggggatggttttgt

SEQ ID NO: 264636 - DNA, 20 bp, Artificial Sequence
  Description of Artificial Sequence: Synthetic oligonucleotide
  Target: LAMA2; (-) strand; PAM type: YTN; PAM sequence: TTC
catggactaggattggggga

SEQ ID NO: 264637 - DNA, 20 bp, Artificial Sequence
  Description of Artificial Sequence: Synthetic oligonucleotide
  Target: LAMA2; (-) strand; PAM type: YTN; PAM sequence: TTT
ccatggactaggattggggg

SEQ ID NO: 264638 - DNA, 20 bp, Artificial Sequence
  Description of Artificial Sequence: Synthetic oligonucleotide
  Target: LAMA2; (-) strand; PAM type: YTN; PAM sequence: TTT
tccatggactaggattgggg

SEQ ID NO: 264639 - DNA, 20 bp, Artificial Sequence
  Description of Artificial Sequence: Synthetic oligonucleotide
  Target: LAMA2; (-) strand; PAM type: YTN; PAM sequence: TTT
ttccatggactaggattggg

SEQ ID NO: 264640 - DNA, 20 bp, Artificial Sequence
  Description of Artificial Sequence: Synthetic oligonucleotide
  Target: LAMA2; (-) strand; PAM type: YTN; PAM sequence: TTC
atggaaggcaatttttccat

SEQ ID NO: 264641 - DNA, 20 bp, Artificial Sequence
  Description of Artificial Sequence: Synthetic oligonucleotide
  Target: LAMA2; (-) strand; PAM type: YTN; PAM sequence: TTT
catggaaggcaatttttcca

SEQ ID NO: 264642 - DNA, 20 bp, Artificial Sequence
  Description of Artificial Sequence: Synthetic oligonucleotide
  Target: LAMA2; (-) strand; PAM type: YTN; PAM sequence: CTG
gtttcatggaaggcaatttt

SEQ ID NO: 264643 - DNA, 20 bp, Artificial Sequence
  Description of Artificial Sequence: Synthetic oligonucleotide
  Target: LAMA2; (-) strand; PAM type: YTN; PAM sequence: TTG
gcaccagggactggtttcat

SEQ ID NO: 264644 - DNA, 20 bp, Artificial Sequence
  Description of Artificial Sequence: Synthetic oligonucleotide
  Target: LAMA2; (-) strand; PAM type: YTN; PAM sequence: TTT
ggcaccagggactggtttca

SEQ ID NO: 264645 - DNA, 20 bp, Artificial Sequence
  Description of Artificial Sequence: Synthetic oligonucleotide
  Target: LAMA2; (-) strand; PAM type: YTN; PAM sequence: TTT
tggcaccagggactggtttc

SEQ ID NO: 264646 - DNA, 20 bp, Artificial Sequence
  Description of Artificial Sequence: Synthetic oligonucleotide
  Target: LAMA2; (-) strand; PAM type: YTN; PAM sequence: TTT
ttggcaccagggactggttt

SEQ ID NO: 264647 - DNA, 20 bp, Artificial Sequence
  Description of Artificial Sequence: Synthetic oligonucleotide
  Target: LAMA2; (-) strand; PAM type: YTN; PAM sequence: CTC
caatgtttttggcaccaggg

SEQ ID NO: 264648 - DNA, 20 bp, Artificial Sequence
  Description of Artificial Sequence: Synthetic oligonucleotide
  Target: LAMA2; (-) strand; PAM type: YTN; PAM sequence: CTG
tagagcagcgtctccaatgt

SEQ ID NO: 264649 - DNA, 20 bp, Artificial Sequence
  Description of Artificial Sequence: Synthetic oligonucleotide
  Target: LAMA2; (-) strand; PAM type: YTN; PAM sequence: CTG
ggtgctgtagagcagcgtct

SEQ ID NO: 264650 - DNA, 20 bp, Artificial Sequence
  Description of Artificial Sequence: Synthetic oligonucleotide
  Target: LAMA2; (-) strand; PAM type: YTN; PAM sequence: TTC
gacaagcagatggagagggg

SEQ ID NO: 264651 - DNA, 20 bp, Artificial Sequence
  Description of Artificial Sequence: Synthetic oligonucleotide
  Target: LAMA2; (-) strand; PAM type: YTN; PAM sequence: CTT
cgacaagcagatggagaggg

SEQ ID NO: 264652 - DNA, 20 bp, Artificial Sequence
  Description of Artificial Sequence: Synthetic oligonucleotide
  Target: LAMA2; (-) strand; PAM type: YTN; PAM sequence: TTA
gtaggtgacttcgacaagca

SEQ ID NO: 264653 - DNA, 20 bp, Artificial Sequence
  Description of Artificial Sequence: Synthetic oligonucleotide
  Target: LAMA2; (-) strand; PAM type: YTN; PAM sequence: TTA
aaggttagtaggtgacttcg

SEQ ID NO: 264654 - DNA, 20 bp, Artificial Sequence
  Description of Artificial Sequence: Synthetic oligonucleotide
  Target: LAMA2; (-) strand; PAM type: YTN; PAM sequence: TTT
aaaggttagtaggtgacttc

SEQ ID NO: 264655 - DNA, 20 bp, Artificial Sequence
  Description of Artificial Sequence: Synthetic oligonucleotide
  Target: LAMA2; (-) strand; PAM type: YTN; PAM sequence: TTA
gacagggaaaatcagcaagg

SEQ ID NO: 264656 - DNA, 20 bp, Artificial Sequence
  Description of Artificial Sequence: Synthetic oligonucleotide
  Target: LAMA2; (-) strand; PAM type: YTN; PAM sequence: CTA
gggaaaatgacaattagaca

SEQ ID NO: 264657 - DNA, 20 bp, Artificial Sequence
  Description of Artificial Sequence: Synthetic oligonucleotide
  Target: LAMA2; (-) strand; PAM type: YTN; PAM sequence: CTA
agaatgatgacaggagtagt

SEQ ID NO: 264658 - DNA, 20 bp, Artificial Sequence
  Description of Artificial Sequence: Synthetic oligonucleotide
  Target: LAMA2; (-) strand; PAM type: YTN; PAM sequence: TTA
aaatcactaagaatgatgac

SEQ ID NO: 264659 - DNA, 20 bp, Artificial Sequence
  Description of Artificial Sequence: Synthetic oligonucleotide
  Target: LAMA2; (-) strand; PAM type: YTN; PAM sequence: TTC
atggacattaaaatcactaa

SEQ ID NO: 264660 - DNA, 20 bp, Artificial Sequence
  Description of Artificial Sequence: Synthetic oligonucleotide
  Target: LAMA2; (-) strand; PAM type: YTN; PAM sequence: TTA
agttcatggacattaaaatc

SEQ ID NO: 264661 - DNA, 20 bp, Artificial Sequence
  Description of Artificial Sequence: Synthetic oligonucleotide
  Target: LAMA2; (-) strand; PAM type: YTN; PAM sequence: CTG
aaagtgaagagtatggaaga

SEQ ID NO: 264662 - DNA, 20 bp, Artificial Sequence
  Description of Artificial Sequence: Synthetic oligonucleotide
  Target: LAMA2; (-) strand; PAM type: YTN; PAM sequence: TTC
aaatggagaccagagaggca

SEQ ID NO: 264663 - DNA, 20 bp, Artificial Sequence
  Description of Artificial Sequence: Synthetic oligonucleotide
  Target: LAMA2; (-) strand; PAM type: YTN; PAM sequence: CTT
caaatggagaccagagaggc

SEQ ID NO: 264664 - DNA, 20 bp, Artificial Sequence
  Description of Artificial Sequence: Synthetic oligonucleotide
  Target: LAMA2; (-) strand; PAM type: YTN; PAM sequence: CTA
gagagaaacgacacagtggg

SEQ ID NO: 264665 - DNA, 20 bp, Artificial Sequence
  Description of Artificial Sequence: Synthetic oligonucleotide
  Target: LAMA2; (-) strand; PAM type: YTN; PAM sequence: TTA
gaagaagtgaactagagaga

SEQ ID NO: 264666 - DNA, 20 bp, Artificial Sequence
  Description of Artificial Sequence: Synthetic oligonucleotide
  Target: LAMA2; (-) strand; PAM type: YTN; PAM sequence: TTT
agaagaagtgaactagagag

SEQ ID NO: 264667 - DNA, 20 bp, Artificial Sequence
  Description of Artificial Sequence: Synthetic oligonucleotide
  Target: LAMA2; (-) strand; PAM type: YTN; PAM sequence: TTG
aagtggaagtatttagaaga

SEQ ID NO: 264668 - DNA, 20 bp, Artificial Sequence
  Description of Artificial Sequence: Synthetic oligonucleotide
  Target: LAMA2; (-) strand; PAM type: YTN; PAM sequence: TTA
cacacattgaagtggaagta

SEQ ID NO: 264669 - DNA, 20 bp, Artificial Sequence
  Description of Artificial Sequence: Synthetic oligonucleotide
  Target: LAMA2; (-) strand; PAM type: YTN; PAM sequence: TTG
tgagattacacacattgaag

SEQ ID NO: 264670 - DNA, 20 bp, Artificial Sequence
  Description of Artificial Sequence: Synthetic oligonucleotide
  Target: LAMA2; (-) strand; PAM type: YTN; PAM sequence: CTA
cagtgaaagcatgagataag

SEQ ID NO: 264671 - DNA, 20 bp, Artificial Sequence
  Description of Artificial Sequence: Synthetic oligonucleotide
  Target: LAMA2; (-) strand; PAM type: YTN; PAM sequence: TTA
ctacagtgaaagcatgagat

SEQ ID NO: 264672 - DNA, 20 bp, Artificial Sequence
  Description of Artificial Sequence: Synthetic oligonucleotide
  Target: LAMA2; (-) strand; PAM type: YTN; PAM sequence: CTG
gttactacagtgaaagcatg

SEQ ID NO: 264673 - DNA, 20 bp, Artificial Sequence
  Description of Artificial Sequence: Synthetic oligonucleotide
  Target: LAMA2; (-) strand; PAM type: YTN; PAM sequence: TTA
agctggttactacagtgaaa

SEQ ID NO: 264674 - DNA, 20 bp, Artificial Sequence
  Description of Artificial Sequence: Synthetic oligonucleotide
  Target: LAMA2; (-) strand; PAM type: YTN; PAM sequence: CTA
ttaagctggttactacagtg

SEQ ID NO: 264675 - DNA, 20 bp, Artificial Sequence
  Description of Artificial Sequence: Synthetic oligonucleotide
  Target: LAMA2; (-) strand; PAM type: YTN; PAM sequence: TTG
caaagcagtaataccaatga

SEQ ID NO: 264676 - DNA, 20 bp, Artificial Sequence
  Description of Artificial Sequence: Synthetic oligonucleotide
  Target: LAMA2; (-) strand; PAM type: YTN; PAM sequence: TTG
agtaaaaaataagtaaagga

SEQ ID NO: 264677 - DNA, 20 bp, Artificial Sequence
  Description of Artificial Sequence: Synthetic oligonucleotide
  Target: LAMA2; (-) strand; PAM type: YTN; PAM sequence: CTT
gagtaaaaaataagtaaagg

SEQ ID NO: 264678 - DNA, 20 bp, Artificial Sequence
  Description of Artificial Sequence: Synthetic oligonucleotide
  Target: LAMA2; (-) strand; PAM type: YTN; PAM sequence: TTC
acttgagtaaaaaataagta

SEQ ID NO: 264679 - DNA, 20 bp, Artificial Sequence
  Description of Artificial Sequence: Synthetic oligonucleotide
  Target: LAMA2; (-) strand; PAM type: YTN; PAM sequence: TTG
gagttcacttgagtaaaaaa

SEQ ID NO: 264680 - DNA, 20 bp, Artificial Sequence
  Description of Artificial Sequence: Synthetic oligonucleotide
  Target: LAMA2; (-) strand; PAM type: YTN; PAM sequence: CTC
acagtgttggagttcacttg

SEQ ID NO: 264681 - DNA, 20 bp, Artificial Sequence
  Description of Artificial Sequence: Synthetic oligonucleotide
  Target: LAMA2; (-) strand; PAM type: YTN; PAM sequence: TTC
tcacagtgttggagttcact

SEQ ID NO: 264682 - DNA, 20 bp, Artificial Sequence
  Description of Artificial Sequence: Synthetic oligonucleotide
  Target: LAMA2; (-) strand; PAM type: YTN; PAM sequence: CTC
aaaaaaaaaaagaaggtgca

SEQ ID NO: 264683 - DNA, 20 bp, Artificial Sequence
  Description of Artificial Sequence: Synthetic oligonucleotide
  Target: LAMA2; (-) strand; PAM type: YTN; PAM sequence: CTC
cgtctcaaaaaaaaaaagaa

SEQ ID NO: 264684 - DNA, 20 bp, Artificial Sequence
  Description of Artificial Sequence: Synthetic oligonucleotide
  Target: LAMA2; (-) strand; PAM type: YTN; PAM sequence: CTG
ggtgacagagcaagactccg

SEQ ID NO: 264685 - DNA, 20 bp, Artificial Sequence
  Description of Artificial Sequence: Synthetic oligonucleotide
  Target: LAMA2; (-) strand; PAM type: YTN; PAM sequence: CTC
cagcctgggtgacagagcaa

SEQ ID NO: 264686 - DNA, 20 bp, Artificial Sequence
  Description of Artificial Sequence: Synthetic oligonucleotide
  Target: LAMA2; (-) strand; PAM type: YTN; PAM sequence: CTG
cactccagcctgggtgacag

SEQ ID NO: 264687 - DNA, 20 bp, Artificial Sequence
  Description of Artificial Sequence: Synthetic oligonucleotide
  Target: LAMA2; (-) strand; PAM type: YTN; PAM sequence: CTG
agatcgcgtcactgcactcc

SEQ ID NO: 264688 - DNA, 20 bp, Artificial Sequence
  Description of Artificial Sequence: Synthetic oligonucleotide
  Target: LAMA2; (-) strand; PAM type: YTN; PAM sequence: TTG
cagtgagctgagatcgcgtc

SEQ ID NO: 264689 - DNA, 20 bp, Artificial Sequence
  Description of Artificial Sequence: Synthetic oligonucleotide
  Target: LAMA2; (-) strand; PAM type: YTN; PAM sequence: CTT
gcagtgagctgagatcgcgt

SEQ ID NO: 264690 - DNA, 20 bp, Artificial Sequence
  Description of Artificial Sequence: Synthetic oligonucleotide
  Target: LAMA2; (-) strand; PAM type: YTN; PAM sequence: CTG
agaggcggagcttgcagtga

SEQ ID NO: 264691 - DNA, 20 bp, Artificial Sequence
  Description of Artificial Sequence: Synthetic oligonucleotide
  Target: LAMA2; (-) strand; PAM type: YTN; PAM sequence: TTG
aacctgagaggcggagcttg

SEQ ID NO: 264692 - DNA, 20 bp, Artificial Sequence
  Description of Artificial Sequence: Synthetic oligonucleotide
  Target: LAMA2; (-) strand; PAM type: YTN; PAM sequence: CTT
gaacctgagaggcggagctt

SEQ ID NO: 264693 - DNA, 20 bp, Artificial Sequence
  Description of Artificial Sequence: Synthetic oligonucleotide
  Target: LAMA2; (-) strand; PAM type: YTN; PAM sequence: CTG
aggcaggagaatggcttgaa

SEQ ID NO: 264694 - DNA, 20 bp, Artificial Sequence
  Description of Artificial Sequence: Synthetic oligonucleotide
  Target: LAMA2; (-) strand; PAM type: YTN; PAM sequence: CTC
aggaggctgaggcaggagaa

SEQ ID NO: 264695 - DNA, 20 bp, Artificial Sequence
  Description of Artificial Sequence: Synthetic oligonucleotide
  Target: LAMA2; (-) strand; PAM type: YTN; PAM sequence: CTA
ctcaggaggctgaggcagga

SEQ ID NO: 264696 - DNA, 20 bp, Artificial Sequence
  Description of Artificial Sequence: Synthetic oligonucleotide
  Target: LAMA2; (-) strand; PAM type: YTN; PAM sequence: TTC
cagctactcaggaggctgag

SEQ ID NO: 264697 - DNA, 20 bp, Artificial Sequence
  Description of Artificial Sequence: Synthetic oligonucleotide
  Target: LAMA2; (-) strand; PAM type: YTN; PAM sequence: CTG
tagttccagctactcaggag

SEQ ID NO: 264698 - DNA, 20 bp, Artificial Sequence
  Description of Artificial Sequence: Synthetic oligonucleotide
  Target: LAMA2; (-) strand; PAM type: YTN; PAM sequence: TTA
aaaatacaaaaaaagaagcc

SEQ ID NO: 264699 - DNA, 20 bp, Artificial Sequence
  Description of Artificial Sequence: Synthetic oligonucleotide
  Target: LAMA2; (-) strand; PAM type: YTN; PAM sequence: CTA
ttaaaaatacaaaaaaagaa

SEQ ID NO: 264700 - DNA, 20 bp, Artificial Sequence
  Description of Artificial Sequence: Synthetic oligonucleotide
  Target: LAMA2; (-) strand; PAM type: YTN; PAM sequence: CTC
tattaaaaatacaaaaaaag

SEQ ID NO: 264701 - DNA, 20 bp, Artificial Sequence
  Description of Artificial Sequence: Synthetic oligonucleotide
  Target: LAMA2; (-) strand; PAM type: YTN; PAM sequence: CTA
acacagtgaaaccccgtctc

SEQ ID NO: 264702 - DNA, 20 bp, Artificial Sequence
  Description of Artificial Sequence: Synthetic oligonucleotide
  Target: LAMA2; (-) strand; PAM type: YTN; PAM sequence: CTG
gctaacacagtgaaaccccg

SEQ ID NO: 264703 - DNA, 20 bp, Artificial Sequence
  Description of Artificial Sequence: Synthetic oligonucleotide
  Target: LAMA2; (-) strand; PAM type: YTN; PAM sequence: TTG
ggaggccgaaggaggcgaat

SEQ ID NO: 264704 - DNA, 20 bp, Artificial Sequence
  Description of Artificial Sequence: Synthetic oligonucleotide
  Target: LAMA2; (-) strand; PAM type: YTN; PAM sequence: TTT
gggaggccgaaggaggcgaa

SEQ ID NO: 264705 - DNA, 20 bp, Artificial Sequence
  Description of Artificial Sequence: Synthetic oligonucleotide
  Target: LAMA2; (-) strand; PAM type: YTN; PAM sequence: CTT
tgggaggccgaaggaggcga

SEQ ID NO: 264706 - DNA, 20 bp, Artificial Sequence
  Description of Artificial Sequence: Synthetic oligonucleotide
  Target: LAMA2; (-) strand; PAM type: YTN; PAM sequence: CTG
tagtcccagcactttgggag

SEQ ID NO: 264707 - DNA, 20 bp, Artificial Sequence
  Description of Artificial Sequence: Synthetic oligonucleotide
  Target: LAMA2; (-) strand; PAM type: YTN; PAM sequence: TTA
cgcctgtagtcccagcactt

SEQ ID NO: 264708 - DNA, 20 bp, Artificial Sequence
  Description of Artificial Sequence: Synthetic oligonucleotide
  Target: LAMA2; (-) strand; PAM type: YTN; PAM sequence: CTT
acgcctgtagtcccagcact

SEQ ID NO: 264709 - DNA, 20 bp, Artificial Sequence
  Description of Artificial Sequence: Synthetic oligonucleotide
  Target: LAMA2; (-) strand; PAM type: YTN; PAM sequence: TTA
gaaggtgcaggtggccgggc

SEQ ID NO: 264710 - DNA, 20 bp, Artificial Sequence
  Description of Artificial Sequence: Synthetic oligonucleotide
  Target: LAMA2; (-) strand; PAM type: YTN; PAM sequence: CTT
agaaggtgcaggtggccggg

SEQ ID NO: 264711 - DNA, 20 bp, Artificial Sequence
  Description of Artificial Sequence: Synthetic oligonucleotide
  Target: LAMA2; (-) strand; PAM type: YTN; PAM sequence: TTC
agcttagaaggtgcaggtgg

SEQ ID NO: 264712 - DNA, 20 bp, Artificial Sequence
  Description of Artificial Sequence: Synthetic oligonucleotide
  Target: LAMA2; (-) strand; PAM type: YTN; PAM sequence: CTA
cagccacgttcagcttagaa

SEQ ID NO: 264713 - DNA, 20 bp, Artificial Sequence
  Description of Artificial Sequence: Synthetic oligonucleotide
  Target: LAMA2; (-) strand; PAM type: YTN; PAM sequence: TTC
tacagccacgttcagcttag

SEQ ID NO: 264714 - DNA, 20 bp, Artificial Sequence
  Description of Artificial Sequence: Synthetic oligonucleotide
  Target: LAMA2; (-) strand; PAM type: YTN; PAM sequence: TTT
ctacagccacgttcagctta

SEQ ID NO: 264715 - DNA, 20 bp, Artificial Sequence
  Description of Artificial Sequence: Synthetic oligonucleotide
  Target: LAMA2; (-) strand; PAM type: YTN; PAM sequence: TTT
tctacagccacgttcagctt

SEQ ID NO: 264716 - DNA, 20 bp, Artificial Sequence
  Description of Artificial Sequence: Synthetic oligonucleotide
  Target: LAMA2; (-) strand; PAM type: YTN; PAM sequence: TTT
ttctacagccacgttcagct

SEQ ID NO: 264717 - DNA, 20 bp, Artificial Sequence
  Description of Artificial Sequence: Synthetic oligonucleotide
  Target: LAMA2; (-) strand; PAM type: YTN; PAM sequence: CTT
tttctacagccacgttcagc

SEQ ID NO: 264718 - DNA, 20 bp, Artificial Sequence
  Description of Artificial Sequence: Synthetic oligonucleotide
  Target: LAMA2; (-) strand; PAM type: YTN; PAM sequence: TTG
tctttttctacagccacgtt

SEQ ID NO: 264719 - DNA, 20 bp, Artificial Sequence
  Description of Artificial Sequence: Synthetic oligonucleotide
  Target: LAMA2; (-) strand; PAM type: YTN; PAM sequence: TTA
gatggcacaattgtcttttt

SEQ ID NO: 264720 - DNA, 20 bp, Artificial Sequence
  Description of Artificial Sequence: Synthetic oligonucleotide
  Target: LAMA2; (-) strand; PAM type: YTN; PAM sequence: TTA
aggtgagattagatggcaca

SEQ ID NO: 264721 - DNA, 20 bp, Artificial Sequence
  Description of Artificial Sequence: Synthetic oligonucleotide
  Target: LAMA2; (-) strand; PAM type: YTN; PAM sequence: TTT
aaggtgagattagatggcac

SEQ ID NO: 264722 - DNA, 20 bp, Artificial Sequence
  Description of Artificial Sequence: Synthetic oligonucleotide
  Target: LAMA2; (-) strand; PAM type: YTN; PAM sequence: TTG
aagagagggatcatgaattt

SEQ ID NO: 264723 - DNA, 20 bp, Artificial Sequence
  Description of Artificial Sequence: Synthetic oligonucleotide
  Target: LAMA2; (-) strand; PAM type: YTN; PAM sequence: TTT
gaagagagggatcatgaatt

SEQ ID NO: 264724 - DNA, 20 bp, Artificial Sequence
  Description of Artificial Sequence: Synthetic oligonucleotide
  Target: LAMA2; (-) strand; PAM type: YTN; PAM sequence: TTG
cagagcagcacaaagggtcc

SEQ ID NO: 264725 - DNA, 20 bp, Artificial Sequence
  Description of Artificial Sequence: Synthetic oligonucleotide
  Target: LAMA2; (-) strand; PAM type: YTN; PAM sequence: CTA
ggaatgtggaaaagaaaaag

SEQ ID NO: 264726 - DNA, 20 bp, Artificial Sequence
  Description of Artificial Sequence: Synthetic oligonucleotide
  Target: LAMA2; (-) strand; PAM type: YTN; PAM sequence: TTG
aggatggagggggaggtatg

SEQ ID NO: 264727 - DNA, 20 bp, Artificial Sequence
  Description of Artificial Sequence: Synthetic oligonucleotide
  Target: LAMA2; (-) strand; PAM type: YTN; PAM sequence: CTT
gaggatggagggggaggtat

SEQ ID NO: 264728 - DNA, 20 bp, Artificial Sequence
  Description of Artificial Sequence: Synthetic oligonucleotide
  Target: LAMA2; (-) strand; PAM type: YTN; PAM sequence: TTA
ggcttgaggatggaggggga

SEQ ID NO: 264729 - DNA, 20 bp, Artificial Sequence
  Description of Artificial Sequence: Synthetic oligonucleotide
  Target: LAMA2; (-) strand; PAM type: YTN; PAM sequence: TTT
aggcttgaggatggaggggg

SEQ ID NO: 264730 - DNA, 20 bp, Artificial Sequence
  Description of Artificial Sequence: Synthetic oligonucleotide
  Target: LAMA2; (-) strand; PAM type: YTN; PAM sequence: CTG
agggtaaggatgggaggggg

SEQ ID NO: 264731 - DNA, 20 bp, Artificial Sequence
  Description of Artificial Sequence: Synthetic oligonucleotide
  Target: LAMA2; (-) strand; PAM type: YTN; PAM sequence: CTC
aatgaaataagaggcaacac

SEQ ID NO: 264732 - DNA, 20 bp, Artificial Sequence
  Description of Artificial Sequence: Synthetic oligonucleotide
  Target: LAMA2; (-) strand; PAM type: YTN; PAM sequence: TTC
tcaatgaaataagaggcaac

SEQ ID NO: 264733 - DNA, 20 bp, Artificial Sequence
  Description of Artificial Sequence: Synthetic oligonucleotide
  Target: LAMA2; (-) strand; PAM type: YTN; PAM sequence: CTA
aattctcaatgaaataagag

SEQ ID NO: 264734 - DNA, 20 bp, Artificial Sequence
  Description of Artificial Sequence: Synthetic oligonucleotide
  Target: LAMA2; (-) strand; PAM type: YTN; PAM sequence: TTC
taaattctcaatgaaataag

SEQ ID NO: 264735 - DNA, 20 bp, Artificial Sequence
  Description of Artificial Sequence: Synthetic oligonucleotide
  Target: LAMA2; (-) strand; PAM type: YTN; PAM sequence: CTT
ctaaattctcaatgaaataa

SEQ ID NO: 264736 - DNA, 20 bp, Artificial Sequence
  Description of Artificial Sequence: Synthetic oligonucleotide
  Target: LAMA2; (-) strand; PAM type: YTN; PAM sequence: CTG
acagcttctaaattctcaat

SEQ ID NO: 264737 - DNA, 20 bp, Artificial Sequence
  Description of Artificial Sequence: Synthetic oligonucleotide
  Target: LAMA2; (-) strand; PAM type: YTN; PAM sequence: TTC
tgacagcttctaaattctca

SEQ ID NO: 264738 - DNA, 20 bp, Artificial Sequence
  Description of Artificial Sequence: Synthetic oligonucleotide
  Target: LAMA2; (-) strand; PAM type: YTN; PAM sequence: CTT
ctgacagcttctaaattctc

SEQ ID NO: 264739 - DNA, 20 bp, Artificial Sequence
  Description of Artificial Sequence: Synthetic oligonucleotide
  Target: LAMA2; (-) strand; PAM type: YTN; PAM sequence: CTC
ttctgacagcttctaaattc

SEQ ID NO: 264740 - DNA, 20 bp, Artificial Sequence
  Description of Artificial Sequence: Synthetic oligonucleotide
  Target: LAMA2; (-) strand; PAM type: YTN; PAM sequence: CTC
tcttctgacagcttctaaat

SEQ ID NO: 264741 - DNA, 20 bp, Artificial Sequence
  Description of Artificial Sequence: Synthetic oligonucleotide
  Target: LAMA2; (-) strand; PAM type: YTN; PAM sequence: TTA
cctctcttctgacagcttct

SEQ ID NO: 264742 - DNA, 20 bp, Artificial Sequence
  Description of Artificial Sequence: Synthetic oligonucleotide
  Target: LAMA2; (-) strand; PAM type: YTN; PAM sequence: TTG
ttacctctcttctgacagct

SEQ ID NO: 264743 - DNA, 20 bp, Artificial Sequence
  Description of Artificial Sequence: Synthetic oligonucleotide
  Target: LAMA2; (-) strand; PAM type: YTN; PAM sequence: CTT
gttacctctcttctgacagc

SEQ ID NO: 264744 - DNA, 20 bp, Artificial Sequence
  Description of Artificial Sequence: Synthetic oligonucleotide
  Target: LAMA2; (-) strand; PAM type: YTN; PAM sequence: TTG
ggcacagatgcagaaaagtg

SEQ ID NO: 264745 - DNA, 20 bp, Artificial Sequence
  Description of Artificial Sequence: Synthetic oligonucleotide
  Target: LAMA2; (-) strand; PAM type: YTN; PAM sequence: TTC
atccaaagtaatagaaaaga

SEQ ID NO: 264746 - DNA, 20 bp, Artificial Sequence
  Description of Artificial Sequence: Synthetic oligonucleotide
  Target: LAMA2; (-) strand; PAM type: YTN; PAM sequence: CTG
gaaacaagaataattcatcc

SEQ ID NO: 264747 - DNA, 20 bp, Artificial Sequence
  Description of Artificial Sequence: Synthetic oligonucleotide
  Target: LAMA2; (-) strand; PAM type: YTN; PAM sequence: TTC
tggaaacaagaataattcat

SEQ ID NO: 264748 - DNA, 20 bp, Artificial Sequence
  Description of Artificial Sequence: Synthetic oligonucleotide
  Target: LAMA2; (-) strand; PAM type: YTN; PAM sequence: TTT
ctggaaacaagaataattca

SEQ ID NO: 264749 - DNA, 20 bp, Artificial Sequence
  Description of Artificial Sequence: Synthetic oligonucleotide
  Target: LAMA2; (-) strand; PAM type: YTN; PAM sequence: TTT
tctggaaacaagaataattc

SEQ ID NO: 264750 - DNA, 20 bp, Artificial Sequence
  Description of Artificial Sequence: Synthetic oligonucleotide
  Target: LAMA2; (-) strand; PAM type: YTN; PAM sequence: CTT
ttctggaaacaagaataatt

SEQ ID NO: 264751 - DNA, 20 bp, Artificial Sequence
  Description of Artificial Sequence: Synthetic oligonucleotide
  Target: LAMA2; (-) strand; PAM type: YTN; PAM sequence: TTG
agaacatagggggaagatgt

SEQ ID NO: 264752 - DNA, 20 bp, Artificial Sequence
  Description of Artificial Sequence: Synthetic oligonucleotide
  Target: LAMA2; (-) strand; PAM type: YTN; PAM sequence: TTA
gccagagtgatgtcatcaag

SEQ ID NO: 264753 - DNA, 20 bp, Artificial Sequence
  Description of Artificial Sequence: Synthetic oligonucleotide
  Target: LAMA2; (-) strand; PAM type: YTN; PAM sequence: TTA
agatggaaaaaaaaagtgac

SEQ ID NO: 264754 - DNA, 20 bp, Artificial Sequence
  Description of Artificial Sequence: Synthetic oligonucleotide
  Target: LAMA2; (-) strand; PAM type: YTN; PAM sequence: TTT
aagatggaaaaaaaaagtga

SEQ ID NO: 264755 - DNA, 20 bp, Artificial Sequence
  Description of Artificial Sequence: Synthetic oligonucleotide
  Target: LAMA2; (-) strand; PAM type: YTN; PAM sequence: TTT
taagatggaaaaaaaaagtg

SEQ ID NO: 264756 - DNA, 20 bp, Artificial Sequence
  Description of Artificial Sequence: Synthetic oligonucleotide
  Target: LAMA2; (-) strand; PAM type: YTN; PAM sequence: CTT
ttaagatggaaaaaaaaagt

SEQ ID NO: 264757 - DNA, 20 bp, Artificial Sequence
  Description of Artificial Sequence: Synthetic oligonucleotide
  Target: LAMA2; (-) strand; PAM type: YTN; PAM sequence: TTG
cttttaagatggaaaaaaaa

SEQ ID NO: 264758 - DNA, 20 bp, Artificial Sequence
  Description of Artificial Sequence: Synthetic oligonucleotide
  Target: LAMA2; (-) strand; PAM type: YTN; PAM sequence: TTT
gcttttaagatggaaaaaaa

SEQ ID NO: 264759 - DNA, 20 bp, Artificial Sequence
  Description of Artificial Sequence: Synthetic oligonucleotide
  Target: LAMA2; (-) strand; PAM type: YTN; PAM sequence: TTT
tgcttttaagatggaaaaaa

SEQ ID NO: 264760 - DNA, 20 bp, Artificial Sequence
  Description of Artificial Sequence: Synthetic oligonucleotide
  Target: LAMA2; (-) strand; PAM type: YTN; PAM sequence: TTT
ttgcttttaagatggaaaaa

SEQ ID NO: 264761 - DNA, 20 bp, Artificial Sequence
  Description of Artificial Sequence: Synthetic oligonucleotide
  Target: LAMA2; (-) strand; PAM type: YTN; PAM sequence: TTG
tttttgcttttaagatggaa

SEQ ID NO: 264762 - DNA, 20 bp, Artificial Sequence
  Description of Artificial Sequence: Synthetic oligonucleotide
  Target: LAMA2; (-) strand; PAM type: YTN; PAM sequence: TTT
gtttttgcttttaagatgga

SEQ ID NO: 264763 - DNA, 20 bp, Artificial Sequence
  Description of Artificial Sequence: Synthetic oligonucleotide
  Target: LAMA2; (-) strand; PAM type: YTN; PAM sequence: TTA
gaaaggaaatgagtcaggag

SEQ ID NO: 264764 - DNA, 20 bp, Artificial Sequence
  Description of Artificial Sequence: Synthetic oligonucleotide
  Target: LAMA2; (-) strand; PAM type: YTN; PAM sequence: CTT
agaaaggaaatgagtcagga

SEQ ID NO: 264765 - DNA, 20 bp, Artificial Sequence
  Description of Artificial Sequence: Synthetic oligonucleotide
  Target: LAMA2; (-) strand; PAM type: YTN; PAM sequence: TTA
cttagaaaggaaatgagtca

SEQ ID NO: 264766 - DNA, 20 bp, Artificial Sequence
  Description of Artificial Sequence: Synthetic oligonucleotide
  Target: LAMA2; (-) strand; PAM type: YTN; PAM sequence: TTG
tatggaaggagaagaatgaa

SEQ ID NO: 264767 - DNA, 20 bp, Artificial Sequence
  Description of Artificial Sequence: Synthetic oligonucleotide
  Target: LAMA2; (-) strand; PAM type: YTN; PAM sequence: CTC
cattgtatggaaggagaaga

SEQ ID NO: 264768 - DNA, 20 bp, Artificial Sequence
  Description of Artificial Sequence: Synthetic oligonucleotide
  Target: LAMA2; (-) strand; PAM type: YTN; PAM sequence: CTC
tccattgtatggaaggagaa

SEQ ID NO: 264769 - DNA, 20 bp, Artificial Sequence
  Description of Artificial Sequence: Synthetic oligonucleotide
  Target: LAMA2; (-) strand; PAM type: YTN; PAM sequence: TTA
tagacgggatagacagctct

SEQ ID NO: 264770 - DNA, 20 bp, Artificial Sequence
  Description of Artificial Sequence: Synthetic oligonucleotide
  Target: LAMA2; (-) strand; PAM type: YTN; PAM sequence: TTC
aaaggagaatggatgaagag

SEQ ID NO: 264771 - DNA, 20 bp, Artificial Sequence
  Description of Artificial Sequence: Synthetic oligonucleotide
  Target: LAMA2; (-) strand; PAM type: YTN; PAM sequence: TTA
gtaattcaaaggagaatgga

SEQ ID NO: 264772 - DNA, 20 bp, Artificial Sequence
  Description of Artificial Sequence: Synthetic oligonucleotide
  Target: LAMA2; (-) strand; PAM type: YTN; PAM sequence: TTT
agtaattcaaaggagaatgg

SEQ ID NO: 264773 - DNA, 20 bp, Artificial Sequence
  Description of Artificial Sequence: Synthetic oligonucleotide
  Target: LAMA2; (-) strand; PAM type: YTN; PAM sequence: TTT
tagtaattcaaaggagaatg

SEQ ID NO: 264774 - DNA, 20 bp, Artificial Sequence
  Description of Artificial Sequence: Synthetic oligonucleotide
  Target: LAMA2; (-) strand; PAM type: YTN; PAM sequence: TTT
ttagtaattcaaaggagaat

SEQ ID NO: 264775 - DNA, 20 bp, Artificial Sequence
  Description of Artificial Sequence: Synthetic oligonucleotide
  Target: LAMA2; (-) strand; PAM type: YTN; PAM sequence: CTG
tttttagtaattcaaaggag

SEQ ID NO: 264776 - DNA, 20 bp, Artificial Sequence
  Description of Artificial Sequence: Synthetic oligonucleotide
  Target: LAMA2; (-) strand; PAM type: YTN; PAM sequence: TTG
aatccagtatagaagaggag

SEQ ID NO: 264777 - DNA, 20 bp, Artificial Sequence
  Description of Artificial Sequence: Synthetic oligonucleotide
  Target: LAMA2; (-) strand; PAM type: YTN; PAM sequence: TTA
gccattgaatccagtataga

SEQ ID NO: 264778 - DNA, 20 bp, Artificial Sequence
  Description of Artificial Sequence: Synthetic oligonucleotide
  Target: LAMA2; (-) strand; PAM type: YTN; PAM sequence: CTG
tagattagccattgaatcca

SEQ ID NO: 264779 - DNA, 20 bp, Artificial Sequence
  Description of Artificial Sequence: Synthetic oligonucleotide
  Target: LAMA2; (-) strand; PAM type: YTN; PAM sequence: CTG
gtggctgtagattagccatt

SEQ ID NO: 264780 - DNA, 20 bp, Artificial Sequence
  Description of Artificial Sequence: Synthetic oligonucleotide
  Target: LAMA2; (-) strand; PAM type: YTN; PAM sequence: TTA
gatatagtaaggtgaacact

SEQ ID NO: 264781 - DNA, 20 bp, Artificial Sequence
  Description of Artificial Sequence: Synthetic oligonucleotide
  Target: LAMA2; (-) strand; PAM type: YTN; PAM sequence: CTG
ttagatatagtaaggtgaac

SEQ ID NO: 264782 - DNA, 20 bp, Artificial Sequence
  Description of Artificial Sequence: Synthetic oligonucleotide
  Target: LAMA2; (-) strand; PAM type: YTN; PAM sequence: TTC
acagtggcaaacatggctgt

SEQ ID NO: 264783 - DNA, 20 bp, Artificial Sequence
  Description of Artificial Sequence: Synthetic oligonucleotide
  Target: LAMA2; (-) strand; PAM type: YTN; PAM sequence: TTC
aagaagaatggggtgattca

SEQ ID NO: 264784 - DNA, 20 bp, Artificial Sequence
  Description of Artificial Sequence: Synthetic oligonucleotide
  Target: LAMA2; (-) strand; PAM type: YTN; PAM sequence: TTT
caagaagaatggggtgattc

SEQ ID NO: 264785 - DNA, 20 bp, Artificial Sequence
  Description of Artificial Sequence: Synthetic oligonucleotide
  Target: LAMA2; (-) strand; PAM type: YTN; PAM sequence: TTG
agcaaagggtttcaagaaga

SEQ ID NO: 264786 - DNA, 20 bp, Artificial Sequence
  Description of Artificial Sequence: Synthetic oligonucleotide
  Target: LAMA2; (-) strand; PAM type: YTN; PAM sequence: CTG
gaaagcaaattgagcaaagg

SEQ ID NO: 264787 - DNA, 20 bp, Artificial Sequence
  Description of Artificial Sequence: Synthetic oligonucleotide
  Target: LAMA2; (-) strand; PAM type: YTN; PAM sequence: CTC
cagaatgccatgggctggaa

SEQ ID NO: 264788 - DNA, 20 bp, Artificial Sequence
  Description of Artificial Sequence: Synthetic oligonucleotide
  Target: LAMA2; (-) strand; PAM type: YTN; PAM sequence: TTG
aacatctccagaatgccatg

SEQ ID NO: 264789 - DNA, 20 bp, Artificial Sequence
  Description of Artificial Sequence: Synthetic oligonucleotide
  Target: LAMA2; (-) strand; PAM type: YTN; PAM sequence: TTT
gaacatctccagaatgccat

SEQ ID NO: 264790 - DNA, 20 bp, Artificial Sequence
  Description of Artificial Sequence: Synthetic oligonucleotide
  Target: LAMA2; (-) strand; PAM type: YTN; PAM sequence: CTA
tggaatttgaacatctccag

SEQ ID NO: 264791 - DNA, 20 bp, Artificial Sequence
  Description of Artificial Sequence: Synthetic oligonucleotide
  Target: LAMA2; (-) strand; PAM type: YTN; PAM sequence: CTG
agaaggagccactatggaat

SEQ ID NO: 264792 - DNA, 20 bp, Artificial Sequence
  Description of Artificial Sequence: Synthetic oligonucleotide
  Target: LAMA2; (-) strand; PAM type: YTN; PAM sequence: TTC
agagtaatgaagaaagctga

SEQ ID NO: 264793 - DNA, 20 bp, Artificial Sequence
  Description of Artificial Sequence: Synthetic oligonucleotide
  Target: LAMA2; (-) strand; PAM type: YTN; PAM sequence: TTT
cagagtaatgaagaaagctg

SEQ ID NO: 264794 - DNA, 20 bp, Artificial Sequence
  Description of Artificial Sequence: Synthetic oligonucleotide
  Target: LAMA2; (-) strand; PAM type: YTN; PAM sequence: CTA
tgtagatttcagagtaatga

SEQ ID NO: 264795 - DNA, 20 bp, Artificial Sequence
  Description of Artificial Sequence: Synthetic oligonucleotide
  Target: LAMA2; (-) strand; PAM type: YTN; PAM sequence: TTG
agtcccaggaataccactat

SEQ ID NO: 264796 - DNA, 20 bp, Artificial Sequence
  Description of Artificial Sequence: Synthetic oligonucleotide
  Target: LAMA2; (-) strand; PAM type: YTN; PAM sequence: CTC
caaggattgagtcccaggaa

SEQ ID NO: 264797 - DNA, 20 bp, Artificial Sequence
  Description of Artificial Sequence: Synthetic oligonucleotide
  Target: LAMA2; (-) strand; PAM type: YTN; PAM sequence: TTG
ctccaaggattgagtcccag

SEQ ID NO: 264798 - DNA, 20 bp, Artificial Sequence
  Description of Artificial Sequence: Synthetic oligonucleotide
  Target: LAMA2; (-) strand; PAM type: YTN; PAM sequence: TTA
gagaaacaaattgctccaag

SEQ ID NO: 264799 - DNA, 20 bp, Artificial Sequence
  Description of Artificial Sequence: Synthetic oligonucleotide
  Target: LAMA2; (-) strand; PAM type: YTN; PAM sequence: CTG
aatgaatgtagttagagaaa

SEQ ID NO: 264800 - DNA, 20 bp, Artificial Sequence
  Description of Artificial Sequence: Synthetic oligonucleotide
  Target: LAMA2; (-) strand; PAM type: YTN; PAM sequence: CTG
ggtaagatcaccatctgaat

SEQ ID NO: 264801 - DNA, 20 bp, Artificial Sequence
  Description of Artificial Sequence: Synthetic oligonucleotide
  Target: LAMA2; (-) strand; PAM type: YTN; PAM sequence: CTC
agtacagaaagccacatgcc

SEQ ID NO: 264802 - DNA, 20 bp, Artificial Sequence
  Description of Artificial Sequence: Synthetic oligonucleotide
  Target: LAMA2; (-) strand; PAM type: YTN; PAM sequence: CTG
tgggatgtcaatatcaaaat

SEQ ID NO: 264803 - DNA, 20 bp, Artificial Sequence
  Description of Artificial Sequence: Synthetic oligonucleotide
  Target: LAMA2; (-) strand; PAM type: YTN; PAM sequence: TTA
atagtaaatactgtgggatg

SEQ ID NO: 264804 - DNA, 20 bp, Artificial Sequence
  Description of Artificial Sequence: Synthetic oligonucleotide
  Target: LAMA2; (-) strand; PAM type: YTN; PAM sequence: CTT
aatagtaaatactgtgggat

SEQ ID NO: 264805 - DNA, 20 bp, Artificial Sequence
  Description of Artificial Sequence: Synthetic oligonucleotide
  Target: LAMA2; (-) strand; PAM type: YTN; PAM sequence: TTA
aatcataaacttaatagtaa

SEQ ID NO: 264806 - DNA, 20 bp, Artificial Sequence
  Description of Artificial Sequence: Synthetic oligonucleotide
  Target: LAMA2; (-) strand; PAM type: YTN; PAM sequence: CTC
cccacaccatagtaatgagt

SEQ ID NO: 264807 - DNA, 20 bp, Artificial Sequence
  Description of Artificial Sequence: Synthetic oligonucleotide
  Target: LAMA2; (-) strand; PAM type: YTN; PAM sequence: TTA
cctccccacaccatagtaat

SEQ ID NO: 264808 - DNA, 20 bp, Artificial Sequence
  Description of Artificial Sequence: Synthetic oligonucleotide
  Target: LAMA2; (-) strand; PAM type: YTN; PAM sequence: CTG
cagaaaaattacctccccac

SEQ ID NO: 264809 - DNA, 20 bp, Artificial Sequence
  Description of Artificial Sequence: Synthetic oligonucleotide
  Target: LAMA2; (-) strand; PAM type: YTN; PAM sequence: TTA
cagtggtaatacatatctgc

SEQ ID NO: 264810 - DNA, 20 bp, Artificial Sequence
  Description of Artificial Sequence: Synthetic oligonucleotide
  Target: LAMA2; (-) strand; PAM type: YTN; PAM sequence: TTT
acagtggtaatacatatctg

SEQ ID NO: 264811 - DNA, 20 bp, Artificial Sequence
  Description of Artificial Sequence: Synthetic oligonucleotide
  Target: LAMA2; (-) strand; PAM type: YTN; PAM sequence: CTT
tacagtggtaatacatatct

SEQ ID NO: 264812 - DNA, 20 bp, Artificial Sequence
  Description of Artificial Sequence: Synthetic oligonucleotide
  Target: LAMA2; (-) strand; PAM type: YTN; PAM sequence: TTC
tttacagtggtaatacatat

SEQ ID NO: 264813 - DNA, 20 bp, Artificial Sequence
  Description of Artificial Sequence: Synthetic oligonucleotide
  Target: LAMA2; (-) strand; PAM type: YTN; PAM sequence: TTT
ctttacagtggtaatacata

SEQ ID NO: 264814 - DNA, 20 bp, Artificial Sequence
  Description of Artificial Sequence: Synthetic oligonucleotide
  Target: LAMA2; (-) strand; PAM type: YTN; PAM sequence: TTA
atcagtaaatgtttctttac

SEQ ID NO: 264815 - DNA, 20 bp, Artificial Sequence
  Description of Artificial Sequence: Synthetic oligonucleotide
  Target: LAMA2; (-) strand; PAM type: YTN; PAM sequence: TTC
agatacaataatgtatcaag

SEQ ID NO: 264816 - DNA, 20 bp, Artificial Sequence
  Description of Artificial Sequence: Synthetic oligonucleotide
  Target: LAMA2; (-) strand; PAM type: YTN; PAM sequence: TTG
tgtatgttcagatacaataa

SEQ ID NO: 264817 - DNA, 20 bp, Artificial Sequence
  Description of Artificial Sequence: Synthetic oligonucleotide
  Target: LAMA2; (-) strand; PAM type: YTN; PAM sequence: TTT
gtgtatgttcagatacaata

SEQ ID NO: 264818 - DNA, 20 bp, Artificial Sequence
  Description of Artificial Sequence: Synthetic oligonucleotide
  Target: LAMA2; (-) strand; PAM type: YTN; PAM sequence: TTA
atatggatgaaataaatttg

SEQ ID NO: 264819 - DNA, 20 bp, Artificial Sequence
  Description of Artificial Sequence: Synthetic oligonucleotide
  Target: LAMA2; (-) strand; PAM type: YTN; PAM sequence: CTT
aatatggatgaaataaattt

SEQ ID NO: 264820 - DNA, 20 bp, Artificial Sequence
  Description of Artificial Sequence: Synthetic oligonucleotide
  Target: LAMA2; (-) strand; PAM type: YTN; PAM sequence: CTG
aaacatatcttaatatggat

SEQ ID NO: 264821 - DNA, 20 bp, Artificial Sequence
  Description of Artificial Sequence: Synthetic oligonucleotide
  Target: LAMA2; (-) strand; PAM type: YTN; PAM sequence: TTA
tactgaaacatatcttaata

SEQ ID NO: 264822 - DNA, 20 bp, Artificial Sequence
  Description of Artificial Sequence: Synthetic oligonucleotide
  Target: LAMA2; (-) strand; PAM type: YTN; PAM sequence: CTA
aaaggtaagtaaaacaaaat

SEQ ID NO: 264823 - DNA, 20 bp, Artificial Sequence
  Description of Artificial Sequence: Synthetic oligonucleotide
  Target: LAMA2; (-) strand; PAM type: YTN; PAM sequence: TTG
taataagagctaaaaggtaa

SEQ ID NO: 264824 - DNA, 20 bp, Artificial Sequence
  Description of Artificial Sequence: Synthetic oligonucleotide
  Target: LAMA2; (-) strand; PAM type: YTN; PAM sequence: TTA
acataaaatgaaggtaagca

SEQ ID NO: 264825 - DNA, 20 bp, Artificial Sequence
  Description of Artificial Sequence: Synthetic oligonucleotide
  Target: LAMA2; (-) strand; PAM type: YTN; PAM sequence: TTA
cagatatgttaacataaaat

SEQ ID NO: 264826 - DNA, 20 bp, Artificial Sequence
  Description of Artificial Sequence: Synthetic oligonucleotide
  Target: LAMA2; (-) strand; PAM type: YTN; PAM sequence: TTT
acagatatgttaacataaaa

SEQ ID NO: 264827 - DNA, 20 bp, Artificial Sequence
  Description of Artificial Sequence: Synthetic oligonucleotide
  Target: LAMA2; (-) strand; PAM type: YTN; PAM sequence: CTT
tacagatatgttaacataaa

SEQ ID NO: 264828 - DNA, 20 bp, Artificial Sequence
  Description of Artificial Sequence: Synthetic oligonucleotide
  Target: LAMA2; (-) strand; PAM type: YTN; PAM sequence: TTG
ctttacagatatgttaacat

SEQ ID NO: 264829 - DNA, 20 bp, Artificial Sequence
  Description of Artificial Sequence: Synthetic oligonucleotide
  Target: LAMA2; (-) strand; PAM type: YTN; PAM sequence: CTT
gctttacagatatgttaaca

SEQ ID NO: 264830 - DNA, 20 bp, Artificial Sequence
  Description of Artificial Sequence: Synthetic oligonucleotide
  Target: LAMA2; (-) strand; PAM type: YTN; PAM sequence: TTA
gaagagaagagaaataaagg

SEQ ID NO: 264831 - DNA, 20 bp, Artificial Sequence
  Description of Artificial Sequence: Synthetic oligonucleotide
  Target: LAMA2; (-) strand; PAM type: YTN; PAM sequence: TTA
attagaagagaagagaaata

SEQ ID NO: 264832 - DNA, 20 bp, Artificial Sequence
  Description of Artificial Sequence: Synthetic oligonucleotide
  Target: LAMA2; (-) strand; PAM type: YTN; PAM sequence: CTA
gttaattagaagagaagaga

SEQ ID NO: 264833 - DNA, 20 bp, Artificial Sequence
  Description of Artificial Sequence: Synthetic oligonucleotide
  Target: LAMA2; (-) strand; PAM type: YTN; PAM sequence: CTG
gaagaatatgtaagagcatc

SEQ ID NO: 264834 - DNA, 20 bp, Artificial Sequence
  Description of Artificial Sequence: Synthetic oligonucleotide
  Target: LAMA2; (-) strand; PAM type: YTN; PAM sequence: TTA
aaatagtgcataaaagtgtc

SEQ ID NO: 264835 - DNA, 20 bp, Artificial Sequence
  Description of Artificial Sequence: Synthetic oligonucleotide
  Target: LAMA2; (-) strand; PAM type: YTN; PAM sequence: TTG
tggaagagattaaaatagtg

SEQ ID NO: 264836 - DNA, 20 bp, Artificial Sequence
  Description of Artificial Sequence: Synthetic oligonucleotide
  Target: LAMA2; (-) strand; PAM type: YTN; PAM sequence: TTT
gtggaagagattaaaatagt

SEQ ID NO: 264837 - DNA, 20 bp, Artificial Sequence
  Description of Artificial Sequence: Synthetic oligonucleotide
  Target: LAMA2; (-) strand; PAM type: YTN; PAM sequence: TTA
aaatttgtggaagagattaa

SEQ ID NO: 264838 - DNA, 20 bp, Artificial Sequence
  Description of Artificial Sequence: Synthetic oligonucleotide
  Target: LAMA2; (-) strand; PAM type: YTN; PAM sequence: TTG
taattaaaatttgtggaaga

SEQ ID NO: 264839 - DNA, 20 bp, Artificial Sequence
  Description of Artificial Sequence: Synthetic oligonucleotide
  Target: LAMA2; (-) strand; PAM type: YTN; PAM sequence: TTG
attgtaattaaaatttgtgg

SEQ ID NO: 264840 - DNA, 20 bp, Artificial Sequence
  Description of Artificial Sequence: Synthetic oligonucleotide
  Target: LAMA2; (-) strand; PAM type: YTN; PAM sequence: TTT
gattgtaattaaaatttgtg

SEQ ID NO: 264841 - DNA, 20 bp, Artificial Sequence
  Description of Artificial Sequence: Synthetic oligonucleotide
  Target: LAMA2; (-) strand; PAM type: YTN; PAM sequence: TTT
tgattgtaattaaaatttgt

SEQ ID NO: 264842 - DNA, 20 bp, Artificial Sequence
  Description of Artificial Sequence: Synthetic oligonucleotide
  Target: LAMA2; (-) strand; PAM type: YTN; PAM sequence: TTC
cagtaattttgattgtaatt

SEQ ID NO: 264843 - DNA, 20 bp, Artificial Sequence
  Description of Artificial Sequence: Synthetic oligonucleotide
  Target: LAMA2; (-) strand; PAM type: YTN; PAM sequence: TTA
caatcaaaattccagtaatt

SEQ ID NO: 264844 - DNA, 20 bp, Artificial Sequence
  Description of Artificial Sequence: Synthetic oligonucleotide
  Target: LAMA2; (-) strand; PAM type: YTN; PAM sequence: TTA
attacaatcaaaattccagt

SEQ ID NO: 264845 - DNA, 20 bp, Artificial Sequence
  Description of Artificial Sequence: Synthetic oligonucleotide
  Target: LAMA2; (-) strand; PAM type: YTN; PAM sequence: TTT
aattacaatcaaaattccag

SEQ ID NO: 264846 - DNA, 20 bp, Artificial Sequence
  Description of Artificial Sequence: Synthetic oligonucleotide
  Target: LAMA2; (-) strand; PAM type: YTN; PAM sequence: CTA
atttaattacaatcaaaatt

SEQ ID NO: 264847 - DNA, 20 bp, Artificial Sequence
  Description of Artificial Sequence: Synthetic oligonucleotide
  Target: LAMA2; (-) strand; PAM type: YTN; PAM sequence: TTA
caaataggctaatttaatta

SEQ ID NO: 264848 - DNA, 20 bp, Artificial Sequence
  Description of Artificial Sequence: Synthetic oligonucleotide
  Target: LAMA2; (-) strand; PAM type: YTN; PAM sequence: TTT
acaaataggctaatttaatt

SEQ ID NO: 264849 - DNA, 20 bp, Artificial Sequence
  Description of Artificial Sequence: Synthetic oligonucleotide
  Target: LAMA2; (-) strand; PAM type: YTN; PAM sequence: CTT
tacaaataggctaatttaat

SEQ ID NO: 264850 - DNA, 20 bp, Artificial Sequence
  Description of Artificial Sequence: Synthetic oligonucleotide
  Target: LAMA2; (-) strand; PAM type: YTN; PAM sequence: TTC
tttacaaataggctaattta

SEQ ID NO: 264851 - DNA, 20 bp, Artificial Sequence
  Description of Artificial Sequence: Synthetic oligonucleotide
  Target: LAMA2; (-) strand; PAM type: YTN; PAM sequence: CTA
gtgtaaatatagcaattctt

SEQ ID NO: 264852 - DNA, 20 bp, Artificial Sequence
  Description of Artificial Sequence: Synthetic oligonucleotide
  Target: LAMA2; (-) strand; PAM type: YTN; PAM sequence: CTG
aagagagaagagtgactagt

SEQ ID NO: 264853 - DNA, 20 bp, Artificial Sequence
  Description of Artificial Sequence: Synthetic oligonucleotide
  Target: LAMA2; (-) strand; PAM type: YTN; PAM sequence: CTG
taagacataaaatatctgaa

SEQ ID NO: 264854 - DNA, 20 bp, Artificial Sequence
  Description of Artificial Sequence: Synthetic oligonucleotide
  Target: LAMA2; (-) strand; PAM type: YTN; PAM sequence: TTA
ctgtaagacataaaatatct

SEQ ID NO: 264855 - DNA, 20 bp, Artificial Sequence
  Description of Artificial Sequence: Synthetic oligonucleotide
  Target: LAMA2; (-) strand; PAM type: YTN; PAM sequence: TTT
actgtaagacataaaatatc

SEQ ID NO: 264856 - DNA, 20 bp, Artificial Sequence
  Description of Artificial Sequence: Synthetic oligonucleotide
  Target: LAMA2; (-) strand; PAM type: YTN; PAM sequence: TTA
aaacagtttactgtaagaca

SEQ ID NO: 264857 - DNA, 20 bp, Artificial Sequence
  Description of Artificial Sequence: Synthetic oligonucleotide
  Target: LAMA2; (-) strand; PAM type: YTN; PAM sequence: CTT
aaaacagtttactgtaagac

SEQ ID NO: 264858 - DNA, 20 bp, Artificial Sequence
  Description of Artificial Sequence: Synthetic oligonucleotide
  Target: LAMA2; (-) strand; PAM type: YTN; PAM sequence: TTG
atatagacaaccttaaaaca

SEQ ID NO: 264859 - DNA, 20 bp, Artificial Sequence
  Description of Artificial Sequence: Synthetic oligonucleotide
  Target: LAMA2; (-) strand; PAM type: YTN; PAM sequence: CTT
gatatagacaaccttaaaac

SEQ ID NO: 264860 - DNA, 20 bp, Artificial Sequence
  Description of Artificial Sequence: Synthetic oligonucleotide
  Target: LAMA2; (-) strand; PAM type: YTN; PAM sequence: TTA
tatgagaaatgcgtgcttga

SEQ ID NO: 264861 - DNA, 20 bp, Artificial Sequence
  Description of Artificial Sequence: Synthetic oligonucleotide
  Target: LAMA2; (-) strand; PAM type: YTN; PAM sequence: TTT
atatgagaaatgcgtgcttg

SEQ ID NO: 264862 - DNA, 20 bp, Artificial Sequence
  Description of Artificial Sequence: Synthetic oligonucleotide
  Target: LAMA2; (-) strand; PAM type: YTN; PAM sequence: TTT
tatatgagaaatgcgtgctt

SEQ ID NO: 264863 - DNA, 20 bp, Artificial Sequence
  Description of Artificial Sequence: Synthetic oligonucleotide
  Target: LAMA2; (-) strand; PAM type: YTN; PAM sequence: TTT
ttatatgagaaatgcgtgct

SEQ ID NO: 264864 - DNA, 20 bp, Artificial Sequence
  Description of Artificial Sequence: Synthetic oligonucleotide
  Target: LAMA2; (-) strand; PAM type: YTN; PAM sequence: TTA
aaatgaaaatgtaagataca

SEQ ID NO: 264865 - DNA, 20 bp, Artificial Sequence
  Description of Artificial Sequence: Synthetic oligonucleotide
  Target: LAMA2; (-) strand; PAM type: YTN; PAM sequence: CTA
ccattaaaatgaaaatgtaa

SEQ ID NO: 264866 - DNA, 20 bp, Artificial Sequence
  Description of Artificial Sequence: Synthetic oligonucleotide
  Target: LAMA2; (-) strand; PAM type: YTN; PAM sequence: TTA
ctaccattaaaatgaaaatg

SEQ ID NO: 264867 - DNA, 20 bp, Artificial Sequence
  Description of Artificial Sequence: Synthetic oligonucleotide
  Target: LAMA2; (-) strand; PAM type: YTN; PAM sequence: TTT
actaccattaaaatgaaaat

SEQ ID NO: 264868 - DNA, 20 bp, Artificial Sequence
  Description of Artificial Sequence: Synthetic oligonucleotide
  Target: LAMA2; (-) strand; PAM type: YTN; PAM sequence: TTG
aaacaaaacaggtaatgttt

SEQ ID NO: 264869 - DNA, 20 bp, Artificial Sequence
  Description of Artificial Sequence: Synthetic oligonucleotide
  Target: LAMA2; (-) strand; PAM type: YTN; PAM sequence: CTA
tgttgaaacaaaacaggtaa

SEQ ID NO: 264870 - DNA, 20 bp, Artificial Sequence
  Description of Artificial Sequence: Synthetic oligonucleotide
  Target: LAMA2; (-) strand; PAM type: YTN; PAM sequence: TTA
ctatgttgaaacaaaacagg

SEQ ID NO: 264871 - DNA, 20 bp, Artificial Sequence
  Description of Artificial Sequence: Synthetic oligonucleotide
  Target: LAMA2; (-) strand; PAM type: YTN; PAM sequence: TTT
actatgttgaaacaaaacag

SEQ ID NO: 264872 - DNA, 20 bp, Artificial Sequence
  Description of Artificial Sequence: Synthetic oligonucleotide
  Target: LAMA2; (-) strand; PAM type: YTN; PAM sequence: TTA
gtacatttactatgttgaaa

SEQ ID NO: 264873 - DNA, 20 bp, Artificial Sequence
  Description of Artificial Sequence: Synthetic oligonucleotide
  Target: LAMA2; (-) strand; PAM type: YTN; PAM sequence: TTA
ccaataatgaccagttagta

SEQ ID NO: 264874 - DNA, 20 bp, Artificial Sequence
  Description of Artificial Sequence: Synthetic oligonucleotide
  Target: LAMA2; (-) strand; PAM type: YTN; PAM sequence: TTT
accaataatgaccagttagt

SEQ ID NO: 264875 - DNA, 20 bp, Artificial Sequence
  Description of Artificial Sequence: Synthetic oligonucleotide
  Target: LAMA2; (-) strand; PAM type: YTN; PAM sequence: TTA
aggtttaccaataatgacca

SEQ ID NO: 264876 - DNA, 20 bp, Artificial Sequence
  Description of Artificial Sequence: Synthetic oligonucleotide
  Target: LAMA2; (-) strand; PAM type: YTN; PAM sequence: CTA
atagttaaggtttaccaata

SEQ ID NO: 264877 - DNA, 20 bp, Artificial Sequence
  Description of Artificial Sequence: Synthetic oligonucleotide
  Target: LAMA2; (-) strand; PAM type: YTN; PAM sequence: TTC
taatagttaaggtttaccaa

SEQ ID NO: 264878 - DNA, 20 bp, Artificial Sequence
  Description of Artificial Sequence: Synthetic oligonucleotide
  Target: LAMA2; (-) strand; PAM type: YTN; PAM sequence: CTA
ttctaatagttaaggtttac

SEQ ID NO: 264879 - DNA, 20 bp, Artificial Sequence
  Description of Artificial Sequence: Synthetic oligonucleotide
  Target: LAMA2; (-) strand; PAM type: YTN; PAM sequence: TTG
gatatcaaatacatgtaaaa

SEQ ID NO: 264880 - DNA, 20 bp, Artificial Sequence
  Description of Artificial Sequence: Synthetic oligonucleotide
  Target: LAMA2; (-) strand; PAM type: YTN; PAM sequence: TTA
ttggatatcaaatacatgta

SEQ ID NO: 264881 - DNA, 20 bp, Artificial Sequence
  Description of Artificial Sequence: Synthetic oligonucleotide
  Target: LAMA2; (-) strand; PAM type: YTN; PAM sequence: CTA
aaataaaagttattggatat

SEQ ID NO: 264882 - DNA, 20 bp, Artificial Sequence
  Description of Artificial Sequence: Synthetic oligonucleotide
  Target: LAMA2; (-) strand; PAM type: YTN; PAM sequence: CTA
gaactaaaataaaagttatt

SEQ ID NO: 264883 - DNA, 20 bp, Artificial Sequence
  Description of Artificial Sequence: Synthetic oligonucleotide
  Target: LAMA2; (-) strand; PAM type: YTN; PAM sequence: TTC
tagaactaaaataaaagtta

SEQ ID NO: 264884 - DNA, 20 bp, Artificial Sequence
  Description of Artificial Sequence: Synthetic oligonucleotide
  Target: LAMA2; (-) strand; PAM type: YTN; PAM sequence: CTT
ctagaactaaaataaaagtt

SEQ ID NO: 264885 - DNA, 20 bp, Artificial Sequence
  Description of Artificial Sequence: Synthetic oligonucleotide
  Target: LAMA2; (-) strand; PAM type: YTN; PAM sequence: CTG
ataaacttctagaactaaaa

SEQ ID NO: 264886 - DNA, 20 bp, Artificial Sequence
  Description of Artificial Sequence: Synthetic oligonucleotide
  Target: LAMA2; (-) strand; PAM type: YTN; PAM sequence: CTG
aatcaactgataaacttcta

SEQ ID NO: 264887 - DNA, 20 bp, Artificial Sequence
  Description of Artificial Sequence: Synthetic oligonucleotide
  Target: LAMA2; (-) strand; PAM type: YTN; PAM sequence: TTA
acaataactgaatcaactga

SEQ ID NO: 264888 - DNA, 20 bp, Artificial Sequence
  Description of Artificial Sequence: Synthetic oligonucleotide
  Target: LAMA2; (-) strand; PAM type: YTN; PAM sequence: CTT
aacaataactgaatcaactg

SEQ ID NO: 264889 - DNA, 20 bp, Artificial Sequence
  Description of Artificial Sequence: Synthetic oligonucleotide
  Target: LAMA2; (-) strand; PAM type: YTN; PAM sequence: CTC
aaaaaaaaaaaaaaaaaaaa

SEQ ID NO: 264890 - DNA, 20 bp, Artificial Sequence
  Description of Artificial Sequence: Synthetic oligonucleotide
  Target: LAMA2; (-) strand; PAM type: YTN; PAM sequence: CTC
tcaaaaaaaaaaaaaaaaaa

SEQ ID NO: 264891 - DNA, 20 bp, Artificial Sequence
  Description of Artificial Sequence: Synthetic oligonucleotide
  Target: LAMA2; (-) strand; PAM type: YTN; PAM sequence: CTC
cctctcaaaaaaaaaaaaaa

SEQ ID NO: 264892 - DNA, 20 bp, Artificial Sequence
  Description of Artificial Sequence: Synthetic oligonucleotide
  Target: LAMA2; (-) strand; PAM type: YTN; PAM sequence: CTG
ggtgacagagcaagactccc

SEQ ID NO: 264893 - DNA, 20 bp, Artificial Sequence
  Description of Artificial Sequence: Synthetic oligonucleotide
  Target: LAMA2; (-) strand; PAM type: YTN; PAM sequence: CTA
gcctgggtgacagagcaaga

SEQ ID NO: 264894 - DNA, 20 bp, Artificial Sequence
  Description of Artificial Sequence: Synthetic oligonucleotide
  Target: LAMA2; (-) strand; PAM type: YTN; PAM sequence: CTC
tagcctgggtgacagagcaa

SEQ ID NO: 264895 - DNA, 20 bp, Artificial Sequence
  Description of Artificial Sequence: Synthetic oligonucleotide
  Target: LAMA2; (-) strand; PAM type: YTN; PAM sequence: CTG
ccctctagcctgggtgacag

SEQ ID NO: 264896 - DNA, 20 bp, Artificial Sequence
  Description of Artificial Sequence: Synthetic oligonucleotide
  Target: LAMA2; (-) strand; PAM type: YTN; PAM sequence: TTG
cagtgagccatgatagcacc

SEQ ID NO: 264897 - DNA, 20 bp, Artificial Sequence
  Description of Artificial Sequence: Synthetic oligonucleotide
  Target: LAMA2; (-) strand; PAM type: YTN; PAM sequence: CTG
ggaggtggaggttgcagtga

SEQ ID NO: 264898 - DNA, 20 bp, Artificial Sequence
  Description of Artificial Sequence: Synthetic oligonucleotide
  Target: LAMA2; (-) strand; PAM type: YTN; PAM sequence: TTG
aacctgggaggtggaggttg

SEQ ID NO: 264899 - DNA, 20 bp, Artificial Sequence
  Description of Artificial Sequence: Synthetic oligonucleotide
  Target: LAMA2; (-) strand; PAM type: YTN; PAM sequence: CTT
gaacctgggaggtggaggtt

SEQ ID NO: 264900 - DNA, 20 bp, Artificial Sequence
  Description of Artificial Sequence: Synthetic oligonucleotide
  Target: LAMA2; (-) strand; PAM type: YTN; PAM sequence: CTG
aggcaggaaaatcgcttgaa

SEQ ID NO: 264901 - DNA, 20 bp, Artificial Sequence
  Description of Artificial Sequence: Synthetic oligonucleotide
  Target: LAMA2; (-) strand; PAM type: YTN; PAM sequence: CTC
aggaggctgaggcaggaaaa

SEQ ID NO: 264902 - DNA, 20 bp, Artificial Sequence
  Description of Artificial Sequence: Synthetic oligonucleotide
  Target: LAMA2; (-) strand; PAM type: YTN; PAM sequence: CTA
ctcaggaggctgaggcagga

SEQ ID NO: 264903 - DNA, 20 bp, Artificial Sequence
  Description of Artificial Sequence: Synthetic oligonucleotide
  Target: LAMA2; (-) strand; PAM type: YTN; PAM sequence: CTG
taatcccagctactcaggag

SEQ ID NO: 264904 - DNA, 20 bp, Artificial Sequence
  Description of Artificial Sequence: Synthetic oligonucleotide
  Target: LAMA2; (-) strand; PAM type: YTN; PAM sequence: TTA
tggtggcaggtgcctgtaat

SEQ ID NO: 264905 - DNA, 20 bp, Artificial Sequence
  Description of Artificial Sequence: Synthetic oligonucleotide
  Target: LAMA2; (-) strand; PAM type: YTN; PAM sequence: TTA
gccagttatggtggcaggtg

SEQ ID NO: 264906 - DNA, 20 bp, Artificial Sequence
  Description of Artificial Sequence: Synthetic oligonucleotide
  Target: LAMA2; (-) strand; PAM type: YTN; PAM sequence: CTA
aaatgcaaaaattagccagt

SEQ ID NO: 264907 - DNA, 20 bp, Artificial Sequence
  Description of Artificial Sequence: Synthetic oligonucleotide
  Target: LAMA2; (-) strand; PAM type: YTN; PAM sequence: CTA
ctaaaatgcaaaaattagcc

SEQ ID NO: 264908 - DNA, 20 bp, Artificial Sequence
  Description of Artificial Sequence: Synthetic oligonucleotide
  Target: LAMA2; (-) strand; PAM type: YTN; PAM sequence: CTC
tactaaaatgcaaaaattag

SEQ ID NO: 264909 - DNA, 20 bp, Artificial Sequence
  Description of Artificial Sequence: Synthetic oligonucleotide
  Target: LAMA2; (-) strand; PAM type: YTN; PAM sequence: CTA
aaatggtgaaaccccatctc

SEQ ID NO: 264910 - DNA, 20 bp, Artificial Sequence
  Description of Artificial Sequence: Synthetic oligonucleotide
  Target: LAMA2; (-) strand; PAM type: YTN; PAM sequence: CTG
gctaaaatggtgaaacccca

SEQ ID NO: 264911 - DNA, 20 bp, Artificial Sequence
  Description of Artificial Sequence: Synthetic oligonucleotide
  Target: LAMA2; (-) strand; PAM type: YTN; PAM sequence: TTG
aaatcagcctggctaaaatg

SEQ ID NO: 264912 - DNA, 20 bp, Artificial Sequence
  Description of Artificial Sequence: Synthetic oligonucleotide
  Target: LAMA2; (-) strand; PAM type: YTN; PAM sequence: TTT
gaaatcagcctggctaaaat

SEQ ID NO: 264913 - DNA, 20 bp, Artificial Sequence
  Description of Artificial Sequence: Synthetic oligonucleotide
  Target: LAMA2; (-) strand; PAM type: YTN; PAM sequence: TTG
aggtcaggagtttgaaatca

SEQ ID NO: 264914 - DNA, 20 bp, Artificial Sequence
  Description of Artificial Sequence: Synthetic oligonucleotide
  Target: LAMA2; (-) strand; PAM type: YTN; PAM sequence: CTT
gaggtcaggagtttgaaatc

SEQ ID NO: 264915 - DNA, 20 bp, Artificial Sequence
  Description of Artificial Sequence: Synthetic oligonucleotide
  Target: LAMA2; (-) strand; PAM type: YTN; PAM sequence: TTG
ggaggccgaggcaggcagat

SEQ ID NO: 264916 - DNA, 20 bp, Artificial Sequence
  Description of Artificial Sequence: Synthetic oligonucleotide
  Target: LAMA2; (-) strand; PAM type: YTN; PAM sequence: TTT
gggaggccgaggcaggcaga

SEQ ID NO: 264917 - DNA, 20 bp, Artificial Sequence
  Description of Artificial Sequence: Synthetic oligonucleotide
  Target: LAMA2; (-) strand; PAM type: YTN; PAM sequence: CTT
tgggaggccgaggcaggcag

SEQ ID NO: 264918 - DNA, 20 bp, Artificial Sequence
  Description of Artificial Sequence: Synthetic oligonucleotide
  Target: LAMA2; (-) strand; PAM type: YTN; PAM sequence: CTG
aactttgggaggccgaggca

SEQ ID NO: 264919 - DNA, 20 bp, Artificial Sequence
  Description of Artificial Sequence: Synthetic oligonucleotide
  Target: LAMA2; (-) strand; PAM type: YTN; PAM sequence: CTG
taatccctgaactttgggag

SEQ ID NO: 264920 - DNA, 20 bp, Artificial Sequence
  Description of Artificial Sequence: Synthetic oligonucleotide
  Target: LAMA2; (-) strand; PAM type: YTN; PAM sequence: TTC
atgcctgtaatccctgaact

SEQ ID NO: 264921 - DNA, 20 bp, Artificial Sequence
  Description of Artificial Sequence: Synthetic oligonucleotide
  Target: LAMA2; (-) strand; PAM type: YTN; PAM sequence: TTG
gtggttcatgcctgtaatcc

SEQ ID NO: 264922 - DNA, 20 bp, Artificial Sequence
  Description of Artificial Sequence: Synthetic oligonucleotide
  Target: LAMA2; (-) strand; PAM type: YTN; PAM sequence: TTT
ggtggttcatgcctgtaatc

SEQ ID NO: 264923 - DNA, 20 bp, Artificial Sequence
  Description of Artificial Sequence: Synthetic oligonucleotide
  Target: LAMA2; (-) strand; PAM type: YTN; PAM sequence: TTA
taggccaggtttggtggttc

SEQ ID NO: 264924 - DNA, 20 bp, Artificial Sequence
  Description of Artificial Sequence: Synthetic oligonucleotide
  Target: LAMA2; (-) strand; PAM type: YTN; PAM sequence: TTG
caaataatagtattataggc

SEQ ID NO: 264925 - DNA, 20 bp, Artificial Sequence
  Description of Artificial Sequence: Synthetic oligonucleotide
  Target: LAMA2; (-) strand; PAM type: YTN; PAM sequence: TTT
gcaaataatagtattatagg

SEQ ID NO: 264926 - DNA, 20 bp, Artificial Sequence
  Description of Artificial Sequence: Synthetic oligonucleotide
  Target: LAMA2; (-) strand; PAM type: YTN; PAM sequence: TTA
taatatttgcaaataatagt

SEQ ID NO: 264927 - DNA, 20 bp, Artificial Sequence
  Description of Artificial Sequence: Synthetic oligonucleotide
  Target: LAMA2; (-) strand; PAM type: YTN; PAM sequence: TTG
acaagtgaaagcacaattat

SEQ ID NO: 264928 - DNA, 20 bp, Artificial Sequence
  Description of Artificial Sequence: Synthetic oligonucleotide
  Target: LAMA2; (-) strand; PAM type: YTN; PAM sequence: TTT
gacaagtgaaagcacaatta

SEQ ID NO: 264929 - DNA, 20 bp, Artificial Sequence
  Description of Artificial Sequence: Synthetic oligonucleotide
  Target: LAMA2; (-) strand; PAM type: YTN; PAM sequence: TTT
tgacaagtgaaagcacaatt

SEQ ID NO: 264930 - DNA, 20 bp, Artificial Sequence
  Description of Artificial Sequence: Synthetic oligonucleotide
  Target: LAMA2; (-) strand; PAM type: YTN; PAM sequence: CTT
ttgacaagtgaaagcacaat

SEQ ID NO: 264931 - DNA, 20 bp, Artificial Sequence
  Description of Artificial Sequence: Synthetic oligonucleotide
  Target: LAMA2; (-) strand; PAM type: YTN; PAM sequence: TTA
taacagatatagcttttgac

SEQ ID NO: 264932 - DNA, 20 bp, Artificial Sequence
  Description of Artificial Sequence: Synthetic oligonucleotide
  Target: LAMA2; (-) strand; PAM type: YTN; PAM sequence: TTA
ttataacagatatagctttt

SEQ ID NO: 264933 - DNA, 20 bp, Artificial Sequence
  Description of Artificial Sequence: Synthetic oligonucleotide
  Target: LAMA2; (-) strand; PAM type: YTN; PAM sequence: TTA
ttattataacagatatagct

SEQ ID NO: 264934 - DNA, 20 bp, Artificial Sequence
  Description of Artificial Sequence: Synthetic oligonucleotide
  Target: LAMA2; (-) strand; PAM type: YTN; PAM sequence: TTA
aaaacatgaaattattatta

SEQ ID NO: 264935 - DNA, 20 bp, Artificial Sequence
  Description of Artificial Sequence: Synthetic oligonucleotide
  Target: LAMA2; (-) strand; PAM type: YTN; PAM sequence: TTT
aaaaacatgaaattattatt

SEQ ID NO: 264936 - DNA, 20 bp, Artificial Sequence
  Description of Artificial Sequence: Synthetic oligonucleotide
  Target: LAMA2; (-) strand; PAM type: YTN; PAM sequence: TTG
ggagacaatttaaaaacatg

SEQ ID NO: 264937 - DNA, 20 bp, Artificial Sequence
  Description of Artificial Sequence: Synthetic oligonucleotide
  Target: LAMA2; (-) strand; PAM type: YTN; PAM sequence: TTT
gggagacaatttaaaaacat

SEQ ID NO: 264938 - DNA, 20 bp, Artificial Sequence
  Description of Artificial Sequence: Synthetic oligonucleotide
  Target: LAMA2; (-) strand; PAM type: YTN; PAM sequence: TTT
tgggagacaatttaaaaaca

SEQ ID NO: 264939 - DNA, 20 bp, Artificial Sequence
  Description of Artificial Sequence: Synthetic oligonucleotide
  Target: LAMA2; (-) strand; PAM type: YTN; PAM sequence: TTA
ttttgggagacaatttaaaa

SEQ ID NO: 264940 - DNA, 20 bp, Artificial Sequence
  Description of Artificial Sequence: Synthetic oligonucleotide
  Target: LAMA2; (-) strand; PAM type: YTN; PAM sequence: TTA
ttattttgggagacaattta

SEQ ID NO: 264941 - DNA, 20 bp, Artificial Sequence
  Description of Artificial Sequence: Synthetic oligonucleotide
  Target: LAMA2; (-) strand; PAM type: YTN; PAM sequence: CTT
attattttgggagacaattt

SEQ ID NO: 264942 - DNA, 20 bp, Artificial Sequence
  Description of Artificial Sequence: Synthetic oligonucleotide
  Target: LAMA2; (-) strand; PAM type: YTN; PAM sequence: TTA
aaatcagtaataaaatagaa

SEQ ID NO: 264943 - DNA, 20 bp, Artificial Sequence
  Description of Artificial Sequence: Synthetic oligonucleotide
  Target: LAMA2; (-) strand; PAM type: YTN; PAM sequence: TTA
aggcaatcatattaaaatca

SEQ ID NO: 264944 - DNA, 20 bp, Artificial Sequence
  Description of Artificial Sequence: Synthetic oligonucleotide
  Target: LAMA2; (-) strand; PAM type: YTN; PAM sequence: CTT
aaggcaatcatattaaaatc

SEQ ID NO: 264945 - DNA, 20 bp, Artificial Sequence
  Description of Artificial Sequence: Synthetic oligonucleotide
  Target: LAMA2; (-) strand; PAM type: YTN; PAM sequence: TTA
atggtgaaagacttaaggca

SEQ ID NO: 264946 - DNA, 20 bp, Artificial Sequence
  Description of Artificial Sequence: Synthetic oligonucleotide
  Target: LAMA2; (-) strand; PAM type: YTN; PAM sequence: CTT
aatggtgaaagacttaaggc

SEQ ID NO: 264947 - DNA, 20 bp, Artificial Sequence
  Description of Artificial Sequence: Synthetic oligonucleotide
  Target: LAMA2; (-) strand; PAM type: YTN; PAM sequence: CTA
accatcagcatcatacttaa

SEQ ID NO: 264948 - DNA, 20 bp, Artificial Sequence
  Description of Artificial Sequence: Synthetic oligonucleotide
  Target: LAMA2; (-) strand; PAM type: YTN; PAM sequence: TTA
tactaaccatcagcatcata

SEQ ID NO: 264949 - DNA, 20 bp, Artificial Sequence
  Description of Artificial Sequence: Synthetic oligonucleotide
  Target: LAMA2; (-) strand; PAM type: YTN; PAM sequence: CTT
atactaaccatcagcatcat

SEQ ID NO: 264950 - DNA, 20 bp, Artificial Sequence
  Description of Artificial Sequence: Synthetic oligonucleotide
  Target: LAMA2; (-) strand; PAM type: YTN; PAM sequence: TTC
ttatactaaccatcagcatc

SEQ ID NO: 264951 - DNA, 20 bp, Artificial Sequence
  Description of Artificial Sequence: Synthetic oligonucleotide
  Target: LAMA2; (-) strand; PAM type: YTN; PAM sequence: TTT
cttatactaaccatcagcat

SEQ ID NO: 264952 - DNA, 20 bp, Artificial Sequence
  Description of Artificial Sequence: Synthetic oligonucleotide
  Target: LAMA2; (-) strand; PAM type: YTN; PAM sequence: TTT
tcttatactaaccatcagca

SEQ ID NO: 264953 - DNA, 20 bp, Artificial Sequence
  Description of Artificial Sequence: Synthetic oligonucleotide
  Target: LAMA2; (-) strand; PAM type: YTN; PAM sequence: TTT
ttcttatactaaccatcagc

SEQ ID NO: 264954 - DNA, 20 bp, Artificial Sequence
  Description of Artificial Sequence: Synthetic oligonucleotide
  Target: LAMA2; (-) strand; PAM type: YTN; PAM sequence: TTC
gtaacatgacaagaaatgtt

SEQ ID NO: 264955 - DNA, 20 bp, Artificial Sequence
  Description of Artificial Sequence: Synthetic oligonucleotide
  Target: LAMA2; (-) strand; PAM type: YTN; PAM sequence: TTT
cgtaacatgacaagaaatgt

SEQ ID NO: 264956 - DNA, 20 bp, Artificial Sequence
  Description of Artificial Sequence: Synthetic oligonucleotide
  Target: LAMA2; (-) strand; PAM type: YTN; PAM sequence: TTT
tcgtaacatgacaagaaatg

SEQ ID NO: 264957 - DNA, 20 bp, Artificial Sequence
  Description of Artificial Sequence: Synthetic oligonucleotide
  Target: LAMA2; (-) strand; PAM type: YTN; PAM sequence: CTA
ggaatagaaagcagttttcg

SEQ ID NO: 264958 - DNA, 20 bp, Artificial Sequence
  Description of Artificial Sequence: Synthetic oligonucleotide
  Target: LAMA2; (-) strand; PAM type: YTN; PAM sequence: TTA
agaagctaggaatagaaagc

SEQ ID NO: 264959 - DNA, 20 bp, Artificial Sequence
  Description of Artificial Sequence: Synthetic oligonucleotide
  Target: LAMA2; (-) strand; PAM type: YTN; PAM sequence: TTT
aagaagctaggaatagaaag

SEQ ID NO: 264960 - DNA, 20 bp, Artificial Sequence
  Description of Artificial Sequence: Synthetic oligonucleotide
  Target: LAMA2; (-) strand; PAM type: YTN; PAM sequence: CTT
taagaagctaggaatagaaa

SEQ ID NO: 264961 - DNA, 20 bp, Artificial Sequence
  Description of Artificial Sequence: Synthetic oligonucleotide
  Target: LAMA2; (-) strand; PAM type: YTN; PAM sequence: TTG
aaagaggatatctttaagaa

SEQ ID NO: 264962 - DNA, 20 bp, Artificial Sequence
  Description of Artificial Sequence: Synthetic oligonucleotide
  Target: LAMA2; (-) strand; PAM type: YTN; PAM sequence: CTG
attgaaagaggatatcttta

SEQ ID NO: 264963 - DNA, 20 bp, Artificial Sequence
  Description of Artificial Sequence: Synthetic oligonucleotide
  Target: LAMA2; (-) strand; PAM type: YTN; PAM sequence: TTA
tcctgattgaaagaggatat

SEQ ID NO: 264964 - DNA, 20 bp, Artificial Sequence
  Description of Artificial Sequence: Synthetic oligonucleotide
  Target: LAMA2; (-) strand; PAM type: YTN; PAM sequence: CTT
atcctgattgaaagaggata

SEQ ID NO: 264965 - DNA, 20 bp, Artificial Sequence
  Description of Artificial Sequence: Synthetic oligonucleotide
  Target: LAMA2; (-) strand; PAM type: YTN; PAM sequence: TTA
aatatcttatcctgattgaa

SEQ ID NO: 264966 - DNA, 20 bp, Artificial Sequence
  Description of Artificial Sequence: Synthetic oligonucleotide
  Target: LAMA2; (-) strand; PAM type: YTN; PAM sequence: TTT
aaatatcttatcctgattga

SEQ ID NO: 264967 - DNA, 20 bp, Artificial Sequence
  Description of Artificial Sequence: Synthetic oligonucleotide
  Target: LAMA2; (-) strand; PAM type: YTN; PAM sequence: TTA
agcatatgagtaatttaaat

SEQ ID NO: 264968 - DNA, 20 bp, Artificial Sequence
  Description of Artificial Sequence: Synthetic oligonucleotide
  Target: LAMA2; (-) strand; PAM type: YTN; PAM sequence: CTC
cacaattaagcatatgagta

SEQ ID NO: 264969 - DNA, 20 bp, Artificial Sequence
  Description of Artificial Sequence: Synthetic oligonucleotide
  Target: LAMA2; (-) strand; PAM type: YTN; PAM sequence: CTC
tccacaattaagcatatgag

SEQ ID NO: 264970 - DNA, 20 bp, Artificial Sequence
  Description of Artificial Sequence: Synthetic oligonucleotide
  Target: LAMA2; (-) strand; PAM type: YTN; PAM sequence: CTC
cactctccacaattaagcat

SEQ ID NO: 264971 - DNA, 20 bp, Artificial Sequence
  Description of Artificial Sequence: Synthetic oligonucleotide
  Target: LAMA2; (-) strand; PAM type: YTN; PAM sequence: TTC
ccactccactctccacaatt

SEQ ID NO: 264972 - DNA, 20 bp, Artificial Sequence
  Description of Artificial Sequence: Synthetic oligonucleotide
  Target: LAMA2; (-) strand; PAM type: YTN; PAM sequence: CTA
cattcccactccactctcca

SEQ ID NO: 264973 - DNA, 20 bp, Artificial Sequence
  Description of Artificial Sequence: Synthetic oligonucleotide
  Target: LAMA2; (-) strand; PAM type: YTN; PAM sequence: TTA
aatgcatctacattcccact

SEQ ID NO: 264974 - DNA, 20 bp, Artificial Sequence
  Description of Artificial Sequence: Synthetic oligonucleotide
  Target: LAMA2; (-) strand; PAM type: YTN; PAM sequence: CTT
aaatgcatctacattcccac

SEQ ID NO: 264975 - DNA, 20 bp, Artificial Sequence
  Description of Artificial Sequence: Synthetic oligonucleotide
  Target: LAMA2; (-) strand; PAM type: YTN; PAM sequence: CTC
ttaaatgcatctacattccc

SEQ ID NO: 264976 - DNA, 20 bp, Artificial Sequence
  Description of Artificial Sequence: Synthetic oligonucleotide
  Target: LAMA2; (-) strand; PAM type: YTN; PAM sequence: CTA
tatatgatcacctcttaaat

SEQ ID NO: 264977 - DNA, 20 bp, Artificial Sequence
  Description of Artificial Sequence: Synthetic oligonucleotide
  Target: LAMA2; (-) strand; PAM type: YTN; PAM sequence: TTA
aggtgaaaaacctatatatg

SEQ ID NO: 264978 - DNA, 20 bp, Artificial Sequence
  Description of Artificial Sequence: Synthetic oligonucleotide
  Target: LAMA2; (-) strand; PAM type: YTN; PAM sequence: TTT
aaggtgaaaaacctatatat

SEQ ID NO: 264979 - DNA, 20 bp, Artificial Sequence
  Description of Artificial Sequence: Synthetic oligonucleotide
  Target: LAMA2; (-) strand; PAM type: YTN; PAM sequence: CTG
tttaaggtgaaaaacctata

SEQ ID NO: 264980 - DNA, 20 bp, Artificial Sequence
  Description of Artificial Sequence: Synthetic oligonucleotide
  Target: LAMA2; (-) strand; PAM type: YTN; PAM sequence: TTC
tgtttaaggtgaaaaaccta

SEQ ID NO: 264981 - DNA, 20 bp, Artificial Sequence
  Description of Artificial Sequence: Synthetic oligonucleotide
  Target: LAMA2; (-) strand; PAM type: YTN; PAM sequence: TTA
tggttctgtttaaggtgaaa

SEQ ID NO: 264982 - DNA, 20 bp, Artificial Sequence
  Description of Artificial Sequence: Synthetic oligonucleotide
  Target: LAMA2; (-) strand; PAM type: YTN; PAM sequence: TTT
atggttctgtttaaggtgaa

SEQ ID NO: 264983 - DNA, 20 bp, Artificial Sequence
  Description of Artificial Sequence: Synthetic oligonucleotide
  Target: LAMA2; (-) strand; PAM type: YTN; PAM sequence: TTA
gtcaataatatcatttatgg

SEQ ID NO: 264984 - DNA, 20 bp, Artificial Sequence
  Description of Artificial Sequence: Synthetic oligonucleotide
  Target: LAMA2; (-) strand; PAM type: YTN; PAM sequence: TTT
agtcaataatatcatttatg

SEQ ID NO: 264985 - DNA, 20 bp, Artificial Sequence
  Description of Artificial Sequence: Synthetic oligonucleotide
  Target: LAMA2; (-) strand; PAM type: YTN; PAM sequence: TTA
tttagtcaataatatcattt

SEQ ID NO: 264986 - DNA, 20 bp, Artificial Sequence
  Description of Artificial Sequence: Synthetic oligonucleotide
  Target: LAMA2; (-) strand; PAM type: YTN; PAM sequence: TTT
atttagtcaataatatcatt

SEQ ID NO: 264987 - DNA, 20 bp, Artificial Sequence
  Description of Artificial Sequence: Synthetic oligonucleotide
  Target: LAMA2; (-) strand; PAM type: YTN; PAM sequence: TTA
tttatttagtcaataatatc

SEQ ID NO: 264988 - DNA, 20 bp, Artificial Sequence
  Description of Artificial Sequence: Synthetic oligonucleotide
  Target: LAMA2; (-) strand; PAM type: YTN; PAM sequence: TTA
agttatttatttagtcaata

SEQ ID NO: 264989 - DNA, 20 bp, Artificial Sequence
  Description of Artificial Sequence: Synthetic oligonucleotide
  Target: LAMA2; (-) strand; PAM type: YTN; PAM sequence: CTA
atattaagttatttatttag

SEQ ID NO: 264990 - DNA, 20 bp, Artificial Sequence
  Description of Artificial Sequence: Synthetic oligonucleotide
  Target: LAMA2; (-) strand; PAM type: YTN; PAM sequence: TTC
atggatggctaatattaagt

SEQ ID NO: 264991 - DNA, 20 bp, Artificial Sequence
  Description of Artificial Sequence: Synthetic oligonucleotide
  Target: LAMA2; (-) strand; PAM type: YTN; PAM sequence: CTG
gaattcatggatggctaata

SEQ ID NO: 264992 - DNA, 20 bp, Artificial Sequence
  Description of Artificial Sequence: Synthetic oligonucleotide
  Target: LAMA2; (-) strand; PAM type: YTN; PAM sequence: TTC
tggaattcatggatggctaa

SEQ ID NO: 264993 - DNA, 20 bp, Artificial Sequence
  Description of Artificial Sequence: Synthetic oligonucleotide
  Target: LAMA2; (-) strand; PAM type: YTN; PAM sequence: TTT
ctggaattcatggatggcta

SEQ ID NO: 264994 - DNA, 20 bp, Artificial Sequence
  Description of Artificial Sequence: Synthetic oligonucleotide
  Target: LAMA2; (-) strand; PAM type: YTN; PAM sequence: TTA
tttctggaattcatggatgg

SEQ ID NO: 264995 - DNA, 20 bp, Artificial Sequence
  Description of Artificial Sequence: Synthetic oligonucleotide
  Target: LAMA2; (-) strand; PAM type: YTN; PAM sequence: CTA
aagcaagatagtaattattt

SEQ ID NO: 264996 - DNA, 20 bp, Artificial Sequence
  Description of Artificial Sequence: Synthetic oligonucleotide
  Target: LAMA2; (-) strand; PAM type: YTN; PAM sequence: TTG
atgaaaaaatagcatactaa

SEQ ID NO: 264997 - DNA, 20 bp, Artificial Sequence
  Description of Artificial Sequence: Synthetic oligonucleotide
  Target: LAMA2; (-) strand; PAM type: YTN; PAM sequence: TTG
tcaggcaagcagttgatgaa

SEQ ID NO: 264998 - DNA, 20 bp, Artificial Sequence
  Description of Artificial Sequence: Synthetic oligonucleotide
  Target: LAMA2; (-) strand; PAM type: YTN; PAM sequence: TTT
gtcaggcaagcagttgatga

SEQ ID NO: 264999 - DNA, 20 bp, Artificial Sequence
  Description of Artificial Sequence: Synthetic oligonucleotide
  Target: LAMA2; (-) strand; PAM type: YTN; PAM sequence: TTG
aatttgtcaggcaagcagtt

SEQ ID NO: 265000 - DNA, 20 bp, Artificial Sequence
  Description of Artificial Sequence: Synthetic oligonucleotide
  Target: LAMA2; (-) strand; PAM type: YTN; PAM sequence: CTA
ttgaatttgtcaggcaagca

SEQ ID NO: 265001 - DNA, 20 bp, Artificial Sequence
  Description of Artificial Sequence: Synthetic oligonucleotide
  Target: LAMA2; (-) strand; PAM type: YTN; PAM sequence: TTG
cctattgaatttgtcaggca

SEQ ID NO: 265002 - DNA, 20 bp, Artificial Sequence
  Description of Artificial Sequence: Synthetic oligonucleotide
  Target: LAMA2; (-) strand; PAM type: YTN; PAM sequence: CTC
aaattgcctattgaatttgt

SEQ ID NO: 265003 - DNA, 20 bp, Artificial Sequence
  Description of Artificial Sequence: Synthetic oligonucleotide
  Target: LAMA2; (-) strand; PAM type: YTN; PAM sequence: CTC
tcaaattgcctattgaattt

SEQ ID NO: 265004 - DNA, 20 bp, Artificial Sequence
  Description of Artificial Sequence: Synthetic oligonucleotide
  Target: LAMA2; (-) strand; PAM type: YTN; PAM sequence: TTC
ctctcaaattgcctattgaa

SEQ ID NO: 265005 - DNA, 20 bp, Artificial Sequence
  Description of Artificial Sequence: Synthetic oligonucleotide
  Target: LAMA2; (-) strand; PAM type: YTN; PAM sequence: CTT
cctctcaaattgcctattga

SEQ ID NO: 265006 - DNA, 20 bp, Artificial Sequence
  Description of Artificial Sequence: Synthetic oligonucleotide
  Target: LAMA2; (-) strand; PAM type: YTN; PAM sequence: TTA
accccttcctctcaaattgc

SEQ ID NO: 265007 - DNA, 20 bp, Artificial Sequence
  Description of Artificial Sequence: Synthetic oligonucleotide
  Target: LAMA2; (-) strand; PAM type: YTN; PAM sequence: TTA
agaatgtgtatagattaacc

SEQ ID NO: 265008 - DNA, 20 bp, Artificial Sequence
  Description of Artificial Sequence: Synthetic oligonucleotide
  Target: LAMA2; (-) strand; PAM type: YTN; PAM sequence: CTT
aagaatgtgtatagattaac

SEQ ID NO: 265009 - DNA, 20 bp, Artificial Sequence
  Description of Artificial Sequence: Synthetic oligonucleotide
  Target: LAMA2; (-) strand; PAM type: YTN; PAM sequence: TTG
cttaagaatgtgtatagatt

SEQ ID NO: 265010 - DNA, 20 bp, Artificial Sequence
  Description of Artificial Sequence: Synthetic oligonucleotide
  Target: LAMA2; (-) strand; PAM type: YTN; PAM sequence: CTT
gcttaagaatgtgtatagat

SEQ ID NO: 265011 - DNA, 20 bp, Artificial Sequence
  Description of Artificial Sequence: Synthetic oligonucleotide
  Target: LAMA2; (-) strand; PAM type: YTN; PAM sequence: TTC
ttgcttaagaatgtgtatag

SEQ ID NO: 265012 - DNA, 20 bp, Artificial Sequence
  Description of Artificial Sequence: Synthetic oligonucleotide
  Target: LAMA2; (-) strand; PAM type: YTN; PAM sequence: TTA
attcttgcttaagaatgtgt

SEQ ID NO: 265013 - DNA, 20 bp, Artificial Sequence
  Description of Artificial Sequence: Synthetic oligonucleotide
  Target: LAMA2; (-) strand; PAM type: YTN; PAM sequence: TTT
aattcttgcttaagaatgtg

SEQ ID NO: 265014 - DNA, 20 bp, Artificial Sequence
  Description of Artificial Sequence: Synthetic oligonucleotide
  Target: LAMA2; (-) strand; PAM type: YTN; PAM sequence: TTG
cataagacatatacatttaa

SEQ ID NO: 265015 - DNA, 20 bp, Artificial Sequence
  Description of Artificial Sequence: Synthetic oligonucleotide
  Target: LAMA2; (-) strand; PAM type: YTN; PAM sequence: CTA
aaaatgccagtgaagattgc

SEQ ID NO: 265016 - DNA, 20 bp, Artificial Sequence
  Description of Artificial Sequence: Synthetic oligonucleotide
  Target: LAMA2; (-) strand; PAM type: YTN; PAM sequence: CTG
tgctaaaaatgccagtgaag

SEQ ID NO: 265017 - DNA, 20 bp, Artificial Sequence
  Description of Artificial Sequence: Synthetic oligonucleotide
  Target: LAMA2; (-) strand; PAM type: YTN; PAM sequence: TTA
atcatataaagcaaatataa

SEQ ID NO: 265018 - DNA, 20 bp, Artificial Sequence
  Description of Artificial Sequence: Synthetic oligonucleotide
  Target: LAMA2; (-) strand; PAM type: YTN; PAM sequence: CTA
aattaatcatataaagcaaa

SEQ ID NO: 265019 - DNA, 20 bp, Artificial Sequence
  Description of Artificial Sequence: Synthetic oligonucleotide
  Target: LAMA2; (-) strand; PAM type: YTN; PAM sequence: TTC
taaattaatcatataaagca

SEQ ID NO: 265020 - DNA, 20 bp, Artificial Sequence
  Description of Artificial Sequence: Synthetic oligonucleotide
  Target: LAMA2; (-) strand; PAM type: YTN; PAM sequence: CTT
ctaaattaatcatataaagc

SEQ ID NO: 265021 - DNA, 20 bp, Artificial Sequence
  Description of Artificial Sequence: Synthetic oligonucleotide
  Target: LAMA2; (-) strand; PAM type: YTN; PAM sequence: TTA
taaatgcttctaaattaatc

SEQ ID NO: 265022 - DNA, 20 bp, Artificial Sequence
  Description of Artificial Sequence: Synthetic oligonucleotide
  Target: LAMA2; (-) strand; PAM type: YTN; PAM sequence: TTT
ataaatgcttctaaattaat

SEQ ID NO: 265023 - DNA, 20 bp, Artificial Sequence
  Description of Artificial Sequence: Synthetic oligonucleotide
  Target: LAMA2; (-) strand; PAM type: YTN; PAM sequence: TTA
tttataaatgcttctaaatt

SEQ ID NO: 265024 - DNA, 20 bp, Artificial Sequence
  Description of Artificial Sequence: Synthetic oligonucleotide
  Target: LAMA2; (-) strand; PAM type: YTN; PAM sequence: CTG
cattatttataaatgcttct

SEQ ID NO: 265025 - DNA, 20 bp, Artificial Sequence
  Description of Artificial Sequence: Synthetic oligonucleotide
  Target: LAMA2; (-) strand; PAM type: YTN; PAM sequence: TTA
aactgcattatttataaatg

SEQ ID NO: 265026 - DNA, 20 bp, Artificial Sequence
  Description of Artificial Sequence: Synthetic oligonucleotide
  Target: LAMA2; (-) strand; PAM type: YTN; PAM sequence: TTG
aaattaaactgcattattta

SEQ ID NO: 265027 - DNA, 20 bp, Artificial Sequence
  Description of Artificial Sequence: Synthetic oligonucleotide
  Target: LAMA2; (-) strand; PAM type: YTN; PAM sequence: CTA
acaaaattgaaattaaactg

SEQ ID NO: 265028 - DNA, 20 bp, Artificial Sequence
  Description of Artificial Sequence: Synthetic oligonucleotide
  Target: LAMA2; (-) strand; PAM type: YTN; PAM sequence: TTA
atcctaacaaaattgaaatt

SEQ ID NO: 265029 - DNA, 20 bp, Artificial Sequence
  Description of Artificial Sequence: Synthetic oligonucleotide
  Target: LAMA2; (-) strand; PAM type: YTN; PAM sequence: TTT
aatcctaacaaaattgaaat

SEQ ID NO: 265030 - DNA, 20 bp, Artificial Sequence
  Description of Artificial Sequence: Synthetic oligonucleotide
  Target: LAMA2; (-) strand; PAM type: YTN; PAM sequence: TTT
taatcctaacaaaattgaaa

SEQ ID NO: 265031 - DNA, 20 bp, Artificial Sequence
  Description of Artificial Sequence: Synthetic oligonucleotide
  Target: LAMA2; (-) strand; PAM type: YTN; PAM sequence: TTG
gtcaaaagaggacagtataa

SEQ ID NO: 265032 - DNA, 20 bp, Artificial Sequence
  Description of Artificial Sequence: Synthetic oligonucleotide
  Target: LAMA2; (-) strand; PAM type: YTN; PAM sequence: TTA
gagaacaaaaatagtcataa

SEQ ID NO: 265033 - DNA, 20 bp, Artificial Sequence
  Description of Artificial Sequence: Synthetic oligonucleotide
  Target: LAMA2; (-) strand; PAM type: YTN; PAM sequence: CTT
agagaacaaaaatagtcata

SEQ ID NO: 265034 - DNA, 20 bp, Artificial Sequence
  Description of Artificial Sequence: Synthetic oligonucleotide
  Target: LAMA2; (-) strand; PAM type: YTN; PAM sequence: TTC
ttagagaacaaaaatagtca

SEQ ID NO: 265035 - DNA, 20 bp, Artificial Sequence
  Description of Artificial Sequence: Synthetic oligonucleotide
  Target: LAMA2; (-) strand; PAM type: YTN; PAM sequence: TTA
gaattcttagagaacaaaaa

SEQ ID NO: 265036 - DNA, 20 bp, Artificial Sequence
  Description of Artificial Sequence: Synthetic oligonucleotide
  Target: LAMA2; (-) strand; PAM type: YTN; PAM sequence: TTT
agaattcttagagaacaaaa

SEQ ID NO: 265037 - DNA, 20 bp, Artificial Sequence
  Description of Artificial Sequence: Synthetic oligonucleotide
  Target: LAMA2; (-) strand; PAM type: YTN; PAM sequence: TTT
tagaattcttagagaacaaa

SEQ ID NO: 265038 - DNA, 20 bp, Artificial Sequence
  Description of Artificial Sequence: Synthetic oligonucleotide
  Target: LAMA2; (-) strand; PAM type: YTN; PAM sequence: CTT
ttagaattcttagagaacaa

SEQ ID NO: 265039 - DNA, 20 bp, Artificial Sequence
  Description of Artificial Sequence: Synthetic oligonucleotide
  Target: LAMA2; (-) strand; PAM type: YTN; PAM sequence: CTC
agaaaatagacatgctttta

SEQ ID NO: 265040 - DNA, 20 bp, Artificial Sequence
  Description of Artificial Sequence: Synthetic oligonucleotide
  Target: LAMA2; (-) strand; PAM type: YTN; PAM sequence: TTC
ctcagaaaatagacatgctt

SEQ ID NO: 265041 - DNA, 20 bp, Artificial Sequence
  Description of Artificial Sequence: Synthetic oligonucleotide
  Target: LAMA2; (-) strand; PAM type: YTN; PAM sequence: CTA
gggattcctcagaaaataga

SEQ ID NO: 265042 - DNA, 20 bp, Artificial Sequence
  Description of Artificial Sequence: Synthetic oligonucleotide
  Target: LAMA2; (-) strand; PAM type: YTN; PAM sequence: TTC
atctagggattcctcagaaa

SEQ ID NO: 265043 - DNA, 20 bp, Artificial Sequence
  Description of Artificial Sequence: Synthetic oligonucleotide
  Target: LAMA2; (-) strand; PAM type: YTN; PAM sequence: CTT
catctagggattcctcagaa

SEQ ID NO: 265044 - DNA, 20 bp, Artificial Sequence
  Description of Artificial Sequence: Synthetic oligonucleotide
  Target: LAMA2; (-) strand; PAM type: YTN; PAM sequence: TTA
cttcatctagggattcctca

SEQ ID NO: 265045 - DNA, 20 bp, Artificial Sequence
  Description of Artificial Sequence: Synthetic oligonucleotide
  Target: LAMA2; (-) strand; PAM type: YTN; PAM sequence: TTT
acttcatctagggattcctc

SEQ ID NO: 265046 - DNA, 20 bp, Artificial Sequence
  Description of Artificial Sequence: Synthetic oligonucleotide
  Target: LAMA2; (-) strand; PAM type: YTN; PAM sequence: TTT
tacttcatctagggattcct

SEQ ID NO: 265047 - DNA, 20 bp, Artificial Sequence
  Description of Artificial Sequence: Synthetic oligonucleotide
  Target: LAMA2; (-) strand; PAM type: YTN; PAM sequence: TTT
ttacttcatctagggattcc

SEQ ID NO: 265048 - DNA, 20 bp, Artificial Sequence
  Description of Artificial Sequence: Synthetic oligonucleotide
  Target: LAMA2; (-) strand; PAM type: YTN; PAM sequence: TTT
tttacttcatctagggattc

SEQ ID NO: 265049 - DNA, 20 bp, Artificial Sequence
  Description of Artificial Sequence: Synthetic oligonucleotide
  Target: LAMA2; (-) strand; PAM type: YTN; PAM sequence: TTA
ttttttacttcatctaggga

SEQ ID NO: 265050 - DNA, 20 bp, Artificial Sequence
  Description of Artificial Sequence: Synthetic oligonucleotide
  Target: LAMA2; (-) strand; PAM type: YTN; PAM sequence: TTT
attttttacttcatctaggg

SEQ ID NO: 265051 - DNA, 20 bp, Artificial Sequence
  Description of Artificial Sequence: Synthetic oligonucleotide
  Target: LAMA2; (-) strand; PAM type: YTN; PAM sequence: TTA
atggaagtatttatttttta

SEQ ID NO: 265052 - DNA, 20 bp, Artificial Sequence
  Description of Artificial Sequence: Synthetic oligonucleotide
  Target: LAMA2; (-) strand; PAM type: YTN; PAM sequence: TTT
aatggaagtatttatttttt

SEQ ID NO: 265053 - DNA, 20 bp, Artificial Sequence
  Description of Artificial Sequence: Synthetic oligonucleotide
  Target: LAMA2; (-) strand; PAM type: YTN; PAM sequence: TTG
tttaatggaagtatttattt

SEQ ID NO: 265054 - DNA, 20 bp, Artificial Sequence
  Description of Artificial Sequence: Synthetic oligonucleotide
  Target: LAMA2; (-) strand; PAM type: YTN; PAM sequence: TTT
gtttaatggaagtatttatt

SEQ ID NO: 265055 - DNA, 20 bp, Artificial Sequence
  Description of Artificial Sequence: Synthetic oligonucleotide
  Target: LAMA2; (-) strand; PAM type: YTN; PAM sequence: CTG
tgtttgtttaatggaagtat

SEQ ID NO: 265056 - DNA, 20 bp, Artificial Sequence
  Description of Artificial Sequence: Synthetic oligonucleotide
  Target: LAMA2; (-) strand; PAM type: YTN; PAM sequence: TTA
taccagctgtgtttgtttaa

SEQ ID NO: 265057 - DNA, 20 bp, Artificial Sequence
  Description of Artificial Sequence: Synthetic oligonucleotide
  Target: LAMA2; (-) strand; PAM type: YTN; PAM sequence: TTT
ataccagctgtgtttgttta

SEQ ID NO: 265058 - DNA, 20 bp, Artificial Sequence
  Description of Artificial Sequence: Synthetic oligonucleotide
  Target: LAMA2; (-) strand; PAM type: YTN; PAM sequence: TTG
gagcataacggtttatacca

SEQ ID NO: 265059 - DNA, 20 bp, Artificial Sequence
  Description of Artificial Sequence: Synthetic oligonucleotide
  Target: LAMA2; (-) strand; PAM type: YTN; PAM sequence: TTT
ggagcataacggtttatacc

SEQ ID NO: 265060 - DNA, 20 bp, Artificial Sequence
  Description of Artificial Sequence: Synthetic oligonucleotide
  Target: LAMA2; (-) strand; PAM type: YTN; PAM sequence: TTC
catgaaagaaaatataaaaa

SEQ ID NO: 265061 - DNA, 20 bp, Artificial Sequence
  Description of Artificial Sequence: Synthetic oligonucleotide
  Target: LAMA2; (-) strand; PAM type: YTN; PAM sequence: TTG
tgagttccatgaaagaaaat

SEQ ID NO: 265062 - DNA, 20 bp, Artificial Sequence
  Description of Artificial Sequence: Synthetic oligonucleotide
  Target: LAMA2; (-) strand; PAM type: YTN; PAM sequence: TTC
aaaagttgtgagttccatga

SEQ ID NO: 265063 - DNA, 20 bp, Artificial Sequence
  Description of Artificial Sequence: Synthetic oligonucleotide
  Target: LAMA2; (-) strand; PAM type: YTN; PAM sequence: CTA
aattcaaaagttgtgagttc

SEQ ID NO: 265064 - DNA, 20 bp, Artificial Sequence
  Description of Artificial Sequence: Synthetic oligonucleotide
  Target: LAMA2; (-) strand; PAM type: YTN; PAM sequence: TTG
cctaaattcaaaagttgtga

SEQ ID NO: 265065 - DNA, 20 bp, Artificial Sequence
  Description of Artificial Sequence: Synthetic oligonucleotide
  Target: LAMA2; (-) strand; PAM type: YTN; PAM sequence: TTC
aaagatgaacagagttgcct

SEQ ID NO: 265066 - DNA, 20 bp, Artificial Sequence
  Description of Artificial Sequence: Synthetic oligonucleotide
  Target: LAMA2; (-) strand; PAM type: YTN; PAM sequence: TTT
caaagatgaacagagttgcc

SEQ ID NO: 265067 - DNA, 20 bp, Artificial Sequence
  Description of Artificial Sequence: Synthetic oligonucleotide
  Target: LAMA2; (-) strand; PAM type: YTN; PAM sequence: CTC
atgaggccatttcaaagatg

SEQ ID NO: 265068 - DNA, 20 bp, Artificial Sequence
  Description of Artificial Sequence: Synthetic oligonucleotide
  Target: LAMA2; (-) strand; PAM type: YTN; PAM sequence: TTG
cctcatgaggccatttcaaa

SEQ ID NO: 265069 - DNA, 20 bp, Artificial Sequence
  Description of Artificial Sequence: Synthetic oligonucleotide
  Target: LAMA2; (-) strand; PAM type: YTN; PAM sequence: TTT
gcctcatgaggccatttcaa

SEQ ID NO: 265070 - DNA, 20 bp, Artificial Sequence
  Description of Artificial Sequence: Synthetic oligonucleotide
  Target: LAMA2; (-) strand; PAM type: YTN; PAM sequence: TTA
tttgcctcatgaggccattt

SEQ ID NO: 265071 - DNA, 20 bp, Artificial Sequence
  Description of Artificial Sequence: Synthetic oligonucleotide
  Target: LAMA2; (-) strand; PAM type: YTN; PAM sequence: CTT
atttgcctcatgaggccatt

SEQ ID NO: 265072 - DNA, 20 bp, Artificial Sequence
  Description of Artificial Sequence: Synthetic oligonucleotide
  Target: LAMA2; (-) strand; PAM type: YTN; PAM sequence: TTC
ttatttgcctcatgaggcca

SEQ ID NO: 265073 - DNA, 20 bp, Artificial Sequence
  Description of Artificial Sequence: Synthetic oligonucleotide
  Target: LAMA2; (-) strand; PAM type: YTN; PAM sequence: TTT
cttatttgcctcatgaggcc

SEQ ID NO: 265074 - DNA, 20 bp, Artificial Sequence
  Description of Artificial Sequence: Synthetic oligonucleotide
  Target: LAMA2; (-) strand; PAM type: YTN; PAM sequence: CTA
tttcttatttgcctcatgag

SEQ ID NO: 265075 - DNA, 20 bp, Artificial Sequence
  Description of Artificial Sequence: Synthetic oligonucleotide
  Target: LAMA2; (-) strand; PAM type: YTN; PAM sequence: CTG
tgtgggagtaataacagcta

SEQ ID NO: 265076 - DNA, 20 bp, Artificial Sequence
  Description of Artificial Sequence: Synthetic oligonucleotide
  Target: LAMA2; (-) strand; PAM type: YTN; PAM sequence: TTA
ctgtgtgggagtaataacag

SEQ ID NO: 265077 - DNA, 20 bp, Artificial Sequence
  Description of Artificial Sequence: Synthetic oligonucleotide
  Target: LAMA2; (-) strand; PAM type: YTN; PAM sequence: CTT
actgtgtgggagtaataaca

SEQ ID NO: 265078 - DNA, 20 bp, Artificial Sequence
  Description of Artificial Sequence: Synthetic oligonucleotide
  Target: LAMA2; (-) strand; PAM type: YTN; PAM sequence: CTC
acttactgtgtgggagtaat

SEQ ID NO: 265079 - DNA, 20 bp, Artificial Sequence
  Description of Artificial Sequence: Synthetic oligonucleotide
  Target: LAMA2; (-) strand; PAM type: YTN; PAM sequence: TTC
ctcacttactgtgtgggagt

SEQ ID NO: 265080 - DNA, 20 bp, Artificial Sequence
  Description of Artificial Sequence: Synthetic oligonucleotide
  Target: LAMA2; (-) strand; PAM type: YTN; PAM sequence: TTT
cctcacttactgtgtgggag

SEQ ID NO: 265081 - DNA, 20 bp, Artificial Sequence
  Description of Artificial Sequence: Synthetic oligonucleotide
  Target: LAMA2; (-) strand; PAM type: YTN; PAM sequence: TTC
agtttcctcacttactgtgt

SEQ ID NO: 265082 - DNA, 20 bp, Artificial Sequence
  Description of Artificial Sequence: Synthetic oligonucleotide
  Target: LAMA2; (-) strand; PAM type: YTN; PAM sequence: CTT
cagtttcctcacttactgtg

SEQ ID NO: 265083 - DNA, 20 bp, Artificial Sequence
  Description of Artificial Sequence: Synthetic oligonucleotide
  Target: LAMA2; (-) strand; PAM type: YTN; PAM sequence: TTG
cacataaaagagaaatcagt

SEQ ID NO: 265084 - DNA, 20 bp, Artificial Sequence
  Description of Artificial Sequence: Synthetic oligonucleotide
  Target: LAMA2; (-) strand; PAM type: YTN; PAM sequence: CTG
agagccatattgcacataaa

SEQ ID NO: 265085 - DNA, 20 bp, Artificial Sequence
  Description of Artificial Sequence: Synthetic oligonucleotide
  Target: LAMA2; (-) strand; PAM type: YTN; PAM sequence: CTG
tataatggatatgatatgaa

SEQ ID NO: 265086 - DNA, 20 bp, Artificial Sequence
  Description of Artificial Sequence: Synthetic oligonucleotide
  Target: LAMA2; (-) strand; PAM type: YTN; PAM sequence: TTG
cactgtataatggatatgat

SEQ ID NO: 265087 - DNA, 20 bp, Artificial Sequence
  Description of Artificial Sequence: Synthetic oligonucleotide
  Target: LAMA2; (-) strand; PAM type: YTN; PAM sequence: CTA
taccaaggtagagggcattg

SEQ ID NO: 265088 - DNA, 20 bp, Artificial Sequence
  Description of Artificial Sequence: Synthetic oligonucleotide
  Target: LAMA2; (-) strand; PAM type: YTN; PAM sequence: TTG
ccactataccaaggtagagg

SEQ ID NO: 265089 - DNA, 20 bp, Artificial Sequence
  Description of Artificial Sequence: Synthetic oligonucleotide
  Target: LAMA2; (-) strand; PAM type: YTN; PAM sequence: CTT
gccactataccaaggtagag

SEQ ID NO: 265090 - DNA, 20 bp, Artificial Sequence
  Description of Artificial Sequence: Synthetic oligonucleotide
  Target: LAMA2; (-) strand; PAM type: YTN; PAM sequence: TTC
atgcttgccactataccaag

SEQ ID NO: 265091 - DNA, 20 bp, Artificial Sequence
  Description of Artificial Sequence: Synthetic oligonucleotide
  Target: LAMA2; (-) strand; PAM type: YTN; PAM sequence: CTG
cagagttcatgcttgccact

SEQ ID NO: 265092 - DNA, 20 bp, Artificial Sequence
  Description of Artificial Sequence: Synthetic oligonucleotide
  Target: LAMA2; (-) strand; PAM type: YTN; PAM sequence: CTG
actgcagagttcatgcttgc

SEQ ID NO: 265093 - DNA, 20 bp, Artificial Sequence
  Description of Artificial Sequence: Synthetic oligonucleotide
  Target: LAMA2; (-) strand; PAM type: YTN; PAM sequence: CTC
tgactgcagagttcatgctt

SEQ ID NO: 265094 - DNA, 20 bp, Artificial Sequence
  Description of Artificial Sequence: Synthetic oligonucleotide
  Target: LAMA2; (-) strand; PAM type: YTN; PAM sequence: TTG
aatcaaggcactctgactgc

SEQ ID NO: 265095 - DNA, 20 bp, Artificial Sequence
  Description of Artificial Sequence: Synthetic oligonucleotide
  Target: LAMA2; (-) strand; PAM type: YTN; PAM sequence: TTT
gaatcaaggcactctgactg

SEQ ID NO: 265096 - DNA, 20 bp, Artificial Sequence
  Description of Artificial Sequence: Synthetic oligonucleotide
  Target: LAMA2; (-) strand; PAM type: YTN; PAM sequence: CTA
ccagtaaggggtgaagccag

SEQ ID NO: 265097 - DNA, 20 bp, Artificial Sequence
  Description of Artificial Sequence: Synthetic oligonucleotide
  Target: LAMA2; (-) strand; PAM type: YTN; PAM sequence: CTC
acactaccagtaaggggtga

SEQ ID NO: 265098 - DNA, 20 bp, Artificial Sequence
  Description of Artificial Sequence: Synthetic oligonucleotide
  Target: LAMA2; (-) strand; PAM type: YTN; PAM sequence: TTG
agtaggctcacactaccagt

SEQ ID NO: 265099 - DNA, 20 bp, Artificial Sequence
  Description of Artificial Sequence: Synthetic oligonucleotide
  Target: LAMA2; (-) strand; PAM type: YTN; PAM sequence: TTA
aataaattgagtaggctcac

SEQ ID NO: 265100 - DNA, 20 bp, Artificial Sequence
  Description of Artificial Sequence: Synthetic oligonucleotide
  Target: LAMA2; (-) strand; PAM type: YTN; PAM sequence: TTC
aggttaaataaattgagtag

SEQ ID NO: 265101 - DNA, 20 bp, Artificial Sequence
  Description of Artificial Sequence: Synthetic oligonucleotide
  Target: LAMA2; (-) strand; PAM type: YTN; PAM sequence: CTC
attcaggttaaataaattga

SEQ ID NO: 265102 - DNA, 20 bp, Artificial Sequence
  Description of Artificial Sequence: Synthetic oligonucleotide
  Target: LAMA2; (-) strand; PAM type: YTN; PAM sequence: CTA
agacctcattcaggttaaat

SEQ ID NO: 265103 - DNA, 20 bp, Artificial Sequence
  Description of Artificial Sequence: Synthetic oligonucleotide
  Target: LAMA2; (-) strand; PAM type: YTN; PAM sequence: TTA
tataaatgaagaaactaaga

SEQ ID NO: 265104 - DNA, 20 bp, Artificial Sequence
  Description of Artificial Sequence: Synthetic oligonucleotide
  Target: LAMA2; (-) strand; PAM type: YTN; PAM sequence: TTC
attatataaatgaagaaact

SEQ ID NO: 265105 - DNA, 20 bp, Artificial Sequence
  Description of Artificial Sequence: Synthetic oligonucleotide
  Target: LAMA2; (-) strand; PAM type: YTN; PAM sequence: TTT
cattatataaatgaagaaac

SEQ ID NO: 265106 - DNA, 20 bp, Artificial Sequence
  Description of Artificial Sequence: Synthetic oligonucleotide
  Target: LAMA2; (-) strand; PAM type: YTN; PAM sequence: TTT
tcattatataaatgaagaaa

SEQ ID NO: 265107 - DNA, 20 bp, Artificial Sequence
  Description of Artificial Sequence: Synthetic oligonucleotide
  Target: LAMA2; (-) strand; PAM type: YTN; PAM sequence: TTG
ttttcattatataaatgaag

SEQ ID NO: 265108 - DNA, 20 bp, Artificial Sequence
  Description of Artificial Sequence: Synthetic oligonucleotide
  Target: LAMA2; (-) strand; PAM type: YTN; PAM sequence: TTA
ttgttttcattatataaatg

SEQ ID NO: 265109 - DNA, 20 bp, Artificial Sequence
  Description of Artificial Sequence: Synthetic oligonucleotide
  Target: LAMA2; (-) strand; PAM type: YTN; PAM sequence: CTA
ttattgttttcattatataa

SEQ ID NO: 265110 - DNA, 20 bp, Artificial Sequence
  Description of Artificial Sequence: Synthetic oligonucleotide
  Target: LAMA2; (-) strand; PAM type: YTN; PAM sequence: CTG
tgagtagccactattattgt

SEQ ID NO: 265111 - DNA, 20 bp, Artificial Sequence
  Description of Artificial Sequence: Synthetic oligonucleotide
  Target: LAMA2; (-) strand; PAM type: YTN; PAM sequence: CTC
tgtgagtagccactattatt

SEQ ID NO: 265112 - DNA, 20 bp, Artificial Sequence
  Description of Artificial Sequence: Synthetic oligonucleotide
  Target: LAMA2; (-) strand; PAM type: YTN; PAM sequence: TTA
caaaaactctgtgagtagcc

SEQ ID NO: 265113 - DNA, 20 bp, Artificial Sequence
  Description of Artificial Sequence: Synthetic oligonucleotide
  Target: LAMA2; (-) strand; PAM type: YTN; PAM sequence: CTT
acaaaaactctgtgagtagc

SEQ ID NO: 265114 - DNA, 20 bp, Artificial Sequence
  Description of Artificial Sequence: Synthetic oligonucleotide
  Target: LAMA2; (-) strand; PAM type: YTN; PAM sequence: TTC
atcaaatccttacaaaaact

SEQ ID NO: 265115 - DNA, 20 bp, Artificial Sequence
  Description of Artificial Sequence: Synthetic oligonucleotide
  Target: LAMA2; (-) strand; PAM type: YTN; PAM sequence: TTT
catcaaatccttacaaaaac

SEQ ID NO: 265116 - DNA, 20 bp, Artificial Sequence
  Description of Artificial Sequence: Synthetic oligonucleotide
  Target: LAMA2; (-) strand; PAM type: YTN; PAM sequence: TTG
agtatttcatcaaatcctta

SEQ ID NO: 265117 - DNA, 20 bp, Artificial Sequence
  Description of Artificial Sequence: Synthetic oligonucleotide
  Target: LAMA2; (-) strand; PAM type: YTN; PAM sequence: TTA
ttgagtatttcatcaaatcc

SEQ ID NO: 265118 - DNA, 20 bp, Artificial Sequence
  Description of Artificial Sequence: Synthetic oligonucleotide
  Target: LAMA2; (-) strand; PAM type: YTN; PAM sequence: TTT
attgagtatttcatcaaatc

SEQ ID NO: 265119 - DNA, 20 bp, Artificial Sequence
  Description of Artificial Sequence: Synthetic oligonucleotide
  Target: LAMA2; (-) strand; PAM type: YTN; PAM sequence: TTT
tattgagtatttcatcaaat

SEQ ID NO: 265120 - DNA, 20 bp, Artificial Sequence
  Description of Artificial Sequence: Synthetic oligonucleotide
  Target: LAMA2; (-) strand; PAM type: YTN; PAM sequence: CTT
ttattgagtatttcatcaaa

SEQ ID NO: 265121 - DNA, 20 bp, Artificial Sequence
  Description of Artificial Sequence: Synthetic oligonucleotide
  Target: LAMA2; (-) strand; PAM type: YTN; PAM sequence: CTA
agccttttattgagtatttc

SEQ ID NO: 265122 - DNA, 20 bp, Artificial Sequence
  Description of Artificial Sequence: Synthetic oligonucleotide
  Target: LAMA2; (-) strand; PAM type: YTN; PAM sequence: TTC
taagccttttattgagtatt

SEQ ID NO: 265123 - DNA, 20 bp, Artificial Sequence
  Description of Artificial Sequence: Synthetic oligonucleotide
  Target: LAMA2; (-) strand; PAM type: YTN; PAM sequence: CTA
agtaatgttctaagcctttt

SEQ ID NO: 265124 - DNA, 20 bp, Artificial Sequence
  Description of Artificial Sequence: Synthetic oligonucleotide
  Target: LAMA2; (-) strand; PAM type: YTN; PAM sequence: TTA
tgaagcgtaccatgcactaa

SEQ ID NO: 265125 - DNA, 20 bp, Artificial Sequence
  Description of Artificial Sequence: Synthetic oligonucleotide
  Target: LAMA2; (-) strand; PAM type: YTN; PAM sequence: TTT
atgaagcgtaccatgcacta

SEQ ID NO: 265126 - DNA, 20 bp, Artificial Sequence
  Description of Artificial Sequence: Synthetic oligonucleotide
  Target: LAMA2; (-) strand; PAM type: YTN; PAM sequence: TTT
tatgaagcgtaccatgcact

SEQ ID NO: 265127 - DNA, 20 bp, Artificial Sequence
  Description of Artificial Sequence: Synthetic oligonucleotide
  Target: LAMA2; (-) strand; PAM type: YTN; PAM sequence: CTT
ttatgaagcgtaccatgcac

SEQ ID NO: 265128 - DNA, 20 bp, Artificial Sequence
  Description of Artificial Sequence: Synthetic oligonucleotide
  Target: LAMA2; (-) strand; PAM type: YTN; PAM sequence: TTG
cttttatgaagcgtaccatg

SEQ ID NO: 265129 - DNA, 20 bp, Artificial Sequence
  Description of Artificial Sequence: Synthetic oligonucleotide
  Target: LAMA2; (-) strand; PAM type: YTN; PAM sequence: TTA
tcataattgcttttatgaag

SEQ ID NO: 265130 - DNA, 20 bp, Artificial Sequence
  Description of Artificial Sequence: Synthetic oligonucleotide
  Target: LAMA2; (-) strand; PAM type: YTN; PAM sequence: TTA
tgatcatcattatcataatt

SEQ ID NO: 265131 - DNA, 20 bp, Artificial Sequence
  Description of Artificial Sequence: Synthetic oligonucleotide
  Target: LAMA2; (-) strand; PAM type: YTN; PAM sequence: TTT
atgatcatcattatcataat

SEQ ID NO: 265132 - DNA, 20 bp, Artificial Sequence
  Description of Artificial Sequence: Synthetic oligonucleotide
  Target: LAMA2; (-) strand; PAM type: YTN; PAM sequence: CTT
tatgatcatcattatcataa

SEQ ID NO: 265133 - DNA, 20 bp, Artificial Sequence
  Description of Artificial Sequence: Synthetic oligonucleotide
  Target: LAMA2; (-) strand; PAM type: YTN; PAM sequence: TTA
tcatctttatgatcatcatt

SEQ ID NO: 265134 - DNA, 20 bp, Artificial Sequence
  Description of Artificial Sequence: Synthetic oligonucleotide
  Target: LAMA2; (-) strand; PAM type: YTN; PAM sequence: CTA
taaatggtagataatgtgta

SEQ ID NO: 265135 - DNA, 20 bp, Artificial Sequence
  Description of Artificial Sequence: Synthetic oligonucleotide
  Target: LAMA2; (-) strand; PAM type: YTN; PAM sequence: TTC
gactataaatggtagataat

SEQ ID NO: 265136 - DNA, 20 bp, Artificial Sequence
  Description of Artificial Sequence: Synthetic oligonucleotide
  Target: LAMA2; (-) strand; PAM type: YTN; PAM sequence: CTT
cgactataaatggtagataa

SEQ ID NO: 265137 - DNA, 20 bp, Artificial Sequence
  Description of Artificial Sequence: Synthetic oligonucleotide
  Target: LAMA2; (-) strand; PAM type: YTN; PAM sequence: TTC
ttcgactataaatggtagat

SEQ ID NO: 265138 - DNA, 20 bp, Artificial Sequence
  Description of Artificial Sequence: Synthetic oligonucleotide
  Target: LAMA2; (-) strand; PAM type: YTN; PAM sequence: TTG
gttcttcgactataaatggt

SEQ ID NO: 265139 - DNA, 20 bp, Artificial Sequence
  Description of Artificial Sequence: Synthetic oligonucleotide
  Target: LAMA2; (-) strand; PAM type: YTN; PAM sequence: CTG
attggttcttcgactataaa

SEQ ID NO: 265140 - DNA, 20 bp, Artificial Sequence
  Description of Artificial Sequence: Synthetic oligonucleotide
  Target: LAMA2; (-) strand; PAM type: YTN; PAM sequence: TTA
tcaactgattggttcttcga

SEQ ID NO: 265141 - DNA, 20 bp, Artificial Sequence
  Description of Artificial Sequence: Synthetic oligonucleotide
  Target: LAMA2; (-) strand; PAM type: YTN; PAM sequence: TTA
attatcaactgattggttct

SEQ ID NO: 265142 - DNA, 20 bp, Artificial Sequence
  Description of Artificial Sequence: Synthetic oligonucleotide
  Target: LAMA2; (-) strand; PAM type: YTN; PAM sequence: TTG
attaattatcaactgattgg

SEQ ID NO: 265143 - DNA, 20 bp, Artificial Sequence
  Description of Artificial Sequence: Synthetic oligonucleotide
  Target: LAMA2; (-) strand; PAM type: YTN; PAM sequence: TTT
gattaattatcaactgattg

SEQ ID NO: 265144 - DNA, 20 bp, Artificial Sequence
  Description of Artificial Sequence: Synthetic oligonucleotide
  Target: LAMA2; (-) strand; PAM type: YTN; PAM sequence: TTT
tgattaattatcaactgatt

SEQ ID NO: 265145 - DNA, 20 bp, Artificial Sequence
  Description of Artificial Sequence: Synthetic oligonucleotide
  Target: LAMA2; (-) strand; PAM type: YTN; PAM sequence: TTT
ttgattaattatcaactgat

SEQ ID NO: 265146 - DNA, 20 bp, Artificial Sequence
  Description of Artificial Sequence: Synthetic oligonucleotide
  Target: LAMA2; (-) strand; PAM type: YTN; PAM sequence: TTT
tttgattaattatcaactga

SEQ ID NO: 265147 - DNA, 20 bp, Artificial Sequence
  Description of Artificial Sequence: Synthetic oligonucleotide
  Target: LAMA2; (-) strand; PAM type: YTN; PAM sequence: TTA
ttttttgattaattatcaac

SEQ ID NO: 265148 - DNA, 20 bp, Artificial Sequence
  Description of Artificial Sequence: Synthetic oligonucleotide
  Target: LAMA2; (-) strand; PAM type: YTN; PAM sequence: CTT
attttttgattaattatcaa

SEQ ID NO: 265149 - DNA, 20 bp, Artificial Sequence
  Description of Artificial Sequence: Synthetic oligonucleotide
  Target: LAMA2; (-) strand; PAM type: YTN; PAM sequence: TTA
cttattttttgattaattat

SEQ ID NO: 265150 - DNA, 20 bp, Artificial Sequence
  Description of Artificial Sequence: Synthetic oligonucleotide
  Target: LAMA2; (-) strand; PAM type: YTN; PAM sequence: TTT
acttattttttgattaatta

SEQ ID NO: 265151 - DNA, 20 bp, Artificial Sequence
  Description of Artificial Sequence: Synthetic oligonucleotide
  Target: LAMA2; (-) strand; PAM type: YTN; PAM sequence: TTT
tacttattttttgattaatt

SEQ ID NO: 265152 - DNA, 20 bp, Artificial Sequence
  Description of Artificial Sequence: Synthetic oligonucleotide
  Target: LAMA2; (-) strand; PAM type: YTN; PAM sequence: TTT
ttacttattttttgattaat

SEQ ID NO: 265153 - DNA, 20 bp, Artificial Sequence
  Description of Artificial Sequence: Synthetic oligonucleotide
  Target: LAMA2; (-) strand; PAM type: YTN; PAM sequence: TTT
tttacttattttttgattaa

SEQ ID NO: 265154 - DNA, 20 bp, Artificial Sequence
  Description of Artificial Sequence: Synthetic oligonucleotide
  Target: LAMA2; (-) strand; PAM type: YTN; PAM sequence: TTT
ttttacttattttttgatta

SEQ ID NO: 265155 - DNA, 20 bp, Artificial Sequence
  Description of Artificial Sequence: Synthetic oligonucleotide
  Target: LAMA2; (-) strand; PAM type: YTN; PAM sequence: TTT
tttttacttattttttgatt

SEQ ID NO: 265156 - DNA, 20 bp, Artificial Sequence
  Description of Artificial Sequence: Synthetic oligonucleotide
  Target: LAMA2; (-) strand; PAM type: YTN; PAM sequence: CTA
gacatgaattttttttactt

SEQ ID NO: 265157 - DNA, 20 bp, Artificial Sequence
  Description of Artificial Sequence: Synthetic oligonucleotide
  Target: LAMA2; (-) strand; PAM type: YTN; PAM sequence: CTA
gcatagcgctagacatgaat

SEQ ID NO: 265158 - DNA, 20 bp, Artificial Sequence
  Description of Artificial Sequence: Synthetic oligonucleotide
  Target: LAMA2; (-) strand; PAM type: YTN; PAM sequence: CTG
agacagtaagaaaatctagc

SEQ ID NO: 265159 - DNA, 20 bp, Artificial Sequence
  Description of Artificial Sequence: Synthetic oligonucleotide
  Target: LAMA2; (-) strand; PAM type: YTN; PAM sequence: TTA
caacatccgaaatggactga

SEQ ID NO: 265160 - DNA, 20 bp, Artificial Sequence
  Description of Artificial Sequence: Synthetic oligonucleotide
  Target: LAMA2; (-) strand; PAM type: YTN; PAM sequence: TTG
ttacaacatccgaaatggac

SEQ ID NO: 265161 - DNA, 20 bp, Artificial Sequence
  Description of Artificial Sequence: Synthetic oligonucleotide
  Target: LAMA2; (-) strand; PAM type: YTN; PAM sequence: TTT
gttacaacatccgaaatgga

SEQ ID NO: 265162 - DNA, 20 bp, Artificial Sequence
  Description of Artificial Sequence: Synthetic oligonucleotide
  Target: LAMA2; (-) strand; PAM type: YTN; PAM sequence: TTT
tgttacaacatccgaaatgg

SEQ ID NO: 265163 - DNA, 20 bp, Artificial Sequence
  Description of Artificial Sequence: Synthetic oligonucleotide
  Target: LAMA2; (-) strand; PAM type: YTN; PAM sequence: TTA
tgatattttgttacaacatc

SEQ ID NO: 265164 - DNA, 20 bp, Artificial Sequence
  Description of Artificial Sequence: Synthetic oligonucleotide
  Target: LAMA2; (-) strand; PAM type: YTN; PAM sequence: TTT
atgatattttgttacaacat

SEQ ID NO: 265165 - DNA, 20 bp, Artificial Sequence
  Description of Artificial Sequence: Synthetic oligonucleotide
  Target: LAMA2; (-) strand; PAM type: YTN; PAM sequence: CTA
cccagtttatgatattttgt

SEQ ID NO: 265166 - DNA, 20 bp, Artificial Sequence
  Description of Artificial Sequence: Synthetic oligonucleotide
  Target: LAMA2; (-) strand; PAM type: YTN; PAM sequence: TTA
taagctacccagtttatgat

SEQ ID NO: 265167 - DNA, 20 bp, Artificial Sequence
  Description of Artificial Sequence: Synthetic oligonucleotide
  Target: LAMA2; (-) strand; PAM type: YTN; PAM sequence: TTT
ataagctacccagtttatga

SEQ ID NO: 265168 - DNA, 20 bp, Artificial Sequence
  Description of Artificial Sequence: Synthetic oligonucleotide
  Target: LAMA2; (-) strand; PAM type: YTN; PAM sequence: TTA
tttataagctacccagttta

SEQ ID NO: 265169 - DNA, 20 bp, Artificial Sequence
  Description of Artificial Sequence: Synthetic oligonucleotide
  Target: LAMA2; (-) strand; PAM type: YTN; PAM sequence: CTG
ttatttataagctacccagt

SEQ ID NO: 265170 - DNA, 20 bp, Artificial Sequence
  Description of Artificial Sequence: Synthetic oligonucleotide
  Target: LAMA2; (-) strand; PAM type: YTN; PAM sequence: TTC
tgttatttataagctaccca

SEQ ID NO: 265171 - DNA, 20 bp, Artificial Sequence
  Description of Artificial Sequence: Synthetic oligonucleotide
  Target: LAMA2; (-) strand; PAM type: YTN; PAM sequence: TTT
ctgttatttataagctaccc

SEQ ID NO: 265172 - DNA, 20 bp, Artificial Sequence
  Description of Artificial Sequence: Synthetic oligonucleotide
  Target: LAMA2; (-) strand; PAM type: YTN; PAM sequence: CTG
tgggaaataagtttctgtta

SEQ ID NO: 265173 - DNA, 20 bp, Artificial Sequence
  Description of Artificial Sequence: Synthetic oligonucleotide
  Target: LAMA2; (-) strand; PAM type: YTN; PAM sequence: TTC
agaactgtgggaaataagtt

SEQ ID NO: 265174 - DNA, 20 bp, Artificial Sequence
  Description of Artificial Sequence: Synthetic oligonucleotide
  Target: LAMA2; (-) strand; PAM type: YTN; PAM sequence: CTT
cagaactgtgggaaataagt

SEQ ID NO: 265175 - DNA, 20 bp, Artificial Sequence
  Description of Artificial Sequence: Synthetic oligonucleotide
  Target: LAMA2; (-) strand; PAM type: YTN; PAM sequence: TTC
ccagccttcagaactgtggg

SEQ ID NO: 265176 - DNA, 20 bp, Artificial Sequence
  Description of Artificial Sequence: Synthetic oligonucleotide
  Target: LAMA2; (-) strand; PAM type: YTN; PAM sequence: CTT
cccagccttcagaactgtgg

SEQ ID NO: 265177 - DNA, 20 bp, Artificial Sequence
  Description of Artificial Sequence: Synthetic oligonucleotide
  Target: LAMA2; (-) strand; PAM type: YTN; PAM sequence: TTG
gacttcccagccttcagaac

SEQ ID NO: 265178 - DNA, 20 bp, Artificial Sequence
  Description of Artificial Sequence: Synthetic oligonucleotide
  Target: LAMA2; (-) strand; PAM type: YTN; PAM sequence: CTT
ggacttcccagccttcagaa

SEQ ID NO: 265179 - DNA, 20 bp, Artificial Sequence
  Description of Artificial Sequence: Synthetic oligonucleotide
  Target: LAMA2; (-) strand; PAM type: YTN; PAM sequence: TTG
atcttggacttcccagcctt

SEQ ID NO: 265180 - DNA, 20 bp, Artificial Sequence
  Description of Artificial Sequence: Synthetic oligonucleotide
  Target: LAMA2; (-) strand; PAM type: YTN; PAM sequence: CTT
gatcttggacttcccagcct

SEQ ID NO: 265181 - DNA, 20 bp, Artificial Sequence
  Description of Artificial Sequence: Synthetic oligonucleotide
  Target: LAMA2; (-) strand; PAM type: YTN; PAM sequence: CTG
gagacttgatcttggacttc

SEQ ID NO: 265182 - DNA, 20 bp, Artificial Sequence
  Description of Artificial Sequence: Synthetic oligonucleotide
  Target: LAMA2; (-) strand; PAM type: YTN; PAM sequence: TTG
ctggagacttgatcttggac

SEQ ID NO: 265183 - DNA, 20 bp, Artificial Sequence
  Description of Artificial Sequence: Synthetic oligonucleotide
  Target: LAMA2; (-) strand; PAM type: YTN; PAM sequence: TTT
gctggagacttgatcttgga

SEQ ID NO: 265184 - DNA, 20 bp, Artificial Sequence
  Description of Artificial Sequence: Synthetic oligonucleotide
  Target: LAMA2; (-) strand; PAM type: YTN; PAM sequence: CTT
tgctggagacttgatcttgg

SEQ ID NO: 265185 - DNA, 20 bp, Artificial Sequence
  Description of Artificial Sequence: Synthetic oligonucleotide
  Target: LAMA2; (-) strand; PAM type: YTN; PAM sequence: CTG
actttgctggagacttgatc

SEQ ID NO: 265186 - DNA, 20 bp, Artificial Sequence
  Description of Artificial Sequence: Synthetic oligonucleotide
  Target: LAMA2; (-) strand; PAM type: YTN; PAM sequence: TTC
cccagacactgactttgctg

SEQ ID NO: 265187 - DNA, 20 bp, Artificial Sequence
  Description of Artificial Sequence: Synthetic oligonucleotide
  Target: LAMA2; (-) strand; PAM type: YTN; PAM sequence: CTT
ccccagacactgactttgct

SEQ ID NO: 265188 - DNA, 20 bp, Artificial Sequence
  Description of Artificial Sequence: Synthetic oligonucleotide
  Target: LAMA2; (-) strand; PAM type: YTN; PAM sequence: CTA
tgaccaggaaagaagccttc

SEQ ID NO: 265189 - DNA, 20 bp, Artificial Sequence
  Description of Artificial Sequence: Synthetic oligonucleotide
  Target: LAMA2; (-) strand; PAM type: YTN; PAM sequence: TTC
caacacgtgaagacaaagaa

SEQ ID NO: 265190 - DNA, 20 bp, Artificial Sequence
  Description of Artificial Sequence: Synthetic oligonucleotide
  Target: LAMA2; (-) strand; PAM type: YTN; PAM sequence: CTT
ccaacacgtgaagacaaaga

SEQ ID NO: 265191 - DNA, 20 bp, Artificial Sequence
  Description of Artificial Sequence: Synthetic oligonucleotide
  Target: LAMA2; (-) strand; PAM type: YTN; PAM sequence: CTA
gtgccttccaacacgtgaag

SEQ ID NO: 265192 - DNA, 20 bp, Artificial Sequence
  Description of Artificial Sequence: Synthetic oligonucleotide
  Target: LAMA2; (-) strand; PAM type: YTN; PAM sequence: CTA
tctagtgccttccaacacgt

SEQ ID NO: 265193 - DNA, 20 bp, Artificial Sequence
  Description of Artificial Sequence: Synthetic oligonucleotide
  Target: LAMA2; (-) strand; PAM type: YTN; PAM sequence: TTA
caaaagagaccccagagagc

SEQ ID NO: 265194 - DNA, 20 bp, Artificial Sequence
  Description of Artificial Sequence: Synthetic oligonucleotide
  Target: LAMA2; (-) strand; PAM type: YTN; PAM sequence: TTT
acaaaagagaccccagagag

SEQ ID NO: 265195 - DNA, 20 bp, Artificial Sequence
  Description of Artificial Sequence: Synthetic oligonucleotide
  Target: LAMA2; (-) strand; PAM type: YTN; PAM sequence: CTT
tacaaaagagaccccagaga

SEQ ID NO: 265196 - DNA, 20 bp, Artificial Sequence
  Description of Artificial Sequence: Synthetic oligonucleotide
  Target: LAMA2; (-) strand; PAM type: YTN; PAM sequence: TTA
gggcctttacaaaagagacc

SEQ ID NO: 265197 - DNA, 20 bp, Artificial Sequence
  Description of Artificial Sequence: Synthetic oligonucleotide
  Target: LAMA2; (-) strand; PAM type: YTN; PAM sequence: CTC
atgagtgggattagggcctt

SEQ ID NO: 265198 - DNA, 20 bp, Artificial Sequence
  Description of Artificial Sequence: Synthetic oligonucleotide
  Target: LAMA2; (-) strand; PAM type: YTN; PAM sequence: CTG
gagcctcatgagtgggatta

SEQ ID NO: 265199 - DNA, 20 bp, Artificial Sequence
  Description of Artificial Sequence: Synthetic oligonucleotide
  Target: LAMA2; (-) strand; PAM type: YTN; PAM sequence: TTA
catcatgaggctggagcctc

SEQ ID NO: 265200 - DNA, 20 bp, Artificial Sequence
  Description of Artificial Sequence: Synthetic oligonucleotide
  Target: LAMA2; (-) strand; PAM type: YTN; PAM sequence: TTG
ggaggtgattacatcatgag

SEQ ID NO: 265201 - DNA, 20 bp, Artificial Sequence
  Description of Artificial Sequence: Synthetic oligonucleotide
  Target: LAMA2; (-) strand; PAM type: YTN; PAM sequence: TTT
gggaggtgattacatcatga

SEQ ID NO: 265202 - DNA, 20 bp, Artificial Sequence
  Description of Artificial Sequence: Synthetic oligonucleotide
  Target: LAMA2; (-) strand; PAM type: YTN; PAM sequence: CTT
tgggaggtgattacatcatg

SEQ ID NO: 265203 - DNA, 20 bp, Artificial Sequence
  Description of Artificial Sequence: Synthetic oligonucleotide
  Target: LAMA2; (-) strand; PAM type: YTN; PAM sequence: CTC
ccagtgtgatagtaatagga

SEQ ID NO: 265204 - DNA, 20 bp, Artificial Sequence
  Description of Artificial Sequence: Synthetic oligonucleotide
  Target: LAMA2; (-) strand; PAM type: YTN; PAM sequence: CTG
tctcccagtgtgatagtaat

SEQ ID NO: 265205 - DNA, 20 bp, Artificial Sequence
  Description of Artificial Sequence: Synthetic oligonucleotide
  Target: LAMA2; (-) strand; PAM type: YTN; PAM sequence: TTG
aaatcctgtctcccagtgtg

SEQ ID NO: 265206 - DNA, 20 bp, Artificial Sequence
  Description of Artificial Sequence: Synthetic oligonucleotide
  Target: LAMA2; (-) strand; PAM type: YTN; PAM sequence: TTG
tatgttgaaatcctgtctcc

SEQ ID NO: 265207 - DNA, 20 bp, Artificial Sequence
  Description of Artificial Sequence: Synthetic oligonucleotide
  Target: LAMA2; (-) strand; PAM type: YTN; PAM sequence: TTT
gtatgttgaaatcctgtctc

SEQ ID NO: 265208 - DNA, 20 bp, Artificial Sequence
  Description of Artificial Sequence: Synthetic oligonucleotide
  Target: LAMA2; (-) strand; PAM type: YTN; PAM sequence: CTC
caaaaatttgtatgttgaaa

SEQ ID NO: 265209 - DNA, 20 bp, Artificial Sequence
  Description of Artificial Sequence: Synthetic oligonucleotide
  Target: LAMA2; (-) strand; PAM type: YTN; PAM sequence: TTC
tccaaaaatttgtatgttga

SEQ ID NO: 265210 - DNA, 20 bp, Artificial Sequence
  Description of Artificial Sequence: Synthetic oligonucleotide
  Target: LAMA2; (-) strand; PAM type: YTN; PAM sequence: CTG
tgttctccaaaaatttgtat

SEQ ID NO: 265211 - DNA, 20 bp, Artificial Sequence
  Description of Artificial Sequence: Synthetic oligonucleotide
  Target: LAMA2; (-) strand; PAM type: YTN; PAM sequence: CTG
aacaactgtgttctccaaaa

SEQ ID NO: 265212 - DNA, 20 bp, Artificial Sequence
  Description of Artificial Sequence: Synthetic oligonucleotide
  Target: LAMA2; (-) strand; PAM type: YTN; PAM sequence: CTA
tggcctgaacaactgtgttc

SEQ ID NO: 265213 - DNA, 20 bp, Artificial Sequence
  Description of Artificial Sequence: Synthetic oligonucleotide
  Target: LAMA2; (-) strand; PAM type: YTN; PAM sequence: TTG
ctatggcctgaacaactgtg

SEQ ID NO: 265214 - DNA, 20 bp, Artificial Sequence
  Description of Artificial Sequence: Synthetic oligonucleotide
  Target: LAMA2; (-) strand; PAM type: YTN; PAM sequence: CTT
gctatggcctgaacaactgt

SEQ ID NO: 265215 - DNA, 20 bp, Artificial Sequence
  Description of Artificial Sequence: Synthetic oligonucleotide
  Target: LAMA2; (-) strand; PAM type: YTN; PAM sequence: TTA
aggcttgctatggcctgaac

SEQ ID NO: 265216 - DNA, 20 bp, Artificial Sequence
  Description of Artificial Sequence: Synthetic oligonucleotide
  Target: LAMA2; (-) strand; PAM type: YTN; PAM sequence: TTG
ggggttaaggcttgctatgg

SEQ ID NO: 265217 - DNA, 20 bp, Artificial Sequence
  Description of Artificial Sequence: Synthetic oligonucleotide
  Target: LAMA2; (-) strand; PAM type: YTN; PAM sequence: CTC
caaatatcatcatgttgggg

SEQ ID NO: 265218 - DNA, 20 bp, Artificial Sequence
  Description of Artificial Sequence: Synthetic oligonucleotide
  Target: LAMA2; (-) strand; PAM type: YTN; PAM sequence: TTC
agggaaaggtgtgaagataa

SEQ ID NO: 265219 - DNA, 20 bp, Artificial Sequence
  Description of Artificial Sequence: Synthetic oligonucleotide
  Target: LAMA2; (-) strand; PAM type: YTN; PAM sequence: TTT
cagggaaaggtgtgaagata

SEQ ID NO: 265220 - DNA, 20 bp, Artificial Sequence
  Description of Artificial Sequence: Synthetic oligonucleotide
  Target: LAMA2; (-) strand; PAM type: YTN; PAM sequence: TTT
tcagggaaaggtgtgaagat

SEQ ID NO: 265221 - DNA, 20 bp, Artificial Sequence
  Description of Artificial Sequence: Synthetic oligonucleotide
  Target: LAMA2; (-) strand; PAM type: YTN; PAM sequence: TTA
tattttcagggaaaggtgtg

SEQ ID NO: 265222 - DNA, 20 bp, Artificial Sequence
  Description of Artificial Sequence: Synthetic oligonucleotide
  Target: LAMA2; (-) strand; PAM type: YTN; PAM sequence: TTT
atattttcagggaaaggtgt

SEQ ID NO: 265223 - DNA, 20 bp, Artificial Sequence
  Description of Artificial Sequence: Synthetic oligonucleotide
  Target: LAMA2; (-) strand; PAM type: YTN; PAM sequence: CTT
tatattttcagggaaaggtg

SEQ ID NO: 265224 - DNA, 20 bp, Artificial Sequence
  Description of Artificial Sequence: Synthetic oligonucleotide
  Target: LAMA2; (-) strand; PAM type: YTN; PAM sequence: CTA
tgcactttatattttcaggg

SEQ ID NO: 265225 - DNA, 20 bp, Artificial Sequence
  Description of Artificial Sequence: Synthetic oligonucleotide
  Target: LAMA2; (-) strand; PAM type: YTN; PAM sequence: TTC
ctatgcactttatattttca

SEQ ID NO: 265226 - DNA, 20 bp, Artificial Sequence
  Description of Artificial Sequence: Synthetic oligonucleotide
  Target: LAMA2; (-) strand; PAM type: YTN; PAM sequence: TTT
cctatgcactttatattttc

SEQ ID NO: 265227 - DNA, 20 bp, Artificial Sequence
  Description of Artificial Sequence: Synthetic oligonucleotide
  Target: LAMA2; (-) strand; PAM type: YTN; PAM sequence: CTT
tcctatgcactttatatttt

SEQ ID NO: 265228 - DNA, 20 bp, Artificial Sequence
  Description of Artificial Sequence: Synthetic oligonucleotide
  Target: LAMA2; (-) strand; PAM type: YTN; PAM sequence: TTC
tttcctatgcactttatatt

SEQ ID NO: 265229 - DNA, 20 bp, Artificial Sequence
  Description of Artificial Sequence: Synthetic oligonucleotide
  Target: LAMA2; (-) strand; PAM type: YTN; PAM sequence: TTT
ctttcctatgcactttatat

SEQ ID NO: 265230 - DNA, 20 bp, Artificial Sequence
  Description of Artificial Sequence: Synthetic oligonucleotide
  Target: LAMA2; (-) strand; PAM type: YTN; PAM sequence: TTT
tctttcctatgcactttata

SEQ ID NO: 265231 - DNA, 20 bp, Artificial Sequence
  Description of Artificial Sequence: Synthetic oligonucleotide
  Target: LAMA2; (-) strand; PAM type: YTN; PAM sequence: CTA
cagttttctttcctatgcac

SEQ ID NO: 265232 - DNA, 20 bp, Artificial Sequence
  Description of Artificial Sequence: Synthetic oligonucleotide
  Target: LAMA2; (-) strand; PAM type: YTN; PAM sequence: TTC
tacagttttctttcctatgc

SEQ ID NO: 265233 - DNA, 20 bp, Artificial Sequence
  Description of Artificial Sequence: Synthetic oligonucleotide
  Target: LAMA2; (-) strand; PAM type: YTN; PAM sequence: TTT
ctacagttttctttcctatg

SEQ ID NO: 265234 - DNA, 20 bp, Artificial Sequence
  Description of Artificial Sequence: Synthetic oligonucleotide
  Target: LAMA2; (-) strand; PAM type: YTN; PAM sequence: CTT
tctacagttttctttcctat

SEQ ID NO: 265235 - DNA, 20 bp, Artificial Sequence
  Description of Artificial Sequence: Synthetic oligonucleotide
  Target: LAMA2; (-) strand; PAM type: YTN; PAM sequence: CTA
taaagctttctacagttttc

SEQ ID NO: 265236 - DNA, 20 bp, Artificial Sequence
  Description of Artificial Sequence: Synthetic oligonucleotide
  Target: LAMA2; (-) strand; PAM type: YTN; PAM sequence: TTA
gtctataaagctttctacag

SEQ ID NO: 265237 - DNA, 20 bp, Artificial Sequence
  Description of Artificial Sequence: Synthetic oligonucleotide
  Target: LAMA2; (-) strand; PAM type: YTN; PAM sequence: TTT
agtctataaagctttctaca

SEQ ID NO: 265238 - DNA, 20 bp, Artificial Sequence
  Description of Artificial Sequence: Synthetic oligonucleotide
  Target: LAMA2; (-) strand; PAM type: YTN; PAM sequence: TTA
aaatatttagtctataaagc

SEQ ID NO: 265239 - DNA, 20 bp, Artificial Sequence
  Description of Artificial Sequence: Synthetic oligonucleotide
  Target: LAMA2; (-) strand; PAM type: YTN; PAM sequence: TTT
aaaatatttagtctataaag

SEQ ID NO: 265240 - DNA, 20 bp, Artificial Sequence
  Description of Artificial Sequence: Synthetic oligonucleotide
  Target: LAMA2; (-) strand; PAM type: YTN; PAM sequence: CTT
taaaatatttagtctataaa

SEQ ID NO: 265241 - DNA, 20 bp, Artificial Sequence
  Description of Artificial Sequence: Synthetic oligonucleotide
  Target: LAMA2; (-) strand; PAM type: YTN; PAM sequence: TTC
tttaaaatatttagtctata

SEQ ID NO: 265242 - DNA, 20 bp, Artificial Sequence
  Description of Artificial Sequence: Synthetic oligonucleotide
  Target: LAMA2; (-) strand; PAM type: YTN; PAM sequence: TTT
ctttaaaatatttagtctat

SEQ ID NO: 265243 - DNA, 20 bp, Artificial Sequence
  Description of Artificial Sequence: Synthetic oligonucleotide
  Target: LAMA2; (-) strand; PAM type: YTN; PAM sequence: CTG
ggtttctttaaaatatttag

SEQ ID NO: 265244 - DNA, 20 bp, Artificial Sequence
  Description of Artificial Sequence: Synthetic oligonucleotide
  Target: LAMA2; (-) strand; PAM type: YTN; PAM sequence: TTA
caaggtgatctgggtttctt

SEQ ID NO: 265245 - DNA, 20 bp, Artificial Sequence
  Description of Artificial Sequence: Synthetic oligonucleotide
  Target: LAMA2; (-) strand; PAM type: YTN; PAM sequence: TTA
ggtatgatgaagagcatagt

SEQ ID NO: 265246 - DNA, 20 bp, Artificial Sequence
  Description of Artificial Sequence: Synthetic oligonucleotide
  Target: LAMA2; (-) strand; PAM type: YTN; PAM sequence: TTG
caagtatcattaggtatgat

SEQ ID NO: 265247 - DNA, 20 bp, Artificial Sequence
  Description of Artificial Sequence: Synthetic oligonucleotide
  Target: LAMA2; (-) strand; PAM type: YTN; PAM sequence: CTT
gcaagtatcattaggtatga

SEQ ID NO: 265248 - DNA, 20 bp, Artificial Sequence
  Description of Artificial Sequence: Synthetic oligonucleotide
  Target: LAMA2; (-) strand; PAM type: YTN; PAM sequence: TTA
tcttgcaagtatcattaggt

SEQ ID NO: 265249 - DNA, 20 bp, Artificial Sequence
  Description of Artificial Sequence: Synthetic oligonucleotide
  Target: LAMA2; (-) strand; PAM type: YTN; PAM sequence: CTA
ggatgaagcaacaattatct

SEQ ID NO: 265250 - DNA, 20 bp, Artificial Sequence
  Description of Artificial Sequence: Synthetic oligonucleotide
  Target: LAMA2; (-) strand; PAM type: YTN; PAM sequence: TTA
atgcctaggatgaagcaaca

SEQ ID NO: 265251 - DNA, 20 bp, Artificial Sequence
  Description of Artificial Sequence: Synthetic oligonucleotide
  Target: LAMA2; (-) strand; PAM type: YTN; PAM sequence: TTA
ttaatgcctaggatgaagca

SEQ ID NO: 265252 - DNA, 20 bp, Artificial Sequence
  Description of Artificial Sequence: Synthetic oligonucleotide
  Target: LAMA2; (-) strand; PAM type: YTN; PAM sequence: TTT
attaatgcctaggatgaagc

SEQ ID NO: 265253 - DNA, 20 bp, Artificial Sequence
  Description of Artificial Sequence: Synthetic oligonucleotide
  Target: LAMA2; (-) strand; PAM type: YTN; PAM sequence: CTA
tgtacaggatttattaatgc

SEQ ID NO: 265254 - DNA, 20 bp, Artificial Sequence
  Description of Artificial Sequence: Synthetic oligonucleotide
  Target: LAMA2; (-) strand; PAM type: YTN; PAM sequence: TTC
ataataacatgcctatgtac

SEQ ID NO: 265255 - DNA, 20 bp, Artificial Sequence
  Description of Artificial Sequence: Synthetic oligonucleotide
  Target: LAMA2; (-) strand; PAM type: YTN; PAM sequence: CTA
ttcataataacatgcctatg

SEQ ID NO: 265256 - DNA, 20 bp, Artificial Sequence
  Description of Artificial Sequence: Synthetic oligonucleotide
  Target: LAMA2; (-) strand; PAM type: YTN; PAM sequence: CTG
agctattcataataacatgc

SEQ ID NO: 265257 - DNA, 20 bp, Artificial Sequence
  Description of Artificial Sequence: Synthetic oligonucleotide
  Target: LAMA2; (-) strand; PAM type: YTN; PAM sequence: TTA
aggagcaatgtcactgagct

SEQ ID NO: 265258 - DNA, 20 bp, Artificial Sequence
  Description of Artificial Sequence: Synthetic oligonucleotide
  Target: LAMA2; (-) strand; PAM type: YTN; PAM sequence: CTT
aaggagcaatgtcactgagc

SEQ ID NO: 265259 - DNA, 20 bp, Artificial Sequence
  Description of Artificial Sequence: Synthetic oligonucleotide
  Target: LAMA2; (-) strand; PAM type: YTN; PAM sequence: TTC
ttaaggagcaatgtcactga

SEQ ID NO: 265260 - DNA, 20 bp, Artificial Sequence
  Description of Artificial Sequence: Synthetic oligonucleotide
  Target: LAMA2; (-) strand; PAM type: YTN; PAM sequence: TTT
cttaaggagcaatgtcactg

SEQ ID NO: 265261 - DNA, 20 bp, Artificial Sequence
  Description of Artificial Sequence: Synthetic oligonucleotide
  Target: LAMA2; (-) strand; PAM type: YTN; PAM sequence: TTT
tcttaaggagcaatgtcact

SEQ ID NO: 265262 - DNA, 20 bp, Artificial Sequence
  Description of Artificial Sequence: Synthetic oligonucleotide
  Target: LAMA2; (-) strand; PAM type: YTN; PAM sequence: TTT
ttcttaaggagcaatgtcac

SEQ ID NO: 265263 - DNA, 20 bp, Artificial Sequence
  Description of Artificial Sequence: Synthetic oligonucleotide
  Target: LAMA2; (-) strand; PAM type: YTN; PAM sequence: TTT
tttcttaaggagcaatgtca

SEQ ID NO: 265264 - DNA, 20 bp, Artificial Sequence
  Description of Artificial Sequence: Synthetic oligonucleotide
  Target: LAMA2; (-) strand; PAM type: YTN; PAM sequence: TTT
ttttcttaaggagcaatgtc

SEQ ID NO: 265265 - DNA, 20 bp, Artificial Sequence
  Description of Artificial Sequence: Synthetic oligonucleotide
  Target: LAMA2; (-) strand; PAM type: YTN; PAM sequence: TTT
tttttcttaaggagcaatgt

SEQ ID NO: 265266 - DNA, 20 bp, Artificial Sequence
  Description of Artificial Sequence: Synthetic oligonucleotide
  Target: LAMA2; (-) strand; PAM type: YTN; PAM sequence: TTC
aaaaaaattttttttcttaa

SEQ ID NO: 265267 - DNA, 20 bp, Artificial Sequence
  Description of Artificial Sequence: Synthetic oligonucleotide
  Target: LAMA2; (-) strand; PAM type: YTN; PAM sequence: CTT
caaaaaaattttttttctta

SEQ ID NO: 265268 - DNA, 20 bp, Artificial Sequence
  Description of Artificial Sequence: Synthetic oligonucleotide
  Target: LAMA2; (-) strand; PAM type: YTN; PAM sequence: TTA
gtcttcaaaaaaattttttt

SEQ ID NO: 265269 - DNA, 20 bp, Artificial Sequence
  Description of Artificial Sequence: Synthetic oligonucleotide
  Target: LAMA2; (-) strand; PAM type: YTN; PAM sequence: TTT
agtcttcaaaaaaatttttt

SEQ ID NO: 265270 - DNA, 20 bp, Artificial Sequence
  Description of Artificial Sequence: Synthetic oligonucleotide
  Target: LAMA2; (-) strand; PAM type: YTN; PAM sequence: TTT
tagtcttcaaaaaaattttt

SEQ ID NO: 265271 - DNA, 20 bp, Artificial Sequence
  Description of Artificial Sequence: Synthetic oligonucleotide
  Target: LAMA2; (-) strand; PAM type: YTN; PAM sequence: TTA
cataggttttagtcttcaaa

SEQ ID NO: 265272 - DNA, 20 bp, Artificial Sequence
  Description of Artificial Sequence: Synthetic oligonucleotide
  Target: LAMA2; (-) strand; PAM type: YTN; PAM sequence: CTC
agtattacataggttttagt

SEQ ID NO: 265273 - DNA, 20 bp, Artificial Sequence
  Description of Artificial Sequence: Synthetic oligonucleotide
  Target: LAMA2; (-) strand; PAM type: YTN; PAM sequence: TTG
gactcagtattacataggtt

SEQ ID NO: 265274 - DNA, 20 bp, Artificial Sequence
  Description of Artificial Sequence: Synthetic oligonucleotide
  Target: LAMA2; (-) strand; PAM type: YTN; PAM sequence: CTT
ggactcagtattacataggt

SEQ ID NO: 265275 - DNA, 20 bp, Artificial Sequence
  Description of Artificial Sequence: Synthetic oligonucleotide
  Target: LAMA2; (-) strand; PAM type: YTN; PAM sequence: CTA
tccccttggactcagtatta

SEQ ID NO: 265276 - DNA, 20 bp, Artificial Sequence
  Description of Artificial Sequence: Synthetic oligonucleotide
  Target: LAMA2; (-) strand; PAM type: YTN; PAM sequence: CTC
ccgctatccccttggactca

SEQ ID NO: 265277 - DNA, 20 bp, Artificial Sequence
  Description of Artificial Sequence: Synthetic oligonucleotide
  Target: LAMA2; (-) strand; PAM type: YTN; PAM sequence: TTA
cctcccgctatccccttgga

SEQ ID NO: 265278 - DNA, 20 bp, Artificial Sequence
  Description of Artificial Sequence: Synthetic oligonucleotide
  Target: LAMA2; (-) strand; PAM type: YTN; PAM sequence: CTT
acctcccgctatccccttgg

SEQ ID NO: 265279 - DNA, 20 bp, Artificial Sequence
  Description of Artificial Sequence: Synthetic oligonucleotide
  Target: LAMA2; (-) strand; PAM type: YTN; PAM sequence: TTC
acttacctcccgctatcccc

SEQ ID NO: 265280 - DNA, 20 bp, Artificial Sequence
  Description of Artificial Sequence: Synthetic oligonucleotide
  Target: LAMA2; (-) strand; PAM type: YTN; PAM sequence: TTA
gttcacttacctcccgctat

SEQ ID NO: 265281 - DNA, 20 bp, Artificial Sequence
  Description of Artificial Sequence: Synthetic oligonucleotide
  Target: LAMA2; (-) strand; PAM type: YTN; PAM sequence: CTG
ttagttcacttacctcccgc

SEQ ID NO: 265282 - DNA, 20 bp, Artificial Sequence
  Description of Artificial Sequence: Synthetic oligonucleotide
  Target: LAMA2; (-) strand; PAM type: YTN; PAM sequence: TTA
ctgttagttcacttacctcc

SEQ ID NO: 265283 - DNA, 20 bp, Artificial Sequence
  Description of Artificial Sequence: Synthetic oligonucleotide
  Target: LAMA2; (-) strand; PAM type: YTN; PAM sequence: CTA
gttactgttagttcacttac

SEQ ID NO: 265284 - DNA, 20 bp, Artificial Sequence
  Description of Artificial Sequence: Synthetic oligonucleotide
  Target: LAMA2; (-) strand; PAM type: YTN; PAM sequence: CTA
tgtgtgtgtactagttactg

SEQ ID NO: 265285 - DNA, 20 bp, Artificial Sequence
  Description of Artificial Sequence: Synthetic oligonucleotide
  Target: LAMA2; (-) strand; PAM type: YTN; PAM sequence: CTA
cctatgtgtgtgtactagtt

SEQ ID NO: 265286 - DNA, 20 bp, Artificial Sequence
  Description of Artificial Sequence: Synthetic oligonucleotide
  Target: LAMA2; (-) strand; PAM type: YTN; PAM sequence: TTA
ctacctatgtgtgtgtacta

SEQ ID NO: 265287 - DNA, 20 bp, Artificial Sequence
  Description of Artificial Sequence: Synthetic oligonucleotide
  Target: LAMA2; (-) strand; PAM type: YTN; PAM sequence: CTT
actacctatgtgtgtgtact

SEQ ID NO: 265288 - DNA, 20 bp, Artificial Sequence
  Description of Artificial Sequence: Synthetic oligonucleotide
  Target: LAMA2; (-) strand; PAM type: YTN; PAM sequence: CTA
cttactacctatgtgtgtgt

SEQ ID NO: 265289 - DNA, 20 bp, Artificial Sequence
  Description of Artificial Sequence: Synthetic oligonucleotide
  Target: LAMA2; (-) strand; PAM type: YTN; PAM sequence: CTA
cctacttactacctatgtgt

SEQ ID NO: 265290 - DNA, 20 bp, Artificial Sequence
  Description of Artificial Sequence: Synthetic oligonucleotide
  Target: LAMA2; (-) strand; PAM type: YTN; PAM sequence: CTA
tctacctacttactacctat

SEQ ID NO: 265291 - DNA, 20 bp, Artificial Sequence
  Description of Artificial Sequence: Synthetic oligonucleotide
  Target: LAMA2; (-) strand; PAM type: YTN; PAM sequence: CTA
tctatctacctacttactac

SEQ ID NO: 265292 - DNA, 20 bp, Artificial Sequence
  Description of Artificial Sequence: Synthetic oligonucleotide
  Target: LAMA2; (-) strand; PAM type: YTN; PAM sequence: CTA
tctatctatctacctactta

SEQ ID NO: 265293 - DNA, 20 bp, Artificial Sequence
  Description of Artificial Sequence: Synthetic oligonucleotide
  Target: LAMA2; (-) strand; PAM type: YTN; PAM sequence: CTA
tctatctatctatctaccta

SEQ ID NO: 265294 - DNA, 20 bp, Artificial Sequence
  Description of Artificial Sequence: Synthetic oligonucleotide
  Target: LAMA2; (-) strand; PAM type: YTN; PAM sequence: CTA
tctatctatctatctatcta

SEQ ID NO: 265295 - DNA, 20 bp, Artificial Sequence
  Description of Artificial Sequence: Synthetic oligonucleotide
  Target: LAMA2; (-) strand; PAM type: YTN; PAM sequence: CTA
tctatctatctatctatcta

SEQ ID NO: 265296 - DNA, 20 bp, Artificial Sequence
  Description of Artificial Sequence: Synthetic oligonucleotide
  Target: LAMA2; (-) strand; PAM type: YTN; PAM sequence: CTA
tctatctatctatctatcta

SEQ ID NO: 265297 - DNA, 20 bp, Artificial Sequence
  Description of Artificial Sequence: Synthetic oligonucleotide
  Target: LAMA2; (-) strand; PAM type: YTN; PAM sequence: CTA
tctatctatctatctatcta

SEQ ID NO: 265298 - DNA, 20 bp, Artificial Sequence
  Description of Artificial Sequence: Synthetic oligonucleotide
  Target: LAMA2; (-) strand; PAM type: YTN; PAM sequence: CTA
tctatctatctatctatcta

SEQ ID NO: 265299 - DNA, 20 bp, Artificial Sequence
  Description of Artificial Sequence: Synthetic oligonucleotide
  Target: LAMA2; (-) strand; PAM type: YTN; PAM sequence: CTG
tatctatctatctatctatc

SEQ ID NO: 265300 - DNA, 20 bp, Artificial Sequence
  Description of Artificial Sequence: Synthetic oligonucleotide
  Target: LAMA2; (-) strand; PAM type: YTN; PAM sequence: TTC
tgtatctatctatctatcta

SEQ ID NO: 265301 - DNA, 20 bp, Artificial Sequence
  Description of Artificial Sequence: Synthetic oligonucleotide
  Target: LAMA2; (-) strand; PAM type: YTN; PAM sequence: CTT
ctgtatctatctatctatct

SEQ ID NO: 265302 - DNA, 20 bp, Artificial Sequence
  Description of Artificial Sequence: Synthetic oligonucleotide
  Target: LAMA2; (-) strand; PAM type: YTN; PAM sequence: TTC
cttctgtatctatctatcta

SEQ ID NO: 265303 - DNA, 20 bp, Artificial Sequence
  Description of Artificial Sequence: Synthetic oligonucleotide
  Target: LAMA2; (-) strand; PAM type: YTN; PAM sequence: CTT
ccttctgtatctatctatct

SEQ ID NO: 265304 - DNA, 20 bp, Artificial Sequence
  Description of Artificial Sequence: Synthetic oligonucleotide
  Target: LAMA2; (-) strand; PAM type: YTN; PAM sequence: TTA
aatgaaaatatcttccttct

SEQ ID NO: 265305 - DNA, 20 bp, Artificial Sequence
  Description of Artificial Sequence: Synthetic oligonucleotide
  Target: LAMA2; (-) strand; PAM type: YTN; PAM sequence: CTA
cagggtgtagcaatgattaa

SEQ ID NO: 265306 - DNA, 20 bp, Artificial Sequence
  Description of Artificial Sequence: Synthetic oligonucleotide
  Target: LAMA2; (-) strand; PAM type: YTN; PAM sequence: CTG
actacagggtgtagcaatga

SEQ ID NO: 265307 - DNA, 20 bp, Artificial Sequence
  Description of Artificial Sequence: Synthetic oligonucleotide
  Target: LAMA2; (-) strand; PAM type: YTN; PAM sequence: TTC
ccatgtgaaaaaaaaaatag

SEQ ID NO: 265308 - DNA, 20 bp, Artificial Sequence
  Description of Artificial Sequence: Synthetic oligonucleotide
  Target: LAMA2; (-) strand; PAM type: YTN; PAM sequence: TTC
aatattcccatgtgaaaaaa

SEQ ID NO: 265309 - DNA, 20 bp, Artificial Sequence
  Description of Artificial Sequence: Synthetic oligonucleotide
  Target: LAMA2; (-) strand; PAM type: YTN; PAM sequence: CTT
caatattcccatgtgaaaaa

SEQ ID NO: 265310 - DNA, 20 bp, Artificial Sequence
  Description of Artificial Sequence: Synthetic oligonucleotide
  Target: LAMA2; (-) strand; PAM type: YTN; PAM sequence: CTA
agtcttcaatattcccatgt

SEQ ID NO: 265311 - DNA, 20 bp, Artificial Sequence
  Description of Artificial Sequence: Synthetic oligonucleotide
  Target: LAMA2; (-) strand; PAM type: YTN; PAM sequence: CTA
gctaagtcttcaatattccc

SEQ ID NO: 265312 - DNA, 20 bp, Artificial Sequence
  Description of Artificial Sequence: Synthetic oligonucleotide
  Target: LAMA2; (-) strand; PAM type: YTN; PAM sequence: TTG
agctagctaagtcttcaata

SEQ ID NO: 265313 - DNA, 20 bp, Artificial Sequence
  Description of Artificial Sequence: Synthetic oligonucleotide
  Target: LAMA2; (-) strand; PAM type: YTN; PAM sequence: TTT
gagctagctaagtcttcaat

SEQ ID NO: 265314 - DNA, 20 bp, Artificial Sequence
  Description of Artificial Sequence: Synthetic oligonucleotide
  Target: LAMA2; (-) strand; PAM type: YTN; PAM sequence: TTG
tttgagctagctaagtcttc

SEQ ID NO: 265315 - DNA, 20 bp, Artificial Sequence
  Description of Artificial Sequence: Synthetic oligonucleotide
  Target: LAMA2; (-) strand; PAM type: YTN; PAM sequence: TTA
aaaagttgtttgagctagct

SEQ ID NO: 265316 - DNA, 20 bp, Artificial Sequence
  Description of Artificial Sequence: Synthetic oligonucleotide
  Target: LAMA2; (-) strand; PAM type: YTN; PAM sequence: TTT
aaaaagttgtttgagctagc

SEQ ID NO: 265317 - DNA, 20 bp, Artificial Sequence
  Description of Artificial Sequence: Synthetic oligonucleotide
  Target: LAMA2; (-) strand; PAM type: YTN; PAM sequence: CTT
taaaaagttgtttgagctag

SEQ ID NO: 265318 - DNA, 20 bp, Artificial Sequence
  Description of Artificial Sequence: Synthetic oligonucleotide
  Target: LAMA2; (-) strand; PAM type: YTN; PAM sequence: TTA
tctttaaaaagttgtttgag

SEQ ID NO: 265319 - DNA, 20 bp, Artificial Sequence
  Description of Artificial Sequence: Synthetic oligonucleotide
  Target: LAMA2; (-) strand; PAM type: YTN; PAM sequence: TTT
atctttaaaaagttgtttga

SEQ ID NO: 265320 - DNA, 20 bp, Artificial Sequence
  Description of Artificial Sequence: Synthetic oligonucleotide
  Target: LAMA2; (-) strand; PAM type: YTN; PAM sequence: TTT
tatctttaaaaagttgtttg

SEQ ID NO: 265321 - DNA, 20 bp, Artificial Sequence
  Description of Artificial Sequence: Synthetic oligonucleotide
  Target: LAMA2; (-) strand; PAM type: YTN; PAM sequence: TTA
ttttatctttaaaaagttgt

SEQ ID NO: 265322 - DNA, 20 bp, Artificial Sequence
  Description of Artificial Sequence: Synthetic oligonucleotide
  Target: LAMA2; (-) strand; PAM type: YTN; PAM sequence: TTC
cacaaattattttatcttta

SEQ ID NO: 265323 - DNA, 20 bp, Artificial Sequence
  Description of Artificial Sequence: Synthetic oligonucleotide
  Target: LAMA2; (-) strand; PAM type: YTN; PAM sequence: TTT
ccacaaattattttatcttt

SEQ ID NO: 265324 - DNA, 20 bp, Artificial Sequence
  Description of Artificial Sequence: Synthetic oligonucleotide
  Target: LAMA2; (-) strand; PAM type: YTN; PAM sequence: TTA
tgatagagtgaaaataatat

SEQ ID NO: 265325 - DNA, 20 bp, Artificial Sequence
  Description of Artificial Sequence: Synthetic oligonucleotide
  Target: LAMA2; (-) strand; PAM type: YTN; PAM sequence: TTA
aaataagaattatgatagag

SEQ ID NO: 265326 - DNA, 20 bp, Artificial Sequence
  Description of Artificial Sequence: Synthetic oligonucleotide
  Target: LAMA2; (-) strand; PAM type: YTN; PAM sequence: TTT
aaaataagaattatgataga

SEQ ID NO: 265327 - DNA, 20 bp, Artificial Sequence
  Description of Artificial Sequence: Synthetic oligonucleotide
  Target: LAMA2; (-) strand; PAM type: YTN; PAM sequence: TTT
taaaataagaattatgatag

SEQ ID NO: 265328 - DNA, 20 bp, Artificial Sequence
  Description of Artificial Sequence: Synthetic oligonucleotide
  Target: LAMA2; (-) strand; PAM type: YTN; PAM sequence: TTT
ttaaaataagaattatgata

SEQ ID NO: 265329 - DNA, 20 bp, Artificial Sequence
  Description of Artificial Sequence: Synthetic oligonucleotide
  Target: LAMA2; (-) strand; PAM type: YTN; PAM sequence: CTT
tttaaaataagaattatgat

SEQ ID NO: 265330 - DNA, 20 bp, Artificial Sequence
  Description of Artificial Sequence: Synthetic oligonucleotide
  Target: LAMA2; (-) strand; PAM type: YTN; PAM sequence: TTC
tttttaaaataagaattatg

SEQ ID NO: 265331 - DNA, 20 bp, Artificial Sequence
  Description of Artificial Sequence: Synthetic oligonucleotide
  Target: LAMA2; (-) strand; PAM type: YTN; PAM sequence: TTT
ctttttaaaataagaattat

SEQ ID NO: 265332 - DNA, 20 bp, Artificial Sequence
  Description of Artificial Sequence: Synthetic oligonucleotide
  Target: LAMA2; (-) strand; PAM type: YTN; PAM sequence: TTT
tctttttaaaataagaatta

SEQ ID NO: 265333 - DNA, 20 bp, Artificial Sequence
  Description of Artificial Sequence: Synthetic oligonucleotide
  Target: LAMA2; (-) strand; PAM type: YTN; PAM sequence: TTA
ttttctttttaaaataagaa

SEQ ID NO: 265334 - DNA, 20 bp, Artificial Sequence
  Description of Artificial Sequence: Synthetic oligonucleotide
  Target: LAMA2; (-) strand; PAM type: YTN; PAM sequence: TTA
ttattttctttttaaaataa

SEQ ID NO: 265335 - DNA, 20 bp, Artificial Sequence
  Description of Artificial Sequence: Synthetic oligonucleotide
  Target: LAMA2; (-) strand; PAM type: YTN; PAM sequence: TTT
attattttctttttaaaata

SEQ ID NO: 265336 - DNA, 20 bp, Artificial Sequence
  Description of Artificial Sequence: Synthetic oligonucleotide
  Target: LAMA2; (-) strand; PAM type: YTN; PAM sequence: TTT
tattattttctttttaaaat

SEQ ID NO: 265337 - DNA, 20 bp, Artificial Sequence
  Description of Artificial Sequence: Synthetic oligonucleotide
  Target: LAMA2; (-) strand; PAM type: YTN; PAM sequence: TTT
ttattattttctttttaaaa

SEQ ID NO: 265338 - DNA, 20 bp, Artificial Sequence
  Description of Artificial Sequence: Synthetic oligonucleotide
  Target: LAMA2; (-) strand; PAM type: YTN; PAM sequence: TTA
tttttattattttcttttta

SEQ ID NO: 265339 - DNA, 20 bp, Artificial Sequence
  Description of Artificial Sequence: Synthetic oligonucleotide
  Target: LAMA2; (-) strand; PAM type: YTN; PAM sequence: TTT
atttttattattttcttttt

SEQ ID NO: 265340 - DNA, 20 bp, Artificial Sequence
  Description of Artificial Sequence: Synthetic oligonucleotide
  Target: LAMA2; (-) strand; PAM type: YTN; PAM sequence: TTA
tagagatttatttttattat

SEQ ID NO: 265341 - DNA, 20 bp, Artificial Sequence
  Description of Artificial Sequence: Synthetic oligonucleotide
  Target: LAMA2; (-) strand; PAM type: YTN; PAM sequence: TTC
aggcaacagcaatgatcagt

SEQ ID NO: 265342 - DNA, 20 bp, Artificial Sequence
  Description of Artificial Sequence: Synthetic oligonucleotide
  Target: LAMA2; (-) strand; PAM type: YTN; PAM sequence: TTT
caggcaacagcaatgatcag

SEQ ID NO: 265343 - DNA, 20 bp, Artificial Sequence
  Description of Artificial Sequence: Synthetic oligonucleotide
  Target: LAMA2; (-) strand; PAM type: YTN; PAM sequence: TTA
aatgtttcaggcaacagcaa

SEQ ID NO: 265344 - DNA, 20 bp, Artificial Sequence
  Description of Artificial Sequence: Synthetic oligonucleotide
  Target: LAMA2; (-) strand; PAM type: YTN; PAM sequence: TTG
gttaaatgtttcaggcaaca

SEQ ID NO: 265345 - DNA, 20 bp, Artificial Sequence
  Description of Artificial Sequence: Synthetic oligonucleotide
  Target: LAMA2; (-) strand; PAM type: YTN; PAM sequence: CTG
aagatagaggtaattggtta

SEQ ID NO: 265346 - DNA, 20 bp, Artificial Sequence
  Description of Artificial Sequence: Synthetic oligonucleotide
  Target: LAMA2; (-) strand; PAM type: YTN; PAM sequence: TTA
ctgaagatagaggtaattgg

SEQ ID NO: 265347 - DNA, 20 bp, Artificial Sequence
  Description of Artificial Sequence: Synthetic oligonucleotide
  Target: LAMA2; (-) strand; PAM type: YTN; PAM sequence: TTT
actgaagatagaggtaattg

SEQ ID NO: 265348 - DNA, 20 bp, Artificial Sequence
  Description of Artificial Sequence: Synthetic oligonucleotide
  Target: LAMA2; (-) strand; PAM type: YTN; PAM sequence: CTA
tttactgaagatagaggtaa

SEQ ID NO: 265349 - DNA, 20 bp, Artificial Sequence
  Description of Artificial Sequence: Synthetic oligonucleotide
  Target: LAMA2; (-) strand; PAM type: YTN; PAM sequence: CTG
tctatttactgaagatagag

SEQ ID NO: 265350 - DNA, 20 bp, Artificial Sequence
  Description of Artificial Sequence: Synthetic oligonucleotide
  Target: LAMA2; (-) strand; PAM type: YTN; PAM sequence: TTA
caaatctgtctatttactga

SEQ ID NO: 265351 - DNA, 20 bp, Artificial Sequence
  Description of Artificial Sequence: Synthetic oligonucleotide
  Target: LAMA2; (-) strand; PAM type: YTN; PAM sequence: CTA
gttacaaatctgtctattta

SEQ ID NO: 265352 - DNA, 20 bp, Artificial Sequence
  Description of Artificial Sequence: Synthetic oligonucleotide
  Target: LAMA2; (-) strand; PAM type: YTN; PAM sequence: TTC
tagttacaaatctgtctatt

SEQ ID NO: 265353 - DNA, 20 bp, Artificial Sequence
  Description of Artificial Sequence: Synthetic oligonucleotide
  Target: LAMA2; (-) strand; PAM type: YTN; PAM sequence: TTA
caaaacaaaaaatagtgaat

SEQ ID NO: 265354 - DNA, 20 bp, Artificial Sequence
  Description of Artificial Sequence: Synthetic oligonucleotide
  Target: LAMA2; (-) strand; PAM type: YTN; PAM sequence: TTT
acaaaacaaaaaatagtgaa

SEQ ID NO: 265355 - DNA, 20 bp, Artificial Sequence
  Description of Artificial Sequence: Synthetic oligonucleotide
  Target: LAMA2; (-) strand; PAM type: YTN; PAM sequence: TTA
aataaggtttacaaaacaaa

SEQ ID NO: 265356 - DNA, 20 bp, Artificial Sequence
  Description of Artificial Sequence: Synthetic oligonucleotide
  Target: LAMA2; (-) strand; PAM type: YTN; PAM sequence: TTA
ggtagattaaataaggttta

SEQ ID NO: 265357 - DNA, 20 bp, Artificial Sequence
  Description of Artificial Sequence: Synthetic oligonucleotide
  Target: LAMA2; (-) strand; PAM type: YTN; PAM sequence: TTG
ttaggtagattaaataaggt

SEQ ID NO: 265358 - DNA, 20 bp, Artificial Sequence
  Description of Artificial Sequence: Synthetic oligonucleotide
  Target: LAMA2; (-) strand; PAM type: YTN; PAM sequence: CTG
gcaaggttgttaggtagatt

SEQ ID NO: 265359 - DNA, 20 bp, Artificial Sequence
  Description of Artificial Sequence: Synthetic oligonucleotide
  Target: LAMA2; (-) strand; PAM type: YTN; PAM sequence: TTC
tggcaaggttgttaggtaga

SEQ ID NO: 265360 - DNA, 20 bp, Artificial Sequence
  Description of Artificial Sequence: Synthetic oligonucleotide
  Target: LAMA2; (-) strand; PAM type: YTN; PAM sequence: CTA
ttctggcaaggttgttaggt

SEQ ID NO: 265361 - DNA, 20 bp, Artificial Sequence
  Description of Artificial Sequence: Synthetic oligonucleotide
  Target: LAMA2; (-) strand; PAM type: YTN; PAM sequence: CTC
tattctggcaaggttgttag

SEQ ID NO: 265362 - DNA, 20 bp, Artificial Sequence
  Description of Artificial Sequence: Synthetic oligonucleotide
  Target: LAMA2; (-) strand; PAM type: YTN; PAM sequence: CTA
acaatctctattctggcaag

SEQ ID NO: 265363 - DNA, 20 bp, Artificial Sequence
  Description of Artificial Sequence: Synthetic oligonucleotide
  Target: LAMA2; (-) strand; PAM type: YTN; PAM sequence: TTA
gtataatgctaacaatctct

SEQ ID NO: 265364 - DNA, 20 bp, Artificial Sequence
  Description of Artificial Sequence: Synthetic oligonucleotide
  Target: LAMA2; (-) strand; PAM type: YTN; PAM sequence: CTT
agtataatgctaacaatctc

SEQ ID NO: 265365 - DNA, 20 bp, Artificial Sequence
  Description of Artificial Sequence: Synthetic oligonucleotide
  Target: LAMA2; (-) strand; PAM type: YTN; PAM sequence: TTC
cagaacttagtataatgcta

SEQ ID NO: 265366 - DNA, 20 bp, Artificial Sequence
  Description of Artificial Sequence: Synthetic oligonucleotide
  Target: LAMA2; (-) strand; PAM type: YTN; PAM sequence: TTT
ccagaacttagtataatgct

SEQ ID NO: 265367 - DNA, 20 bp, Artificial Sequence
  Description of Artificial Sequence: Synthetic oligonucleotide
  Target: LAMA2; (-) strand; PAM type: YTN; PAM sequence: TTA
atttccagaacttagtataa

SEQ ID NO: 265368 - DNA, 20 bp, Artificial Sequence
  Description of Artificial Sequence: Synthetic oligonucleotide
  Target: LAMA2; (-) strand; PAM type: YTN; PAM sequence: TTA
gcattaatttccagaactta

SEQ ID NO: 265369 - DNA, 20 bp, Artificial Sequence
  Description of Artificial Sequence: Synthetic oligonucleotide
  Target: LAMA2; (-) strand; PAM type: YTN; PAM sequence: CTT
agcattaatttccagaactt

SEQ ID NO: 265370 - DNA, 20 bp, Artificial Sequence
  Description of Artificial Sequence: Synthetic oligonucleotide
  Target: LAMA2; (-) strand; PAM type: YTN; PAM sequence: TTC
ttagcattaatttccagaac

SEQ ID NO: 265371 - DNA, 20 bp, Artificial Sequence
  Description of Artificial Sequence: Synthetic oligonucleotide
  Target: LAMA2; (-) strand; PAM type: YTN; PAM sequence: TTT
cttagcattaatttccagaa

SEQ ID NO: 265372 - DNA, 20 bp, Artificial Sequence
  Description of Artificial Sequence: Synthetic oligonucleotide
  Target: LAMA2; (-) strand; PAM type: YTN; PAM sequence: TTT
tcttagcattaatttccaga

SEQ ID NO: 265373 - DNA, 20 bp, Artificial Sequence
  Description of Artificial Sequence: Synthetic oligonucleotide
  Target: LAMA2; (-) strand; PAM type: YTN; PAM sequence: TTA
cattttcttagcattaattt

SEQ ID NO: 265374 - DNA, 20 bp, Artificial Sequence
  Description of Artificial Sequence: Synthetic oligonucleotide
  Target: LAMA2; (-) strand; PAM type: YTN; PAM sequence: CTT
acattttcttagcattaatt

SEQ ID NO: 265375 - DNA, 20 bp, Artificial Sequence
  Description of Artificial Sequence: Synthetic oligonucleotide
  Target: LAMA2; (-) strand; PAM type: YTN; PAM sequence: TTG
cttacattttcttagcatta

SEQ ID NO: 265376 - DNA, 20 bp, Artificial Sequence
  Description of Artificial Sequence: Synthetic oligonucleotide
  Target: LAMA2; (-) strand; PAM type: YTN; PAM sequence: TTA
taggttgcttacattttctt

SEQ ID NO: 265377 - DNA, 20 bp, Artificial Sequence
  Description of Artificial Sequence: Synthetic oligonucleotide
  Target: LAMA2; (-) strand; PAM type: YTN; PAM sequence: TTT
ataggttgcttacattttct

SEQ ID NO: 265378 - DNA, 20 bp, Artificial Sequence
  Description of Artificial Sequence: Synthetic oligonucleotide
  Target: LAMA2; (-) strand; PAM type: YTN; PAM sequence: CTT
tataggttgcttacattttc

SEQ ID NO: 265379 - DNA, 20 bp, Artificial Sequence
  Description of Artificial Sequence: Synthetic oligonucleotide
  Target: LAMA2; (-) strand; PAM type: YTN; PAM sequence: TTC
aaggctttataggttgctta

SEQ ID NO: 265380 - DNA, 20 bp, Artificial Sequence
  Description of Artificial Sequence: Synthetic oligonucleotide
  Target: LAMA2; (-) strand; PAM type: YTN; PAM sequence: TTG
ttcaaggctttataggttgc

SEQ ID NO: 265381 - DNA, 20 bp, Artificial Sequence
  Description of Artificial Sequence: Synthetic oligonucleotide
  Target: LAMA2; (-) strand; PAM type: YTN; PAM sequence: TTT
gttcaaggctttataggttg

SEQ ID NO: 265382 - DNA, 20 bp, Artificial Sequence
  Description of Artificial Sequence: Synthetic oligonucleotide
  Target: LAMA2; (-) strand; PAM type: YTN; PAM sequence: TTT
tgttcaaggctttataggtt

SEQ ID NO: 265383 - DNA, 20 bp, Artificial Sequence
  Description of Artificial Sequence: Synthetic oligonucleotide
  Target: LAMA2; (-) strand; PAM type: YTN; PAM sequence: TTT
ttgttcaaggctttataggt

SEQ ID NO: 265384 - DNA, 20 bp, Artificial Sequence
  Description of Artificial Sequence: Synthetic oligonucleotide
  Target: LAMA2; (-) strand; PAM type: YTN; PAM sequence: CTT
tttgttcaaggctttatagg

SEQ ID NO: 265385 - DNA, 20 bp, Artificial Sequence
  Description of Artificial Sequence: Synthetic oligonucleotide
  Target: LAMA2; (-) strand; PAM type: YTN; PAM sequence: CTA
atactttttgttcaaggctt

SEQ ID NO: 265386 - DNA, 20 bp, Artificial Sequence
  Description of Artificial Sequence: Synthetic oligonucleotide
  Target: LAMA2; (-) strand; PAM type: YTN; PAM sequence: TTC
taatactttttgttcaaggc

SEQ ID NO: 265387 - DNA, 20 bp, Artificial Sequence
  Description of Artificial Sequence: Synthetic oligonucleotide
  Target: LAMA2; (-) strand; PAM type: YTN; PAM sequence: CTT
ctaatactttttgttcaagg

SEQ ID NO: 265388 - DNA, 20 bp, Artificial Sequence
  Description of Artificial Sequence: Synthetic oligonucleotide
  Target: LAMA2; (-) strand; PAM type: YTN; PAM sequence: CTG
cttctaatactttttgttca

SEQ ID NO: 265389 - DNA, 20 bp, Artificial Sequence
  Description of Artificial Sequence: Synthetic oligonucleotide
  Target: LAMA2; (-) strand; PAM type: YTN; PAM sequence: TTG
aaacctgcttctaatacttt

SEQ ID NO: 265390 - DNA, 20 bp, Artificial Sequence
  Description of Artificial Sequence: Synthetic oligonucleotide
  Target: LAMA2; (-) strand; PAM type: YTN; PAM sequence: TTT
gaaacctgcttctaatactt

SEQ ID NO: 265391 - DNA, 20 bp, Artificial Sequence
  Description of Artificial Sequence: Synthetic oligonucleotide
  Target: LAMA2; (-) strand; PAM type: YTN; PAM sequence: TTG
tggtggatttgaaacctgct

SEQ ID NO: 265392 - DNA, 20 bp, Artificial Sequence
  Description of Artificial Sequence: Synthetic oligonucleotide
  Target: LAMA2; (-) strand; PAM type: YTN; PAM sequence: TTT
gtggtggatttgaaacctgc

SEQ ID NO: 265393 - DNA, 20 bp, Artificial Sequence
  Description of Artificial Sequence: Synthetic oligonucleotide
  Target: LAMA2; (-) strand; PAM type: YTN; PAM sequence: CTG
gagaacgcagtttgtggtgg

SEQ ID NO: 265394 - DNA, 20 bp, Artificial Sequence
  Description of Artificial Sequence: Synthetic oligonucleotide
  Target: LAMA2; (-) strand; PAM type: YTN; PAM sequence: TTG
ccgtctggagaacgcagttt

SEQ ID NO: 265395 - DNA, 20 bp, Artificial Sequence
  Description of Artificial Sequence: Synthetic oligonucleotide
  Target: LAMA2; (-) strand; PAM type: YTN; PAM sequence: CTT
gccgtctggagaacgcagtt

SEQ ID NO: 265396 - DNA, 20 bp, Artificial Sequence
  Description of Artificial Sequence: Synthetic oligonucleotide
  Target: LAMA2; (-) strand; PAM type: YTN; PAM sequence: CTC
ttgccgtctggagaacgcag

SEQ ID NO: 265397 - DNA, 20 bp, Artificial Sequence
  Description of Artificial Sequence: Synthetic oligonucleotide
  Target: LAMA2; (-) strand; PAM type: YTN; PAM sequence: CTC
tcttgccgtctggagaacgc

SEQ ID NO: 265398 - DNA, 20 bp, Artificial Sequence
  Description of Artificial Sequence: Synthetic oligonucleotide
  Target: LAMA2; (-) strand; PAM type: YTN; PAM sequence: TTA
cactctcttgccgtctggag

SEQ ID NO: 265399 - DNA, 20 bp, Artificial Sequence
  Description of Artificial Sequence: Synthetic oligonucleotide
  Target: LAMA2; (-) strand; PAM type: YTN; PAM sequence: TTT
acactctcttgccgtctgga

SEQ ID NO: 265400 - DNA, 20 bp, Artificial Sequence
  Description of Artificial Sequence: Synthetic oligonucleotide
  Target: LAMA2; (-) strand; PAM type: YTN; PAM sequence: TTA
atcagcagagagtgtttaca

SEQ ID NO: 265401 - DNA, 20 bp, Artificial Sequence
  Description of Artificial Sequence: Synthetic oligonucleotide
  Target: LAMA2; (-) strand; PAM type: YTN; PAM sequence: TTT
aatcagcagagagtgtttac

SEQ ID NO: 265402 - DNA, 20 bp, Artificial Sequence
  Description of Artificial Sequence: Synthetic oligonucleotide
  Target: LAMA2; (-) strand; PAM type: YTN; PAM sequence: CTC
atttaatcagcagagagtgt

SEQ ID NO: 265403 - DNA, 20 bp, Artificial Sequence
  Description of Artificial Sequence: Synthetic oligonucleotide
  Target: LAMA2; (-) strand; PAM type: YTN; PAM sequence: TTG
taaaatcaaactcatttaat

SEQ ID NO: 265404 - DNA, 20 bp, Artificial Sequence
  Description of Artificial Sequence: Synthetic oligonucleotide
  Target: LAMA2; (-) strand; PAM type: YTN; PAM sequence: CTT
gtaaaatcaaactcatttaa

SEQ ID NO: 265405 - DNA, 20 bp, Artificial Sequence
  Description of Artificial Sequence: Synthetic oligonucleotide
  Target: LAMA2; (-) strand; PAM type: YTN; PAM sequence: TTG
agcttgtaaaatcaaactca

SEQ ID NO: 265406 - DNA, 20 bp, Artificial Sequence
  Description of Artificial Sequence: Synthetic oligonucleotide
  Target: LAMA2; (-) strand; PAM type: YTN; PAM sequence: CTT
gagcttgtaaaatcaaactc

SEQ ID NO: 265407 - DNA, 20 bp, Artificial Sequence
  Description of Artificial Sequence: Synthetic oligonucleotide
  Target: LAMA2; (-) strand; PAM type: YTN; PAM sequence: TTC
acttgagcttgtaaaatcaa

SEQ ID NO: 265408 - DNA, 20 bp, Artificial Sequence
  Description of Artificial Sequence: Synthetic oligonucleotide
  Target: LAMA2; (-) strand; PAM type: YTN; PAM sequence: CTA
agatataattcacttgagct

SEQ ID NO: 265409 - DNA, 20 bp, Artificial Sequence
  Description of Artificial Sequence: Synthetic oligonucleotide
  Target: LAMA2; (-) strand; PAM type: YTN; PAM sequence: CTC
taagatataattcacttgag

SEQ ID NO: 265410 - DNA, 20 bp, Artificial Sequence
  Description of Artificial Sequence: Synthetic oligonucleotide
  Target: LAMA2; (-) strand; PAM type: YTN; PAM sequence: CTG
tcccgactctaagatataat

SEQ ID NO: 265411 - DNA, 20 bp, Artificial Sequence
  Description of Artificial Sequence: Synthetic oligonucleotide
  Target: LAMA2; (-) strand; PAM type: YTN; PAM sequence: TTC
tgtcccgactctaagatata

SEQ ID NO: 265412 - DNA, 20 bp, Artificial Sequence
  Description of Artificial Sequence: Synthetic oligonucleotide
  Target: LAMA2; (-) strand; PAM type: YTN; PAM sequence: TTG
cagattctgtcccgactcta

SEQ ID NO: 265413 - DNA, 20 bp, Artificial Sequence
  Description of Artificial Sequence: Synthetic oligonucleotide
  Target: LAMA2; (-) strand; PAM type: YTN; PAM sequence: TTT
gcagattctgtcccgactct

SEQ ID NO: 265414 - DNA, 20 bp, Artificial Sequence
  Description of Artificial Sequence: Synthetic oligonucleotide
  Target: LAMA2; (-) strand; PAM type: YTN; PAM sequence: TTT
tgcagattctgtcccgactc

SEQ ID NO: 265415 - DNA, 20 bp, Artificial Sequence
  Description of Artificial Sequence: Synthetic oligonucleotide
  Target: LAMA2; (-) strand; PAM type: YTN; PAM sequence: CTT
ttgcagattctgtcccgact

SEQ ID NO: 265416 - DNA, 20 bp, Artificial Sequence
  Description of Artificial Sequence: Synthetic oligonucleotide
  Target: LAMA2; (-) strand; PAM type: YTN; PAM sequence: CTA
gtcacttttgcagattctgt

SEQ ID NO: 265417 - DNA, 20 bp, Artificial Sequence
  Description of Artificial Sequence: Synthetic oligonucleotide
  Target: LAMA2; (-) strand; PAM type: YTN; PAM sequence: TTC
catacatgacccctagtcac

SEQ ID NO: 265418 - DNA, 20 bp, Artificial Sequence
  Description of Artificial Sequence: Synthetic oligonucleotide
  Target: LAMA2; (-) strand; PAM type: YTN; PAM sequence: TTT
ccatacatgacccctagtca

SEQ ID NO: 265419 - DNA, 20 bp, Artificial Sequence
  Description of Artificial Sequence: Synthetic oligonucleotide
  Target: LAMA2; (-) strand; PAM type: YTN; PAM sequence: TTT
tccatacatgacccctagtc

SEQ ID NO: 265420 - DNA, 20 bp, Artificial Sequence
  Description of Artificial Sequence: Synthetic oligonucleotide
  Target: LAMA2; (-) strand; PAM type: YTN; PAM sequence: CTC
aagtgttttccatacatgac

SEQ ID NO: 265421 - DNA, 20 bp, Artificial Sequence
  Description of Artificial Sequence: Synthetic oligonucleotide
  Target: LAMA2; (-) strand; PAM type: YTN; PAM sequence: TTC
tcaagtgttttccatacatg

SEQ ID NO: 265422 - DNA, 20 bp, Artificial Sequence
  Description of Artificial Sequence: Synthetic oligonucleotide
  Target: LAMA2; (-) strand; PAM type: YTN; PAM sequence: TTT
ctcaagtgttttccatacat

SEQ ID NO: 265423 - DNA, 20 bp, Artificial Sequence
  Description of Artificial Sequence: Synthetic oligonucleotide
  Target: LAMA2; (-) strand; PAM type: YTN; PAM sequence: CTC
acaatttctcaagtgttttc

SEQ ID NO: 265424 - DNA, 20 bp, Artificial Sequence
  Description of Artificial Sequence: Synthetic oligonucleotide
  Target: LAMA2; (-) strand; PAM type: YTN; PAM sequence: TTC
tcacaatttctcaagtgttt

SEQ ID NO: 265425 - DNA, 20 bp, Artificial Sequence
  Description of Artificial Sequence: Synthetic oligonucleotide
  Target: LAMA2; (-) strand; PAM type: YTN; PAM sequence: TTA
tgttctcacaatttctcaag

SEQ ID NO: 265426 - DNA, 20 bp, Artificial Sequence
  Description of Artificial Sequence: Synthetic oligonucleotide
  Target: LAMA2; (-) strand; PAM type: YTN; PAM sequence: TTT
atgttctcacaatttctcaa

SEQ ID NO: 265427 - DNA, 20 bp, Artificial Sequence
  Description of Artificial Sequence: Synthetic oligonucleotide
  Target: LAMA2; (-) strand; PAM type: YTN; PAM sequence: TTT
tatgttctcacaatttctca

SEQ ID NO: 265428 - DNA, 20 bp, Artificial Sequence
  Description of Artificial Sequence: Synthetic oligonucleotide
  Target: LAMA2; (-) strand; PAM type: YTN; PAM sequence: CTG
cgacaaattttatgttctca

SEQ ID NO: 265429 - DNA, 20 bp, Artificial Sequence
  Description of Artificial Sequence: Synthetic oligonucleotide
  Target: LAMA2; (-) strand; PAM type: YTN; PAM sequence: CTA
tcctgcgacaaattttatgt

SEQ ID NO: 265430 - DNA, 20 bp, Artificial Sequence
  Description of Artificial Sequence: Synthetic oligonucleotide
  Target: LAMA2; (-) strand; PAM type: YTN; PAM sequence: TTA
ctatcctgcgacaaatttta

SEQ ID NO: 265431 - DNA, 20 bp, Artificial Sequence
  Description of Artificial Sequence: Synthetic oligonucleotide
  Target: LAMA2; (-) strand; PAM type: YTN; PAM sequence: CTT
actatcctgcgacaaatttt

SEQ ID NO: 265432 - DNA, 20 bp, Artificial Sequence
  Description of Artificial Sequence: Synthetic oligonucleotide
  Target: LAMA2; (-) strand; PAM type: YTN; PAM sequence: TTG
cttactatcctgcgacaaat

SEQ ID NO: 265433 - DNA, 20 bp, Artificial Sequence
  Description of Artificial Sequence: Synthetic oligonucleotide
  Target: LAMA2; (-) strand; PAM type: YTN; PAM sequence: TTA
ttgcttactatcctgcgaca

SEQ ID NO: 265434 - DNA, 20 bp, Artificial Sequence
  Description of Artificial Sequence: Synthetic oligonucleotide
  Target: LAMA2; (-) strand; PAM type: YTN; PAM sequence: TTT
attgcttactatcctgcgac

SEQ ID NO: 265435 - DNA, 20 bp, Artificial Sequence
  Description of Artificial Sequence: Synthetic oligonucleotide
  Target: LAMA2; (-) strand; PAM type: YTN; PAM sequence: TTT
tattgcttactatcctgcga

SEQ ID NO: 265436 - DNA, 20 bp, Artificial Sequence
  Description of Artificial Sequence: Synthetic oligonucleotide
  Target: LAMA2; (-) strand; PAM type: YTN; PAM sequence: CTG
gaaagatgttttattgctta

SEQ ID NO: 265437 - DNA, 20 bp, Artificial Sequence
  Description of Artificial Sequence: Synthetic oligonucleotide
  Target: LAMA2; (-) strand; PAM type: YTN; PAM sequence: TTA
taaaacctggaaagatgttt

SEQ ID NO: 265438 - DNA, 20 bp, Artificial Sequence
  Description of Artificial Sequence: Synthetic oligonucleotide
  Target: LAMA2; (-) strand; PAM type: YTN; PAM sequence: TTT
ataaaacctggaaagatgtt

SEQ ID NO: 265439 - DNA, 20 bp, Artificial Sequence
  Description of Artificial Sequence: Synthetic oligonucleotide
  Target: LAMA2; (-) strand; PAM type: YTN; PAM sequence: CTT
tataaaacctggaaagatgt

SEQ ID NO: 265440 - DNA, 20 bp, Artificial Sequence
  Description of Artificial Sequence: Synthetic oligonucleotide
  Target: LAMA2; (-) strand; PAM type: YTN; PAM sequence: TTC
ctttataaaacctggaaaga

SEQ ID NO: 265441 - DNA, 20 bp, Artificial Sequence
  Description of Artificial Sequence: Synthetic oligonucleotide
  Target: LAMA2; (-) strand; PAM type: YTN; PAM sequence: TTT
cctttataaaacctggaaag

SEQ ID NO: 265442 - DNA, 20 bp, Artificial Sequence
  Description of Artificial Sequence: Synthetic oligonucleotide
  Target: LAMA2; (-) strand; PAM type: YTN; PAM sequence: TTT
tcctttataaaacctggaaa

SEQ ID NO: 265443 - DNA, 20 bp, Artificial Sequence
  Description of Artificial Sequence: Synthetic oligonucleotide
  Target: LAMA2; (-) strand; PAM type: YTN; PAM sequence: TTA
ttttcctttataaaacctgg

SEQ ID NO: 265444 - DNA, 20 bp, Artificial Sequence
  Description of Artificial Sequence: Synthetic oligonucleotide
  Target: LAMA2; (-) strand; PAM type: YTN; PAM sequence: TTT
attttcctttataaaacctg

SEQ ID NO: 265445 - DNA, 20 bp, Artificial Sequence
  Description of Artificial Sequence: Synthetic oligonucleotide
  Target: LAMA2; (-) strand; PAM type: YTN; PAM sequence: TTT
tattttcctttataaaacct

SEQ ID NO: 265446 - DNA, 20 bp, Artificial Sequence
  Description of Artificial Sequence: Synthetic oligonucleotide
  Target: LAMA2; (-) strand; PAM type: YTN; PAM sequence: CTA
cattttattttcctttataa

SEQ ID NO: 265447 - DNA, 20 bp, Artificial Sequence
  Description of Artificial Sequence: Synthetic oligonucleotide
  Target: LAMA2; (-) strand; PAM type: YTN; PAM sequence: TTC
ctacattttattttccttta

SEQ ID NO: 265448 - DNA, 20 bp, Artificial Sequence
  Description of Artificial Sequence: Synthetic oligonucleotide
  Target: LAMA2; (-) strand; PAM type: YTN; PAM sequence: TTT
cctacattttattttccttt

SEQ ID NO: 265449 - DNA, 20 bp, Artificial Sequence
  Description of Artificial Sequence: Synthetic oligonucleotide
  Target: LAMA2; (-) strand; PAM type: YTN; PAM sequence: CTG
gagatgacaatcagtttcct

SEQ ID NO: 265450 - DNA, 20 bp, Artificial Sequence
  Description of Artificial Sequence: Synthetic oligonucleotide
  Target: LAMA2; (-) strand; PAM type: YTN; PAM sequence: TTC
actggagatgacaatcagtt

SEQ ID NO: 265451 - DNA, 20 bp, Artificial Sequence
  Description of Artificial Sequence: Synthetic oligonucleotide
  Target: LAMA2; (-) strand; PAM type: YTN; PAM sequence: TTT
cactggagatgacaatcagt

SEQ ID NO: 265452 - DNA, 20 bp, Artificial Sequence
  Description of Artificial Sequence: Synthetic oligonucleotide
  Target: LAMA2; (-) strand; PAM type: YTN; PAM sequence: TTA
agtttcactggagatgacaa

SEQ ID NO: 265453 - DNA, 20 bp, Artificial Sequence
  Description of Artificial Sequence: Synthetic oligonucleotide
  Target: LAMA2; (-) strand; PAM type: YTN; PAM sequence: CTT
aagtttcactggagatgaca

SEQ ID NO: 265454 - DNA, 20 bp, Artificial Sequence
  Description of Artificial Sequence: Synthetic oligonucleotide
  Target: LAMA2; (-) strand; PAM type: YTN; PAM sequence: TTA
agtaagcaatacttaagttt

SEQ ID NO: 265455 - DNA, 20 bp, Artificial Sequence
  Description of Artificial Sequence: Synthetic oligonucleotide
  Target: LAMA2; (-) strand; PAM type: YTN; PAM sequence: TTG
ttaagtaagcaatacttaag

SEQ ID NO: 265456 - DNA, 20 bp, Artificial Sequence
  Description of Artificial Sequence: Synthetic oligonucleotide
  Target: LAMA2; (-) strand; PAM type: YTN; PAM sequence: TTT
gttaagtaagcaatacttaa

SEQ ID NO: 265457 - DNA, 20 bp, Artificial Sequence
  Description of Artificial Sequence: Synthetic oligonucleotide
  Target: LAMA2; (-) strand; PAM type: YTN; PAM sequence: TTG
acagatatttgttaagtaag

SEQ ID NO: 265458 - DNA, 20 bp, Artificial Sequence
  Description of Artificial Sequence: Synthetic oligonucleotide
  Target: LAMA2; (-) strand; PAM type: YTN; PAM sequence: TTC
cacagttgacagatatttgt

SEQ ID NO: 265459 - DNA, 20 bp, Artificial Sequence
  Description of Artificial Sequence: Synthetic oligonucleotide
  Target: LAMA2; (-) strand; PAM type: YTN; PAM sequence: TTT
ccacagttgacagatatttg

SEQ ID NO: 265460 - DNA, 20 bp, Artificial Sequence
  Description of Artificial Sequence: Synthetic oligonucleotide
  Target: LAMA2; (-) strand; PAM type: YTN; PAM sequence: TTT
tccacagttgacagatattt

SEQ ID NO: 265461 - DNA, 20 bp, Artificial Sequence
  Description of Artificial Sequence: Synthetic oligonucleotide
  Target: LAMA2; (-) strand; PAM type: YTN; PAM sequence: TTT
ttccacagttgacagatatt

SEQ ID NO: 265462 - DNA, 20 bp, Artificial Sequence
  Description of Artificial Sequence: Synthetic oligonucleotide
  Target: LAMA2; (-) strand; PAM type: YTN; PAM sequence: TTT
tttccacagttgacagatat

SEQ ID NO: 265463 - DNA, 20 bp, Artificial Sequence
  Description of Artificial Sequence: Synthetic oligonucleotide
  Target: LAMA2; (-) strand; PAM type: YTN; PAM sequence: TTA
ttttttccacagttgacaga

SEQ ID NO: 265464 - DNA, 20 bp, Artificial Sequence
  Description of Artificial Sequence: Synthetic oligonucleotide
  Target: LAMA2; (-) strand; PAM type: YTN; PAM sequence: TTT
attttttccacagttgacag

SEQ ID NO: 265465 - DNA, 20 bp, Artificial Sequence
  Description of Artificial Sequence: Synthetic oligonucleotide
  Target: LAMA2; (-) strand; PAM type: YTN; PAM sequence: CTG
tttattttttccacagttga

SEQ ID NO: 265466 - DNA, 20 bp, Artificial Sequence
  Description of Artificial Sequence: Synthetic oligonucleotide
  Target: LAMA2; (-) strand; PAM type: YTN; PAM sequence: CTA
atgagcactgtttatttttt

SEQ ID NO: 265467 - DNA, 20 bp, Artificial Sequence
  Description of Artificial Sequence: Synthetic oligonucleotide
  Target: LAMA2; (-) strand; PAM type: YTN; PAM sequence: TTC
ctaatgagcactgtttattt

SEQ ID NO: 265468 - DNA, 20 bp, Artificial Sequence
  Description of Artificial Sequence: Synthetic oligonucleotide
  Target: LAMA2; (-) strand; PAM type: YTN; PAM sequence: CTG
attcctaatgagcactgttt

SEQ ID NO: 265469 - DNA, 20 bp, Artificial Sequence
  Description of Artificial Sequence: Synthetic oligonucleotide
  Target: LAMA2; (-) strand; PAM type: YTN; PAM sequence: TTC
tgattcctaatgagcactgt

SEQ ID NO: 265470 - DNA, 20 bp, Artificial Sequence
  Description of Artificial Sequence: Synthetic oligonucleotide
  Target: LAMA2; (-) strand; PAM type: YTN; PAM sequence: CTA
ttctgattcctaatgagcac

SEQ ID NO: 265471 - DNA, 20 bp, Artificial Sequence
  Description of Artificial Sequence: Synthetic oligonucleotide
  Target: LAMA2; (-) strand; PAM type: YTN; PAM sequence: CTG
acaaagtgaacctattctga

SEQ ID NO: 265472 - DNA, 20 bp, Artificial Sequence
  Description of Artificial Sequence: Synthetic oligonucleotide
  Target: LAMA2; (-) strand; PAM type: YTN; PAM sequence: CTC
tgacaaagtgaacctattct

SEQ ID NO: 265473 - DNA, 20 bp, Artificial Sequence
  Description of Artificial Sequence: Synthetic oligonucleotide
  Target: LAMA2; (-) strand; PAM type: YTN; PAM sequence: TTG
cctctgacaaagtgaaccta

SEQ ID NO: 265474 - DNA, 20 bp, Artificial Sequence
  Description of Artificial Sequence: Synthetic oligonucleotide
  Target: LAMA2; (-) strand; PAM type: YTN; PAM sequence: TTA
caggcatgagccattgcctc

SEQ ID NO: 265475 - DNA, 20 bp, Artificial Sequence
  Description of Artificial Sequence: Synthetic oligonucleotide
  Target: LAMA2; (-) strand; PAM type: YTN; PAM sequence: CTA
ggattacaggcatgagccat

SEQ ID NO: 265476 - DNA, 20 bp, Artificial Sequence
  Description of Artificial Sequence: Synthetic oligonucleotide
  Target: LAMA2; (-) strand; PAM type: YTN; PAM sequence: CTC
caaaagtgctaggattacag

SEQ ID NO: 265477 - DNA, 20 bp, Artificial Sequence
  Description of Artificial Sequence: Synthetic oligonucleotide
  Target: LAMA2; (-) strand; PAM type: YTN; PAM sequence: TTG
gcctccaaaagtgctaggat

SEQ ID NO: 265478 - DNA, 20 bp, Artificial Sequence
  Description of Artificial Sequence: Synthetic oligonucleotide
  Target: LAMA2; (-) strand; PAM type: YTN; PAM sequence: CTT
ggcctccaaaagtgctagga

SEQ ID NO: 265479 - DNA, 20 bp, Artificial Sequence
  Description of Artificial Sequence: Synthetic oligonucleotide
  Target: LAMA2; (-) strand; PAM type: YTN; PAM sequence: CTC
ttggcctccaaaagtgctag

SEQ ID NO: 265480 - DNA, 20 bp, Artificial Sequence
  Description of Artificial Sequence: Synthetic oligonucleotide
  Target: LAMA2; (-) strand; PAM type: YTN; PAM sequence: CTC
cgctcttggcctccaaaagt

SEQ ID NO: 265481 - DNA, 20 bp, Artificial Sequence
  Description of Artificial Sequence: Synthetic oligonucleotide
  Target: LAMA2; (-) strand; PAM type: YTN; PAM sequence: CTG
gatcctccgctcttggcctc

SEQ ID NO: 265482 - DNA, 20 bp, Artificial Sequence
  Description of Artificial Sequence: Synthetic oligonucleotide
  Target: LAMA2; (-) strand; PAM type: YTN; PAM sequence: CTC
ctggatcctccgctcttggc

SEQ ID NO: 265483 - DNA, 20 bp, Artificial Sequence
  Description of Artificial Sequence: Synthetic oligonucleotide
  Target: LAMA2; (-) strand; PAM type: YTN; PAM sequence: CTC
gaactcctggatcctccgct

SEQ ID NO: 265484 - DNA, 20 bp, Artificial Sequence
  Description of Artificial Sequence: Synthetic oligonucleotide
  Target: LAMA2; (-) strand; PAM type: YTN; PAM sequence: CTG
gtctcgaactcctggatcct

SEQ ID NO: 265485 - DNA, 20 bp, Artificial Sequence
  Description of Artificial Sequence: Synthetic oligonucleotide
  Target: LAMA2; (-) strand; PAM type: YTN; PAM sequence: TTG
accatgctggtctcgaactc

SEQ ID NO: 265486 - DNA, 20 bp, Artificial Sequence
  Description of Artificial Sequence: Synthetic oligonucleotide
  Target: LAMA2; (-) strand; PAM type: YTN; PAM sequence: TTG
ttgaccatgctggtctcgaa

SEQ ID NO: 265487 - DNA, 20 bp, Artificial Sequence
  Description of Artificial Sequence: Synthetic oligonucleotide
  Target: LAMA2; (-) strand; PAM type: YTN; PAM sequence: TTT
gttgaccatgctggtctcga

SEQ ID NO: 265488 - DNA, 20 bp, Artificial Sequence
  Description of Artificial Sequence: Synthetic oligonucleotide
  Target: LAMA2; (-) strand; PAM type: YTN; PAM sequence: CTT
tgttgaccatgctggtctcg

SEQ ID NO: 265489 - DNA, 20 bp, Artificial Sequence
  Description of Artificial Sequence: Synthetic oligonucleotide
  Target: LAMA2; (-) strand; PAM type: YTN; PAM sequence: TTG
tagacacagggcctttgttg

SEQ ID NO: 265490 - DNA, 20 bp, Artificial Sequence
  Description of Artificial Sequence: Synthetic oligonucleotide
  Target: LAMA2; (-) strand; PAM type: YTN; PAM sequence: TTT
gtagacacagggcctttgtt

SEQ ID NO: 265491 - DNA, 20 bp, Artificial Sequence
  Description of Artificial Sequence: Synthetic oligonucleotide
  Target: LAMA2; (-) strand; PAM type: YTN; PAM sequence: TTT
tgtagacacagggcctttgt

SEQ ID NO: 265492 - DNA, 20 bp, Artificial Sequence
  Description of Artificial Sequence: Synthetic oligonucleotide
  Target: LAMA2; (-) strand; PAM type: YTN; PAM sequence: TTT
ttgtagacacagggcctttg

SEQ ID NO: 265493 - DNA, 20 bp, Artificial Sequence
  Description of Artificial Sequence: Synthetic oligonucleotide
  Target: LAMA2; (-) strand; PAM type: YTN; PAM sequence: TTT
tttgtagacacagggccttt

SEQ ID NO: 265494 - DNA, 20 bp, Artificial Sequence
  Description of Artificial Sequence: Synthetic oligonucleotide
  Target: LAMA2; (-) strand; PAM type: YTN; PAM sequence: TTA
attttttgtagacacagggc

SEQ ID NO: 265495 - DNA, 20 bp, Artificial Sequence
  Description of Artificial Sequence: Synthetic oligonucleotide
  Target: LAMA2; (-) strand; PAM type: YTN; PAM sequence: TTT
aattttttgtagacacaggg

SEQ ID NO: 265496 - DNA, 20 bp, Artificial Sequence
  Description of Artificial Sequence: Synthetic oligonucleotide
  Target: LAMA2; (-) strand; PAM type: YTN; PAM sequence: TTT
taattttttgtagacacagg

SEQ ID NO: 265497 - DNA, 20 bp, Artificial Sequence
  Description of Artificial Sequence: Synthetic oligonucleotide
  Target: LAMA2; (-) strand; PAM type: YTN; PAM sequence: TTT
ttaattttttgtagacacag

SEQ ID NO: 265498 - DNA, 20 bp, Artificial Sequence
  Description of Artificial Sequence: Synthetic oligonucleotide
  Target: LAMA2; (-) strand; PAM type: YTN; PAM sequence: TTA
atttttaattttttgtagac

SEQ ID NO: 265499 - DNA, 20 bp, Artificial Sequence
  Description of Artificial Sequence: Synthetic oligonucleotide
  Target: LAMA2; (-) strand; PAM type: YTN; PAM sequence: TTT
aatttttaattttttgtaga

SEQ ID NO: 265500 - DNA, 20 bp, Artificial Sequence
  Description of Artificial Sequence: Synthetic oligonucleotide
  Target: LAMA2; (-) strand; PAM type: YTN; PAM sequence: TTT
taatttttaattttttgtag

SEQ ID NO: 265501 - DNA, 20 bp, Artificial Sequence
  Description of Artificial Sequence: Synthetic oligonucleotide
  Target: LAMA2; (-) strand; PAM type: YTN; PAM sequence: TTT
ttaatttttaattttttgta

SEQ ID NO: 265502 - DNA, 20 bp, Artificial Sequence
  Description of Artificial Sequence: Synthetic oligonucleotide
  Target: LAMA2; (-) strand; PAM type: YTN; PAM sequence: TTT
tttaatttttaattttttgt

SEQ ID NO: 265503 - DNA, 20 bp, Artificial Sequence
  Description of Artificial Sequence: Synthetic oligonucleotide
  Target: LAMA2; (-) strand; PAM type: YTN; PAM sequence: TTT
ttttaatttttaattttttg

SEQ ID NO: 265504 - DNA, 20 bp, Artificial Sequence
  Description of Artificial Sequence: Synthetic oligonucleotide
  Target: LAMA2; (-) strand; PAM type: YTN; PAM sequence: TTT
tttttaatttttaatttttt

SEQ ID NO: 265505 - DNA, 20 bp, Artificial Sequence
  Description of Artificial Sequence: Synthetic oligonucleotide
  Target: LAMA2; (-) strand; PAM type: YTN; PAM sequence: CTT
ttttttaatttttaattttt

SEQ ID NO: 265506 - DNA, 20 bp, Artificial Sequence
  Description of Artificial Sequence: Synthetic oligonucleotide
  Target: LAMA2; (-) strand; PAM type: YTN; PAM sequence: TTC
ttttttttaatttttaattt

SEQ ID NO: 265507 - DNA, 20 bp, Artificial Sequence
  Description of Artificial Sequence: Synthetic oligonucleotide
  Target: LAMA2; (-) strand; PAM type: YTN; PAM sequence: CTA
ttcttttttttaatttttaa

SEQ ID NO: 265508 - DNA, 20 bp, Artificial Sequence
  Description of Artificial Sequence: Synthetic oligonucleotide
  Target: LAMA2; (-) strand; PAM type: YTN; PAM sequence: TTG
aatgaacctattcttttttt

SEQ ID NO: 265509 - DNA, 20 bp, Artificial Sequence
  Description of Artificial Sequence: Synthetic oligonucleotide
  Target: LAMA2; (-) strand; PAM type: YTN; PAM sequence: TTT
gaatgaacctattctttttt

SEQ ID NO: 265510 - DNA, 20 bp, Artificial Sequence
  Description of Artificial Sequence: Synthetic oligonucleotide
  Target: LAMA2; (-) strand; PAM type: YTN; PAM sequence: TTT
tgaatgaacctattcttttt

SEQ ID NO: 265511 - DNA, 20 bp, Artificial Sequence
  Description of Artificial Sequence: Synthetic oligonucleotide
  Target: LAMA2; (-) strand; PAM type: YTN; PAM sequence: TTA
ttttgaatgaacctattctt

SEQ ID NO: 265512 - DNA, 20 bp, Artificial Sequence
  Description of Artificial Sequence: Synthetic oligonucleotide
  Target: LAMA2; (-) strand; PAM type: YTN; PAM sequence: TTG
atatgtgttattttgaatga

SEQ ID NO: 265513 - DNA, 20 bp, Artificial Sequence
  Description of Artificial Sequence: Synthetic oligonucleotide
  Target: LAMA2; (-) strand; PAM type: YTN; PAM sequence: TTT
gatatgtgttattttgaatg

SEQ ID NO: 265514 - DNA, 20 bp, Artificial Sequence
  Description of Artificial Sequence: Synthetic oligonucleotide
  Target: LAMA2; (-) strand; PAM type: YTN; PAM sequence: TTA
gtttgatatgtgttattttg

SEQ ID NO: 265515 - DNA, 20 bp, Artificial Sequence
  Description of Artificial Sequence: Synthetic oligonucleotide
  Target: LAMA2; (-) strand; PAM type: YTN; PAM sequence: CTT
agtttgatatgtgttatttt

SEQ ID NO: 265516 - DNA, 20 bp, Artificial Sequence
  Description of Artificial Sequence: Synthetic oligonucleotide
  Target: LAMA2; (-) strand; PAM type: YTN; PAM sequence: CTA
gcacttagtttgatatgtgt

SEQ ID NO: 265517 - DNA, 20 bp, Artificial Sequence
  Description of Artificial Sequence: Synthetic oligonucleotide
  Target: LAMA2; (-) strand; PAM type: YTN; PAM sequence: TTA
tatatacagtaaacctagca

SEQ ID NO: 265518 - DNA, 20 bp, Artificial Sequence
  Description of Artificial Sequence: Synthetic oligonucleotide
  Target: LAMA2; (-) strand; PAM type: YTN; PAM sequence: TTC
agatattatatatacagtaa

SEQ ID NO: 265519 - DNA, 20 bp, Artificial Sequence
  Description of Artificial Sequence: Synthetic oligonucleotide
  Target: LAMA2; (-) strand; PAM type: YTN; PAM sequence: TTT
cagatattatatatacagta

SEQ ID NO: 265520 - DNA, 20 bp, Artificial Sequence
  Description of Artificial Sequence: Synthetic oligonucleotide
  Target: LAMA2; (-) strand; PAM type: YTN; PAM sequence: TTT
tcagatattatatatacagt

SEQ ID NO: 265521 - DNA, 20 bp, Artificial Sequence
  Description of Artificial Sequence: Synthetic oligonucleotide
  Target: LAMA2; (-) strand; PAM type: YTN; PAM sequence: CTA
ggttttcagatattatatat

SEQ ID NO: 265522 - DNA, 20 bp, Artificial Sequence
  Description of Artificial Sequence: Synthetic oligonucleotide
  Target: LAMA2; (-) strand; PAM type: YTN; PAM sequence: TTA
gaaaactaggttttcagata

SEQ ID NO: 265523 - DNA, 20 bp, Artificial Sequence
  Description of Artificial Sequence: Synthetic oligonucleotide
  Target: LAMA2; (-) strand; PAM type: YTN; PAM sequence: TTT
agaaaactaggttttcagat

SEQ ID NO: 265524 - DNA, 20 bp, Artificial Sequence
  Description of Artificial Sequence: Synthetic oligonucleotide
  Target: LAMA2; (-) strand; PAM type: YTN; PAM sequence: CTG
ggatttagaaaactaggttt

SEQ ID NO: 265525 - DNA, 20 bp, Artificial Sequence
  Description of Artificial Sequence: Synthetic oligonucleotide
  Target: LAMA2; (-) strand; PAM type: YTN; PAM sequence: TTA
ctgggatttagaaaactagg

SEQ ID NO: 265526 - DNA, 20 bp, Artificial Sequence
  Description of Artificial Sequence: Synthetic oligonucleotide
  Target: LAMA2; (-) strand; PAM type: YTN; PAM sequence: TTT
actgggatttagaaaactag

SEQ ID NO: 265527 - DNA, 20 bp, Artificial Sequence
  Description of Artificial Sequence: Synthetic oligonucleotide
  Target: LAMA2; (-) strand; PAM type: YTN; PAM sequence: TTT
tactgggatttagaaaacta

SEQ ID NO: 265528 - DNA, 20 bp, Artificial Sequence
  Description of Artificial Sequence: Synthetic oligonucleotide
  Target: LAMA2; (-) strand; PAM type: YTN; PAM sequence: TTG
atattttactgggatttaga

SEQ ID NO: 265529 - DNA, 20 bp, Artificial Sequence
  Description of Artificial Sequence: Synthetic oligonucleotide
  Target: LAMA2; (-) strand; PAM type: YTN; PAM sequence: CTT
gatattttactgggatttag

SEQ ID NO: 265530 - DNA, 20 bp, Artificial Sequence
  Description of Artificial Sequence: Synthetic oligonucleotide
  Target: LAMA2; (-) strand; PAM type: YTN; PAM sequence: CTG
ataaacttgatattttactg

SEQ ID NO: 265531 - DNA, 20 bp, Artificial Sequence
  Description of Artificial Sequence: Synthetic oligonucleotide
  Target: LAMA2; (-) strand; PAM type: YTN; PAM sequence: TTG
tctgataaacttgatatttt

SEQ ID NO: 265532 - DNA, 20 bp, Artificial Sequence
  Description of Artificial Sequence: Synthetic oligonucleotide
  Target: LAMA2; (-) strand; PAM type: YTN; PAM sequence: TTG
agatatgatgtatcacattg

SEQ ID NO: 265533 - DNA, 20 bp, Artificial Sequence
  Description of Artificial Sequence: Synthetic oligonucleotide
  Target: LAMA2; (-) strand; PAM type: YTN; PAM sequence: TTT
gagatatgatgtatcacatt

SEQ ID NO: 265534 - DNA, 20 bp, Artificial Sequence
  Description of Artificial Sequence: Synthetic oligonucleotide
  Target: LAMA2; (-) strand; PAM type: YTN; PAM sequence: CTG
aatttgagatatgatgtatc

SEQ ID NO: 265535 - DNA, 20 bp, Artificial Sequence
  Description of Artificial Sequence: Synthetic oligonucleotide
  Target: LAMA2; (-) strand; PAM type: YTN; PAM sequence: TTG
ctgaatttgagatatgatgt

SEQ ID NO: 265536 - DNA, 20 bp, Artificial Sequence
  Description of Artificial Sequence: Synthetic oligonucleotide
  Target: LAMA2; (-) strand; PAM type: YTN; PAM sequence: TTT
gctgaatttgagatatgatg

SEQ ID NO: 265537 - DNA, 20 bp, Artificial Sequence
  Description of Artificial Sequence: Synthetic oligonucleotide
  Target: LAMA2; (-) strand; PAM type: YTN; PAM sequence: TTT
tgctgaatttgagatatgat

SEQ ID NO: 265538 - DNA, 20 bp, Artificial Sequence
  Description of Artificial Sequence: Synthetic oligonucleotide
  Target: LAMA2; (-) strand; PAM type: YTN; PAM sequence: TTT
ttgctgaatttgagatatga

SEQ ID NO: 265539 - DNA, 20 bp, Artificial Sequence
  Description of Artificial Sequence: Synthetic oligonucleotide
  Target: LAMA2; (-) strand; PAM type: YTN; PAM sequence: TTT
tttgctgaatttgagatatg

SEQ ID NO: 265540 - DNA, 20 bp, Artificial Sequence
  Description of Artificial Sequence: Synthetic oligonucleotide
  Target: LAMA2; (-) strand; PAM type: YTN; PAM sequence: TTA
ttttttgctgaatttgagat

SEQ ID NO: 265541 - DNA, 20 bp, Artificial Sequence
  Description of Artificial Sequence: Synthetic oligonucleotide
  Target: LAMA2; (-) strand; PAM type: YTN; PAM sequence: TTA
ttattttttgctgaatttga

SEQ ID NO: 265542 - DNA, 20 bp, Artificial Sequence
  Description of Artificial Sequence: Synthetic oligonucleotide
  Target: LAMA2; (-) strand; PAM type: YTN; PAM sequence: TTG
gacacataatagcagttatt

SEQ ID NO: 265543 - DNA, 20 bp, Artificial Sequence
  Description of Artificial Sequence: Synthetic oligonucleotide
  Target: LAMA2; (-) strand; PAM type: YTN; PAM sequence: TTT
ggacacataatagcagttat

SEQ ID NO: 265544 - DNA, 20 bp, Artificial Sequence
  Description of Artificial Sequence: Synthetic oligonucleotide
  Target: LAMA2; (-) strand; PAM type: YTN; PAM sequence: TTT
tggacacataatagcagtta

SEQ ID NO: 265545 - DNA, 20 bp, Artificial Sequence
  Description of Artificial Sequence: Synthetic oligonucleotide
  Target: LAMA2; (-) strand; PAM type: YTN; PAM sequence: CTG
gtacatacacagttttggac

SEQ ID NO: 265546 - DNA, 20 bp, Artificial Sequence
  Description of Artificial Sequence: Synthetic oligonucleotide
  Target: LAMA2; (-) strand; PAM type: YTN; PAM sequence: TTG
gtcctggtacatacacagtt

SEQ ID NO: 265547 - DNA, 20 bp, Artificial Sequence
  Description of Artificial Sequence: Synthetic oligonucleotide
  Target: LAMA2; (-) strand; PAM type: YTN; PAM sequence: TTT
ggtcctggtacatacacagt

SEQ ID NO: 265548 - DNA, 20 bp, Artificial Sequence
  Description of Artificial Sequence: Synthetic oligonucleotide
  Target: LAMA2; (-) strand; PAM type: YTN; PAM sequence: TTT
tggtcctggtacatacacag

SEQ ID NO: 265549 - DNA, 20 bp, Artificial Sequence
  Description of Artificial Sequence: Synthetic oligonucleotide
  Target: LAMA2; (-) strand; PAM type: YTN; PAM sequence: CTG
ttttggtcctggtacataca

SEQ ID NO: 265550 - DNA, 20 bp, Artificial Sequence
  Description of Artificial Sequence: Synthetic oligonucleotide
  Target: LAMA2; (-) strand; PAM type: YTN; PAM sequence: CTG
tacagtgacctgttttggtc

SEQ ID NO: 265551 - DNA, 20 bp, Artificial Sequence
  Description of Artificial Sequence: Synthetic oligonucleotide
  Target: LAMA2; (-) strand; PAM type: YTN; PAM sequence: CTC
tgtacagtgacctgttttgg

SEQ ID NO: 265552 - DNA, 20 bp, Artificial Sequence
  Description of Artificial Sequence: Synthetic oligonucleotide
  Target: LAMA2; (-) strand; PAM type: YTN; PAM sequence: TTG
taacaataaatgagaaaatc

SEQ ID NO: 265553 - DNA, 20 bp, Artificial Sequence
  Description of Artificial Sequence: Synthetic oligonucleotide
  Target: LAMA2; (-) strand; PAM type: YTN; PAM sequence: TTA
ttgtaacaataaatgagaaa

SEQ ID NO: 265554 - DNA, 20 bp, Artificial Sequence
  Description of Artificial Sequence: Synthetic oligonucleotide
  Target: LAMA2; (-) strand; PAM type: YTN; PAM sequence: TTT
attgtaacaataaatgagaa

SEQ ID NO: 265555 - DNA, 20 bp, Artificial Sequence
  Description of Artificial Sequence: Synthetic oligonucleotide
  Target: LAMA2; (-) strand; PAM type: YTN; PAM sequence: CTC
ataagtttattgtaacaata

SEQ ID NO: 265556 - DNA, 20 bp, Artificial Sequence
  Description of Artificial Sequence: Synthetic oligonucleotide
  Target: LAMA2; (-) strand; PAM type: YTN; PAM sequence: CTA
tctcataagtttattgtaac

SEQ ID NO: 265557 - DNA, 20 bp, Artificial Sequence
  Description of Artificial Sequence: Synthetic oligonucleotide
  Target: LAMA2; (-) strand; PAM type: YTN; PAM sequence: TTG
tctatctcataagtttattg

SEQ ID NO: 265558 - DNA, 20 bp, Artificial Sequence
  Description of Artificial Sequence: Synthetic oligonucleotide
  Target: LAMA2; (-) strand; PAM type: YTN; PAM sequence: CTT
gtctatctcataagtttatt

SEQ ID NO: 265559 - DNA, 20 bp, Artificial Sequence
  Description of Artificial Sequence: Synthetic oligonucleotide
  Target: LAMA2; (-) strand; PAM type: YTN; PAM sequence: TTC
atcaacaataaaagaagaaa

SEQ ID NO: 265560 - DNA, 20 bp, Artificial Sequence
  Description of Artificial Sequence: Synthetic oligonucleotide
  Target: LAMA2; (-) strand; PAM type: YTN; PAM sequence: CTA
gcatcagttcatcaacaata

SEQ ID NO: 265561 - DNA, 20 bp, Artificial Sequence
  Description of Artificial Sequence: Synthetic oligonucleotide
  Target: LAMA2; (-) strand; PAM type: YTN; PAM sequence: CTC
tagcatcagttcatcaacaa

SEQ ID NO: 265562 - DNA, 20 bp, Artificial Sequence
  Description of Artificial Sequence: Synthetic oligonucleotide
  Target: LAMA2; (-) strand; PAM type: YTN; PAM sequence: TTC
tctagcatcagttcatcaac

SEQ ID NO: 265563 - DNA, 20 bp, Artificial Sequence
  Description of Artificial Sequence: Synthetic oligonucleotide
  Target: LAMA2; (-) strand; PAM type: YTN; PAM sequence: TTT
ctctagcatcagttcatcaa

SEQ ID NO: 265564 - DNA, 20 bp, Artificial Sequence
  Description of Artificial Sequence: Synthetic oligonucleotide
  Target: LAMA2; (-) strand; PAM type: YTN; PAM sequence: TTA
atttctctagcatcagttca

SEQ ID NO: 265565 - DNA, 20 bp, Artificial Sequence
  Description of Artificial Sequence: Synthetic oligonucleotide
  Target: LAMA2; (-) strand; PAM type: YTN; PAM sequence: TTT
aatttctctagcatcagttc

SEQ ID NO: 265566 - DNA, 20 bp, Artificial Sequence
  Description of Artificial Sequence: Synthetic oligonucleotide
  Target: LAMA2; (-) strand; PAM type: YTN; PAM sequence: TTA
tttaatttctctagcatcag

SEQ ID NO: 265567 - DNA, 20 bp, Artificial Sequence
  Description of Artificial Sequence: Synthetic oligonucleotide
  Target: LAMA2; (-) strand; PAM type: YTN; PAM sequence: TTA
agcaagttatttaatttctc

SEQ ID NO: 265568 - DNA, 20 bp, Artificial Sequence
  Description of Artificial Sequence: Synthetic oligonucleotide
  Target: LAMA2; (-) strand; PAM type: YTN; PAM sequence: CTT
aagcaagttatttaatttct

SEQ ID NO: 265569 - DNA, 20 bp, Artificial Sequence
  Description of Artificial Sequence: Synthetic oligonucleotide
  Target: LAMA2; (-) strand; PAM type: YTN; PAM sequence: TTA
tgacttaagcaagttattta

SEQ ID NO: 265570 - DNA, 20 bp, Artificial Sequence
  Description of Artificial Sequence: Synthetic oligonucleotide
  Target: LAMA2; (-) strand; PAM type: YTN; PAM sequence: TTT
atgacttaagcaagttattt

SEQ ID NO: 265571 - DNA, 20 bp, Artificial Sequence
  Description of Artificial Sequence: Synthetic oligonucleotide
  Target: LAMA2; (-) strand; PAM type: YTN; PAM sequence: TTT
tatgacttaagcaagttatt

SEQ ID NO: 265572 - DNA, 20 bp, Artificial Sequence
  Description of Artificial Sequence: Synthetic oligonucleotide
  Target: LAMA2; (-) strand; PAM type: YTN; PAM sequence: CTG
ttttatgacttaagcaagtt

SEQ ID NO: 265573 - DNA, 20 bp, Artificial Sequence
  Description of Artificial Sequence: Synthetic oligonucleotide
  Target: LAMA2; (-) strand; PAM type: YTN; PAM sequence: CTG
ctgttttatgacttaagcaa

SEQ ID NO: 265574 - DNA, 20 bp, Artificial Sequence
  Description of Artificial Sequence: Synthetic oligonucleotide
  Target: LAMA2; (-) strand; PAM type: YTN; PAM sequence: CTC
tgctgttttatgacttaagc

SEQ ID NO: 265575 - DNA, 20 bp, Artificial Sequence
  Description of Artificial Sequence: Synthetic oligonucleotide
  Target: LAMA2; (-) strand; PAM type: YTN; PAM sequence: TTG
aaacatggatatggcctctg

SEQ ID NO: 265576 - DNA, 20 bp, Artificial Sequence
  Description of Artificial Sequence: Synthetic oligonucleotide
  Target: LAMA2; (-) strand; PAM type: YTN; PAM sequence: TTT
gaaacatggatatggcctct

SEQ ID NO: 265577 - DNA, 20 bp, Artificial Sequence
  Description of Artificial Sequence: Synthetic oligonucleotide
  Target: LAMA2; (-) strand; PAM type: YTN; PAM sequence: TTA
aacaaaccagcatttgaaac

SEQ ID NO: 265578 - DNA, 20 bp, Artificial Sequence
  Description of Artificial Sequence: Synthetic oligonucleotide
  Target: LAMA2; (-) strand; PAM type: YTN; PAM sequence: TTT
aaacaaaccagcatttgaaa

SEQ ID NO: 265579 - DNA, 20 bp, Artificial Sequence
  Description of Artificial Sequence: Synthetic oligonucleotide
  Target: LAMA2; (-) strand; PAM type: YTN; PAM sequence: CTA
tttaaacaaaccagcatttg

SEQ ID NO: 265580 - DNA, 20 bp, Artificial Sequence
  Description of Artificial Sequence: Synthetic oligonucleotide
  Target: LAMA2; (-) strand; PAM type: YTN; PAM sequence: CTC
atcaaacatctatttaaaca

SEQ ID NO: 265581 - DNA, 20 bp, Artificial Sequence
  Description of Artificial Sequence: Synthetic oligonucleotide
  Target: LAMA2; (-) strand; PAM type: YTN; PAM sequence: CTA
tgaaatagctcatcaaacat

SEQ ID NO: 265582 - DNA, 20 bp, Artificial Sequence
  Description of Artificial Sequence: Synthetic oligonucleotide
  Target: LAMA2; (-) strand; PAM type: YTN; PAM sequence: TTG
tgcacaaggatactatgaaa

SEQ ID NO: 265583 - DNA, 20 bp, Artificial Sequence
  Description of Artificial Sequence: Synthetic oligonucleotide
  Target: LAMA2; (-) strand; PAM type: YTN; PAM sequence: CTT
gtgcacaaggatactatgaa

SEQ ID NO: 265584 - DNA, 20 bp, Artificial Sequence
  Description of Artificial Sequence: Synthetic oligonucleotide
  Target: LAMA2; (-) strand; PAM type: YTN; PAM sequence: TTC
aatcttgtgcacaaggatac

SEQ ID NO: 265585 - DNA, 20 bp, Artificial Sequence
  Description of Artificial Sequence: Synthetic oligonucleotide
  Target: LAMA2; (-) strand; PAM type: YTN; PAM sequence: TTT
caatcttgtgcacaaggata

SEQ ID NO: 265586 - DNA, 20 bp, Artificial Sequence
  Description of Artificial Sequence: Synthetic oligonucleotide
  Target: LAMA2; (-) strand; PAM type: YTN; PAM sequence: TTT
tcaatcttgtgcacaaggat

SEQ ID NO: 265587 - DNA, 20 bp, Artificial Sequence
  Description of Artificial Sequence: Synthetic oligonucleotide
  Target: LAMA2; (-) strand; PAM type: YTN; PAM sequence: CTC
atattttcaatcttgtgcac

SEQ ID NO: 265588 - DNA, 20 bp, Artificial Sequence
  Description of Artificial Sequence: Synthetic oligonucleotide
  Target: LAMA2; (-) strand; PAM type: YTN; PAM sequence: CTG
gctcatattttcaatcttgt

SEQ ID NO: 265589 - DNA, 20 bp, Artificial Sequence
  Description of Artificial Sequence: Synthetic oligonucleotide
  Target: LAMA2; (-) strand; PAM type: YTN; PAM sequence: CTA
acatctggctcatattttca

SEQ ID NO: 265590 - DNA, 20 bp, Artificial Sequence
  Description of Artificial Sequence: Synthetic oligonucleotide
  Target: LAMA2; (-) strand; PAM type: YTN; PAM sequence: CTG
gctaacatctggctcatatt

SEQ ID NO: 265591 - DNA, 20 bp, Artificial Sequence
  Description of Artificial Sequence: Synthetic oligonucleotide
  Target: LAMA2; (-) strand; PAM type: YTN; PAM sequence: CTA
tcagctggctaacatctggc

SEQ ID NO: 265592 - DNA, 20 bp, Artificial Sequence
  Description of Artificial Sequence: Synthetic oligonucleotide
  Target: LAMA2; (-) strand; PAM type: YTN; PAM sequence: TTA
gcaacgtatatgcccatcaa

SEQ ID NO: 265593 - DNA, 20 bp, Artificial Sequence
  Description of Artificial Sequence: Synthetic oligonucleotide
  Target: LAMA2; (-) strand; PAM type: YTN; PAM sequence: TTT
agcaacgtatatgcccatca

SEQ ID NO: 265594 - DNA, 20 bp, Artificial Sequence
  Description of Artificial Sequence: Synthetic oligonucleotide
  Target: LAMA2; (-) strand; PAM type: YTN; PAM sequence: TTT
tagcaacgtatatgcccatc

SEQ ID NO: 265595 - DNA, 20 bp, Artificial Sequence
  Description of Artificial Sequence: Synthetic oligonucleotide
  Target: LAMA2; (-) strand; PAM type: YTN; PAM sequence: TTT
ttagcaacgtatatgcccat

SEQ ID NO: 265596 - DNA, 20 bp, Artificial Sequence
  Description of Artificial Sequence: Synthetic oligonucleotide
  Target: LAMA2; (-) strand; PAM type: YTN; PAM sequence: TTT
tttagcaacgtatatgccca

SEQ ID NO: 265597 - DNA, 20 bp, Artificial Sequence
  Description of Artificial Sequence: Synthetic oligonucleotide
  Target: LAMA2; (-) strand; PAM type: YTN; PAM sequence: TTT
ttttagcaacgtatatgccc

SEQ ID NO: 265598 - DNA, 20 bp, Artificial Sequence
  Description of Artificial Sequence: Synthetic oligonucleotide
  Target: LAMA2; (-) strand; PAM type: YTN; PAM sequence: CTG
ggtcacatttttttagcaac

SEQ ID NO: 265599 - DNA, 20 bp, Artificial Sequence
  Description of Artificial Sequence: Synthetic oligonucleotide
  Target: LAMA2; (-) strand; PAM type: YTN; PAM sequence: CTC
tgggtcacatttttttagca

SEQ ID NO: 265600 - DNA, 20 bp, Artificial Sequence
  Description of Artificial Sequence: Synthetic oligonucleotide
  Target: LAMA2; (-) strand; PAM type: YTN; PAM sequence: CTA
gagtgtactctgggtcacat

SEQ ID NO: 265601 - DNA, 20 bp, Artificial Sequence
  Description of Artificial Sequence: Synthetic oligonucleotide
  Target: LAMA2; (-) strand; PAM type: YTN; PAM sequence: TTG
gagatatcactagagtgtac

SEQ ID NO: 265602 - DNA, 20 bp, Artificial Sequence
  Description of Artificial Sequence: Synthetic oligonucleotide
  Target: LAMA2; (-) strand; PAM type: YTN; PAM sequence: CTC
atcattggagatatcactag

SEQ ID NO: 265603 - DNA, 20 bp, Artificial Sequence
  Description of Artificial Sequence: Synthetic oligonucleotide
  Target: LAMA2; (-) strand; PAM type: YTN; PAM sequence: TTA
cgcctcatcattggagatat

SEQ ID NO: 265604 - DNA, 20 bp, Artificial Sequence
  Description of Artificial Sequence: Synthetic oligonucleotide
  Target: LAMA2; (-) strand; PAM type: YTN; PAM sequence: CTT
acgcctcatcattggagata

SEQ ID NO: 265605 - DNA, 20 bp, Artificial Sequence
  Description of Artificial Sequence: Synthetic oligonucleotide
  Target: LAMA2; (-) strand; PAM type: YTN; PAM sequence: TTG
aacacaacaaggtcaaatac

SEQ ID NO: 265606 - DNA, 20 bp, Artificial Sequence
  Description of Artificial Sequence: Synthetic oligonucleotide
  Target: LAMA2; (-) strand; PAM type: YTN; PAM sequence: TTT
gaacacaacaaggtcaaata

SEQ ID NO: 265607 - DNA, 20 bp, Artificial Sequence
  Description of Artificial Sequence: Synthetic oligonucleotide
  Target: LAMA2; (-) strand; PAM type: YTN; PAM sequence: TTT
tgaacacaacaaggtcaaat

SEQ ID NO: 265608 - DNA, 20 bp, Artificial Sequence
  Description of Artificial Sequence: Synthetic oligonucleotide
  Target: LAMA2; (-) strand; PAM type: YTN; PAM sequence: TTA
cagatattttgaacacaaca

SEQ ID NO: 265609 - DNA, 20 bp, Artificial Sequence
  Description of Artificial Sequence: Synthetic oligonucleotide
  Target: LAMA2; (-) strand; PAM type: YTN; PAM sequence: TTT
acagatattttgaacacaac

SEQ ID NO: 265610 - DNA, 20 bp, Artificial Sequence
  Description of Artificial Sequence: Synthetic oligonucleotide
  Target: LAMA2; (-) strand; PAM type: YTN; PAM sequence: TTG
atagatatcatccaaagcat

SEQ ID NO: 265611 - DNA, 20 bp, Artificial Sequence
  Description of Artificial Sequence: Synthetic oligonucleotide
  Target: LAMA2; (-) strand; PAM type: YTN; PAM sequence: TTT
gatagatatcatccaaagca

SEQ ID NO: 265612 - DNA, 20 bp, Artificial Sequence
  Description of Artificial Sequence: Synthetic oligonucleotide
  Target: LAMA2; (-) strand; PAM type: YTN; PAM sequence: CTG
aatatttgatagatatcatc

SEQ ID NO: 265613 - DNA, 20 bp, Artificial Sequence
  Description of Artificial Sequence: Synthetic oligonucleotide
  Target: LAMA2; (-) strand; PAM type: YTN; PAM sequence: TTA
tctgaatatttgatagatat

SEQ ID NO: 265614 - DNA, 20 bp, Artificial Sequence
  Description of Artificial Sequence: Synthetic oligonucleotide
  Target: LAMA2; (-) strand; PAM type: YTN; PAM sequence: TTA
tattatctgaatatttgata

SEQ ID NO: 265615 - DNA, 20 bp, Artificial Sequence
  Description of Artificial Sequence: Synthetic oligonucleotide
  Target: LAMA2; (-) strand; PAM type: YTN; PAM sequence: TTT
atattatctgaatatttgat

SEQ ID NO: 265616 - DNA, 20 bp, Artificial Sequence
  Description of Artificial Sequence: Synthetic oligonucleotide
  Target: LAMA2; (-) strand; PAM type: YTN; PAM sequence: CTT
tatattatctgaatatttga

SEQ ID NO: 265617 - DNA, 20 bp, Artificial Sequence
  Description of Artificial Sequence: Synthetic oligonucleotide
  Target: LAMA2; (-) strand; PAM type: YTN; PAM sequence: TTC
agctttatattatctgaata

SEQ ID NO: 265618 - DNA, 20 bp, Artificial Sequence
  Description of Artificial Sequence: Synthetic oligonucleotide
  Target: LAMA2; (-) strand; PAM type: YTN; PAM sequence: TTT
cagctttatattatctgaat

SEQ ID NO: 265619 - DNA, 20 bp, Artificial Sequence
  Description of Artificial Sequence: Synthetic oligonucleotide
  Target: LAMA2; (-) strand; PAM type: YTN; PAM sequence: CTT
tcagctttatattatctgaa

SEQ ID NO: 265620 - DNA, 20 bp, Artificial Sequence
  Description of Artificial Sequence: Synthetic oligonucleotide
  Target: LAMA2; (-) strand; PAM type: YTN; PAM sequence: TTA
gataatactttcagctttat

SEQ ID NO: 265621 - DNA, 20 bp, Artificial Sequence
  Description of Artificial Sequence: Synthetic oligonucleotide
  Target: LAMA2; (-) strand; PAM type: YTN; PAM sequence: TTC
ccaccatccaacacattaga

SEQ ID NO: 265622 - DNA, 20 bp, Artificial Sequence
  Description of Artificial Sequence: Synthetic oligonucleotide
  Target: LAMA2; (-) strand; PAM type: YTN; PAM sequence: TTT
cccaccatccaacacattag

SEQ ID NO: 265623 - DNA, 20 bp, Artificial Sequence
  Description of Artificial Sequence: Synthetic oligonucleotide
  Target: LAMA2; (-) strand; PAM type: YTN; PAM sequence: TTT
tcccaccatccaacacatta

SEQ ID NO: 265624 - DNA, 20 bp, Artificial Sequence
  Description of Artificial Sequence: Synthetic oligonucleotide
  Target: LAMA2; (-) strand; PAM type: YTN; PAM sequence: CTG
tcaggatattttcccaccat

SEQ ID NO: 265625 - DNA, 20 bp, Artificial Sequence
  Description of Artificial Sequence: Synthetic oligonucleotide
  Target: LAMA2; (-) strand; PAM type: YTN; PAM sequence: TTC
atagtatcatctgtcaggat

SEQ ID NO: 265626 - DNA, 20 bp, Artificial Sequence
  Description of Artificial Sequence: Synthetic oligonucleotide
  Target: LAMA2; (-) strand; PAM type: YTN; PAM sequence: CTG
taattcatagtatcatctgt

SEQ ID NO: 265627 - DNA, 20 bp, Artificial Sequence
  Description of Artificial Sequence: Synthetic oligonucleotide
  Target: LAMA2; (-) strand; PAM type: YTN; PAM sequence: TTA
actgtaattcatagtatcat

SEQ ID NO: 265628 - DNA, 20 bp, Artificial Sequence
  Description of Artificial Sequence: Synthetic oligonucleotide
  Target: LAMA2; (-) strand; PAM type: YTN; PAM sequence: TTG
ttaactgtaattcatagtat

SEQ ID NO: 265629 - DNA, 20 bp, Artificial Sequence
  Description of Artificial Sequence: Synthetic oligonucleotide
  Target: LAMA2; (-) strand; PAM type: YTN; PAM sequence: CTT
gttaactgtaattcatagta

SEQ ID NO: 265630 - DNA, 20 bp, Artificial Sequence
  Description of Artificial Sequence: Synthetic oligonucleotide
  Target: LAMA2; (-) strand; PAM type: YTN; PAM sequence: CTC
atcttgttaactgtaattca

SEQ ID NO: 265631 - DNA, 20 bp, Artificial Sequence
  Description of Artificial Sequence: Synthetic oligonucleotide
  Target: LAMA2; (-) strand; PAM type: YTN; PAM sequence: TTA
atctcatcttgttaactgta

SEQ ID NO: 265632 - DNA, 20 bp, Artificial Sequence
  Description of Artificial Sequence: Synthetic oligonucleotide
  Target: LAMA2; (-) strand; PAM type: YTN; PAM sequence: CTA
ttaatctcatcttgttaact

SEQ ID NO: 265633 - DNA, 20 bp, Artificial Sequence
  Description of Artificial Sequence: Synthetic oligonucleotide
  Target: LAMA2; (-) strand; PAM type: YTN; PAM sequence: TTC
tattaatctcatcttgttaa

SEQ ID NO: 265634 - DNA, 20 bp, Artificial Sequence
  Description of Artificial Sequence: Synthetic oligonucleotide
  Target: LAMA2; (-) strand; PAM type: YTN; PAM sequence: TTT
ctattaatctcatcttgtta

SEQ ID NO: 265635 - DNA, 20 bp, Artificial Sequence
  Description of Artificial Sequence: Synthetic oligonucleotide
  Target: LAMA2; (-) strand; PAM type: YTN; PAM sequence: TTT
tctattaatctcatcttgtt

SEQ ID NO: 265636 - DNA, 20 bp, Artificial Sequence
  Description of Artificial Sequence: Synthetic oligonucleotide
  Target: LAMA2; (-) strand; PAM type: YTN; PAM sequence: CTT
ttctattaatctcatcttgt

SEQ ID NO: 265637 - DNA, 20 bp, Artificial Sequence
  Description of Artificial Sequence: Synthetic oligonucleotide
  Target: LAMA2; (-) strand; PAM type: YTN; PAM sequence: TTC
aaatcttttctattaatctc

SEQ ID NO: 265638 - DNA, 20 bp, Artificial Sequence
  Description of Artificial Sequence: Synthetic oligonucleotide
  Target: LAMA2; (-) strand; PAM type: YTN; PAM sequence: CTG
agttcaaatcttttctatta

SEQ ID NO: 265639 - DNA, 20 bp, Artificial Sequence
  Description of Artificial Sequence: Synthetic oligonucleotide
  Target: LAMA2; (-) strand; PAM type: YTN; PAM sequence: TTA
cctgagttcaaatcttttct

SEQ ID NO: 265640 - DNA, 20 bp, Artificial Sequence
  Description of Artificial Sequence: Synthetic oligonucleotide
  Target: LAMA2; (-) strand; PAM type: YTN; PAM sequence: CTT
acctgagttcaaatcttttc

SEQ ID NO: 265641 - DNA, 20 bp, Artificial Sequence
  Description of Artificial Sequence: Synthetic oligonucleotide
  Target: LAMA2; (-) strand; PAM type: YTN; PAM sequence: TTA
acagatgccacaggaatgaa

SEQ ID NO: 265642 - DNA, 20 bp, Artificial Sequence
  Description of Artificial Sequence: Synthetic oligonucleotide
  Target: LAMA2; (-) strand; PAM type: YTN; PAM sequence: TTG
gaaacataattaacagatgc

SEQ ID NO: 265643 - DNA, 20 bp, Artificial Sequence
  Description of Artificial Sequence: Synthetic oligonucleotide
  Target: LAMA2; (-) strand; PAM type: YTN; PAM sequence: CTG
catgttggaaacataattaa

SEQ ID NO: 265644 - DNA, 20 bp, Artificial Sequence
  Description of Artificial Sequence: Synthetic oligonucleotide
  Target: LAMA2; (-) strand; PAM type: YTN; PAM sequence: CTA
ccataggccatagacctgca

SEQ ID NO: 265645 - DNA, 20 bp, Artificial Sequence
  Description of Artificial Sequence: Synthetic oligonucleotide
  Target: LAMA2; (-) strand; PAM type: YTN; PAM sequence: CTA
tctaccataggccatagacc

SEQ ID NO: 265646 - DNA, 20 bp, Artificial Sequence
  Description of Artificial Sequence: Synthetic oligonucleotide
  Target: LAMA2; (-) strand; PAM type: YTN; PAM sequence: TTA
ctatctaccataggccatag

SEQ ID NO: 265647 - DNA, 20 bp, Artificial Sequence
  Description of Artificial Sequence: Synthetic oligonucleotide
  Target: LAMA2; (-) strand; PAM type: YTN; PAM sequence: CTT
actatctaccataggccata

SEQ ID NO: 265648 - DNA, 20 bp, Artificial Sequence
  Description of Artificial Sequence: Synthetic oligonucleotide
  Target: LAMA2; (-) strand; PAM type: YTN; PAM sequence: TTC
ttactatctaccataggcca

SEQ ID NO: 265649 - DNA, 20 bp, Artificial Sequence
  Description of Artificial Sequence: Synthetic oligonucleotide
  Target: LAMA2; (-) strand; PAM type: YTN; PAM sequence: TTC
atattcttactatctaccat

SEQ ID NO: 265650 - DNA, 20 bp, Artificial Sequence
  Description of Artificial Sequence: Synthetic oligonucleotide
  Target: LAMA2; (-) strand; PAM type: YTN; PAM sequence: CTT
catattcttactatctacca

SEQ ID NO: 265651 - DNA, 20 bp, Artificial Sequence
  Description of Artificial Sequence: Synthetic oligonucleotide
  Target: LAMA2; (-) strand; PAM type: YTN; PAM sequence: CTA
gagggcaagacccatgcagt

SEQ ID NO: 265652 - DNA, 20 bp, Artificial Sequence
  Description of Artificial Sequence: Synthetic oligonucleotide
  Target: LAMA2; (-) strand; PAM type: YTN; PAM sequence: CTC
ctagagggcaagacccatgc

SEQ ID NO: 265653 - DNA, 20 bp, Artificial Sequence
  Description of Artificial Sequence: Synthetic oligonucleotide
  Target: LAMA2; (-) strand; PAM type: YTN; PAM sequence: CTA
gagaataagctcctagaggg

SEQ ID NO: 265654 - DNA, 20 bp, Artificial Sequence
  Description of Artificial Sequence: Synthetic oligonucleotide
  Target: LAMA2; (-) strand; PAM type: YTN; PAM sequence: CTA
aactagagaataagctccta

SEQ ID NO: 265655 - DNA, 20 bp, Artificial Sequence
  Description of Artificial Sequence: Synthetic oligonucleotide
  Target: LAMA2; (-) strand; PAM type: YTN; PAM sequence: TTC
ccctaaactagagaataagc

SEQ ID NO: 265656 - DNA, 20 bp, Artificial Sequence
  Description of Artificial Sequence: Synthetic oligonucleotide
  Target: LAMA2; (-) strand; PAM type: YTN; PAM sequence: TTT
cccctaaactagagaataag

SEQ ID NO: 265657 - DNA, 20 bp, Artificial Sequence
  Description of Artificial Sequence: Synthetic oligonucleotide
  Target: LAMA2; (-) strand; PAM type: YTN; PAM sequence: CTT
tcccctaaactagagaataa

SEQ ID NO: 265658 - DNA, 20 bp, Artificial Sequence
  Description of Artificial Sequence: Synthetic oligonucleotide
  Target: LAMA2; (-) strand; PAM type: YTN; PAM sequence: TTC
tttcccctaaactagagaat

SEQ ID NO: 265659 - DNA, 20 bp, Artificial Sequence
  Description of Artificial Sequence: Synthetic oligonucleotide
  Target: LAMA2; (-) strand; PAM type: YTN; PAM sequence: CTG
ttctttcccctaaactagag

SEQ ID NO: 265660 - DNA, 20 bp, Artificial Sequence
  Description of Artificial Sequence: Synthetic oligonucleotide
  Target: LAMA2; (-) strand; PAM type: YTN; PAM sequence: CTC
tgttctttcccctaaactag

SEQ ID NO: 265661 - DNA, 20 bp, Artificial Sequence
  Description of Artificial Sequence: Synthetic oligonucleotide
  Target: LAMA2; (-) strand; PAM type: YTN; PAM sequence: TTC
ctctgttctttcccctaaac

SEQ ID NO: 265662 - DNA, 20 bp, Artificial Sequence
  Description of Artificial Sequence: Synthetic oligonucleotide
  Target: LAMA2; (-) strand; PAM type: YTN; PAM sequence: TTT
cctctgttctttcccctaaa

SEQ ID NO: 265663 - DNA, 20 bp, Artificial Sequence
  Description of Artificial Sequence: Synthetic oligonucleotide
  Target: LAMA2; (-) strand; PAM type: YTN; PAM sequence: CTA
atatgtgtcatttcctctgt

SEQ ID NO: 265664 - DNA, 20 bp, Artificial Sequence
  Description of Artificial Sequence: Synthetic oligonucleotide
  Target: LAMA2; (-) strand; PAM type: YTN; PAM sequence: TTG
ctaatatgtgtcatttcctc

SEQ ID NO: 265665 - DNA, 20 bp, Artificial Sequence
  Description of Artificial Sequence: Synthetic oligonucleotide
  Target: LAMA2; (-) strand; PAM type: YTN; PAM sequence: TTC
acatgaattgctaatatgtg

SEQ ID NO: 265666 - DNA, 20 bp, Artificial Sequence
  Description of Artificial Sequence: Synthetic oligonucleotide
  Target: LAMA2; (-) strand; PAM type: YTN; PAM sequence: CTT
cacatgaattgctaatatgt

SEQ ID NO: 265667 - DNA, 20 bp, Artificial Sequence
  Description of Artificial Sequence: Synthetic oligonucleotide
  Target: LAMA2; (-) strand; PAM type: YTN; PAM sequence: TTA
cttcacatgaattgctaata

SEQ ID NO: 265668 - DNA, 20 bp, Artificial Sequence
  Description of Artificial Sequence: Synthetic oligonucleotide
  Target: LAMA2; (-) strand; PAM type: YTN; PAM sequence: CTT
acttcacatgaattgctaat

SEQ ID NO: 265669 - DNA, 20 bp, Artificial Sequence
  Description of Artificial Sequence: Synthetic oligonucleotide
  Target: LAMA2; (-) strand; PAM type: YTN; PAM sequence: CTC
ttacttcacatgaattgcta

SEQ ID NO: 265670 - DNA, 20 bp, Artificial Sequence
  Description of Artificial Sequence: Synthetic oligonucleotide
  Target: LAMA2; (-) strand; PAM type: YTN; PAM sequence: CTG
caatcaagtaaggactctta

SEQ ID NO: 265671 - DNA, 20 bp, Artificial Sequence
  Description of Artificial Sequence: Synthetic oligonucleotide
  Target: LAMA2; (-) strand; PAM type: YTN; PAM sequence: CTA
gtgaatctgcaatcaagtaa

SEQ ID NO: 265672 - DNA, 20 bp, Artificial Sequence
  Description of Artificial Sequence: Synthetic oligonucleotide
  Target: LAMA2; (-) strand; PAM type: YTN; PAM sequence: TTG
gcacctagtgaatctgcaat

SEQ ID NO: 265673 - DNA, 20 bp, Artificial Sequence
  Description of Artificial Sequence: Synthetic oligonucleotide
  Target: LAMA2; (-) strand; PAM type: YTN; PAM sequence: CTG
tgttggcacctagtgaatct

SEQ ID NO: 265674 - DNA, 20 bp, Artificial Sequence
  Description of Artificial Sequence: Synthetic oligonucleotide
  Target: LAMA2; (-) strand; PAM type: YTN; PAM sequence: TTA
tacaaatagcaatgccctgt

SEQ ID NO: 265675 - DNA, 20 bp, Artificial Sequence
  Description of Artificial Sequence: Synthetic oligonucleotide
  Target: LAMA2; (-) strand; PAM type: YTN; PAM sequence: CTT
atacaaatagcaatgccctg

SEQ ID NO: 265676 - DNA, 20 bp, Artificial Sequence
  Description of Artificial Sequence: Synthetic oligonucleotide
  Target: LAMA2; (-) strand; PAM type: YTN; PAM sequence: TTG
gatcttatacaaatagcaat

SEQ ID NO: 265677 - DNA, 20 bp, Artificial Sequence
  Description of Artificial Sequence: Synthetic oligonucleotide
  Target: LAMA2; (-) strand; PAM type: YTN; PAM sequence: TTT
ggatcttatacaaatagcaa

SEQ ID NO: 265678 - DNA, 20 bp, Artificial Sequence
  Description of Artificial Sequence: Synthetic oligonucleotide
  Target: LAMA2; (-) strand; PAM type: YTN; PAM sequence: TTG
atttggatcttatacaaata

SEQ ID NO: 265679 - DNA, 20 bp, Artificial Sequence
  Description of Artificial Sequence: Synthetic oligonucleotide
  Target: LAMA2; (-) strand; PAM type: YTN; PAM sequence: CTT
gatttggatcttatacaaat

SEQ ID NO: 265680 - DNA, 20 bp, Artificial Sequence
  Description of Artificial Sequence: Synthetic oligonucleotide
  Target: LAMA2; (-) strand; PAM type: YTN; PAM sequence: CTC
ccttgatttggatcttatac

SEQ ID NO: 265681 - DNA, 20 bp, Artificial Sequence
  Description of Artificial Sequence: Synthetic oligonucleotide
  Target: LAMA2; (-) strand; PAM type: YTN; PAM sequence: TTC
ctcccttgatttggatctta

SEQ ID NO: 265682 - DNA, 20 bp, Artificial Sequence
  Description of Artificial Sequence: Synthetic oligonucleotide
  Target: LAMA2; (-) strand; PAM type: YTN; PAM sequence: CTT
cctcccttgatttggatctt

SEQ ID NO: 265683 - DNA, 20 bp, Artificial Sequence
  Description of Artificial Sequence: Synthetic oligonucleotide
  Target: LAMA2; (-) strand; PAM type: YTN; PAM sequence: TTA
aatgtacttcctcccttgat

SEQ ID NO: 265684 - DNA, 20 bp, Artificial Sequence
  Description of Artificial Sequence: Synthetic oligonucleotide
  Target: LAMA2; (-) strand; PAM type: YTN; PAM sequence: TTG
caaatatattaaatgtactt

SEQ ID NO: 265685 - DNA, 20 bp, Artificial Sequence
  Description of Artificial Sequence: Synthetic oligonucleotide
  Target: LAMA2; (-) strand; PAM type: YTN; PAM sequence: CTT
gcaaatatattaaatgtact

SEQ ID NO: 265686 - DNA, 20 bp, Artificial Sequence
  Description of Artificial Sequence: Synthetic oligonucleotide
  Target: LAMA2; (-) strand; PAM type: YTN; PAM sequence: CTG
tgacttgcaaatatattaaa

SEQ ID NO: 265687 - DNA, 20 bp, Artificial Sequence
  Description of Artificial Sequence: Synthetic oligonucleotide
  Target: LAMA2; (-) strand; PAM type: YTN; PAM sequence: CTA
gctgtgacttgcaaatatat

SEQ ID NO: 265688 - DNA, 20 bp, Artificial Sequence
  Description of Artificial Sequence: Synthetic oligonucleotide
  Target: LAMA2; (-) strand; PAM type: YTN; PAM sequence: CTC
tagctgtgacttgcaaatat

SEQ ID NO: 265689 - DNA, 20 bp, Artificial Sequence
  Description of Artificial Sequence: Synthetic oligonucleotide
  Target: LAMA2; (-) strand; PAM type: YTN; PAM sequence: TTA
taagtctctagctgtgactt

SEQ ID NO: 265690 - DNA, 20 bp, Artificial Sequence
  Description of Artificial Sequence: Synthetic oligonucleotide
  Target: LAMA2; (-) strand; PAM type: YTN; PAM sequence: TTC
aaaatatagtagattataag

SEQ ID NO: 265691 - DNA, 20 bp, Artificial Sequence
  Description of Artificial Sequence: Synthetic oligonucleotide
  Target: LAMA2; (-) strand; PAM type: YTN; PAM sequence: TTT
caaaatatagtagattataa

SEQ ID NO: 265692 - DNA, 20 bp, Artificial Sequence
  Description of Artificial Sequence: Synthetic oligonucleotide
  Target: LAMA2; (-) strand; PAM type: YTN; PAM sequence: CTT
tcaaaatatagtagattata

SEQ ID NO: 265693 - DNA, 20 bp, Artificial Sequence
  Description of Artificial Sequence: Synthetic oligonucleotide
  Target: LAMA2; (-) strand; PAM type: YTN; PAM sequence: TTC
tttcaaaatatagtagatta

SEQ ID NO: 265694 - DNA, 20 bp, Artificial Sequence
  Description of Artificial Sequence: Synthetic oligonucleotide
  Target: LAMA2; (-) strand; PAM type: YTN; PAM sequence: TTT
ctttcaaaatatagtagatt

SEQ ID NO: 265695 - DNA, 20 bp, Artificial Sequence
  Description of Artificial Sequence: Synthetic oligonucleotide
  Target: LAMA2; (-) strand; PAM type: YTN; PAM sequence: CTC
agggtttctttcaaaatata

SEQ ID NO: 265696 - DNA, 20 bp, Artificial Sequence
  Description of Artificial Sequence: Synthetic oligonucleotide
  Target: LAMA2; (-) strand; PAM type: YTN; PAM sequence: TTA
ctcagggtttctttcaaaat

SEQ ID NO: 265697 - DNA, 20 bp, Artificial Sequence
  Description of Artificial Sequence: Synthetic oligonucleotide
  Target: LAMA2; (-) strand; PAM type: YTN; PAM sequence: CTT
actcagggtttctttcaaaa

SEQ ID NO: 265698 - DNA, 20 bp, Artificial Sequence
  Description of Artificial Sequence: Synthetic oligonucleotide
  Target: LAMA2; (-) strand; PAM type: YTN; PAM sequence: TTA
gcaatcttactcagggtttc

SEQ ID NO: 265699 - DNA, 20 bp, Artificial Sequence
  Description of Artificial Sequence: Synthetic oligonucleotide
  Target: LAMA2; (-) strand; PAM type: YTN; PAM sequence: TTT
agcaatcttactcagggttt

SEQ ID NO: 265700 - DNA, 20 bp, Artificial Sequence
  Description of Artificial Sequence: Synthetic oligonucleotide
  Target: LAMA2; (-) strand; PAM type: YTN; PAM sequence: CTA
aacatttagcaatcttactc

SEQ ID NO: 265701 - DNA, 20 bp, Artificial Sequence
  Description of Artificial Sequence: Synthetic oligonucleotide
  Target: LAMA2; (-) strand; PAM type: YTN; PAM sequence: TTC
aagctaaacatttagcaatc

SEQ ID NO: 265702 - DNA, 20 bp, Artificial Sequence
  Description of Artificial Sequence: Synthetic oligonucleotide
  Target: LAMA2; (-) strand; PAM type: YTN; PAM sequence: TTT
caagctaaacatttagcaat

SEQ ID NO: 265703 - DNA, 20 bp, Artificial Sequence
  Description of Artificial Sequence: Synthetic oligonucleotide
  Target: LAMA2; (-) strand; PAM type: YTN; PAM sequence: TTG
tttcaagctaaacatttagc

SEQ ID NO: 265704 - DNA, 20 bp, Artificial Sequence
  Description of Artificial Sequence: Synthetic oligonucleotide
  Target: LAMA2; (-) strand; PAM type: YTN; PAM sequence: TTT
gtttcaagctaaacatttag

SEQ ID NO: 265705 - DNA, 20 bp, Artificial Sequence
  Description of Artificial Sequence: Synthetic oligonucleotide
  Target: LAMA2; (-) strand; PAM type: YTN; PAM sequence: CTT
tgtttcaagctaaacattta

SEQ ID NO: 265706 - DNA, 20 bp, Artificial Sequence
  Description of Artificial Sequence: Synthetic oligonucleotide
  Target: LAMA2; (-) strand; PAM type: YTN; PAM sequence: CTA
aatctttgtttcaagctaaa

SEQ ID NO: 265707 - DNA, 20 bp, Artificial Sequence
  Description of Artificial Sequence: Synthetic oligonucleotide
  Target: LAMA2; (-) strand; PAM type: YTN; PAM sequence: TTC
ctaaatctttgtttcaagct

SEQ ID NO: 265708 - DNA, 20 bp, Artificial Sequence
  Description of Artificial Sequence: Synthetic oligonucleotide
  Target: LAMA2; (-) strand; PAM type: YTN; PAM sequence: CTT
cctaaatctttgtttcaagc

SEQ ID NO: 265709 - DNA, 20 bp, Artificial Sequence
  Description of Artificial Sequence: Synthetic oligonucleotide
  Target: LAMA2; (-) strand; PAM type: YTN; PAM sequence: TTA
cttcctaaatctttgtttca

SEQ ID NO: 265710 - DNA, 20 bp, Artificial Sequence
  Description of Artificial Sequence: Synthetic oligonucleotide
  Target: LAMA2; (-) strand; PAM type: YTN; PAM sequence: CTA
ttacttcctaaatctttgtt

SEQ ID NO: 265711 - DNA, 20 bp, Artificial Sequence
  Description of Artificial Sequence: Synthetic oligonucleotide
  Target: LAMA2; (-) strand; PAM type: YTN; PAM sequence: CTA
agaatactattacttcctaa

SEQ ID NO: 265712 - DNA, 20 bp, Artificial Sequence
  Description of Artificial Sequence: Synthetic oligonucleotide
  Target: LAMA2; (-) strand; PAM type: YTN; PAM sequence: CTC
aaatatctaagaatactatt

SEQ ID NO: 265713 - DNA, 20 bp, Artificial Sequence
  Description of Artificial Sequence: Synthetic oligonucleotide
  Target: LAMA2; (-) strand; PAM type: YTN; PAM sequence: CTA
gggaaggtcctcaaatatct

SEQ ID NO: 265714 - DNA, 20 bp, Artificial Sequence
  Description of Artificial Sequence: Synthetic oligonucleotide
  Target: LAMA2; (-) strand; PAM type: YTN; PAM sequence: TTC
ctagggaaggtcctcaaata

SEQ ID NO: 265715 - DNA, 20 bp, Artificial Sequence
  Description of Artificial Sequence: Synthetic oligonucleotide
  Target: LAMA2; (-) strand; PAM type: YTN; PAM sequence: TTT
cctagggaaggtcctcaaat

SEQ ID NO: 265716 - DNA, 20 bp, Artificial Sequence
  Description of Artificial Sequence: Synthetic oligonucleotide
  Target: LAMA2; (-) strand; PAM type: YTN; PAM sequence: TTT
tcctagggaaggtcctcaaa

SEQ ID NO: 265717 - DNA, 20 bp, Artificial Sequence
  Description of Artificial Sequence: Synthetic oligonucleotide
  Target: LAMA2; (-) strand; PAM type: YTN; PAM sequence: CTT
ttcctagggaaggtcctcaa

SEQ ID NO: 265718 - DNA, 20 bp, Artificial Sequence
  Description of Artificial Sequence: Synthetic oligonucleotide
  Target: LAMA2; (-) strand; PAM type: YTN; PAM sequence: TTC
ccttttcctagggaaggtcc

SEQ ID NO: 265719 - DNA, 20 bp, Artificial Sequence
  Description of Artificial Sequence: Synthetic oligonucleotide
  Target: LAMA2; (-) strand; PAM type: YTN; PAM sequence: CTA
attcccttttcctagggaag

SEQ ID NO: 265720 - DNA, 20 bp, Artificial Sequence
  Description of Artificial Sequence: Synthetic oligonucleotide
  Target: LAMA2; (-) strand; PAM type: YTN; PAM sequence: TTA
agtctaattcccttttccta

SEQ ID NO: 265721 - DNA, 20 bp, Artificial Sequence
  Description of Artificial Sequence: Synthetic oligonucleotide
  Target: LAMA2; (-) strand; PAM type: YTN; PAM sequence: CTA
tgaaaattaagtctaattcc

SEQ ID NO: 265722 - DNA, 20 bp, Artificial Sequence
  Description of Artificial Sequence: Synthetic oligonucleotide
  Target: LAMA2; (-) strand; PAM type: YTN; PAM sequence: CTG
aagctatgaaaattaagtct

SEQ ID NO: 265723 - DNA, 20 bp, Artificial Sequence
  Description of Artificial Sequence: Synthetic oligonucleotide
  Target: LAMA2; (-) strand; PAM type: YTN; PAM sequence: TTC
tgaagctatgaaaattaagt

SEQ ID NO: 265724 - DNA, 20 bp, Artificial Sequence
  Description of Artificial Sequence: Synthetic oligonucleotide
  Target: LAMA2; (-) strand; PAM type: YTN; PAM sequence: CTT
ctgaagctatgaaaattaag

SEQ ID NO: 265725 - DNA, 20 bp, Artificial Sequence
  Description of Artificial Sequence: Synthetic oligonucleotide
  Target: LAMA2; (-) strand; PAM type: YTN; PAM sequence: CTG
ccttctgaagctatgaaaat

SEQ ID NO: 265726 - DNA, 20 bp, Artificial Sequence
  Description of Artificial Sequence: Synthetic oligonucleotide
  Target: LAMA2; (-) strand; PAM type: YTN; PAM sequence: TTC
tgccttctgaagctatgaaa

SEQ ID NO: 265727 - DNA, 20 bp, Artificial Sequence
  Description of Artificial Sequence: Synthetic oligonucleotide
  Target: LAMA2; (-) strand; PAM type: YTN; PAM sequence: TTC
agtgagtgatccaagttctg

SEQ ID NO: 265728 - DNA, 20 bp, Artificial Sequence
  Description of Artificial Sequence: Synthetic oligonucleotide
  Target: LAMA2; (-) strand; PAM type: YTN; PAM sequence: TTT
cagtgagtgatccaagttct

SEQ ID NO: 265729 - DNA, 20 bp, Artificial Sequence
  Description of Artificial Sequence: Synthetic oligonucleotide
  Target: LAMA2; (-) strand; PAM type: YTN; PAM sequence: TTT
tcagtgagtgatccaagttc

SEQ ID NO: 265730 - DNA, 20 bp, Artificial Sequence
  Description of Artificial Sequence: Synthetic oligonucleotide
  Target: LAMA2; (-) strand; PAM type: YTN; PAM sequence: CTA
attttcagtgagtgatccaa

SEQ ID NO: 265731 - DNA, 20 bp, Artificial Sequence
  Description of Artificial Sequence: Synthetic oligonucleotide
  Target: LAMA2; (-) strand; PAM type: YTN; PAM sequence: TTC
taattttcagtgagtgatcc

SEQ ID NO: 265732 - DNA, 20 bp, Artificial Sequence
  Description of Artificial Sequence: Synthetic oligonucleotide
  Target: LAMA2; (-) strand; PAM type: YTN; PAM sequence: TTG
atgcattctaattttcagtg

SEQ ID NO: 265733 - DNA, 20 bp, Artificial Sequence
  Description of Artificial Sequence: Synthetic oligonucleotide
  Target: LAMA2; (-) strand; PAM type: YTN; PAM sequence: TTT
gatgcattctaattttcagt

SEQ ID NO: 265734 - DNA, 20 bp, Artificial Sequence
  Description of Artificial Sequence: Synthetic oligonucleotide
  Target: LAMA2; (-) strand; PAM type: YTN; PAM sequence: TTA
cggtgaataaaaatttgatg

SEQ ID NO: 265735 - DNA, 20 bp, Artificial Sequence
  Description of Artificial Sequence: Synthetic oligonucleotide
  Target: LAMA2; (-) strand; PAM type: YTN; PAM sequence: CTT
acggtgaataaaaatttgat

SEQ ID NO: 265736 - DNA, 20 bp, Artificial Sequence
  Description of Artificial Sequence: Synthetic oligonucleotide
  Target: LAMA2; (-) strand; PAM type: YTN; PAM sequence: TTC
cttacggtgaataaaaattt

SEQ ID NO: 265737 - DNA, 20 bp, Artificial Sequence
  Description of Artificial Sequence: Synthetic oligonucleotide
  Target: LAMA2; (-) strand; PAM type: YTN; PAM sequence: TTT
ccttacggtgaataaaaatt

SEQ ID NO: 265738 - DNA, 20 bp, Artificial Sequence
  Description of Artificial Sequence: Synthetic oligonucleotide
  Target: LAMA2; (-) strand; PAM type: YTN; PAM sequence: TTT
tccttacggtgaataaaaat

SEQ ID NO: 265739 - DNA, 20 bp, Artificial Sequence
  Description of Artificial Sequence: Synthetic oligonucleotide
  Target: LAMA2; (-) strand; PAM type: YTN; PAM sequence: TTT
ttccttacggtgaataaaaa

SEQ ID NO: 265740 - DNA, 20 bp, Artificial Sequence
  Description of Artificial Sequence: Synthetic oligonucleotide
  Target: LAMA2; (-) strand; PAM type: YTN; PAM sequence: CTG
tgaagtttttccttacggtg

SEQ ID NO: 265741 - DNA, 20 bp, Artificial Sequence
  Description of Artificial Sequence: Synthetic oligonucleotide
  Target: LAMA2; (-) strand; PAM type: YTN; PAM sequence: TTG
cataagctgtgaagtttttc

SEQ ID NO: 265742 - DNA, 20 bp, Artificial Sequence
  Description of Artificial Sequence: Synthetic oligonucleotide
  Target: LAMA2; (-) strand; PAM type: YTN; PAM sequence: CTT
gcataagctgtgaagttttt

SEQ ID NO: 265743 - DNA, 20 bp, Artificial Sequence
  Description of Artificial Sequence: Synthetic oligonucleotide
  Target: LAMA2; (-) strand; PAM type: YTN; PAM sequence: TTC
gtcttgcataagctgtgaag

SEQ ID NO: 265744 - DNA, 20 bp, Artificial Sequence
  Description of Artificial Sequence: Synthetic oligonucleotide
  Target: LAMA2; (-) strand; PAM type: YTN; PAM sequence: TTT
cgtcttgcataagctgtgaa

SEQ ID NO: 265745 - DNA, 20 bp, Artificial Sequence
  Description of Artificial Sequence: Synthetic oligonucleotide
  Target: LAMA2; (-) strand; PAM type: YTN; PAM sequence: TTT
tcgtcttgcataagctgtga

SEQ ID NO: 265746 - DNA, 20 bp, Artificial Sequence
  Description of Artificial Sequence: Synthetic oligonucleotide
  Target: LAMA2; (-) strand; PAM type: YTN; PAM sequence: TTT
ttcgtcttgcataagctgtg

SEQ ID NO: 265747 - DNA, 20 bp, Artificial Sequence
  Description of Artificial Sequence: Synthetic oligonucleotide
  Target: LAMA2; (-) strand; PAM type: YTN; PAM sequence: TTT
tttcgtcttgcataagctgt

SEQ ID NO: 265748 - DNA, 20 bp, Artificial Sequence
  Description of Artificial Sequence: Synthetic oligonucleotide
  Target: LAMA2; (-) strand; PAM type: YTN; PAM sequence: CTT
ttttcgtcttgcataagctg

SEQ ID NO: 265749 - DNA, 20 bp, Artificial Sequence
  Description of Artificial Sequence: Synthetic oligonucleotide
  Target: LAMA2; (-) strand; PAM type: YTN; PAM sequence: TTA
taagacagcttttttcgtct

SEQ ID NO: 265750 - DNA, 20 bp, Artificial Sequence
  Description of Artificial Sequence: Synthetic oligonucleotide
  Target: LAMA2; (-) strand; PAM type: YTN; PAM sequence: CTT
ataagacagcttttttcgtc

SEQ ID NO: 265751 - DNA, 20 bp, Artificial Sequence
  Description of Artificial Sequence: Synthetic oligonucleotide
  Target: LAMA2; (-) strand; PAM type: YTN; PAM sequence: TTC
ttataagacagcttttttcg

SEQ ID NO: 265752 - DNA, 20 bp, Artificial Sequence
  Description of Artificial Sequence: Synthetic oligonucleotide
  Target: LAMA2; (-) strand; PAM type: YTN; PAM sequence: TTA
aatgcatgaattcttataag

SEQ ID NO: 265753 - DNA, 20 bp, Artificial Sequence
  Description of Artificial Sequence: Synthetic oligonucleotide
  Target: LAMA2; (-) strand; PAM type: YTN; PAM sequence: TTG
agatatcattaaatgcatga

SEQ ID NO: 265754 - DNA, 20 bp, Artificial Sequence
  Description of Artificial Sequence: Synthetic oligonucleotide
  Target: LAMA2; (-) strand; PAM type: YTN; PAM sequence: CTT
gagatatcattaaatgcatg

SEQ ID NO: 265755 - DNA, 20 bp, Artificial Sequence
  Description of Artificial Sequence: Synthetic oligonucleotide
  Target: LAMA2; (-) strand; PAM type: YTN; PAM sequence: TTC
cttgagatatcattaaatgc

SEQ ID NO: 265756 - DNA, 20 bp, Artificial Sequence
  Description of Artificial Sequence: Synthetic oligonucleotide
  Target: LAMA2; (-) strand; PAM type: YTN; PAM sequence: TTT
ccttgagatatcattaaatg

SEQ ID NO: 265757 - DNA, 20 bp, Artificial Sequence
  Description of Artificial Sequence: Synthetic oligonucleotide
  Target: LAMA2; (-) strand; PAM type: YTN; PAM sequence: CTT
tccttgagatatcattaaat

SEQ ID NO: 265758 - DNA, 20 bp, Artificial Sequence
  Description of Artificial Sequence: Synthetic oligonucleotide
  Target: LAMA2; (-) strand; PAM type: YTN; PAM sequence: CTA
tactttccttgagatatcat

SEQ ID NO: 265759 - DNA, 20 bp, Artificial Sequence
  Description of Artificial Sequence: Synthetic oligonucleotide
  Target: LAMA2; (-) strand; PAM type: YTN; PAM sequence: TTC
tatactttccttgagatatc

SEQ ID NO: 265760 - DNA, 20 bp, Artificial Sequence
  Description of Artificial Sequence: Synthetic oligonucleotide
  Target: LAMA2; (-) strand; PAM type: YTN; PAM sequence: CTT
ctatactttccttgagatat

SEQ ID NO: 265761 - DNA, 20 bp, Artificial Sequence
  Description of Artificial Sequence: Synthetic oligonucleotide
  Target: LAMA2; (-) strand; PAM type: YTN; PAM sequence: TTG
ccatacaggaatgccttcta

SEQ ID NO: 265762 - DNA, 20 bp, Artificial Sequence
  Description of Artificial Sequence: Synthetic oligonucleotide
  Target: LAMA2; (-) strand; PAM type: YTN; PAM sequence: CTT
gccatacaggaatgccttct

SEQ ID NO: 265763 - DNA, 20 bp, Artificial Sequence
  Description of Artificial Sequence: Synthetic oligonucleotide
  Target: LAMA2; (-) strand; PAM type: YTN; PAM sequence: TTC
ttgccatacaggaatgcctt

SEQ ID NO: 265764 - DNA, 20 bp, Artificial Sequence
  Description of Artificial Sequence: Synthetic oligonucleotide
  Target: LAMA2; (-) strand; PAM type: YTN; PAM sequence: CTT
cttgccatacaggaatgcct

SEQ ID NO: 265765 - DNA, 20 bp, Artificial Sequence
  Description of Artificial Sequence: Synthetic oligonucleotide
  Target: LAMA2; (-) strand; PAM type: YTN; PAM sequence: CTA
accttcttgccatacaggaa

SEQ ID NO: 265766 - DNA, 20 bp, Artificial Sequence
  Description of Artificial Sequence: Synthetic oligonucleotide
  Target: LAMA2; (-) strand; PAM type: YTN; PAM sequence: TTA
atctaaccttcttgccatac

SEQ ID NO: 265767 - DNA, 20 bp, Artificial Sequence
  Description of Artificial Sequence: Synthetic oligonucleotide
  Target: LAMA2; (-) strand; PAM type: YTN; PAM sequence: CTT
aatctaaccttcttgccata

SEQ ID NO: 265768 - DNA, 20 bp, Artificial Sequence
  Description of Artificial Sequence: Synthetic oligonucleotide
  Target: LAMA2; (-) strand; PAM type: YTN; PAM sequence: TTA
cttaatctaaccttcttgcc

SEQ ID NO: 265769 - DNA, 20 bp, Artificial Sequence
  Description of Artificial Sequence: Synthetic oligonucleotide
  Target: LAMA2; (-) strand; PAM type: YTN; PAM sequence: CTA
aggtgagaaattacttaatc

SEQ ID NO: 265770 - DNA, 20 bp, Artificial Sequence
  Description of Artificial Sequence: Synthetic oligonucleotide
  Target: LAMA2; (-) strand; PAM type: YTN; PAM sequence: CTC
aggcctaaggtgagaaatta

SEQ ID NO: 265771 - DNA, 20 bp, Artificial Sequence
  Description of Artificial Sequence: Synthetic oligonucleotide
  Target: LAMA2; (-) strand; PAM type: YTN; PAM sequence: TTA
tagtatctcaggcctaaggt

SEQ ID NO: 265772 - DNA, 20 bp, Artificial Sequence
  Description of Artificial Sequence: Synthetic oligonucleotide
  Target: LAMA2; (-) strand; PAM type: YTN; PAM sequence: TTA
atattatagtatctcaggcc

SEQ ID NO: 265773 - DNA, 20 bp, Artificial Sequence
  Description of Artificial Sequence: Synthetic oligonucleotide
  Target: LAMA2; (-) strand; PAM type: YTN; PAM sequence: CTA
taacattaatattatagtat

SEQ ID NO: 265774 - DNA, 20 bp, Artificial Sequence
  Description of Artificial Sequence: Synthetic oligonucleotide
  Target: LAMA2; (-) strand; PAM type: YTN; PAM sequence: CTA
caaaatcaaatgactataac

SEQ ID NO: 265775 - DNA, 20 bp, Artificial Sequence
  Description of Artificial Sequence: Synthetic oligonucleotide
  Target: LAMA2; (-) strand; PAM type: YTN; PAM sequence: TTC
tacaaaatcaaatgactata

SEQ ID NO: 265776 - DNA, 20 bp, Artificial Sequence
  Description of Artificial Sequence: Synthetic oligonucleotide
  Target: LAMA2; (-) strand; PAM type: YTN; PAM sequence: CTT
ctacaaaatcaaatgactat

SEQ ID NO: 265777 - DNA, 20 bp, Artificial Sequence
  Description of Artificial Sequence: Synthetic oligonucleotide
  Target: LAMA2; (-) strand; PAM type: YTN; PAM sequence: TTC
cttctacaaaatcaaatgac

SEQ ID NO: 265778 - DNA, 20 bp, Artificial Sequence
  Description of Artificial Sequence: Synthetic oligonucleotide
  Target: LAMA2; (-) strand; PAM type: YTN; PAM sequence: TTG
gtatatattccttctacaaa

SEQ ID NO: 265779 - DNA, 20 bp, Artificial Sequence
  Description of Artificial Sequence: Synthetic oligonucleotide
  Target: LAMA2; (-) strand; PAM type: YTN; PAM sequence: CTG
ttggtatatattccttctac

SEQ ID NO: 265780 - DNA, 20 bp, Artificial Sequence
  Description of Artificial Sequence: Synthetic oligonucleotide
  Target: LAMA2; (-) strand; PAM type: YTN; PAM sequence: CTG
gaaaactgttggtatatatt

SEQ ID NO: 265781 - DNA, 20 bp, Artificial Sequence
  Description of Artificial Sequence: Synthetic oligonucleotide
  Target: LAMA2; (-) strand; PAM type: YTN; PAM sequence: TTG
cacactggaaaactgttggt

SEQ ID NO: 265782 - DNA, 20 bp, Artificial Sequence
  Description of Artificial Sequence: Synthetic oligonucleotide
  Target: LAMA2; (-) strand; PAM type: YTN; PAM sequence: TTT
gcacactggaaaactgttgg

SEQ ID NO: 265783 - DNA, 20 bp, Artificial Sequence
  Description of Artificial Sequence: Synthetic oligonucleotide
  Target: LAMA2; (-) strand; PAM type: YTN; PAM sequence: TTT
tgcacactggaaaactgttg

SEQ ID NO: 265784 - DNA, 20 bp, Artificial Sequence
  Description of Artificial Sequence: Synthetic oligonucleotide
  Target: LAMA2; (-) strand; PAM type: YTN; PAM sequence: TTT
ttgcacactggaaaactgtt

SEQ ID NO: 265785 - DNA, 20 bp, Artificial Sequence
  Description of Artificial Sequence: Synthetic oligonucleotide
  Target: LAMA2; (-) strand; PAM type: YTN; PAM sequence: TTT
tttgcacactggaaaactgt

SEQ ID NO: 265786 - DNA, 20 bp, Artificial Sequence
  Description of Artificial Sequence: Synthetic oligonucleotide
  Target: LAMA2; (-) strand; PAM type: YTN; PAM sequence: TTT
ttttgcacactggaaaactg

SEQ ID NO: 265787 - DNA, 20 bp, Artificial Sequence
  Description of Artificial Sequence: Synthetic oligonucleotide
  Target: LAMA2; (-) strand; PAM type: YTN; PAM sequence: TTT
tttttgcacactggaaaact

SEQ ID NO: 265788 - DNA, 20 bp, Artificial Sequence
  Description of Artificial Sequence: Synthetic oligonucleotide
  Target: LAMA2; (-) strand; PAM type: YTN; PAM sequence: TTT
ttttttgcacactggaaaac

SEQ ID NO: 265789 - DNA, 20 bp, Artificial Sequence
  Description of Artificial Sequence: Synthetic oligonucleotide
  Target: LAMA2; (-) strand; PAM type: YTN; PAM sequence: TTA
agtttttttttgcacactgg

SEQ ID NO: 265790 - DNA, 20 bp, Artificial Sequence
  Description of Artificial Sequence: Synthetic oligonucleotide
  Target: LAMA2; (-) strand; PAM type: YTN; PAM sequence: TTG
ttaagtttttttttgcacac

SEQ ID NO: 265791 - DNA, 20 bp, Artificial Sequence
  Description of Artificial Sequence: Synthetic oligonucleotide
  Target: LAMA2; (-) strand; PAM type: YTN; PAM sequence: TTT
gttaagtttttttttgcaca

SEQ ID NO: 265792 - DNA, 20 bp, Artificial Sequence
  Description of Artificial Sequence: Synthetic oligonucleotide
  Target: LAMA2; (-) strand; PAM type: YTN; PAM sequence: TTA
gatttgttaagttttttttt

SEQ ID NO: 265793 - DNA, 20 bp, Artificial Sequence
  Description of Artificial Sequence: Synthetic oligonucleotide
  Target: LAMA2; (-) strand; PAM type: YTN; PAM sequence: TTC
aataatacatcagaatatat

SEQ ID NO: 265794 - DNA, 20 bp, Artificial Sequence
  Description of Artificial Sequence: Synthetic oligonucleotide
  Target: LAMA2; (-) strand; PAM type: YTN; PAM sequence: CTT
caataatacatcagaatata

SEQ ID NO: 265795 - DNA, 20 bp, Artificial Sequence
  Description of Artificial Sequence: Synthetic oligonucleotide
  Target: LAMA2; (-) strand; PAM type: YTN; PAM sequence: CTC
ttcaataatacatcagaata

SEQ ID NO: 265796 - DNA, 20 bp, Artificial Sequence
  Description of Artificial Sequence: Synthetic oligonucleotide
  Target: LAMA2; (-) strand; PAM type: YTN; PAM sequence: CTA
gtatctcttcaataatacat

SEQ ID NO: 265797 - DNA, 20 bp, Artificial Sequence
  Description of Artificial Sequence: Synthetic oligonucleotide
  Target: LAMA2; (-) strand; PAM type: YTN; PAM sequence: CTC
aagagtggtatgtgctagta

SEQ ID NO: 265798 - DNA, 20 bp, Artificial Sequence
  Description of Artificial Sequence: Synthetic oligonucleotide
  Target: LAMA2; (-) strand; PAM type: YTN; PAM sequence: TTC
tcaagagtggtatgtgctag

SEQ ID NO: 265799 - DNA, 20 bp, Artificial Sequence
  Description of Artificial Sequence: Synthetic oligonucleotide
  Target: LAMA2; (-) strand; PAM type: YTN; PAM sequence: TTA
tattctcaagagtggtatgt

SEQ ID NO: 265800 - DNA, 20 bp, Artificial Sequence
  Description of Artificial Sequence: Synthetic oligonucleotide
  Target: LAMA2; (-) strand; PAM type: YTN; PAM sequence: TTA
attatattctcaagagtggt

SEQ ID NO: 265801 - DNA, 20 bp, Artificial Sequence
  Description of Artificial Sequence: Synthetic oligonucleotide
  Target: LAMA2; (-) strand; PAM type: YTN; PAM sequence: TTT
aattatattctcaagagtgg

SEQ ID NO: 265802 - DNA, 20 bp, Artificial Sequence
  Description of Artificial Sequence: Synthetic oligonucleotide
  Target: LAMA2; (-) strand; PAM type: YTN; PAM sequence: CTA
atgagaagtttaattatatt

SEQ ID NO: 265803 - DNA, 20 bp, Artificial Sequence
  Description of Artificial Sequence: Synthetic oligonucleotide
  Target: LAMA2; (-) strand; PAM type: YTN; PAM sequence: TTG
gatgcctaatgagaagttta

SEQ ID NO: 265804 - DNA, 20 bp, Artificial Sequence
  Description of Artificial Sequence: Synthetic oligonucleotide
  Target: LAMA2; (-) strand; PAM type: YTN; PAM sequence: TTT
ggatgcctaatgagaagttt

SEQ ID NO: 265805 - DNA, 20 bp, Artificial Sequence
  Description of Artificial Sequence: Synthetic oligonucleotide
  Target: LAMA2; (-) strand; PAM type: YTN; PAM sequence: TTT
tggatgcctaatgagaagtt

SEQ ID NO: 265806 - DNA, 20 bp, Artificial Sequence
  Description of Artificial Sequence: Synthetic oligonucleotide
  Target: LAMA2; (-) strand; PAM type: YTN; PAM sequence: CTA
tattttggatgcctaatgag

SEQ ID NO: 265807 - DNA, 20 bp, Artificial Sequence
  Description of Artificial Sequence: Synthetic oligonucleotide
  Target: LAMA2; (-) strand; PAM type: YTN; PAM sequence: TTC
ctatattttggatgcctaat

SEQ ID NO: 265808 - DNA, 20 bp, Artificial Sequence
  Description of Artificial Sequence: Synthetic oligonucleotide
  Target: LAMA2; (-) strand; PAM type: YTN; PAM sequence: TTA
ggggaaattcctatattttg

SEQ ID NO: 265809 - DNA, 20 bp, Artificial Sequence
  Description of Artificial Sequence: Synthetic oligonucleotide
  Target: LAMA2; (-) strand; PAM type: YTN; PAM sequence: TTA
gccattaggggaaattccta

SEQ ID NO: 265810 - DNA, 20 bp, Artificial Sequence
  Description of Artificial Sequence: Synthetic oligonucleotide
  Target: LAMA2; (-) strand; PAM type: YTN; PAM sequence: TTA
tataaaaattagccattagg

SEQ ID NO: 265811 - DNA, 20 bp, Artificial Sequence
  Description of Artificial Sequence: Synthetic oligonucleotide
  Target: LAMA2; (-) strand; PAM type: YTN; PAM sequence: CTT
atataaaaattagccattag

SEQ ID NO: 265812 - DNA, 20 bp, Artificial Sequence
  Description of Artificial Sequence: Synthetic oligonucleotide
  Target: LAMA2; (-) strand; PAM type: YTN; PAM sequence: TTC
ttatataaaaattagccatt

SEQ ID NO: 265813 - DNA, 20 bp, Artificial Sequence
  Description of Artificial Sequence: Synthetic oligonucleotide
  Target: LAMA2; (-) strand; PAM type: YTN; PAM sequence: TTT
cttatataaaaattagccat

SEQ ID NO: 265814 - DNA, 20 bp, Artificial Sequence
  Description of Artificial Sequence: Synthetic oligonucleotide
  Target: LAMA2; (-) strand; PAM type: YTN; PAM sequence: TTT
tcttatataaaaattagcca

SEQ ID NO: 265815 - DNA, 20 bp, Artificial Sequence
  Description of Artificial Sequence: Synthetic oligonucleotide
  Target: LAMA2; (-) strand; PAM type: YTN; PAM sequence: TTT
ttcttatataaaaattagcc

SEQ ID NO: 265816 - DNA, 20 bp, Artificial Sequence
  Description of Artificial Sequence: Synthetic oligonucleotide
  Target: LAMA2; (-) strand; PAM type: YTN; PAM sequence: TTT
tttcttatataaaaattagc

SEQ ID NO: 265817 - DNA, 20 bp, Artificial Sequence
  Description of Artificial Sequence: Synthetic oligonucleotide
  Target: LAMA2; (-) strand; PAM type: YTN; PAM sequence: TTG
aaatagtgtacatagtattt

SEQ ID NO: 265818 - DNA, 20 bp, Artificial Sequence
  Description of Artificial Sequence: Synthetic oligonucleotide
  Target: LAMA2; (-) strand; PAM type: YTN; PAM sequence: TTT
gaaatagtgtacatagtatt

SEQ ID NO: 265819 - DNA, 20 bp, Artificial Sequence
  Description of Artificial Sequence: Synthetic oligonucleotide
  Target: LAMA2; (-) strand; PAM type: YTN; PAM sequence: CTT
tgaaatagtgtacatagtat

SEQ ID NO: 265820 - DNA, 20 bp, Artificial Sequence
  Description of Artificial Sequence: Synthetic oligonucleotide
  Target: LAMA2; (-) strand; PAM type: YTN; PAM sequence: CTG
ctttgaaatagtgtacatag

SEQ ID NO: 265821 - DNA, 20 bp, Artificial Sequence
  Description of Artificial Sequence: Synthetic oligonucleotide
  Target: LAMA2; (-) strand; PAM type: YTN; PAM sequence: CTG
tctgctttgaaatagtgtac

SEQ ID NO: 265822 - DNA, 20 bp, Artificial Sequence
  Description of Artificial Sequence: Synthetic oligonucleotide
  Target: LAMA2; (-) strand; PAM type: YTN; PAM sequence: TTC
tgtctgctttgaaatagtgt

SEQ ID NO: 265823 - DNA, 20 bp, Artificial Sequence
  Description of Artificial Sequence: Synthetic oligonucleotide
  Target: LAMA2; (-) strand; PAM type: YTN; PAM sequence: TTT
ctgtctgctttgaaatagtg

SEQ ID NO: 265824 - DNA, 20 bp, Artificial Sequence
  Description of Artificial Sequence: Synthetic oligonucleotide
  Target: LAMA2; (-) strand; PAM type: YTN; PAM sequence: TTT
tctgtctgctttgaaatagt

SEQ ID NO: 265825 - DNA, 20 bp, Artificial Sequence
  Description of Artificial Sequence: Synthetic oligonucleotide
  Target: LAMA2; (-) strand; PAM type: YTN; PAM sequence: CTT
ttctgtctgctttgaaatag

SEQ ID NO: 265826 - DNA, 20 bp, Artificial Sequence
  Description of Artificial Sequence: Synthetic oligonucleotide
  Target: LAMA2; (-) strand; PAM type: YTN; PAM sequence: TTC
atatgacttttctgtctgct

SEQ ID NO: 265827 - DNA, 20 bp, Artificial Sequence
  Description of Artificial Sequence: Synthetic oligonucleotide
  Target: LAMA2; (-) strand; PAM type: YTN; PAM sequence: TTT
catatgacttttctgtctgc

SEQ ID NO: 265828 - DNA, 20 bp, Artificial Sequence
  Description of Artificial Sequence: Synthetic oligonucleotide
  Target: LAMA2; (-) strand; PAM type: YTN; PAM sequence: TTT
tcatatgacttttctgtctg

SEQ ID NO: 265829 - DNA, 20 bp, Artificial Sequence
  Description of Artificial Sequence: Synthetic oligonucleotide
  Target: LAMA2; (-) strand; PAM type: YTN; PAM sequence: CTT
ttcatatgacttttctgtct

SEQ ID NO: 265830 - DNA, 20 bp, Artificial Sequence
  Description of Artificial Sequence: Synthetic oligonucleotide
  Target: LAMA2; (-) strand; PAM type: YTN; PAM sequence: TTG
acatacccttttcatatgac

SEQ ID NO: 265831 - DNA, 20 bp, Artificial Sequence
  Description of Artificial Sequence: Synthetic oligonucleotide
  Target: LAMA2; (-) strand; PAM type: YTN; PAM sequence: TTT
gacatacccttttcatatga

SEQ ID NO: 265832 - DNA, 20 bp, Artificial Sequence
  Description of Artificial Sequence: Synthetic oligonucleotide
  Target: LAMA2; (-) strand; PAM type: YTN; PAM sequence: TTT
tgacatacccttttcatatg

SEQ ID NO: 265833 - DNA, 20 bp, Artificial Sequence
  Description of Artificial Sequence: Synthetic oligonucleotide
  Target: LAMA2; (-) strand; PAM type: YTN; PAM sequence: TTT
ttgacatacccttttcatat

SEQ ID NO: 265834 - DNA, 20 bp, Artificial Sequence
  Description of Artificial Sequence: Synthetic oligonucleotide
  Target: LAMA2; (-) strand; PAM type: YTN; PAM sequence: TTT
tttgacatacccttttcata

SEQ ID NO: 265835 - DNA, 20 bp, Artificial Sequence
  Description of Artificial Sequence: Synthetic oligonucleotide
  Target: LAMA2; (-) strand; PAM type: YTN; PAM sequence: CTT
ttttgacatacccttttcat

SEQ ID NO: 265836 - DNA, 20 bp, Artificial Sequence
  Description of Artificial Sequence: Synthetic oligonucleotide
  Target: LAMA2; (-) strand; PAM type: YTN; PAM sequence: TTG
aaacttttttgacataccct

SEQ ID NO: 265837 - DNA, 20 bp, Artificial Sequence
  Description of Artificial Sequence: Synthetic oligonucleotide
  Target: LAMA2; (-) strand; PAM type: YTN; PAM sequence: TTT
gaaacttttttgacataccc

SEQ ID NO: 265838 - DNA, 20 bp, Artificial Sequence
  Description of Artificial Sequence: Synthetic oligonucleotide
  Target: LAMA2; (-) strand; PAM type: YTN; PAM sequence: TTT
tgaaacttttttgacatacc

SEQ ID NO: 265839 - DNA, 20 bp, Artificial Sequence
  Description of Artificial Sequence: Synthetic oligonucleotide
  Target: LAMA2; (-) strand; PAM type: YTN; PAM sequence: TTT
ttgaaacttttttgacatac

SEQ ID NO: 265840 - DNA, 20 bp, Artificial Sequence
  Description of Artificial Sequence: Synthetic oligonucleotide
  Target: LAMA2; (-) strand; PAM type: YTN; PAM sequence: CTT
tttgaaacttttttgacata

SEQ ID NO: 265841 - DNA, 20 bp, Artificial Sequence
  Description of Artificial Sequence: Synthetic oligonucleotide
  Target: LAMA2; (-) strand; PAM type: YTN; PAM sequence: CTC
tttttgaaacttttttgaca

SEQ ID NO: 265842 - DNA, 20 bp, Artificial Sequence
  Description of Artificial Sequence: Synthetic oligonucleotide
  Target: LAMA2; (-) strand; PAM type: YTN; PAM sequence: TTA
ggtccacaaacacacaacac

SEQ ID NO: 265843 - DNA, 20 bp, Artificial Sequence
  Description of Artificial Sequence: Synthetic oligonucleotide
  Target: LAMA2; (-) strand; PAM type: YTN; PAM sequence: CTG
gttaggtccacaaacacaca

SEQ ID NO: 265844 - DNA, 20 bp, Artificial Sequence
  Description of Artificial Sequence: Synthetic oligonucleotide
  Target: LAMA2; (-) strand; PAM type: YTN; PAM sequence: TTG
aatcaaatgtcctggttagg

SEQ ID NO: 265845 - DNA, 20 bp, Artificial Sequence
  Description of Artificial Sequence: Synthetic oligonucleotide
  Target: LAMA2; (-) strand; PAM type: YTN; PAM sequence: TTA
attgaatcaaatgtcctggt

SEQ ID NO: 265846 - DNA, 20 bp, Artificial Sequence
  Description of Artificial Sequence: Synthetic oligonucleotide
  Target: LAMA2; (-) strand; PAM type: YTN; PAM sequence: TTG
gttaattgaatcaaatgtcc

SEQ ID NO: 265847 - DNA, 20 bp, Artificial Sequence
  Description of Artificial Sequence: Synthetic oligonucleotide
  Target: LAMA2; (-) strand; PAM type: YTN; PAM sequence: CTT
ggttaattgaatcaaatgtc

SEQ ID NO: 265848 - DNA, 20 bp, Artificial Sequence
  Description of Artificial Sequence: Synthetic oligonucleotide
  Target: LAMA2; (-) strand; PAM type: YTN; PAM sequence: CTA
aacttggttaattgaatcaa

SEQ ID NO: 265849 - DNA, 20 bp, Artificial Sequence
  Description of Artificial Sequence: Synthetic oligonucleotide
  Target: LAMA2; (-) strand; PAM type: YTN; PAM sequence: CTG
acatactaaacttggttaat

SEQ ID NO: 265850 - DNA, 20 bp, Artificial Sequence
  Description of Artificial Sequence: Synthetic oligonucleotide
  Target: LAMA2; (-) strand; PAM type: YTN; PAM sequence: TTG
ctgacatactaaacttggtt

SEQ ID NO: 265851 - DNA, 20 bp, Artificial Sequence
  Description of Artificial Sequence: Synthetic oligonucleotide
  Target: LAMA2; (-) strand; PAM type: YTN; PAM sequence: TTC
agagggttgctgacatacta

SEQ ID NO: 265852 - DNA, 20 bp, Artificial Sequence
  Description of Artificial Sequence: Synthetic oligonucleotide
  Target: LAMA2; (-) strand; PAM type: YTN; PAM sequence: TTT
cagagggttgctgacatact

SEQ ID NO: 265853 - DNA, 20 bp, Artificial Sequence
  Description of Artificial Sequence: Synthetic oligonucleotide
  Target: LAMA2; (-) strand; PAM type: YTN; PAM sequence: CTT
tcagagggttgctgacatac

SEQ ID NO: 265854 - DNA, 20 bp, Artificial Sequence
  Description of Artificial Sequence: Synthetic oligonucleotide
  Target: LAMA2; (-) strand; PAM type: YTN; PAM sequence: CTC
aatctttcagagggttgctg

SEQ ID NO: 265855 - DNA, 20 bp, Artificial Sequence
  Description of Artificial Sequence: Synthetic oligonucleotide
  Target: LAMA2; (-) strand; PAM type: YTN; PAM sequence: TTC
tcaatctttcagagggttgc

SEQ ID NO: 265856 - DNA, 20 bp, Artificial Sequence
  Description of Artificial Sequence: Synthetic oligonucleotide
  Target: LAMA2; (-) strand; PAM type: YTN; PAM sequence: CTT
ctcaatctttcagagggttg

SEQ ID NO: 265857 - DNA, 20 bp, Artificial Sequence
  Description of Artificial Sequence: Synthetic oligonucleotide
  Target: LAMA2; (-) strand; PAM type: YTN; PAM sequence: CTG
gacagtcaatcttctcaatc

SEQ ID NO: 265858 - DNA, 20 bp, Artificial Sequence
  Description of Artificial Sequence: Synthetic oligonucleotide
  Target: LAMA2; (-) strand; PAM type: YTN; PAM sequence: CTC
tggacagtcaatcttctcaa

SEQ ID NO: 265859 - DNA, 20 bp, Artificial Sequence
  Description of Artificial Sequence: Synthetic oligonucleotide
  Target: LAMA2; (-) strand; PAM type: YTN; PAM sequence: TTC
tctggacagtcaatcttctc

SEQ ID NO: 265860 - DNA, 20 bp, Artificial Sequence
  Description of Artificial Sequence: Synthetic oligonucleotide
  Target: LAMA2; (-) strand; PAM type: YTN; PAM sequence: TTG
taatattctctggacagtca

SEQ ID NO: 265861 - DNA, 20 bp, Artificial Sequence
  Description of Artificial Sequence: Synthetic oligonucleotide
  Target: LAMA2; (-) strand; PAM type: YTN; PAM sequence: TTC
aacagagaaagcaaatattg

SEQ ID NO: 265862 - DNA, 20 bp, Artificial Sequence
  Description of Artificial Sequence: Synthetic oligonucleotide
  Target: LAMA2; (-) strand; PAM type: YTN; PAM sequence: CTT
caacagagaaagcaaatatt

SEQ ID NO: 265863 - DNA, 20 bp, Artificial Sequence
  Description of Artificial Sequence: Synthetic oligonucleotide
  Target: LAMA2; (-) strand; PAM type: YTN; PAM sequence: TTC
ttcaacagagaaagcaaata

SEQ ID NO: 265864 - DNA, 20 bp, Artificial Sequence
  Description of Artificial Sequence: Synthetic oligonucleotide
  Target: LAMA2; (-) strand; PAM type: YTN; PAM sequence: TTT
cttcaacagagaaagcaaat

SEQ ID NO: 265865 - DNA, 20 bp, Artificial Sequence
  Description of Artificial Sequence: Synthetic oligonucleotide
  Target: LAMA2; (-) strand; PAM type: YTN; PAM sequence: CTA
cataatttcttcaacagaga

SEQ ID NO: 265866 - DNA, 20 bp, Artificial Sequence
  Description of Artificial Sequence: Synthetic oligonucleotide
  Target: LAMA2; (-) strand; PAM type: YTN; PAM sequence: CTG
taagtctacataatttcttc

SEQ ID NO: 265867 - DNA, 20 bp, Artificial Sequence
  Description of Artificial Sequence: Synthetic oligonucleotide
  Target: LAMA2; (-) strand; PAM type: YTN; PAM sequence: TTA
tacctgtaagtctacataat

SEQ ID NO: 265868 - DNA, 20 bp, Artificial Sequence
  Description of Artificial Sequence: Synthetic oligonucleotide
  Target: LAMA2; (-) strand; PAM type: YTN; PAM sequence: CTT
atacctgtaagtctacataa

SEQ ID NO: 265869 - DNA, 20 bp, Artificial Sequence
  Description of Artificial Sequence: Synthetic oligonucleotide
  Target: LAMA2; (-) strand; PAM type: YTN; PAM sequence: CTC
ttatacctgtaagtctacat

SEQ ID NO: 265870 - DNA, 20 bp, Artificial Sequence
  Description of Artificial Sequence: Synthetic oligonucleotide
  Target: LAMA2; (-) strand; PAM type: YTN; PAM sequence: TTC
tcttatacctgtaagtctac

SEQ ID NO: 265871 - DNA, 20 bp, Artificial Sequence
  Description of Artificial Sequence: Synthetic oligonucleotide
  Target: LAMA2; (-) strand; PAM type: YTN; PAM sequence: TTT
ctcttatacctgtaagtcta

SEQ ID NO: 265872 - DNA, 20 bp, Artificial Sequence
  Description of Artificial Sequence: Synthetic oligonucleotide
  Target: LAMA2; (-) strand; PAM type: YTN; PAM sequence: TTG
tttctcttatacctgtaagt

SEQ ID NO: 265873 - DNA, 20 bp, Artificial Sequence
  Description of Artificial Sequence: Synthetic oligonucleotide
  Target: LAMA2; (-) strand; PAM type: YTN; PAM sequence: TTT
gtttctcttatacctgtaag

SEQ ID NO: 265874 - DNA, 20 bp, Artificial Sequence
  Description of Artificial Sequence: Synthetic oligonucleotide
  Target: LAMA2; (-) strand; PAM type: YTN; PAM sequence: TTT
tgtttctcttatacctgtaa

SEQ ID NO: 265875 - DNA, 20 bp, Artificial Sequence
  Description of Artificial Sequence: Synthetic oligonucleotide
  Target: LAMA2; (-) strand; PAM type: YTN; PAM sequence: TTC
aaaaatatgattttgtttct

SEQ ID NO: 265876 - DNA, 20 bp, Artificial Sequence
  Description of Artificial Sequence: Synthetic oligonucleotide
  Target: LAMA2; (-) strand; PAM type: YTN; PAM sequence: CTA
aaaataagagattcaaaaat

SEQ ID NO: 265877 - DNA, 20 bp, Artificial Sequence
  Description of Artificial Sequence: Synthetic oligonucleotide
  Target: LAMA2; (-) strand; PAM type: YTN; PAM sequence: TTA
ctaaaaataagagattcaaa

SEQ ID NO: 265878 - DNA, 20 bp, Artificial Sequence
  Description of Artificial Sequence: Synthetic oligonucleotide
  Target: LAMA2; (-) strand; PAM type: YTN; PAM sequence: TTA
aagccaataatcattactaa

SEQ ID NO: 265879 - DNA, 20 bp, Artificial Sequence
  Description of Artificial Sequence: Synthetic oligonucleotide
  Target: LAMA2; (-) strand; PAM type: YTN; PAM sequence: CTT
aaagccaataatcattacta

SEQ ID NO: 265880 - DNA, 20 bp, Artificial Sequence
  Description of Artificial Sequence: Synthetic oligonucleotide
  Target: LAMA2; (-) strand; PAM type: YTN; PAM sequence: TTA
aaatccttaaagccaataat

SEQ ID NO: 265881 - DNA, 20 bp, Artificial Sequence
  Description of Artificial Sequence: Synthetic oligonucleotide
  Target: LAMA2; (-) strand; PAM type: YTN; PAM sequence: CTG
aattaaaatccttaaagcca

SEQ ID NO: 265882 - DNA, 20 bp, Artificial Sequence
  Description of Artificial Sequence: Synthetic oligonucleotide
  Target: LAMA2; (-) strand; PAM type: YTN; PAM sequence: TTA
gtaactgaattaaaatcctt

SEQ ID NO: 265883 - DNA, 20 bp, Artificial Sequence
  Description of Artificial Sequence: Synthetic oligonucleotide
  Target: LAMA2; (-) strand; PAM type: YTN; PAM sequence: CTA
aatataacattagtaactga

SEQ ID NO: 265884 - DNA, 20 bp, Artificial Sequence
  Description of Artificial Sequence: Synthetic oligonucleotide
  Target: LAMA2; (-) strand; PAM type: YTN; PAM sequence: TTA
tgtaacctaaatataacatt

SEQ ID NO: 265885 - DNA, 20 bp, Artificial Sequence
  Description of Artificial Sequence: Synthetic oligonucleotide
  Target: LAMA2; (-) strand; PAM type: YTN; PAM sequence: TTT
atgtaacctaaatataacat

SEQ ID NO: 265886 - DNA, 20 bp, Artificial Sequence
  Description of Artificial Sequence: Synthetic oligonucleotide
  Target: LAMA2; (-) strand; PAM type: YTN; PAM sequence: TTT
tatgtaacctaaatataaca

SEQ ID NO: 265887 - DNA, 20 bp, Artificial Sequence
  Description of Artificial Sequence: Synthetic oligonucleotide
  Target: LAMA2; (-) strand; PAM type: YTN; PAM sequence: TTA
ttttatgtaacctaaatata

SEQ ID NO: 265888 - DNA, 20 bp, Artificial Sequence
  Description of Artificial Sequence: Synthetic oligonucleotide
  Target: LAMA2; (-) strand; PAM type: YTN; PAM sequence: TTG
cataatgaattattttatgt

SEQ ID NO: 265889 - DNA, 20 bp, Artificial Sequence
  Description of Artificial Sequence: Synthetic oligonucleotide
  Target: LAMA2; (-) strand; PAM type: YTN; PAM sequence: TTG
cagtaaaataattgcataat

SEQ ID NO: 265890 - DNA, 20 bp, Artificial Sequence
  Description of Artificial Sequence: Synthetic oligonucleotide
  Target: LAMA2; (-) strand; PAM type: YTN; PAM sequence: TTT
gcagtaaaataattgcataa

SEQ ID NO: 265891 - DNA, 20 bp, Artificial Sequence
  Description of Artificial Sequence: Synthetic oligonucleotide
  Target: LAMA2; (-) strand; PAM type: YTN; PAM sequence: TTT
tgcagtaaaataattgcata

SEQ ID NO: 265892 - DNA, 20 bp, Artificial Sequence
  Description of Artificial Sequence: Synthetic oligonucleotide
  Target: LAMA2; (-) strand; PAM type: YTN; PAM sequence: CTT
ttgcagtaaaataattgcat

SEQ ID NO: 265893 - DNA, 20 bp, Artificial Sequence
  Description of Artificial Sequence: Synthetic oligonucleotide
  Target: LAMA2; (-) strand; PAM type: YTN; PAM sequence: TTG
cttttgcagtaaaataattg

SEQ ID NO: 265894 - DNA, 20 bp, Artificial Sequence
  Description of Artificial Sequence: Synthetic oligonucleotide
  Target: LAMA2; (-) strand; PAM type: YTN; PAM sequence: TTT
gcttttgcagtaaaataatt

SEQ ID NO: 265895 - DNA, 20 bp, Artificial Sequence
  Description of Artificial Sequence: Synthetic oligonucleotide
  Target: LAMA2; (-) strand; PAM type: YTN; PAM sequence: TTT
tgcttttgcagtaaaataat

SEQ ID NO: 265896 - DNA, 20 bp, Artificial Sequence
  Description of Artificial Sequence: Synthetic oligonucleotide
  Target: LAMA2; (-) strand; PAM type: YTN; PAM sequence: CTT
ttgcttttgcagtaaaataa

SEQ ID NO: 265897 - DNA, 20 bp, Artificial Sequence
  Description of Artificial Sequence: Synthetic oligonucleotide
  Target: LAMA2; (-) strand; PAM type: YTN; PAM sequence: TTC
agccttttgcttttgcagta

SEQ ID NO: 265898 - DNA, 20 bp, Artificial Sequence
  Description of Artificial Sequence: Synthetic oligonucleotide
  Target: LAMA2; (-) strand; PAM type: YTN; PAM sequence: TTT
cagccttttgcttttgcagt

SEQ ID NO: 265899 - DNA, 20 bp, Artificial Sequence
  Description of Artificial Sequence: Synthetic oligonucleotide
  Target: LAMA2; (-) strand; PAM type: YTN; PAM sequence: TTT
tcagccttttgcttttgcag

SEQ ID NO: 265900 - DNA, 20 bp, Artificial Sequence
  Description of Artificial Sequence: Synthetic oligonucleotide
  Target: LAMA2; (-) strand; PAM type: YTN; PAM sequence: TTC
aacaataattttcagccttt

SEQ ID NO: 265901 - DNA, 20 bp, Artificial Sequence
  Description of Artificial Sequence: Synthetic oligonucleotide
  Target: LAMA2; (-) strand; PAM type: YTN; PAM sequence: CTT
caacaataattttcagcctt

SEQ ID NO: 265902 - DNA, 20 bp, Artificial Sequence
  Description of Artificial Sequence: Synthetic oligonucleotide
  Target: LAMA2; (-) strand; PAM type: YTN; PAM sequence: TTA
tagagatgaatgtgccaaaa

SEQ ID NO: 265903 - DNA, 20 bp, Artificial Sequence
  Description of Artificial Sequence: Synthetic oligonucleotide
  Target: LAMA2; (-) strand; PAM type: YTN; PAM sequence: TTT
atagagatgaatgtgccaaa

SEQ ID NO: 265904 - DNA, 20 bp, Artificial Sequence
  Description of Artificial Sequence: Synthetic oligonucleotide
  Target: LAMA2; (-) strand; PAM type: YTN; PAM sequence: TTT
tatagagatgaatgtgccaa

SEQ ID NO: 265905 - DNA, 20 bp, Artificial Sequence
  Description of Artificial Sequence: Synthetic oligonucleotide
  Target: LAMA2; (-) strand; PAM type: YTN; PAM sequence: TTA
ttttatagagatgaatgtgc

SEQ ID NO: 265906 - DNA, 20 bp, Artificial Sequence
  Description of Artificial Sequence: Synthetic oligonucleotide
  Target: LAMA2; (-) strand; PAM type: YTN; PAM sequence: CTT
attttatagagatgaatgtg

SEQ ID NO: 265907 - DNA, 20 bp, Artificial Sequence
  Description of Artificial Sequence: Synthetic oligonucleotide
  Target: LAMA2; (-) strand; PAM type: YTN; PAM sequence: TTA
agaacttattttatagagat

SEQ ID NO: 265908 - DNA, 20 bp, Artificial Sequence
  Description of Artificial Sequence: Synthetic oligonucleotide
  Target: LAMA2; (-) strand; PAM type: YTN; PAM sequence: TTT
aagaacttattttatagaga

SEQ ID NO: 265909 - DNA, 20 bp, Artificial Sequence
  Description of Artificial Sequence: Synthetic oligonucleotide
  Target: LAMA2; (-) strand; PAM type: YTN; PAM sequence: TTT
taagaacttattttatagag

SEQ ID NO: 265910 - DNA, 20 bp, Artificial Sequence
  Description of Artificial Sequence: Synthetic oligonucleotide
  Target: LAMA2; (-) strand; PAM type: YTN; PAM sequence: CTG
gggagtgttttaagaactta

SEQ ID NO: 265911 - DNA, 20 bp, Artificial Sequence
  Description of Artificial Sequence: Synthetic oligonucleotide
  Target: LAMA2; (-) strand; PAM type: YTN; PAM sequence: TTA
actggggagtgttttaagaa

SEQ ID NO: 265912 - DNA, 20 bp, Artificial Sequence
  Description of Artificial Sequence: Synthetic oligonucleotide
  Target: LAMA2; (-) strand; PAM type: YTN; PAM sequence: CTG
atgaataagtgttaactggg

SEQ ID NO: 265913 - DNA, 20 bp, Artificial Sequence
  Description of Artificial Sequence: Synthetic oligonucleotide
  Target: LAMA2; (-) strand; PAM type: YTN; PAM sequence: TTC
agcaaggtgtcatgctgatg

SEQ ID NO: 265914 - DNA, 20 bp, Artificial Sequence
  Description of Artificial Sequence: Synthetic oligonucleotide
  Target: LAMA2; (-) strand; PAM type: YTN; PAM sequence: TTC
aagtcattcagcaaggtgtc

SEQ ID NO: 265915 - DNA, 20 bp, Artificial Sequence
  Description of Artificial Sequence: Synthetic oligonucleotide
  Target: LAMA2; (-) strand; PAM type: YTN; PAM sequence: TTT
caagtcattcagcaaggtgt

SEQ ID NO: 265916 - DNA, 20 bp, Artificial Sequence
  Description of Artificial Sequence: Synthetic oligonucleotide
  Target: LAMA2; (-) strand; PAM type: YTN; PAM sequence: TTA
taatttcaagtcattcagca

SEQ ID NO: 265917 - DNA, 20 bp, Artificial Sequence
  Description of Artificial Sequence: Synthetic oligonucleotide
  Target: LAMA2; (-) strand; PAM type: YTN; PAM sequence: CTA
tgaattataatttcaagtca

SEQ ID NO: 265918 - DNA, 20 bp, Artificial Sequence
  Description of Artificial Sequence: Synthetic oligonucleotide
  Target: LAMA2; (-) strand; PAM type: YTN; PAM sequence: TTA
tctatgaattataatttcaa

SEQ ID NO: 265919 - DNA, 20 bp, Artificial Sequence
  Description of Artificial Sequence: Synthetic oligonucleotide
  Target: LAMA2; (-) strand; PAM type: YTN; PAM sequence: CTC
caagataaaataattatcta

SEQ ID NO: 265920 - DNA, 20 bp, Artificial Sequence
  Description of Artificial Sequence: Synthetic oligonucleotide
  Target: LAMA2; (-) strand; PAM type: YTN; PAM sequence: TTA
tgagagataatggctccaag

SEQ ID NO: 265921 - DNA, 20 bp, Artificial Sequence
  Description of Artificial Sequence: Synthetic oligonucleotide
  Target: LAMA2; (-) strand; PAM type: YTN; PAM sequence: TTA
acagtagcattatgagagat

SEQ ID NO: 265922 - DNA, 20 bp, Artificial Sequence
  Description of Artificial Sequence: Synthetic oligonucleotide
  Target: LAMA2; (-) strand; PAM type: YTN; PAM sequence: TTT
aacagtagcattatgagaga

SEQ ID NO: 265923 - DNA, 20 bp, Artificial Sequence
  Description of Artificial Sequence: Synthetic oligonucleotide
  Target: LAMA2; (-) strand; PAM type: YTN; PAM sequence: TTC
catatttaacagtagcatta

SEQ ID NO: 265924 - DNA, 20 bp, Artificial Sequence
  Description of Artificial Sequence: Synthetic oligonucleotide
  Target: LAMA2; (-) strand; PAM type: YTN; PAM sequence: TTA
agcaataaaagagccattcc

SEQ ID NO: 265925 - DNA, 20 bp, Artificial Sequence
  Description of Artificial Sequence: Synthetic oligonucleotide
  Target: LAMA2; (-) strand; PAM type: YTN; PAM sequence: TTT
aagcaataaaagagccattc

SEQ ID NO: 265926 - DNA, 20 bp, Artificial Sequence
  Description of Artificial Sequence: Synthetic oligonucleotide
  Target: LAMA2; (-) strand; PAM type: YTN; PAM sequence: TTT
taagcaataaaagagccatt

SEQ ID NO: 265927 - DNA, 20 bp, Artificial Sequence
  Description of Artificial Sequence: Synthetic oligonucleotide
  Target: LAMA2; (-) strand; PAM type: YTN; PAM sequence: TTT
ttaagcaataaaagagccat

SEQ ID NO: 265928 - DNA, 20 bp, Artificial Sequence
  Description of Artificial Sequence: Synthetic oligonucleotide
  Target: LAMA2; (-) strand; PAM type: YTN; PAM sequence: TTC
aaccatccaaaggaaccacc

SEQ ID NO: 265929 - DNA, 20 bp, Artificial Sequence
  Description of Artificial Sequence: Synthetic oligonucleotide
  Target: LAMA2; (-) strand; PAM type: YTN; PAM sequence: TTA
ttcaaccatccaaaggaacc

SEQ ID NO: 265930 - DNA, 20 bp, Artificial Sequence
  Description of Artificial Sequence: Synthetic oligonucleotide
  Target: LAMA2; (-) strand; PAM type: YTN; PAM sequence: TTT
attcaaccatccaaaggaac

SEQ ID NO: 265931 - DNA, 20 bp, Artificial Sequence
  Description of Artificial Sequence: Synthetic oligonucleotide
  Target: LAMA2; (-) strand; PAM type: YTN; PAM sequence: TTT
tattcaaccatccaaaggaa

SEQ ID NO: 265932 - DNA, 20 bp, Artificial Sequence
  Description of Artificial Sequence: Synthetic oligonucleotide
  Target: LAMA2; (-) strand; PAM type: YTN; PAM sequence: CTT
ttattcaaccatccaaagga

SEQ ID NO: 265933 - DNA, 20 bp, Artificial Sequence
  Description of Artificial Sequence: Synthetic oligonucleotide
  Target: LAMA2; (-) strand; PAM type: YTN; PAM sequence: CTC
ttttattcaaccatccaaag

SEQ ID NO: 265934 - DNA, 20 bp, Artificial Sequence
  Description of Artificial Sequence: Synthetic oligonucleotide
  Target: LAMA2; (-) strand; PAM type: YTN; PAM sequence: TTA
agtgccataatcctctttta

SEQ ID NO: 265935 - DNA, 20 bp, Artificial Sequence
  Description of Artificial Sequence: Synthetic oligonucleotide
  Target: LAMA2; (-) strand; PAM type: YTN; PAM sequence: TTT
aagtgccataatcctctttt

SEQ ID NO: 265936 - DNA, 20 bp, Artificial Sequence
  Description of Artificial Sequence: Synthetic oligonucleotide
  Target: LAMA2; (-) strand; PAM type: YTN; PAM sequence: TTG
atttaagtgccataatcctc

SEQ ID NO: 265937 - DNA, 20 bp, Artificial Sequence
  Description of Artificial Sequence: Synthetic oligonucleotide
  Target: LAMA2; (-) strand; PAM type: YTN; PAM sequence: TTG
ccattgatttaagtgccata

SEQ ID NO: 265938 - DNA, 20 bp, Artificial Sequence
  Description of Artificial Sequence: Synthetic oligonucleotide
  Target: LAMA2; (-) strand; PAM type: YTN; PAM sequence: TTT
gccattgatttaagtgccat

SEQ ID NO: 265939 - DNA, 20 bp, Artificial Sequence
  Description of Artificial Sequence: Synthetic oligonucleotide
  Target: LAMA2; (-) strand; PAM type: YTN; PAM sequence: TTT
tgccattgatttaagtgcca

SEQ ID NO: 265940 - DNA, 20 bp, Artificial Sequence
  Description of Artificial Sequence: Synthetic oligonucleotide
  Target: LAMA2; (-) strand; PAM type: YTN; PAM sequence: TTG
tcatattttgccattgattt

SEQ ID NO: 265941 - DNA, 20 bp, Artificial Sequence
  Description of Artificial Sequence: Synthetic oligonucleotide
  Target: LAMA2; (-) strand; PAM type: YTN; PAM sequence: TTT
gtcatattttgccattgatt

SEQ ID NO: 265942 - DNA, 20 bp, Artificial Sequence
  Description of Artificial Sequence: Synthetic oligonucleotide
  Target: LAMA2; (-) strand; PAM type: YTN; PAM sequence: TTA
gcagggcaaaatgatttgtc

SEQ ID NO: 265943 - DNA, 20 bp, Artificial Sequence
  Description of Artificial Sequence: Synthetic oligonucleotide
  Target: LAMA2; (-) strand; PAM type: YTN; PAM sequence: TTG
cagaaaagtggttagcaggg

SEQ ID NO: 265944 - DNA, 20 bp, Artificial Sequence
  Description of Artificial Sequence: Synthetic oligonucleotide
  Target: LAMA2; (-) strand; PAM type: YTN; PAM sequence: TTC
aagtgtcattgcagaaaagt

SEQ ID NO: 265945 - DNA, 20 bp, Artificial Sequence
  Description of Artificial Sequence: Synthetic oligonucleotide
  Target: LAMA2; (-) strand; PAM type: YTN; PAM sequence: TTT
caagtgtcattgcagaaaag

SEQ ID NO: 265946 - DNA, 20 bp, Artificial Sequence
  Description of Artificial Sequence: Synthetic oligonucleotide
  Target: LAMA2; (-) strand; PAM type: YTN; PAM sequence: TTC
agatgaaaaagcccaaattt

SEQ ID NO: 265947 - DNA, 20 bp, Artificial Sequence
  Description of Artificial Sequence: Synthetic oligonucleotide
  Target: LAMA2; (-) strand; PAM type: YTN; PAM sequence: TTT
cagatgaaaaagcccaaatt

SEQ ID NO: 265948 - DNA, 20 bp, Artificial Sequence
  Description of Artificial Sequence: Synthetic oligonucleotide
  Target: LAMA2; (-) strand; PAM type: YTN; PAM sequence: TTT
tcagatgaaaaagcccaaat

SEQ ID NO: 265949 - DNA, 20 bp, Artificial Sequence
  Description of Artificial Sequence: Synthetic oligonucleotide
  Target: LAMA2; (-) strand; PAM type: YTN; PAM sequence: TTT
ttcagatgaaaaagcccaaa

SEQ ID NO: 265950 - DNA, 20 bp, Artificial Sequence
  Description of Artificial Sequence: Synthetic oligonucleotide
  Target: LAMA2; (-) strand; PAM type: YTN; PAM sequence: CTT
tttcagatgaaaaagcccaa

SEQ ID NO: 265951 - DNA, 20 bp, Artificial Sequence
  Description of Artificial Sequence: Synthetic oligonucleotide
  Target: LAMA2; (-) strand; PAM type: YTN; PAM sequence: CTG
gtcaggctttttcagatgaa

SEQ ID NO: 265952 - DNA, 20 bp, Artificial Sequence
  Description of Artificial Sequence: Synthetic oligonucleotide
  Target: LAMA2; (-) strand; PAM type: YTN; PAM sequence: TTC
caggaagtatagatgaaact

SEQ ID NO: 265953 - DNA, 20 bp, Artificial Sequence
  Description of Artificial Sequence: Synthetic oligonucleotide
  Target: LAMA2; (-) strand; PAM type: YTN; PAM sequence: CTG
aatgaatgaatgcatgttcc

SEQ ID NO: 265954 - DNA, 20 bp, Artificial Sequence
  Description of Artificial Sequence: Synthetic oligonucleotide
  Target: LAMA2; (-) strand; PAM type: YTN; PAM sequence: TTG
aatgactgaatgaatgaatg

SEQ ID NO: 265955 - DNA, 20 bp, Artificial Sequence
  Description of Artificial Sequence: Synthetic oligonucleotide
  Target: LAMA2; (-) strand; PAM type: YTN; PAM sequence: TTT
gaatgactgaatgaatgaat

SEQ ID NO: 265956 - DNA, 20 bp, Artificial Sequence
  Description of Artificial Sequence: Synthetic oligonucleotide
  Target: LAMA2; (-) strand; PAM type: YTN; PAM sequence: TTT
tgaatgactgaatgaatgaa

SEQ ID NO: 265957 - DNA, 20 bp, Artificial Sequence
  Description of Artificial Sequence: Synthetic oligonucleotide
  Target: LAMA2; (-) strand; PAM type: YTN; PAM sequence: CTA
ttttgaatgactgaatgaat

SEQ ID NO: 265958 - DNA, 20 bp, Artificial Sequence
  Description of Artificial Sequence: Synthetic oligonucleotide
  Target: LAMA2; (-) strand; PAM type: YTN; PAM sequence: TTC
gatgactattttgaatgact

SEQ ID NO: 265959 - DNA, 20 bp, Artificial Sequence
  Description of Artificial Sequence: Synthetic oligonucleotide
  Target: LAMA2; (-) strand; PAM type: YTN; PAM sequence: TTC
atcaaacatgggaggcattc

SEQ ID NO: 265960 - DNA, 20 bp, Artificial Sequence
  Description of Artificial Sequence: Synthetic oligonucleotide
  Target: LAMA2; (-) strand; PAM type: YTN; PAM sequence: TTA
gttcatcaaacatgggaggc

SEQ ID NO: 265961 - DNA, 20 bp, Artificial Sequence
  Description of Artificial Sequence: Synthetic oligonucleotide
  Target: LAMA2; (-) strand; PAM type: YTN; PAM sequence: TTT
agttcatcaaacatgggagg

SEQ ID NO: 265962 - DNA, 20 bp, Artificial Sequence
  Description of Artificial Sequence: Synthetic oligonucleotide
  Target: LAMA2; (-) strand; PAM type: YTN; PAM sequence: TTT
tagttcatcaaacatgggag

SEQ ID NO: 265963 - DNA, 20 bp, Artificial Sequence
  Description of Artificial Sequence: Synthetic oligonucleotide
  Target: LAMA2; (-) strand; PAM type: YTN; PAM sequence: CTT
ttagttcatcaaacatggga

SEQ ID NO: 265964 - DNA, 20 bp, Artificial Sequence
  Description of Artificial Sequence: Synthetic oligonucleotide
  Target: LAMA2; (-) strand; PAM type: YTN; PAM sequence: CTC
cttttagttcatcaaacatg

SEQ ID NO: 265965 - DNA, 20 bp, Artificial Sequence
  Description of Artificial Sequence: Synthetic oligonucleotide
  Target: LAMA2; (-) strand; PAM type: YTN; PAM sequence: TTA
aatgctccttttagttcatc

SEQ ID NO: 265966 - DNA, 20 bp, Artificial Sequence
  Description of Artificial Sequence: Synthetic oligonucleotide
  Target: LAMA2; (-) strand; PAM type: YTN; PAM sequence: CTT
aaatgctccttttagttcat

SEQ ID NO: 265967 - DNA, 20 bp, Artificial Sequence
  Description of Artificial Sequence: Synthetic oligonucleotide
  Target: LAMA2; (-) strand; PAM type: YTN; PAM sequence: CTG
gcttaaatgctccttttagt

SEQ ID NO: 265968 - DNA, 20 bp, Artificial Sequence
  Description of Artificial Sequence: Synthetic oligonucleotide
  Target: LAMA2; (-) strand; PAM type: YTN; PAM sequence: CTA
aaactggcttaaatgctcct

SEQ ID NO: 265969 - DNA, 20 bp, Artificial Sequence
  Description of Artificial Sequence: Synthetic oligonucleotide
  Target: LAMA2; (-) strand; PAM type: YTN; PAM sequence: TTC
cccgatgacctaaaactggc

SEQ ID NO: 265970 - DNA, 20 bp, Artificial Sequence
  Description of Artificial Sequence: Synthetic oligonucleotide
  Target: LAMA2; (-) strand; PAM type: YTN; PAM sequence: CTG
agaaacattccccgatgacc

SEQ ID NO: 265971 - DNA, 20 bp, Artificial Sequence
  Description of Artificial Sequence: Synthetic oligonucleotide
  Target: LAMA2; (-) strand; PAM type: YTN; PAM sequence: CTC
tgagaaacattccccgatga

SEQ ID NO: 265972 - DNA, 20 bp, Artificial Sequence
  Description of Artificial Sequence: Synthetic oligonucleotide
  Target: LAMA2; (-) strand; PAM type: YTN; PAM sequence: TTC
tctgagaaacattccccgat

SEQ ID NO: 265973 - DNA, 20 bp, Artificial Sequence
  Description of Artificial Sequence: Synthetic oligonucleotide
  Target: LAMA2; (-) strand; PAM type: YTN; PAM sequence: TTT
ctctgagaaacattccccga

SEQ ID NO: 265974 - DNA, 20 bp, Artificial Sequence
  Description of Artificial Sequence: Synthetic oligonucleotide
  Target: LAMA2; (-) strand; PAM type: YTN; PAM sequence: CTT
tctctgagaaacattccccg

SEQ ID NO: 265975 - DNA, 20 bp, Artificial Sequence
  Description of Artificial Sequence: Synthetic oligonucleotide
  Target: LAMA2; (-) strand; PAM type: YTN; PAM sequence: TTA
aatgtcactttctctgagaa

SEQ ID NO: 265976 - DNA, 20 bp, Artificial Sequence
  Description of Artificial Sequence: Synthetic oligonucleotide
  Target: LAMA2; (-) strand; PAM type: YTN; PAM sequence: TTT
aaatgtcactttctctgaga

SEQ ID NO: 265977 - DNA, 20 bp, Artificial Sequence
  Description of Artificial Sequence: Synthetic oligonucleotide
  Target: LAMA2; (-) strand; PAM type: YTN; PAM sequence: TTT
taaatgtcactttctctgag

SEQ ID NO: 265978 - DNA, 20 bp, Artificial Sequence
  Description of Artificial Sequence: Synthetic oligonucleotide
  Target: LAMA2; (-) strand; PAM type: YTN; PAM sequence: CTC
attttaaatgtcactttctc

SEQ ID NO: 265979 - DNA, 20 bp, Artificial Sequence
  Description of Artificial Sequence: Synthetic oligonucleotide
  Target: LAMA2; (-) strand; PAM type: YTN; PAM sequence: CTC
tcattttaaatgtcactttc

SEQ ID NO: 265980 - DNA, 20 bp, Artificial Sequence
  Description of Artificial Sequence: Synthetic oligonucleotide
  Target: LAMA2; (-) strand; PAM type: YTN; PAM sequence: TTC
agctctcattttaaatgtca

SEQ ID NO: 265981 - DNA, 20 bp, Artificial Sequence
  Description of Artificial Sequence: Synthetic oligonucleotide
  Target: LAMA2; (-) strand; PAM type: YTN; PAM sequence: TTT
cagctctcattttaaatgtc

SEQ ID NO: 265982 - DNA, 20 bp, Artificial Sequence
  Description of Artificial Sequence: Synthetic oligonucleotide
  Target: LAMA2; (-) strand; PAM type: YTN; PAM sequence: TTC
atttcagctctcattttaaa

SEQ ID NO: 265983 - DNA, 20 bp, Artificial Sequence
  Description of Artificial Sequence: Synthetic oligonucleotide
  Target: LAMA2; (-) strand; PAM type: YTN; PAM sequence: TTA
ttcatttcagctctcatttt

SEQ ID NO: 265984 - DNA, 20 bp, Artificial Sequence
  Description of Artificial Sequence: Synthetic oligonucleotide
  Target: LAMA2; (-) strand; PAM type: YTN; PAM sequence: CTT
attcatttcagctctcattt

SEQ ID NO: 265985 - DNA, 20 bp, Artificial Sequence
  Description of Artificial Sequence: Synthetic oligonucleotide
  Target: LAMA2; (-) strand; PAM type: YTN; PAM sequence: CTA
gcacttattcatttcagctc

SEQ ID NO: 265986 - DNA, 20 bp, Artificial Sequence
  Description of Artificial Sequence: Synthetic oligonucleotide
  Target: LAMA2; (-) strand; PAM type: YTN; PAM sequence: CTA
cagtgtatatcaggctagca

SEQ ID NO: 265987 - DNA, 20 bp, Artificial Sequence
  Description of Artificial Sequence: Synthetic oligonucleotide
  Target: LAMA2; (-) strand; PAM type: YTN; PAM sequence: CTC
tacagtgtatatcaggctag

SEQ ID NO: 265988 - DNA, 20 bp, Artificial Sequence
  Description of Artificial Sequence: Synthetic oligonucleotide
  Target: LAMA2; (-) strand; PAM type: YTN; PAM sequence: TTA
gctctacagtgtatatcagg

SEQ ID NO: 265989 - DNA, 20 bp, Artificial Sequence
  Description of Artificial Sequence: Synthetic oligonucleotide
  Target: LAMA2; (-) strand; PAM type: YTN; PAM sequence: CTT
agctctacagtgtatatcag

SEQ ID NO: 265990 - DNA, 20 bp, Artificial Sequence
  Description of Artificial Sequence: Synthetic oligonucleotide
  Target: LAMA2; (-) strand; PAM type: YTN; PAM sequence: TTG
caaatccttagctctacagt

SEQ ID NO: 265991 - DNA, 20 bp, Artificial Sequence
  Description of Artificial Sequence: Synthetic oligonucleotide
  Target: LAMA2; (-) strand; PAM type: YTN; PAM sequence: TTT
gcaaatccttagctctacag

SEQ ID NO: 265992 - DNA, 20 bp, Artificial Sequence
  Description of Artificial Sequence: Synthetic oligonucleotide
  Target: LAMA2; (-) strand; PAM type: YTN; PAM sequence: TTC
atttgcaaatccttagctct

SEQ ID NO: 265993 - DNA, 20 bp, Artificial Sequence
  Description of Artificial Sequence: Synthetic oligonucleotide
  Target: LAMA2; (-) strand; PAM type: YTN; PAM sequence: TTT
catttgcaaatccttagctc

SEQ ID NO: 265994 - DNA, 20 bp, Artificial Sequence
  Description of Artificial Sequence: Synthetic oligonucleotide
  Target: LAMA2; (-) strand; PAM type: YTN; PAM sequence: TTT
tcatttgcaaatccttagct

SEQ ID NO: 265995 - DNA, 20 bp, Artificial Sequence
  Description of Artificial Sequence: Synthetic oligonucleotide
  Target: LAMA2; (-) strand; PAM type: YTN; PAM sequence: CTT
ttcatttgcaaatccttagc

SEQ ID NO: 265996 - DNA, 20 bp, Artificial Sequence
  Description of Artificial Sequence: Synthetic oligonucleotide
  Target: LAMA2; (-) strand; PAM type: YTN; PAM sequence: CTG
ggacttttcatttgcaaatc

SEQ ID NO: 265997 - DNA, 20 bp, Artificial Sequence
  Description of Artificial Sequence: Synthetic oligonucleotide
  Target: LAMA2; (-) strand; PAM type: YTN; PAM sequence: CTG
ctgggacttttcatttgcaa

SEQ ID NO: 265998 - DNA, 20 bp, Artificial Sequence
  Description of Artificial Sequence: Synthetic oligonucleotide
  Target: LAMA2; (-) strand; PAM type: YTN; PAM sequence: TTA
tcactgctgggacttttcat

SEQ ID NO: 265999 - DNA, 20 bp, Artificial Sequence
  Description of Artificial Sequence: Synthetic oligonucleotide
  Target: LAMA2; (-) strand; PAM type: YTN; PAM sequence: TTT
atcactgctgggacttttca

SEQ ID NO: 266000 - DNA, 20 bp, Artificial Sequence
  Description of Artificial Sequence: Synthetic oligonucleotide
  Target: LAMA2; (-) strand; PAM type: YTN; PAM sequence: CTT
tatcactgctgggacttttc

SEQ ID NO: 266001 - DNA, 20 bp, Artificial Sequence
  Description of Artificial Sequence: Synthetic oligonucleotide
  Target: LAMA2; (-) strand; PAM type: YTN; PAM sequence: CTC
tttatcactgctgggacttt

SEQ ID NO: 266002 - DNA, 20 bp, Artificial Sequence
  Description of Artificial Sequence: Synthetic oligonucleotide
  Target: LAMA2; (-) strand; PAM type: YTN; PAM sequence: TTA
tgcggatactctttatcact

SEQ ID NO: 266003 - DNA, 20 bp, Artificial Sequence
  Description of Artificial Sequence: Synthetic oligonucleotide
  Target: LAMA2; (-) strand; PAM type: YTN; PAM sequence: CTC
aaattatgcggatactcttt

SEQ ID NO: 266004 - DNA, 20 bp, Artificial Sequence
  Description of Artificial Sequence: Synthetic oligonucleotide
  Target: LAMA2; (-) strand; PAM type: YTN; PAM sequence: TTC
tcaaattatgcggatactct

SEQ ID NO: 266005 - DNA, 20 bp, Artificial Sequence
  Description of Artificial Sequence: Synthetic oligonucleotide
  Target: LAMA2; (-) strand; PAM type: YTN; PAM sequence: CTG
aaattctcaaattatgcgga

SEQ ID NO: 266006 - DNA, 20 bp, Artificial Sequence
  Description of Artificial Sequence: Synthetic oligonucleotide
  Target: LAMA2; (-) strand; PAM type: YTN; PAM sequence: TTG
catataatgccgtagccaca

SEQ ID NO: 266007 - DNA, 20 bp, Artificial Sequence
  Description of Artificial Sequence: Synthetic oligonucleotide
  Target: LAMA2; (-) strand; PAM type: YTN; PAM sequence: TTT
gcatataatgccgtagccac

SEQ ID NO: 266008 - DNA, 20 bp, Artificial Sequence
  Description of Artificial Sequence: Synthetic oligonucleotide
  Target: LAMA2; (-) strand; PAM type: YTN; PAM sequence: CTT
tgcatataatgccgtagcca

SEQ ID NO: 266009 - DNA, 20 bp, Artificial Sequence
  Description of Artificial Sequence: Synthetic oligonucleotide
  Target: LAMA2; (-) strand; PAM type: YTN; PAM sequence: TTC
tttgcatataatgccgtagc

SEQ ID NO: 266010 - DNA, 20 bp, Artificial Sequence
  Description of Artificial Sequence: Synthetic oligonucleotide
  Target: LAMA2; (-) strand; PAM type: YTN; PAM sequence: TTT
ctttgcatataatgccgtag

SEQ ID NO: 266011 - DNA, 20 bp, Artificial Sequence
  Description of Artificial Sequence: Synthetic oligonucleotide
  Target: LAMA2; (-) strand; PAM type: YTN; PAM sequence: CTT
tctttgcatataatgccgta

SEQ ID NO: 266012 - DNA, 20 bp, Artificial Sequence
  Description of Artificial Sequence: Synthetic oligonucleotide
  Target: LAMA2; (-) strand; PAM type: YTN; PAM sequence: CTG
ctttctttgcatataatgcc

SEQ ID NO: 266013 - DNA, 20 bp, Artificial Sequence
  Description of Artificial Sequence: Synthetic oligonucleotide
  Target: LAMA2; (-) strand; PAM type: YTN; PAM sequence: CTG
tagccactgctttctttgca

SEQ ID NO: 266014 - DNA, 20 bp, Artificial Sequence
  Description of Artificial Sequence: Synthetic oligonucleotide
  Target: LAMA2; (-) strand; PAM type: YTN; PAM sequence: CTC
catatgtagctgtagccact

SEQ ID NO: 266015 - DNA, 20 bp, Artificial Sequence
  Description of Artificial Sequence: Synthetic oligonucleotide
  Target: LAMA2; (-) strand; PAM type: YTN; PAM sequence: TTA
cccctccatatgtagctgta

SEQ ID NO: 266016 - DNA, 20 bp, Artificial Sequence
  Description of Artificial Sequence: Synthetic oligonucleotide
  Target: LAMA2; (-) strand; PAM type: YTN; PAM sequence: CTT
acccctccatatgtagctgt

SEQ ID NO: 266017 - DNA, 20 bp, Artificial Sequence
  Description of Artificial Sequence: Synthetic oligonucleotide
  Target: LAMA2; (-) strand; PAM type: YTN; PAM sequence: CTG
tgcttacccctccatatgta

SEQ ID NO: 266018 - DNA, 20 bp, Artificial Sequence
  Description of Artificial Sequence: Synthetic oligonucleotide
  Target: LAMA2; (-) strand; PAM type: YTN; PAM sequence: TTC
accaccactgtgcttacccc

SEQ ID NO: 266019 - DNA, 20 bp, Artificial Sequence
  Description of Artificial Sequence: Synthetic oligonucleotide
  Target: LAMA2; (-) strand; PAM type: YTN; PAM sequence: CTT
caccaccactgtgcttaccc

SEQ ID NO: 266020 - DNA, 20 bp, Artificial Sequence
  Description of Artificial Sequence: Synthetic oligonucleotide
  Target: LAMA2; (-) strand; PAM type: YTN; PAM sequence: CTG
ccacccccacccccgccttc

SEQ ID NO: 266021 - DNA, 20 bp, Artificial Sequence
  Description of Artificial Sequence: Synthetic oligonucleotide
  Target: LAMA2; (-) strand; PAM type: YTN; PAM sequence: TTA
cctgccacccccacccccgc

SEQ ID NO: 266022 - DNA, 20 bp, Artificial Sequence
  Description of Artificial Sequence: Synthetic oligonucleotide
  Target: LAMA2; (-) strand; PAM type: YTN; PAM sequence: TTC
attacctgccacccccaccc

SEQ ID NO: 266023 - DNA, 20 bp, Artificial Sequence
  Description of Artificial Sequence: Synthetic oligonucleotide
  Target: LAMA2; (-) strand; PAM type: YTN; PAM sequence: CTT
cattacctgccacccccacc

SEQ ID NO: 266024 - DNA, 20 bp, Artificial Sequence
  Description of Artificial Sequence: Synthetic oligonucleotide
  Target: LAMA2; (-) strand; PAM type: YTN; PAM sequence: TTA
gcatggcaaggaagagcttc

SEQ ID NO: 266025 - DNA, 20 bp, Artificial Sequence
  Description of Artificial Sequence: Synthetic oligonucleotide
  Target: LAMA2; (-) strand; PAM type: YTN; PAM sequence: CTC
ccaaatgcagtcaggatgaa

SEQ ID NO: 266026 - DNA, 20 bp, Artificial Sequence
  Description of Artificial Sequence: Synthetic oligonucleotide
  Target: LAMA2; (-) strand; PAM type: YTN; PAM sequence: CTA
gctcccaaatgcagtcagga

SEQ ID NO: 266027 - DNA, 20 bp, Artificial Sequence
  Description of Artificial Sequence: Synthetic oligonucleotide
  Target: LAMA2; (-) strand; PAM type: YTN; PAM sequence: CTA
cactagctcccaaatgcagt

SEQ ID NO: 266028 - DNA, 20 bp, Artificial Sequence
  Description of Artificial Sequence: Synthetic oligonucleotide
  Target: LAMA2; (-) strand; PAM type: YTN; PAM sequence: TTG
aaagcctacactagctccca

SEQ ID NO: 266029 - DNA, 20 bp, Artificial Sequence
  Description of Artificial Sequence: Synthetic oligonucleotide
  Target: LAMA2; (-) strand; PAM type: YTN; PAM sequence: CTT
gaaagcctacactagctccc

SEQ ID NO: 266030 - DNA, 20 bp, Artificial Sequence
  Description of Artificial Sequence: Synthetic oligonucleotide
  Target: LAMA2; (-) strand; PAM type: YTN; PAM sequence: TTG
cttgaaagcctacactagct

SEQ ID NO: 266031 - DNA, 20 bp, Artificial Sequence
  Description of Artificial Sequence: Synthetic oligonucleotide
  Target: LAMA2; (-) strand; PAM type: YTN; PAM sequence: CTT
gcttgaaagcctacactagc

SEQ ID NO: 266032 - DNA, 20 bp, Artificial Sequence
  Description of Artificial Sequence: Synthetic oligonucleotide
  Target: LAMA2; (-) strand; PAM type: YTN; PAM sequence: CTC
ttgcttgaaagcctacacta

SEQ ID NO: 266033 - DNA, 20 bp, Artificial Sequence
  Description of Artificial Sequence: Synthetic oligonucleotide
  Target: LAMA2; (-) strand; PAM type: YTN; PAM sequence: TTC
tcttgcttgaaagcctacac

SEQ ID NO: 266034 - DNA, 20 bp, Artificial Sequence
  Description of Artificial Sequence: Synthetic oligonucleotide
  Target: LAMA2; (-) strand; PAM type: YTN; PAM sequence: CTT
ctcttgcttgaaagcctaca

SEQ ID NO: 266035 - DNA, 20 bp, Artificial Sequence
  Description of Artificial Sequence: Synthetic oligonucleotide
  Target: LAMA2; (-) strand; PAM type: YTN; PAM sequence: CTA
tgaacatatcaaaccatgac

SEQ ID NO: 266036 - DNA, 20 bp, Artificial Sequence
  Description of Artificial Sequence: Synthetic oligonucleotide
  Target: LAMA2; (-) strand; PAM type: YTN; PAM sequence: CTG
cagagtgatcatcctatgaa

SEQ ID NO: 266037 - DNA, 20 bp, Artificial Sequence
  Description of Artificial Sequence: Synthetic oligonucleotide
  Target: LAMA2; (-) strand; PAM type: YTN; PAM sequence: CTC
cacactgcagagtgatcatc

SEQ ID NO: 266038 - DNA, 20 bp, Artificial Sequence
  Description of Artificial Sequence: Synthetic oligonucleotide
  Target: LAMA2; (-) strand; PAM type: YTN; PAM sequence: TTC
tccacactgcagagtgatca

SEQ ID NO: 266039 - DNA, 20 bp, Artificial Sequence
  Description of Artificial Sequence: Synthetic oligonucleotide
  Target: LAMA2; (-) strand; PAM type: YTN; PAM sequence: TTT
ctccacactgcagagtgatc

SEQ ID NO: 266040 - DNA, 20 bp, Artificial Sequence
  Description of Artificial Sequence: Synthetic oligonucleotide
  Target: LAMA2; (-) strand; PAM type: YTN; PAM sequence: CTG
gtgatttctccacactgcag

SEQ ID NO: 266041 - DNA, 20 bp, Artificial Sequence
  Description of Artificial Sequence: Synthetic oligonucleotide
  Target: LAMA2; (-) strand; PAM type: YTN; PAM sequence: TTA
tctggtgatttctccacact

SEQ ID NO: 266042 - DNA, 20 bp, Artificial Sequence
  Description of Artificial Sequence: Synthetic oligonucleotide
  Target: LAMA2; (-) strand; PAM type: YTN; PAM sequence: CTT
atctggtgatttctccacac

SEQ ID NO: 266043 - DNA, 20 bp, Artificial Sequence
  Description of Artificial Sequence: Synthetic oligonucleotide
  Target: LAMA2; (-) strand; PAM type: YTN; PAM sequence: TTC
ttatctggtgatttctccac

SEQ ID NO: 266044 - DNA, 20 bp, Artificial Sequence
  Description of Artificial Sequence: Synthetic oligonucleotide
  Target: LAMA2; (-) strand; PAM type: YTN; PAM sequence: TTT
cttatctggtgatttctcca

SEQ ID NO: 266045 - DNA, 20 bp, Artificial Sequence
  Description of Artificial Sequence: Synthetic oligonucleotide
  Target: LAMA2; (-) strand; PAM type: YTN; PAM sequence: TTT
tcttatctggtgatttctcc

SEQ ID NO: 266046 - DNA, 20 bp, Artificial Sequence
  Description of Artificial Sequence: Synthetic oligonucleotide
  Target: LAMA2; (-) strand; PAM type: YTN; PAM sequence: CTC
catattttcttatctggtga

SEQ ID NO: 266047 - DNA, 20 bp, Artificial Sequence
  Description of Artificial Sequence: Synthetic oligonucleotide
  Target: LAMA2; (-) strand; PAM type: YTN; PAM sequence: CTG
tctccatattttcttatctg

SEQ ID NO: 266048 - DNA, 20 bp, Artificial Sequence
  Description of Artificial Sequence: Synthetic oligonucleotide
  Target: LAMA2; (-) strand; PAM type: YTN; PAM sequence: CTA
aagatcctgtctccatattt

SEQ ID NO: 266049 - DNA, 20 bp, Artificial Sequence
  Description of Artificial Sequence: Synthetic oligonucleotide
  Target: LAMA2; (-) strand; PAM type: YTN; PAM sequence: TTA
gctaaagatcctgtctccat

SEQ ID NO: 266050 - DNA, 20 bp, Artificial Sequence
  Description of Artificial Sequence: Synthetic oligonucleotide
  Target: LAMA2; (-) strand; PAM type: YTN; PAM sequence: TTT
agctaaagatcctgtctcca

SEQ ID NO: 266051 - DNA, 20 bp, Artificial Sequence
  Description of Artificial Sequence: Synthetic oligonucleotide
  Target: LAMA2; (-) strand; PAM type: YTN; PAM sequence: TTT
tagctaaagatcctgtctcc

SEQ ID NO: 266052 - DNA, 20 bp, Artificial Sequence
  Description of Artificial Sequence: Synthetic oligonucleotide
  Target: LAMA2; (-) strand; PAM type: YTN; PAM sequence: CTT
ttagctaaagatcctgtctc

SEQ ID NO: 266053 - DNA, 20 bp, Artificial Sequence
  Description of Artificial Sequence: Synthetic oligonucleotide
  Target: LAMA2; (-) strand; PAM type: YTN; PAM sequence: TTA
gaatagccttttagctaaag

SEQ ID NO: 266054 - DNA, 20 bp, Artificial Sequence
  Description of Artificial Sequence: Synthetic oligonucleotide
  Target: LAMA2; (-) strand; PAM type: YTN; PAM sequence: TTA
ttagaatagccttttagcta

SEQ ID NO: 266055 - DNA, 20 bp, Artificial Sequence
  Description of Artificial Sequence: Synthetic oligonucleotide
  Target: LAMA2; (-) strand; PAM type: YTN; PAM sequence: TTG
gattattagaatagcctttt

SEQ ID NO: 266056 - DNA, 20 bp, Artificial Sequence
  Description of Artificial Sequence: Synthetic oligonucleotide
  Target: LAMA2; (-) strand; PAM type: YTN; PAM sequence: TTT
ggattattagaatagccttt

SEQ ID NO: 266057 - DNA, 20 bp, Artificial Sequence
  Description of Artificial Sequence: Synthetic oligonucleotide
  Target: LAMA2; (-) strand; PAM type: YTN; PAM sequence: TTA
tttggattattagaatagcc

SEQ ID NO: 266058 - DNA, 20 bp, Artificial Sequence
  Description of Artificial Sequence: Synthetic oligonucleotide
  Target: LAMA2; (-) strand; PAM type: YTN; PAM sequence: TTT
atttggattattagaatagc

SEQ ID NO: 266059 - DNA, 20 bp, Artificial Sequence
  Description of Artificial Sequence: Synthetic oligonucleotide
  Target: LAMA2; (-) strand; PAM type: YTN; PAM sequence: TTT
tatttggattattagaatag

SEQ ID NO: 266060 - DNA, 20 bp, Artificial Sequence
  Description of Artificial Sequence: Synthetic oligonucleotide
  Target: LAMA2; (-) strand; PAM type: YTN; PAM sequence: CTG
tcatattttatttggattat

SEQ ID NO: 266061 - DNA, 20 bp, Artificial Sequence
  Description of Artificial Sequence: Synthetic oligonucleotide
  Target: LAMA2; (-) strand; PAM type: YTN; PAM sequence: CTG
gccactgtcatattttattt

SEQ ID NO: 266062 - DNA, 20 bp, Artificial Sequence
  Description of Artificial Sequence: Synthetic oligonucleotide
  Target: LAMA2; (-) strand; PAM type: YTN; PAM sequence: TTC
atctggccactgtcatattt

SEQ ID NO: 266063 - DNA, 20 bp, Artificial Sequence
  Description of Artificial Sequence: Synthetic oligonucleotide
  Target: LAMA2; (-) strand; PAM type: YTN; PAM sequence: TTT
catctggccactgtcatatt

SEQ ID NO: 266064 - DNA, 20 bp, Artificial Sequence
  Description of Artificial Sequence: Synthetic oligonucleotide
  Target: LAMA2; (-) strand; PAM type: YTN; PAM sequence: TTT
tcatctggccactgtcatat

SEQ ID NO: 266065 - DNA, 20 bp, Artificial Sequence
  Description of Artificial Sequence: Synthetic oligonucleotide
  Target: LAMA2; (-) strand; PAM type: YTN; PAM sequence: CTA
ttttcatctggccactgtca

SEQ ID NO: 266066 - DNA, 20 bp, Artificial Sequence
  Description of Artificial Sequence: Synthetic oligonucleotide
  Target: LAMA2; (-) strand; PAM type: YTN; PAM sequence: CTA
ctattttcatctggccactg

SEQ ID NO: 266067 - DNA, 20 bp, Artificial Sequence
  Description of Artificial Sequence: Synthetic oligonucleotide
  Target: LAMA2; (-) strand; PAM type: YTN; PAM sequence: TTG
ctactattttcatctggcca

SEQ ID NO: 266068 - DNA, 20 bp, Artificial Sequence
  Description of Artificial Sequence: Synthetic oligonucleotide
  Target: LAMA2; (-) strand; PAM type: YTN; PAM sequence: TTG
ttgctactattttcatctgg

SEQ ID NO: 266069 - DNA, 20 bp, Artificial Sequence
  Description of Artificial Sequence: Synthetic oligonucleotide
  Target: LAMA2; (-) strand; PAM type: YTN; PAM sequence: CTT
gttgctactattttcatctg

SEQ ID NO: 266070 - DNA, 20 bp, Artificial Sequence
  Description of Artificial Sequence: Synthetic oligonucleotide
  Target: LAMA2; (-) strand; PAM type: YTN; PAM sequence: TTC
ttgttgctactattttcatc

SEQ ID NO: 266071 - DNA, 20 bp, Artificial Sequence
  Description of Artificial Sequence: Synthetic oligonucleotide
  Target: LAMA2; (-) strand; PAM type: YTN; PAM sequence: TTT
cttgttgctactattttcat

SEQ ID NO: 266072 - DNA, 20 bp, Artificial Sequence
  Description of Artificial Sequence: Synthetic oligonucleotide
  Target: LAMA2; (-) strand; PAM type: YTN; PAM sequence: CTT
tcttgttgctactattttca

SEQ ID NO: 266073 - DNA, 20 bp, Artificial Sequence
  Description of Artificial Sequence: Synthetic oligonucleotide
  Target: LAMA2; (-) strand; PAM type: YTN; PAM sequence: TTG
actttcttgttgctactatt

SEQ ID NO: 266074 - DNA, 20 bp, Artificial Sequence
  Description of Artificial Sequence: Synthetic oligonucleotide
  Target: LAMA2; (-) strand; PAM type: YTN; PAM sequence: CTT
gactttcttgttgctactat

SEQ ID NO: 266075 - DNA, 20 bp, Artificial Sequence
  Description of Artificial Sequence: Synthetic oligonucleotide
  Target: LAMA2; (-) strand; PAM type: YTN; PAM sequence: TTC
ttgactttcttgttgctact

SEQ ID NO: 266076 - DNA, 20 bp, Artificial Sequence
  Description of Artificial Sequence: Synthetic oligonucleotide
  Target: LAMA2; (-) strand; PAM type: YTN; PAM sequence: TTT
cttgactttcttgttgctac

SEQ ID NO: 266077 - DNA, 20 bp, Artificial Sequence
  Description of Artificial Sequence: Synthetic oligonucleotide
  Target: LAMA2; (-) strand; PAM type: YTN; PAM sequence: CTG
tttcttgactttcttgttgc

SEQ ID NO: 266078 - DNA, 20 bp, Artificial Sequence
  Description of Artificial Sequence: Synthetic oligonucleotide
  Target: LAMA2; (-) strand; PAM type: YTN; PAM sequence: CTC
tgtttcttgactttcttgtt

SEQ ID NO: 266079 - DNA, 20 bp, Artificial Sequence
  Description of Artificial Sequence: Synthetic oligonucleotide
  Target: LAMA2; (-) strand; PAM type: YTN; PAM sequence: CTC
tctgtttcttgactttcttg

SEQ ID NO: 266080 - DNA, 20 bp, Artificial Sequence
  Description of Artificial Sequence: Synthetic oligonucleotide
  Target: LAMA2; (-) strand; PAM type: YTN; PAM sequence: TTA
ctctctgtttcttgactttc

SEQ ID NO: 266081 - DNA, 20 bp, Artificial Sequence
  Description of Artificial Sequence: Synthetic oligonucleotide
  Target: LAMA2; (-) strand; PAM type: YTN; PAM sequence: CTA
ttactctctgtttcttgact

SEQ ID NO: 266082 - DNA, 20 bp, Artificial Sequence
  Description of Artificial Sequence: Synthetic oligonucleotide
  Target: LAMA2; (-) strand; PAM type: YTN; PAM sequence: TTC
catgagtctattactctctg

SEQ ID NO: 266083 - DNA, 20 bp, Artificial Sequence
  Description of Artificial Sequence: Synthetic oligonucleotide
  Target: LAMA2; (-) strand; PAM type: YTN; PAM sequence: TTA
gatcatcagttccatgagtc

SEQ ID NO: 266084 - DNA, 20 bp, Artificial Sequence
  Description of Artificial Sequence: Synthetic oligonucleotide
  Target: LAMA2; (-) strand; PAM type: YTN; PAM sequence: TTA
tccgaggtatccattagatc

SEQ ID NO: 266085 - DNA, 20 bp, Artificial Sequence
  Description of Artificial Sequence: Synthetic oligonucleotide
  Target: LAMA2; (-) strand; PAM type: YTN; PAM sequence: CTT
atccgaggtatccattagat

SEQ ID NO: 266086 - DNA, 20 bp, Artificial Sequence
  Description of Artificial Sequence: Synthetic oligonucleotide
  Target: LAMA2; (-) strand; PAM type: YTN; PAM sequence: CTC
ttatccgaggtatccattag

SEQ ID NO: 266087 - DNA, 20 bp, Artificial Sequence
  Description of Artificial Sequence: Synthetic oligonucleotide
  Target: LAMA2; (-) strand; PAM type: YTN; PAM sequence: CTC
tcttatccgaggtatccatt

SEQ ID NO: 266088 - DNA, 20 bp, Artificial Sequence
  Description of Artificial Sequence: Synthetic oligonucleotide
  Target: LAMA2; (-) strand; PAM type: YTN; PAM sequence: CTA
gaggcctctcttatccgagg

SEQ ID NO: 266089 - DNA, 20 bp, Artificial Sequence
  Description of Artificial Sequence: Synthetic oligonucleotide
  Target: LAMA2; (-) strand; PAM type: YTN; PAM sequence: TTG
ccaaggtcagcaacctagag

SEQ ID NO: 266090 - DNA, 20 bp, Artificial Sequence
  Description of Artificial Sequence: Synthetic oligonucleotide
  Target: LAMA2; (-) strand; PAM type: YTN; PAM sequence: CTC
aattgccaaggtcagcaacc

SEQ ID NO: 266091 - DNA, 20 bp, Artificial Sequence
  Description of Artificial Sequence: Synthetic oligonucleotide
  Target: LAMA2; (-) strand; PAM type: YTN; PAM sequence: TTC
actcaattgccaaggtcagc

SEQ ID NO: 266092 - DNA, 20 bp, Artificial Sequence
  Description of Artificial Sequence: Synthetic oligonucleotide
  Target: LAMA2; (-) strand; PAM type: YTN; PAM sequence: CTG
tcattcactcaattgccaag

SEQ ID NO: 266093 - DNA, 20 bp, Artificial Sequence
  Description of Artificial Sequence: Synthetic oligonucleotide
  Target: LAMA2; (-) strand; PAM type: YTN; PAM sequence: CTG
aggtcactgtcattcactca

SEQ ID NO: 266094 - DNA, 20 bp, Artificial Sequence
  Description of Artificial Sequence: Synthetic oligonucleotide
  Target: LAMA2; (-) strand; PAM type: YTN; PAM sequence: TTC
atctgaggtcactgtcattc

SEQ ID NO: 266095 - DNA, 20 bp, Artificial Sequence
  Description of Artificial Sequence: Synthetic oligonucleotide
  Target: LAMA2; (-) strand; PAM type: YTN; PAM sequence: TTT
catctgaggtcactgtcatt

SEQ ID NO: 266096 - DNA, 20 bp, Artificial Sequence
  Description of Artificial Sequence: Synthetic oligonucleotide
  Target: LAMA2; (-) strand; PAM type: YTN; PAM sequence: CTC
gtttcatctgaggtcactgt

SEQ ID NO: 266097 - DNA, 20 bp, Artificial Sequence
  Description of Artificial Sequence: Synthetic oligonucleotide
  Target: LAMA2; (-) strand; PAM type: YTN; PAM sequence: TTC
tcgtttcatctgaggtcact

SEQ ID NO: 266098 - DNA, 20 bp, Artificial Sequence
  Description of Artificial Sequence: Synthetic oligonucleotide
  Target: LAMA2; (-) strand; PAM type: YTN; PAM sequence: TTT
ctcgtttcatctgaggtcac

SEQ ID NO: 266099 - DNA, 20 bp, Artificial Sequence
  Description of Artificial Sequence: Synthetic oligonucleotide
  Target: LAMA2; (-) strand; PAM type: YTN; PAM sequence: CTG
tatttctcgtttcatctgag

SEQ ID NO: 266100 - DNA, 20 bp, Artificial Sequence
  Description of Artificial Sequence: Synthetic oligonucleotide
  Target: LAMA2; (-) strand; PAM type: YTN; PAM sequence: CTC
ctgtatttctcgtttcatct

SEQ ID NO: 266101 - DNA, 20 bp, Artificial Sequence
  Description of Artificial Sequence: Synthetic oligonucleotide
  Target: LAMA2; (-) strand; PAM type: YTN; PAM sequence: TTG
taatactcctgtatttctcg

SEQ ID NO: 266102 - DNA, 20 bp, Artificial Sequence
  Description of Artificial Sequence: Synthetic oligonucleotide
  Target: LAMA2; (-) strand; PAM type: YTN; PAM sequence: CTT
gtaatactcctgtatttctc

SEQ ID NO: 266103 - DNA, 20 bp, Artificial Sequence
  Description of Artificial Sequence: Synthetic oligonucleotide
  Target: LAMA2; (-) strand; PAM type: YTN; PAM sequence: CTA
aaccttgtaatactcctgta

SEQ ID NO: 266104 - DNA, 20 bp, Artificial Sequence
  Description of Artificial Sequence: Synthetic oligonucleotide
  Target: LAMA2; (-) strand; PAM type: YTN; PAM sequence: TTG
ctaaaccttgtaatactcct

SEQ ID NO: 266105 - DNA, 20 bp, Artificial Sequence
  Description of Artificial Sequence: Synthetic oligonucleotide
  Target: LAMA2; (-) strand; PAM type: YTN; PAM sequence: CTT
gctaaaccttgtaatactcc

SEQ ID NO: 266106 - DNA, 20 bp, Artificial Sequence
  Description of Artificial Sequence: Synthetic oligonucleotide
  Target: LAMA2; (-) strand; PAM type: YTN; PAM sequence: CTC
ttgctaaaccttgtaatact

SEQ ID NO: 266107 - DNA, 20 bp, Artificial Sequence
  Description of Artificial Sequence: Synthetic oligonucleotide
  Target: LAMA2; (-) strand; PAM type: YTN; PAM sequence: TTC
atctcttgctaaaccttgta

SEQ ID NO: 266108 - DNA, 20 bp, Artificial Sequence
  Description of Artificial Sequence: Synthetic oligonucleotide
  Target: LAMA2; (-) strand; PAM type: YTN; PAM sequence: TTG
aaatgacaacaatgaagttc

SEQ ID NO: 266109 - DNA, 20 bp, Artificial Sequence
  Description of Artificial Sequence: Synthetic oligonucleotide
  Target: LAMA2; (-) strand; PAM type: YTN; PAM sequence: TTT
gaaatgacaacaatgaagtt

SEQ ID NO: 266110 - DNA, 20 bp, Artificial Sequence
  Description of Artificial Sequence: Synthetic oligonucleotide
  Target: LAMA2; (-) strand; PAM type: YTN; PAM sequence: TTA
aatttgaaatgacaacaatg

SEQ ID NO: 266111 - DNA, 20 bp, Artificial Sequence
  Description of Artificial Sequence: Synthetic oligonucleotide
  Target: LAMA2; (-) strand; PAM type: YTN; PAM sequence: CTT
aaatttgaaatgacaacaat

SEQ ID NO: 266112 - DNA, 20 bp, Artificial Sequence
  Description of Artificial Sequence: Synthetic oligonucleotide
  Target: LAMA2; (-) strand; PAM type: YTN; PAM sequence: TTG
tataacacagaagcgtctta

SEQ ID NO: 266113 - DNA, 20 bp, Artificial Sequence
  Description of Artificial Sequence: Synthetic oligonucleotide
  Target: LAMA2; (-) strand; PAM type: YTN; PAM sequence: TTG
aataaatattgtataacaca

SEQ ID NO: 266114 - DNA, 20 bp, Artificial Sequence
  Description of Artificial Sequence: Synthetic oligonucleotide
  Target: LAMA2; (-) strand; PAM type: YTN; PAM sequence: CTT
gaataaatattgtataacac

SEQ ID NO: 266115 - DNA, 20 bp, Artificial Sequence
  Description of Artificial Sequence: Synthetic oligonucleotide
  Target: LAMA2; (-) strand; PAM type: YTN; PAM sequence: TTC
ttgaataaatattgtataac

SEQ ID NO: 266116 - DNA, 20 bp, Artificial Sequence
  Description of Artificial Sequence: Synthetic oligonucleotide
  Target: LAMA2; (-) strand; PAM type: YTN; PAM sequence: CTT
cttgaataaatattgtataa

SEQ ID NO: 266117 - DNA, 20 bp, Artificial Sequence
  Description of Artificial Sequence: Synthetic oligonucleotide
  Target: LAMA2; (-) strand; PAM type: YTN; PAM sequence: TTG
cttcttgaataaatattgta

SEQ ID NO: 266118 - DNA, 20 bp, Artificial Sequence
  Description of Artificial Sequence: Synthetic oligonucleotide
  Target: LAMA2; (-) strand; PAM type: YTN; PAM sequence: CTA
attgcttcttgaataaatat

SEQ ID NO: 266119 - DNA, 20 bp, Artificial Sequence
  Description of Artificial Sequence: Synthetic oligonucleotide
  Target: LAMA2; (-) strand; PAM type: YTN; PAM sequence: TTC
taattgcttcttgaataaat

SEQ ID NO: 266120 - DNA, 20 bp, Artificial Sequence
  Description of Artificial Sequence: Synthetic oligonucleotide
  Target: LAMA2; (-) strand; PAM type: YTN; PAM sequence: CTT
ctaattgcttcttgaataaa

SEQ ID NO: 266121 - DNA, 20 bp, Artificial Sequence
  Description of Artificial Sequence: Synthetic oligonucleotide
  Target: LAMA2; (-) strand; PAM type: YTN; PAM sequence: CTG
cttctaattgcttcttgaat

SEQ ID NO: 266122 - DNA, 20 bp, Artificial Sequence
  Description of Artificial Sequence: Synthetic oligonucleotide
  Target: LAMA2; (-) strand; PAM type: YTN; PAM sequence: TTC
tgcttctaattgcttcttga

SEQ ID NO: 266123 - DNA, 20 bp, Artificial Sequence
  Description of Artificial Sequence: Synthetic oligonucleotide
  Target: LAMA2; (-) strand; PAM type: YTN; PAM sequence: CTT
ctgcttctaattgcttcttg

SEQ ID NO: 266124 - DNA, 20 bp, Artificial Sequence
  Description of Artificial Sequence: Synthetic oligonucleotide
  Target: LAMA2; (-) strand; PAM type: YTN; PAM sequence: TTC
cagacttctgcttctaattg

SEQ ID NO: 266125 - DNA, 20 bp, Artificial Sequence
  Description of Artificial Sequence: Synthetic oligonucleotide
  Target: LAMA2; (-) strand; PAM type: YTN; PAM sequence: CTA
atgggttccagacttctgct

SEQ ID NO: 266126 - DNA, 20 bp, Artificial Sequence
  Description of Artificial Sequence: Synthetic oligonucleotide
  Target: LAMA2; (-) strand; PAM type: YTN; PAM sequence: CTC
taatgggttccagacttctg

SEQ ID NO: 266127 - DNA, 20 bp, Artificial Sequence
  Description of Artificial Sequence: Synthetic oligonucleotide
  Target: LAMA2; (-) strand; PAM type: YTN; PAM sequence: CTG
gatatctctaatgggttcca

SEQ ID NO: 266128 - DNA, 20 bp, Artificial Sequence
  Description of Artificial Sequence: Synthetic oligonucleotide
  Target: LAMA2; (-) strand; PAM type: YTN; PAM sequence: TTC
agcctggatatctctaatgg

SEQ ID NO: 266129 - DNA, 20 bp, Artificial Sequence
  Description of Artificial Sequence: Synthetic oligonucleotide
  Target: LAMA2; (-) strand; PAM type: YTN; PAM sequence: TTA
tgtattcagcctggatatct

SEQ ID NO: 266130 - DNA, 20 bp, Artificial Sequence
  Description of Artificial Sequence: Synthetic oligonucleotide
  Target: LAMA2; (-) strand; PAM type: YTN; PAM sequence: TTT
atgtattcagcctggatatc

SEQ ID NO: 266131 - DNA, 20 bp, Artificial Sequence
  Description of Artificial Sequence: Synthetic oligonucleotide
  Target: LAMA2; (-) strand; PAM type: YTN; PAM sequence: TTT
tatgtattcagcctggatat

SEQ ID NO: 266132 - DNA, 20 bp, Artificial Sequence
  Description of Artificial Sequence: Synthetic oligonucleotide
  Target: LAMA2; (-) strand; PAM type: YTN; PAM sequence: CTG
tattttatgtattcagcctg

SEQ ID NO: 266133 - DNA, 20 bp, Artificial Sequence
  Description of Artificial Sequence: Synthetic oligonucleotide
  Target: LAMA2; (-) strand; PAM type: YTN; PAM sequence: CTC
tgtattttatgtattcagcc

SEQ ID NO: 266134 - DNA, 20 bp, Artificial Sequence
  Description of Artificial Sequence: Synthetic oligonucleotide
  Target: LAMA2; (-) strand; PAM type: YTN; PAM sequence: TTA
atggtgtgcccaaaactctg

SEQ ID NO: 266135 - DNA, 20 bp, Artificial Sequence
  Description of Artificial Sequence: Synthetic oligonucleotide
  Target: LAMA2; (-) strand; PAM type: YTN; PAM sequence: TTC
agttaatggtgtgcccaaaa

SEQ ID NO: 266136 - DNA, 20 bp, Artificial Sequence
  Description of Artificial Sequence: Synthetic oligonucleotide
  Target: LAMA2; (-) strand; PAM type: YTN; PAM sequence: CTT
cagttaatggtgtgcccaaa

SEQ ID NO: 266137 - DNA, 20 bp, Artificial Sequence
  Description of Artificial Sequence: Synthetic oligonucleotide
  Target: LAMA2; (-) strand; PAM type: YTN; PAM sequence: CTA
tgacttcagttaatggtgtg

SEQ ID NO: 266138 - DNA, 20 bp, Artificial Sequence
  Description of Artificial Sequence: Synthetic oligonucleotide
  Target: LAMA2; (-) strand; PAM type: YTN; PAM sequence: TTA
ctatgacttcagttaatggt

SEQ ID NO: 266139 - DNA, 20 bp, Artificial Sequence
  Description of Artificial Sequence: Synthetic oligonucleotide
  Target: LAMA2; (-) strand; PAM type: YTN; PAM sequence: TTC
atccattactatgacttcag

SEQ ID NO: 266140 - DNA, 20 bp, Artificial Sequence
  Description of Artificial Sequence: Synthetic oligonucleotide
  Target: LAMA2; (-) strand; PAM type: YTN; PAM sequence: TTT
catccattactatgacttca

SEQ ID NO: 266141 - DNA, 20 bp, Artificial Sequence
  Description of Artificial Sequence: Synthetic oligonucleotide
  Target: LAMA2; (-) strand; PAM type: YTN; PAM sequence: TTG
gtgatttcatccattactat

SEQ ID NO: 266142 - DNA, 20 bp, Artificial Sequence
  Description of Artificial Sequence: Synthetic oligonucleotide
  Target: LAMA2; (-) strand; PAM type: YTN; PAM sequence: CTT
ggtgatttcatccattacta

SEQ ID NO: 266143 - DNA, 20 bp, Artificial Sequence
  Description of Artificial Sequence: Synthetic oligonucleotide
  Target: LAMA2; (-) strand; PAM type: YTN; PAM sequence: TTA
ccttggtgatttcatccatt

SEQ ID NO: 266144 - DNA, 20 bp, Artificial Sequence
  Description of Artificial Sequence: Synthetic oligonucleotide
  Target: LAMA2; (-) strand; PAM type: YTN; PAM sequence: TTT
accttggtgatttcatccat

SEQ ID NO: 266145 - DNA, 20 bp, Artificial Sequence
  Description of Artificial Sequence: Synthetic oligonucleotide
  Target: LAMA2; (-) strand; PAM type: YTN; PAM sequence: CTC
cacatttaccttggtgattt

SEQ ID NO: 266146 - DNA, 20 bp, Artificial Sequence
  Description of Artificial Sequence: Synthetic oligonucleotide
  Target: LAMA2; (-) strand; PAM type: YTN; PAM sequence: CTC
ctccacatttaccttggtga

SEQ ID NO: 266147 - DNA, 20 bp, Artificial Sequence
  Description of Artificial Sequence: Synthetic oligonucleotide
  Target: LAMA2; (-) strand; PAM type: YTN; PAM sequence: TTC
tcctccacatttaccttggt

SEQ ID NO: 266148 - DNA, 20 bp, Artificial Sequence
  Description of Artificial Sequence: Synthetic oligonucleotide
  Target: LAMA2; (-) strand; PAM type: YTN; PAM sequence: TTT
ctcctccacatttaccttgg

SEQ ID NO: 266149 - DNA, 20 bp, Artificial Sequence
  Description of Artificial Sequence: Synthetic oligonucleotide
  Target: LAMA2; (-) strand; PAM type: YTN; PAM sequence: TTT
tctcctccacatttaccttg

SEQ ID NO: 266150 - DNA, 20 bp, Artificial Sequence
  Description of Artificial Sequence: Synthetic oligonucleotide
  Target: LAMA2; (-) strand; PAM type: YTN; PAM sequence: TTT
ttctcctccacatttacctt

SEQ ID NO: 266151 - DNA, 20 bp, Artificial Sequence
  Description of Artificial Sequence: Synthetic oligonucleotide
  Target: LAMA2; (-) strand; PAM type: YTN; PAM sequence: TTT
tttctcctccacatttacct

SEQ ID NO: 266152 - DNA, 20 bp, Artificial Sequence
  Description of Artificial Sequence: Synthetic oligonucleotide
  Target: LAMA2; (-) strand; PAM type: YTN; PAM sequence: CTT
ttttctcctccacatttacc

SEQ ID NO: 266153 - DNA, 20 bp, Artificial Sequence
  Description of Artificial Sequence: Synthetic oligonucleotide
  Target: LAMA2; (-) strand; PAM type: YTN; PAM sequence: CTC
ttttttctcctccacattta

SEQ ID NO: 266154 - DNA, 20 bp, Artificial Sequence
  Description of Artificial Sequence: Synthetic oligonucleotide
  Target: LAMA2; (-) strand; PAM type: YTN; PAM sequence: CTC
atctcttttttctcctccac

SEQ ID NO: 266155 - DNA, 20 bp, Artificial Sequence
  Description of Artificial Sequence: Synthetic oligonucleotide
  Target: LAMA2; (-) strand; PAM type: YTN; PAM sequence: TTG
gtcctcatctcttttttctc

SEQ ID NO: 266156 - DNA, 20 bp, Artificial Sequence
  Description of Artificial Sequence: Synthetic oligonucleotide
  Target: LAMA2; (-) strand; PAM type: YTN; PAM sequence: TTT
ggtcctcatctcttttttct

SEQ ID NO: 266157 - DNA, 20 bp, Artificial Sequence
  Description of Artificial Sequence: Synthetic oligonucleotide
  Target: LAMA2; (-) strand; PAM type: YTN; PAM sequence: CTT
tggtcctcatctcttttttc

SEQ ID NO: 266158 - DNA, 20 bp, Artificial Sequence
  Description of Artificial Sequence: Synthetic oligonucleotide
  Target: LAMA2; (-) strand; PAM type: YTN; PAM sequence: CTA
actttggtcctcatctcttt

SEQ ID NO: 266159 - DNA, 20 bp, Artificial Sequence
  Description of Artificial Sequence: Synthetic oligonucleotide
  Target: LAMA2; (-) strand; PAM type: YTN; PAM sequence: TTC
taactttggtcctcatctct

SEQ ID NO: 266160 - DNA, 20 bp, Artificial Sequence
  Description of Artificial Sequence: Synthetic oligonucleotide
  Target: LAMA2; (-) strand; PAM type: YTN; PAM sequence: TTA
attctaactttggtcctcat

SEQ ID NO: 266161 - DNA, 20 bp, Artificial Sequence
  Description of Artificial Sequence: Synthetic oligonucleotide
  Target: LAMA2; (-) strand; PAM type: YTN; PAM sequence: CTT
aattctaactttggtcctca

SEQ ID NO: 266162 - DNA, 20 bp, Artificial Sequence
  Description of Artificial Sequence: Synthetic oligonucleotide
  Target: LAMA2; (-) strand; PAM type: YTN; PAM sequence: TTG
acgcccttaattctaacttt

SEQ ID NO: 266163 - DNA, 20 bp, Artificial Sequence
  Description of Artificial Sequence: Synthetic oligonucleotide
  Target: LAMA2; (-) strand; PAM type: YTN; PAM sequence: TTC
aatataattgacgcccttaa

SEQ ID NO: 266164 - DNA, 20 bp, Artificial Sequence
  Description of Artificial Sequence: Synthetic oligonucleotide
  Target: LAMA2; (-) strand; PAM type: YTN; PAM sequence: CTG
ttcaatataattgacgccct

SEQ ID NO: 266165 - DNA, 20 bp, Artificial Sequence
  Description of Artificial Sequence: Synthetic oligonucleotide
  Target: LAMA2; (-) strand; PAM type: YTN; PAM sequence: TTC
tgttcaatataattgacgcc

SEQ ID NO: 266166 - DNA, 20 bp, Artificial Sequence
  Description of Artificial Sequence: Synthetic oligonucleotide
  Target: LAMA2; (-) strand; PAM type: YTN; PAM sequence: TTT
ctgttcaatataattgacgc

SEQ ID NO: 266167 - DNA, 20 bp, Artificial Sequence
  Description of Artificial Sequence: Synthetic oligonucleotide
  Target: LAMA2; (-) strand; PAM type: YTN; PAM sequence: CTT
tctgttcaatataattgacg

SEQ ID NO: 266168 - DNA, 20 bp, Artificial Sequence
  Description of Artificial Sequence: Synthetic oligonucleotide
  Target: LAMA2; (-) strand; PAM type: YTN; PAM sequence: TTC
cctttctgttcaatataatt

SEQ ID NO: 266169 - DNA, 20 bp, Artificial Sequence
  Description of Artificial Sequence: Synthetic oligonucleotide
  Target: LAMA2; (-) strand; PAM type: YTN; PAM sequence: CTT
ccctttctgttcaatataat

SEQ ID NO: 266170 - DNA, 20 bp, Artificial Sequence
  Description of Artificial Sequence: Synthetic oligonucleotide
  Target: LAMA2; (-) strand; PAM type: YTN; PAM sequence: TTC
cttccctttctgttcaatat

SEQ ID NO: 266171 - DNA, 20 bp, Artificial Sequence
  Description of Artificial Sequence: Synthetic oligonucleotide
  Target: LAMA2; (-) strand; PAM type: YTN; PAM sequence: CTT
ccttccctttctgttcaata

SEQ ID NO: 266172 - DNA, 20 bp, Artificial Sequence
  Description of Artificial Sequence: Synthetic oligonucleotide
  Target: LAMA2; (-) strand; PAM type: YTN; PAM sequence: CTC
ttccttccctttctgttcaa

SEQ ID NO: 266173 - DNA, 20 bp, Artificial Sequence
  Description of Artificial Sequence: Synthetic oligonucleotide
  Target: LAMA2; (-) strand; PAM type: YTN; PAM sequence: TTA
tcgactcttccttccctttc

SEQ ID NO: 266174 - DNA, 20 bp, Artificial Sequence
  Description of Artificial Sequence: Synthetic oligonucleotide
  Target: LAMA2; (-) strand; PAM type: YTN; PAM sequence: TTT
atcgactcttccttcccttt

SEQ ID NO: 266175 - DNA, 20 bp, Artificial Sequence
  Description of Artificial Sequence: Synthetic oligonucleotide
  Target: LAMA2; (-) strand; PAM type: YTN; PAM sequence: CTT
tatcgactcttccttccctt

SEQ ID NO: 266176 - DNA, 20 bp, Artificial Sequence
  Description of Artificial Sequence: Synthetic oligonucleotide
  Target: LAMA2; (-) strand; PAM type: YTN; PAM sequence: CTC
ctttatcgactcttccttcc

SEQ ID NO: 266177 - DNA, 20 bp, Artificial Sequence
  Description of Artificial Sequence: Synthetic oligonucleotide
  Target: LAMA2; (-) strand; PAM type: YTN; PAM sequence: TTC
tcctttatcgactcttcctt

SEQ ID NO: 266178 - DNA, 20 bp, Artificial Sequence
  Description of Artificial Sequence: Synthetic oligonucleotide
  Target: LAMA2; (-) strand; PAM type: YTN; PAM sequence: CTC
gaattctcctttatcgactc

SEQ ID NO: 266179 - DNA, 20 bp, Artificial Sequence
  Description of Artificial Sequence: Synthetic oligonucleotide
  Target: LAMA2; (-) strand; PAM type: YTN; PAM sequence: CTA
ctcgaattctcctttatcga

SEQ ID NO: 266180 - DNA, 20 bp, Artificial Sequence
  Description of Artificial Sequence: Synthetic oligonucleotide
  Target: LAMA2; (-) strand; PAM type: YTN; PAM sequence: CTG
cggctactcgaattctcctt

SEQ ID NO: 266181 - DNA, 20 bp, Artificial Sequence
  Description of Artificial Sequence: Synthetic oligonucleotide
  Target: LAMA2; (-) strand; PAM type: YTN; PAM sequence: TTC
tgcggctactcgaattctcc

SEQ ID NO: 266182 - DNA, 20 bp, Artificial Sequence
  Description of Artificial Sequence: Synthetic oligonucleotide
  Target: LAMA2; (-) strand; PAM type: YTN; PAM sequence: CTT
ctgcggctactcgaattctc

SEQ ID NO: 266183 - DNA, 20 bp, Artificial Sequence
  Description of Artificial Sequence: Synthetic oligonucleotide
  Target: LAMA2; (-) strand; PAM type: YTN; PAM sequence: CTA
cttctgcggctactcgaatt

SEQ ID NO: 266184 - DNA, 20 bp, Artificial Sequence
  Description of Artificial Sequence: Synthetic oligonucleotide
  Target: LAMA2; (-) strand; PAM type: YTN; PAM sequence: CTC
ctacttctgcggctactcga

SEQ ID NO: 266185 - DNA, 20 bp, Artificial Sequence
  Description of Artificial Sequence: Synthetic oligonucleotide
  Target: LAMA2; (-) strand; PAM type: YTN; PAM sequence: TTC
tcctacttctgcggctactc

SEQ ID NO: 266186 - DNA, 20 bp, Artificial Sequence
  Description of Artificial Sequence: Synthetic oligonucleotide
  Target: LAMA2; (-) strand; PAM type: YTN; PAM sequence: TTT
ctcctacttctgcggctact

SEQ ID NO: 266187 - DNA, 20 bp, Artificial Sequence
  Description of Artificial Sequence: Synthetic oligonucleotide
  Target: LAMA2; (-) strand; PAM type: YTN; PAM sequence: TTG
atgtttctcctacttctgcg

SEQ ID NO: 266188 - DNA, 20 bp, Artificial Sequence
  Description of Artificial Sequence: Synthetic oligonucleotide
  Target: LAMA2; (-) strand; PAM type: YTN; PAM sequence: TTA
agagtaagccagttgatgtt

SEQ ID NO: 266189 - DNA, 20 bp, Artificial Sequence
  Description of Artificial Sequence: Synthetic oligonucleotide
  Target: LAMA2; (-) strand; PAM type: YTN; PAM sequence: TTT
aagagtaagccagttgatgt

SEQ ID NO: 266190 - DNA, 20 bp, Artificial Sequence
  Description of Artificial Sequence: Synthetic oligonucleotide
  Target: LAMA2; (-) strand; PAM type: YTN; PAM sequence: CTT
taagagtaagccagttgatg

SEQ ID NO: 266191 - DNA, 20 bp, Artificial Sequence
  Description of Artificial Sequence: Synthetic oligonucleotide
  Target: LAMA2; (-) strand; PAM type: YTN; PAM sequence: TTC
tttaagagtaagccagttga

SEQ ID NO: 266192 - DNA, 20 bp, Artificial Sequence
  Description of Artificial Sequence: Synthetic oligonucleotide
  Target: LAMA2; (-) strand; PAM type: YTN; PAM sequence: CTT
ctttaagagtaagccagttg

SEQ ID NO: 266193 - DNA, 20 bp, Artificial Sequence
  Description of Artificial Sequence: Synthetic oligonucleotide
  Target: LAMA2; (-) strand; PAM type: YTN; PAM sequence: CTG
ccgtgcccagcccccatggc

SEQ ID NO: 266194 - DNA, 20 bp, Artificial Sequence
  Description of Artificial Sequence: Synthetic oligonucleotide
  Target: LAMA2; (-) strand; PAM type: YTN; PAM sequence: TTA
caggcgggagctgccgtgcc

SEQ ID NO: 266195 - DNA, 20 bp, Artificial Sequence
  Description of Artificial Sequence: Synthetic oligonucleotide
  Target: LAMA2; (-) strand; PAM type: YTN; PAM sequence: TTG
ggattacaggcgggagctgc

SEQ ID NO: 266196 - DNA, 20 bp, Artificial Sequence
  Description of Artificial Sequence: Synthetic oligonucleotide
  Target: LAMA2; (-) strand; PAM type: YTN; PAM sequence: CTC
ccaaagtgttgggattacag

SEQ ID NO: 266197 - DNA, 20 bp, Artificial Sequence
  Description of Artificial Sequence: Synthetic oligonucleotide
  Target: LAMA2; (-) strand; PAM type: YTN; PAM sequence: CTG
gcctcccaaagtgttgggat

SEQ ID NO: 266198 - DNA, 20 bp, Artificial Sequence
  Description of Artificial Sequence: Synthetic oligonucleotide
  Target: LAMA2; (-) strand; PAM type: YTN; PAM sequence: CTG
ccctggcctcccaaagtgtt

SEQ ID NO: 266199 - DNA, 20 bp, Artificial Sequence
  Description of Artificial Sequence: Synthetic oligonucleotide
  Target: LAMA2; (-) strand; PAM type: YTN; PAM sequence: CTG
cctgccctggcctcccaaag

SEQ ID NO: 266200 - DNA, 20 bp, Artificial Sequence
  Description of Artificial Sequence: Synthetic oligonucleotide
  Target: LAMA2; (-) strand; PAM type: YTN; PAM sequence: TTG
accccgtgatctgcctgccc

SEQ ID NO: 266201 - DNA, 20 bp, Artificial Sequence
  Description of Artificial Sequence: Synthetic oligonucleotide
  Target: LAMA2; (-) strand; PAM type: YTN; PAM sequence: CTT
gaccccgtgatctgcctgcc

SEQ ID NO: 266202 - DNA, 20 bp, Artificial Sequence
  Description of Artificial Sequence: Synthetic oligonucleotide
  Target: LAMA2; (-) strand; PAM type: YTN; PAM sequence: CTC
ttgaccccgtgatctgcctg

SEQ ID NO: 266203 - DNA, 20 bp, Artificial Sequence
  Description of Artificial Sequence: Synthetic oligonucleotide
  Target: LAMA2; (-) strand; PAM type: YTN; PAM sequence: CTC
catctcttgaccccgtgatc

SEQ ID NO: 266204 - DNA, 20 bp, Artificial Sequence
  Description of Artificial Sequence: Synthetic oligonucleotide
  Target: LAMA2; (-) strand; PAM type: YTN; PAM sequence: CTG
gccaggatcgtctccatctc

SEQ ID NO: 266205 - DNA, 20 bp, Artificial Sequence
  Description of Artificial Sequence: Synthetic oligonucleotide
  Target: LAMA2; (-) strand; PAM type: YTN; PAM sequence: TTC
accatgctggccaggatcgt

SEQ ID NO: 266206 - DNA, 20 bp, Artificial Sequence
  Description of Artificial Sequence: Synthetic oligonucleotide
  Target: LAMA2; (-) strand; PAM type: YTN; PAM sequence: TTT
caccatgctggccaggatcg

SEQ ID NO: 266207 - DNA, 20 bp, Artificial Sequence
  Description of Artificial Sequence: Synthetic oligonucleotide
  Target: LAMA2; (-) strand; PAM type: YTN; PAM sequence: TTC
agtaaagacggggtttcacc

SEQ ID NO: 266208 - DNA, 20 bp, Artificial Sequence
  Description of Artificial Sequence: Synthetic oligonucleotide
  Target: LAMA2; (-) strand; PAM type: YTN; PAM sequence: TTT
cagtaaagacggggtttcac

SEQ ID NO: 266209 - DNA, 20 bp, Artificial Sequence
  Description of Artificial Sequence: Synthetic oligonucleotide
  Target: LAMA2; (-) strand; PAM type: YTN; PAM sequence: TTT
tcagtaaagacggggtttca

SEQ ID NO: 266210 - DNA, 20 bp, Artificial Sequence
  Description of Artificial Sequence: Synthetic oligonucleotide
  Target: LAMA2; (-) strand; PAM type: YTN; PAM sequence: TTC
gtattttcagtaaagacggg

SEQ ID NO: 266211 - DNA, 20 bp, Artificial Sequence
  Description of Artificial Sequence: Synthetic oligonucleotide
  Target: LAMA2; (-) strand; PAM type: YTN; PAM sequence: TTT
cgtattttcagtaaagacgg

SEQ ID NO: 266212 - DNA, 20 bp, Artificial Sequence
  Description of Artificial Sequence: Synthetic oligonucleotide
  Target: LAMA2; (-) strand; PAM type: YTN; PAM sequence: TTT
tcgtattttcagtaaagacg

SEQ ID NO: 266213 - DNA, 20 bp, Artificial Sequence
  Description of Artificial Sequence: Synthetic oligonucleotide
  Target: LAMA2; (-) strand; PAM type: YTN; PAM sequence: TTA
attttcgtattttcagtaaa

SEQ ID NO: 266214 - DNA, 20 bp, Artificial Sequence
  Description of Artificial Sequence: Synthetic oligonucleotide
  Target: LAMA2; (-) strand; PAM type: YTN; PAM sequence: TTA
caggcatgcgtaaccatgcc

SEQ ID NO: 266215 - DNA, 20 bp, Artificial Sequence
  Description of Artificial Sequence: Synthetic oligonucleotide
  Target: LAMA2; (-) strand; PAM type: YTN; PAM sequence: CTG
agattacaggcatgcgtaac

SEQ ID NO: 266216 - DNA, 20 bp, Artificial Sequence
  Description of Artificial Sequence: Synthetic oligonucleotide
  Target: LAMA2; (-) strand; PAM type: YTN; PAM sequence: CTG
agtagctgagattacaggca

SEQ ID NO: 266217 - DNA, 20 bp, Artificial Sequence
  Description of Artificial Sequence: Synthetic oligonucleotide
  Target: LAMA2; (-) strand; PAM type: YTN; PAM sequence: CTC
ctgagtagctgagattacag

SEQ ID NO: 266218 - DNA, 20 bp, Artificial Sequence
  Description of Artificial Sequence: Synthetic oligonucleotide
  Target: LAMA2; (-) strand; PAM type: YTN; PAM sequence: CTC
agcctcctgagtagctgaga

SEQ ID NO: 266219 - DNA, 20 bp, Artificial Sequence
  Description of Artificial Sequence: Synthetic oligonucleotide
  Target: LAMA2; (-) strand; PAM type: YTN; PAM sequence: CTG
cctcagcctcctgagtagct

SEQ ID NO: 266220 - DNA, 20 bp, Artificial Sequence
  Description of Artificial Sequence: Synthetic oligonucleotide
  Target: LAMA2; (-) strand; PAM type: YTN; PAM sequence: CTC
ctgcctcagcctcctgagta

SEQ ID NO: 266221 - DNA, 20 bp, Artificial Sequence
  Description of Artificial Sequence: Synthetic oligonucleotide
  Target: LAMA2; (-) strand; PAM type: YTN; PAM sequence: TTC
tcctgcctcagcctcctgag

SEQ ID NO: 266222 - DNA, 20 bp, Artificial Sequence
  Description of Artificial Sequence: Synthetic oligonucleotide
  Target: LAMA2; (-) strand; PAM type: YTN; PAM sequence: TTC
aagcgattctcctgcctcag

SEQ ID NO: 266223 - DNA, 20 bp, Artificial Sequence
  Description of Artificial Sequence: Synthetic oligonucleotide
  Target: LAMA2; (-) strand; PAM type: YTN; PAM sequence: CTC
ccaggttcaagcgattctcc

SEQ ID NO: 266224 - DNA, 20 bp, Artificial Sequence
  Description of Artificial Sequence: Synthetic oligonucleotide
  Target: LAMA2; (-) strand; PAM type: YTN; PAM sequence: CTG
cctcccaggttcaagcgatt

SEQ ID NO: 266225 - DNA, 20 bp, Artificial Sequence
  Description of Artificial Sequence: Synthetic oligonucleotide
  Target: LAMA2; (-) strand; PAM type: YTN; PAM sequence: CTC
tgcctcccaggttcaagcga

SEQ ID NO: 266226 - DNA, 20 bp, Artificial Sequence
  Description of Artificial Sequence: Synthetic oligonucleotide
  Target: LAMA2; (-) strand; PAM type: YTN; PAM sequence: CTG
caacctctgcctcccaggtt

SEQ ID NO: 266227 - DNA, 20 bp, Artificial Sequence
  Description of Artificial Sequence: Synthetic oligonucleotide
  Target: LAMA2; (-) strand; PAM type: YTN; PAM sequence: CTC
actgcaacctctgcctccca

SEQ ID NO: 266228 - DNA, 20 bp, Artificial Sequence
  Description of Artificial Sequence: Synthetic oligonucleotide
  Target: LAMA2; (-) strand; PAM type: YTN; PAM sequence: CTC
agctcactgcaacctctgcc

SEQ ID NO: 266229 - DNA, 20 bp, Artificial Sequence
  Description of Artificial Sequence: Synthetic oligonucleotide
  Target: LAMA2; (-) strand; PAM type: YTN; PAM sequence: CTG
gagtgcagtggcaccatctc

SEQ ID NO: 266230 - DNA, 20 bp, Artificial Sequence
  Description of Artificial Sequence: Synthetic oligonucleotide
  Target: LAMA2; (-) strand; PAM type: YTN; PAM sequence: CTG
tagtcaggctggagtgcagt

SEQ ID NO: 266231 - DNA, 20 bp, Artificial Sequence
  Description of Artificial Sequence: Synthetic oligonucleotide
  Target: LAMA2; (-) strand; PAM type: YTN; PAM sequence: CTC
tgtagtcaggctggagtgca

SEQ ID NO: 266232 - DNA, 20 bp, Artificial Sequence
  Description of Artificial Sequence: Synthetic oligonucleotide
  Target: LAMA2; (-) strand; PAM type: YTN; PAM sequence: CTC
gctctgtagtcaggctggag

SEQ ID NO: 266233 - DNA, 20 bp, Artificial Sequence
  Description of Artificial Sequence: Synthetic oligonucleotide
  Target: LAMA2; (-) strand; PAM type: YTN; PAM sequence: TTG
agacagtctcgctctgtagt

SEQ ID NO: 266234 - DNA, 20 bp, Artificial Sequence
  Description of Artificial Sequence: Synthetic oligonucleotide
  Target: LAMA2; (-) strand; PAM type: YTN; PAM sequence: TTT
gagacagtctcgctctgtag

SEQ ID NO: 266235 - DNA, 20 bp, Artificial Sequence
  Description of Artificial Sequence: Synthetic oligonucleotide
  Target: LAMA2; (-) strand; PAM type: YTN; PAM sequence: TTT
tgagacagtctcgctctgta

SEQ ID NO: 266236 - DNA, 20 bp, Artificial Sequence
  Description of Artificial Sequence: Synthetic oligonucleotide
  Target: LAMA2; (-) strand; PAM type: YTN; PAM sequence: TTT
ttgagacagtctcgctctgt

SEQ ID NO: 266237 - DNA, 20 bp, Artificial Sequence
  Description of Artificial Sequence: Synthetic oligonucleotide
  Target: LAMA2; (-) strand; PAM type: YTN; PAM sequence: TTT
tttgagacagtctcgctctg

SEQ ID NO: 266238 - DNA, 20 bp, Artificial Sequence
  Description of Artificial Sequence: Synthetic oligonucleotide
  Target: LAMA2; (-) strand; PAM type: YTN; PAM sequence: TTT
ttttgagacagtctcgctct

SEQ ID NO: 266239 - DNA, 20 bp, Artificial Sequence
  Description of Artificial Sequence: Synthetic oligonucleotide
  Target: LAMA2; (-) strand; PAM type: YTN; PAM sequence: TTT
tttttgagacagtctcgctc

SEQ ID NO: 266240 - DNA, 20 bp, Artificial Sequence
  Description of Artificial Sequence: Synthetic oligonucleotide
  Target: LAMA2; (-) strand; PAM type: YTN; PAM sequence: TTT
ttttttgagacagtctcgct

SEQ ID NO: 266241 - DNA, 20 bp, Artificial Sequence
  Description of Artificial Sequence: Synthetic oligonucleotide
  Target: LAMA2; (-) strand; PAM type: YTN; PAM sequence: TTT
tttttttgagacagtctcgc

SEQ ID NO: 266242 - DNA, 20 bp, Artificial Sequence
  Description of Artificial Sequence: Synthetic oligonucleotide
  Target: LAMA2; (-) strand; PAM type: YTN; PAM sequence: TTT
ttttttttgagacagtctcg

SEQ ID NO: 266243 - DNA, 20 bp, Artificial Sequence
  Description of Artificial Sequence: Synthetic oligonucleotide
  Target: LAMA2; (-) strand; PAM type: YTN; PAM sequence: TTT
tttttttttgagacagtctc

SEQ ID NO: 266244 - DNA, 20 bp, Artificial Sequence
  Description of Artificial Sequence: Synthetic oligonucleotide
  Target: LAMA2; (-) strand; PAM type: YTN; PAM sequence: TTT
ttttttttttgagacagtct

SEQ ID NO: 266245 - DNA, 20 bp, Artificial Sequence
  Description of Artificial Sequence: Synthetic oligonucleotide
  Target: LAMA2; (-) strand; PAM type: YTN; PAM sequence: TTT
tttttttttttgagacagtc

SEQ ID NO: 266246 - DNA, 20 bp, Artificial Sequence
  Description of Artificial Sequence: Synthetic oligonucleotide
  Target: LAMA2; (-) strand; PAM type: YTN; PAM sequence: CTT
ttttttttttttgagacagt

SEQ ID NO: 266247 - DNA, 20 bp, Artificial Sequence
  Description of Artificial Sequence: Synthetic oligonucleotide
  Target: LAMA2; (-) strand; PAM type: YTN; PAM sequence: TTC
ttttttttttttttgagaca

SEQ ID NO: 266248 - DNA, 20 bp, Artificial Sequence
  Description of Artificial Sequence: Synthetic oligonucleotide
  Target: LAMA2; (-) strand; PAM type: YTN; PAM sequence: TTT
cttttttttttttttgagac

SEQ ID NO: 266249 - DNA, 20 bp, Artificial Sequence
  Description of Artificial Sequence: Synthetic oligonucleotide
  Target: LAMA2; (-) strand; PAM type: YTN; PAM sequence: CTT
tcttttttttttttttgaga

SEQ ID NO: 266250 - DNA, 20 bp, Artificial Sequence
  Description of Artificial Sequence: Synthetic oligonucleotide
  Target: LAMA2; (-) strand; PAM type: YTN; PAM sequence: TTC
tttcttttttttttttttga

SEQ ID NO: 266251 - DNA, 20 bp, Artificial Sequence
  Description of Artificial Sequence: Synthetic oligonucleotide
  Target: LAMA2; (-) strand; PAM type: YTN; PAM sequence: TTT
ctttcttttttttttttttg

SEQ ID NO: 266252 - DNA, 20 bp, Artificial Sequence
  Description of Artificial Sequence: Synthetic oligonucleotide
  Target: LAMA2; (-) strand; PAM type: YTN; PAM sequence: CTT
tctttctttttttttttttt

SEQ ID NO: 266253 - DNA, 20 bp, Artificial Sequence
  Description of Artificial Sequence: Synthetic oligonucleotide
  Target: LAMA2; (-) strand; PAM type: YTN; PAM sequence: TTC
tttctttctttttttttttt

SEQ ID NO: 266254 - DNA, 20 bp, Artificial Sequence
  Description of Artificial Sequence: Synthetic oligonucleotide
  Target: LAMA2; (-) strand; PAM type: YTN; PAM sequence: TTT
ctttctttcttttttttttt

SEQ ID NO: 266255 - DNA, 20 bp, Artificial Sequence
  Description of Artificial Sequence: Synthetic oligonucleotide
  Target: LAMA2; (-) strand; PAM type: YTN; PAM sequence: TTT
tctttctttctttttttttt

SEQ ID NO: 266256 - DNA, 20 bp, Artificial Sequence
  Description of Artificial Sequence: Synthetic oligonucleotide
  Target: LAMA2; (-) strand; PAM type: YTN; PAM sequence: TTT
ttctttctttcttttttttt

SEQ ID NO: 266257 - DNA, 20 bp, Artificial Sequence
  Description of Artificial Sequence: Synthetic oligonucleotide
  Target: LAMA2; (-) strand; PAM type: YTN; PAM sequence: CTT
tttctttctttctttttttt

SEQ ID NO: 266258 - DNA, 20 bp, Artificial Sequence
  Description of Artificial Sequence: Synthetic oligonucleotide
  Target: LAMA2; (-) strand; PAM type: YTN; PAM sequence: TTC
tttttctttctttctttttt

SEQ ID NO: 266259 - DNA, 20 bp, Artificial Sequence
  Description of Artificial Sequence: Synthetic oligonucleotide
  Target: LAMA2; (-) strand; PAM type: YTN; PAM sequence: TTT
ctttttctttctttcttttt

SEQ ID NO: 266260 - DNA, 20 bp, Artificial Sequence
  Description of Artificial Sequence: Synthetic oligonucleotide
  Target: LAMA2; (-) strand; PAM type: YTN; PAM sequence: CTT
tctttttctttctttctttt

SEQ ID NO: 266261 - DNA, 20 bp, Artificial Sequence
  Description of Artificial Sequence: Synthetic oligonucleotide
  Target: LAMA2; (-) strand; PAM type: YTN; PAM sequence: TTC
tttctttttctttctttctt

SEQ ID NO: 266262 - DNA, 20 bp, Artificial Sequence
  Description of Artificial Sequence: Synthetic oligonucleotide
  Target: LAMA2; (-) strand; PAM type: YTN; PAM sequence: TTT
ctttctttttctttctttct

SEQ ID NO: 266263 - DNA, 20 bp, Artificial Sequence
  Description of Artificial Sequence: Synthetic oligonucleotide
  Target: LAMA2; (-) strand; PAM type: YTN; PAM sequence: CTT
tctttctttttctttctttc

SEQ ID NO: 266264 - DNA, 20 bp, Artificial Sequence
  Description of Artificial Sequence: Synthetic oligonucleotide
  Target: LAMA2; (-) strand; PAM type: YTN; PAM sequence: TTC
tttctttctttttctttctt

SEQ ID NO: 266265 - DNA, 20 bp, Artificial Sequence
  Description of Artificial Sequence: Synthetic oligonucleotide
  Target: LAMA2; (-) strand; PAM type: YTN; PAM sequence: TTT
ctttctttctttttctttct

SEQ ID NO: 266266 - DNA, 20 bp, Artificial Sequence
  Description of Artificial Sequence: Synthetic oligonucleotide
  Target: LAMA2; (-) strand; PAM type: YTN; PAM sequence: TTC
ccatggtttctttctttctt

SEQ ID NO: 266267 - DNA, 20 bp, Artificial Sequence
  Description of Artificial Sequence: Synthetic oligonucleotide
  Target: LAMA2; (-) strand; PAM type: YTN; PAM sequence: CTT
cccatggtttctttctttct

SEQ ID NO: 266268 - DNA, 20 bp, Artificial Sequence
  Description of Artificial Sequence: Synthetic oligonucleotide
  Target: LAMA2; (-) strand; PAM type: YTN; PAM sequence: CTC
ttcccatggtttctttcttt

SEQ ID NO: 266269 - DNA, 20 bp, Artificial Sequence
  Description of Artificial Sequence: Synthetic oligonucleotide
  Target: LAMA2; (-) strand; PAM type: YTN; PAM sequence: CTC
tcttcccatggtttctttct

SEQ ID NO: 266270 - DNA, 20 bp, Artificial Sequence
  Description of Artificial Sequence: Synthetic oligonucleotide
  Target: LAMA2; (-) strand; PAM type: YTN; PAM sequence: CTG
gatactctcttcccatggtt

SEQ ID NO: 266271 - DNA, 20 bp, Artificial Sequence
  Description of Artificial Sequence: Synthetic oligonucleotide
  Target: LAMA2; (-) strand; PAM type: YTN; PAM sequence: TTC
tggatactctcttcccatgg

SEQ ID NO: 266272 - DNA, 20 bp, Artificial Sequence
  Description of Artificial Sequence: Synthetic oligonucleotide
  Target: LAMA2; (-) strand; PAM type: YTN; PAM sequence: TTT
ctggatactctcttcccatg

SEQ ID NO: 266273 - DNA, 20 bp, Artificial Sequence
  Description of Artificial Sequence: Synthetic oligonucleotide
  Target: LAMA2; (-) strand; PAM type: YTN; PAM sequence: TTG
atagatatttctggatactc

SEQ ID NO: 266274 - DNA, 20 bp, Artificial Sequence
  Description of Artificial Sequence: Synthetic oligonucleotide
  Target: LAMA2; (-) strand; PAM type: YTN; PAM sequence: CTG
tagccattgatagatatttc

SEQ ID NO: 266275 - DNA, 20 bp, Artificial Sequence
  Description of Artificial Sequence: Synthetic oligonucleotide
  Target: LAMA2; (-) strand; PAM type: YTN; PAM sequence: TTC
tgtagccattgatagatatt

SEQ ID NO: 266276 - DNA, 20 bp, Artificial Sequence
  Description of Artificial Sequence: Synthetic oligonucleotide
  Target: LAMA2; (-) strand; PAM type: YTN; PAM sequence: TTT
ctgtagccattgatagatat

SEQ ID NO: 266277 - DNA, 20 bp, Artificial Sequence
  Description of Artificial Sequence: Synthetic oligonucleotide
  Target: LAMA2; (-) strand; PAM type: YTN; PAM sequence: TTT
tctgtagccattgatagata

SEQ ID NO: 266278 - DNA, 20 bp, Artificial Sequence
  Description of Artificial Sequence: Synthetic oligonucleotide
  Target: LAMA2; (-) strand; PAM type: YTN; PAM sequence: CTC
atatgtaggttttctgtagc

SEQ ID NO: 266279 - DNA, 20 bp, Artificial Sequence
  Description of Artificial Sequence: Synthetic oligonucleotide
  Target: LAMA2; (-) strand; PAM type: YTN; PAM sequence: TTA
caatcatcaggcctcatatg

SEQ ID NO: 266280 - DNA, 20 bp, Artificial Sequence
  Description of Artificial Sequence: Synthetic oligonucleotide
  Target: LAMA2; (-) strand; PAM type: YTN; PAM sequence: CTT
acaatcatcaggcctcatat

SEQ ID NO: 266281 - DNA, 20 bp, Artificial Sequence
  Description of Artificial Sequence: Synthetic oligonucleotide
  Target: LAMA2; (-) strand; PAM type: YTN; PAM sequence: CTA
aagcaaaacttacaatcatc

SEQ ID NO: 266282 - DNA, 20 bp, Artificial Sequence
  Description of Artificial Sequence: Synthetic oligonucleotide
  Target: LAMA2; (-) strand; PAM type: YTN; PAM sequence: TTG
ctaaagcaaaacttacaatc

SEQ ID NO: 266283 - DNA, 20 bp, Artificial Sequence
  Description of Artificial Sequence: Synthetic oligonucleotide
  Target: LAMA2; (-) strand; PAM type: YTN; PAM sequence: TTG
ttgctaaagcaaaacttaca

SEQ ID NO: 266284 - DNA, 20 bp, Artificial Sequence
  Description of Artificial Sequence: Synthetic oligonucleotide
  Target: LAMA2; (-) strand; PAM type: YTN; PAM sequence: TTT
gttgctaaagcaaaacttac

SEQ ID NO: 266285 - DNA, 20 bp, Artificial Sequence
  Description of Artificial Sequence: Synthetic oligonucleotide
  Target: LAMA2; (-) strand; PAM type: YTN; PAM sequence: CTT
tgttgctaaagcaaaactta

SEQ ID NO: 266286 - DNA, 20 bp, Artificial Sequence
  Description of Artificial Sequence: Synthetic oligonucleotide
  Target: LAMA2; (-) strand; PAM type: YTN; PAM sequence: TTA
aacataataccaggatgacc

SEQ ID NO: 266287 - DNA, 20 bp, Artificial Sequence
  Description of Artificial Sequence: Synthetic oligonucleotide
  Target: LAMA2; (-) strand; PAM type: YTN; PAM sequence: TTC
accattaaacataataccag

SEQ ID NO: 266288 - DNA, 20 bp, Artificial Sequence
  Description of Artificial Sequence: Synthetic oligonucleotide
  Target: LAMA2; (-) strand; PAM type: YTN; PAM sequence: TTT
caccattaaacataatacca

SEQ ID NO: 266289 - DNA, 20 bp, Artificial Sequence
  Description of Artificial Sequence: Synthetic oligonucleotide
  Target: LAMA2; (-) strand; PAM type: YTN; PAM sequence: CTG
gtttcaccattaaacataat

SEQ ID NO: 266290 - DNA, 20 bp, Artificial Sequence
  Description of Artificial Sequence: Synthetic oligonucleotide
  Target: LAMA2; (-) strand; PAM type: YTN; PAM sequence: TTC
tggtttcaccattaaacata

SEQ ID NO: 266291 - DNA, 20 bp, Artificial Sequence
  Description of Artificial Sequence: Synthetic oligonucleotide
  Target: LAMA2; (-) strand; PAM type: YTN; PAM sequence: CTT
ctggtttcaccattaaacat

SEQ ID NO: 266292 - DNA, 20 bp, Artificial Sequence
  Description of Artificial Sequence: Synthetic oligonucleotide
  Target: LAMA2; (-) strand; PAM type: YTN; PAM sequence: TTA
aacaggcttctggtttcacc

SEQ ID NO: 266293 - DNA, 20 bp, Artificial Sequence
  Description of Artificial Sequence: Synthetic oligonucleotide
  Target: LAMA2; (-) strand; PAM type: YTN; PAM sequence: TTT
aaacaggcttctggtttcac

SEQ ID NO: 266294 - DNA, 20 bp, Artificial Sequence
  Description of Artificial Sequence: Synthetic oligonucleotide
  Target: LAMA2; (-) strand; PAM type: YTN; PAM sequence: CTT
taaacaggcttctggtttca

SEQ ID NO: 266295 - DNA, 20 bp, Artificial Sequence
  Description of Artificial Sequence: Synthetic oligonucleotide
  Target: LAMA2; (-) strand; PAM type: YTN; PAM sequence: CTC
cctttaaacaggcttctggt

SEQ ID NO: 266296 - DNA, 20 bp, Artificial Sequence
  Description of Artificial Sequence: Synthetic oligonucleotide
  Target: LAMA2; (-) strand; PAM type: YTN; PAM sequence: TTC
tccctttaaacaggcttctg

SEQ ID NO: 266297 - DNA, 20 bp, Artificial Sequence
  Description of Artificial Sequence: Synthetic oligonucleotide
  Target: LAMA2; (-) strand; PAM type: YTN; PAM sequence: CTC
ccattctccctttaaacagg

SEQ ID NO: 266298 - DNA, 20 bp, Artificial Sequence
  Description of Artificial Sequence: Synthetic oligonucleotide
  Target: LAMA2; (-) strand; PAM type: YTN; PAM sequence: TTC
atctcccattctccctttaa

SEQ ID NO: 266299 - DNA, 20 bp, Artificial Sequence
  Description of Artificial Sequence: Synthetic oligonucleotide
  Target: LAMA2; (-) strand; PAM type: YTN; PAM sequence: CTT
catctcccattctcccttta

SEQ ID NO: 266300 - DNA, 20 bp, Artificial Sequence
  Description of Artificial Sequence: Synthetic oligonucleotide
  Target: LAMA2; (-) strand; PAM type: YTN; PAM sequence: TTC
ttcatctcccattctccctt

SEQ ID NO: 266301 - DNA, 20 bp, Artificial Sequence
  Description of Artificial Sequence: Synthetic oligonucleotide
  Target: LAMA2; (-) strand; PAM type: YTN; PAM sequence: CTT
cttcatctcccattctccct

SEQ ID NO: 266302 - DNA, 20 bp, Artificial Sequence
  Description of Artificial Sequence: Synthetic oligonucleotide
  Target: LAMA2; (-) strand; PAM type: YTN; PAM sequence: CTA
cttcttcatctcccattctc

SEQ ID NO: 266303 - DNA, 20 bp, Artificial Sequence
  Description of Artificial Sequence: Synthetic oligonucleotide
  Target: LAMA2; (-) strand; PAM type: YTN; PAM sequence: CTC
tacttcttcatctcccattc

SEQ ID NO: 266304 - DNA, 20 bp, Artificial Sequence
  Description of Artificial Sequence: Synthetic oligonucleotide
  Target: LAMA2; (-) strand; PAM type: YTN; PAM sequence: CTG
gtctctacttcttcatctcc

SEQ ID NO: 266305 - DNA, 20 bp, Artificial Sequence
  Description of Artificial Sequence: Synthetic oligonucleotide
  Target: LAMA2; (-) strand; PAM type: YTN; PAM sequence: TTC
ctggtctctacttcttcatc

SEQ ID NO: 266306 - DNA, 20 bp, Artificial Sequence
  Description of Artificial Sequence: Synthetic oligonucleotide
  Target: LAMA2; (-) strand; PAM type: YTN; PAM sequence: TTA
cattcctggtctctacttct

SEQ ID NO: 266307 - DNA, 20 bp, Artificial Sequence
  Description of Artificial Sequence: Synthetic oligonucleotide
  Target: LAMA2; (-) strand; PAM type: YTN; PAM sequence: TTT
acattcctggtctctacttc

SEQ ID NO: 266308 - DNA, 20 bp, Artificial Sequence
  Description of Artificial Sequence: Synthetic oligonucleotide
  Target: LAMA2; (-) strand; PAM type: YTN; PAM sequence: TTG
tttacattcctggtctctac

SEQ ID NO: 266309 - DNA, 20 bp, Artificial Sequence
  Description of Artificial Sequence: Synthetic oligonucleotide
  Target: LAMA2; (-) strand; PAM type: YTN; PAM sequence: TTA
aaaagacattgtttacattc

SEQ ID NO: 266310 - DNA, 20 bp, Artificial Sequence
  Description of Artificial Sequence: Synthetic oligonucleotide
  Target: LAMA2; (-) strand; PAM type: YTN; PAM sequence: TTT
aaaaagacattgtttacatt

SEQ ID NO: 266311 - DNA, 20 bp, Artificial Sequence
  Description of Artificial Sequence: Synthetic oligonucleotide
  Target: LAMA2; (-) strand; PAM type: YTN; PAM sequence: TTT
taaaaagacattgtttacat

SEQ ID NO: 266312 - DNA, 20 bp, Artificial Sequence
  Description of Artificial Sequence: Synthetic oligonucleotide
  Target: LAMA2; (-) strand; PAM type: YTN; PAM sequence: CTT
ttaaaaagacattgtttaca

SEQ ID NO: 266313 - DNA, 20 bp, Artificial Sequence
  Description of Artificial Sequence: Synthetic oligonucleotide
  Target: LAMA2; (-) strand; PAM type: YTN; PAM sequence: TTC
gataagcttttaaaaagaca

SEQ ID NO: 266314 - DNA, 20 bp, Artificial Sequence
  Description of Artificial Sequence: Synthetic oligonucleotide
  Target: LAMA2; (-) strand; PAM type: YTN; PAM sequence: TTT
cgataagcttttaaaaagac

SEQ ID NO: 266315 - DNA, 20 bp, Artificial Sequence
  Description of Artificial Sequence: Synthetic oligonucleotide
  Target: LAMA2; (-) strand; PAM type: YTN; PAM sequence: TTT
tcgataagcttttaaaaaga

SEQ ID NO: 266316 - DNA, 20 bp, Artificial Sequence
  Description of Artificial Sequence: Synthetic oligonucleotide
  Target: LAMA2; (-) strand; PAM type: YTN; PAM sequence: CTA
ttttcgataagcttttaaaa

SEQ ID NO: 266317 - DNA, 20 bp, Artificial Sequence
  Description of Artificial Sequence: Synthetic oligonucleotide
  Target: LAMA2; (-) strand; PAM type: YTN; PAM sequence: CTA
tcctattttcgataagcttt

SEQ ID NO: 266318 - DNA, 20 bp, Artificial Sequence
  Description of Artificial Sequence: Synthetic oligonucleotide
  Target: LAMA2; (-) strand; PAM type: YTN; PAM sequence: TTC
tatcctattttcgataagct

SEQ ID NO: 266319 - DNA, 20 bp, Artificial Sequence
  Description of Artificial Sequence: Synthetic oligonucleotide
  Target: LAMA2; (-) strand; PAM type: YTN; PAM sequence: TTT
ctatcctattttcgataagc

SEQ ID NO: 266320 - DNA, 20 bp, Artificial Sequence
  Description of Artificial Sequence: Synthetic oligonucleotide
  Target: LAMA2; (-) strand; PAM type: YTN; PAM sequence: TTG
acaatttctatcctattttc

SEQ ID NO: 266321 - DNA, 20 bp, Artificial Sequence
  Description of Artificial Sequence: Synthetic oligonucleotide
  Target: LAMA2; (-) strand; PAM type: YTN; PAM sequence: CTT
gacaatttctatcctatttt

SEQ ID NO: 266322 - DNA, 20 bp, Artificial Sequence
  Description of Artificial Sequence: Synthetic oligonucleotide
  Target: LAMA2; (-) strand; PAM type: YTN; PAM sequence: TTG
cttgacaatttctatcctat

SEQ ID NO: 266323 - DNA, 20 bp, Artificial Sequence
  Description of Artificial Sequence: Synthetic oligonucleotide
  Target: LAMA2; (-) strand; PAM type: YTN; PAM sequence: CTC
aaattgcttgacaatttcta

SEQ ID NO: 266324 - DNA, 20 bp, Artificial Sequence
  Description of Artificial Sequence: Synthetic oligonucleotide
  Target: LAMA2; (-) strand; PAM type: YTN; PAM sequence: CTG
tgaggtctcaaattgcttga

SEQ ID NO: 266325 - DNA, 20 bp, Artificial Sequence
  Description of Artificial Sequence: Synthetic oligonucleotide
  Target: LAMA2; (-) strand; PAM type: YTN; PAM sequence: TTA
aaaaaaaaatctgtgaggtc

SEQ ID NO: 266326 - DNA, 20 bp, Artificial Sequence
  Description of Artificial Sequence: Synthetic oligonucleotide
  Target: LAMA2; (-) strand; PAM type: YTN; PAM sequence: CTT
aaaaaaaaaatctgtgaggt

SEQ ID NO: 266327 - DNA, 20 bp, Artificial Sequence
  Description of Artificial Sequence: Synthetic oligonucleotide
  Target: LAMA2; (-) strand; PAM type: YTN; PAM sequence: CTG
tcttaaaaaaaaaatctgtg

SEQ ID NO: 266328 - DNA, 20 bp, Artificial Sequence
  Description of Artificial Sequence: Synthetic oligonucleotide
  Target: LAMA2; (-) strand; PAM type: YTN; PAM sequence: TTC
ctgtcttaaaaaaaaaatct

SEQ ID NO: 266329 - DNA, 20 bp, Artificial Sequence
  Description of Artificial Sequence: Synthetic oligonucleotide
  Target: LAMA2; (-) strand; PAM type: YTN; PAM sequence: TTT
cctgtcttaaaaaaaaaatc

SEQ ID NO: 266330 - DNA, 20 bp, Artificial Sequence
  Description of Artificial Sequence: Synthetic oligonucleotide
  Target: LAMA2; (-) strand; PAM type: YTN; PAM sequence: CTT
tcctgtcttaaaaaaaaaat

SEQ ID NO: 266331 - DNA, 20 bp, Artificial Sequence
  Description of Artificial Sequence: Synthetic oligonucleotide
  Target: LAMA2; (-) strand; PAM type: YTN; PAM sequence: TTG
gtcaagcctttcctgtctta

SEQ ID NO: 266332 - DNA, 20 bp, Artificial Sequence
  Description of Artificial Sequence: Synthetic oligonucleotide
  Target: LAMA2; (-) strand; PAM type: YTN; PAM sequence: TTG
aaattggtcaagcctttcct

SEQ ID NO: 266333 - DNA, 20 bp, Artificial Sequence
  Description of Artificial Sequence: Synthetic oligonucleotide
  Target: LAMA2; (-) strand; PAM type: YTN; PAM sequence: TTT
gaaattggtcaagcctttcc

SEQ ID NO: 266334 - DNA, 20 bp, Artificial Sequence
  Description of Artificial Sequence: Synthetic oligonucleotide
  Target: LAMA2; (-) strand; PAM type: YTN; PAM sequence: TTA
atatttgaaattggtcaagc

SEQ ID NO: 266335 - DNA, 20 bp, Artificial Sequence
  Description of Artificial Sequence: Synthetic oligonucleotide
  Target: LAMA2; (-) strand; PAM type: YTN; PAM sequence: CTC
attaatatttgaaattggtc

SEQ ID NO: 266336 - DNA, 20 bp, Artificial Sequence
  Description of Artificial Sequence: Synthetic oligonucleotide
  Target: LAMA2; (-) strand; PAM type: YTN; PAM sequence: TTC
tcattaatatttgaaattgg

SEQ ID NO: 266337 - DNA, 20 bp, Artificial Sequence
  Description of Artificial Sequence: Synthetic oligonucleotide
  Target: LAMA2; (-) strand; PAM type: YTN; PAM sequence: CTC
attctcattaatatttgaaa

SEQ ID NO: 266338 - DNA, 20 bp, Artificial Sequence
  Description of Artificial Sequence: Synthetic oligonucleotide
  Target: LAMA2; (-) strand; PAM type: YTN; PAM sequence: TTG
caggctcattctcattaata

SEQ ID NO: 266339 - DNA, 20 bp, Artificial Sequence
  Description of Artificial Sequence: Synthetic oligonucleotide
  Target: LAMA2; (-) strand; PAM type: YTN; PAM sequence: TTT
gcaggctcattctcattaat

SEQ ID NO: 266340 - DNA, 20 bp, Artificial Sequence
  Description of Artificial Sequence: Synthetic oligonucleotide
  Target: LAMA2; (-) strand; PAM type: YTN; PAM sequence: CTT
tgcaggctcattctcattaa

SEQ ID NO: 266341 - DNA, 20 bp, Artificial Sequence
  Description of Artificial Sequence: Synthetic oligonucleotide
  Target: LAMA2; (-) strand; PAM type: YTN; PAM sequence: CTC
ctttgcaggctcattctcat

SEQ ID NO: 266342 - DNA, 20 bp, Artificial Sequence
  Description of Artificial Sequence: Synthetic oligonucleotide
  Target: LAMA2; (-) strand; PAM type: YTN; PAM sequence: TTC
cctcctttgcaggctcattc

SEQ ID NO: 266343 - DNA, 20 bp, Artificial Sequence
  Description of Artificial Sequence: Synthetic oligonucleotide
  Target: LAMA2; (-) strand; PAM type: YTN; PAM sequence: TTA
ttccctcctttgcaggctca

SEQ ID NO: 266344 - DNA, 20 bp, Artificial Sequence
  Description of Artificial Sequence: Synthetic oligonucleotide
  Target: LAMA2; (-) strand; PAM type: YTN; PAM sequence: TTT
attccctcctttgcaggctc

SEQ ID NO: 266345 - DNA, 20 bp, Artificial Sequence
  Description of Artificial Sequence: Synthetic oligonucleotide
  Target: LAMA2; (-) strand; PAM type: YTN; PAM sequence: CTT
tattccctcctttgcaggct

SEQ ID NO: 266346 - DNA, 20 bp, Artificial Sequence
  Description of Artificial Sequence: Synthetic oligonucleotide
  Target: LAMA2; (-) strand; PAM type: YTN; PAM sequence: CTC
caccatctttattccctcct

SEQ ID NO: 266347 - DNA, 20 bp, Artificial Sequence
  Description of Artificial Sequence: Synthetic oligonucleotide
  Target: LAMA2; (-) strand; PAM type: YTN; PAM sequence: TTC
tccaccatctttattccctc

SEQ ID NO: 266348 - DNA, 20 bp, Artificial Sequence
  Description of Artificial Sequence: Synthetic oligonucleotide
  Target: LAMA2; (-) strand; PAM type: YTN; PAM sequence: TTT
ctccaccatctttattccct

SEQ ID NO: 266349 - DNA, 20 bp, Artificial Sequence
  Description of Artificial Sequence: Synthetic oligonucleotide
  Target: LAMA2; (-) strand; PAM type: YTN; PAM sequence: TTT
tctccaccatctttattccc

SEQ ID NO: 266350 - DNA, 20 bp, Artificial Sequence
  Description of Artificial Sequence: Synthetic oligonucleotide
  Target: LAMA2; (-) strand; PAM type: YTN; PAM sequence: CTC
cccattttctccaccatctt

SEQ ID NO: 266351 - DNA, 20 bp, Artificial Sequence
  Description of Artificial Sequence: Synthetic oligonucleotide
  Target: LAMA2; (-) strand; PAM type: YTN; PAM sequence: CTG
cctccccattttctccacca

SEQ ID NO: 266352 - DNA, 20 bp, Artificial Sequence
  Description of Artificial Sequence: Synthetic oligonucleotide
  Target: LAMA2; (-) strand; PAM type: YTN; PAM sequence: CTC
ctgcctccccattttctcca

SEQ ID NO: 266353 - DNA, 20 bp, Artificial Sequence
  Description of Artificial Sequence: Synthetic oligonucleotide
  Target: LAMA2; (-) strand; PAM type: YTN; PAM sequence: TTC
ctcctgcctccccattttct

SEQ ID NO: 266354 - DNA, 20 bp, Artificial Sequence
  Description of Artificial Sequence: Synthetic oligonucleotide
  Target: LAMA2; (-) strand; PAM type: YTN; PAM sequence: TTT
cctcctgcctccccattttc

SEQ ID NO: 266355 - DNA, 20 bp, Artificial Sequence
  Description of Artificial Sequence: Synthetic oligonucleotide
  Target: LAMA2; (-) strand; PAM type: YTN; PAM sequence: CTT
tcctcctgcctccccatttt

SEQ ID NO: 266356 - DNA, 20 bp, Artificial Sequence
  Description of Artificial Sequence: Synthetic oligonucleotide
  Target: LAMA2; (-) strand; PAM type: YTN; PAM sequence: TTC
ctttcctcctgcctccccat

SEQ ID NO: 266357 - DNA, 20 bp, Artificial Sequence
  Description of Artificial Sequence: Synthetic oligonucleotide
  Target: LAMA2; (-) strand; PAM type: YTN; PAM sequence: TTT
cctttcctcctgcctcccca

SEQ ID NO: 266358 - DNA, 20 bp, Artificial Sequence
  Description of Artificial Sequence: Synthetic oligonucleotide
  Target: LAMA2; (-) strand; PAM type: YTN; PAM sequence: TTG
gtttcctttcctcctgcctc

SEQ ID NO: 266359 - DNA, 20 bp, Artificial Sequence
  Description of Artificial Sequence: Synthetic oligonucleotide
  Target: LAMA2; (-) strand; PAM type: YTN; PAM sequence: CTA
aattggtttcctttcctcct

SEQ ID NO: 266360 - DNA, 20 bp, Artificial Sequence
  Description of Artificial Sequence: Synthetic oligonucleotide
  Target: LAMA2; (-) strand; PAM type: YTN; PAM sequence: CTC
ctaaattggtttcctttcct

SEQ ID NO: 266361 - DNA, 20 bp, Artificial Sequence
  Description of Artificial Sequence: Synthetic oligonucleotide
  Target: LAMA2; (-) strand; PAM type: YTN; PAM sequence: CTC
cactcctaaattggtttcct

SEQ ID NO: 266362 - DNA, 20 bp, Artificial Sequence
  Description of Artificial Sequence: Synthetic oligonucleotide
  Target: LAMA2; (-) strand; PAM type: YTN; PAM sequence: CTA
ctccactcctaaattggttt

SEQ ID NO: 266363 - DNA, 20 bp, Artificial Sequence
  Description of Artificial Sequence: Synthetic oligonucleotide
  Target: LAMA2; (-) strand; PAM type: YTN; PAM sequence: CTG
aagctactccactcctaaat

SEQ ID NO: 266364 - DNA, 20 bp, Artificial Sequence
  Description of Artificial Sequence: Synthetic oligonucleotide
  Target: LAMA2; (-) strand; PAM type: YTN; PAM sequence: TTG
tctgaagctactccactcct

SEQ ID NO: 266365 - DNA, 20 bp, Artificial Sequence
  Description of Artificial Sequence: Synthetic oligonucleotide
  Target: LAMA2; (-) strand; PAM type: YTN; PAM sequence: TTT
gtctgaagctactccactcc

SEQ ID NO: 266366 - DNA, 20 bp, Artificial Sequence
  Description of Artificial Sequence: Synthetic oligonucleotide
  Target: LAMA2; (-) strand; PAM type: YTN; PAM sequence: CTT
tgtctgaagctactccactc

SEQ ID NO: 266367 - DNA, 20 bp, Artificial Sequence
  Description of Artificial Sequence: Synthetic oligonucleotide
  Target: LAMA2; (-) strand; PAM type: YTN; PAM sequence: TTC
cgtcctttgtctgaagctac

SEQ ID NO: 266368 - DNA, 20 bp, Artificial Sequence
  Description of Artificial Sequence: Synthetic oligonucleotide
  Target: LAMA2; (-) strand; PAM type: YTN; PAM sequence: TTT
ccgtcctttgtctgaagcta

SEQ ID NO: 266369 - DNA, 20 bp, Artificial Sequence
  Description of Artificial Sequence: Synthetic oligonucleotide
  Target: LAMA2; (-) strand; PAM type: YTN; PAM sequence: TTG
tttccgtcctttgtctgaag

SEQ ID NO: 266370 - DNA, 20 bp, Artificial Sequence
  Description of Artificial Sequence: Synthetic oligonucleotide
  Target: LAMA2; (-) strand; PAM type: YTN; PAM sequence: TTT
gtttccgtcctttgtctgaa

SEQ ID NO: 266371 - DNA, 20 bp, Artificial Sequence
  Description of Artificial Sequence: Synthetic oligonucleotide
  Target: LAMA2; (-) strand; PAM type: YTN; PAM sequence: TTG
acatttgtttccgtcctttg

SEQ ID NO: 266372 - DNA, 20 bp, Artificial Sequence
  Description of Artificial Sequence: Synthetic oligonucleotide
  Target: LAMA2; (-) strand; PAM type: YTN; PAM sequence: TTT
gacatttgtttccgtccttt

SEQ ID NO: 266373 - DNA, 20 bp, Artificial Sequence
  Description of Artificial Sequence: Synthetic oligonucleotide
  Target: LAMA2; (-) strand; PAM type: YTN; PAM sequence: CTT
tgacatttgtttccgtcctt

SEQ ID NO: 266374 - DNA, 20 bp, Artificial Sequence
  Description of Artificial Sequence: Synthetic oligonucleotide
  Target: LAMA2; (-) strand; PAM type: YTN; PAM sequence: TTC
catccctttgacatttgttt

SEQ ID NO: 266375 - DNA, 20 bp, Artificial Sequence
  Description of Artificial Sequence: Synthetic oligonucleotide
  Target: LAMA2; (-) strand; PAM type: YTN; PAM sequence: TTT
ccatccctttgacatttgtt

SEQ ID NO: 266376 - DNA, 20 bp, Artificial Sequence
  Description of Artificial Sequence: Synthetic oligonucleotide
  Target: LAMA2; (-) strand; PAM type: YTN; PAM sequence: TTT
tccatccctttgacatttgt

SEQ ID NO: 266377 - DNA, 20 bp, Artificial Sequence
  Description of Artificial Sequence: Synthetic oligonucleotide
  Target: LAMA2; (-) strand; PAM type: YTN; PAM sequence: TTA
ttttccatccctttgacatt

SEQ ID NO: 266378 - DNA, 20 bp, Artificial Sequence
  Description of Artificial Sequence: Synthetic oligonucleotide
  Target: LAMA2; (-) strand; PAM type: YTN; PAM sequence: TTG
ccacattattttccatccct

SEQ ID NO: 266379 - DNA, 20 bp, Artificial Sequence
  Description of Artificial Sequence: Synthetic oligonucleotide
  Target: LAMA2; (-) strand; PAM type: YTN; PAM sequence: TTC
agtatattgccacattattt

SEQ ID NO: 266380 - DNA, 20 bp, Artificial Sequence
  Description of Artificial Sequence: Synthetic oligonucleotide
  Target: LAMA2; (-) strand; PAM type: YTN; PAM sequence: CTG
gcaaacaattcagtatattg

SEQ ID NO: 266381 - DNA, 20 bp, Artificial Sequence
  Description of Artificial Sequence: Synthetic oligonucleotide
  Target: LAMA2; (-) strand; PAM type: YTN; PAM sequence: TTC
ctggcaaacaattcagtata

SEQ ID NO: 266382 - DNA, 20 bp, Artificial Sequence
  Description of Artificial Sequence: Synthetic oligonucleotide
  Target: LAMA2; (-) strand; PAM type: YTN; PAM sequence: TTT
cctggcaaacaattcagtat

SEQ ID NO: 266383 - DNA, 20 bp, Artificial Sequence
  Description of Artificial Sequence: Synthetic oligonucleotide
  Target: LAMA2; (-) strand; PAM type: YTN; PAM sequence: TTG
gtttcctggcaaacaattca

SEQ ID NO: 266384 - DNA, 20 bp, Artificial Sequence
  Description of Artificial Sequence: Synthetic oligonucleotide
  Target: LAMA2; (-) strand; PAM type: YTN; PAM sequence: CTT
ggtttcctggcaaacaattc

SEQ ID NO: 266385 - DNA, 20 bp, Artificial Sequence
  Description of Artificial Sequence: Synthetic oligonucleotide
  Target: LAMA2; (-) strand; PAM type: YTN; PAM sequence: CTC
ccttggtttcctggcaaaca

SEQ ID NO: 266386 - DNA, 20 bp, Artificial Sequence
  Description of Artificial Sequence: Synthetic oligonucleotide
  Target: LAMA2; (-) strand; PAM type: YTN; PAM sequence: TTG
gatgctcccttggtttcctg

SEQ ID NO: 266387 - DNA, 20 bp, Artificial Sequence
  Description of Artificial Sequence: Synthetic oligonucleotide
  Target: LAMA2; (-) strand; PAM type: YTN; PAM sequence: TTT
ggatgctcccttggtttcct

SEQ ID NO: 266388 - DNA, 20 bp, Artificial Sequence
  Description of Artificial Sequence: Synthetic oligonucleotide
  Target: LAMA2; (-) strand; PAM type: YTN; PAM sequence: CTA
atttggatgctcccttggtt

SEQ ID NO: 266389 - DNA, 20 bp, Artificial Sequence
  Description of Artificial Sequence: Synthetic oligonucleotide
  Target: LAMA2; (-) strand; PAM type: YTN; PAM sequence: CTC
taatttggatgctcccttgg

SEQ ID NO: 266390 - DNA, 20 bp, Artificial Sequence
  Description of Artificial Sequence: Synthetic oligonucleotide
  Target: LAMA2; (-) strand; PAM type: YTN; PAM sequence: TTA
agagataagaaagctctaat

SEQ ID NO: 266391 - DNA, 20 bp, Artificial Sequence
  Description of Artificial Sequence: Synthetic oligonucleotide
  Target: LAMA2; (-) strand; PAM type: YTN; PAM sequence: TTT
aagagataagaaagctctaa

SEQ ID NO: 266392 - DNA, 20 bp, Artificial Sequence
  Description of Artificial Sequence: Synthetic oligonucleotide
  Target: LAMA2; (-) strand; PAM type: YTN; PAM sequence: CTT
taagagataagaaagctcta

SEQ ID NO: 266393 - DNA, 20 bp, Artificial Sequence
  Description of Artificial Sequence: Synthetic oligonucleotide
  Target: LAMA2; (-) strand; PAM type: YTN; PAM sequence: CTA
ctttaagagataagaaagct

SEQ ID NO: 266394 - DNA, 20 bp, Artificial Sequence
  Description of Artificial Sequence: Synthetic oligonucleotide
  Target: LAMA2; (-) strand; PAM type: YTN; PAM sequence: TTA
ccctactttaagagataaga

SEQ ID NO: 266395 - DNA, 20 bp, Artificial Sequence
  Description of Artificial Sequence: Synthetic oligonucleotide
  Target: LAMA2; (-) strand; PAM type: YTN; PAM sequence: CTT
accctactttaagagataag

SEQ ID NO: 266396 - DNA, 20 bp, Artificial Sequence
  Description of Artificial Sequence: Synthetic oligonucleotide
  Target: LAMA2; (-) strand; PAM type: YTN; PAM sequence: CTA
caccttaccctactttaaga

SEQ ID NO: 266397 - DNA, 20 bp, Artificial Sequence
  Description of Artificial Sequence: Synthetic oligonucleotide
  Target: LAMA2; (-) strand; PAM type: YTN; PAM sequence: TTC
tacaccttaccctactttaa

SEQ ID NO: 266398 - DNA, 20 bp, Artificial Sequence
  Description of Artificial Sequence: Synthetic oligonucleotide
  Target: LAMA2; (-) strand; PAM type: YTN; PAM sequence: CTT
ctacaccttaccctacttta

SEQ ID NO: 266399 - DNA, 20 bp, Artificial Sequence
  Description of Artificial Sequence: Synthetic oligonucleotide
  Target: LAMA2; (-) strand; PAM type: YTN; PAM sequence: CTA
cttctacaccttaccctact

SEQ ID NO: 266400 - DNA, 20 bp, Artificial Sequence
  Description of Artificial Sequence: Synthetic oligonucleotide
  Target: LAMA2; (-) strand; PAM type: YTN; PAM sequence: TTC
tacttctacaccttacccta

SEQ ID NO: 266401 - DNA, 20 bp, Artificial Sequence
  Description of Artificial Sequence: Synthetic oligonucleotide
  Target: LAMA2; (-) strand; PAM type: YTN; PAM sequence: CTT
ctacttctacaccttaccct

SEQ ID NO: 266402 - DNA, 20 bp, Artificial Sequence
  Description of Artificial Sequence: Synthetic oligonucleotide
  Target: LAMA2; (-) strand; PAM type: YTN; PAM sequence: CTC
aaatcttctacttctacacc

SEQ ID NO: 266403 - DNA, 20 bp, Artificial Sequence
  Description of Artificial Sequence: Synthetic oligonucleotide
  Target: LAMA2; (-) strand; PAM type: YTN; PAM sequence: CTC
ccaacgtgcccagccaatct

SEQ ID NO: 266404 - DNA, 20 bp, Artificial Sequence
  Description of Artificial Sequence: Synthetic oligonucleotide
  Target: LAMA2; (-) strand; PAM type: YTN; PAM sequence: CTC
agcctcccaacgtgcccagc

SEQ ID NO: 266405 - DNA, 20 bp, Artificial Sequence
  Description of Artificial Sequence: Synthetic oligonucleotide
  Target: LAMA2; (-) strand; PAM type: YTN; PAM sequence: CTC
aggtgatccacccacctcag

SEQ ID NO: 266406 - DNA, 20 bp, Artificial Sequence
  Description of Artificial Sequence: Synthetic oligonucleotide
  Target: LAMA2; (-) strand; PAM type: YTN; PAM sequence: CTG
acctcaggtgatccacccac

SEQ ID NO: 266407 - DNA, 20 bp, Artificial Sequence
  Description of Artificial Sequence: Synthetic oligonucleotide
  Target: LAMA2; (-) strand; PAM type: YTN; PAM sequence: CTC
ctgacctcaggtgatccacc

SEQ ID NO: 266408 - DNA, 20 bp, Artificial Sequence
  Description of Artificial Sequence: Synthetic oligonucleotide
  Target: LAMA2; (-) strand; PAM type: YTN; PAM sequence: TTG
aactcctgacctcaggtgat

SEQ ID NO: 266409 - DNA, 20 bp, Artificial Sequence
  Description of Artificial Sequence: Synthetic oligonucleotide
  Target: LAMA2; (-) strand; PAM type: YTN; PAM sequence: CTT
gaactcctgacctcaggtga

SEQ ID NO: 266410 - DNA, 20 bp, Artificial Sequence
  Description of Artificial Sequence: Synthetic oligonucleotide
  Target: LAMA2; (-) strand; PAM type: YTN; PAM sequence: CTG
gtcttgaactcctgacctca

SEQ ID NO: 266411 - DNA, 20 bp, Artificial Sequence
  Description of Artificial Sequence: Synthetic oligonucleotide
  Target: LAMA2; (-) strand; PAM type: YTN; PAM sequence: TTG
gccaggctggtcttgaactc

SEQ ID NO: 266412 - DNA, 20 bp, Artificial Sequence
  Description of Artificial Sequence: Synthetic oligonucleotide
  Target: LAMA2; (-) strand; PAM type: YTN; PAM sequence: TTC
accatgttggccaggctggt

SEQ ID NO: 266413 - DNA, 20 bp, Artificial Sequence
  Description of Artificial Sequence: Synthetic oligonucleotide
  Target: LAMA2; (-) strand; PAM type: YTN; PAM sequence: TTT
caccatgttggccaggctgg

SEQ ID NO: 266414 - DNA, 20 bp, Artificial Sequence
  Description of Artificial Sequence: Synthetic oligonucleotide
  Target: LAMA2; (-) strand; PAM type: YTN; PAM sequence: TTA
gtagagatggggtttcacca

SEQ ID NO: 266415 - DNA, 20 bp, Artificial Sequence
  Description of Artificial Sequence: Synthetic oligonucleotide
  Target: LAMA2; (-) strand; PAM type: YTN; PAM sequence: TTT
agtagagatggggtttcacc

SEQ ID NO: 266416 - DNA, 20 bp, Artificial Sequence
  Description of Artificial Sequence: Synthetic oligonucleotide
  Target: LAMA2; (-) strand; PAM type: YTN; PAM sequence: TTT
tagtagagatggggtttcac

SEQ ID NO: 266417 - DNA, 20 bp, Artificial Sequence
  Description of Artificial Sequence: Synthetic oligonucleotide
  Target: LAMA2; (-) strand; PAM type: YTN; PAM sequence: TTT
ttagtagagatggggtttca

SEQ ID NO: 266418 - DNA, 20 bp, Artificial Sequence
  Description of Artificial Sequence: Synthetic oligonucleotide
  Target: LAMA2; (-) strand; PAM type: YTN; PAM sequence: TTG
tatttttagtagagatgggg

SEQ ID NO: 266419 - DNA, 20 bp, Artificial Sequence
  Description of Artificial Sequence: Synthetic oligonucleotide
  Target: LAMA2; (-) strand; PAM type: YTN; PAM sequence: TTT
gtatttttagtagagatggg

SEQ ID NO: 266420 - DNA, 20 bp, Artificial Sequence
  Description of Artificial Sequence: Synthetic oligonucleotide
  Target: LAMA2; (-) strand; PAM type: YTN; PAM sequence: TTT
tgtatttttagtagagatgg

SEQ ID NO: 266421 - DNA, 20 bp, Artificial Sequence
  Description of Artificial Sequence: Synthetic oligonucleotide
  Target: LAMA2; (-) strand; PAM type: YTN; PAM sequence: TTT
ttgtatttttagtagagatg

SEQ ID NO: 266422 - DNA, 20 bp, Artificial Sequence
  Description of Artificial Sequence: Synthetic oligonucleotide
  Target: LAMA2; (-) strand; PAM type: YTN; PAM sequence: TTT
tttgtatttttagtagagat

SEQ ID NO: 266423 - DNA, 20 bp, Artificial Sequence
  Description of Artificial Sequence: Synthetic oligonucleotide
  Target: LAMA2; (-) strand; PAM type: YTN; PAM sequence: CTA
attttttgtatttttagtag

SEQ ID NO: 266424 - DNA, 20 bp, Artificial Sequence
  Description of Artificial Sequence: Synthetic oligonucleotide
  Target: LAMA2; (-) strand; PAM type: YTN; PAM sequence: CTA
caggcacataccaccacgcc

SEQ ID NO: 266425 - DNA, 20 bp, Artificial Sequence
  Description of Artificial Sequence: Synthetic oligonucleotide
  Target: LAMA2; (-) strand; PAM type: YTN; PAM sequence: CTG
gtactacaggcacataccac

SEQ ID NO: 266426 - DNA, 20 bp, Artificial Sequence
  Description of Artificial Sequence: Synthetic oligonucleotide
  Target: LAMA2; (-) strand; PAM type: YTN; PAM sequence: TTC
ccgagtagctggtactacag

SEQ ID NO: 266427 - DNA, 20 bp, Artificial Sequence
  Description of Artificial Sequence: Synthetic oligonucleotide
  Target: LAMA2; (-) strand; PAM type: YTN; PAM sequence: CTT
cccgagtagctggtactaca

SEQ ID NO: 266428 - DNA, 20 bp, Artificial Sequence
  Description of Artificial Sequence: Synthetic oligonucleotide
  Target: LAMA2; (-) strand; PAM type: YTN; PAM sequence: CTC
accttcccgagtagctggta

SEQ ID NO: 266429 - DNA, 20 bp, Artificial Sequence
  Description of Artificial Sequence: Synthetic oligonucleotide
  Target: LAMA2; (-) strand; PAM type: YTN; PAM sequence: CTG
cctcaccttcccgagtagct

SEQ ID NO: 266430 - DNA, 20 bp, Artificial Sequence
  Description of Artificial Sequence: Synthetic oligonucleotide
  Target: LAMA2; (-) strand; PAM type: YTN; PAM sequence: CTC
ctgcctcaccttcccgagta

SEQ ID NO: 266431 - DNA, 20 bp, Artificial Sequence
  Description of Artificial Sequence: Synthetic oligonucleotide
  Target: LAMA2; (-) strand; PAM type: YTN; PAM sequence: TTC
tcctgcctcaccttcccgag

SEQ ID NO: 266432 - DNA, 20 bp, Artificial Sequence
  Description of Artificial Sequence: Synthetic oligonucleotide
  Target: LAMA2; (-) strand; PAM type: YTN; PAM sequence: CTG
aataaagggattctcctgcc

SEQ ID NO: 266433 - DNA, 20 bp, Artificial Sequence
  Description of Artificial Sequence: Synthetic oligonucleotide
  Target: LAMA2; (-) strand; PAM type: YTN; PAM sequence: CTC
ctgaataaagggattctcct

SEQ ID NO: 266434 - DNA, 20 bp, Artificial Sequence
  Description of Artificial Sequence: Synthetic oligonucleotide
  Target: LAMA2; (-) strand; PAM type: YTN; PAM sequence: CTG
cctcctgaataaagggattc

SEQ ID NO: 266435 - DNA, 20 bp, Artificial Sequence
  Description of Artificial Sequence: Synthetic oligonucleotide
  Target: LAMA2; (-) strand; PAM type: YTN; PAM sequence: CTC
tgcctcctgaataaagggat

SEQ ID NO: 266436 - DNA, 20 bp, Artificial Sequence
  Description of Artificial Sequence: Synthetic oligonucleotide
  Target: LAMA2; (-) strand; PAM type: YTN; PAM sequence: CTG
caacctctgcctcctgaata

SEQ ID NO: 266437 - DNA, 20 bp, Artificial Sequence
  Description of Artificial Sequence: Synthetic oligonucleotide
  Target: LAMA2; (-) strand; PAM type: YTN; PAM sequence: CTC
actgcaacctctgcctcctg

SEQ ID NO: 266438 - DNA, 20 bp, Artificial Sequence
  Description of Artificial Sequence: Synthetic oligonucleotide
  Target: LAMA2; (-) strand; PAM type: YTN; PAM sequence: TTG
gctcactgcaacctctgcct

SEQ ID NO: 266439 - DNA, 20 bp, Artificial Sequence
  Description of Artificial Sequence: Synthetic oligonucleotide
  Target: LAMA2; (-) strand; PAM type: YTN; PAM sequence: CTT
ggctcactgcaacctctgcc

SEQ ID NO: 266440 - DNA, 20 bp, Artificial Sequence
  Description of Artificial Sequence: Synthetic oligonucleotide
  Target: LAMA2; (-) strand; PAM type: YTN; PAM sequence: CTG
gagtgcagtggcaccatctt

SEQ ID NO: 266441 - DNA, 20 bp, Artificial Sequence
  Description of Artificial Sequence: Synthetic oligonucleotide
  Target: LAMA2; (-) strand; PAM type: YTN; PAM sequence: CTG
tcgcccaggctggagtgcag

SEQ ID NO: 266442 - DNA, 20 bp, Artificial Sequence
  Description of Artificial Sequence: Synthetic oligonucleotide
  Target: LAMA2; (-) strand; PAM type: YTN; PAM sequence: CTC
tgtcgcccaggctggagtgc

SEQ ID NO: 266443 - DNA, 20 bp, Artificial Sequence
  Description of Artificial Sequence: Synthetic oligonucleotide
  Target: LAMA2; (-) strand; PAM type: YTN; PAM sequence: TTG
agacagagctctgtcgccca

SEQ ID NO: 266444 - DNA, 20 bp, Artificial Sequence
  Description of Artificial Sequence: Synthetic oligonucleotide
  Target: LAMA2; (-) strand; PAM type: YTN; PAM sequence: TTT
gagacagagctctgtcgccc

SEQ ID NO: 266445 - DNA, 20 bp, Artificial Sequence
  Description of Artificial Sequence: Synthetic oligonucleotide
  Target: LAMA2; (-) strand; PAM type: YTN; PAM sequence: TTT
tgagacagagctctgtcgcc

SEQ ID NO: 266446 - DNA, 20 bp, Artificial Sequence
  Description of Artificial Sequence: Synthetic oligonucleotide
  Target: LAMA2; (-) strand; PAM type: YTN; PAM sequence: TTT
ttgagacagagctctgtcgc

SEQ ID NO: 266447 - DNA, 20 bp, Artificial Sequence
  Description of Artificial Sequence: Synthetic oligonucleotide
  Target: LAMA2; (-) strand; PAM type: YTN; PAM sequence: TTT
tttgagacagagctctgtcg

SEQ ID NO: 266448 - DNA, 20 bp, Artificial Sequence
  Description of Artificial Sequence: Synthetic oligonucleotide
  Target: LAMA2; (-) strand; PAM type: YTN; PAM sequence: TTT
ttttgagacagagctctgtc

SEQ ID NO: 266449 - DNA, 20 bp, Artificial Sequence
  Description of Artificial Sequence: Synthetic oligonucleotide
  Target: LAMA2; (-) strand; PAM type: YTN; PAM sequence: TTT
tttttgagacagagctctgt

SEQ ID NO: 266450 - DNA, 20 bp, Artificial Sequence
  Description of Artificial Sequence: Synthetic oligonucleotide
  Target: LAMA2; (-) strand; PAM type: YTN; PAM sequence: TTT
ttttttgagacagagctctg

SEQ ID NO: 266451 - DNA, 20 bp, Artificial Sequence
  Description of Artificial Sequence: Synthetic oligonucleotide
  Target: LAMA2; (-) strand; PAM type: YTN; PAM sequence: TTT
tttttttgagacagagctct

SEQ ID NO: 266452 - DNA, 20 bp, Artificial Sequence
  Description of Artificial Sequence: Synthetic oligonucleotide
  Target: LAMA2; (-) strand; PAM type: YTN; PAM sequence: TTT
ttttttttgagacagagctc

SEQ ID NO: 266453 - DNA, 20 bp, Artificial Sequence
  Description of Artificial Sequence: Synthetic oligonucleotide
  Target: LAMA2; (-) strand; PAM type: YTN; PAM sequence: TTT
tttttttttgagacagagct

SEQ ID NO: 266454 - DNA, 20 bp, Artificial Sequence
  Description of Artificial Sequence: Synthetic oligonucleotide
  Target: LAMA2; (-) strand; PAM type: YTN; PAM sequence: TTT
ttttttttttgagacagagc

SEQ ID NO: 266455 - DNA, 20 bp, Artificial Sequence
  Description of Artificial Sequence: Synthetic oligonucleotide
  Target: LAMA2; (-) strand; PAM type: YTN; PAM sequence: TTT
tttttttttttgagacagag

SEQ ID NO: 266456 - DNA, 20 bp, Artificial Sequence
  Description of Artificial Sequence: Synthetic oligonucleotide
  Target: LAMA2; (-) strand; PAM type: YTN; PAM sequence: TTT
ttttttttttttgagacaga

SEQ ID NO: 266457 - DNA, 20 bp, Artificial Sequence
  Description of Artificial Sequence: Synthetic oligonucleotide
  Target: LAMA2; (-) strand; PAM type: YTN; PAM sequence: TTT
tttttttttttttgagacag

SEQ ID NO: 266458 - DNA, 20 bp, Artificial Sequence
  Description of Artificial Sequence: Synthetic oligonucleotide
  Target: LAMA2; (-) strand; PAM type: YTN; PAM sequence: TTT
ttttttttttttttgagaca

SEQ ID NO: 266459 - DNA, 20 bp, Artificial Sequence
  Description of Artificial Sequence: Synthetic oligonucleotide
  Target: LAMA2; (-) strand; PAM type: YTN; PAM sequence: TTT
tttttttttttttttgagac

SEQ ID NO: 266460 - DNA, 20 bp, Artificial Sequence
  Description of Artificial Sequence: Synthetic oligonucleotide
  Target: LAMA2; (-) strand; PAM type: YTN; PAM sequence: TTT
ttttttttttttttttgaga

SEQ ID NO: 266461 - DNA, 20 bp, Artificial Sequence
  Description of Artificial Sequence: Synthetic oligonucleotide
  Target: LAMA2; (-) strand; PAM type: YTN; PAM sequence: TTT
tttttttttttttttttgag

SEQ ID NO: 266462 - DNA, 20 bp, Artificial Sequence
  Description of Artificial Sequence: Synthetic oligonucleotide
  Target: LAMA2; (-) strand; PAM type: YTN; PAM sequence: TTT
ttttttttttttttttttga

SEQ ID NO: 266463 - DNA, 20 bp, Artificial Sequence
  Description of Artificial Sequence: Synthetic oligonucleotide
  Target: LAMA2; (-) strand; PAM type: YTN; PAM sequence: TTT
tttttttttttttttttttg

SEQ ID NO: 266464 - DNA, 20 bp, Artificial Sequence
  Description of Artificial Sequence: Synthetic oligonucleotide
  Target: LAMA2; (-) strand; PAM type: YTN; PAM sequence: CTT
tttttttttttttttttttt

SEQ ID NO: 266465 - DNA, 20 bp, Artificial Sequence
  Description of Artificial Sequence: Synthetic oligonucleotide
  Target: LAMA2; (-) strand; PAM type: YTN; PAM sequence: CTC
tttttttttttttttttttt

SEQ ID NO: 266466 - DNA, 20 bp, Artificial Sequence
  Description of Artificial Sequence: Synthetic oligonucleotide
  Target: LAMA2; (-) strand; PAM type: YTN; PAM sequence: TTC
tctttttttttttttttttt

SEQ ID NO: 266467 - DNA, 20 bp, Artificial Sequence
  Description of Artificial Sequence: Synthetic oligonucleotide
  Target: LAMA2; (-) strand; PAM type: YTN; PAM sequence: TTT
ctcttttttttttttttttt

SEQ ID NO: 266468 - DNA, 20 bp, Artificial Sequence
  Description of Artificial Sequence: Synthetic oligonucleotide
  Target: LAMA2; (-) strand; PAM type: YTN; PAM sequence: TTT
tctctttttttttttttttt

SEQ ID NO: 266469 - DNA, 20 bp, Artificial Sequence
  Description of Artificial Sequence: Synthetic oligonucleotide
  Target: LAMA2; (-) strand; PAM type: YTN; PAM sequence: TTT
ttctcttttttttttttttt

SEQ ID NO: 266470 - DNA, 20 bp, Artificial Sequence
  Description of Artificial Sequence: Synthetic oligonucleotide
  Target: LAMA2; (-) strand; PAM type: YTN; PAM sequence: CTT
tttctctttttttttttttt

SEQ ID NO: 266471 - DNA, 20 bp, Artificial Sequence
  Description of Artificial Sequence: Synthetic oligonucleotide
  Target: LAMA2; (-) strand; PAM type: YTN; PAM sequence: TTC
tttttctctttttttttttt

SEQ ID NO: 266472 - DNA, 20 bp, Artificial Sequence
  Description of Artificial Sequence: Synthetic oligonucleotide
  Target: LAMA2; (-) strand; PAM type: YTN; PAM sequence: TTT
ctttttctcttttttttttt

SEQ ID NO: 266473 - DNA, 20 bp, Artificial Sequence
  Description of Artificial Sequence: Synthetic oligonucleotide
  Target: LAMA2; (-) strand; PAM type: YTN; PAM sequence: TTT
tctttttctctttttttttt

SEQ ID NO: 266474 - DNA, 20 bp, Artificial Sequence
  Description of Artificial Sequence: Synthetic oligonucleotide
  Target: LAMA2; (-) strand; PAM type: YTN; PAM sequence: CTT
ttctttttctcttttttttt

SEQ ID NO: 266475 - DNA, 20 bp, Artificial Sequence
  Description of Artificial Sequence: Synthetic oligonucleotide
  Target: LAMA2; (-) strand; PAM type: YTN; PAM sequence: TTC
ttttctttttctcttttttt

SEQ ID NO: 266476 - DNA, 20 bp, Artificial Sequence
  Description of Artificial Sequence: Synthetic oligonucleotide
  Target: LAMA2; (-) strand; PAM type: YTN; PAM sequence: TTT
cttttctttttctctttttt

SEQ ID NO: 266477 - DNA, 20 bp, Artificial Sequence
  Description of Artificial Sequence: Synthetic oligonucleotide
  Target: LAMA2; (-) strand; PAM type: YTN; PAM sequence: TTT
tcttttctttttctcttttt

SEQ ID NO: 266478 - DNA, 20 bp, Artificial Sequence
  Description of Artificial Sequence: Synthetic oligonucleotide
  Target: LAMA2; (-) strand; PAM type: YTN; PAM sequence: CTT
ttcttttctttttctctttt

SEQ ID NO: 266479 - DNA, 20 bp, Artificial Sequence
  Description of Artificial Sequence: Synthetic oligonucleotide
  Target: LAMA2; (-) strand; PAM type: YTN; PAM sequence: TTC
ttttcttttctttttctctt

SEQ ID NO: 266480 - DNA, 20 bp, Artificial Sequence
  Description of Artificial Sequence: Synthetic oligonucleotide
  Target: LAMA2; (-) strand; PAM type: YTN; PAM sequence: TTT
cttttcttttctttttctct

SEQ ID NO: 266481 - DNA, 20 bp, Artificial Sequence
  Description of Artificial Sequence: Synthetic oligonucleotide
  Target: LAMA2; (-) strand; PAM type: YTN; PAM sequence: TTT
tcttttcttttctttttctc

SEQ ID NO: 266482 - DNA, 20 bp, Artificial Sequence
  Description of Artificial Sequence: Synthetic oligonucleotide
  Target: LAMA2; (-) strand; PAM type: YTN; PAM sequence: CTT
ttcttttcttttctttttct

SEQ ID NO: 266483 - DNA, 20 bp, Artificial Sequence
  Description of Artificial Sequence: Synthetic oligonucleotide
  Target: LAMA2; (-) strand; PAM type: YTN; PAM sequence: TTC
ttttcttttcttttcttttt

SEQ ID NO: 266484 - DNA, 20 bp, Artificial Sequence
  Description of Artificial Sequence: Synthetic oligonucleotide
  Target: LAMA2; (-) strand; PAM type: YTN; PAM sequence: TTT
cttttcttttcttttctttt

SEQ ID NO: 266485 - DNA, 20 bp, Artificial Sequence
  Description of Artificial Sequence: Synthetic oligonucleotide
  Target: LAMA2; (-) strand; PAM type: YTN; PAM sequence: TTT
tcttttcttttcttttcttt

SEQ ID NO: 266486 - DNA, 20 bp, Artificial Sequence
  Description of Artificial Sequence: Synthetic oligonucleotide
  Target: LAMA2; (-) strand; PAM type: YTN; PAM sequence: CTT
ttcttttcttttcttttctt

SEQ ID NO: 266487 - DNA, 20 bp, Artificial Sequence
  Description of Artificial Sequence: Synthetic oligonucleotide
  Target: LAMA2; (-) strand; PAM type: YTN; PAM sequence: TTC
caatatgacaaggtacaagt

SEQ ID NO: 266488 - DNA, 20 bp, Artificial Sequence
  Description of Artificial Sequence: Synthetic oligonucleotide
  Target: LAMA2; (-) strand; PAM type: YTN; PAM sequence: TTT
ccaatatgacaaggtacaag

SEQ ID NO: 266489 - DNA, 20 bp, Artificial Sequence
  Description of Artificial Sequence: Synthetic oligonucleotide
  Target: LAMA2; (-) strand; PAM type: YTN; PAM sequence: TTT
tccaatatgacaaggtacaa

SEQ ID NO: 266490 - DNA, 20 bp, Artificial Sequence
  Description of Artificial Sequence: Synthetic oligonucleotide
  Target: LAMA2; (-) strand; PAM type: YTN; PAM sequence: CTG
gttttccaatatgacaaggt

SEQ ID NO: 266491 - DNA, 20 bp, Artificial Sequence
  Description of Artificial Sequence: Synthetic oligonucleotide
  Target: LAMA2; (-) strand; PAM type: YTN; PAM sequence: TTA
taacaatgtgaaatgaatct

SEQ ID NO: 266492 - DNA, 20 bp, Artificial Sequence
  Description of Artificial Sequence: Synthetic oligonucleotide
  Target: LAMA2; (-) strand; PAM type: YTN; PAM sequence: TTT
ataacaatgtgaaatgaatc

SEQ ID NO: 266493 - DNA, 20 bp, Artificial Sequence
  Description of Artificial Sequence: Synthetic oligonucleotide
  Target: LAMA2; (-) strand; PAM type: YTN; PAM sequence: TTT
tataacaatgtgaaatgaat

SEQ ID NO: 266494 - DNA, 20 bp, Artificial Sequence
  Description of Artificial Sequence: Synthetic oligonucleotide
  Target: LAMA2; (-) strand; PAM type: YTN; PAM sequence: TTA
cagattttataacaatgtga

SEQ ID NO: 266495 - DNA, 20 bp, Artificial Sequence
  Description of Artificial Sequence: Synthetic oligonucleotide
  Target: LAMA2; (-) strand; PAM type: YTN; PAM sequence: TTT
acagattttataacaatgtg

SEQ ID NO: 266496 - DNA, 20 bp, Artificial Sequence
  Description of Artificial Sequence: Synthetic oligonucleotide
  Target: LAMA2; (-) strand; PAM type: YTN; PAM sequence: TTG
tgacatttacagattttata

SEQ ID NO: 266497 - DNA, 20 bp, Artificial Sequence
  Description of Artificial Sequence: Synthetic oligonucleotide
  Target: LAMA2; (-) strand; PAM type: YTN; PAM sequence: TTA
tattgtgacatttacagatt

SEQ ID NO: 266498 - DNA, 20 bp, Artificial Sequence
  Description of Artificial Sequence: Synthetic oligonucleotide
  Target: LAMA2; (-) strand; PAM type: YTN; PAM sequence: TTG
aaattatattgtgacattta

SEQ ID NO: 266499 - DNA, 20 bp, Artificial Sequence
  Description of Artificial Sequence: Synthetic oligonucleotide
  Target: LAMA2; (-) strand; PAM type: YTN; PAM sequence: TTT
gaaattatattgtgacattt

SEQ ID NO: 266500 - DNA, 20 bp, Artificial Sequence
  Description of Artificial Sequence: Synthetic oligonucleotide
  Target: LAMA2; (-) strand; PAM type: YTN; PAM sequence: TTA
tatttgaaattatattgtga

SEQ ID NO: 266501 - DNA, 20 bp, Artificial Sequence
  Description of Artificial Sequence: Synthetic oligonucleotide
  Target: LAMA2; (-) strand; PAM type: YTN; PAM sequence: TTG
gtgttatatttgaaattata

SEQ ID NO: 266502 - DNA, 20 bp, Artificial Sequence
  Description of Artificial Sequence: Synthetic oligonucleotide
  Target: LAMA2; (-) strand; PAM type: YTN; PAM sequence: TTT
ggtgttatatttgaaattat

SEQ ID NO: 266503 - DNA, 20 bp, Artificial Sequence
  Description of Artificial Sequence: Synthetic oligonucleotide
  Target: LAMA2; (-) strand; PAM type: YTN; PAM sequence: TTT
tggtgttatatttgaaatta

SEQ ID NO: 266504 - DNA, 20 bp, Artificial Sequence
  Description of Artificial Sequence: Synthetic oligonucleotide
  Target: LAMA2; (-) strand; PAM type: YTN; PAM sequence: TTT
ttggtgttatatttgaaatt

SEQ ID NO: 266505 - DNA, 20 bp, Artificial Sequence
  Description of Artificial Sequence: Synthetic oligonucleotide
  Target: LAMA2; (-) strand; PAM type: YTN; PAM sequence: TTA
catttttggtgttatatttg

SEQ ID NO: 266506 - DNA, 20 bp, Artificial Sequence
  Description of Artificial Sequence: Synthetic oligonucleotide
  Target: LAMA2; (-) strand; PAM type: YTN; PAM sequence: TTT
acatttttggtgttatattt

SEQ ID NO: 266507 - DNA, 20 bp, Artificial Sequence
  Description of Artificial Sequence: Synthetic oligonucleotide
  Target: LAMA2; (-) strand; PAM type: YTN; PAM sequence: TTT
tacatttttggtgttatatt

SEQ ID NO: 266508 - DNA, 20 bp, Artificial Sequence
  Description of Artificial Sequence: Synthetic oligonucleotide
  Target: LAMA2; (-) strand; PAM type: YTN; PAM sequence: TTT
ttacatttttggtgttatat

SEQ ID NO: 266509 - DNA, 20 bp, Artificial Sequence
  Description of Artificial Sequence: Synthetic oligonucleotide
  Target: LAMA2; (-) strand; PAM type: YTN; PAM sequence: TTT
tttacatttttggtgttata

SEQ ID NO: 266510 - DNA, 20 bp, Artificial Sequence
  Description of Artificial Sequence: Synthetic oligonucleotide
  Target: LAMA2; (-) strand; PAM type: YTN; PAM sequence: TTA
ttttttacatttttggtgtt

SEQ ID NO: 266511 - DNA, 20 bp, Artificial Sequence
  Description of Artificial Sequence: Synthetic oligonucleotide
  Target: LAMA2; (-) strand; PAM type: YTN; PAM sequence: TTT
attttttacatttttggtgt

SEQ ID NO: 266512 - DNA, 20 bp, Artificial Sequence
  Description of Artificial Sequence: Synthetic oligonucleotide
  Target: LAMA2; (-) strand; PAM type: YTN; PAM sequence: TTA
gatcatttattttttacatt

SEQ ID NO: 266513 - DNA, 20 bp, Artificial Sequence
  Description of Artificial Sequence: Synthetic oligonucleotide
  Target: LAMA2; (-) strand; PAM type: YTN; PAM sequence: TTT
agatcatttattttttacat

SEQ ID NO: 266514 - DNA, 20 bp, Artificial Sequence
  Description of Artificial Sequence: Synthetic oligonucleotide
  Target: LAMA2; (-) strand; PAM type: YTN; PAM sequence: TTT
tagatcatttattttttaca

SEQ ID NO: 266515 - DNA, 20 bp, Artificial Sequence
  Description of Artificial Sequence: Synthetic oligonucleotide
  Target: LAMA2; (-) strand; PAM type: YTN; PAM sequence: TTG
ccacagtgaattttagatca

SEQ ID NO: 266516 - DNA, 20 bp, Artificial Sequence
  Description of Artificial Sequence: Synthetic oligonucleotide
  Target: LAMA2; (-) strand; PAM type: YTN; PAM sequence: CTA
tgacattgccacagtgaatt

SEQ ID NO: 266517 - DNA, 20 bp, Artificial Sequence
  Description of Artificial Sequence: Synthetic oligonucleotide
  Target: LAMA2; (-) strand; PAM type: YTN; PAM sequence: TTG
cagtgaaactatgacattgc

SEQ ID NO: 266518 - DNA, 20 bp, Artificial Sequence
  Description of Artificial Sequence: Synthetic oligonucleotide
  Target: LAMA2; (-) strand; PAM type: YTN; PAM sequence: CTT
gcagtgaaactatgacattg

SEQ ID NO: 266519 - DNA, 20 bp, Artificial Sequence
  Description of Artificial Sequence: Synthetic oligonucleotide
  Target: LAMA2; (-) strand; PAM type: YTN; PAM sequence: TTC
ttgcagtgaaactatgacat

SEQ ID NO: 266520 - DNA, 20 bp, Artificial Sequence
  Description of Artificial Sequence: Synthetic oligonucleotide
  Target: LAMA2; (-) strand; PAM type: YTN; PAM sequence: TTT
cttgcagtgaaactatgaca

SEQ ID NO: 266521 - DNA, 20 bp, Artificial Sequence
  Description of Artificial Sequence: Synthetic oligonucleotide
  Target: LAMA2; (-) strand; PAM type: YTN; PAM sequence: CTA
tttcttgcagtgaaactatg

SEQ ID NO: 266522 - DNA, 20 bp, Artificial Sequence
  Description of Artificial Sequence: Synthetic oligonucleotide
  Target: LAMA2; (-) strand; PAM type: YTN; PAM sequence: TTA
tgctatttcttgcagtgaaa

SEQ ID NO: 266523 - DNA, 20 bp, Artificial Sequence
  Description of Artificial Sequence: Synthetic oligonucleotide
  Target: LAMA2; (-) strand; PAM type: YTN; PAM sequence: TTT
atgctatttcttgcagtgaa

SEQ ID NO: 266524 - DNA, 20 bp, Artificial Sequence
  Description of Artificial Sequence: Synthetic oligonucleotide
  Target: LAMA2; (-) strand; PAM type: YTN; PAM sequence: TTG
agagtttatgctatttcttg

SEQ ID NO: 266525 - DNA, 20 bp, Artificial Sequence
  Description of Artificial Sequence: Synthetic oligonucleotide
  Target: LAMA2; (-) strand; PAM type: YTN; PAM sequence: TTT
gagagtttatgctatttctt

SEQ ID NO: 266526 - DNA, 20 bp, Artificial Sequence
  Description of Artificial Sequence: Synthetic oligonucleotide
  Target: LAMA2; (-) strand; PAM type: YTN; PAM sequence: TTT
tgagagtttatgctatttct

SEQ ID NO: 266527 - DNA, 20 bp, Artificial Sequence
  Description of Artificial Sequence: Synthetic oligonucleotide
  Target: LAMA2; (-) strand; PAM type: YTN; PAM sequence: TTT
ttgagagtttatgctatttc

SEQ ID NO: 266528 - DNA, 20 bp, Artificial Sequence
  Description of Artificial Sequence: Synthetic oligonucleotide
  Target: LAMA2; (-) strand; PAM type: YTN; PAM sequence: CTT
tttgagagtttatgctattt

SEQ ID NO: 266529 - DNA, 20 bp, Artificial Sequence
  Description of Artificial Sequence: Synthetic oligonucleotide
  Target: LAMA2; (-) strand; PAM type: YTN; PAM sequence: CTC
tttttgagagtttatgctat

SEQ ID NO: 266530 - DNA, 20 bp, Artificial Sequence
  Description of Artificial Sequence: Synthetic oligonucleotide
  Target: LAMA2; (-) strand; PAM type: YTN; PAM sequence: TTA
actctttttgagagtttatg

SEQ ID NO: 266531 - DNA, 20 bp, Artificial Sequence
  Description of Artificial Sequence: Synthetic oligonucleotide
  Target: LAMA2; (-) strand; PAM type: YTN; PAM sequence: CTA
ttaactctttttgagagttt

SEQ ID NO: 266532 - DNA, 20 bp, Artificial Sequence
  Description of Artificial Sequence: Synthetic oligonucleotide
  Target: LAMA2; (-) strand; PAM type: YTN; PAM sequence: TTC
tattaactctttttgagagt

SEQ ID NO: 266533 - DNA, 20 bp, Artificial Sequence
  Description of Artificial Sequence: Synthetic oligonucleotide
  Target: LAMA2; (-) strand; PAM type: YTN; PAM sequence: CTT
ctattaactctttttgagag

SEQ ID NO: 266534 - DNA, 20 bp, Artificial Sequence
  Description of Artificial Sequence: Synthetic oligonucleotide
  Target: LAMA2; (-) strand; PAM type: YTN; PAM sequence: TTA
aaacttctattaactctttt

SEQ ID NO: 266535 - DNA, 20 bp, Artificial Sequence
  Description of Artificial Sequence: Synthetic oligonucleotide
  Target: LAMA2; (-) strand; PAM type: YTN; PAM sequence: TTT
aaaacttctattaactcttt

SEQ ID NO: 266536 - DNA, 20 bp, Artificial Sequence
  Description of Artificial Sequence: Synthetic oligonucleotide
  Target: LAMA2; (-) strand; PAM type: YTN; PAM sequence: TTG
tttaaaacttctattaactc

SEQ ID NO: 266537 - DNA, 20 bp, Artificial Sequence
  Description of Artificial Sequence: Synthetic oligonucleotide
  Target: LAMA2; (-) strand; PAM type: YTN; PAM sequence: TTT
gtttaaaacttctattaact

SEQ ID NO: 266538 - DNA, 20 bp, Artificial Sequence
  Description of Artificial Sequence: Synthetic oligonucleotide
  Target: LAMA2; (-) strand; PAM type: YTN; PAM sequence: TTA
atgtttgtttaaaacttcta

SEQ ID NO: 266539 - DNA, 20 bp, Artificial Sequence
  Description of Artificial Sequence: Synthetic oligonucleotide
  Target: LAMA2; (-) strand; PAM type: YTN; PAM sequence: TTG
ccatggaattaatgtttgtt

SEQ ID NO: 266540 - DNA, 20 bp, Artificial Sequence
  Description of Artificial Sequence: Synthetic oligonucleotide
  Target: LAMA2; (-) strand; PAM type: YTN; PAM sequence: TTC
caccacagatattgccatgg

SEQ ID NO: 266541 - DNA, 20 bp, Artificial Sequence
  Description of Artificial Sequence: Synthetic oligonucleotide
  Target: LAMA2; (-) strand; PAM type: YTN; PAM sequence: TTT
ccaccacagatattgccatg

SEQ ID NO: 266542 - DNA, 20 bp, Artificial Sequence
  Description of Artificial Sequence: Synthetic oligonucleotide
  Target: LAMA2; (-) strand; PAM type: YTN; PAM sequence: CTG
acgtcatttccaccacagat

SEQ ID NO: 266543 - DNA, 20 bp, Artificial Sequence
  Description of Artificial Sequence: Synthetic oligonucleotide
  Target: LAMA2; (-) strand; PAM type: YTN; PAM sequence: TTC
acaacaaacaatagctgacg

SEQ ID NO: 266544 - DNA, 20 bp, Artificial Sequence
  Description of Artificial Sequence: Synthetic oligonucleotide
  Target: LAMA2; (-) strand; PAM type: YTN; PAM sequence: TTG
gtagggaatgtgtggcaatt

SEQ ID NO: 266545 - DNA, 20 bp, Artificial Sequence
  Description of Artificial Sequence: Synthetic oligonucleotide
  Target: LAMA2; (-) strand; PAM type: YTN; PAM sequence: TTG
ttggtagggaatgtgtggca

SEQ ID NO: 266546 - DNA, 20 bp, Artificial Sequence
  Description of Artificial Sequence: Synthetic oligonucleotide
  Target: LAMA2; (-) strand; PAM type: YTN; PAM sequence: CTA
atggccagacaattgttggt

SEQ ID NO: 266547 - DNA, 20 bp, Artificial Sequence
  Description of Artificial Sequence: Synthetic oligonucleotide
  Target: LAMA2; (-) strand; PAM type: YTN; PAM sequence: TTC
taatggccagacaattgttg

SEQ ID NO: 266548 - DNA, 20 bp, Artificial Sequence
  Description of Artificial Sequence: Synthetic oligonucleotide
  Target: LAMA2; (-) strand; PAM type: YTN; PAM sequence: CTT
ctaatggccagacaattgtt

SEQ ID NO: 266549 - DNA, 20 bp, Artificial Sequence
  Description of Artificial Sequence: Synthetic oligonucleotide
  Target: LAMA2; (-) strand; PAM type: YTN; PAM sequence: TTC
atgtgtcttctaatggccag

SEQ ID NO: 266550 - DNA, 20 bp, Artificial Sequence
  Description of Artificial Sequence: Synthetic oligonucleotide
  Target: LAMA2; (-) strand; PAM type: YTN; PAM sequence: TTT
catgtgtcttctaatggcca

SEQ ID NO: 266551 - DNA, 20 bp, Artificial Sequence
  Description of Artificial Sequence: Synthetic oligonucleotide
  Target: LAMA2; (-) strand; PAM type: YTN; PAM sequence: TTA
tgtttcatgtgtcttctaat

SEQ ID NO: 266552 - DNA, 20 bp, Artificial Sequence
  Description of Artificial Sequence: Synthetic oligonucleotide
  Target: LAMA2; (-) strand; PAM type: YTN; PAM sequence: TTT
atgtttcatgtgtcttctaa

SEQ ID NO: 266553 - DNA, 20 bp, Artificial Sequence
  Description of Artificial Sequence: Synthetic oligonucleotide
  Target: LAMA2; (-) strand; PAM type: YTN; PAM sequence: TTA
gtcaatcaagaagaatgtat

SEQ ID NO: 266554 - DNA, 20 bp, Artificial Sequence
  Description of Artificial Sequence: Synthetic oligonucleotide
  Target: LAMA2; (-) strand; PAM type: YTN; PAM sequence: TTT
agtcaatcaagaagaatgta

SEQ ID NO: 266555 - DNA, 20 bp, Artificial Sequence
  Description of Artificial Sequence: Synthetic oligonucleotide
  Target: LAMA2; (-) strand; PAM type: YTN; PAM sequence: TTC
atttagtcaatcaagaagaa

SEQ ID NO: 266556 - DNA, 20 bp, Artificial Sequence
  Description of Artificial Sequence: Synthetic oligonucleotide
  Target: LAMA2; (-) strand; PAM type: YTN; PAM sequence: CTT
catttagtcaatcaagaaga

SEQ ID NO: 266557 - DNA, 20 bp, Artificial Sequence
  Description of Artificial Sequence: Synthetic oligonucleotide
  Target: LAMA2; (-) strand; PAM type: YTN; PAM sequence: CTG
cttcatttagtcaatcaaga

SEQ ID NO: 266558 - DNA, 20 bp, Artificial Sequence
  Description of Artificial Sequence: Synthetic oligonucleotide
  Target: LAMA2; (-) strand; PAM type: YTN; PAM sequence: CTC
tgcttcatttagtcaatcaa

SEQ ID NO: 266559 - DNA, 20 bp, Artificial Sequence
  Description of Artificial Sequence: Synthetic oligonucleotide
  Target: LAMA2; (-) strand; PAM type: YTN; PAM sequence: CTG
ggctctgcttcatttagtca

SEQ ID NO: 266560 - DNA, 20 bp, Artificial Sequence
  Description of Artificial Sequence: Synthetic oligonucleotide
  Target: LAMA2; (-) strand; PAM type: YTN; PAM sequence: TTG
gatgatatcccatagactgg

SEQ ID NO: 266561 - DNA, 20 bp, Artificial Sequence
  Description of Artificial Sequence: Synthetic oligonucleotide
  Target: LAMA2; (-) strand; PAM type: YTN; PAM sequence: CTT
ggatgatatcccatagactg

SEQ ID NO: 266562 - DNA, 20 bp, Artificial Sequence
  Description of Artificial Sequence: Synthetic oligonucleotide
  Target: LAMA2; (-) strand; PAM type: YTN; PAM sequence: TTG
aacttggatgatatcccata

SEQ ID NO: 266563 - DNA, 20 bp, Artificial Sequence
  Description of Artificial Sequence: Synthetic oligonucleotide
  Target: LAMA2; (-) strand; PAM type: YTN; PAM sequence: CTT
gaacttggatgatatcccat

SEQ ID NO: 266564 - DNA, 20 bp, Artificial Sequence
  Description of Artificial Sequence: Synthetic oligonucleotide
  Target: LAMA2; (-) strand; PAM type: YTN; PAM sequence: CTG
gagccacgaagccgccagct

SEQ ID NO: 266565 - DNA, 20 bp, Artificial Sequence
  Description of Artificial Sequence: Synthetic oligonucleotide
  Target: LAMA2; (-) strand; PAM type: YTN; PAM sequence: CTC
agctggagccacgaagccgc

SEQ ID NO: 266566 - DNA, 20 bp, Artificial Sequence
  Description of Artificial Sequence: Synthetic oligonucleotide
  Target: LAMA2; (-) strand; PAM type: YTN; PAM sequence: CTG
ataatctcagctggagccac

SEQ ID NO: 266567 - DNA, 20 bp, Artificial Sequence
  Description of Artificial Sequence: Synthetic oligonucleotide
  Target: LAMA2; (-) strand; PAM type: YTN; PAM sequence: TTC
ctgataatctcagctggagc

SEQ ID NO: 266568 - DNA, 20 bp, Artificial Sequence
  Description of Artificial Sequence: Synthetic oligonucleotide
  Target: LAMA2; (-) strand; PAM type: YTN; PAM sequence: CTT
cctgataatctcagctggag

SEQ ID NO: 266569 - DNA, 20 bp, Artificial Sequence
  Description of Artificial Sequence: Synthetic oligonucleotide
  Target: LAMA2; (-) strand; PAM type: YTN; PAM sequence: TTG
acttcctgataatctcagct

SEQ ID NO: 266570 - DNA, 20 bp, Artificial Sequence
  Description of Artificial Sequence: Synthetic oligonucleotide
  Target: LAMA2; (-) strand; PAM type: YTN; PAM sequence: TTA
gtgaattgacttcctgataa

SEQ ID NO: 266571 - DNA, 20 bp, Artificial Sequence
  Description of Artificial Sequence: Synthetic oligonucleotide
  Target: LAMA2; (-) strand; PAM type: YTN; PAM sequence: CTA
gatggacatgttagtgaatt

SEQ ID NO: 266572 - DNA, 20 bp, Artificial Sequence
  Description of Artificial Sequence: Synthetic oligonucleotide
  Target: LAMA2; (-) strand; PAM type: YTN; PAM sequence: TTA
caaactagatggacatgtta

SEQ ID NO: 266573 - DNA, 20 bp, Artificial Sequence
  Description of Artificial Sequence: Synthetic oligonucleotide
  Target: LAMA2; (-) strand; PAM type: YTN; PAM sequence: TTG
agaaacaaaaaagtcagtta

SEQ ID NO: 266574 - DNA, 20 bp, Artificial Sequence
  Description of Artificial Sequence: Synthetic oligonucleotide
  Target: LAMA2; (-) strand; PAM type: YTN; PAM sequence: TTA
taaacaatatcgaaagaaaa

SEQ ID NO: 266575 - DNA, 20 bp, Artificial Sequence
  Description of Artificial Sequence: Synthetic oligonucleotide
  Target: LAMA2; (-) strand; PAM type: YTN; PAM sequence: CTT
ataaacaatatcgaaagaaa

SEQ ID NO: 266576 - DNA, 20 bp, Artificial Sequence
  Description of Artificial Sequence: Synthetic oligonucleotide
  Target: LAMA2; (-) strand; PAM type: YTN; PAM sequence: TTA
catcttataaacaatatcga

SEQ ID NO: 266577 - DNA, 20 bp, Artificial Sequence
  Description of Artificial Sequence: Synthetic oligonucleotide
  Target: LAMA2; (-) strand; PAM type: YTN; PAM sequence: CTT
acatcttataaacaatatcg

SEQ ID NO: 266578 - DNA, 20 bp, Artificial Sequence
  Description of Artificial Sequence: Synthetic oligonucleotide
  Target: LAMA2; (-) strand; PAM type: YTN; PAM sequence: TTG
gagtggtcaaaatagtgact

SEQ ID NO: 266579 - DNA, 20 bp, Artificial Sequence
  Description of Artificial Sequence: Synthetic oligonucleotide
  Target: LAMA2; (-) strand; PAM type: YTN; PAM sequence: TTT
ggagtggtcaaaatagtgac

SEQ ID NO: 266580 - DNA, 20 bp, Artificial Sequence
  Description of Artificial Sequence: Synthetic oligonucleotide
  Target: LAMA2; (-) strand; PAM type: YTN; PAM sequence: TTA
taagacaggatttggagtgg

SEQ ID NO: 266581 - DNA, 20 bp, Artificial Sequence
  Description of Artificial Sequence: Synthetic oligonucleotide
  Target: LAMA2; (-) strand; PAM type: YTN; PAM sequence: TTT
ataagacaggatttggagtg

SEQ ID NO: 266582 - DNA, 20 bp, Artificial Sequence
  Description of Artificial Sequence: Synthetic oligonucleotide
  Target: LAMA2; (-) strand; PAM type: YTN; PAM sequence: TTT
tataagacaggatttggagt

SEQ ID NO: 266583 - DNA, 20 bp, Artificial Sequence
  Description of Artificial Sequence: Synthetic oligonucleotide
  Target: LAMA2; (-) strand; PAM type: YTN; PAM sequence: CTG
gattttataagacaggattt

SEQ ID NO: 266584 - DNA, 20 bp, Artificial Sequence
  Description of Artificial Sequence: Synthetic oligonucleotide
  Target: LAMA2; (-) strand; PAM type: YTN; PAM sequence: TTA
gctggattttataagacagg

SEQ ID NO: 266585 - DNA, 20 bp, Artificial Sequence
  Description of Artificial Sequence: Synthetic oligonucleotide
  Target: LAMA2; (-) strand; PAM type: YTN; PAM sequence: TTT
agctggattttataagacag

SEQ ID NO: 266586 - DNA, 20 bp, Artificial Sequence
  Description of Artificial Sequence: Synthetic oligonucleotide
  Target: LAMA2; (-) strand; PAM type: YTN; PAM sequence: TTT
tagctggattttataagaca

SEQ ID NO: 266587 - DNA, 20 bp, Artificial Sequence
  Description of Artificial Sequence: Synthetic oligonucleotide
  Target: LAMA2; (-) strand; PAM type: YTN; PAM sequence: TTG
aattttagctggattttata

SEQ ID NO: 266588 - DNA, 20 bp, Artificial Sequence
  Description of Artificial Sequence: Synthetic oligonucleotide
  Target: LAMA2; (-) strand; PAM type: YTN; PAM sequence: TTG
gaattgaattttagctggat

SEQ ID NO: 266589 - DNA, 20 bp, Artificial Sequence
  Description of Artificial Sequence: Synthetic oligonucleotide
  Target: LAMA2; (-) strand; PAM type: YTN; PAM sequence: TTT
ggaattgaattttagctgga

SEQ ID NO: 266590 - DNA, 20 bp, Artificial Sequence
  Description of Artificial Sequence: Synthetic oligonucleotide
  Target: LAMA2; (-) strand; PAM type: YTN; PAM sequence: TTG
agaaaaaggaagaagggaat

SEQ ID NO: 266591 - DNA, 20 bp, Artificial Sequence
  Description of Artificial Sequence: Synthetic oligonucleotide
  Target: LAMA2; (-) strand; PAM type: YTN; PAM sequence: TTG
agagttgagaaaaaggaaga

SEQ ID NO: 266592 - DNA, 20 bp, Artificial Sequence
  Description of Artificial Sequence: Synthetic oligonucleotide
  Target: LAMA2; (-) strand; PAM type: YTN; PAM sequence: TTT
gagagttgagaaaaaggaag

SEQ ID NO: 266593 - DNA, 20 bp, Artificial Sequence
  Description of Artificial Sequence: Synthetic oligonucleotide
  Target: LAMA2; (-) strand; PAM type: YTN; PAM sequence: TTG
catttgagagttgagaaaaa

SEQ ID NO: 266594 - DNA, 20 bp, Artificial Sequence
  Description of Artificial Sequence: Synthetic oligonucleotide
  Target: LAMA2; (-) strand; PAM type: YTN; PAM sequence: CTT
gcatttgagagttgagaaaa

SEQ ID NO: 266595 - DNA, 20 bp, Artificial Sequence
  Description of Artificial Sequence: Synthetic oligonucleotide
  Target: LAMA2; (-) strand; PAM type: YTN; PAM sequence: TTG
tgggaatgcgatccttgcat

SEQ ID NO: 266596 - DNA, 20 bp, Artificial Sequence
  Description of Artificial Sequence: Synthetic oligonucleotide
  Target: LAMA2; (-) strand; PAM type: YTN; PAM sequence: CTT
gtgggaatgcgatccttgca

SEQ ID NO: 266597 - DNA, 20 bp, Artificial Sequence
  Description of Artificial Sequence: Synthetic oligonucleotide
  Target: LAMA2; (-) strand; PAM type: YTN; PAM sequence: TTA
tcttgtgggaatgcgatcct

SEQ ID NO: 266598 - DNA, 20 bp, Artificial Sequence
  Description of Artificial Sequence: Synthetic oligonucleotide
  Target: LAMA2; (-) strand; PAM type: YTN; PAM sequence: TTG
aatgttatcttgtgggaatg

SEQ ID NO: 266599 - DNA, 20 bp, Artificial Sequence
  Description of Artificial Sequence: Synthetic oligonucleotide
  Target: LAMA2; (-) strand; PAM type: YTN; PAM sequence: CTG
acaaaaaataaacatggcag

SEQ ID NO: 266600 - DNA, 20 bp, Artificial Sequence
  Description of Artificial Sequence: Synthetic oligonucleotide
  Target: LAMA2; (-) strand; PAM type: YTN; PAM sequence: TTA
aaaaaaccacctgacaaaaa

SEQ ID NO: 266601 - DNA, 20 bp, Artificial Sequence
  Description of Artificial Sequence: Synthetic oligonucleotide
  Target: LAMA2; (-) strand; PAM type: YTN; PAM sequence: TTT
aaaaaaaccacctgacaaaa

SEQ ID NO: 266602 - DNA, 20 bp, Artificial Sequence
  Description of Artificial Sequence: Synthetic oligonucleotide
  Target: LAMA2; (-) strand; PAM type: YTN; PAM sequence: TTG
ggaaaataataatttaaaaa

SEQ ID NO: 266603 - DNA, 20 bp, Artificial Sequence
  Description of Artificial Sequence: Synthetic oligonucleotide
  Target: LAMA2; (-) strand; PAM type: YTN; PAM sequence: TTT
gggaaaataataatttaaaa

SEQ ID NO: 266604 - DNA, 20 bp, Artificial Sequence
  Description of Artificial Sequence: Synthetic oligonucleotide
  Target: LAMA2; (-) strand; PAM type: YTN; PAM sequence: CTT
tgggaaaataataatttaaa

SEQ ID NO: 266605 - DNA, 20 bp, Artificial Sequence
  Description of Artificial Sequence: Synthetic oligonucleotide
  Target: LAMA2; (-) strand; PAM type: YTN; PAM sequence: TTA
gactttgggaaaataataat

SEQ ID NO: 266606 - DNA, 20 bp, Artificial Sequence
  Description of Artificial Sequence: Synthetic oligonucleotide
  Target: LAMA2; (-) strand; PAM type: YTN; PAM sequence: CTT
agactttgggaaaataataa

SEQ ID NO: 266607 - DNA, 20 bp, Artificial Sequence
  Description of Artificial Sequence: Synthetic oligonucleotide
  Target: LAMA2; (-) strand; PAM type: YTN; PAM sequence: TTA
cttagactttgggaaaataa

SEQ ID NO: 266608 - DNA, 20 bp, Artificial Sequence
  Description of Artificial Sequence: Synthetic oligonucleotide
  Target: LAMA2; (-) strand; PAM type: YTN; PAM sequence: TTT
acttagactttgggaaaata

SEQ ID NO: 266609 - DNA, 20 bp, Artificial Sequence
  Description of Artificial Sequence: Synthetic oligonucleotide
  Target: LAMA2; (-) strand; PAM type: YTN; PAM sequence: CTA
gaaatttacttagactttgg

SEQ ID NO: 266610 - DNA, 20 bp, Artificial Sequence
  Description of Artificial Sequence: Synthetic oligonucleotide
  Target: LAMA2; (-) strand; PAM type: YTN; PAM sequence: TTC
tagaaatttacttagacttt

SEQ ID NO: 266611 - DNA, 20 bp, Artificial Sequence
  Description of Artificial Sequence: Synthetic oligonucleotide
  Target: LAMA2; (-) strand; PAM type: YTN; PAM sequence: CTT
ctagaaatttacttagactt

SEQ ID NO: 266612 - DNA, 20 bp, Artificial Sequence
  Description of Artificial Sequence: Synthetic oligonucleotide
  Target: LAMA2; (-) strand; PAM type: YTN; PAM sequence: CTA
ccttctagaaatttacttag

SEQ ID NO: 266613 - DNA, 20 bp, Artificial Sequence
  Description of Artificial Sequence: Synthetic oligonucleotide
  Target: LAMA2; (-) strand; PAM type: YTN; PAM sequence: CTG
aaacaggcaatgaaagaaca

SEQ ID NO: 266614 - DNA, 20 bp, Artificial Sequence
  Description of Artificial Sequence: Synthetic oligonucleotide
  Target: LAMA2; (-) strand; PAM type: YTN; PAM sequence: CTA
catggaatgcactgaaacag

SEQ ID NO: 266615 - DNA, 20 bp, Artificial Sequence
  Description of Artificial Sequence: Synthetic oligonucleotide
  Target: LAMA2; (-) strand; PAM type: YTN; PAM sequence: TTA
ggaagagctacatggaatgc

SEQ ID NO: 266616 - DNA, 20 bp, Artificial Sequence
  Description of Artificial Sequence: Synthetic oligonucleotide
  Target: LAMA2; (-) strand; PAM type: YTN; PAM sequence: TTA
tgcaataaggagttaggaag

SEQ ID NO: 266617 - DNA, 20 bp, Artificial Sequence
  Description of Artificial Sequence: Synthetic oligonucleotide
  Target: LAMA2; (-) strand; PAM type: YTN; PAM sequence: TTA
acacaataatcaattatgca

SEQ ID NO: 266618 - DNA, 20 bp, Artificial Sequence
  Description of Artificial Sequence: Synthetic oligonucleotide
  Target: LAMA2; (-) strand; PAM type: YTN; PAM sequence: TTT
aacacaataatcaattatgc

SEQ ID NO: 266619 - DNA, 20 bp, Artificial Sequence
  Description of Artificial Sequence: Synthetic oligonucleotide
  Target: LAMA2; (-) strand; PAM type: YTN; PAM sequence: TTA
tatttaacacaataatcaat

SEQ ID NO: 266620 - DNA, 20 bp, Artificial Sequence
  Description of Artificial Sequence: Synthetic oligonucleotide
  Target: LAMA2; (-) strand; PAM type: YTN; PAM sequence: TTC
atgaagcagaattatattta

SEQ ID NO: 266621 - DNA, 20 bp, Artificial Sequence
  Description of Artificial Sequence: Synthetic oligonucleotide
  Target: LAMA2; (-) strand; PAM type: YTN; PAM sequence: TTT
catgaagcagaattatattt

SEQ ID NO: 266622 - DNA, 20 bp, Artificial Sequence
  Description of Artificial Sequence: Synthetic oligonucleotide
  Target: LAMA2; (-) strand; PAM type: YTN; PAM sequence: TTT
tcatgaagcagaattatatt

SEQ ID NO: 266623 - DNA, 20 bp, Artificial Sequence
  Description of Artificial Sequence: Synthetic oligonucleotide
  Target: LAMA2; (-) strand; PAM type: YTN; PAM sequence: TTA
aaattttcatgaagcagaat

SEQ ID NO: 266624 - DNA, 20 bp, Artificial Sequence
  Description of Artificial Sequence: Synthetic oligonucleotide
  Target: LAMA2; (-) strand; PAM type: YTN; PAM sequence: TTC
aaattaaaattttcatgaag

SEQ ID NO: 266625 - DNA, 20 bp, Artificial Sequence
  Description of Artificial Sequence: Synthetic oligonucleotide
  Target: LAMA2; (-) strand; PAM type: YTN; PAM sequence: CTT
caaattaaaattttcatgaa

SEQ ID NO: 266626 - DNA, 20 bp, Artificial Sequence
  Description of Artificial Sequence: Synthetic oligonucleotide
  Target: LAMA2; (-) strand; PAM type: YTN; PAM sequence: TTC
agaatagtgtgcaaatagct

SEQ ID NO: 266627 - DNA, 20 bp, Artificial Sequence
  Description of Artificial Sequence: Synthetic oligonucleotide
  Target: LAMA2; (-) strand; PAM type: YTN; PAM sequence: CTT
cagaatagtgtgcaaatagc

SEQ ID NO: 266628 - DNA, 20 bp, Artificial Sequence
  Description of Artificial Sequence: Synthetic oligonucleotide
  Target: LAMA2; (-) strand; PAM type: YTN; PAM sequence: TTC
cacaaagaaatgagaatagc

SEQ ID NO: 266629 - DNA, 20 bp, Artificial Sequence
  Description of Artificial Sequence: Synthetic oligonucleotide
  Target: LAMA2; (-) strand; PAM type: YTN; PAM sequence: TTT
ccacaaagaaatgagaatag

SEQ ID NO: 266630 - DNA, 20 bp, Artificial Sequence
  Description of Artificial Sequence: Synthetic oligonucleotide
  Target: LAMA2; (-) strand; PAM type: YTN; PAM sequence: CTT
tccacaaagaaatgagaata

SEQ ID NO: 266631 - DNA, 20 bp, Artificial Sequence
  Description of Artificial Sequence: Synthetic oligonucleotide
  Target: LAMA2; (-) strand; PAM type: YTN; PAM sequence: TTA
acacctttccacaaagaaat

SEQ ID NO: 266632 - DNA, 20 bp, Artificial Sequence
  Description of Artificial Sequence: Synthetic oligonucleotide
  Target: LAMA2; (-) strand; PAM type: YTN; PAM sequence: TTT
aacacctttccacaaagaaa

SEQ ID NO: 266633 - DNA, 20 bp, Artificial Sequence
  Description of Artificial Sequence: Synthetic oligonucleotide
  Target: LAMA2; (-) strand; PAM type: YTN; PAM sequence: CTT
taacacctttccacaaagaa

SEQ ID NO: 266634 - DNA, 20 bp, Artificial Sequence
  Description of Artificial Sequence: Synthetic oligonucleotide
  Target: LAMA2; (-) strand; PAM type: YTN; PAM sequence: TTG
gggtgataccctttaacacc

SEQ ID NO: 266635 - DNA, 20 bp, Artificial Sequence
  Description of Artificial Sequence: Synthetic oligonucleotide
  Target: LAMA2; (-) strand; PAM type: YTN; PAM sequence: TTG
cataataagagacattgggg

SEQ ID NO: 266636 - DNA, 20 bp, Artificial Sequence
  Description of Artificial Sequence: Synthetic oligonucleotide
  Target: LAMA2; (-) strand; PAM type: YTN; PAM sequence: CTT
gcataataagagacattggg

SEQ ID NO: 266637 - DNA, 20 bp, Artificial Sequence
  Description of Artificial Sequence: Synthetic oligonucleotide
  Target: LAMA2; (-) strand; PAM type: YTN; PAM sequence: TTA
tgcttgcataataagagaca

SEQ ID NO: 266638 - DNA, 20 bp, Artificial Sequence
  Description of Artificial Sequence: Synthetic oligonucleotide
  Target: LAMA2; (-) strand; PAM type: YTN; PAM sequence: CTT
atgcttgcataataagagac

SEQ ID NO: 266639 - DNA, 20 bp, Artificial Sequence
  Description of Artificial Sequence: Synthetic oligonucleotide
  Target: LAMA2; (-) strand; PAM type: YTN; PAM sequence: TTC
ttatgcttgcataataagag

SEQ ID NO: 266640 - DNA, 20 bp, Artificial Sequence
  Description of Artificial Sequence: Synthetic oligonucleotide
  Target: LAMA2; (-) strand; PAM type: YTN; PAM sequence: TTT
cttatgcttgcataataaga

SEQ ID NO: 266641 - DNA, 20 bp, Artificial Sequence
  Description of Artificial Sequence: Synthetic oligonucleotide
  Target: LAMA2; (-) strand; PAM type: YTN; PAM sequence: CTT
tcttatgcttgcataataag

SEQ ID NO: 266642 - DNA, 20 bp, Artificial Sequence
  Description of Artificial Sequence: Synthetic oligonucleotide
  Target: LAMA2; (-) strand; PAM type: YTN; PAM sequence: TTC
tttcttatgcttgcataata

SEQ ID NO: 266643 - DNA, 20 bp, Artificial Sequence
  Description of Artificial Sequence: Synthetic oligonucleotide
  Target: LAMA2; (-) strand; PAM type: YTN; PAM sequence: CTT
ctttcttatgcttgcataat

SEQ ID NO: 266644 - DNA, 20 bp, Artificial Sequence
  Description of Artificial Sequence: Synthetic oligonucleotide
  Target: LAMA2; (-) strand; PAM type: YTN; PAM sequence: CTC
agatcgatatcttctttctt

SEQ ID NO: 266645 - DNA, 20 bp, Artificial Sequence
  Description of Artificial Sequence: Synthetic oligonucleotide
  Target: LAMA2; (-) strand; PAM type: YTN; PAM sequence: CTA
gcaatctcagatcgatatct

SEQ ID NO: 266646 - DNA, 20 bp, Artificial Sequence
  Description of Artificial Sequence: Synthetic oligonucleotide
  Target: LAMA2; (-) strand; PAM type: YTN; PAM sequence: CTA
aaactagcaatctcagatcg

SEQ ID NO: 266647 - DNA, 20 bp, Artificial Sequence
  Description of Artificial Sequence: Synthetic oligonucleotide
  Target: LAMA2; (-) strand; PAM type: YTN; PAM sequence: TTC
ataaatacagaggagtcaat

SEQ ID NO: 266648 - DNA, 20 bp, Artificial Sequence
  Description of Artificial Sequence: Synthetic oligonucleotide
  Target: LAMA2; (-) strand; PAM type: YTN; PAM sequence: CTT
cataaatacagaggagtcaa

SEQ ID NO: 266649 - DNA, 20 bp, Artificial Sequence
  Description of Artificial Sequence: Synthetic oligonucleotide
  Target: LAMA2; (-) strand; PAM type: YTN; PAM sequence: TTC
ttcataaatacagaggagtc

SEQ ID NO: 266650 - DNA, 20 bp, Artificial Sequence
  Description of Artificial Sequence: Synthetic oligonucleotide
  Target: LAMA2; (-) strand; PAM type: YTN; PAM sequence: CTC
aaggtggaaagcatagatgt

SEQ ID NO: 266651 - DNA, 20 bp, Artificial Sequence
  Description of Artificial Sequence: Synthetic oligonucleotide
  Target: LAMA2; (-) strand; PAM type: YTN; PAM sequence: CTG
aaaccacctcaaggtggaaa

SEQ ID NO: 266652 - DNA, 20 bp, Artificial Sequence
  Description of Artificial Sequence: Synthetic oligonucleotide
  Target: LAMA2; (-) strand; PAM type: YTN; PAM sequence: TTC
tgaaaccacctcaaggtgga

SEQ ID NO: 266653 - DNA, 20 bp, Artificial Sequence
  Description of Artificial Sequence: Synthetic oligonucleotide
  Target: LAMA2; (-) strand; PAM type: YTN; PAM sequence: TTT
ctgaaaccacctcaaggtgg

SEQ ID NO: 266654 - DNA, 20 bp, Artificial Sequence
  Description of Artificial Sequence: Synthetic oligonucleotide
  Target: LAMA2; (-) strand; PAM type: YTN; PAM sequence: CTT
tctgaaaccacctcaaggtg

SEQ ID NO: 266655 - DNA, 20 bp, Artificial Sequence
  Description of Artificial Sequence: Synthetic oligonucleotide
  Target: LAMA2; (-) strand; PAM type: YTN; PAM sequence: CTA
gtgggctttctgaaaccacc

SEQ ID NO: 266656 - DNA, 20 bp, Artificial Sequence
  Description of Artificial Sequence: Synthetic oligonucleotide
  Target: LAMA2; (-) strand; PAM type: YTN; PAM sequence: TTG
gcacatgcccactagtgggc

SEQ ID NO: 266657 - DNA, 20 bp, Artificial Sequence
  Description of Artificial Sequence: Synthetic oligonucleotide
  Target: LAMA2; (-) strand; PAM type: YTN; PAM sequence: CTT
ggcacatgcccactagtggg

SEQ ID NO: 266658 - DNA, 20 bp, Artificial Sequence
  Description of Artificial Sequence: Synthetic oligonucleotide
  Target: LAMA2; (-) strand; PAM type: YTN; PAM sequence: CTG
tggccttggcacatgcccac

SEQ ID NO: 266659 - DNA, 20 bp, Artificial Sequence
  Description of Artificial Sequence: Synthetic oligonucleotide
  Target: LAMA2; (-) strand; PAM type: YTN; PAM sequence: CTA
caaatactgtggccttggca

SEQ ID NO: 266660 - DNA, 20 bp, Artificial Sequence
  Description of Artificial Sequence: Synthetic oligonucleotide
  Target: LAMA2; (-) strand; PAM type: YTN; PAM sequence: TTA
gaaaaaggtgctacaaatac

SEQ ID NO: 266661 - DNA, 20 bp, Artificial Sequence
  Description of Artificial Sequence: Synthetic oligonucleotide
  Target: LAMA2; (-) strand; PAM type: YTN; PAM sequence: CTA
tgagatgttagaaaaaggtg

SEQ ID NO: 266662 - DNA, 20 bp, Artificial Sequence
  Description of Artificial Sequence: Synthetic oligonucleotide
  Target: LAMA2; (-) strand; PAM type: YTN; PAM sequence: CTC
tatgagatgttagaaaaagg

SEQ ID NO: 266663 - DNA, 20 bp, Artificial Sequence
  Description of Artificial Sequence: Synthetic oligonucleotide
  Target: LAMA2; (-) strand; PAM type: YTN; PAM sequence: TTA
gctctatgagatgttagaaa

SEQ ID NO: 266664 - DNA, 20 bp, Artificial Sequence
  Description of Artificial Sequence: Synthetic oligonucleotide
  Target: LAMA2; (-) strand; PAM type: YTN; PAM sequence: TTT
agctctatgagatgttagaa

SEQ ID NO: 266665 - DNA, 20 bp, Artificial Sequence
  Description of Artificial Sequence: Synthetic oligonucleotide
  Target: LAMA2; (-) strand; PAM type: YTN; PAM sequence: TTT
tagctctatgagatgttaga

SEQ ID NO: 266666 - DNA, 20 bp, Artificial Sequence
  Description of Artificial Sequence: Synthetic oligonucleotide
  Target: LAMA2; (-) strand; PAM type: YTN; PAM sequence: TTC
atatcccaggttttagctct

SEQ ID NO: 266667 - DNA, 20 bp, Artificial Sequence
  Description of Artificial Sequence: Synthetic oligonucleotide
  Target: LAMA2; (-) strand; PAM type: YTN; PAM sequence: CTT
catatcccaggttttagctc

SEQ ID NO: 266668 - DNA, 20 bp, Artificial Sequence
  Description of Artificial Sequence: Synthetic oligonucleotide
  Target: LAMA2; (-) strand; PAM type: YTN; PAM sequence: TTC
ttcatatcccaggttttagc

SEQ ID NO: 266669 - DNA, 20 bp, Artificial Sequence
  Description of Artificial Sequence: Synthetic oligonucleotide
  Target: LAMA2; (-) strand; PAM type: YTN; PAM sequence: TTT
cttcatatcccaggttttag

SEQ ID NO: 266670 - DNA, 20 bp, Artificial Sequence
  Description of Artificial Sequence: Synthetic oligonucleotide
  Target: LAMA2; (-) strand; PAM type: YTN; PAM sequence: TTA
tgtttcttcatatcccaggt

SEQ ID NO: 266671 - DNA, 20 bp, Artificial Sequence
  Description of Artificial Sequence: Synthetic oligonucleotide
  Target: LAMA2; (-) strand; PAM type: YTN; PAM sequence: TTT
atgtttcttcatatcccagg

SEQ ID NO: 266672 - DNA, 20 bp, Artificial Sequence
  Description of Artificial Sequence: Synthetic oligonucleotide
  Target: LAMA2; (-) strand; PAM type: YTN; PAM sequence: CTA
ggcatttatgtttcttcata

SEQ ID NO: 266673 - DNA, 20 bp, Artificial Sequence
  Description of Artificial Sequence: Synthetic oligonucleotide
  Target: LAMA2; (-) strand; PAM type: YTN; PAM sequence: TTC
taggcatttatgtttcttca

SEQ ID NO: 266674 - DNA, 20 bp, Artificial Sequence
  Description of Artificial Sequence: Synthetic oligonucleotide
  Target: LAMA2; (-) strand; PAM type: YTN; PAM sequence: CTT
ctaggcatttatgtttcttc

SEQ ID NO: 266675 - DNA, 20 bp, Artificial Sequence
  Description of Artificial Sequence: Synthetic oligonucleotide
  Target: LAMA2; (-) strand; PAM type: YTN; PAM sequence: TTC
ttctaggcatttatgtttct

SEQ ID NO: 266676 - DNA, 20 bp, Artificial Sequence
  Description of Artificial Sequence: Synthetic oligonucleotide
  Target: LAMA2; (-) strand; PAM type: YTN; PAM sequence: TTT
cttctaggcatttatgtttc

SEQ ID NO: 266677 - DNA, 20 bp, Artificial Sequence
  Description of Artificial Sequence: Synthetic oligonucleotide
  Target: LAMA2; (-) strand; PAM type: YTN; PAM sequence: TTA
tttcttctaggcatttatgt

SEQ ID NO: 266678 - DNA, 20 bp, Artificial Sequence
  Description of Artificial Sequence: Synthetic oligonucleotide
  Target: LAMA2; (-) strand; PAM type: YTN; PAM sequence: TTA
ttatttcttctaggcattta

SEQ ID NO: 266679 - DNA, 20 bp, Artificial Sequence
  Description of Artificial Sequence: Synthetic oligonucleotide
  Target: LAMA2; (-) strand; PAM type: YTN; PAM sequence: TTT
attatttcttctaggcattt

SEQ ID NO: 266680 - DNA, 20 bp, Artificial Sequence
  Description of Artificial Sequence: Synthetic oligonucleotide
  Target: LAMA2; (-) strand; PAM type: YTN; PAM sequence: CTA
aaatttattatttcttctag

SEQ ID NO: 266681 - DNA, 20 bp, Artificial Sequence
  Description of Artificial Sequence: Synthetic oligonucleotide
  Target: LAMA2; (-) strand; PAM type: YTN; PAM sequence: CTC
taaaatttattatttcttct

SEQ ID NO: 266682 - DNA, 20 bp, Artificial Sequence
  Description of Artificial Sequence: Synthetic oligonucleotide
  Target: LAMA2; (-) strand; PAM type: YTN; PAM sequence: TTC
gagtctctaaaatttattat

SEQ ID NO: 266683 - DNA, 20 bp, Artificial Sequence
  Description of Artificial Sequence: Synthetic oligonucleotide
  Target: LAMA2; (-) strand; PAM type: YTN; PAM sequence: CTT
cgagtctctaaaatttatta

SEQ ID NO: 266684 - DNA, 20 bp, Artificial Sequence
  Description of Artificial Sequence: Synthetic oligonucleotide
  Target: LAMA2; (-) strand; PAM type: YTN; PAM sequence: TTG
gggaatagacttcgagtctc

SEQ ID NO: 266685 - DNA, 20 bp, Artificial Sequence
  Description of Artificial Sequence: Synthetic oligonucleotide
  Target: LAMA2; (-) strand; PAM type: YTN; PAM sequence: CTA
aattggggaatagacttcga

SEQ ID NO: 266686 - DNA, 20 bp, Artificial Sequence
  Description of Artificial Sequence: Synthetic oligonucleotide
  Target: LAMA2; (-) strand; PAM type: YTN; PAM sequence: CTC
taaattggggaatagacttc

SEQ ID NO: 266687 - DNA, 20 bp, Artificial Sequence
  Description of Artificial Sequence: Synthetic oligonucleotide
  Target: LAMA2; (-) strand; PAM type: YTN; PAM sequence: CTA
ctctaaattggggaatagac

SEQ ID NO: 266688 - DNA, 20 bp, Artificial Sequence
  Description of Artificial Sequence: Synthetic oligonucleotide
  Target: LAMA2; (-) strand; PAM type: YTN; PAM sequence: CTC
ctactctaaattggggaata

SEQ ID NO: 266689 - DNA, 20 bp, Artificial Sequence
  Description of Artificial Sequence: Synthetic oligonucleotide
  Target: LAMA2; (-) strand; PAM type: YTN; PAM sequence: TTC
tcctactctaaattggggaa

SEQ ID NO: 266690 - DNA, 20 bp, Artificial Sequence
  Description of Artificial Sequence: Synthetic oligonucleotide
  Target: LAMA2; (-) strand; PAM type: YTN; PAM sequence: TTT
ctcctactctaaattgggga

SEQ ID NO: 266691 - DNA, 20 bp, Artificial Sequence
  Description of Artificial Sequence: Synthetic oligonucleotide
  Target: LAMA2; (-) strand; PAM type: YTN; PAM sequence: TTT
tctcctactctaaattgggg

SEQ ID NO: 266692 - DNA, 20 bp, Artificial Sequence
  Description of Artificial Sequence: Synthetic oligonucleotide
  Target: LAMA2; (-) strand; PAM type: YTN; PAM sequence: TTT
ttctcctactctaaattggg

SEQ ID NO: 266693 - DNA, 20 bp, Artificial Sequence
  Description of Artificial Sequence: Synthetic oligonucleotide
  Target: LAMA2; (-) strand; PAM type: YTN; PAM sequence: CTA
tgtaaatttttctcctactc

SEQ ID NO: 266694 - DNA, 20 bp, Artificial Sequence
  Description of Artificial Sequence: Synthetic oligonucleotide
  Target: LAMA2; (-) strand; PAM type: YTN; PAM sequence: CTC
tatgtaaatttttctcctac

SEQ ID NO: 266695 - DNA, 20 bp, Artificial Sequence
  Description of Artificial Sequence: Synthetic oligonucleotide
  Target: LAMA2; (-) strand; PAM type: YTN; PAM sequence: CTG
aatcaatctctatgtaaatt

SEQ ID NO: 266696 - DNA, 20 bp, Artificial Sequence
  Description of Artificial Sequence: Synthetic oligonucleotide
  Target: LAMA2; (-) strand; PAM type: YTN; PAM sequence: TTC
cctgaatcaatctctatgta

SEQ ID NO: 266697 - DNA, 20 bp, Artificial Sequence
  Description of Artificial Sequence: Synthetic oligonucleotide
  Target: LAMA2; (-) strand; PAM type: YTN; PAM sequence: TTT
ccctgaatcaatctctatgt

SEQ ID NO: 266698 - DNA, 20 bp, Artificial Sequence
  Description of Artificial Sequence: Synthetic oligonucleotide
  Target: LAMA2; (-) strand; PAM type: YTN; PAM sequence: TTT
tccctgaatcaatctctatg

SEQ ID NO: 266699 - DNA, 20 bp, Artificial Sequence
  Description of Artificial Sequence: Synthetic oligonucleotide
  Target: LAMA2; (-) strand; PAM type: YTN; PAM sequence: CTT
ttccctgaatcaatctctat

SEQ ID NO: 266700 - DNA, 20 bp, Artificial Sequence
  Description of Artificial Sequence: Synthetic oligonucleotide
  Target: LAMA2; (-) strand; PAM type: YTN; PAM sequence: CTC
ttttccctgaatcaatctct

SEQ ID NO: 266701 - DNA, 20 bp, Artificial Sequence
  Description of Artificial Sequence: Synthetic oligonucleotide
  Target: LAMA2; (-) strand; PAM type: YTN; PAM sequence: TTC
tcttttccctgaatcaatct

SEQ ID NO: 266702 - DNA, 20 bp, Artificial Sequence
  Description of Artificial Sequence: Synthetic oligonucleotide
  Target: LAMA2; (-) strand; PAM type: YTN; PAM sequence: CTA
ttctcttttccctgaatcaa

SEQ ID NO: 266703 - DNA, 20 bp, Artificial Sequence
  Description of Artificial Sequence: Synthetic oligonucleotide
  Target: LAMA2; (-) strand; PAM type: YTN; PAM sequence: TTG
ctattctcttttccctgaat

SEQ ID NO: 266704 - DNA, 20 bp, Artificial Sequence
  Description of Artificial Sequence: Synthetic oligonucleotide
  Target: LAMA2; (-) strand; PAM type: YTN; PAM sequence: CTG
acaataagagttgctattct

SEQ ID NO: 266705 - DNA, 20 bp, Artificial Sequence
  Description of Artificial Sequence: Synthetic oligonucleotide
  Target: LAMA2; (-) strand; PAM type: YTN; PAM sequence: CTA
cactgacaataagagttgct

SEQ ID NO: 266706 - DNA, 20 bp, Artificial Sequence
  Description of Artificial Sequence: Synthetic oligonucleotide
  Target: LAMA2; (-) strand; PAM type: YTN; PAM sequence: CTA
tcgtagctacactgacaata

SEQ ID NO: 266707 - DNA, 20 bp, Artificial Sequence
  Description of Artificial Sequence: Synthetic oligonucleotide
  Target: LAMA2; (-) strand; PAM type: YTN; PAM sequence: CTG
tgctatcgtagctacactga

SEQ ID NO: 266708 - DNA, 20 bp, Artificial Sequence
  Description of Artificial Sequence: Synthetic oligonucleotide
  Target: LAMA2; (-) strand; PAM type: YTN; PAM sequence: CTA
atactgtgctatcgtagcta

SEQ ID NO: 266709 - DNA, 20 bp, Artificial Sequence
  Description of Artificial Sequence: Synthetic oligonucleotide
  Target: LAMA2; (-) strand; PAM type: YTN; PAM sequence: TTG
agaaactaatactgtgctat

SEQ ID NO: 266710 - DNA, 20 bp, Artificial Sequence
  Description of Artificial Sequence: Synthetic oligonucleotide
  Target: LAMA2; (-) strand; PAM type: YTN; PAM sequence: TTT
gagaaactaatactgtgcta

SEQ ID NO: 266711 - DNA, 20 bp, Artificial Sequence
  Description of Artificial Sequence: Synthetic oligonucleotide
  Target: LAMA2; (-) strand; PAM type: YTN; PAM sequence: TTG
atttgagaaactaatactgt

SEQ ID NO: 266712 - DNA, 20 bp, Artificial Sequence
  Description of Artificial Sequence: Synthetic oligonucleotide
  Target: LAMA2; (-) strand; PAM type: YTN; PAM sequence: TTT
gatttgagaaactaatactg

SEQ ID NO: 266713 - DNA, 20 bp, Artificial Sequence
  Description of Artificial Sequence: Synthetic oligonucleotide
  Target: LAMA2; (-) strand; PAM type: YTN; PAM sequence: CTT
tgatttgagaaactaatact

SEQ ID NO: 266714 - DNA, 20 bp, Artificial Sequence
  Description of Artificial Sequence: Synthetic oligonucleotide
  Target: LAMA2; (-) strand; PAM type: YTN; PAM sequence: CTC
tttgatttgagaaactaata

SEQ ID NO: 266715 - DNA, 20 bp, Artificial Sequence
  Description of Artificial Sequence: Synthetic oligonucleotide
  Target: LAMA2; (-) strand; PAM type: YTN; PAM sequence: TTA
aaggaactctttgatttgag

SEQ ID NO: 266716 - DNA, 20 bp, Artificial Sequence
  Description of Artificial Sequence: Synthetic oligonucleotide
  Target: LAMA2; (-) strand; PAM type: YTN; PAM sequence: TTT
aaaggaactctttgatttga

SEQ ID NO: 266717 - DNA, 20 bp, Artificial Sequence
  Description of Artificial Sequence: Synthetic oligonucleotide
  Target: LAMA2; (-) strand; PAM type: YTN; PAM sequence: TTT
taaaggaactctttgatttg

SEQ ID NO: 266718 - DNA, 20 bp, Artificial Sequence
  Description of Artificial Sequence: Synthetic oligonucleotide
  Target: LAMA2; (-) strand; PAM type: YTN; PAM sequence: TTT
ttaaaggaactctttgattt

SEQ ID NO: 266719 - DNA, 20 bp, Artificial Sequence
  Description of Artificial Sequence: Synthetic oligonucleotide
  Target: LAMA2; (-) strand; PAM type: YTN; PAM sequence: TTG
atataaatatttttaaagga

SEQ ID NO: 266720 - DNA, 20 bp, Artificial Sequence
  Description of Artificial Sequence: Synthetic oligonucleotide
  Target: LAMA2; (-) strand; PAM type: YTN; PAM sequence: TTT
gatataaatatttttaaagg

SEQ ID NO: 266721 - DNA, 20 bp, Artificial Sequence
  Description of Artificial Sequence: Synthetic oligonucleotide
  Target: LAMA2; (-) strand; PAM type: YTN; PAM sequence: CTT
tgatataaatatttttaaag

SEQ ID NO: 266722 - DNA, 20 bp, Artificial Sequence
  Description of Artificial Sequence: Synthetic oligonucleotide
  Target: LAMA2; (-) strand; PAM type: YTN; PAM sequence: CTC
agtctttgatataaatattt

SEQ ID NO: 266723 - DNA, 20 bp, Artificial Sequence
  Description of Artificial Sequence: Synthetic oligonucleotide
  Target: LAMA2; (-) strand; PAM type: YTN; PAM sequence: CTG
acagagaactcagtctttga

SEQ ID NO: 266724 - DNA, 20 bp, Artificial Sequence
  Description of Artificial Sequence: Synthetic oligonucleotide
  Target: LAMA2; (-) strand; PAM type: YTN; PAM sequence: TTA
tcactgacagagaactcagt

SEQ ID NO: 266725 - DNA, 20 bp, Artificial Sequence
  Description of Artificial Sequence: Synthetic oligonucleotide
  Target: LAMA2; (-) strand; PAM type: YTN; PAM sequence: TTT
atcactgacagagaactcag

SEQ ID NO: 266726 - DNA, 20 bp, Artificial Sequence
  Description of Artificial Sequence: Synthetic oligonucleotide
  Target: LAMA2; (-) strand; PAM type: YTN; PAM sequence: CTT
tatcactgacagagaactca

SEQ ID NO: 266727 - DNA, 20 bp, Artificial Sequence
  Description of Artificial Sequence: Synthetic oligonucleotide
  Target: LAMA2; (-) strand; PAM type: YTN; PAM sequence: CTC
acacacacactttatcactg

SEQ ID NO: 266728 - DNA, 20 bp, Artificial Sequence
  Description of Artificial Sequence: Synthetic oligonucleotide
  Target: LAMA2; (-) strand; PAM type: YTN; PAM sequence: TTA
cacacacacactcacacaca

SEQ ID NO: 266729 - DNA, 20 bp, Artificial Sequence
  Description of Artificial Sequence: Synthetic oligonucleotide
  Target: LAMA2; (-) strand; PAM type: YTN; PAM sequence: CTT
acacacacacactcacacac

SEQ ID NO: 266730 - DNA, 20 bp, Artificial Sequence
  Description of Artificial Sequence: Synthetic oligonucleotide
  Target: LAMA2; (-) strand; PAM type: YTN; PAM sequence: TTC
ttacacacacacactcacac

SEQ ID NO: 266731 - DNA, 20 bp, Artificial Sequence
  Description of Artificial Sequence: Synthetic oligonucleotide
  Target: LAMA2; (-) strand; PAM type: YTN; PAM sequence: TTT
cttacacacacacactcaca

SEQ ID NO: 266732 - DNA, 20 bp, Artificial Sequence
  Description of Artificial Sequence: Synthetic oligonucleotide
  Target: LAMA2; (-) strand; PAM type: YTN; PAM sequence: CTT
tcttacacacacacactcac

SEQ ID NO: 266733 - DNA, 20 bp, Artificial Sequence
  Description of Artificial Sequence: Synthetic oligonucleotide
  Target: LAMA2; (-) strand; PAM type: YTN; PAM sequence: CTA
tgaacacatatactttctta

SEQ ID NO: 266734 - DNA, 20 bp, Artificial Sequence
  Description of Artificial Sequence: Synthetic oligonucleotide
  Target: LAMA2; (-) strand; PAM type: YTN; PAM sequence: CTA
tgaatgtgtgtctatgaaca

SEQ ID NO: 266735 - DNA, 20 bp, Artificial Sequence
  Description of Artificial Sequence: Synthetic oligonucleotide
  Target: LAMA2; (-) strand; PAM type: YTN; PAM sequence: CTA
gctatgaatgtgtgtctatg

SEQ ID NO: 266736 - DNA, 20 bp, Artificial Sequence
  Description of Artificial Sequence: Synthetic oligonucleotide
  Target: LAMA2; (-) strand; PAM type: YTN; PAM sequence: TTA
tcatacagtccctagctatg

SEQ ID NO: 266737 - DNA, 20 bp, Artificial Sequence
  Description of Artificial Sequence: Synthetic oligonucleotide
  Target: LAMA2; (-) strand; PAM type: YTN; PAM sequence: TTT
atcatacagtccctagctat

SEQ ID NO: 266738 - DNA, 20 bp, Artificial Sequence
  Description of Artificial Sequence: Synthetic oligonucleotide
  Target: LAMA2; (-) strand; PAM type: YTN; PAM sequence: TTA
gaatgtaatttatcatacag

SEQ ID NO: 266739 - DNA, 20 bp, Artificial Sequence
  Description of Artificial Sequence: Synthetic oligonucleotide
  Target: LAMA2; (-) strand; PAM type: YTN; PAM sequence: TTA
gtgatagttagaatgtaatt

SEQ ID NO: 266740 - DNA, 20 bp, Artificial Sequence
  Description of Artificial Sequence: Synthetic oligonucleotide
  Target: LAMA2; (-) strand; PAM type: YTN; PAM sequence: TTT
agtgatagttagaatgtaat

SEQ ID NO: 266741 - DNA, 20 bp, Artificial Sequence
  Description of Artificial Sequence: Synthetic oligonucleotide
  Target: LAMA2; (-) strand; PAM type: YTN; PAM sequence: TTA
atttagtgatagttagaatg

SEQ ID NO: 266742 - DNA, 20 bp, Artificial Sequence
  Description of Artificial Sequence: Synthetic oligonucleotide
  Target: LAMA2; (-) strand; PAM type: YTN; PAM sequence: TTT
aatttagtgatagttagaat

SEQ ID NO: 266743 - DNA, 20 bp, Artificial Sequence
  Description of Artificial Sequence: Synthetic oligonucleotide
  Target: LAMA2; (-) strand; PAM type: YTN; PAM sequence: TTT
taatttagtgatagttagaa

SEQ ID NO: 266744 - DNA, 20 bp, Artificial Sequence
  Description of Artificial Sequence: Synthetic oligonucleotide
  Target: LAMA2; (-) strand; PAM type: YTN; PAM sequence: TTT
ttaatttagtgatagttaga

SEQ ID NO: 266745 - DNA, 20 bp, Artificial Sequence
  Description of Artificial Sequence: Synthetic oligonucleotide
  Target: LAMA2; (-) strand; PAM type: YTN; PAM sequence: TTG
tttttaatttagtgatagtt

SEQ ID NO: 266746 - DNA, 20 bp, Artificial Sequence
  Description of Artificial Sequence: Synthetic oligonucleotide
  Target: LAMA2; (-) strand; PAM type: YTN; PAM sequence: TTT
gtttttaatttagtgatagt

SEQ ID NO: 266747 - DNA, 20 bp, Artificial Sequence
  Description of Artificial Sequence: Synthetic oligonucleotide
  Target: LAMA2; (-) strand; PAM type: YTN; PAM sequence: CTG
taaaggaaaagggagaagaa

SEQ ID NO: 266748 - DNA, 20 bp, Artificial Sequence
  Description of Artificial Sequence: Synthetic oligonucleotide
  Target: LAMA2; (-) strand; PAM type: YTN; PAM sequence: TTC
tgtaaaggaaaagggagaag

SEQ ID NO: 266749 - DNA, 20 bp, Artificial Sequence
  Description of Artificial Sequence: Synthetic oligonucleotide
  Target: LAMA2; (-) strand; PAM type: YTN; PAM sequence: TTG
acaattctgtaaaggaaaag

SEQ ID NO: 266750 - DNA, 20 bp, Artificial Sequence
  Description of Artificial Sequence: Synthetic oligonucleotide
  Target: LAMA2; (-) strand; PAM type: YTN; PAM sequence: TTC
acagaagtcaccagcagtgt

SEQ ID NO: 266751 - DNA, 20 bp, Artificial Sequence
  Description of Artificial Sequence: Synthetic oligonucleotide
  Target: LAMA2; (-) strand; PAM type: YTN; PAM sequence: TTC
catagtatccaagagcacat

SEQ ID NO: 266752 - DNA, 20 bp, Artificial Sequence
  Description of Artificial Sequence: Synthetic oligonucleotide
  Target: LAMA2; (-) strand; PAM type: YTN; PAM sequence: TTG
acaattccatagtatccaag

SEQ ID NO: 266753 - DNA, 20 bp, Artificial Sequence
  Description of Artificial Sequence: Synthetic oligonucleotide
  Target: LAMA2; (-) strand; PAM type: YTN; PAM sequence: CTT
gacaattccatagtatccaa

SEQ ID NO: 266754 - DNA, 20 bp, Artificial Sequence
  Description of Artificial Sequence: Synthetic oligonucleotide
  Target: LAMA2; (-) strand; PAM type: YTN; PAM sequence: TTG
gcaatcccttgacaattcca

SEQ ID NO: 266755 - DNA, 20 bp, Artificial Sequence
  Description of Artificial Sequence: Synthetic oligonucleotide
  Target: LAMA2; (-) strand; PAM type: YTN; PAM sequence: TTT
ggcaatcccttgacaattcc

SEQ ID NO: 266756 - DNA, 20 bp, Artificial Sequence
  Description of Artificial Sequence: Synthetic oligonucleotide
  Target: LAMA2; (-) strand; PAM type: YTN; PAM sequence: CTG
acagtcatttggcaatccct

SEQ ID NO: 266757 - DNA, 20 bp, Artificial Sequence
  Description of Artificial Sequence: Synthetic oligonucleotide
  Target: LAMA2; (-) strand; PAM type: YTN; PAM sequence: TTG
ctgacagtcatttggcaatc

SEQ ID NO: 266758 - DNA, 20 bp, Artificial Sequence
  Description of Artificial Sequence: Synthetic oligonucleotide
  Target: LAMA2; (-) strand; PAM type: YTN; PAM sequence: CTG
gaagaaatcagagggcaggc

SEQ ID NO: 266759 - DNA, 20 bp, Artificial Sequence
  Description of Artificial Sequence: Synthetic oligonucleotide
  Target: LAMA2; (-) strand; PAM type: YTN; PAM sequence: TTA
ctggaagaaatcagagggca

SEQ ID NO: 266760 - DNA, 20 bp, Artificial Sequence
  Description of Artificial Sequence: Synthetic oligonucleotide
  Target: LAMA2; (-) strand; PAM type: YTN; PAM sequence: TTG
ttactggaagaaatcagagg

SEQ ID NO: 266761 - DNA, 20 bp, Artificial Sequence
  Description of Artificial Sequence: Synthetic oligonucleotide
  Target: LAMA2; (-) strand; PAM type: YTN; PAM sequence: CTT
gttactggaagaaatcagag

SEQ ID NO: 266762 - DNA, 20 bp, Artificial Sequence
  Description of Artificial Sequence: Synthetic oligonucleotide
  Target: LAMA2; (-) strand; PAM type: YTN; PAM sequence: TTA
cttgttactggaagaaatca

SEQ ID NO: 266763 - DNA, 20 bp, Artificial Sequence
  Description of Artificial Sequence: Synthetic oligonucleotide
  Target: LAMA2; (-) strand; PAM type: YTN; PAM sequence: CTT
acttgttactggaagaaatc

SEQ ID NO: 266764 - DNA, 20 bp, Artificial Sequence
  Description of Artificial Sequence: Synthetic oligonucleotide
  Target: LAMA2; (-) strand; PAM type: YTN; PAM sequence: CTC
aatcttacttgttactggaa

SEQ ID NO: 266765 - DNA, 20 bp, Artificial Sequence
  Description of Artificial Sequence: Synthetic oligonucleotide
  Target: LAMA2; (-) strand; PAM type: YTN; PAM sequence: TTC
tcaatcttacttgttactgg

SEQ ID NO: 266766 - DNA, 20 bp, Artificial Sequence
  Description of Artificial Sequence: Synthetic oligonucleotide
  Target: LAMA2; (-) strand; PAM type: YTN; PAM sequence: TTT
ctcaatcttacttgttactg

SEQ ID NO: 266767 - DNA, 20 bp, Artificial Sequence
  Description of Artificial Sequence: Synthetic oligonucleotide
  Target: LAMA2; (-) strand; PAM type: YTN; PAM sequence: TTA
tatttctcaatcttacttgt

SEQ ID NO: 266768 - DNA, 20 bp, Artificial Sequence
  Description of Artificial Sequence: Synthetic oligonucleotide
  Target: LAMA2; (-) strand; PAM type: YTN; PAM sequence: TTG
ggaaatatggttatatttct

SEQ ID NO: 266769 - DNA, 20 bp, Artificial Sequence
  Description of Artificial Sequence: Synthetic oligonucleotide
  Target: LAMA2; (-) strand; PAM type: YTN; PAM sequence: CTG
attgggaaatatggttatat

SEQ ID NO: 266770 - DNA, 20 bp, Artificial Sequence
  Description of Artificial Sequence: Synthetic oligonucleotide
  Target: LAMA2; (-) strand; PAM type: YTN; PAM sequence: TTC
tgattgggaaatatggttat

SEQ ID NO: 266771 - DNA, 20 bp, Artificial Sequence
  Description of Artificial Sequence: Synthetic oligonucleotide
  Target: LAMA2; (-) strand; PAM type: YTN; PAM sequence: TTT
ctgattgggaaatatggtta

SEQ ID NO: 266772 - DNA, 20 bp, Artificial Sequence
  Description of Artificial Sequence: Synthetic oligonucleotide
  Target: LAMA2; (-) strand; PAM type: YTN; PAM sequence: CTA
gacagatggcgtttctgatt

SEQ ID NO: 266773 - DNA, 20 bp, Artificial Sequence
  Description of Artificial Sequence: Synthetic oligonucleotide
  Target: LAMA2; (-) strand; PAM type: YTN; PAM sequence: CTA
catggaaaaaatagccaaat

SEQ ID NO: 266774 - DNA, 20 bp, Artificial Sequence
  Description of Artificial Sequence: Synthetic oligonucleotide
  Target: LAMA2; (-) strand; PAM type: YTN; PAM sequence: TTG
tctacatggaaaaaatagcc

SEQ ID NO: 266775 - DNA, 20 bp, Artificial Sequence
  Description of Artificial Sequence: Synthetic oligonucleotide
  Target: LAMA2; (-) strand; PAM type: YTN; PAM sequence: TTT
gtctacatggaaaaaatagc

SEQ ID NO: 266776 - DNA, 20 bp, Artificial Sequence
  Description of Artificial Sequence: Synthetic oligonucleotide
  Target: LAMA2; (-) strand; PAM type: YTN; PAM sequence: TTT
tgtctacatggaaaaaatag

SEQ ID NO: 266777 - DNA, 20 bp, Artificial Sequence
  Description of Artificial Sequence: Synthetic oligonucleotide
  Target: LAMA2; (-) strand; PAM type: YTN; PAM sequence: TTT
ttgtctacatggaaaaaata

SEQ ID NO: 266778 - DNA, 20 bp, Artificial Sequence
  Description of Artificial Sequence: Synthetic oligonucleotide
  Target: LAMA2; (-) strand; PAM type: YTN; PAM sequence: TTG
agatttttgtctacatggaa

SEQ ID NO: 266779 - DNA, 20 bp, Artificial Sequence
  Description of Artificial Sequence: Synthetic oligonucleotide
  Target: LAMA2; (-) strand; PAM type: YTN; PAM sequence: TTA
aattgagatttttgtctaca

SEQ ID NO: 266780 - DNA, 20 bp, Artificial Sequence
  Description of Artificial Sequence: Synthetic oligonucleotide
  Target: LAMA2; (-) strand; PAM type: YTN; PAM sequence: CTT
aaattgagatttttgtctac

SEQ ID NO: 266781 - DNA, 20 bp, Artificial Sequence
  Description of Artificial Sequence: Synthetic oligonucleotide
  Target: LAMA2; (-) strand; PAM type: YTN; PAM sequence: CTA
tcttaaattgagatttttgt

SEQ ID NO: 266782 - DNA, 20 bp, Artificial Sequence
  Description of Artificial Sequence: Synthetic oligonucleotide
  Target: LAMA2; (-) strand; PAM type: YTN; PAM sequence: CTC
tatcttaaattgagattttt

SEQ ID NO: 266783 - DNA, 20 bp, Artificial Sequence
  Description of Artificial Sequence: Synthetic oligonucleotide
  Target: LAMA2; (-) strand; PAM type: YTN; PAM sequence: TTA
aaaatatctctatcttaaat

SEQ ID NO: 266784 - DNA, 20 bp, Artificial Sequence
  Description of Artificial Sequence: Synthetic oligonucleotide
  Target: LAMA2; (-) strand; PAM type: YTN; PAM sequence: TTA
ttaaaaatatctctatctta

SEQ ID NO: 266785 - DNA, 20 bp, Artificial Sequence
  Description of Artificial Sequence: Synthetic oligonucleotide
  Target: LAMA2; (-) strand; PAM type: YTN; PAM sequence: CTA
tattattaaaaatatctcta

SEQ ID NO: 266786 - DNA, 20 bp, Artificial Sequence
  Description of Artificial Sequence: Synthetic oligonucleotide
  Target: LAMA2; (-) strand; PAM type: YTN; PAM sequence: TTC
tatattattaaaaatatctc

SEQ ID NO: 266787 - DNA, 20 bp, Artificial Sequence
  Description of Artificial Sequence: Synthetic oligonucleotide
  Target: LAMA2; (-) strand; PAM type: YTN; PAM sequence: TTT
ctatattattaaaaatatct

SEQ ID NO: 266788 - DNA, 20 bp, Artificial Sequence
  Description of Artificial Sequence: Synthetic oligonucleotide
  Target: LAMA2; (-) strand; PAM type: YTN; PAM sequence: TTG
tcatgtttctatattattaa

SEQ ID NO: 266789 - DNA, 20 bp, Artificial Sequence
  Description of Artificial Sequence: Synthetic oligonucleotide
  Target: LAMA2; (-) strand; PAM type: YTN; PAM sequence: TTT
gtcatgtttctatattatta

SEQ ID NO: 266790 - DNA, 20 bp, Artificial Sequence
  Description of Artificial Sequence: Synthetic oligonucleotide
  Target: LAMA2; (-) strand; PAM type: YTN; PAM sequence: TTT
tgtcatgtttctatattatt

SEQ ID NO: 266791 - DNA, 20 bp, Artificial Sequence
  Description of Artificial Sequence: Synthetic oligonucleotide
  Target: LAMA2; (-) strand; PAM type: YTN; PAM sequence: CTT
ttgtcatgtttctatattat

SEQ ID NO: 266792 - DNA, 20 bp, Artificial Sequence
  Description of Artificial Sequence: Synthetic oligonucleotide
  Target: LAMA2; (-) strand; PAM type: YTN; PAM sequence: CTC
acttttgtcatgtttctata

SEQ ID NO: 266793 - DNA, 20 bp, Artificial Sequence
  Description of Artificial Sequence: Synthetic oligonucleotide
  Target: LAMA2; (-) strand; PAM type: YTN; PAM sequence: TTA
tatactcacttttgtcatgt

SEQ ID NO: 266794 - DNA, 20 bp, Artificial Sequence
  Description of Artificial Sequence: Synthetic oligonucleotide
  Target: LAMA2; (-) strand; PAM type: YTN; PAM sequence: TTC
aaaggaaaaatgaaccatag

SEQ ID NO: 266795 - DNA, 20 bp, Artificial Sequence
  Description of Artificial Sequence: Synthetic oligonucleotide
  Target: LAMA2; (-) strand; PAM type: YTN; PAM sequence: TTT
caaaggaaaaatgaaccata

SEQ ID NO: 266796 - DNA, 20 bp, Artificial Sequence
  Description of Artificial Sequence: Synthetic oligonucleotide
  Target: LAMA2; (-) strand; PAM type: YTN; PAM sequence: TTG
ggacagagtttcaaaggaaa

SEQ ID NO: 266797 - DNA, 20 bp, Artificial Sequence
  Description of Artificial Sequence: Synthetic oligonucleotide
  Target: LAMA2; (-) strand; PAM type: YTN; PAM sequence: CTT
gggacagagtttcaaaggaa

SEQ ID NO: 266798 - DNA, 20 bp, Artificial Sequence
  Description of Artificial Sequence: Synthetic oligonucleotide
  Target: LAMA2; (-) strand; PAM type: YTN; PAM sequence: TTA
cttgggacagagtttcaaag

SEQ ID NO: 266799 - DNA, 20 bp, Artificial Sequence
  Description of Artificial Sequence: Synthetic oligonucleotide
  Target: LAMA2; (-) strand; PAM type: YTN; PAM sequence: TTT
acttgggacagagtttcaaa

SEQ ID NO: 266800 - DNA, 20 bp, Artificial Sequence
  Description of Artificial Sequence: Synthetic oligonucleotide
  Target: LAMA2; (-) strand; PAM type: YTN; PAM sequence: TTA
tttacttgggacagagtttc

SEQ ID NO: 266801 - DNA, 20 bp, Artificial Sequence
  Description of Artificial Sequence: Synthetic oligonucleotide
  Target: LAMA2; (-) strand; PAM type: YTN; PAM sequence: TTA
ataagtattatttacttggg

SEQ ID NO: 266802 - DNA, 20 bp, Artificial Sequence
  Description of Artificial Sequence: Synthetic oligonucleotide
  Target: LAMA2; (-) strand; PAM type: YTN; PAM sequence: TTA
attaataagtattatttact

SEQ ID NO: 266803 - DNA, 20 bp, Artificial Sequence
  Description of Artificial Sequence: Synthetic oligonucleotide
  Target: LAMA2; (-) strand; PAM type: YTN; PAM sequence: TTT
aattaataagtattatttac

SEQ ID NO: 266804 - DNA, 20 bp, Artificial Sequence
  Description of Artificial Sequence: Synthetic oligonucleotide
  Target: LAMA2; (-) strand; PAM type: YTN; PAM sequence: TTT
taattaataagtattattta

SEQ ID NO: 266805 - DNA, 20 bp, Artificial Sequence
  Description of Artificial Sequence: Synthetic oligonucleotide
  Target: LAMA2; (-) strand; PAM type: YTN; PAM sequence: TTC
aattttaattaataagtatt

SEQ ID NO: 266806 - DNA, 20 bp, Artificial Sequence
  Description of Artificial Sequence: Synthetic oligonucleotide
  Target: LAMA2; (-) strand; PAM type: YTN; PAM sequence: CTT
caattttaattaataagtat

SEQ ID NO: 266807 - DNA, 20 bp, Artificial Sequence
  Description of Artificial Sequence: Synthetic oligonucleotide
  Target: LAMA2; (-) strand; PAM type: YTN; PAM sequence: TTG
gtacttcaattttaattaat

SEQ ID NO: 266808 - DNA, 20 bp, Artificial Sequence
  Description of Artificial Sequence: Synthetic oligonucleotide
  Target: LAMA2; (-) strand; PAM type: YTN; PAM sequence: TTA
atattggtacttcaatttta

SEQ ID NO: 266809 - DNA, 20 bp, Artificial Sequence
  Description of Artificial Sequence: Synthetic oligonucleotide
  Target: LAMA2; (-) strand; PAM type: YTN; PAM sequence: TTA
cattaatattggtacttcaa

SEQ ID NO: 266810 - DNA, 20 bp, Artificial Sequence
  Description of Artificial Sequence: Synthetic oligonucleotide
  Target: LAMA2; (-) strand; PAM type: YTN; PAM sequence: CTT
acattaatattggtacttca

SEQ ID NO: 266811 - DNA, 20 bp, Artificial Sequence
  Description of Artificial Sequence: Synthetic oligonucleotide
  Target: LAMA2; (-) strand; PAM type: YTN; PAM sequence: TTA
taaatatgtcttacattaat

SEQ ID NO: 266812 - DNA, 20 bp, Artificial Sequence
  Description of Artificial Sequence: Synthetic oligonucleotide
  Target: LAMA2; (-) strand; PAM type: YTN; PAM sequence: TTT
ataaatatgtcttacattaa

SEQ ID NO: 266813 - DNA, 20 bp, Artificial Sequence
  Description of Artificial Sequence: Synthetic oligonucleotide
  Target: LAMA2; (-) strand; PAM type: YTN; PAM sequence: TTT
tataaatatgtcttacatta

SEQ ID NO: 266814 - DNA, 20 bp, Artificial Sequence
  Description of Artificial Sequence: Synthetic oligonucleotide
  Target: LAMA2; (-) strand; PAM type: YTN; PAM sequence: TTG
ttttataaatatgtcttaca

SEQ ID NO: 266815 - DNA, 20 bp, Artificial Sequence
  Description of Artificial Sequence: Synthetic oligonucleotide
  Target: LAMA2; (-) strand; PAM type: YTN; PAM sequence: TTT
gttttataaatatgtcttac

SEQ ID NO: 266816 - DNA, 20 bp, Artificial Sequence
  Description of Artificial Sequence: Synthetic oligonucleotide
  Target: LAMA2; (-) strand; PAM type: YTN; PAM sequence: TTG
tatatatatatcatttgttt

SEQ ID NO: 266817 - DNA, 20 bp, Artificial Sequence
  Description of Artificial Sequence: Synthetic oligonucleotide
  Target: LAMA2; (-) strand; PAM type: YTN; PAM sequence: TTT
gtatatatatatcatttgtt

SEQ ID NO: 266818 - DNA, 20 bp, Artificial Sequence
  Description of Artificial Sequence: Synthetic oligonucleotide
  Target: LAMA2; (-) strand; PAM type: YTN; PAM sequence: TTA
tgaaaccatgcatatttgta

SEQ ID NO: 266819 - DNA, 20 bp, Artificial Sequence
  Description of Artificial Sequence: Synthetic oligonucleotide
  Target: LAMA2; (-) strand; PAM type: YTN; PAM sequence: TTT
atgaaaccatgcatatttgt

SEQ ID NO: 266820 - DNA, 20 bp, Artificial Sequence
  Description of Artificial Sequence: Synthetic oligonucleotide
  Target: LAMA2; (-) strand; PAM type: YTN; PAM sequence: CTG
gtatatttatgaaaccatgc

SEQ ID NO: 266821 - DNA, 20 bp, Artificial Sequence
  Description of Artificial Sequence: Synthetic oligonucleotide
  Target: LAMA2; (-) strand; PAM type: YTN; PAM sequence: TTA
gactggtatatttatgaaac

SEQ ID NO: 266822 - DNA, 20 bp, Artificial Sequence
  Description of Artificial Sequence: Synthetic oligonucleotide
  Target: LAMA2; (-) strand; PAM type: YTN; PAM sequence: CTA
tatgcaagcattagactggt

SEQ ID NO: 266823 - DNA, 20 bp, Artificial Sequence
  Description of Artificial Sequence: Synthetic oligonucleotide
  Target: LAMA2; (-) strand; PAM type: YTN; PAM sequence: TTA
tgggcagagctatatgcaag

SEQ ID NO: 266824 - DNA, 20 bp, Artificial Sequence
  Description of Artificial Sequence: Synthetic oligonucleotide
  Target: LAMA2; (-) strand; PAM type: YTN; PAM sequence: TTC
atagatgatattatgggcag

SEQ ID NO: 266825 - DNA, 20 bp, Artificial Sequence
  Description of Artificial Sequence: Synthetic oligonucleotide
  Target: LAMA2; (-) strand; PAM type: YTN; PAM sequence: CTT
catagatgatattatgggca

SEQ ID NO: 266826 - DNA, 20 bp, Artificial Sequence
  Description of Artificial Sequence: Synthetic oligonucleotide
  Target: LAMA2; (-) strand; PAM type: YTN; PAM sequence: TTA
tataatatgcacccgaacaa

SEQ ID NO: 266827 - DNA, 20 bp, Artificial Sequence
  Description of Artificial Sequence: Synthetic oligonucleotide
  Target: LAMA2; (-) strand; PAM type: YTN; PAM sequence: TTA
aacacataaaataaatggaa

SEQ ID NO: 266828 - DNA, 20 bp, Artificial Sequence
  Description of Artificial Sequence: Synthetic oligonucleotide
  Target: LAMA2; (-) strand; PAM type: YTN; PAM sequence: TTG
aattaaacacataaaataaa

SEQ ID NO: 266829 - DNA, 20 bp, Artificial Sequence
  Description of Artificial Sequence: Synthetic oligonucleotide
  Target: LAMA2; (-) strand; PAM type: YTN; PAM sequence: CTT
gaattaaacacataaaataa

SEQ ID NO: 266830 - DNA, 20 bp, Artificial Sequence
  Description of Artificial Sequence: Synthetic oligonucleotide
  Target: LAMA2; (-) strand; PAM type: YTN; PAM sequence: TTC
ccaatcttgaattaaacaca

SEQ ID NO: 266831 - DNA, 20 bp, Artificial Sequence
  Description of Artificial Sequence: Synthetic oligonucleotide
  Target: LAMA2; (-) strand; PAM type: YTN; PAM sequence: TTT
cccaatcttgaattaaacac

SEQ ID NO: 266832 - DNA, 20 bp, Artificial Sequence
  Description of Artificial Sequence: Synthetic oligonucleotide
  Target: LAMA2; (-) strand; PAM type: YTN; PAM sequence: TTA
tttcccaatcttgaattaaa

SEQ ID NO: 266833 - DNA, 20 bp, Artificial Sequence
  Description of Artificial Sequence: Synthetic oligonucleotide
  Target: LAMA2; (-) strand; PAM type: YTN; PAM sequence: TTG
ataattatttcccaatcttg

SEQ ID NO: 266834 - DNA, 20 bp, Artificial Sequence
  Description of Artificial Sequence: Synthetic oligonucleotide
  Target: LAMA2; (-) strand; PAM type: YTN; PAM sequence: CTT
gataattatttcccaatctt

SEQ ID NO: 266835 - DNA, 20 bp, Artificial Sequence
  Description of Artificial Sequence: Synthetic oligonucleotide
  Target: LAMA2; (-) strand; PAM type: YTN; PAM sequence: TTC
ttgataattatttcccaatc

SEQ ID NO: 266836 - DNA, 20 bp, Artificial Sequence
  Description of Artificial Sequence: Synthetic oligonucleotide
  Target: LAMA2; (-) strand; PAM type: YTN; PAM sequence: TTT
cttgataattatttcccaat

SEQ ID NO: 266837 - DNA, 20 bp, Artificial Sequence
  Description of Artificial Sequence: Synthetic oligonucleotide
  Target: LAMA2; (-) strand; PAM type: YTN; PAM sequence: TTT
tcttgataattatttcccaa

SEQ ID NO: 266838 - DNA, 20 bp, Artificial Sequence
  Description of Artificial Sequence: Synthetic oligonucleotide
  Target: LAMA2; (-) strand; PAM type: YTN; PAM sequence: TTC
aatgttttcttgataattat

SEQ ID NO: 266839 - DNA, 20 bp, Artificial Sequence
  Description of Artificial Sequence: Synthetic oligonucleotide
  Target: LAMA2; (-) strand; PAM type: YTN; PAM sequence: TTT
caatgttttcttgataatta

SEQ ID NO: 266840 - DNA, 20 bp, Artificial Sequence
  Description of Artificial Sequence: Synthetic oligonucleotide
  Target: LAMA2; (-) strand; PAM type: YTN; PAM sequence: TTT
tcaatgttttcttgataatt

SEQ ID NO: 266841 - DNA, 20 bp, Artificial Sequence
  Description of Artificial Sequence: Synthetic oligonucleotide
  Target: LAMA2; (-) strand; PAM type: YTN; PAM sequence: TTT
ttcaatgttttcttgataat

SEQ ID NO: 266842 - DNA, 20 bp, Artificial Sequence
  Description of Artificial Sequence: Synthetic oligonucleotide
  Target: LAMA2; (-) strand; PAM type: YTN; PAM sequence: TTG
tacaatttttcaatgttttc

SEQ ID NO: 266843 - DNA, 20 bp, Artificial Sequence
  Description of Artificial Sequence: Synthetic oligonucleotide
  Target: LAMA2; (-) strand; PAM type: YTN; PAM sequence: TTA
attgtacaatttttcaatgt

SEQ ID NO: 266844 - DNA, 20 bp, Artificial Sequence
  Description of Artificial Sequence: Synthetic oligonucleotide
  Target: LAMA2; (-) strand; PAM type: YTN; PAM sequence: TTT
aattgtacaatttttcaatg

SEQ ID NO: 266845 - DNA, 20 bp, Artificial Sequence
  Description of Artificial Sequence: Synthetic oligonucleotide
  Target: LAMA2; (-) strand; PAM type: YTN; PAM sequence: CTT
taattgtacaatttttcaat

SEQ ID NO: 266846 - DNA, 20 bp, Artificial Sequence
  Description of Artificial Sequence: Synthetic oligonucleotide
  Target: LAMA2; (-) strand; PAM type: YTN; PAM sequence: CTG
ctttaattgtacaatttttc

SEQ ID NO: 266847 - DNA, 20 bp, Artificial Sequence
  Description of Artificial Sequence: Synthetic oligonucleotide
  Target: LAMA2; (-) strand; PAM type: YTN; PAM sequence: TTG
gagcataacaataagtcacc

SEQ ID NO: 266848 - DNA, 20 bp, Artificial Sequence
  Description of Artificial Sequence: Synthetic oligonucleotide
  Target: LAMA2; (-) strand; PAM type: YTN; PAM sequence: TTT
ggagcataacaataagtcac

SEQ ID NO: 266849 - DNA, 20 bp, Artificial Sequence
  Description of Artificial Sequence: Synthetic oligonucleotide
  Target: LAMA2; (-) strand; PAM type: YTN; PAM sequence: TTT
tggagcataacaataagtca

SEQ ID NO: 266850 - DNA, 20 bp, Artificial Sequence
  Description of Artificial Sequence: Synthetic oligonucleotide
  Target: LAMA2; (-) strand; PAM type: YTN; PAM sequence: TTT
ttggagcataacaataagtc

SEQ ID NO: 266851 - DNA, 20 bp, Artificial Sequence
  Description of Artificial Sequence: Synthetic oligonucleotide
  Target: LAMA2; (-) strand; PAM type: YTN; PAM sequence: TTT
tttggagcataacaataagt

SEQ ID NO: 266852 - DNA, 20 bp, Artificial Sequence
  Description of Artificial Sequence: Synthetic oligonucleotide
  Target: LAMA2; (-) strand; PAM type: YTN; PAM sequence: TTC
cgggagatgacattttttgg

SEQ ID NO: 266853 - DNA, 20 bp, Artificial Sequence
  Description of Artificial Sequence: Synthetic oligonucleotide
  Target: LAMA2; (-) strand; PAM type: YTN; PAM sequence: CTG
tgattccgggagatgacatt

SEQ ID NO: 266854 - DNA, 20 bp, Artificial Sequence
  Description of Artificial Sequence: Synthetic oligonucleotide
  Target: LAMA2; (-) strand; PAM type: YTN; PAM sequence: TTA
agaaaaaggaggctgtgatt

SEQ ID NO: 266855 - DNA, 20 bp, Artificial Sequence
  Description of Artificial Sequence: Synthetic oligonucleotide
  Target: LAMA2; (-) strand; PAM type: YTN; PAM sequence: CTT
aagaaaaaggaggctgtgat

SEQ ID NO: 266856 - DNA, 20 bp, Artificial Sequence
  Description of Artificial Sequence: Synthetic oligonucleotide
  Target: LAMA2; (-) strand; PAM type: YTN; PAM sequence: CTC
agaccatcttaagaaaaagg

SEQ ID NO: 266857 - DNA, 20 bp, Artificial Sequence
  Description of Artificial Sequence: Synthetic oligonucleotide
  Target: LAMA2; (-) strand; PAM type: YTN; PAM sequence: TTC
catggtaccaagctcagacc

SEQ ID NO: 266858 - DNA, 20 bp, Artificial Sequence
  Description of Artificial Sequence: Synthetic oligonucleotide
  Target: LAMA2; (-) strand; PAM type: YTN; PAM sequence: TTT
ccatggtaccaagctcagac

SEQ ID NO: 266859 - DNA, 20 bp, Artificial Sequence
  Description of Artificial Sequence: Synthetic oligonucleotide
  Target: LAMA2; (-) strand; PAM type: YTN; PAM sequence: CTG
tgtttccatggtaccaagct

SEQ ID NO: 266860 - DNA, 20 bp, Artificial Sequence
  Description of Artificial Sequence: Synthetic oligonucleotide
  Target: LAMA2; (-) strand; PAM type: YTN; PAM sequence: TTA
gggctgtgtttccatggtac

SEQ ID NO: 266861 - DNA, 20 bp, Artificial Sequence
  Description of Artificial Sequence: Synthetic oligonucleotide
  Target: LAMA2; (-) strand; PAM type: YTN; PAM sequence: CTT
agggctgtgtttccatggta

SEQ ID NO: 266862 - DNA, 20 bp, Artificial Sequence
  Description of Artificial Sequence: Synthetic oligonucleotide
  Target: LAMA2; (-) strand; PAM type: YTN; PAM sequence: TTC
ttagggctgtgtttccatgg

SEQ ID NO: 266863 - DNA, 20 bp, Artificial Sequence
  Description of Artificial Sequence: Synthetic oligonucleotide
  Target: LAMA2; (-) strand; PAM type: YTN; PAM sequence: CTT
cttagggctgtgtttccatg

SEQ ID NO: 266864 - DNA, 20 bp, Artificial Sequence
  Description of Artificial Sequence: Synthetic oligonucleotide
  Target: LAMA2; (-) strand; PAM type: YTN; PAM sequence: TTC
ttcttagggctgtgtttcca

SEQ ID NO: 266865 - DNA, 20 bp, Artificial Sequence
  Description of Artificial Sequence: Synthetic oligonucleotide
  Target: LAMA2; (-) strand; PAM type: YTN; PAM sequence: TTT
cttcttagggctgtgtttcc

SEQ ID NO: 266866 - DNA, 20 bp, Artificial Sequence
  Description of Artificial Sequence: Synthetic oligonucleotide
  Target: LAMA2; (-) strand; PAM type: YTN; PAM sequence: TTG
tttcttcttagggctgtgtt

SEQ ID NO: 266867 - DNA, 20 bp, Artificial Sequence
  Description of Artificial Sequence: Synthetic oligonucleotide
  Target: LAMA2; (-) strand; PAM type: YTN; PAM sequence: TTT
gtttcttcttagggctgtgt

SEQ ID NO: 266868 - DNA, 20 bp, Artificial Sequence
  Description of Artificial Sequence: Synthetic oligonucleotide
  Target: LAMA2; (-) strand; PAM type: YTN; PAM sequence: TTT
tgtttcttcttagggctgtg

SEQ ID NO: 266869 - DNA, 20 bp, Artificial Sequence
  Description of Artificial Sequence: Synthetic oligonucleotide
  Target: LAMA2; (-) strand; PAM type: YTN; PAM sequence: CTT
ttgtttcttcttagggctgt

SEQ ID NO: 266870 - DNA, 20 bp, Artificial Sequence
  Description of Artificial Sequence: Synthetic oligonucleotide
  Target: LAMA2; (-) strand; PAM type: YTN; PAM sequence: TTC
cagcttttgtttcttcttag

SEQ ID NO: 266871 - DNA, 20 bp, Artificial Sequence
  Description of Artificial Sequence: Synthetic oligonucleotide
  Target: LAMA2; (-) strand; PAM type: YTN; PAM sequence: CTG
aaataagatattccagcttt

SEQ ID NO: 266872 - DNA, 20 bp, Artificial Sequence
  Description of Artificial Sequence: Synthetic oligonucleotide
  Target: LAMA2; (-) strand; PAM type: YTN; PAM sequence: TTC
agacagcactgaaataagat

SEQ ID NO: 266873 - DNA, 20 bp, Artificial Sequence
  Description of Artificial Sequence: Synthetic oligonucleotide
  Target: LAMA2; (-) strand; PAM type: YTN; PAM sequence: TTC
atcaatgtataaaccagtgc

SEQ ID NO: 266874 - DNA, 20 bp, Artificial Sequence
  Description of Artificial Sequence: Synthetic oligonucleotide
  Target: LAMA2; (-) strand; PAM type: YTN; PAM sequence: TTT
catcaatgtataaaccagtg

SEQ ID NO: 266875 - DNA, 20 bp, Artificial Sequence
  Description of Artificial Sequence: Synthetic oligonucleotide
  Target: LAMA2; (-) strand; PAM type: YTN; PAM sequence: TTT
tcatcaatgtataaaccagt

SEQ ID NO: 266876 - DNA, 20 bp, Artificial Sequence
  Description of Artificial Sequence: Synthetic oligonucleotide
  Target: LAMA2; (-) strand; PAM type: YTN; PAM sequence: CTA
gggttttcatcaatgtataa

SEQ ID NO: 266877 - DNA, 20 bp, Artificial Sequence
  Description of Artificial Sequence: Synthetic oligonucleotide
  Target: LAMA2; (-) strand; PAM type: YTN; PAM sequence: TTA
acagaaagtgcaggtagtgt

SEQ ID NO: 266878 - DNA, 20 bp, Artificial Sequence
  Description of Artificial Sequence: Synthetic oligonucleotide
  Target: LAMA2; (-) strand; PAM type: YTN; PAM sequence: CTT
aacagaaagtgcaggtagtg

SEQ ID NO: 266879 - DNA, 20 bp, Artificial Sequence
  Description of Artificial Sequence: Synthetic oligonucleotide
  Target: LAMA2; (-) strand; PAM type: YTN; PAM sequence: CTA
taaatcacttaacagaaagt

SEQ ID NO: 266880 - DNA, 20 bp, Artificial Sequence
  Description of Artificial Sequence: Synthetic oligonucleotide
  Target: LAMA2; (-) strand; PAM type: YTN; PAM sequence: CTG
aagtctataaatcacttaac

SEQ ID NO: 266881 - DNA, 20 bp, Artificial Sequence
  Description of Artificial Sequence: Synthetic oligonucleotide
  Target: LAMA2; (-) strand; PAM type: YTN; PAM sequence: TTA
ctgaagtctataaatcactt

SEQ ID NO: 266882 - DNA, 20 bp, Artificial Sequence
  Description of Artificial Sequence: Synthetic oligonucleotide
  Target: LAMA2; (-) strand; PAM type: YTN; PAM sequence: CTT
actgaagtctataaatcact

SEQ ID NO: 266883 - DNA, 20 bp, Artificial Sequence
  Description of Artificial Sequence: Synthetic oligonucleotide
  Target: LAMA2; (-) strand; PAM type: YTN; PAM sequence: CTG
ccttactgaagtctataaat

SEQ ID NO: 266884 - DNA, 20 bp, Artificial Sequence
  Description of Artificial Sequence: Synthetic oligonucleotide
  Target: LAMA2; (-) strand; PAM type: YTN; PAM sequence: CTA
ccctgccttactgaagtcta

SEQ ID NO: 266885 - DNA, 20 bp, Artificial Sequence
  Description of Artificial Sequence: Synthetic oligonucleotide
  Target: LAMA2; (-) strand; PAM type: YTN; PAM sequence: TTA
gagtaaaactaccctgcctt

SEQ ID NO: 266886 - DNA, 20 bp, Artificial Sequence
  Description of Artificial Sequence: Synthetic oligonucleotide
  Target: LAMA2; (-) strand; PAM type: YTN; PAM sequence: CTT
agagtaaaactaccctgcct

SEQ ID NO: 266887 - DNA, 20 bp, Artificial Sequence
  Description of Artificial Sequence: Synthetic oligonucleotide
  Target: LAMA2; (-) strand; PAM type: YTN; PAM sequence: TTC
ttagagtaaaactaccctgc

SEQ ID NO: 266888 - DNA, 20 bp, Artificial Sequence
  Description of Artificial Sequence: Synthetic oligonucleotide
  Target: LAMA2; (-) strand; PAM type: YTN; PAM sequence: TTC
aaaagcaaattcttagagta

SEQ ID NO: 266889 - DNA, 20 bp, Artificial Sequence
  Description of Artificial Sequence: Synthetic oligonucleotide
  Target: LAMA2; (-) strand; PAM type: YTN; PAM sequence: TTT
caaaagcaaattcttagagt

SEQ ID NO: 266890 - DNA, 20 bp, Artificial Sequence
  Description of Artificial Sequence: Synthetic oligonucleotide
  Target: LAMA2; (-) strand; PAM type: YTN; PAM sequence: TTT
tcaaaagcaaattcttagag

SEQ ID NO: 266891 - DNA, 20 bp, Artificial Sequence
  Description of Artificial Sequence: Synthetic oligonucleotide
  Target: LAMA2; (-) strand; PAM type: YTN; PAM sequence: TTA
ttttcaaaagcaaattctta

SEQ ID NO: 266892 - DNA, 20 bp, Artificial Sequence
  Description of Artificial Sequence: Synthetic oligonucleotide
  Target: LAMA2; (-) strand; PAM type: YTN; PAM sequence: CTG
ccatacattattttcaaaag

SEQ ID NO: 266893 - DNA, 20 bp, Artificial Sequence
  Description of Artificial Sequence: Synthetic oligonucleotide
  Target: LAMA2; (-) strand; PAM type: YTN; PAM sequence: CTG
aacaaactgccatacattat

SEQ ID NO: 266894 - DNA, 20 bp, Artificial Sequence
  Description of Artificial Sequence: Synthetic oligonucleotide
  Target: LAMA2; (-) strand; PAM type: YTN; PAM sequence: TTC
tgaacaaactgccatacatt

SEQ ID NO: 266895 - DNA, 20 bp, Artificial Sequence
  Description of Artificial Sequence: Synthetic oligonucleotide
  Target: LAMA2; (-) strand; PAM type: YTN; PAM sequence: CTA
attctgaacaaactgccata

SEQ ID NO: 266896 - DNA, 20 bp, Artificial Sequence
  Description of Artificial Sequence: Synthetic oligonucleotide
  Target: LAMA2; (-) strand; PAM type: YTN; PAM sequence: TTC
taattctgaacaaactgcca

SEQ ID NO: 266897 - DNA, 20 bp, Artificial Sequence
  Description of Artificial Sequence: Synthetic oligonucleotide
  Target: LAMA2; (-) strand; PAM type: YTN; PAM sequence: CTC
aagataaagtgtccagaatt

SEQ ID NO: 266898 - DNA, 20 bp, Artificial Sequence
  Description of Artificial Sequence: Synthetic oligonucleotide
  Target: LAMA2; (-) strand; PAM type: YTN; PAM sequence: TTA
acactcaagataaagtgtcc

SEQ ID NO: 266899 - DNA, 20 bp, Artificial Sequence
  Description of Artificial Sequence: Synthetic oligonucleotide
  Target: LAMA2; (-) strand; PAM type: YTN; PAM sequence: TTT
aacactcaagataaagtgtc

SEQ ID NO: 266900 - DNA, 20 bp, Artificial Sequence
  Description of Artificial Sequence: Synthetic oligonucleotide
  Target: LAMA2; (-) strand; PAM type: YTN; PAM sequence: CTG
tttaacactcaagataaagt

SEQ ID NO: 266901 - DNA, 20 bp, Artificial Sequence
  Description of Artificial Sequence: Synthetic oligonucleotide
  Target: LAMA2; (-) strand; PAM type: YTN; PAM sequence: CTG
tggctgtttaacactcaaga

SEQ ID NO: 266902 - DNA, 20 bp, Artificial Sequence
  Description of Artificial Sequence: Synthetic oligonucleotide
  Target: LAMA2; (-) strand; PAM type: YTN; PAM sequence: CTC
tgtggctgtttaacactcaa

SEQ ID NO: 266903 - DNA, 20 bp, Artificial Sequence
  Description of Artificial Sequence: Synthetic oligonucleotide
  Target: LAMA2; (-) strand; PAM type: YTN; PAM sequence: TTG
ctctgtggctgtttaacact

SEQ ID NO: 266904 - DNA, 20 bp, Artificial Sequence
  Description of Artificial Sequence: Synthetic oligonucleotide
  Target: LAMA2; (-) strand; PAM type: YTN; PAM sequence: TTG
tccaaattgctctgtggctg

SEQ ID NO: 266905 - DNA, 20 bp, Artificial Sequence
  Description of Artificial Sequence: Synthetic oligonucleotide
  Target: LAMA2; (-) strand; PAM type: YTN; PAM sequence: TTA
agaagaaagtgagtaggcac

SEQ ID NO: 266906 - DNA, 20 bp, Artificial Sequence
  Description of Artificial Sequence: Synthetic oligonucleotide
  Target: LAMA2; (-) strand; PAM type: YTN; PAM sequence: TTC
agaatgcacacaaagccgaa

SEQ ID NO: 266907 - DNA, 20 bp, Artificial Sequence
  Description of Artificial Sequence: Synthetic oligonucleotide
  Target: LAMA2; (-) strand; PAM type: YTN; PAM sequence: TTT
cagaatgcacacaaagccga

SEQ ID NO: 266908 - DNA, 20 bp, Artificial Sequence
  Description of Artificial Sequence: Synthetic oligonucleotide
  Target: LAMA2; (-) strand; PAM type: YTN; PAM sequence: TTT
tcagaatgcacacaaagccg

SEQ ID NO: 266909 - DNA, 20 bp, Artificial Sequence
  Description of Artificial Sequence: Synthetic oligonucleotide
  Target: LAMA2; (-) strand; PAM type: YTN; PAM sequence: TTA
caggaaatgttttcagaatg

SEQ ID NO: 266910 - DNA, 20 bp, Artificial Sequence
  Description of Artificial Sequence: Synthetic oligonucleotide
  Target: LAMA2; (-) strand; PAM type: YTN; PAM sequence: TTT
acaggaaatgttttcagaat

SEQ ID NO: 266911 - DNA, 20 bp, Artificial Sequence
  Description of Artificial Sequence: Synthetic oligonucleotide
  Target: LAMA2; (-) strand; PAM type: YTN; PAM sequence: TTC
agaggaaaaggagatgattt

SEQ ID NO: 266912 - DNA, 20 bp, Artificial Sequence
  Description of Artificial Sequence: Synthetic oligonucleotide
  Target: LAMA2; (-) strand; PAM type: YTN; PAM sequence: TTT
cagaggaaaaggagatgatt

SEQ ID NO: 266913 - DNA, 20 bp, Artificial Sequence
  Description of Artificial Sequence: Synthetic oligonucleotide
  Target: LAMA2; (-) strand; PAM type: YTN; PAM sequence: CTT
tcagaggaaaaggagatgat

SEQ ID NO: 266914 - DNA, 20 bp, Artificial Sequence
  Description of Artificial Sequence: Synthetic oligonucleotide
  Target: LAMA2; (-) strand; PAM type: YTN; PAM sequence: TTC
cagccaacaaaaaagaggag

SEQ ID NO: 266915 - DNA, 20 bp, Artificial Sequence
  Description of Artificial Sequence: Synthetic oligonucleotide
  Target: LAMA2; (-) strand; PAM type: YTN; PAM sequence: TTG
tgattccagccaacaaaaaa

SEQ ID NO: 266916 - DNA, 20 bp, Artificial Sequence
  Description of Artificial Sequence: Synthetic oligonucleotide
  Target: LAMA2; (-) strand; PAM type: YTN; PAM sequence: CTT
gtgattccagccaacaaaaa

SEQ ID NO: 266917 - DNA, 20 bp, Artificial Sequence
  Description of Artificial Sequence: Synthetic oligonucleotide
  Target: LAMA2; (-) strand; PAM type: YTN; PAM sequence: CTG
taaaaggcttgtgattccag

SEQ ID NO: 266918 - DNA, 20 bp, Artificial Sequence
  Description of Artificial Sequence: Synthetic oligonucleotide
  Target: LAMA2; (-) strand; PAM type: YTN; PAM sequence: TTG
acaccctgtaaaaggcttgt

SEQ ID NO: 266919 - DNA, 20 bp, Artificial Sequence
  Description of Artificial Sequence: Synthetic oligonucleotide
  Target: LAMA2; (-) strand; PAM type: YTN; PAM sequence: TTT
gacaccctgtaaaaggcttg

SEQ ID NO: 266920 - DNA, 20 bp, Artificial Sequence
  Description of Artificial Sequence: Synthetic oligonucleotide
  Target: LAMA2; (-) strand; PAM type: YTN; PAM sequence: TTG
acatttgacaccctgtaaaa

SEQ ID NO: 266921 - DNA, 20 bp, Artificial Sequence
  Description of Artificial Sequence: Synthetic oligonucleotide
  Target: LAMA2; (-) strand; PAM type: YTN; PAM sequence: CTA
aaaattgacatttgacaccc

SEQ ID NO: 266922 - DNA, 20 bp, Artificial Sequence
  Description of Artificial Sequence: Synthetic oligonucleotide
  Target: LAMA2; (-) strand; PAM type: YTN; PAM sequence: TTA
cctaaaaattgacatttgac

SEQ ID NO: 266923 - DNA, 20 bp, Artificial Sequence
  Description of Artificial Sequence: Synthetic oligonucleotide
  Target: LAMA2; (-) strand; PAM type: YTN; PAM sequence: CTT
acctaaaaattgacatttga

SEQ ID NO: 266924 - DNA, 20 bp, Artificial Sequence
  Description of Artificial Sequence: Synthetic oligonucleotide
  Target: LAMA2; (-) strand; PAM type: YTN; PAM sequence: TTC
aatatccagcttacctaaaa

SEQ ID NO: 266925 - DNA, 20 bp, Artificial Sequence
  Description of Artificial Sequence: Synthetic oligonucleotide
  Target: LAMA2; (-) strand; PAM type: YTN; PAM sequence: CTT
caatatccagcttacctaaa

SEQ ID NO: 266926 - DNA, 20 bp, Artificial Sequence
  Description of Artificial Sequence: Synthetic oligonucleotide
  Target: LAMA2; (-) strand; PAM type: YTN; PAM sequence: CTC
ttcaatatccagcttaccta

SEQ ID NO: 266927 - DNA, 20 bp, Artificial Sequence
  Description of Artificial Sequence: Synthetic oligonucleotide
  Target: LAMA2; (-) strand; PAM type: YTN; PAM sequence: TTA
tcctcttcaatatccagctt

SEQ ID NO: 266928 - DNA, 20 bp, Artificial Sequence
  Description of Artificial Sequence: Synthetic oligonucleotide
  Target: LAMA2; (-) strand; PAM type: YTN; PAM sequence: CTG
gatgaacaataagaccatgt

SEQ ID NO: 266929 - DNA, 20 bp, Artificial Sequence
  Description of Artificial Sequence: Synthetic oligonucleotide
  Target: LAMA2; (-) strand; PAM type: YTN; PAM sequence: TTG
gtccctggatgaacaataag

SEQ ID NO: 266930 - DNA, 20 bp, Artificial Sequence
  Description of Artificial Sequence: Synthetic oligonucleotide
  Target: LAMA2; (-) strand; PAM type: YTN; PAM sequence: CTT
ggtccctggatgaacaataa

SEQ ID NO: 266931 - DNA, 20 bp, Artificial Sequence
  Description of Artificial Sequence: Synthetic oligonucleotide
  Target: LAMA2; (-) strand; PAM type: YTN; PAM sequence: CTA
cttggtccctggatgaacaa

SEQ ID NO: 266932 - DNA, 20 bp, Artificial Sequence
  Description of Artificial Sequence: Synthetic oligonucleotide
  Target: LAMA2; (-) strand; PAM type: YTN; PAM sequence: TTC
atacacatactacttggtcc

SEQ ID NO: 266933 - DNA, 20 bp, Artificial Sequence
  Description of Artificial Sequence: Synthetic oligonucleotide
  Target: LAMA2; (-) strand; PAM type: YTN; PAM sequence: TTT
catacacatactacttggtc

SEQ ID NO: 266934 - DNA, 20 bp, Artificial Sequence
  Description of Artificial Sequence: Synthetic oligonucleotide
  Target: LAMA2; (-) strand; PAM type: YTN; PAM sequence: TTT
tcatacacatactacttggt

SEQ ID NO: 266935 - DNA, 20 bp, Artificial Sequence
  Description of Artificial Sequence: Synthetic oligonucleotide
  Target: LAMA2; (-) strand; PAM type: YTN; PAM sequence: TTT
ttcatacacatactacttgg

SEQ ID NO: 266936 - DNA, 20 bp, Artificial Sequence
  Description of Artificial Sequence: Synthetic oligonucleotide
  Target: LAMA2; (-) strand; PAM type: YTN; PAM sequence: TTA
tttttcatacacatactact

SEQ ID NO: 266937 - DNA, 20 bp, Artificial Sequence
  Description of Artificial Sequence: Synthetic oligonucleotide
  Target: LAMA2; (-) strand; PAM type: YTN; PAM sequence: TTA
gggaaagagagacaaaaata

SEQ ID NO: 266938 - DNA, 20 bp, Artificial Sequence
  Description of Artificial Sequence: Synthetic oligonucleotide
  Target: LAMA2; (-) strand; PAM type: YTN; PAM sequence: TTA
aataaatcggggcatcaagg

SEQ ID NO: 266939 - DNA, 20 bp, Artificial Sequence
  Description of Artificial Sequence: Synthetic oligonucleotide
  Target: LAMA2; (-) strand; PAM type: YTN; PAM sequence: TTA
aaacaattaaataaatcggg

SEQ ID NO: 266940 - DNA, 20 bp, Artificial Sequence
  Description of Artificial Sequence: Synthetic oligonucleotide
  Target: LAMA2; (-) strand; PAM type: YTN; PAM sequence: TTT
aaaacaattaaataaatcgg

SEQ ID NO: 266941 - DNA, 20 bp, Artificial Sequence
  Description of Artificial Sequence: Synthetic oligonucleotide
  Target: LAMA2; (-) strand; PAM type: YTN; PAM sequence: TTT
taaaacaattaaataaatcg

SEQ ID NO: 266942 - DNA, 20 bp, Artificial Sequence
  Description of Artificial Sequence: Synthetic oligonucleotide
  Target: LAMA2; (-) strand; PAM type: YTN; PAM sequence: TTT
ttaaaacaattaaataaatc

SEQ ID NO: 266943 - DNA, 20 bp, Artificial Sequence
  Description of Artificial Sequence: Synthetic oligonucleotide
  Target: LAMA2; (-) strand; PAM type: YTN; PAM sequence: CTT
tttaaaacaattaaataaat

SEQ ID NO: 266944 - DNA, 20 bp, Artificial Sequence
  Description of Artificial Sequence: Synthetic oligonucleotide
  Target: LAMA2; (-) strand; PAM type: YTN; PAM sequence: TTA
ctttttaaaacaattaaata

SEQ ID NO: 266945 - DNA, 20 bp, Artificial Sequence
  Description of Artificial Sequence: Synthetic oligonucleotide
  Target: LAMA2; (-) strand; PAM type: YTN; PAM sequence: CTT
actttttaaaacaattaaat

SEQ ID NO: 266946 - DNA, 20 bp, Artificial Sequence
  Description of Artificial Sequence: Synthetic oligonucleotide
  Target: LAMA2; (-) strand; PAM type: YTN; PAM sequence: CTA
atccaaatggcttacttttt

SEQ ID NO: 266947 - DNA, 20 bp, Artificial Sequence
  Description of Artificial Sequence: Synthetic oligonucleotide
  Target: LAMA2; (-) strand; PAM type: YTN; PAM sequence: TTC
taatccaaatggcttacttt

SEQ ID NO: 266948 - DNA, 20 bp, Artificial Sequence
  Description of Artificial Sequence: Synthetic oligonucleotide
  Target: LAMA2; (-) strand; PAM type: YTN; PAM sequence: TTT
ctaatccaaatggcttactt

SEQ ID NO: 266949 - DNA, 20 bp, Artificial Sequence
  Description of Artificial Sequence: Synthetic oligonucleotide
  Target: LAMA2; (-) strand; PAM type: YTN; PAM sequence: TTT
tctaatccaaatggcttact

SEQ ID NO: 266950 - DNA, 20 bp, Artificial Sequence
  Description of Artificial Sequence: Synthetic oligonucleotide
  Target: LAMA2; (-) strand; PAM type: YTN; PAM sequence: TTT
ttctaatccaaatggcttac

SEQ ID NO: 266951 - DNA, 20 bp, Artificial Sequence
  Description of Artificial Sequence: Synthetic oligonucleotide
  Target: LAMA2; (-) strand; PAM type: YTN; PAM sequence: TTA
aatttttctaatccaaatgg

SEQ ID NO: 266952 - DNA, 20 bp, Artificial Sequence
  Description of Artificial Sequence: Synthetic oligonucleotide
  Target: LAMA2; (-) strand; PAM type: YTN; PAM sequence: TTA
ttaaatttttctaatccaaa

SEQ ID NO: 266953 - DNA, 20 bp, Artificial Sequence
  Description of Artificial Sequence: Synthetic oligonucleotide
  Target: LAMA2; (-) strand; PAM type: YTN; PAM sequence: TTA
attattaaatttttctaatc

SEQ ID NO: 266954 - DNA, 20 bp, Artificial Sequence
  Description of Artificial Sequence: Synthetic oligonucleotide
  Target: LAMA2; (-) strand; PAM type: YTN; PAM sequence: TTA
tcaattaattattaaatttt

SEQ ID NO: 266955 - DNA, 20 bp, Artificial Sequence
  Description of Artificial Sequence: Synthetic oligonucleotide
  Target: LAMA2; (-) strand; PAM type: YTN; PAM sequence: CTC
accagggaattatcaattaa

SEQ ID NO: 266956 - DNA, 20 bp, Artificial Sequence
  Description of Artificial Sequence: Synthetic oligonucleotide
  Target: LAMA2; (-) strand; PAM type: YTN; PAM sequence: TTA
tagtgtactcaccagggaat

SEQ ID NO: 266957 - DNA, 20 bp, Artificial Sequence
  Description of Artificial Sequence: Synthetic oligonucleotide
  Target: LAMA2; (-) strand; PAM type: YTN; PAM sequence: TTA
ttatagtgtactcaccaggg

SEQ ID NO: 266958 - DNA, 20 bp, Artificial Sequence
  Description of Artificial Sequence: Synthetic oligonucleotide
  Target: LAMA2; (-) strand; PAM type: YTN; PAM sequence: TTT
attatagtgtactcaccagg

SEQ ID NO: 266959 - DNA, 20 bp, Artificial Sequence
  Description of Artificial Sequence: Synthetic oligonucleotide
  Target: LAMA2; (-) strand; PAM type: YTN; PAM sequence: TTT
tattatagtgtactcaccag

SEQ ID NO: 266960 - DNA, 20 bp, Artificial Sequence
  Description of Artificial Sequence: Synthetic oligonucleotide
  Target: LAMA2; (-) strand; PAM type: YTN; PAM sequence: CTT
ttattatagtgtactcacca

SEQ ID NO: 266961 - DNA, 20 bp, Artificial Sequence
  Description of Artificial Sequence: Synthetic oligonucleotide
  Target: LAMA2; (-) strand; PAM type: YTN; PAM sequence: CTG
tagcttttattatagtgtac

SEQ ID NO: 266962 - DNA, 20 bp, Artificial Sequence
  Description of Artificial Sequence: Synthetic oligonucleotide
  Target: LAMA2; (-) strand; PAM type: YTN; PAM sequence: CTC
ctgtagcttttattatagtg

SEQ ID NO: 266963 - DNA, 20 bp, Artificial Sequence
  Description of Artificial Sequence: Synthetic oligonucleotide
  Target: LAMA2; (-) strand; PAM type: YTN; PAM sequence: TTG
tatatctcctgtagctttta

SEQ ID NO: 266964 - DNA, 20 bp, Artificial Sequence
  Description of Artificial Sequence: Synthetic oligonucleotide
  Target: LAMA2; (-) strand; PAM type: YTN; PAM sequence: CTT
gtatatctcctgtagctttt

SEQ ID NO: 266965 - DNA, 20 bp, Artificial Sequence
  Description of Artificial Sequence: Synthetic oligonucleotide
  Target: LAMA2; (-) strand; PAM type: YTN; PAM sequence: CTC
ttgtatatctcctgtagctt

SEQ ID NO: 266966 - DNA, 20 bp, Artificial Sequence
  Description of Artificial Sequence: Synthetic oligonucleotide
  Target: LAMA2; (-) strand; PAM type: YTN; PAM sequence: TTC
tcttgtatatctcctgtagc

SEQ ID NO: 266967 - DNA, 20 bp, Artificial Sequence
  Description of Artificial Sequence: Synthetic oligonucleotide
  Target: LAMA2; (-) strand; PAM type: YTN; PAM sequence: CTT
ctcttgtatatctcctgtag

SEQ ID NO: 266968 - DNA, 20 bp, Artificial Sequence
  Description of Artificial Sequence: Synthetic oligonucleotide
  Target: LAMA2; (-) strand; PAM type: YTN; PAM sequence: CTC
caaaaaatggcatgcttctc

SEQ ID NO: 266969 - DNA, 20 bp, Artificial Sequence
  Description of Artificial Sequence: Synthetic oligonucleotide
  Target: LAMA2; (-) strand; PAM type: YTN; PAM sequence: CTC
ctccaaaaaatggcatgctt

SEQ ID NO: 266970 - DNA, 20 bp, Artificial Sequence
  Description of Artificial Sequence: Synthetic oligonucleotide
  Target: LAMA2; (-) strand; PAM type: YTN; PAM sequence: TTA
cagtgagctcctccaaaaaa

SEQ ID NO: 266971 - DNA, 20 bp, Artificial Sequence
  Description of Artificial Sequence: Synthetic oligonucleotide
  Target: LAMA2; (-) strand; PAM type: YTN; PAM sequence: TTT
acagtgagctcctccaaaaa

SEQ ID NO: 266972 - DNA, 20 bp, Artificial Sequence
  Description of Artificial Sequence: Synthetic oligonucleotide
  Target: LAMA2; (-) strand; PAM type: YTN; PAM sequence: TTT
tacagtgagctcctccaaaa

SEQ ID NO: 266973 - DNA, 20 bp, Artificial Sequence
  Description of Artificial Sequence: Synthetic oligonucleotide
  Target: LAMA2; (-) strand; PAM type: YTN; PAM sequence: TTA
acacacaggttttacagtga

SEQ ID NO: 266974 - DNA, 20 bp, Artificial Sequence
  Description of Artificial Sequence: Synthetic oligonucleotide
  Target: LAMA2; (-) strand; PAM type: YTN; PAM sequence: CTT
aacacacaggttttacagtg

SEQ ID NO: 266975 - DNA, 20 bp, Artificial Sequence
  Description of Artificial Sequence: Synthetic oligonucleotide
  Target: LAMA2; (-) strand; PAM type: YTN; PAM sequence: TTG
ataccccttaacacacaggt

SEQ ID NO: 266976 - DNA, 20 bp, Artificial Sequence
  Description of Artificial Sequence: Synthetic oligonucleotide
  Target: LAMA2; (-) strand; PAM type: YTN; PAM sequence: TTA
agttgataccccttaacaca

SEQ ID NO: 266977 - DNA, 20 bp, Artificial Sequence
  Description of Artificial Sequence: Synthetic oligonucleotide
  Target: LAMA2; (-) strand; PAM type: YTN; PAM sequence: TTT
aagttgataccccttaacac

SEQ ID NO: 266978 - DNA, 20 bp, Artificial Sequence
  Description of Artificial Sequence: Synthetic oligonucleotide
  Target: LAMA2; (-) strand; PAM type: YTN; PAM sequence: TTA
catttaagttgatacccctt

SEQ ID NO: 266979 - DNA, 20 bp, Artificial Sequence
  Description of Artificial Sequence: Synthetic oligonucleotide
  Target: LAMA2; (-) strand; PAM type: YTN; PAM sequence: TTT
acatttaagttgatacccct

SEQ ID NO: 266980 - DNA, 20 bp, Artificial Sequence
  Description of Artificial Sequence: Synthetic oligonucleotide
  Target: LAMA2; (-) strand; PAM type: YTN; PAM sequence: CTT
tacatttaagttgatacccc

SEQ ID NO: 266981 - DNA, 20 bp, Artificial Sequence
  Description of Artificial Sequence: Synthetic oligonucleotide
  Target: LAMA2; (-) strand; PAM type: YTN; PAM sequence: TTC
tttacatttaagttgatacc

SEQ ID NO: 266982 - DNA, 20 bp, Artificial Sequence
  Description of Artificial Sequence: Synthetic oligonucleotide
  Target: LAMA2; (-) strand; PAM type: YTN; PAM sequence: TTT
ctttacatttaagttgatac

SEQ ID NO: 266983 - DNA, 20 bp, Artificial Sequence
  Description of Artificial Sequence: Synthetic oligonucleotide
  Target: LAMA2; (-) strand; PAM type: YTN; PAM sequence: TTT
tctttacatttaagttgata

SEQ ID NO: 266984 - DNA, 20 bp, Artificial Sequence
  Description of Artificial Sequence: Synthetic oligonucleotide
  Target: LAMA2; (-) strand; PAM type: YTN; PAM sequence: TTG
aattttctttacatttaagt

SEQ ID NO: 266985 - DNA, 20 bp, Artificial Sequence
  Description of Artificial Sequence: Synthetic oligonucleotide
  Target: LAMA2; (-) strand; PAM type: YTN; PAM sequence: TTT
gaattttctttacatttaag

SEQ ID NO: 266986 - DNA, 20 bp, Artificial Sequence
  Description of Artificial Sequence: Synthetic oligonucleotide
  Target: LAMA2; (-) strand; PAM type: YTN; PAM sequence: CTT
tgaattttctttacatttaa

SEQ ID NO: 266987 - DNA, 20 bp, Artificial Sequence
  Description of Artificial Sequence: Synthetic oligonucleotide
  Target: LAMA2; (-) strand; PAM type: YTN; PAM sequence: TTG
tgcctttgaattttctttac

SEQ ID NO: 266988 - DNA, 20 bp, Artificial Sequence
  Description of Artificial Sequence: Synthetic oligonucleotide
  Target: LAMA2; (-) strand; PAM type: YTN; PAM sequence: TTT
gtgcctttgaattttcttta

SEQ ID NO: 266989 - DNA, 20 bp, Artificial Sequence
  Description of Artificial Sequence: Synthetic oligonucleotide
  Target: LAMA2; (-) strand; PAM type: YTN; PAM sequence: TTT
tgtgcctttgaattttcttt

SEQ ID NO: 266990 - DNA, 20 bp, Artificial Sequence
  Description of Artificial Sequence: Synthetic oligonucleotide
  Target: LAMA2; (-) strand; PAM type: YTN; PAM sequence: TTA
agtgtggtgttttgtgcctt

SEQ ID NO: 266991 - DNA, 20 bp, Artificial Sequence
  Description of Artificial Sequence: Synthetic oligonucleotide
  Target: LAMA2; (-) strand; PAM type: YTN; PAM sequence: TTC
cagtattaagtgtggtgttt

SEQ ID NO: 266992 - DNA, 20 bp, Artificial Sequence
  Description of Artificial Sequence: Synthetic oligonucleotide
  Target: LAMA2; (-) strand; PAM type: YTN; PAM sequence: CTT
ccagtattaagtgtggtgtt

SEQ ID NO: 266993 - DNA, 20 bp, Artificial Sequence
  Description of Artificial Sequence: Synthetic oligonucleotide
  Target: LAMA2; (-) strand; PAM type: YTN; PAM sequence: TTG
aagcttccagtattaagtgt

SEQ ID NO: 266994 - DNA, 20 bp, Artificial Sequence
  Description of Artificial Sequence: Synthetic oligonucleotide
  Target: LAMA2; (-) strand; PAM type: YTN; PAM sequence: CTT
gaagcttccagtattaagtg

SEQ ID NO: 266995 - DNA, 20 bp, Artificial Sequence
  Description of Artificial Sequence: Synthetic oligonucleotide
  Target: LAMA2; (-) strand; PAM type: YTN; PAM sequence: TTC
ttgaagcttccagtattaag

SEQ ID NO: 266996 - DNA, 20 bp, Artificial Sequence
  Description of Artificial Sequence: Synthetic oligonucleotide
  Target: LAMA2; (-) strand; PAM type: YTN; PAM sequence: TTC
atatgttcttgaagcttcca

SEQ ID NO: 266997 - DNA, 20 bp, Artificial Sequence
  Description of Artificial Sequence: Synthetic oligonucleotide
  Target: LAMA2; (-) strand; PAM type: YTN; PAM sequence: TTT
catatgttcttgaagcttcc

SEQ ID NO: 266998 - DNA, 20 bp, Artificial Sequence
  Description of Artificial Sequence: Synthetic oligonucleotide
  Target: LAMA2; (-) strand; PAM type: YTN; PAM sequence: TTT
tcatatgttcttgaagcttc

SEQ ID NO: 266999 - DNA, 20 bp, Artificial Sequence
  Description of Artificial Sequence: Synthetic oligonucleotide
  Target: LAMA2; (-) strand; PAM type: YTN; PAM sequence: CTT
ttcatatgttcttgaagctt

SEQ ID NO: 267000 - DNA, 20 bp, Artificial Sequence
  Description of Artificial Sequence: Synthetic oligonucleotide
  Target: LAMA2; (-) strand; PAM type: YTN; PAM sequence: TTC
ttttcatatgttcttgaagc

SEQ ID NO: 267001 - DNA, 20 bp, Artificial Sequence
  Description of Artificial Sequence: Synthetic oligonucleotide
  Target: LAMA2; (-) strand; PAM type: YTN; PAM sequence: TTT
cttttcatatgttcttgaag

SEQ ID NO: 267002 - DNA, 20 bp, Artificial Sequence
  Description of Artificial Sequence: Synthetic oligonucleotide
  Target: LAMA2; (-) strand; PAM type: YTN; PAM sequence: CTA
tttcttttcatatgttcttg

SEQ ID NO: 267003 - DNA, 20 bp, Artificial Sequence
  Description of Artificial Sequence: Synthetic oligonucleotide
  Target: LAMA2; (-) strand; PAM type: YTN; PAM sequence: CTA
ctatttcttttcatatgttc

SEQ ID NO: 267004 - DNA, 20 bp, Artificial Sequence
  Description of Artificial Sequence: Synthetic oligonucleotide
  Target: LAMA2; (-) strand; PAM type: YTN; PAM sequence: TTA
tacatgctactatttctttt

SEQ ID NO: 267005 - DNA, 20 bp, Artificial Sequence
  Description of Artificial Sequence: Synthetic oligonucleotide
  Target: LAMA2; (-) strand; PAM type: YTN; PAM sequence: TTA
agacccattatacatgctac

SEQ ID NO: 267006 - DNA, 20 bp, Artificial Sequence
  Description of Artificial Sequence: Synthetic oligonucleotide
  Target: LAMA2; (-) strand; PAM type: YTN; PAM sequence: TTT
aagacccattatacatgcta

SEQ ID NO: 267007 - DNA, 20 bp, Artificial Sequence
  Description of Artificial Sequence: Synthetic oligonucleotide
  Target: LAMA2; (-) strand; PAM type: YTN; PAM sequence: TTG
tttaagacccattatacatg

SEQ ID NO: 267008 - DNA, 20 bp, Artificial Sequence
  Description of Artificial Sequence: Synthetic oligonucleotide
  Target: LAMA2; (-) strand; PAM type: YTN; PAM sequence: TTA
attgtttaagacccattata

SEQ ID NO: 267009 - DNA, 20 bp, Artificial Sequence
  Description of Artificial Sequence: Synthetic oligonucleotide
  Target: LAMA2; (-) strand; PAM type: YTN; PAM sequence: CTG
aaattaattgtttaagaccc

SEQ ID NO: 267010 - DNA, 20 bp, Artificial Sequence
  Description of Artificial Sequence: Synthetic oligonucleotide
  Target: LAMA2; (-) strand; PAM type: YTN; PAM sequence: TTC
ccaccagtgaaaatcctgaa

SEQ ID NO: 267011 - DNA, 20 bp, Artificial Sequence
  Description of Artificial Sequence: Synthetic oligonucleotide
  Target: LAMA2; (-) strand; PAM type: YTN; PAM sequence: CTA
ttcccaccagtgaaaatcct

SEQ ID NO: 267012 - DNA, 20 bp, Artificial Sequence
  Description of Artificial Sequence: Synthetic oligonucleotide
  Target: LAMA2; (-) strand; PAM type: YTN; PAM sequence: CTA
ctattcccaccagtgaaaat

SEQ ID NO: 267013 - DNA, 20 bp, Artificial Sequence
  Description of Artificial Sequence: Synthetic oligonucleotide
  Target: LAMA2; (-) strand; PAM type: YTN; PAM sequence: TTC
ctactattcccaccagtgaa

SEQ ID NO: 267014 - DNA, 20 bp, Artificial Sequence
  Description of Artificial Sequence: Synthetic oligonucleotide
  Target: LAMA2; (-) strand; PAM type: YTN; PAM sequence: TTT
cctactattcccaccagtga

SEQ ID NO: 267015 - DNA, 20 bp, Artificial Sequence
  Description of Artificial Sequence: Synthetic oligonucleotide
  Target: LAMA2; (-) strand; PAM type: YTN; PAM sequence: TTG
cccatataatttcctactat

SEQ ID NO: 267016 - DNA, 20 bp, Artificial Sequence
  Description of Artificial Sequence: Synthetic oligonucleotide
  Target: LAMA2; (-) strand; PAM type: YTN; PAM sequence: TTT
gcccatataatttcctacta

SEQ ID NO: 267017 - DNA, 20 bp, Artificial Sequence
  Description of Artificial Sequence: Synthetic oligonucleotide
  Target: LAMA2; (-) strand; PAM type: YTN; PAM sequence: TTG
taagcatttgcccatataat

SEQ ID NO: 267018 - DNA, 20 bp, Artificial Sequence
  Description of Artificial Sequence: Synthetic oligonucleotide
  Target: LAMA2; (-) strand; PAM type: YTN; PAM sequence: TTT
gtaagcatttgcccatataa

SEQ ID NO: 267019 - DNA, 20 bp, Artificial Sequence
  Description of Artificial Sequence: Synthetic oligonucleotide
  Target: LAMA2; (-) strand; PAM type: YTN; PAM sequence: TTT
tgtaagcatttgcccatata

SEQ ID NO: 267020 - DNA, 20 bp, Artificial Sequence
  Description of Artificial Sequence: Synthetic oligonucleotide
  Target: LAMA2; (-) strand; PAM type: YTN; PAM sequence: TTG
tattttgtaagcatttgccc

SEQ ID NO: 267021 - DNA, 20 bp, Artificial Sequence
  Description of Artificial Sequence: Synthetic oligonucleotide
  Target: LAMA2; (-) strand; PAM type: YTN; PAM sequence: CTT
gtattttgtaagcatttgcc

SEQ ID NO: 267022 - DNA, 20 bp, Artificial Sequence
  Description of Artificial Sequence: Synthetic oligonucleotide
  Target: LAMA2; (-) strand; PAM type: YTN; PAM sequence: TTG
cacatgccttgtattttgta

SEQ ID NO: 267023 - DNA, 20 bp, Artificial Sequence
  Description of Artificial Sequence: Synthetic oligonucleotide
  Target: LAMA2; (-) strand; PAM type: YTN; PAM sequence: TTT
gcacatgccttgtattttgt

SEQ ID NO: 267024 - DNA, 20 bp, Artificial Sequence
  Description of Artificial Sequence: Synthetic oligonucleotide
  Target: LAMA2; (-) strand; PAM type: YTN; PAM sequence: TTT
tgcacatgccttgtattttg

SEQ ID NO: 267025 - DNA, 20 bp, Artificial Sequence
  Description of Artificial Sequence: Synthetic oligonucleotide
  Target: LAMA2; (-) strand; PAM type: YTN; PAM sequence: TTA
ggttttgcacatgccttgta

SEQ ID NO: 267026 - DNA, 20 bp, Artificial Sequence
  Description of Artificial Sequence: Synthetic oligonucleotide
  Target: LAMA2; (-) strand; PAM type: YTN; PAM sequence: TTA
ttaggttttgcacatgcctt

SEQ ID NO: 267027 - DNA, 20 bp, Artificial Sequence
  Description of Artificial Sequence: Synthetic oligonucleotide
  Target: LAMA2; (-) strand; PAM type: YTN; PAM sequence: CTT
attaggttttgcacatgcct

SEQ ID NO: 267028 - DNA, 20 bp, Artificial Sequence
  Description of Artificial Sequence: Synthetic oligonucleotide
  Target: LAMA2; (-) strand; PAM type: YTN; PAM sequence: TTA
cttattaggttttgcacatg

SEQ ID NO: 267029 - DNA, 20 bp, Artificial Sequence
  Description of Artificial Sequence: Synthetic oligonucleotide
  Target: LAMA2; (-) strand; PAM type: YTN; PAM sequence: CTG
ttacttattaggttttgcac

SEQ ID NO: 267030 - DNA, 20 bp, Artificial Sequence
  Description of Artificial Sequence: Synthetic oligonucleotide
  Target: LAMA2; (-) strand; PAM type: YTN; PAM sequence: TTC
tgttacttattaggttttgc

SEQ ID NO: 267031 - DNA, 20 bp, Artificial Sequence
  Description of Artificial Sequence: Synthetic oligonucleotide
  Target: LAMA2; (-) strand; PAM type: YTN; PAM sequence: TTC
caaattctgttacttattag

SEQ ID NO: 267032 - DNA, 20 bp, Artificial Sequence
  Description of Artificial Sequence: Synthetic oligonucleotide
  Target: LAMA2; (-) strand; PAM type: YTN; PAM sequence: CTG
aacgccatgttccaaattct

SEQ ID NO: 267033 - DNA, 20 bp, Artificial Sequence
  Description of Artificial Sequence: Synthetic oligonucleotide
  Target: LAMA2; (-) strand; PAM type: YTN; PAM sequence: TTG
tgtctgaacgccatgttcca

SEQ ID NO: 267034 - DNA, 20 bp, Artificial Sequence
  Description of Artificial Sequence: Synthetic oligonucleotide
  Target: LAMA2; (-) strand; PAM type: YTN; PAM sequence: CTG
tgatcatgaaattgtgtctg

SEQ ID NO: 267035 - DNA, 20 bp, Artificial Sequence
  Description of Artificial Sequence: Synthetic oligonucleotide
  Target: LAMA2; (-) strand; PAM type: YTN; PAM sequence: TTC
atctgtgatcatgaaattgt

SEQ ID NO: 267036 - DNA, 20 bp, Artificial Sequence
  Description of Artificial Sequence: Synthetic oligonucleotide
  Target: LAMA2; (-) strand; PAM type: YTN; PAM sequence: TTT
catctgtgatcatgaaattg

SEQ ID NO: 267037 - DNA, 20 bp, Artificial Sequence
  Description of Artificial Sequence: Synthetic oligonucleotide
  Target: LAMA2; (-) strand; PAM type: YTN; PAM sequence: TTT
tcatctgtgatcatgaaatt

SEQ ID NO: 267038 - DNA, 20 bp, Artificial Sequence
  Description of Artificial Sequence: Synthetic oligonucleotide
  Target: LAMA2; (-) strand; PAM type: YTN; PAM sequence: TTC
attttcatctgtgatcatga

SEQ ID NO: 267039 - DNA, 20 bp, Artificial Sequence
  Description of Artificial Sequence: Synthetic oligonucleotide
  Target: LAMA2; (-) strand; PAM type: YTN; PAM sequence: CTC
ccattcattttcatctgtga

SEQ ID NO: 267040 - DNA, 20 bp, Artificial Sequence
  Description of Artificial Sequence: Synthetic oligonucleotide
  Target: LAMA2; (-) strand; PAM type: YTN; PAM sequence: TTC
tcccattcattttcatctgt

SEQ ID NO: 267041 - DNA, 20 bp, Artificial Sequence
  Description of Artificial Sequence: Synthetic oligonucleotide
  Target: LAMA2; (-) strand; PAM type: YTN; PAM sequence: TTA
ttctcccattcattttcatc

SEQ ID NO: 267042 - DNA, 20 bp, Artificial Sequence
  Description of Artificial Sequence: Synthetic oligonucleotide
  Target: LAMA2; (-) strand; PAM type: YTN; PAM sequence: TTT
attctcccattcattttcat

SEQ ID NO: 267043 - DNA, 20 bp, Artificial Sequence
  Description of Artificial Sequence: Synthetic oligonucleotide
  Target: LAMA2; (-) strand; PAM type: YTN; PAM sequence: CTT
tattctcccattcattttca

SEQ ID NO: 267044 - DNA, 20 bp, Artificial Sequence
  Description of Artificial Sequence: Synthetic oligonucleotide
  Target: LAMA2; (-) strand; PAM type: YTN; PAM sequence: CTA
caatatggtctttattctcc

SEQ ID NO: 267045 - DNA, 20 bp, Artificial Sequence
  Description of Artificial Sequence: Synthetic oligonucleotide
  Target: LAMA2; (-) strand; PAM type: YTN; PAM sequence: TTC
tacaatatggtctttattct

SEQ ID NO: 267046 - DNA, 20 bp, Artificial Sequence
  Description of Artificial Sequence: Synthetic oligonucleotide
  Target: LAMA2; (-) strand; PAM type: YTN; PAM sequence: TTT
ctacaatatggtctttattc

SEQ ID NO: 267047 - DNA, 20 bp, Artificial Sequence
  Description of Artificial Sequence: Synthetic oligonucleotide
  Target: LAMA2; (-) strand; PAM type: YTN; PAM sequence: TTA
aggatttctacaatatggtc

SEQ ID NO: 267048 - DNA, 20 bp, Artificial Sequence
  Description of Artificial Sequence: Synthetic oligonucleotide
  Target: LAMA2; (-) strand; PAM type: YTN; PAM sequence: TTT
aaggatttctacaatatggt

SEQ ID NO: 267049 - DNA, 20 bp, Artificial Sequence
  Description of Artificial Sequence: Synthetic oligonucleotide
  Target: LAMA2; (-) strand; PAM type: YTN; PAM sequence: CTG
gtatttaaggatttctacaa

SEQ ID NO: 267050 - DNA, 20 bp, Artificial Sequence
  Description of Artificial Sequence: Synthetic oligonucleotide
  Target: LAMA2; (-) strand; PAM type: YTN; PAM sequence: TTA
gactggtatttaaggatttc

SEQ ID NO: 267051 - DNA, 20 bp, Artificial Sequence
  Description of Artificial Sequence: Synthetic oligonucleotide
  Target: LAMA2; (-) strand; PAM type: YTN; PAM sequence: CTT
agactggtatttaaggattt

SEQ ID NO: 267052 - DNA, 20 bp, Artificial Sequence
  Description of Artificial Sequence: Synthetic oligonucleotide
  Target: LAMA2; (-) strand; PAM type: YTN; PAM sequence: TTC
ttagactggtatttaaggat

SEQ ID NO: 267053 - DNA, 20 bp, Artificial Sequence
  Description of Artificial Sequence: Synthetic oligonucleotide
  Target: LAMA2; (-) strand; PAM type: YTN; PAM sequence: TTT
cttagactggtatttaagga

SEQ ID NO: 267054 - DNA, 20 bp, Artificial Sequence
  Description of Artificial Sequence: Synthetic oligonucleotide
  Target: LAMA2; (-) strand; PAM type: YTN; PAM sequence: CTA
tttcttagactggtatttaa

SEQ ID NO: 267055 - DNA, 20 bp, Artificial Sequence
  Description of Artificial Sequence: Synthetic oligonucleotide
  Target: LAMA2; (-) strand; PAM type: YTN; PAM sequence: TTA
aataactatttcttagactg

SEQ ID NO: 267056 - DNA, 20 bp, Artificial Sequence
  Description of Artificial Sequence: Synthetic oligonucleotide
  Target: LAMA2; (-) strand; PAM type: YTN; PAM sequence: TTA
catagaaaattaaataacta

SEQ ID NO: 267057 - DNA, 20 bp, Artificial Sequence
  Description of Artificial Sequence: Synthetic oligonucleotide
  Target: LAMA2; (-) strand; PAM type: YTN; PAM sequence: TTA
ttacatagaaaattaaataa

SEQ ID NO: 267058 - DNA, 20 bp, Artificial Sequence
  Description of Artificial Sequence: Synthetic oligonucleotide
  Target: LAMA2; (-) strand; PAM type: YTN; PAM sequence: CTT
attacatagaaaattaaata

SEQ ID NO: 267059 - DNA, 20 bp, Artificial Sequence
  Description of Artificial Sequence: Synthetic oligonucleotide
  Target: LAMA2; (-) strand; PAM type: YTN; PAM sequence: TTC
cttattacatagaaaattaa

SEQ ID NO: 267060 - DNA, 20 bp, Artificial Sequence
  Description of Artificial Sequence: Synthetic oligonucleotide
  Target: LAMA2; (-) strand; PAM type: YTN; PAM sequence: TTT
ccttattacatagaaaatta

SEQ ID NO: 267061 - DNA, 20 bp, Artificial Sequence
  Description of Artificial Sequence: Synthetic oligonucleotide
  Target: LAMA2; (-) strand; PAM type: YTN; PAM sequence: TTG
tagtgtttccttattacata

SEQ ID NO: 267062 - DNA, 20 bp, Artificial Sequence
  Description of Artificial Sequence: Synthetic oligonucleotide
  Target: LAMA2; (-) strand; PAM type: YTN; PAM sequence: CTT
gtagtgtttccttattacat

SEQ ID NO: 267063 - DNA, 20 bp, Artificial Sequence
  Description of Artificial Sequence: Synthetic oligonucleotide
  Target: LAMA2; (-) strand; PAM type: YTN; PAM sequence: TTC
aaaataaaaacttgtagtgt

SEQ ID NO: 267064 - DNA, 20 bp, Artificial Sequence
  Description of Artificial Sequence: Synthetic oligonucleotide
  Target: LAMA2; (-) strand; PAM type: YTN; PAM sequence: TTT
caaaataaaaacttgtagtg

SEQ ID NO: 267065 - DNA, 20 bp, Artificial Sequence
  Description of Artificial Sequence: Synthetic oligonucleotide
  Target: LAMA2; (-) strand; PAM type: YTN; PAM sequence: TTT
tcaaaataaaaacttgtagt

SEQ ID NO: 267066 - DNA, 20 bp, Artificial Sequence
  Description of Artificial Sequence: Synthetic oligonucleotide
  Target: LAMA2; (-) strand; PAM type: YTN; PAM sequence: TTT
ttcaaaataaaaacttgtag

SEQ ID NO: 267067 - DNA, 20 bp, Artificial Sequence
  Description of Artificial Sequence: Synthetic oligonucleotide
  Target: LAMA2; (-) strand; PAM type: YTN; PAM sequence: TTT
tttcaaaataaaaacttgta

SEQ ID NO: 267068 - DNA, 20 bp, Artificial Sequence
  Description of Artificial Sequence: Synthetic oligonucleotide
  Target: LAMA2; (-) strand; PAM type: YTN; PAM sequence: TTT
ttttcaaaataaaaacttgt

SEQ ID NO: 267069 - DNA, 20 bp, Artificial Sequence
  Description of Artificial Sequence: Synthetic oligonucleotide
  Target: LAMA2; (-) strand; PAM type: YTN; PAM sequence: CTT
tttttcaaaataaaaacttg

SEQ ID NO: 267070 - DNA, 20 bp, Artificial Sequence
  Description of Artificial Sequence: Synthetic oligonucleotide
  Target: LAMA2; (-) strand; PAM type: YTN; PAM sequence: TTA
acctttttttcaaaataaaa

SEQ ID NO: 267071 - DNA, 20 bp, Artificial Sequence
  Description of Artificial Sequence: Synthetic oligonucleotide
  Target: LAMA2; (-) strand; PAM type: YTN; PAM sequence: CTA
aaatgtggccataatcatat

SEQ ID NO: 267072 - DNA, 20 bp, Artificial Sequence
  Description of Artificial Sequence: Synthetic oligonucleotide
  Target: LAMA2; (-) strand; PAM type: YTN; PAM sequence: TTC
ctaaaatgtggccataatca

SEQ ID NO: 267073 - DNA, 20 bp, Artificial Sequence
  Description of Artificial Sequence: Synthetic oligonucleotide
  Target: LAMA2; (-) strand; PAM type: YTN; PAM sequence: TTT
cctaaaatgtggccataatc

SEQ ID NO: 267074 - DNA, 20 bp, Artificial Sequence
  Description of Artificial Sequence: Synthetic oligonucleotide
  Target: LAMA2; (-) strand; PAM type: YTN; PAM sequence: TTT
tcctaaaatgtggccataat

SEQ ID NO: 267075 - DNA, 20 bp, Artificial Sequence
  Description of Artificial Sequence: Synthetic oligonucleotide
  Target: LAMA2; (-) strand; PAM type: YTN; PAM sequence: CTA
tgataatagttttcctaaaa

SEQ ID NO: 267076 - DNA, 20 bp, Artificial Sequence
  Description of Artificial Sequence: Synthetic oligonucleotide
  Target: LAMA2; (-) strand; PAM type: YTN; PAM sequence: TTC
tatgataatagttttcctaa

SEQ ID NO: 267077 - DNA, 20 bp, Artificial Sequence
  Description of Artificial Sequence: Synthetic oligonucleotide
  Target: LAMA2; (-) strand; PAM type: YTN; PAM sequence: CTC
aattctatgataatagtttt

SEQ ID NO: 267078 - DNA, 20 bp, Artificial Sequence
  Description of Artificial Sequence: Synthetic oligonucleotide
  Target: LAMA2; (-) strand; PAM type: YTN; PAM sequence: TTA
tactcaattctatgataata

SEQ ID NO: 267079 - DNA, 20 bp, Artificial Sequence
  Description of Artificial Sequence: Synthetic oligonucleotide
  Target: LAMA2; (-) strand; PAM type: YTN; PAM sequence: TTC
attatactcaattctatgat

SEQ ID NO: 267080 - DNA, 20 bp, Artificial Sequence
  Description of Artificial Sequence: Synthetic oligonucleotide
  Target: LAMA2; (-) strand; PAM type: YTN; PAM sequence: TTC
aattcattatactcaattct

SEQ ID NO: 267081 - DNA, 20 bp, Artificial Sequence
  Description of Artificial Sequence: Synthetic oligonucleotide
  Target: LAMA2; (-) strand; PAM type: YTN; PAM sequence: TTT
caattcattatactcaattc

SEQ ID NO: 267082 - DNA, 20 bp, Artificial Sequence
  Description of Artificial Sequence: Synthetic oligonucleotide
  Target: LAMA2; (-) strand; PAM type: YTN; PAM sequence: CTG
tttcaattcattatactcaa

SEQ ID NO: 267083 - DNA, 20 bp, Artificial Sequence
  Description of Artificial Sequence: Synthetic oligonucleotide
  Target: LAMA2; (-) strand; PAM type: YTN; PAM sequence: TTG
cctgtttcaattcattatac

SEQ ID NO: 267084 - DNA, 20 bp, Artificial Sequence
  Description of Artificial Sequence: Synthetic oligonucleotide
  Target: LAMA2; (-) strand; PAM type: YTN; PAM sequence: TTT
gcctgtttcaattcattata

SEQ ID NO: 267085 - DNA, 20 bp, Artificial Sequence
  Description of Artificial Sequence: Synthetic oligonucleotide
  Target: LAMA2; (-) strand; PAM type: YTN; PAM sequence: CTC
atttgcctgtttcaattcat

SEQ ID NO: 267086 - DNA, 20 bp, Artificial Sequence
  Description of Artificial Sequence: Synthetic oligonucleotide
  Target: LAMA2; (-) strand; PAM type: YTN; PAM sequence: TTC
tcatttgcctgtttcaattc

SEQ ID NO: 267087 - DNA, 20 bp, Artificial Sequence
  Description of Artificial Sequence: Synthetic oligonucleotide
  Target: LAMA2; (-) strand; PAM type: YTN; PAM sequence: TTT
ctcatttgcctgtttcaatt

SEQ ID NO: 267088 - DNA, 20 bp, Artificial Sequence
  Description of Artificial Sequence: Synthetic oligonucleotide
  Target: LAMA2; (-) strand; PAM type: YTN; PAM sequence: TTT
tctcatttgcctgtttcaat

SEQ ID NO: 267089 - DNA, 20 bp, Artificial Sequence
  Description of Artificial Sequence: Synthetic oligonucleotide
  Target: LAMA2; (-) strand; PAM type: YTN; PAM sequence: CTT
ttctcatttgcctgtttcaa

SEQ ID NO: 267090 - DNA, 20 bp, Artificial Sequence
  Description of Artificial Sequence: Synthetic oligonucleotide
  Target: LAMA2; (-) strand; PAM type: YTN; PAM sequence: CTA
tgcttttctcatttgcctgt

SEQ ID NO: 267091 - DNA, 20 bp, Artificial Sequence
  Description of Artificial Sequence: Synthetic oligonucleotide
  Target: LAMA2; (-) strand; PAM type: YTN; PAM sequence: CTC
tatgcttttctcatttgcct

SEQ ID NO: 267092 - DNA, 20 bp, Artificial Sequence
  Description of Artificial Sequence: Synthetic oligonucleotide
  Target: LAMA2; (-) strand; PAM type: YTN; PAM sequence: TTG
gtctctatgcttttctcatt

SEQ ID NO: 267093 - DNA, 20 bp, Artificial Sequence
  Description of Artificial Sequence: Synthetic oligonucleotide
  Target: LAMA2; (-) strand; PAM type: YTN; PAM sequence: TTA
attggtctctatgcttttct

SEQ ID NO: 267094 - DNA, 20 bp, Artificial Sequence
  Description of Artificial Sequence: Synthetic oligonucleotide
  Target: LAMA2; (-) strand; PAM type: YTN; PAM sequence: TTT
aattggtctctatgcttttc

SEQ ID NO: 267095 - DNA, 20 bp, Artificial Sequence
  Description of Artificial Sequence: Synthetic oligonucleotide
  Target: LAMA2; (-) strand; PAM type: YTN; PAM sequence: TTT
taattggtctctatgctttt

SEQ ID NO: 267096 - DNA, 20 bp, Artificial Sequence
  Description of Artificial Sequence: Synthetic oligonucleotide
  Target: LAMA2; (-) strand; PAM type: YTN; PAM sequence: CTT
ttaattggtctctatgcttt

SEQ ID NO: 267097 - DNA, 20 bp, Artificial Sequence
  Description of Artificial Sequence: Synthetic oligonucleotide
  Target: LAMA2; (-) strand; PAM type: YTN; PAM sequence: CTA
gccttttaattggtctctat

SEQ ID NO: 267098 - DNA, 20 bp, Artificial Sequence
  Description of Artificial Sequence: Synthetic oligonucleotide
  Target: LAMA2; (-) strand; PAM type: YTN; PAM sequence: CTA
gtatactagccttttaattg

SEQ ID NO: 267099 - DNA, 20 bp, Artificial Sequence
  Description of Artificial Sequence: Synthetic oligonucleotide
  Target: LAMA2; (-) strand; PAM type: YTN; PAM sequence: TTG
cccatgctagtatactagcc

SEQ ID NO: 267100 - DNA, 20 bp, Artificial Sequence
  Description of Artificial Sequence: Synthetic oligonucleotide
  Target: LAMA2; (-) strand; PAM type: YTN; PAM sequence: TTT
gcccatgctagtatactagc

SEQ ID NO: 267101 - DNA, 20 bp, Artificial Sequence
  Description of Artificial Sequence: Synthetic oligonucleotide
  Target: LAMA2; (-) strand; PAM type: YTN; PAM sequence: TTT
tgcccatgctagtatactag

SEQ ID NO: 267102 - DNA, 20 bp, Artificial Sequence
  Description of Artificial Sequence: Synthetic oligonucleotide
  Target: LAMA2; (-) strand; PAM type: YTN; PAM sequence: CTT
ttgcccatgctagtatacta

SEQ ID NO: 267103 - DNA, 20 bp, Artificial Sequence
  Description of Artificial Sequence: Synthetic oligonucleotide
  Target: LAMA2; (-) strand; PAM type: YTN; PAM sequence: TTA
tcttttgcccatgctagtat

SEQ ID NO: 267104 - DNA, 20 bp, Artificial Sequence
  Description of Artificial Sequence: Synthetic oligonucleotide
  Target: LAMA2; (-) strand; PAM type: YTN; PAM sequence: CTA
attatcttttgcccatgcta

SEQ ID NO: 267105 - DNA, 20 bp, Artificial Sequence
  Description of Artificial Sequence: Synthetic oligonucleotide
  Target: LAMA2; (-) strand; PAM type: YTN; PAM sequence: TTC
taattatcttttgcccatgc

SEQ ID NO: 267106 - DNA, 20 bp, Artificial Sequence
  Description of Artificial Sequence: Synthetic oligonucleotide
  Target: LAMA2; (-) strand; PAM type: YTN; PAM sequence: CTG
gttctaattatcttttgccc

SEQ ID NO: 267107 - DNA, 20 bp, Artificial Sequence
  Description of Artificial Sequence: Synthetic oligonucleotide
  Target: LAMA2; (-) strand; PAM type: YTN; PAM sequence: TTC
tggttctaattatcttttgc

SEQ ID NO: 267108 - DNA, 20 bp, Artificial Sequence
  Description of Artificial Sequence: Synthetic oligonucleotide
  Target: LAMA2; (-) strand; PAM type: YTN; PAM sequence: CTT
ctggttctaattatcttttg

SEQ ID NO: 267109 - DNA, 20 bp, Artificial Sequence
  Description of Artificial Sequence: Synthetic oligonucleotide
  Target: LAMA2; (-) strand; PAM type: YTN; PAM sequence: CTA
cttctggttctaattatctt

SEQ ID NO: 267110 - DNA, 20 bp, Artificial Sequence
  Description of Artificial Sequence: Synthetic oligonucleotide
  Target: LAMA2; (-) strand; PAM type: YTN; PAM sequence: TTA
cctacttctggttctaatta

SEQ ID NO: 267111 - DNA, 20 bp, Artificial Sequence
  Description of Artificial Sequence: Synthetic oligonucleotide
  Target: LAMA2; (-) strand; PAM type: YTN; PAM sequence: CTA
ttacctacttctggttctaa

SEQ ID NO: 267112 - DNA, 20 bp, Artificial Sequence
  Description of Artificial Sequence: Synthetic oligonucleotide
  Target: LAMA2; (-) strand; PAM type: YTN; PAM sequence: TTA
ctattacctacttctggttc

SEQ ID NO: 267113 - DNA, 20 bp, Artificial Sequence
  Description of Artificial Sequence: Synthetic oligonucleotide
  Target: LAMA2; (-) strand; PAM type: YTN; PAM sequence: TTA
ttactattacctacttctgg

SEQ ID NO: 267114 - DNA, 20 bp, Artificial Sequence
  Description of Artificial Sequence: Synthetic oligonucleotide
  Target: LAMA2; (-) strand; PAM type: YTN; PAM sequence: CTT
attactattacctacttctg

SEQ ID NO: 267115 - DNA, 20 bp, Artificial Sequence
  Description of Artificial Sequence: Synthetic oligonucleotide
  Target: LAMA2; (-) strand; PAM type: YTN; PAM sequence: TTC
ttattactattacctacttc

SEQ ID NO: 267116 - DNA, 20 bp, Artificial Sequence
  Description of Artificial Sequence: Synthetic oligonucleotide
  Target: LAMA2; (-) strand; PAM type: YTN; PAM sequence: CTC
cattcttattactattacct

SEQ ID NO: 267117 - DNA, 20 bp, Artificial Sequence
  Description of Artificial Sequence: Synthetic oligonucleotide
  Target: LAMA2; (-) strand; PAM type: YTN; PAM sequence: TTG
tctccattcttattactatt

SEQ ID NO: 267118 - DNA, 20 bp, Artificial Sequence
  Description of Artificial Sequence: Synthetic oligonucleotide
  Target: LAMA2; (-) strand; PAM type: YTN; PAM sequence: TTT
gtctccattcttattactat

SEQ ID NO: 267119 - DNA, 20 bp, Artificial Sequence
  Description of Artificial Sequence: Synthetic oligonucleotide
  Target: LAMA2; (-) strand; PAM type: YTN; PAM sequence: CTT
tgtctccattcttattacta

SEQ ID NO: 267120 - DNA, 20 bp, Artificial Sequence
  Description of Artificial Sequence: Synthetic oligonucleotide
  Target: LAMA2; (-) strand; PAM type: YTN; PAM sequence: TTC
ctttgtctccattcttatta

SEQ ID NO: 267121 - DNA, 20 bp, Artificial Sequence
  Description of Artificial Sequence: Synthetic oligonucleotide
  Target: LAMA2; (-) strand; PAM type: YTN; PAM sequence: TTC
attcctttgtctccattctt

SEQ ID NO: 267122 - DNA, 20 bp, Artificial Sequence
  Description of Artificial Sequence: Synthetic oligonucleotide
  Target: LAMA2; (-) strand; PAM type: YTN; PAM sequence: CTC
acattcattcctttgtctcc

SEQ ID NO: 267123 - DNA, 20 bp, Artificial Sequence
  Description of Artificial Sequence: Synthetic oligonucleotide
  Target: LAMA2; (-) strand; PAM type: YTN; PAM sequence: TTC
tcacattcattcctttgtct

SEQ ID NO: 267124 - DNA, 20 bp, Artificial Sequence
  Description of Artificial Sequence: Synthetic oligonucleotide
  Target: LAMA2; (-) strand; PAM type: YTN; PAM sequence: TTT
ctcacattcattcctttgtc

SEQ ID NO: 267125 - DNA, 20 bp, Artificial Sequence
  Description of Artificial Sequence: Synthetic oligonucleotide
  Target: LAMA2; (-) strand; PAM type: YTN; PAM sequence: TTT
tctcacattcattcctttgt

SEQ ID NO: 267126 - DNA, 20 bp, Artificial Sequence
  Description of Artificial Sequence: Synthetic oligonucleotide
  Target: LAMA2; (-) strand; PAM type: YTN; PAM sequence: TTA
aaccattttctcacattcat

SEQ ID NO: 267127 - DNA, 20 bp, Artificial Sequence
  Description of Artificial Sequence: Synthetic oligonucleotide
  Target: LAMA2; (-) strand; PAM type: YTN; PAM sequence: CTG
tattaaaccattttctcaca

SEQ ID NO: 267128 - DNA, 20 bp, Artificial Sequence
  Description of Artificial Sequence: Synthetic oligonucleotide
  Target: LAMA2; (-) strand; PAM type: YTN; PAM sequence: CTG
taaagctgtattaaaccatt

SEQ ID NO: 267129 - DNA, 20 bp, Artificial Sequence
  Description of Artificial Sequence: Synthetic oligonucleotide
  Target: LAMA2; (-) strand; PAM type: YTN; PAM sequence: TTC
cgaatctgtaaagctgtatt

SEQ ID NO: 267130 - DNA, 20 bp, Artificial Sequence
  Description of Artificial Sequence: Synthetic oligonucleotide
  Target: LAMA2; (-) strand; PAM type: YTN; PAM sequence: TTT
ccgaatctgtaaagctgtat

SEQ ID NO: 267131 - DNA, 20 bp, Artificial Sequence
  Description of Artificial Sequence: Synthetic oligonucleotide
  Target: LAMA2; (-) strand; PAM type: YTN; PAM sequence: TTA
gtttccgaatctgtaaagct

SEQ ID NO: 267132 - DNA, 20 bp, Artificial Sequence
  Description of Artificial Sequence: Synthetic oligonucleotide
  Target: LAMA2; (-) strand; PAM type: YTN; PAM sequence: CTA
attagtttccgaatctgtaa

SEQ ID NO: 267133 - DNA, 20 bp, Artificial Sequence
  Description of Artificial Sequence: Synthetic oligonucleotide
  Target: LAMA2; (-) strand; PAM type: YTN; PAM sequence: CTC
acatctaattagtttccgaa

SEQ ID NO: 267134 - DNA, 20 bp, Artificial Sequence
  Description of Artificial Sequence: Synthetic oligonucleotide
  Target: LAMA2; (-) strand; PAM type: YTN; PAM sequence: CTC
acccctcacatctaattagt

SEQ ID NO: 267135 - DNA, 20 bp, Artificial Sequence
  Description of Artificial Sequence: Synthetic oligonucleotide
  Target: LAMA2; (-) strand; PAM type: YTN; PAM sequence: CTG
cccggaccctcacccctcac

SEQ ID NO: 267136 - DNA, 20 bp, Artificial Sequence
  Description of Artificial Sequence: Synthetic oligonucleotide
  Target: LAMA2; (-) strand; PAM type: YTN; PAM sequence: TTC
tgcccggaccctcacccctc

SEQ ID NO: 267137 - DNA, 20 bp, Artificial Sequence
  Description of Artificial Sequence: Synthetic oligonucleotide
  Target: LAMA2; (-) strand; PAM type: YTN; PAM sequence: CTT
ctgcccggaccctcacccct

SEQ ID NO: 267138 - DNA, 20 bp, Artificial Sequence
  Description of Artificial Sequence: Synthetic oligonucleotide
  Target: LAMA2; (-) strand; PAM type: YTN; PAM sequence: TTC
aacttctgcccggaccctca

SEQ ID NO: 267139 - DNA, 20 bp, Artificial Sequence
  Description of Artificial Sequence: Synthetic oligonucleotide
  Target: LAMA2; (-) strand; PAM type: YTN; PAM sequence: CTT
caacttctgcccggaccctc

SEQ ID NO: 267140 - DNA, 20 bp, Artificial Sequence
  Description of Artificial Sequence: Synthetic oligonucleotide
  Target: LAMA2; (-) strand; PAM type: YTN; PAM sequence: CTG
tcttcaacttctgcccggac

SEQ ID NO: 267141 - DNA, 20 bp, Artificial Sequence
  Description of Artificial Sequence: Synthetic oligonucleotide
  Target: LAMA2; (-) strand; PAM type: YTN; PAM sequence: CTA
aaaacctgtcttcaacttct

SEQ ID NO: 267142 - DNA, 20 bp, Artificial Sequence
  Description of Artificial Sequence: Synthetic oligonucleotide
  Target: LAMA2; (-) strand; PAM type: YTN; PAM sequence: CTG
cctaaaaacctgtcttcaac

SEQ ID NO: 267143 - DNA, 20 bp, Artificial Sequence
  Description of Artificial Sequence: Synthetic oligonucleotide
  Target: LAMA2; (-) strand; PAM type: YTN; PAM sequence: TTG
ggggtaacctgcctaaaaac

SEQ ID NO: 267144 - DNA, 20 bp, Artificial Sequence
  Description of Artificial Sequence: Synthetic oligonucleotide
  Target: LAMA2; (-) strand; PAM type: YTN; PAM sequence: TTT
gggggtaacctgcctaaaaa

SEQ ID NO: 267145 - DNA, 20 bp, Artificial Sequence
  Description of Artificial Sequence: Synthetic oligonucleotide
  Target: LAMA2; (-) strand; PAM type: YTN; PAM sequence: TTT
tgggggtaacctgcctaaaa

SEQ ID NO: 267146 - DNA, 20 bp, Artificial Sequence
  Description of Artificial Sequence: Synthetic oligonucleotide
  Target: LAMA2; (-) strand; PAM type: YTN; PAM sequence: TTT
ttgggggtaacctgcctaaa

SEQ ID NO: 267147 - DNA, 20 bp, Artificial Sequence
  Description of Artificial Sequence: Synthetic oligonucleotide
  Target: LAMA2; (-) strand; PAM type: YTN; PAM sequence: TTA
atagcaccaccatttttggg

SEQ ID NO: 267148 - DNA, 20 bp, Artificial Sequence
  Description of Artificial Sequence: Synthetic oligonucleotide
  Target: LAMA2; (-) strand; PAM type: YTN; PAM sequence: TTC
agttaatagcaccaccattt

SEQ ID NO: 267149 - DNA, 20 bp, Artificial Sequence
  Description of Artificial Sequence: Synthetic oligonucleotide
  Target: LAMA2; (-) strand; PAM type: YTN; PAM sequence: TTT
cagttaatagcaccaccatt

SEQ ID NO: 267150 - DNA, 20 bp, Artificial Sequence
  Description of Artificial Sequence: Synthetic oligonucleotide
  Target: LAMA2; (-) strand; PAM type: YTN; PAM sequence: CTC
catttcagttaatagcacca

SEQ ID NO: 267151 - DNA, 20 bp, Artificial Sequence
  Description of Artificial Sequence: Synthetic oligonucleotide
  Target: LAMA2; (-) strand; PAM type: YTN; PAM sequence: TTC
tccatttcagttaatagcac

SEQ ID NO: 267152 - DNA, 20 bp, Artificial Sequence
  Description of Artificial Sequence: Synthetic oligonucleotide
  Target: LAMA2; (-) strand; PAM type: YTN; PAM sequence: TTT
ctccatttcagttaatagca

SEQ ID NO: 267153 - DNA, 20 bp, Artificial Sequence
  Description of Artificial Sequence: Synthetic oligonucleotide
  Target: LAMA2; (-) strand; PAM type: YTN; PAM sequence: CTG
gtttctccatttcagttaat

SEQ ID NO: 267154 - DNA, 20 bp, Artificial Sequence
  Description of Artificial Sequence: Synthetic oligonucleotide
  Target: LAMA2; (-) strand; PAM type: YTN; PAM sequence: CTC
ctggtttctccatttcagtt

SEQ ID NO: 267155 - DNA, 20 bp, Artificial Sequence
  Description of Artificial Sequence: Synthetic oligonucleotide
  Target: LAMA2; (-) strand; PAM type: YTN; PAM sequence: CTC
tcctggtttctccatttcag

SEQ ID NO: 267156 - DNA, 20 bp, Artificial Sequence
  Description of Artificial Sequence: Synthetic oligonucleotide
  Target: LAMA2; (-) strand; PAM type: YTN; PAM sequence: CTC
tctcctggtttctccatttc

SEQ ID NO: 267157 - DNA, 20 bp, Artificial Sequence
  Description of Artificial Sequence: Synthetic oligonucleotide
  Target: LAMA2; (-) strand; PAM type: YTN; PAM sequence: CTA
acggctctctcctggtttct

SEQ ID NO: 267158 - DNA, 20 bp, Artificial Sequence
  Description of Artificial Sequence: Synthetic oligonucleotide
  Target: LAMA2; (-) strand; PAM type: YTN; PAM sequence: CTC
taacggctctctcctggttt

SEQ ID NO: 267159 - DNA, 20 bp, Artificial Sequence
  Description of Artificial Sequence: Synthetic oligonucleotide
  Target: LAMA2; (-) strand; PAM type: YTN; PAM sequence: TTC
tctaacggctctctcctggt

SEQ ID NO: 267160 - DNA, 20 bp, Artificial Sequence
  Description of Artificial Sequence: Synthetic oligonucleotide
  Target: LAMA2; (-) strand; PAM type: YTN; PAM sequence: CTT
ctctaacggctctctcctgg

SEQ ID NO: 267161 - DNA, 20 bp, Artificial Sequence
  Description of Artificial Sequence: Synthetic oligonucleotide
  Target: LAMA2; (-) strand; PAM type: YTN; PAM sequence: TTC
ttctctaacggctctctcct

SEQ ID NO: 267162 - DNA, 20 bp, Artificial Sequence
  Description of Artificial Sequence: Synthetic oligonucleotide
  Target: LAMA2; (-) strand; PAM type: YTN; PAM sequence: TTT
cttctctaacggctctctcc

SEQ ID NO: 267163 - DNA, 20 bp, Artificial Sequence
  Description of Artificial Sequence: Synthetic oligonucleotide
  Target: LAMA2; (-) strand; PAM type: YTN; PAM sequence: CTT
tcttctctaacggctctctc

SEQ ID NO: 267164 - DNA, 20 bp, Artificial Sequence
  Description of Artificial Sequence: Synthetic oligonucleotide
  Target: LAMA2; (-) strand; PAM type: YTN; PAM sequence: TTA
tctttcttctctaacggctc

SEQ ID NO: 267165 - DNA, 20 bp, Artificial Sequence
  Description of Artificial Sequence: Synthetic oligonucleotide
  Target: LAMA2; (-) strand; PAM type: YTN; PAM sequence: TTG
aaacataaattatctttctt

SEQ ID NO: 267166 - DNA, 20 bp, Artificial Sequence
  Description of Artificial Sequence: Synthetic oligonucleotide
  Target: LAMA2; (-) strand; PAM type: YTN; PAM sequence: TTT
gaaacataaattatctttct

SEQ ID NO: 267167 - DNA, 20 bp, Artificial Sequence
  Description of Artificial Sequence: Synthetic oligonucleotide
  Target: LAMA2; (-) strand; PAM type: YTN; PAM sequence: CTA
tttgaaacataaattatctt

SEQ ID NO: 267168 - DNA, 20 bp, Artificial Sequence
  Description of Artificial Sequence: Synthetic oligonucleotide
  Target: LAMA2; (-) strand; PAM type: YTN; PAM sequence: CTG
aacctatttgaaacataaat

SEQ ID NO: 267169 - DNA, 20 bp, Artificial Sequence
  Description of Artificial Sequence: Synthetic oligonucleotide
  Target: LAMA2; (-) strand; PAM type: YTN; PAM sequence: CTA
tcaatctgaacctatttgaa

SEQ ID NO: 267170 - DNA, 20 bp, Artificial Sequence
  Description of Artificial Sequence: Synthetic oligonucleotide
  Target: LAMA2; (-) strand; PAM type: YTN; PAM sequence: TTC
tatcaatctgaacctatttg

SEQ ID NO: 267171 - DNA, 20 bp, Artificial Sequence
  Description of Artificial Sequence: Synthetic oligonucleotide
  Target: LAMA2; (-) strand; PAM type: YTN; PAM sequence: TTC
agacagatatgttctatcaa

SEQ ID NO: 267172 - DNA, 20 bp, Artificial Sequence
  Description of Artificial Sequence: Synthetic oligonucleotide
  Target: LAMA2; (-) strand; PAM type: YTN; PAM sequence: TTC
cattcagacagatatgttct

SEQ ID NO: 267173 - DNA, 20 bp, Artificial Sequence
  Description of Artificial Sequence: Synthetic oligonucleotide
  Target: LAMA2; (-) strand; PAM type: YTN; PAM sequence: TTT
ccattcagacagatatgttc

SEQ ID NO: 267174 - DNA, 20 bp, Artificial Sequence
  Description of Artificial Sequence: Synthetic oligonucleotide
  Target: LAMA2; (-) strand; PAM type: YTN; PAM sequence: TTG
catatttccattcagacaga

SEQ ID NO: 267175 - DNA, 20 bp, Artificial Sequence
  Description of Artificial Sequence: Synthetic oligonucleotide
  Target: LAMA2; (-) strand; PAM type: YTN; PAM sequence: TTT
gcatatttccattcagacag

SEQ ID NO: 267176 - DNA, 20 bp, Artificial Sequence
  Description of Artificial Sequence: Synthetic oligonucleotide
  Target: LAMA2; (-) strand; PAM type: YTN; PAM sequence: CTA
tttgcatatttccattcaga

SEQ ID NO: 267177 - DNA, 20 bp, Artificial Sequence
  Description of Artificial Sequence: Synthetic oligonucleotide
  Target: LAMA2; (-) strand; PAM type: YTN; PAM sequence: CTG
cagctatttgcatatttcca

SEQ ID NO: 267178 - DNA, 20 bp, Artificial Sequence
  Description of Artificial Sequence: Synthetic oligonucleotide
  Target: LAMA2; (-) strand; PAM type: YTN; PAM sequence: TTC
ctgcagctatttgcatattt

SEQ ID NO: 267179 - DNA, 20 bp, Artificial Sequence
  Description of Artificial Sequence: Synthetic oligonucleotide
  Target: LAMA2; (-) strand; PAM type: YTN; PAM sequence: TTT
cctgcagctatttgcatatt

SEQ ID NO: 267180 - DNA, 20 bp, Artificial Sequence
  Description of Artificial Sequence: Synthetic oligonucleotide
  Target: LAMA2; (-) strand; PAM type: YTN; PAM sequence: TTC
catttcctgcagctatttgc

SEQ ID NO: 267181 - DNA, 20 bp, Artificial Sequence
  Description of Artificial Sequence: Synthetic oligonucleotide
  Target: LAMA2; (-) strand; PAM type: YTN; PAM sequence: TTT
ccatttcctgcagctatttg

SEQ ID NO: 267182 - DNA, 20 bp, Artificial Sequence
  Description of Artificial Sequence: Synthetic oligonucleotide
  Target: LAMA2; (-) strand; PAM type: YTN; PAM sequence: TTC
agatttccatttcctgcagc

SEQ ID NO: 267183 - DNA, 20 bp, Artificial Sequence
  Description of Artificial Sequence: Synthetic oligonucleotide
  Target: LAMA2; (-) strand; PAM type: YTN; PAM sequence: TTT
cagatttccatttcctgcag

SEQ ID NO: 267184 - DNA, 20 bp, Artificial Sequence
  Description of Artificial Sequence: Synthetic oligonucleotide
  Target: LAMA2; (-) strand; PAM type: YTN; PAM sequence: TTT
tcagatttccatttcctgca

SEQ ID NO: 267185 - DNA, 20 bp, Artificial Sequence
  Description of Artificial Sequence: Synthetic oligonucleotide
  Target: LAMA2; (-) strand; PAM type: YTN; PAM sequence: CTG
caattttcagatttccattt

SEQ ID NO: 267186 - DNA, 20 bp, Artificial Sequence
  Description of Artificial Sequence: Synthetic oligonucleotide
  Target: LAMA2; (-) strand; PAM type: YTN; PAM sequence: CTC
ctgcaattttcagatttcca

SEQ ID NO: 267187 - DNA, 20 bp, Artificial Sequence
  Description of Artificial Sequence: Synthetic oligonucleotide
  Target: LAMA2; (-) strand; PAM type: YTN; PAM sequence: CTG
ctcctgcaattttcagattt

SEQ ID NO: 267188 - DNA, 20 bp, Artificial Sequence
  Description of Artificial Sequence: Synthetic oligonucleotide
  Target: LAMA2; (-) strand; PAM type: YTN; PAM sequence: TTC
atctgctcctgcaattttca

SEQ ID NO: 267189 - DNA, 20 bp, Artificial Sequence
  Description of Artificial Sequence: Synthetic oligonucleotide
  Target: LAMA2; (-) strand; PAM type: YTN; PAM sequence: CTT
catctgctcctgcaattttc

SEQ ID NO: 267190 - DNA, 20 bp, Artificial Sequence
  Description of Artificial Sequence: Synthetic oligonucleotide
  Target: LAMA2; (-) strand; PAM type: YTN; PAM sequence: TTC
cttcatctgctcctgcaatt

SEQ ID NO: 267191 - DNA, 20 bp, Artificial Sequence
  Description of Artificial Sequence: Synthetic oligonucleotide
  Target: LAMA2; (-) strand; PAM type: YTN; PAM sequence: CTT
ccttcatctgctcctgcaat

SEQ ID NO: 267192 - DNA, 20 bp, Artificial Sequence
  Description of Artificial Sequence: Synthetic oligonucleotide
  Target: LAMA2; (-) strand; PAM type: YTN; PAM sequence: CTC
ttccttcatctgctcctgca

SEQ ID NO: 267193 - DNA, 20 bp, Artificial Sequence
  Description of Artificial Sequence: Synthetic oligonucleotide
  Target: LAMA2; (-) strand; PAM type: YTN; PAM sequence: TTA
acatatctcttccttcatct

SEQ ID NO: 267194 - DNA, 20 bp, Artificial Sequence
  Description of Artificial Sequence: Synthetic oligonucleotide
  Target: LAMA2; (-) strand; PAM type: YTN; PAM sequence: TTA
ttaacatatctcttccttca

SEQ ID NO: 267195 - DNA, 20 bp, Artificial Sequence
  Description of Artificial Sequence: Synthetic oligonucleotide
  Target: LAMA2; (-) strand; PAM type: YTN; PAM sequence: CTT
attaacatatctcttccttc

SEQ ID NO: 267196 - DNA, 20 bp, Artificial Sequence
  Description of Artificial Sequence: Synthetic oligonucleotide
  Target: LAMA2; (-) strand; PAM type: YTN; PAM sequence: TTC
acttattaacatatctcttc

SEQ ID NO: 267197 - DNA, 20 bp, Artificial Sequence
  Description of Artificial Sequence: Synthetic oligonucleotide
  Target: LAMA2; (-) strand; PAM type: YTN; PAM sequence: TTA
attcacttattaacatatct

SEQ ID NO: 267198 - DNA, 20 bp, Artificial Sequence
  Description of Artificial Sequence: Synthetic oligonucleotide
  Target: LAMA2; (-) strand; PAM type: YTN; PAM sequence: TTT
aattcacttattaacatatc

SEQ ID NO: 267199 - DNA, 20 bp, Artificial Sequence
  Description of Artificial Sequence: Synthetic oligonucleotide
  Target: LAMA2; (-) strand; PAM type: YTN; PAM sequence: CTT
taattcacttattaacatat

SEQ ID NO: 267200 - DNA, 20 bp, Artificial Sequence
  Description of Artificial Sequence: Synthetic oligonucleotide
  Target: LAMA2; (-) strand; PAM type: YTN; PAM sequence: TTA
tccaactttaattcacttat

SEQ ID NO: 267201 - DNA, 20 bp, Artificial Sequence
  Description of Artificial Sequence: Synthetic oligonucleotide
  Target: LAMA2; (-) strand; PAM type: YTN; PAM sequence: CTT
atccaactttaattcactta

SEQ ID NO: 267202 - DNA, 20 bp, Artificial Sequence
  Description of Artificial Sequence: Synthetic oligonucleotide
  Target: LAMA2; (-) strand; PAM type: YTN; PAM sequence: CTG
ggaaatcttatccaacttta

SEQ ID NO: 267203 - DNA, 20 bp, Artificial Sequence
  Description of Artificial Sequence: Synthetic oligonucleotide
  Target: LAMA2; (-) strand; PAM type: YTN; PAM sequence: TTA
gcctgggaaatcttatccaa

SEQ ID NO: 267204 - DNA, 20 bp, Artificial Sequence
  Description of Artificial Sequence: Synthetic oligonucleotide
  Target: LAMA2; (-) strand; PAM type: YTN; PAM sequence: TTG
gataacattagcctgggaaa

SEQ ID NO: 267205 - DNA, 20 bp, Artificial Sequence
  Description of Artificial Sequence: Synthetic oligonucleotide
  Target: LAMA2; (-) strand; PAM type: YTN; PAM sequence: CTT
ggataacattagcctgggaa

SEQ ID NO: 267206 - DNA, 20 bp, Artificial Sequence
  Description of Artificial Sequence: Synthetic oligonucleotide
  Target: LAMA2; (-) strand; PAM type: YTN; PAM sequence: CTC
gccttggataacattagcct

SEQ ID NO: 267207 - DNA, 20 bp, Artificial Sequence
  Description of Artificial Sequence: Synthetic oligonucleotide
  Target: LAMA2; (-) strand; PAM type: YTN; PAM sequence: CTA
tatactcgccttggataaca

SEQ ID NO: 267208 - DNA, 20 bp, Artificial Sequence
  Description of Artificial Sequence: Synthetic oligonucleotide
  Target: LAMA2; (-) strand; PAM type: YTN; PAM sequence: TTC
tatatactcgccttggataa

SEQ ID NO: 267209 - DNA, 20 bp, Artificial Sequence
  Description of Artificial Sequence: Synthetic oligonucleotide
  Target: LAMA2; (-) strand; PAM type: YTN; PAM sequence: TTT
ctatatactcgccttggata

SEQ ID NO: 267210 - DNA, 20 bp, Artificial Sequence
  Description of Artificial Sequence: Synthetic oligonucleotide
  Target: LAMA2; (-) strand; PAM type: YTN; PAM sequence: CTT
tctatatactcgccttggat

SEQ ID NO: 267211 - DNA, 20 bp, Artificial Sequence
  Description of Artificial Sequence: Synthetic oligonucleotide
  Target: LAMA2; (-) strand; PAM type: YTN; PAM sequence: TTC
tttctatatactcgccttgg

SEQ ID NO: 267212 - DNA, 20 bp, Artificial Sequence
  Description of Artificial Sequence: Synthetic oligonucleotide
  Target: LAMA2; (-) strand; PAM type: YTN; PAM sequence: TTC
attctttctatatactcgcc

SEQ ID NO: 267213 - DNA, 20 bp, Artificial Sequence
  Description of Artificial Sequence: Synthetic oligonucleotide
  Target: LAMA2; (-) strand; PAM type: YTN; PAM sequence: TTT
cattctttctatatactcgc

SEQ ID NO: 267214 - DNA, 20 bp, Artificial Sequence
  Description of Artificial Sequence: Synthetic oligonucleotide
  Target: LAMA2; (-) strand; PAM type: YTN; PAM sequence: CTT
tcattctttctatatactcg

SEQ ID NO: 267215 - DNA, 20 bp, Artificial Sequence
  Description of Artificial Sequence: Synthetic oligonucleotide
  Target: LAMA2; (-) strand; PAM type: YTN; PAM sequence: CTG
tctttcattctttctatata

SEQ ID NO: 267216 - DNA, 20 bp, Artificial Sequence
  Description of Artificial Sequence: Synthetic oligonucleotide
  Target: LAMA2; (-) strand; PAM type: YTN; PAM sequence: TTC
ccaacataaagtcctgtctt

SEQ ID NO: 267217 - DNA, 20 bp, Artificial Sequence
  Description of Artificial Sequence: Synthetic oligonucleotide
  Target: LAMA2; (-) strand; PAM type: YTN; PAM sequence: TTT
cccaacataaagtcctgtct

SEQ ID NO: 267218 - DNA, 20 bp, Artificial Sequence
  Description of Artificial Sequence: Synthetic oligonucleotide
  Target: LAMA2; (-) strand; PAM type: YTN; PAM sequence: CTT
tcccaacataaagtcctgtc

SEQ ID NO: 267219 - DNA, 20 bp, Artificial Sequence
  Description of Artificial Sequence: Synthetic oligonucleotide
  Target: LAMA2; (-) strand; PAM type: YTN; PAM sequence: CTC
ctttcccaacataaagtcct

SEQ ID NO: 267220 - DNA, 20 bp, Artificial Sequence
  Description of Artificial Sequence: Synthetic oligonucleotide
  Target: LAMA2; (-) strand; PAM type: YTN; PAM sequence: TTC
tcctttcccaacataaagtc

SEQ ID NO: 267221 - DNA, 20 bp, Artificial Sequence
  Description of Artificial Sequence: Synthetic oligonucleotide
  Target: LAMA2; (-) strand; PAM type: YTN; PAM sequence: TTT
ctcctttcccaacataaagt

SEQ ID NO: 267222 - DNA, 20 bp, Artificial Sequence
  Description of Artificial Sequence: Synthetic oligonucleotide
  Target: LAMA2; (-) strand; PAM type: YTN; PAM sequence: TTT
tctcctttcccaacataaag

SEQ ID NO: 267223 - DNA, 20 bp, Artificial Sequence
  Description of Artificial Sequence: Synthetic oligonucleotide
  Target: LAMA2; (-) strand; PAM type: YTN; PAM sequence: TTT
ttctcctttcccaacataaa

SEQ ID NO: 267224 - DNA, 20 bp, Artificial Sequence
  Description of Artificial Sequence: Synthetic oligonucleotide
  Target: LAMA2; (-) strand; PAM type: YTN; PAM sequence: CTT
tttctcctttcccaacataa

SEQ ID NO: 267225 - DNA, 20 bp, Artificial Sequence
  Description of Artificial Sequence: Synthetic oligonucleotide
  Target: LAMA2; (-) strand; PAM type: YTN; PAM sequence: TTC
tttttctcctttcccaacat

SEQ ID NO: 267226 - DNA, 20 bp, Artificial Sequence
  Description of Artificial Sequence: Synthetic oligonucleotide
  Target: LAMA2; (-) strand; PAM type: YTN; PAM sequence: CTT
ctttttctcctttcccaaca

SEQ ID NO: 267227 - DNA, 20 bp, Artificial Sequence
  Description of Artificial Sequence: Synthetic oligonucleotide
  Target: LAMA2; (-) strand; PAM type: YTN; PAM sequence: CTC
ttctttttctcctttcccaa

SEQ ID NO: 267228 - DNA, 20 bp, Artificial Sequence
  Description of Artificial Sequence: Synthetic oligonucleotide
  Target: LAMA2; (-) strand; PAM type: YTN; PAM sequence: TTG
gctcttctttttctcctttc

SEQ ID NO: 267229 - DNA, 20 bp, Artificial Sequence
  Description of Artificial Sequence: Synthetic oligonucleotide
  Target: LAMA2; (-) strand; PAM type: YTN; PAM sequence: CTT
ggctcttctttttctccttt

SEQ ID NO: 267230 - DNA, 20 bp, Artificial Sequence
  Description of Artificial Sequence: Synthetic oligonucleotide
  Target: LAMA2; (-) strand; PAM type: YTN; PAM sequence: CTG
ccttggctcttctttttctc

SEQ ID NO: 267231 - DNA, 20 bp, Artificial Sequence
  Description of Artificial Sequence: Synthetic oligonucleotide
  Target: LAMA2; (-) strand; PAM type: YTN; PAM sequence: CTC
ctgccttggctcttcttttt

SEQ ID NO: 267232 - DNA, 20 bp, Artificial Sequence
  Description of Artificial Sequence: Synthetic oligonucleotide
  Target: LAMA2; (-) strand; PAM type: YTN; PAM sequence: CTG
ctcctgccttggctcttctt

SEQ ID NO: 267233 - DNA, 20 bp, Artificial Sequence
  Description of Artificial Sequence: Synthetic oligonucleotide
  Target: LAMA2; (-) strand; PAM type: YTN; PAM sequence: CTG
actgctcctgccttggctct

SEQ ID NO: 267234 - DNA, 20 bp, Artificial Sequence
  Description of Artificial Sequence: Synthetic oligonucleotide
  Target: LAMA2; (-) strand; PAM type: YTN; PAM sequence: TTC
tgactgctcctgccttggct

SEQ ID NO: 267235 - DNA, 20 bp, Artificial Sequence
  Description of Artificial Sequence: Synthetic oligonucleotide
  Target: LAMA2; (-) strand; PAM type: YTN; PAM sequence: CTT
ctgactgctcctgccttggc

SEQ ID NO: 267236 - DNA, 20 bp, Artificial Sequence
  Description of Artificial Sequence: Synthetic oligonucleotide
  Target: LAMA2; (-) strand; PAM type: YTN; PAM sequence: CTC
ttctgactgctcctgccttg

SEQ ID NO: 267237 - DNA, 20 bp, Artificial Sequence
  Description of Artificial Sequence: Synthetic oligonucleotide
  Target: LAMA2; (-) strand; PAM type: YTN; PAM sequence: CTC
tcttctgactgctcctgcct

SEQ ID NO: 267238 - DNA, 20 bp, Artificial Sequence
  Description of Artificial Sequence: Synthetic oligonucleotide
  Target: LAMA2; (-) strand; PAM type: YTN; PAM sequence: TTC
cctctcttctgactgctcct

SEQ ID NO: 267239 - DNA, 20 bp, Artificial Sequence
  Description of Artificial Sequence: Synthetic oligonucleotide
  Target: LAMA2; (-) strand; PAM type: YTN; PAM sequence: CTG
ggttccctctcttctgactg

SEQ ID NO: 267240 - DNA, 20 bp, Artificial Sequence
  Description of Artificial Sequence: Synthetic oligonucleotide
  Target: LAMA2; (-) strand; PAM type: YTN; PAM sequence: TTG
gtgtcaatggcagtgccgcc

SEQ ID NO: 267241 - DNA, 20 bp, Artificial Sequence
  Description of Artificial Sequence: Synthetic oligonucleotide
  Target: LAMA2; (-) strand; PAM type: YTN; PAM sequence: CTT
ggtgtcaatggcagtgccgc

SEQ ID NO: 267242 - DNA, 20 bp, Artificial Sequence
  Description of Artificial Sequence: Synthetic oligonucleotide
  Target: LAMA2; (-) strand; PAM type: YTN; PAM sequence: CTC
ccttggtgtcaatggcagtg

SEQ ID NO: 267243 - DNA, 20 bp, Artificial Sequence
  Description of Artificial Sequence: Synthetic oligonucleotide
  Target: LAMA2; (-) strand; PAM type: YTN; PAM sequence: CTC
tcccttggtgtcaatggcag

SEQ ID NO: 267244 - DNA, 20 bp, Artificial Sequence
  Description of Artificial Sequence: Synthetic oligonucleotide
  Target: LAMA2; (-) strand; PAM type: YTN; PAM sequence: TTC
tctcccttggtgtcaatggc

SEQ ID NO: 267245 - DNA, 20 bp, Artificial Sequence
  Description of Artificial Sequence: Synthetic oligonucleotide
  Target: LAMA2; (-) strand; PAM type: YTN; PAM sequence: CTT
ctctcccttggtgtcaatgg

SEQ ID NO: 267246 - DNA, 20 bp, Artificial Sequence
  Description of Artificial Sequence: Synthetic oligonucleotide
  Target: LAMA2; (-) strand; PAM type: YTN; PAM sequence: CTC
ttctctcccttggtgtcaat

SEQ ID NO: 267247 - DNA, 20 bp, Artificial Sequence
  Description of Artificial Sequence: Synthetic oligonucleotide
  Target: LAMA2; (-) strand; PAM type: YTN; PAM sequence: CTG
ctcttctctcccttggtgtc

SEQ ID NO: 267248 - DNA, 20 bp, Artificial Sequence
  Description of Artificial Sequence: Synthetic oligonucleotide
  Target: LAMA2; (-) strand; PAM type: YTN; PAM sequence: TTC
actgctcttctctcccttgg

SEQ ID NO: 267249 - DNA, 20 bp, Artificial Sequence
  Description of Artificial Sequence: Synthetic oligonucleotide
  Target: LAMA2; (-) strand; PAM type: YTN; PAM sequence: CTG
ttcactgctcttctctccct

SEQ ID NO: 267250 - DNA, 20 bp, Artificial Sequence
  Description of Artificial Sequence: Synthetic oligonucleotide
  Target: LAMA2; (-) strand; PAM type: YTN; PAM sequence: CTG
atgctgttcactgctcttct

SEQ ID NO: 267251 - DNA, 20 bp, Artificial Sequence
  Description of Artificial Sequence: Synthetic oligonucleotide
  Target: LAMA2; (-) strand; PAM type: YTN; PAM sequence: TTG
tgagagcagcaactgatgct

SEQ ID NO: 267252 - DNA, 20 bp, Artificial Sequence
  Description of Artificial Sequence: Synthetic oligonucleotide
  Target: LAMA2; (-) strand; PAM type: YTN; PAM sequence: CTT
gtgagagcagcaactgatgc

SEQ ID NO: 267253 - DNA, 20 bp, Artificial Sequence
  Description of Artificial Sequence: Synthetic oligonucleotide
  Target: LAMA2; (-) strand; PAM type: YTN; PAM sequence: CTC
ccttgtgagagcagcaactg

SEQ ID NO: 267254 - DNA, 20 bp, Artificial Sequence
  Description of Artificial Sequence: Synthetic oligonucleotide
  Target: LAMA2; (-) strand; PAM type: YTN; PAM sequence: TTG
ggtctcccttgtgagagcag

SEQ ID NO: 267255 - DNA, 20 bp, Artificial Sequence
  Description of Artificial Sequence: Synthetic oligonucleotide
  Target: LAMA2; (-) strand; PAM type: YTN; PAM sequence: TTC
attgggtctcccttgtgaga

SEQ ID NO: 267256 - DNA, 20 bp, Artificial Sequence
  Description of Artificial Sequence: Synthetic oligonucleotide
  Target: LAMA2; (-) strand; PAM type: YTN; PAM sequence: TTG
ccaccatattcattgggtct

SEQ ID NO: 267257 - DNA, 20 bp, Artificial Sequence
  Description of Artificial Sequence: Synthetic oligonucleotide
  Target: LAMA2; (-) strand; PAM type: YTN; PAM sequence: TTA
caatagtcaattgccaccat

SEQ ID NO: 267258 - DNA, 20 bp, Artificial Sequence
  Description of Artificial Sequence: Synthetic oligonucleotide
  Target: LAMA2; (-) strand; PAM type: YTN; PAM sequence: CTC
aattacaatagtcaattgcc

SEQ ID NO: 267259 - DNA, 20 bp, Artificial Sequence
  Description of Artificial Sequence: Synthetic oligonucleotide
  Target: LAMA2; (-) strand; PAM type: YTN; PAM sequence: TTG
ctcaattacaatagtcaatt

SEQ ID NO: 267260 - DNA, 20 bp, Artificial Sequence
  Description of Artificial Sequence: Synthetic oligonucleotide
  Target: LAMA2; (-) strand; PAM type: YTN; PAM sequence: TTT
gctcaattacaatagtcaat

SEQ ID NO: 267261 - DNA, 20 bp, Artificial Sequence
  Description of Artificial Sequence: Synthetic oligonucleotide
  Target: LAMA2; (-) strand; PAM type: YTN; PAM sequence: TTA
tttgctcaattacaatagtc

SEQ ID NO: 267262 - DNA, 20 bp, Artificial Sequence
  Description of Artificial Sequence: Synthetic oligonucleotide
  Target: LAMA2; (-) strand; PAM type: YTN; PAM sequence: TTT
atttgctcaattacaatagt

SEQ ID NO: 267263 - DNA, 20 bp, Artificial Sequence
  Description of Artificial Sequence: Synthetic oligonucleotide
  Target: LAMA2; (-) strand; PAM type: YTN; PAM sequence: TTC
aggcggcaagcccatttatt

SEQ ID NO: 267264 - DNA, 20 bp, Artificial Sequence
  Description of Artificial Sequence: Synthetic oligonucleotide
  Target: LAMA2; (-) strand; PAM type: YTN; PAM sequence: CTT
caggcggcaagcccatttat

SEQ ID NO: 267265 - DNA, 20 bp, Artificial Sequence
  Description of Artificial Sequence: Synthetic oligonucleotide
  Target: LAMA2; (-) strand; PAM type: YTN; PAM sequence: CTA
tgtgcttcaggcggcaagcc

SEQ ID NO: 267266 - DNA, 20 bp, Artificial Sequence
  Description of Artificial Sequence: Synthetic oligonucleotide
  Target: LAMA2; (-) strand; PAM type: YTN; PAM sequence: TTC
tatgtgcttcaggcggcaag

SEQ ID NO: 267267 - DNA, 20 bp, Artificial Sequence
  Description of Artificial Sequence: Synthetic oligonucleotide
  Target: LAMA2; (-) strand; PAM type: YTN; PAM sequence: CTT
ctatgtgcttcaggcggcaa

SEQ ID NO: 267268 - DNA, 20 bp, Artificial Sequence
  Description of Artificial Sequence: Synthetic oligonucleotide
  Target: LAMA2; (-) strand; PAM type: YTN; PAM sequence: TTG
gcttctatgtgcttcaggcg

SEQ ID NO: 267269 - DNA, 20 bp, Artificial Sequence
  Description of Artificial Sequence: Synthetic oligonucleotide
  Target: LAMA2; (-) strand; PAM type: YTN; PAM sequence: TTA
ttggcttctatgtgcttcag

SEQ ID NO: 267270 - DNA, 20 bp, Artificial Sequence
  Description of Artificial Sequence: Synthetic oligonucleotide
  Target: LAMA2; (-) strand; PAM type: YTN; PAM sequence: CTC
cgaagccagtgccaacgtta

SEQ ID NO: 267271 - DNA, 20 bp, Artificial Sequence
  Description of Artificial Sequence: Synthetic oligonucleotide
  Target: LAMA2; (-) strand; PAM type: YTN; PAM sequence: TTC
tccgaagccagtgccaacgt

SEQ ID NO: 267272 - DNA, 20 bp, Artificial Sequence
  Description of Artificial Sequence: Synthetic oligonucleotide
  Target: LAMA2; (-) strand; PAM type: YTN; PAM sequence: TTT
ctccgaagccagtgccaacg

SEQ ID NO: 267273 - DNA, 20 bp, Artificial Sequence
  Description of Artificial Sequence: Synthetic oligonucleotide
  Target: LAMA2; (-) strand; PAM type: YTN; PAM sequence: TTT
tctccgaagccagtgccaac

SEQ ID NO: 267274 - DNA, 20 bp, Artificial Sequence
  Description of Artificial Sequence: Synthetic oligonucleotide
  Target: LAMA2; (-) strand; PAM type: YTN; PAM sequence: CTT
ttctccgaagccagtgccaa

SEQ ID NO: 267275 - DNA, 20 bp, Artificial Sequence
  Description of Artificial Sequence: Synthetic oligonucleotide
  Target: LAMA2; (-) strand; PAM type: YTN; PAM sequence: TTC
ttttctccgaagccagtgcc

SEQ ID NO: 267276 - DNA, 20 bp, Artificial Sequence
  Description of Artificial Sequence: Synthetic oligonucleotide
  Target: LAMA2; (-) strand; PAM type: YTN; PAM sequence: TTT
cttttctccgaagccagtgc

SEQ ID NO: 267277 - DNA, 20 bp, Artificial Sequence
  Description of Artificial Sequence: Synthetic oligonucleotide
  Target: LAMA2; (-) strand; PAM type: YTN; PAM sequence: CTT
tcttttctccgaagccagtg

SEQ ID NO: 267278 - DNA, 20 bp, Artificial Sequence
  Description of Artificial Sequence: Synthetic oligonucleotide
  Target: LAMA2; (-) strand; PAM type: YTN; PAM sequence: TTG
cagtaaagcctttcttttct

SEQ ID NO: 267279 - DNA, 20 bp, Artificial Sequence
  Description of Artificial Sequence: Synthetic oligonucleotide
  Target: LAMA2; (-) strand; PAM type: YTN; PAM sequence: TTT
gcagtaaagcctttcttttc

SEQ ID NO: 267280 - DNA, 20 bp, Artificial Sequence
  Description of Artificial Sequence: Synthetic oligonucleotide
  Target: LAMA2; (-) strand; PAM type: YTN; PAM sequence: TTT
tgcagtaaagcctttctttt

SEQ ID NO: 267281 - DNA, 20 bp, Artificial Sequence
  Description of Artificial Sequence: Synthetic oligonucleotide
  Target: LAMA2; (-) strand; PAM type: YTN; PAM sequence: CTG
aacaattttgcagtaaagcc

SEQ ID NO: 267282 - DNA, 20 bp, Artificial Sequence
  Description of Artificial Sequence: Synthetic oligonucleotide
  Target: LAMA2; (-) strand; PAM type: YTN; PAM sequence: TTG
ctgaacaattttgcagtaaa

SEQ ID NO: 267283 - DNA, 20 bp, Artificial Sequence
  Description of Artificial Sequence: Synthetic oligonucleotide
  Target: LAMA2; (-) strand; PAM type: YTN; PAM sequence: CTT
gctgaacaattttgcagtaa

SEQ ID NO: 267284 - DNA, 20 bp, Artificial Sequence
  Description of Artificial Sequence: Synthetic oligonucleotide
  Target: LAMA2; (-) strand; PAM type: YTN; PAM sequence: CTC
cttgctgaacaattttgcag

SEQ ID NO: 267285 - DNA, 20 bp, Artificial Sequence
  Description of Artificial Sequence: Synthetic oligonucleotide
  Target: LAMA2; (-) strand; PAM type: YTN; PAM sequence: TTG
tctccttgctgaacaatttt

SEQ ID NO: 267286 - DNA, 20 bp, Artificial Sequence
  Description of Artificial Sequence: Synthetic oligonucleotide
  Target: LAMA2; (-) strand; PAM type: YTN; PAM sequence: CTT
gtctccttgctgaacaattt

SEQ ID NO: 267287 - DNA, 20 bp, Artificial Sequence
  Description of Artificial Sequence: Synthetic oligonucleotide
  Target: LAMA2; (-) strand; PAM type: YTN; PAM sequence: CTC
ttgtctccttgctgaacaat

SEQ ID NO: 267288 - DNA, 20 bp, Artificial Sequence
  Description of Artificial Sequence: Synthetic oligonucleotide
  Target: LAMA2; (-) strand; PAM type: YTN; PAM sequence: CTG
actcttgtctccttgctgaa

SEQ ID NO: 267289 - DNA, 20 bp, Artificial Sequence
  Description of Artificial Sequence: Synthetic oligonucleotide
  Target: LAMA2; (-) strand; PAM type: YTN; PAM sequence: TTG
aacctgactcttgtctcctt

SEQ ID NO: 267290 - DNA, 20 bp, Artificial Sequence
  Description of Artificial Sequence: Synthetic oligonucleotide
  Target: LAMA2; (-) strand; PAM type: YTN; PAM sequence: TTT
gaacctgactcttgtctcct

SEQ ID NO: 267291 - DNA, 20 bp, Artificial Sequence
  Description of Artificial Sequence: Synthetic oligonucleotide
  Target: LAMA2; (-) strand; PAM type: YTN; PAM sequence: TTA
gggagacagatttgaacctg

SEQ ID NO: 267292 - DNA, 20 bp, Artificial Sequence
  Description of Artificial Sequence: Synthetic oligonucleotide
  Target: LAMA2; (-) strand; PAM type: YTN; PAM sequence: TTC
cccatatcccaaattaggga

SEQ ID NO: 267293 - DNA, 20 bp, Artificial Sequence
  Description of Artificial Sequence: Synthetic oligonucleotide
  Target: LAMA2; (-) strand; PAM type: YTN; PAM sequence: CTT
ccccatatcccaaattaggg

SEQ ID NO: 267294 - DNA, 20 bp, Artificial Sequence
  Description of Artificial Sequence: Synthetic oligonucleotide
  Target: LAMA2; (-) strand; PAM type: YTN; PAM sequence: TTG
caaccttccccatatcccaa

SEQ ID NO: 267295 - DNA, 20 bp, Artificial Sequence
  Description of Artificial Sequence: Synthetic oligonucleotide
  Target: LAMA2; (-) strand; PAM type: YTN; PAM sequence: CTT
gcaaccttccccatatccca

SEQ ID NO: 267296 - DNA, 20 bp, Artificial Sequence
  Description of Artificial Sequence: Synthetic oligonucleotide
  Target: LAMA2; (-) strand; PAM type: YTN; PAM sequence: CTG
accccttgcaaccttcccca

SEQ ID NO: 267297 - DNA, 20 bp, Artificial Sequence
  Description of Artificial Sequence: Synthetic oligonucleotide
  Target: LAMA2; (-) strand; PAM type: YTN; PAM sequence: TTC
tgaccccttgcaaccttccc

SEQ ID NO: 267298 - DNA, 20 bp, Artificial Sequence
  Description of Artificial Sequence: Synthetic oligonucleotide
  Target: LAMA2; (-) strand; PAM type: YTN; PAM sequence: CTT
ctgaccccttgcaaccttcc

SEQ ID NO: 267299 - DNA, 20 bp, Artificial Sequence
  Description of Artificial Sequence: Synthetic oligonucleotide
  Target: LAMA2; (-) strand; PAM type: YTN; PAM sequence: TTG
ccttctgaccccttgcaacc

SEQ ID NO: 267300 - DNA, 20 bp, Artificial Sequence
  Description of Artificial Sequence: Synthetic oligonucleotide
  Target: LAMA2; (-) strand; PAM type: YTN; PAM sequence: CTT
gccttctgaccccttgcaac

SEQ ID NO: 267301 - DNA, 20 bp, Artificial Sequence
  Description of Artificial Sequence: Synthetic oligonucleotide
  Target: LAMA2; (-) strand; PAM type: YTN; PAM sequence: TTG
ccttgccttctgaccccttg

SEQ ID NO: 267302 - DNA, 20 bp, Artificial Sequence
  Description of Artificial Sequence: Synthetic oligonucleotide
  Target: LAMA2; (-) strand; PAM type: YTN; PAM sequence: TTT
gccttgccttctgacccctt

SEQ ID NO: 267303 - DNA, 20 bp, Artificial Sequence
  Description of Artificial Sequence: Synthetic oligonucleotide
  Target: LAMA2; (-) strand; PAM type: YTN; PAM sequence: CTT
tgccttgccttctgacccct

SEQ ID NO: 267304 - DNA, 20 bp, Artificial Sequence
  Description of Artificial Sequence: Synthetic oligonucleotide
  Target: LAMA2; (-) strand; PAM type: YTN; PAM sequence: CTA
aatcctttgccttgccttct

SEQ ID NO: 267305 - DNA, 20 bp, Artificial Sequence
  Description of Artificial Sequence: Synthetic oligonucleotide
  Target: LAMA2; (-) strand; PAM type: YTN; PAM sequence: TTC
taaatcctttgccttgcctt

SEQ ID NO: 267306 - DNA, 20 bp, Artificial Sequence
  Description of Artificial Sequence: Synthetic oligonucleotide
  Target: LAMA2; (-) strand; PAM type: YTN; PAM sequence: TTT
ctaaatcctttgccttgcct

SEQ ID NO: 267307 - DNA, 20 bp, Artificial Sequence
  Description of Artificial Sequence: Synthetic oligonucleotide
  Target: LAMA2; (-) strand; PAM type: YTN; PAM sequence: CTG
ccaagccagcatttctaaat

SEQ ID NO: 267308 - DNA, 20 bp, Artificial Sequence
  Description of Artificial Sequence: Synthetic oligonucleotide
  Target: LAMA2; (-) strand; PAM type: YTN; PAM sequence: CTC
tgccaagccagcatttctaa

SEQ ID NO: 267309 - DNA, 20 bp, Artificial Sequence
  Description of Artificial Sequence: Synthetic oligonucleotide
  Target: LAMA2; (-) strand; PAM type: YTN; PAM sequence: CTC
caatcagactctgccaagcc

SEQ ID NO: 267310 - DNA, 20 bp, Artificial Sequence
  Description of Artificial Sequence: Synthetic oligonucleotide
  Target: LAMA2; (-) strand; PAM type: YTN; PAM sequence: TTG
aagccctccaatcagactct

SEQ ID NO: 267311 - DNA, 20 bp, Artificial Sequence
  Description of Artificial Sequence: Synthetic oligonucleotide
  Target: LAMA2; (-) strand; PAM type: YTN; PAM sequence: TTT
gaagccctccaatcagactc

SEQ ID NO: 267312 - DNA, 20 bp, Artificial Sequence
  Description of Artificial Sequence: Synthetic oligonucleotide
  Target: LAMA2; (-) strand; PAM type: YTN; PAM sequence: CTG
taagtgatcaaatttgaagc

SEQ ID NO: 267313 - DNA, 20 bp, Artificial Sequence
  Description of Artificial Sequence: Synthetic oligonucleotide
  Target: LAMA2; (-) strand; PAM type: YTN; PAM sequence: TTA
ctgtaagtgatcaaatttga

SEQ ID NO: 267314 - DNA, 20 bp, Artificial Sequence
  Description of Artificial Sequence: Synthetic oligonucleotide
  Target: LAMA2; (-) strand; PAM type: YTN; PAM sequence: CTT
actgtaagtgatcaaatttg

SEQ ID NO: 267315 - DNA, 20 bp, Artificial Sequence
  Description of Artificial Sequence: Synthetic oligonucleotide
  Target: LAMA2; (-) strand; PAM type: YTN; PAM sequence: CTC
aatataccttactgtaagtg

SEQ ID NO: 267316 - DNA, 20 bp, Artificial Sequence
  Description of Artificial Sequence: Synthetic oligonucleotide
  Target: LAMA2; (-) strand; PAM type: YTN; PAM sequence: CTG
cctcaatataccttactgta

SEQ ID NO: 267317 - DNA, 20 bp, Artificial Sequence
  Description of Artificial Sequence: Synthetic oligonucleotide
  Target: LAMA2; (-) strand; PAM type: YTN; PAM sequence: CTA
aaatctgcctcaatatacct

SEQ ID NO: 267318 - DNA, 20 bp, Artificial Sequence
  Description of Artificial Sequence: Synthetic oligonucleotide
  Target: LAMA2; (-) strand; PAM type: YTN; PAM sequence: TTG
gcccagaagatccagggcta

SEQ ID NO: 267319 - DNA, 20 bp, Artificial Sequence
  Description of Artificial Sequence: Synthetic oligonucleotide
  Target: LAMA2; (-) strand; PAM type: YTN; PAM sequence: TTC
agaaatgaggggtccattgg

SEQ ID NO: 267320 - DNA, 20 bp, Artificial Sequence
  Description of Artificial Sequence: Synthetic oligonucleotide
  Target: LAMA2; (-) strand; PAM type: YTN; PAM sequence: CTT
cagaaatgaggggtccattg

SEQ ID NO: 267321 - DNA, 20 bp, Artificial Sequence
  Description of Artificial Sequence: Synthetic oligonucleotide
  Target: LAMA2; (-) strand; PAM type: YTN; PAM sequence: CTC
cttcagaaatgaggggtcca

SEQ ID NO: 267322 - DNA, 20 bp, Artificial Sequence
  Description of Artificial Sequence: Synthetic oligonucleotide
  Target: LAMA2; (-) strand; PAM type: YTN; PAM sequence: TTG
gaactccttcagaaatgagg

SEQ ID NO: 267323 - DNA, 20 bp, Artificial Sequence
  Description of Artificial Sequence: Synthetic oligonucleotide
  Target: LAMA2; (-) strand; PAM type: YTN; PAM sequence: CTG
gacattggaactccttcaga

SEQ ID NO: 267324 - DNA, 20 bp, Artificial Sequence
  Description of Artificial Sequence: Synthetic oligonucleotide
  Target: LAMA2; (-) strand; PAM type: YTN; PAM sequence: TTG
aaccaacaagacagggacaa

SEQ ID NO: 267325 - DNA, 20 bp, Artificial Sequence
  Description of Artificial Sequence: Synthetic oligonucleotide
  Target: LAMA2; (-) strand; PAM type: YTN; PAM sequence: CTT
gaaccaacaagacagggaca

SEQ ID NO: 267326 - DNA, 20 bp, Artificial Sequence
  Description of Artificial Sequence: Synthetic oligonucleotide
  Target: LAMA2; (-) strand; PAM type: YTN; PAM sequence: CTC
cccttgaaccaacaagacag

SEQ ID NO: 267327 - DNA, 20 bp, Artificial Sequence
  Description of Artificial Sequence: Synthetic oligonucleotide
  Target: LAMA2; (-) strand; PAM type: YTN; PAM sequence: TTC
ctccccttgaaccaacaaga

SEQ ID NO: 267328 - DNA, 20 bp, Artificial Sequence
  Description of Artificial Sequence: Synthetic oligonucleotide
  Target: LAMA2; (-) strand; PAM type: YTN; PAM sequence: CTA
ttcctccccttgaaccaaca

SEQ ID NO: 267329 - DNA, 20 bp, Artificial Sequence
  Description of Artificial Sequence: Synthetic oligonucleotide
  Target: LAMA2; (-) strand; PAM type: YTN; PAM sequence: CTA
acaacaccaggaaccaacta

SEQ ID NO: 267330 - DNA, 20 bp, Artificial Sequence
  Description of Artificial Sequence: Synthetic oligonucleotide
  Target: LAMA2; (-) strand; PAM type: YTN; PAM sequence: CTC
taacaacaccaggaaccaac

SEQ ID NO: 267331 - DNA, 20 bp, Artificial Sequence
  Description of Artificial Sequence: Synthetic oligonucleotide
  Target: LAMA2; (-) strand; PAM type: YTN; PAM sequence: TTG
acctctaacaacaccaggaa

SEQ ID NO: 267332 - DNA, 20 bp, Artificial Sequence
  Description of Artificial Sequence: Synthetic oligonucleotide
  Target: LAMA2; (-) strand; PAM type: YTN; PAM sequence: TTT
gacctctaacaacaccagga

SEQ ID NO: 267333 - DNA, 20 bp, Artificial Sequence
  Description of Artificial Sequence: Synthetic oligonucleotide
  Target: LAMA2; (-) strand; PAM type: YTN; PAM sequence: TTT
tgacctctaacaacaccagg

SEQ ID NO: 267334 - DNA, 20 bp, Artificial Sequence
  Description of Artificial Sequence: Synthetic oligonucleotide
  Target: LAMA2; (-) strand; PAM type: YTN; PAM sequence: TTC
aatagaaaaattttgacctc

SEQ ID NO: 267335 - DNA, 20 bp, Artificial Sequence
  Description of Artificial Sequence: Synthetic oligonucleotide
  Target: LAMA2; (-) strand; PAM type: YTN; PAM sequence: CTG
caagtcatgtagcccaggca

SEQ ID NO: 267336 - DNA, 20 bp, Artificial Sequence
  Description of Artificial Sequence: Synthetic oligonucleotide
  Target: LAMA2; (-) strand; PAM type: YTN; PAM sequence: TTA
ggtataacagagccaaaagc

SEQ ID NO: 267337 - DNA, 20 bp, Artificial Sequence
  Description of Artificial Sequence: Synthetic oligonucleotide
  Target: LAMA2; (-) strand; PAM type: YTN; PAM sequence: TTT
aggtataacagagccaaaag

SEQ ID NO: 267338 - DNA, 20 bp, Artificial Sequence
  Description of Artificial Sequence: Synthetic oligonucleotide
  Target: LAMA2; (-) strand; PAM type: YTN; PAM sequence: TTT
taggtataacagagccaaaa

SEQ ID NO: 267339 - DNA, 20 bp, Artificial Sequence
  Description of Artificial Sequence: Synthetic oligonucleotide
  Target: LAMA2; (-) strand; PAM type: YTN; PAM sequence: CTT
ttaggtataacagagccaaa

SEQ ID NO: 267340 - DNA, 20 bp, Artificial Sequence
  Description of Artificial Sequence: Synthetic oligonucleotide
  Target: LAMA2; (-) strand; PAM type: YTN; PAM sequence: TTA
ccttttaggtataacagagc

SEQ ID NO: 267341 - DNA, 20 bp, Artificial Sequence
  Description of Artificial Sequence: Synthetic oligonucleotide
  Target: LAMA2; (-) strand; PAM type: YTN; PAM sequence: TTG
ataacaaaatgtcaagttac

SEQ ID NO: 267342 - DNA, 20 bp, Artificial Sequence
  Description of Artificial Sequence: Synthetic oligonucleotide
  Target: LAMA2; (-) strand; PAM type: YTN; PAM sequence: CTG
ttgataacaaaatgtcaagt

SEQ ID NO: 267343 - DNA, 20 bp, Artificial Sequence
  Description of Artificial Sequence: Synthetic oligonucleotide
  Target: LAMA2; (-) strand; PAM type: YTN; PAM sequence: CTA
ccctgttgataacaaaatgt

SEQ ID NO: 267344 - DNA, 20 bp, Artificial Sequence
  Description of Artificial Sequence: Synthetic oligonucleotide
  Target: LAMA2; (-) strand; PAM type: YTN; PAM sequence: CTA
caggaccaaccaaaaccggg

SEQ ID NO: 267345 - DNA, 20 bp, Artificial Sequence
  Description of Artificial Sequence: Synthetic oligonucleotide
  Target: LAMA2; (-) strand; PAM type: YTN; PAM sequence: CTG
agagtgtaactacaggacca

SEQ ID NO: 267346 - DNA, 20 bp, Artificial Sequence
  Description of Artificial Sequence: Synthetic oligonucleotide
  Target: LAMA2; (-) strand; PAM type: YTN; PAM sequence: CTC
tgagagtgtaactacaggac

SEQ ID NO: 267347 - DNA, 20 bp, Artificial Sequence
  Description of Artificial Sequence: Synthetic oligonucleotide
  Target: LAMA2; (-) strand; PAM type: YTN; PAM sequence: TTC
atcaatgactctgagagtgt

SEQ ID NO: 267348 - DNA, 20 bp, Artificial Sequence
  Description of Artificial Sequence: Synthetic oligonucleotide
  Target: LAMA2; (-) strand; PAM type: YTN; PAM sequence: TTG
atggtcaaaattcatcaatg

SEQ ID NO: 267349 - DNA, 20 bp, Artificial Sequence
  Description of Artificial Sequence: Synthetic oligonucleotide
  Target: LAMA2; (-) strand; PAM type: YTN; PAM sequence: TTA
ttgatggtcaaaattcatca

SEQ ID NO: 267350 - DNA, 20 bp, Artificial Sequence
  Description of Artificial Sequence: Synthetic oligonucleotide
  Target: LAMA2; (-) strand; PAM type: YTN; PAM sequence: TTC
attattgatggtcaaaattc

SEQ ID NO: 267351 - DNA, 20 bp, Artificial Sequence
  Description of Artificial Sequence: Synthetic oligonucleotide
  Target: LAMA2; (-) strand; PAM type: YTN; PAM sequence: TTT
cattattgatggtcaaaatt

SEQ ID NO: 267352 - DNA, 20 bp, Artificial Sequence
  Description of Artificial Sequence: Synthetic oligonucleotide
  Target: LAMA2; (-) strand; PAM type: YTN; PAM sequence: CTT
tcattattgatggtcaaaat

SEQ ID NO: 267353 - DNA, 20 bp, Artificial Sequence
  Description of Artificial Sequence: Synthetic oligonucleotide
  Target: LAMA2; (-) strand; PAM type: YTN; PAM sequence: CTG
ctttcattattgatggtcaa

SEQ ID NO: 267354 - DNA, 20 bp, Artificial Sequence
  Description of Artificial Sequence: Synthetic oligonucleotide
  Target: LAMA2; (-) strand; PAM type: YTN; PAM sequence: TTC
tgctttcattattgatggtc

SEQ ID NO: 267355 - DNA, 20 bp, Artificial Sequence
  Description of Artificial Sequence: Synthetic oligonucleotide
  Target: LAMA2; (-) strand; PAM type: YTN; PAM sequence: TTC
aaattctgctttcattattg

SEQ ID NO: 267356 - DNA, 20 bp, Artificial Sequence
  Description of Artificial Sequence: Synthetic oligonucleotide
  Target: LAMA2; (-) strand; PAM type: YTN; PAM sequence: CTG
taaattcaaattctgctttc

SEQ ID NO: 267357 - DNA, 20 bp, Artificial Sequence
  Description of Artificial Sequence: Synthetic oligonucleotide
  Target: LAMA2; (-) strand; PAM type: YTN; PAM sequence: TTA
aaactgtaaattcaaattct

SEQ ID NO: 267358 - DNA, 20 bp, Artificial Sequence
  Description of Artificial Sequence: Synthetic oligonucleotide
  Target: LAMA2; (-) strand; PAM type: YTN; PAM sequence: CTT
aaaactgtaaattcaaattc

SEQ ID NO: 267359 - DNA, 20 bp, Artificial Sequence
  Description of Artificial Sequence: Synthetic oligonucleotide
  Target: LAMA2; (-) strand; PAM type: YTN; PAM sequence: TTC
ttaaaactgtaaattcaaat

SEQ ID NO: 267360 - DNA, 20 bp, Artificial Sequence
  Description of Artificial Sequence: Synthetic oligonucleotide
  Target: LAMA2; (-) strand; PAM type: YTN; PAM sequence: TTT
cttaaaactgtaaattcaaa

SEQ ID NO: 267361 - DNA, 20 bp, Artificial Sequence
  Description of Artificial Sequence: Synthetic oligonucleotide
  Target: LAMA2; (-) strand; PAM type: YTN; PAM sequence: TTG
aaatttcttaaaactgtaaa

SEQ ID NO: 267362 - DNA, 20 bp, Artificial Sequence
  Description of Artificial Sequence: Synthetic oligonucleotide
  Target: LAMA2; (-) strand; PAM type: YTN; PAM sequence: CTT
gaaatttcttaaaactgtaa

SEQ ID NO: 267363 - DNA, 20 bp, Artificial Sequence
  Description of Artificial Sequence: Synthetic oligonucleotide
  Target: LAMA2; (-) strand; PAM type: YTN; PAM sequence: TTC
ttgaaatttcttaaaactgt

SEQ ID NO: 267364 - DNA, 20 bp, Artificial Sequence
  Description of Artificial Sequence: Synthetic oligonucleotide
  Target: LAMA2; (-) strand; PAM type: YTN; PAM sequence: TTA
ttcttgaaatttcttaaaac

SEQ ID NO: 267365 - DNA, 20 bp, Artificial Sequence
  Description of Artificial Sequence: Synthetic oligonucleotide
  Target: LAMA2; (-) strand; PAM type: YTN; PAM sequence: TTT
attcttgaaatttcttaaaa

SEQ ID NO: 267366 - DNA, 20 bp, Artificial Sequence
  Description of Artificial Sequence: Synthetic oligonucleotide
  Target: LAMA2; (-) strand; PAM type: YTN; PAM sequence: TTT
tattcttgaaatttcttaaa

SEQ ID NO: 267367 - DNA, 20 bp, Artificial Sequence
  Description of Artificial Sequence: Synthetic oligonucleotide
  Target: LAMA2; (-) strand; PAM type: YTN; PAM sequence: CTA
tcattttattcttgaaattt

SEQ ID NO: 267368 - DNA, 20 bp, Artificial Sequence
  Description of Artificial Sequence: Synthetic oligonucleotide
  Target: LAMA2; (-) strand; PAM type: YTN; PAM sequence: TTC
tatcattttattcttgaaat

SEQ ID NO: 267369 - DNA, 20 bp, Artificial Sequence
  Description of Artificial Sequence: Synthetic oligonucleotide
  Target: LAMA2; (-) strand; PAM type: YTN; PAM sequence: CTA
accaatcagggtagtattct

SEQ ID NO: 267370 - DNA, 20 bp, Artificial Sequence
  Description of Artificial Sequence: Synthetic oligonucleotide
  Target: LAMA2; (-) strand; PAM type: YTN; PAM sequence: CTG
ctaaccaatcagggtagtat

SEQ ID NO: 267371 - DNA, 20 bp, Artificial Sequence
  Description of Artificial Sequence: Synthetic oligonucleotide
  Target: LAMA2; (-) strand; PAM type: YTN; PAM sequence: TTG
atcctgctaaccaatcaggg

SEQ ID NO: 267372 - DNA, 20 bp, Artificial Sequence
  Description of Artificial Sequence: Synthetic oligonucleotide
  Target: LAMA2; (-) strand; PAM type: YTN; PAM sequence: TTA
ttgatcctgctaaccaatca

SEQ ID NO: 267373 - DNA, 20 bp, Artificial Sequence
  Description of Artificial Sequence: Synthetic oligonucleotide
  Target: LAMA2; (-) strand; PAM type: YTN; PAM sequence: CTG
ttattgatcctgctaaccaa

SEQ ID NO: 267374 - DNA, 20 bp, Artificial Sequence
  Description of Artificial Sequence: Synthetic oligonucleotide
  Target: LAMA2; (-) strand; PAM type: YTN; PAM sequence: TTA
tacaaatcatataaaacaac

SEQ ID NO: 267375 - DNA, 20 bp, Artificial Sequence
  Description of Artificial Sequence: Synthetic oligonucleotide
  Target: LAMA2; (-) strand; PAM type: YTN; PAM sequence: CTC
aaattatacaaatcatataa

SEQ ID NO: 267376 - DNA, 20 bp, Artificial Sequence
  Description of Artificial Sequence: Synthetic oligonucleotide
  Target: LAMA2; (-) strand; PAM type: YTN; PAM sequence: TTA
ctcaaattatacaaatcata

SEQ ID NO: 267377 - DNA, 20 bp, Artificial Sequence
  Description of Artificial Sequence: Synthetic oligonucleotide
  Target: LAMA2; (-) strand; PAM type: YTN; PAM sequence: TTT
actcaaattatacaaatcat

SEQ ID NO: 267378 - DNA, 20 bp, Artificial Sequence
  Description of Artificial Sequence: Synthetic oligonucleotide
  Target: LAMA2; (-) strand; PAM type: YTN; PAM sequence: TTG
cataaaaatttactcaaatt

SEQ ID NO: 267379 - DNA, 20 bp, Artificial Sequence
  Description of Artificial Sequence: Synthetic oligonucleotide
  Target: LAMA2; (-) strand; PAM type: YTN; PAM sequence: TTT
gcataaaaatttactcaaat

SEQ ID NO: 267380 - DNA, 20 bp, Artificial Sequence
  Description of Artificial Sequence: Synthetic oligonucleotide
  Target: LAMA2; (-) strand; PAM type: YTN; PAM sequence: TTT
tgcataaaaatttactcaaa

SEQ ID NO: 267381 - DNA, 20 bp, Artificial Sequence
  Description of Artificial Sequence: Synthetic oligonucleotide
  Target: LAMA2; (-) strand; PAM type: YTN; PAM sequence: CTT
ttgcataaaaatttactcaa

SEQ ID NO: 267382 - DNA, 20 bp, Artificial Sequence
  Description of Artificial Sequence: Synthetic oligonucleotide
  Target: LAMA2; (-) strand; PAM type: YTN; PAM sequence: TTC
agggtcttttgcataaaaat

SEQ ID NO: 267383 - DNA, 20 bp, Artificial Sequence
  Description of Artificial Sequence: Synthetic oligonucleotide
  Target: LAMA2; (-) strand; PAM type: YTN; PAM sequence: TTT
cagggtcttttgcataaaaa

SEQ ID NO: 267384 - DNA, 20 bp, Artificial Sequence
  Description of Artificial Sequence: Synthetic oligonucleotide
  Target: LAMA2; (-) strand; PAM type: YTN; PAM sequence: CTT
tcagggtcttttgcataaaa

SEQ ID NO: 267385 - DNA, 20 bp, Artificial Sequence
  Description of Artificial Sequence: Synthetic oligonucleotide
  Target: LAMA2; (-) strand; PAM type: YTN; PAM sequence: TTC
tttcagggtcttttgcataa

SEQ ID NO: 267386 - DNA, 20 bp, Artificial Sequence
  Description of Artificial Sequence: Synthetic oligonucleotide
  Target: LAMA2; (-) strand; PAM type: YTN; PAM sequence: TTG
attctttcagggtcttttgc

SEQ ID NO: 267387 - DNA, 20 bp, Artificial Sequence
  Description of Artificial Sequence: Synthetic oligonucleotide
  Target: LAMA2; (-) strand; PAM type: YTN; PAM sequence: TTT
gattctttcagggtcttttg

SEQ ID NO: 267388 - DNA, 20 bp, Artificial Sequence
  Description of Artificial Sequence: Synthetic oligonucleotide
  Target: LAMA2; (-) strand; PAM type: YTN; PAM sequence: TTT
tgattctttcagggtctttt

SEQ ID NO: 267389 - DNA, 20 bp, Artificial Sequence
  Description of Artificial Sequence: Synthetic oligonucleotide
  Target: LAMA2; (-) strand; PAM type: YTN; PAM sequence: TTG
atattttgattctttcaggg

SEQ ID NO: 267390 - DNA, 20 bp, Artificial Sequence
  Description of Artificial Sequence: Synthetic oligonucleotide
  Target: LAMA2; (-) strand; PAM type: YTN; PAM sequence: TTT
gatattttgattctttcagg

SEQ ID NO: 267391 - DNA, 20 bp, Artificial Sequence
  Description of Artificial Sequence: Synthetic oligonucleotide
  Target: LAMA2; (-) strand; PAM type: YTN; PAM sequence: TTA
atttgatattttgattcttt

SEQ ID NO: 267392 - DNA, 20 bp, Artificial Sequence
  Description of Artificial Sequence: Synthetic oligonucleotide
  Target: LAMA2; (-) strand; PAM type: YTN; PAM sequence: TTT
aatttgatattttgattctt

SEQ ID NO: 267393 - DNA, 20 bp, Artificial Sequence
  Description of Artificial Sequence: Synthetic oligonucleotide
  Target: LAMA2; (-) strand; PAM type: YTN; PAM sequence: TTT
taatttgatattttgattct

SEQ ID NO: 267394 - DNA, 20 bp, Artificial Sequence
  Description of Artificial Sequence: Synthetic oligonucleotide
  Target: LAMA2; (-) strand; PAM type: YTN; PAM sequence: TTG
ccattttaatttgatatttt

SEQ ID NO: 267395 - DNA, 20 bp, Artificial Sequence
  Description of Artificial Sequence: Synthetic oligonucleotide
  Target: LAMA2; (-) strand; PAM type: YTN; PAM sequence: CTT
gccattttaatttgatattt

SEQ ID NO: 267396 - DNA, 20 bp, Artificial Sequence
  Description of Artificial Sequence: Synthetic oligonucleotide
  Target: LAMA2; (-) strand; PAM type: YTN; PAM sequence: CTG
aacttgccattttaatttga

SEQ ID NO: 267397 - DNA, 20 bp, Artificial Sequence
  Description of Artificial Sequence: Synthetic oligonucleotide
  Target: LAMA2; (-) strand; PAM type: YTN; PAM sequence: TTG
aaagccactgaacttgccat

SEQ ID NO: 267398 - DNA, 20 bp, Artificial Sequence
  Description of Artificial Sequence: Synthetic oligonucleotide
  Target: LAMA2; (-) strand; PAM type: YTN; PAM sequence: TTT
gaaagccactgaacttgcca

SEQ ID NO: 267399 - DNA, 20 bp, Artificial Sequence
  Description of Artificial Sequence: Synthetic oligonucleotide
  Target: LAMA2; (-) strand; PAM type: YTN; PAM sequence: TTA
cagtggatgcaatcaataaa

SEQ ID NO: 267400 - DNA, 20 bp, Artificial Sequence
  Description of Artificial Sequence: Synthetic oligonucleotide
  Target: LAMA2; (-) strand; PAM type: YTN; PAM sequence: CTT
acagtggatgcaatcaataa

SEQ ID NO: 267401 - DNA, 20 bp, Artificial Sequence
  Description of Artificial Sequence: Synthetic oligonucleotide
  Target: LAMA2; (-) strand; PAM type: YTN; PAM sequence: TTA
tgatataaaaaagtgtatct

SEQ ID NO: 267402 - DNA, 20 bp, Artificial Sequence
  Description of Artificial Sequence: Synthetic oligonucleotide
  Target: LAMA2; (-) strand; PAM type: YTN; PAM sequence: CTT
atgatataaaaaagtgtatc

SEQ ID NO: 267403 - DNA, 20 bp, Artificial Sequence
  Description of Artificial Sequence: Synthetic oligonucleotide
  Target: LAMA2; (-) strand; PAM type: YTN; PAM sequence: CTG
gcttatgatataaaaaagtg

SEQ ID NO: 267404 - DNA, 20 bp, Artificial Sequence
  Description of Artificial Sequence: Synthetic oligonucleotide
  Target: LAMA2; (-) strand; PAM type: YTN; PAM sequence: TTC
tggcttatgatataaaaaag

SEQ ID NO: 267405 - DNA, 20 bp, Artificial Sequence
  Description of Artificial Sequence: Synthetic oligonucleotide
  Target: LAMA2; (-) strand; PAM type: YTN; PAM sequence: TTT
ctggcttatgatataaaaaa

SEQ ID NO: 267406 - DNA, 20 bp, Artificial Sequence
  Description of Artificial Sequence: Synthetic oligonucleotide
  Target: LAMA2; (-) strand; PAM type: YTN; PAM sequence: TTG
tgtgtttctggcttatgata

SEQ ID NO: 267407 - DNA, 20 bp, Artificial Sequence
  Description of Artificial Sequence: Synthetic oligonucleotide
  Target: LAMA2; (-) strand; PAM type: YTN; PAM sequence: TTT
gtgtgtttctggcttatgat

SEQ ID NO: 267408 - DNA, 20 bp, Artificial Sequence
  Description of Artificial Sequence: Synthetic oligonucleotide
  Target: LAMA2; (-) strand; PAM type: YTN; PAM sequence: TTT
tgtgtgtttctggcttatga

SEQ ID NO: 267409 - DNA, 20 bp, Artificial Sequence
  Description of Artificial Sequence: Synthetic oligonucleotide
  Target: LAMA2; (-) strand; PAM type: YTN; PAM sequence: TTT
ttgtgtgtttctggcttatg

SEQ ID NO: 267410 - DNA, 20 bp, Artificial Sequence
  Description of Artificial Sequence: Synthetic oligonucleotide
  Target: LAMA2; (-) strand; PAM type: YTN; PAM sequence: CTA
cacacacaagtttttgtgtg

SEQ ID NO: 267411 - DNA, 20 bp, Artificial Sequence
  Description of Artificial Sequence: Synthetic oligonucleotide
  Target: LAMA2; (-) strand; PAM type: YTN; PAM sequence: TTA
gatatctacacacacaagtt

SEQ ID NO: 267412 - DNA, 20 bp, Artificial Sequence
  Description of Artificial Sequence: Synthetic oligonucleotide
  Target: LAMA2; (-) strand; PAM type: YTN; PAM sequence: TTT
agatatctacacacacaagt

SEQ ID NO: 267413 - DNA, 20 bp, Artificial Sequence
  Description of Artificial Sequence: Synthetic oligonucleotide
  Target: LAMA2; (-) strand; PAM type: YTN; PAM sequence: TTA
aataaatggcatggtgtata

SEQ ID NO: 267414 - DNA, 20 bp, Artificial Sequence
  Description of Artificial Sequence: Synthetic oligonucleotide
  Target: LAMA2; (-) strand; PAM type: YTN; PAM sequence: CTA
aaaatgtaaaataacaaaat

SEQ ID NO: 267415 - DNA, 20 bp, Artificial Sequence
  Description of Artificial Sequence: Synthetic oligonucleotide
  Target: LAMA2; (-) strand; PAM type: YTN; PAM sequence: TTC
taaaaatgtaaaataacaaa

SEQ ID NO: 267416 - DNA, 20 bp, Artificial Sequence
  Description of Artificial Sequence: Synthetic oligonucleotide
  Target: LAMA2; (-) strand; PAM type: YTN; PAM sequence: TTT
ctaaaaatgtaaaataacaa

SEQ ID NO: 267417 - DNA, 20 bp, Artificial Sequence
  Description of Artificial Sequence: Synthetic oligonucleotide
  Target: LAMA2; (-) strand; PAM type: YTN; PAM sequence: TTT
tctaaaaatgtaaaataaca

SEQ ID NO: 267418 - DNA, 20 bp, Artificial Sequence
  Description of Artificial Sequence: Synthetic oligonucleotide
  Target: LAMA2; (-) strand; PAM type: YTN; PAM sequence: TTT
ttctaaaaatgtaaaataac

SEQ ID NO: 267419 - DNA, 20 bp, Artificial Sequence
  Description of Artificial Sequence: Synthetic oligonucleotide
  Target: LAMA2; (-) strand; PAM type: YTN; PAM sequence: TTT
tttctaaaaatgtaaaataa

SEQ ID NO: 267420 - DNA, 20 bp, Artificial Sequence
  Description of Artificial Sequence: Synthetic oligonucleotide
  Target: LAMA2; (-) strand; PAM type: YTN; PAM sequence: TTT
ttttctaaaaatgtaaaata

SEQ ID NO: 267421 - DNA, 20 bp, Artificial Sequence
  Description of Artificial Sequence: Synthetic oligonucleotide
  Target: LAMA2; (-) strand; PAM type: YTN; PAM sequence: TTT
tttttctaaaaatgtaaaat

SEQ ID NO: 267422 - DNA, 20 bp, Artificial Sequence
  Description of Artificial Sequence: Synthetic oligonucleotide
  Target: LAMA2; (-) strand; PAM type: YTN; PAM sequence: CTA
aaattttttttctaaaaatg

SEQ ID NO: 267423 - DNA, 20 bp, Artificial Sequence
  Description of Artificial Sequence: Synthetic oligonucleotide
  Target: LAMA2; (-) strand; PAM type: YTN; PAM sequence: TTG
gctaaaattttttttctaaa

SEQ ID NO: 267424 - DNA, 20 bp, Artificial Sequence
  Description of Artificial Sequence: Synthetic oligonucleotide
  Target: LAMA2; (-) strand; PAM type: YTN; PAM sequence: TTT
ggctaaaattttttttctaa

SEQ ID NO: 267425 - DNA, 20 bp, Artificial Sequence
  Description of Artificial Sequence: Synthetic oligonucleotide
  Target: LAMA2; (-) strand; PAM type: YTN; PAM sequence: TTT
tggctaaaattttttttcta

SEQ ID NO: 267426 - DNA, 20 bp, Artificial Sequence
  Description of Artificial Sequence: Synthetic oligonucleotide
  Target: LAMA2; (-) strand; PAM type: YTN; PAM sequence: TTG
agtaggttttggctaaaatt

SEQ ID NO: 267427 - DNA, 20 bp, Artificial Sequence
  Description of Artificial Sequence: Synthetic oligonucleotide
  Target: LAMA2; (-) strand; PAM type: YTN; PAM sequence: CTC
atgaaatccattgagtaggt

SEQ ID NO: 267428 - DNA, 20 bp, Artificial Sequence
  Description of Artificial Sequence: Synthetic oligonucleotide
  Target: LAMA2; (-) strand; PAM type: YTN; PAM sequence: TTA
gatggtgatataagtgactc

SEQ ID NO: 267429 - DNA, 20 bp, Artificial Sequence
  Description of Artificial Sequence: Synthetic oligonucleotide
  Target: LAMA2; (-) strand; PAM type: YTN; PAM sequence: TTT
agatggtgatataagtgact

SEQ ID NO: 267430 - DNA, 20 bp, Artificial Sequence
  Description of Artificial Sequence: Synthetic oligonucleotide
  Target: LAMA2; (-) strand; PAM type: YTN; PAM sequence: CTT
tagatggtgatataagtgac

SEQ ID NO: 267431 - DNA, 20 bp, Artificial Sequence
  Description of Artificial Sequence: Synthetic oligonucleotide
  Target: LAMA2; (-) strand; PAM type: YTN; PAM sequence: CTA
atacgtcccaagctttagat

SEQ ID NO: 267432 - DNA, 20 bp, Artificial Sequence
  Description of Artificial Sequence: Synthetic oligonucleotide
  Target: LAMA2; (-) strand; PAM type: YTN; PAM sequence: TTA
gcctaatacgtcccaagctt

SEQ ID NO: 267433 - DNA, 20 bp, Artificial Sequence
  Description of Artificial Sequence: Synthetic oligonucleotide
  Target: LAMA2; (-) strand; PAM type: YTN; PAM sequence: TTA
attagcctaatacgtcccaa

SEQ ID NO: 267434 - DNA, 20 bp, Artificial Sequence
  Description of Artificial Sequence: Synthetic oligonucleotide
  Target: LAMA2; (-) strand; PAM type: YTN; PAM sequence: TTG
ttaattagcctaatacgtcc

SEQ ID NO: 267435 - DNA, 20 bp, Artificial Sequence
  Description of Artificial Sequence: Synthetic oligonucleotide
  Target: LAMA2; (-) strand; PAM type: YTN; PAM sequence: TTT
gttaattagcctaatacgtc

SEQ ID NO: 267436 - DNA, 20 bp, Artificial Sequence
  Description of Artificial Sequence: Synthetic oligonucleotide
  Target: LAMA2; (-) strand; PAM type: YTN; PAM sequence: CTT
tgttaattagcctaatacgt

SEQ ID NO: 267437 - DNA, 20 bp, Artificial Sequence
  Description of Artificial Sequence: Synthetic oligonucleotide
  Target: LAMA2; (-) strand; PAM type: YTN; PAM sequence: TTC
actttgttaattagcctaat

SEQ ID NO: 267438 - DNA, 20 bp, Artificial Sequence
  Description of Artificial Sequence: Synthetic oligonucleotide
  Target: LAMA2; (-) strand; PAM type: YTN; PAM sequence: CTT
cactttgttaattagcctaa

SEQ ID NO: 267439 - DNA, 20 bp, Artificial Sequence
  Description of Artificial Sequence: Synthetic oligonucleotide
  Target: LAMA2; (-) strand; PAM type: YTN; PAM sequence: TTA
taggtcttcactttgttaat

SEQ ID NO: 267440 - DNA, 20 bp, Artificial Sequence
  Description of Artificial Sequence: Synthetic oligonucleotide
  Target: LAMA2; (-) strand; PAM type: YTN; PAM sequence: TTT
ataggtcttcactttgttaa

SEQ ID NO: 267441 - DNA, 20 bp, Artificial Sequence
  Description of Artificial Sequence: Synthetic oligonucleotide
  Target: LAMA2; (-) strand; PAM type: YTN; PAM sequence: CTC
acaatttataggtcttcact

SEQ ID NO: 267442 - DNA, 20 bp, Artificial Sequence
  Description of Artificial Sequence: Synthetic oligonucleotide
  Target: LAMA2; (-) strand; PAM type: YTN; PAM sequence: TTC
tcacaatttataggtcttca

SEQ ID NO: 267443 - DNA, 20 bp, Artificial Sequence
  Description of Artificial Sequence: Synthetic oligonucleotide
  Target: LAMA2; (-) strand; PAM type: YTN; PAM sequence: CTT
ctcacaatttataggtcttc

SEQ ID NO: 267444 - DNA, 20 bp, Artificial Sequence
  Description of Artificial Sequence: Synthetic oligonucleotide
  Target: LAMA2; (-) strand; PAM type: YTN; PAM sequence: CTC
ttctcacaatttataggtct

SEQ ID NO: 267445 - DNA, 20 bp, Artificial Sequence
  Description of Artificial Sequence: Synthetic oligonucleotide
  Target: LAMA2; (-) strand; PAM type: YTN; PAM sequence: TTC
tcttctcacaatttataggt

SEQ ID NO: 267446 - DNA, 20 bp, Artificial Sequence
  Description of Artificial Sequence: Synthetic oligonucleotide
  Target: LAMA2; (-) strand; PAM type: YTN; PAM sequence: CTT
ctcttctcacaatttatagg

SEQ ID NO: 267447 - DNA, 20 bp, Artificial Sequence
  Description of Artificial Sequence: Synthetic oligonucleotide
  Target: LAMA2; (-) strand; PAM type: YTN; PAM sequence: TTC
ttctcttctcacaatttata

SEQ ID NO: 267448 - DNA, 20 bp, Artificial Sequence
  Description of Artificial Sequence: Synthetic oligonucleotide
  Target: LAMA2; (-) strand; PAM type: YTN; PAM sequence: TTA
attcttctcttctcacaatt

SEQ ID NO: 267449 - DNA, 20 bp, Artificial Sequence
  Description of Artificial Sequence: Synthetic oligonucleotide
  Target: LAMA2; (-) strand; PAM type: YTN; PAM sequence: TTT
aattcttctcttctcacaat

SEQ ID NO: 267450 - DNA, 20 bp, Artificial Sequence
  Description of Artificial Sequence: Synthetic oligonucleotide
  Target: LAMA2; (-) strand; PAM type: YTN; PAM sequence: TTT
taattcttctcttctcacaa

SEQ ID NO: 267451 - DNA, 20 bp, Artificial Sequence
  Description of Artificial Sequence: Synthetic oligonucleotide
  Target: LAMA2; (-) strand; PAM type: YTN; PAM sequence: TTC
acattttaattcttctcttc

SEQ ID NO: 267452 - DNA, 20 bp, Artificial Sequence
  Description of Artificial Sequence: Synthetic oligonucleotide
  Target: LAMA2; (-) strand; PAM type: YTN; PAM sequence: CTT
cacattttaattcttctctt

SEQ ID NO: 267453 - DNA, 20 bp, Artificial Sequence
  Description of Artificial Sequence: Synthetic oligonucleotide
  Target: LAMA2; (-) strand; PAM type: YTN; PAM sequence: TTG
cttcacattttaattcttct

SEQ ID NO: 267454 - DNA, 20 bp, Artificial Sequence
  Description of Artificial Sequence: Synthetic oligonucleotide
  Target: LAMA2; (-) strand; PAM type: YTN; PAM sequence: TTT
gcttcacattttaattcttc

SEQ ID NO: 267455 - DNA, 20 bp, Artificial Sequence
  Description of Artificial Sequence: Synthetic oligonucleotide
  Target: LAMA2; (-) strand; PAM type: YTN; PAM sequence: CTT
tgcttcacattttaattctt

SEQ ID NO: 267456 - DNA, 20 bp, Artificial Sequence
  Description of Artificial Sequence: Synthetic oligonucleotide
  Target: LAMA2; (-) strand; PAM type: YTN; PAM sequence: TTC
tttgcttcacattttaattc

SEQ ID NO: 267457 - DNA, 20 bp, Artificial Sequence
  Description of Artificial Sequence: Synthetic oligonucleotide
  Target: LAMA2; (-) strand; PAM type: YTN; PAM sequence: TTT
ctttgcttcacattttaatt

SEQ ID NO: 267458 - DNA, 20 bp, Artificial Sequence
  Description of Artificial Sequence: Synthetic oligonucleotide
  Target: LAMA2; (-) strand; PAM type: YTN; PAM sequence: CTG
gtttctttgcttcacatttt

SEQ ID NO: 267459 - DNA, 20 bp, Artificial Sequence
  Description of Artificial Sequence: Synthetic oligonucleotide
  Target: LAMA2; (-) strand; PAM type: YTN; PAM sequence: CTG
gctggtttctttgcttcaca

SEQ ID NO: 267460 - DNA, 20 bp, Artificial Sequence
  Description of Artificial Sequence: Synthetic oligonucleotide
  Target: LAMA2; (-) strand; PAM type: YTN; PAM sequence: TTG
ccctggctggtttctttgct

SEQ ID NO: 267461 - DNA, 20 bp, Artificial Sequence
  Description of Artificial Sequence: Synthetic oligonucleotide
  Target: LAMA2; (-) strand; PAM type: YTN; PAM sequence: TTT
gccctggctggtttctttgc

SEQ ID NO: 267462 - DNA, 20 bp, Artificial Sequence
  Description of Artificial Sequence: Synthetic oligonucleotide
  Target: LAMA2; (-) strand; PAM type: YTN; PAM sequence: CTT
tgccctggctggtttctttg

SEQ ID NO: 267463 - DNA, 20 bp, Artificial Sequence
  Description of Artificial Sequence: Synthetic oligonucleotide
  Target: LAMA2; (-) strand; PAM type: YTN; PAM sequence: TTC
tttgccctggctggtttctt

SEQ ID NO: 267464 - DNA, 20 bp, Artificial Sequence
  Description of Artificial Sequence: Synthetic oligonucleotide
  Target: LAMA2; (-) strand; PAM type: YTN; PAM sequence: TTT
ctttgccctggctggtttct

SEQ ID NO: 267465 - DNA, 20 bp, Artificial Sequence
  Description of Artificial Sequence: Synthetic oligonucleotide
  Target: LAMA2; (-) strand; PAM type: YTN; PAM sequence: TTT
tctttgccctggctggtttc

SEQ ID NO: 267466 - DNA, 20 bp, Artificial Sequence
  Description of Artificial Sequence: Synthetic oligonucleotide
  Target: LAMA2; (-) strand; PAM type: YTN; PAM sequence: CTT
ttctttgccctggctggttt

SEQ ID NO: 267467 - DNA, 20 bp, Artificial Sequence
  Description of Artificial Sequence: Synthetic oligonucleotide
  Target: LAMA2; (-) strand; PAM type: YTN; PAM sequence: CTC
ttttctttgccctggctggt

SEQ ID NO: 267468 - DNA, 20 bp, Artificial Sequence
  Description of Artificial Sequence: Synthetic oligonucleotide
  Target: LAMA2; (-) strand; PAM type: YTN; PAM sequence: TTG
gggagaagtgcctcttttct

SEQ ID NO: 267469 - DNA, 20 bp, Artificial Sequence
  Description of Artificial Sequence: Synthetic oligonucleotide
  Target: LAMA2; (-) strand; PAM type: YTN; PAM sequence: CTT
ggggagaagtgcctcttttc

SEQ ID NO: 267470 - DNA, 20 bp, Artificial Sequence
  Description of Artificial Sequence: Synthetic oligonucleotide
  Target: LAMA2; (-) strand; PAM type: YTN; PAM sequence: TTA
tgtcttggggagaagtgcct

SEQ ID NO: 267471 - DNA, 20 bp, Artificial Sequence
  Description of Artificial Sequence: Synthetic oligonucleotide
  Target: LAMA2; (-) strand; PAM type: YTN; PAM sequence: TTT
atgtcttggggagaagtgcc

SEQ ID NO: 267472 - DNA, 20 bp, Artificial Sequence
  Description of Artificial Sequence: Synthetic oligonucleotide
  Target: LAMA2; (-) strand; PAM type: YTN; PAM sequence: TTT
tatgtcttggggagaagtgc

SEQ ID NO: 267473 - DNA, 20 bp, Artificial Sequence
  Description of Artificial Sequence: Synthetic oligonucleotide
  Target: LAMA2; (-) strand; PAM type: YTN; PAM sequence: TTT
ttatgtcttggggagaagtg

SEQ ID NO: 267474 - DNA, 20 bp, Artificial Sequence
  Description of Artificial Sequence: Synthetic oligonucleotide
  Target: LAMA2; (-) strand; PAM type: YTN; PAM sequence: CTG
tttttatgtcttggggagaa

SEQ ID NO: 267475 - DNA, 20 bp, Artificial Sequence
  Description of Artificial Sequence: Synthetic oligonucleotide
  Target: LAMA2; (-) strand; PAM type: YTN; PAM sequence: CTC
agaatctgtttttatgtctt

SEQ ID NO: 267476 - DNA, 20 bp, Artificial Sequence
  Description of Artificial Sequence: Synthetic oligonucleotide
  Target: LAMA2; (-) strand; PAM type: YTN; PAM sequence: TTC
ctcagaatctgtttttatgt

SEQ ID NO: 267477 - DNA, 20 bp, Artificial Sequence
  Description of Artificial Sequence: Synthetic oligonucleotide
  Target: LAMA2; (-) strand; PAM type: YTN; PAM sequence: CTA
ttcctcagaatctgttttta

SEQ ID NO: 267478 - DNA, 20 bp, Artificial Sequence
  Description of Artificial Sequence: Synthetic oligonucleotide
  Target: LAMA2; (-) strand; PAM type: YTN; PAM sequence: CTC
catctattcctcagaatctg

SEQ ID NO: 267479 - DNA, 20 bp, Artificial Sequence
  Description of Artificial Sequence: Synthetic oligonucleotide
  Target: LAMA2; (-) strand; PAM type: YTN; PAM sequence: CTC
ctccatctattcctcagaat

SEQ ID NO: 267480 - DNA, 20 bp, Artificial Sequence
  Description of Artificial Sequence: Synthetic oligonucleotide
  Target: LAMA2; (-) strand; PAM type: YTN; PAM sequence: CTC
agcctcctccatctattcct

SEQ ID NO: 267481 - DNA, 20 bp, Artificial Sequence
  Description of Artificial Sequence: Synthetic oligonucleotide
  Target: LAMA2; (-) strand; PAM type: YTN; PAM sequence: TTG
agatatctcagcctcctcca

SEQ ID NO: 267482 - DNA, 20 bp, Artificial Sequence
  Description of Artificial Sequence: Synthetic oligonucleotide
  Target: LAMA2; (-) strand; PAM type: YTN; PAM sequence: TTG
aagtcataaattgagatatc

SEQ ID NO: 267483 - DNA, 20 bp, Artificial Sequence
  Description of Artificial Sequence: Synthetic oligonucleotide
  Target: LAMA2; (-) strand; PAM type: YTN; PAM sequence: CTG
cacagattgaagtcataaat

SEQ ID NO: 267484 - DNA, 20 bp, Artificial Sequence
  Description of Artificial Sequence: Synthetic oligonucleotide
  Target: LAMA2; (-) strand; PAM type: YTN; PAM sequence: CTG
actgcacagattgaagtcat

SEQ ID NO: 267485 - DNA, 20 bp, Artificial Sequence
  Description of Artificial Sequence: Synthetic oligonucleotide
  Target: LAMA2; (-) strand; PAM type: YTN; PAM sequence: CTC
actgactgcacagattgaag

SEQ ID NO: 267486 - DNA, 20 bp, Artificial Sequence
  Description of Artificial Sequence: Synthetic oligonucleotide
  Target: LAMA2; (-) strand; PAM type: YTN; PAM sequence: TTC
tcactgactgcacagattga

SEQ ID NO: 267487 - DNA, 20 bp, Artificial Sequence
  Description of Artificial Sequence: Synthetic oligonucleotide
  Target: LAMA2; (-) strand; PAM type: YTN; PAM sequence: TTT
ctcactgactgcacagattg

SEQ ID NO: 267488 - DNA, 20 bp, Artificial Sequence
  Description of Artificial Sequence: Synthetic oligonucleotide
  Target: LAMA2; (-) strand; PAM type: YTN; PAM sequence: CTC
catatttctcactgactgca

SEQ ID NO: 267489 - DNA, 20 bp, Artificial Sequence
  Description of Artificial Sequence: Synthetic oligonucleotide
  Target: LAMA2; (-) strand; PAM type: YTN; PAM sequence: CTC
atcatgcctccatatttctc

SEQ ID NO: 267490 - DNA, 20 bp, Artificial Sequence
  Description of Artificial Sequence: Synthetic oligonucleotide
  Target: LAMA2; (-) strand; PAM type: YTN; PAM sequence: CTA
atgccgtggaaatgagtcag

SEQ ID NO: 267491 - DNA, 20 bp, Artificial Sequence
  Description of Artificial Sequence: Synthetic oligonucleotide
  Target: LAMA2; (-) strand; PAM type: YTN; PAM sequence: TTG
aactaatgccgtggaaatga

SEQ ID NO: 267492 - DNA, 20 bp, Artificial Sequence
  Description of Artificial Sequence: Synthetic oligonucleotide
  Target: LAMA2; (-) strand; PAM type: YTN; PAM sequence: CTT
gaactaatgccgtggaaatg

SEQ ID NO: 267493 - DNA, 20 bp, Artificial Sequence
  Description of Artificial Sequence: Synthetic oligonucleotide
  Target: LAMA2; (-) strand; PAM type: YTN; PAM sequence: TTG
gtaagagataatgaggactt

SEQ ID NO: 267494 - DNA, 20 bp, Artificial Sequence
  Description of Artificial Sequence: Synthetic oligonucleotide
  Target: LAMA2; (-) strand; PAM type: YTN; PAM sequence: TTT
ggtaagagataatgaggact

SEQ ID NO: 267495 - DNA, 20 bp, Artificial Sequence
  Description of Artificial Sequence: Synthetic oligonucleotide
  Target: LAMA2; (-) strand; PAM type: YTN; PAM sequence: TTT
tggtaagagataatgaggac

SEQ ID NO: 267496 - DNA, 20 bp, Artificial Sequence
  Description of Artificial Sequence: Synthetic oligonucleotide
  Target: LAMA2; (-) strand; PAM type: YTN; PAM sequence: TTG
ttttggtaagagataatgag

SEQ ID NO: 267497 - DNA, 20 bp, Artificial Sequence
  Description of Artificial Sequence: Synthetic oligonucleotide
  Target: LAMA2; (-) strand; PAM type: YTN; PAM sequence: TTT
gttttggtaagagataatga

SEQ ID NO: 267498 - DNA, 20 bp, Artificial Sequence
  Description of Artificial Sequence: Synthetic oligonucleotide
  Target: LAMA2; (-) strand; PAM type: YTN; PAM sequence: CTA
ccatatttgttttggtaaga

SEQ ID NO: 267499 - DNA, 20 bp, Artificial Sequence
  Description of Artificial Sequence: Synthetic oligonucleotide
  Target: LAMA2; (-) strand; PAM type: YTN; PAM sequence: TTC
taccatatttgttttggtaa

SEQ ID NO: 267500 - DNA, 20 bp, Artificial Sequence
  Description of Artificial Sequence: Synthetic oligonucleotide
  Target: LAMA2; (-) strand; PAM type: YTN; PAM sequence: TTT
ctaccatatttgttttggta

SEQ ID NO: 267501 - DNA, 20 bp, Artificial Sequence
  Description of Artificial Sequence: Synthetic oligonucleotide
  Target: LAMA2; (-) strand; PAM type: YTN; PAM sequence: TTA
aatttctaccatatttgttt

SEQ ID NO: 267502 - DNA, 20 bp, Artificial Sequence
  Description of Artificial Sequence: Synthetic oligonucleotide
  Target: LAMA2; (-) strand; PAM type: YTN; PAM sequence: CTC
cgtcataagagttaaatttc

SEQ ID NO: 267503 - DNA, 20 bp, Artificial Sequence
  Description of Artificial Sequence: Synthetic oligonucleotide
  Target: LAMA2; (-) strand; PAM type: YTN; PAM sequence: CTG
ccactccgtcataagagtta

SEQ ID NO: 267504 - DNA, 20 bp, Artificial Sequence
  Description of Artificial Sequence: Synthetic oligonucleotide
  Target: LAMA2; (-) strand; PAM type: YTN; PAM sequence: CTA
agggtgtgtgagcactgcca

SEQ ID NO: 267505 - DNA, 20 bp, Artificial Sequence
  Description of Artificial Sequence: Synthetic oligonucleotide
  Target: LAMA2; (-) strand; PAM type: YTN; PAM sequence: TTC
taagggtgtgtgagcactgc

SEQ ID NO: 267506 - DNA, 20 bp, Artificial Sequence
  Description of Artificial Sequence: Synthetic oligonucleotide
  Target: LAMA2; (-) strand; PAM type: YTN; PAM sequence: CTT
ctaagggtgtgtgagcactg

SEQ ID NO: 267507 - DNA, 20 bp, Artificial Sequence
  Description of Artificial Sequence: Synthetic oligonucleotide
  Target: LAMA2; (-) strand; PAM type: YTN; PAM sequence: CTG
gaaacttctaagggtgtgtg

SEQ ID NO: 267508 - DNA, 20 bp, Artificial Sequence
  Description of Artificial Sequence: Synthetic oligonucleotide
  Target: LAMA2; (-) strand; PAM type: YTN; PAM sequence: TTG
ggaaggcactggaaacttct

SEQ ID NO: 267509 - DNA, 20 bp, Artificial Sequence
  Description of Artificial Sequence: Synthetic oligonucleotide
  Target: LAMA2; (-) strand; PAM type: YTN; PAM sequence: CTT
gggaaggcactggaaacttc

SEQ ID NO: 267510 - DNA, 20 bp, Artificial Sequence
  Description of Artificial Sequence: Synthetic oligonucleotide
  Target: LAMA2; (-) strand; PAM type: YTN; PAM sequence: TTC
cttgggaaggcactggaaac

SEQ ID NO: 267511 - DNA, 20 bp, Artificial Sequence
  Description of Artificial Sequence: Synthetic oligonucleotide
  Target: LAMA2; (-) strand; PAM type: YTN; PAM sequence: TTT
ccttgggaaggcactggaaa

SEQ ID NO: 267512 - DNA, 20 bp, Artificial Sequence
  Description of Artificial Sequence: Synthetic oligonucleotide
  Target: LAMA2; (-) strand; PAM type: YTN; PAM sequence: CTT
tccttgggaaggcactggaa

SEQ ID NO: 267513 - DNA, 20 bp, Artificial Sequence
  Description of Artificial Sequence: Synthetic oligonucleotide
  Target: LAMA2; (-) strand; PAM type: YTN; PAM sequence: CTG
atctttccttgggaaggcac

SEQ ID NO: 267514 - DNA, 20 bp, Artificial Sequence
  Description of Artificial Sequence: Synthetic oligonucleotide
  Target: LAMA2; (-) strand; PAM type: YTN; PAM sequence: CTC
aaagagtctgatctttcctt

SEQ ID NO: 267515 - DNA, 20 bp, Artificial Sequence
  Description of Artificial Sequence: Synthetic oligonucleotide
  Target: LAMA2; (-) strand; PAM type: YTN; PAM sequence: CTA
atgctcaaagagtctgatct

SEQ ID NO: 267516 - DNA, 20 bp, Artificial Sequence
  Description of Artificial Sequence: Synthetic oligonucleotide
  Target: LAMA2; (-) strand; PAM type: YTN; PAM sequence: TTC
taatgctcaaagagtctgat

SEQ ID NO: 267517 - DNA, 20 bp, Artificial Sequence
  Description of Artificial Sequence: Synthetic oligonucleotide
  Target: LAMA2; (-) strand; PAM type: YTN; PAM sequence: TTT
ctaatgctcaaagagtctga

SEQ ID NO: 267518 - DNA, 20 bp, Artificial Sequence
  Description of Artificial Sequence: Synthetic oligonucleotide
  Target: LAMA2; (-) strand; PAM type: YTN; PAM sequence: TTA
cagagggtttctaatgctca

SEQ ID NO: 267519 - DNA, 20 bp, Artificial Sequence
  Description of Artificial Sequence: Synthetic oligonucleotide
  Target: LAMA2; (-) strand; PAM type: YTN; PAM sequence: CTG
gaaaggtagtcagattacag

SEQ ID NO: 267520 - DNA, 20 bp, Artificial Sequence
  Description of Artificial Sequence: Synthetic oligonucleotide
  Target: LAMA2; (-) strand; PAM type: YTN; PAM sequence: TTG
gagcctggaaaggtagtcag

SEQ ID NO: 267521 - DNA, 20 bp, Artificial Sequence
  Description of Artificial Sequence: Synthetic oligonucleotide
  Target: LAMA2; (-) strand; PAM type: YTN; PAM sequence: CTT
ggagcctggaaaggtagtca

SEQ ID NO: 267522 - DNA, 20 bp, Artificial Sequence
  Description of Artificial Sequence: Synthetic oligonucleotide
  Target: LAMA2; (-) strand; PAM type: YTN; PAM sequence: TTG
agggcttggagcctggaaag

SEQ ID NO: 267523 - DNA, 20 bp, Artificial Sequence
  Description of Artificial Sequence: Synthetic oligonucleotide
  Target: LAMA2; (-) strand; PAM type: YTN; PAM sequence: TTA
tatagaatggagttgagggc

SEQ ID NO: 267524 - DNA, 20 bp, Artificial Sequence
  Description of Artificial Sequence: Synthetic oligonucleotide
  Target: LAMA2; (-) strand; PAM type: YTN; PAM sequence: TTG
gcattatatagaatggagtt

SEQ ID NO: 267525 - DNA, 20 bp, Artificial Sequence
  Description of Artificial Sequence: Synthetic oligonucleotide
  Target: LAMA2; (-) strand; PAM type: YTN; PAM sequence: CTT
ggcattatatagaatggagt

SEQ ID NO: 267526 - DNA, 20 bp, Artificial Sequence
  Description of Artificial Sequence: Synthetic oligonucleotide
  Target: LAMA2; (-) strand; PAM type: YTN; PAM sequence: CTA
gataagtgcaagaaatgcca

SEQ ID NO: 267527 - DNA, 20 bp, Artificial Sequence
  Description of Artificial Sequence: Synthetic oligonucleotide
  Target: LAMA2; (-) strand; PAM type: YTN; PAM sequence: CTA
atgatgtctagataagtgca

SEQ ID NO: 267528 - DNA, 20 bp, Artificial Sequence
  Description of Artificial Sequence: Synthetic oligonucleotide
  Target: LAMA2; (-) strand; PAM type: YTN; PAM sequence: CTG
ctaatgatgtctagataagt

SEQ ID NO: 267529 - DNA, 20 bp, Artificial Sequence
  Description of Artificial Sequence: Synthetic oligonucleotide
  Target: LAMA2; (-) strand; PAM type: YTN; PAM sequence: CTG
agggaatagcaagagcagac

SEQ ID NO: 267530 - DNA, 20 bp, Artificial Sequence
  Description of Artificial Sequence: Synthetic oligonucleotide
  Target: LAMA2; (-) strand; PAM type: YTN; PAM sequence: TTG
tctgagggaatagcaagagc

SEQ ID NO: 267531 - DNA, 20 bp, Artificial Sequence
  Description of Artificial Sequence: Synthetic oligonucleotide
  Target: LAMA2; (-) strand; PAM type: YTN; PAM sequence: TTC
acagggattgtctgagggaa

SEQ ID NO: 267532 - DNA, 20 bp, Artificial Sequence
  Description of Artificial Sequence: Synthetic oligonucleotide
  Target: LAMA2; (-) strand; PAM type: YTN; PAM sequence: TTT
cacagggattgtctgaggga

SEQ ID NO: 267533 - DNA, 20 bp, Artificial Sequence
  Description of Artificial Sequence: Synthetic oligonucleotide
  Target: LAMA2; (-) strand; PAM type: YTN; PAM sequence: TTA
gatttcacagggattgtctg

SEQ ID NO: 267534 - DNA, 20 bp, Artificial Sequence
  Description of Artificial Sequence: Synthetic oligonucleotide
  Target: LAMA2; (-) strand; PAM type: YTN; PAM sequence: TTA
aaaataaattagatttcaca

SEQ ID NO: 267535 - DNA, 20 bp, Artificial Sequence
  Description of Artificial Sequence: Synthetic oligonucleotide
  Target: LAMA2; (-) strand; PAM type: YTN; PAM sequence: TTT
aaaaataaattagatttcac

SEQ ID NO: 267536 - DNA, 20 bp, Artificial Sequence
  Description of Artificial Sequence: Synthetic oligonucleotide
  Target: LAMA2; (-) strand; PAM type: YTN; PAM sequence: CTT
taaaaataaattagatttca

SEQ ID NO: 267537 - DNA, 20 bp, Artificial Sequence
  Description of Artificial Sequence: Synthetic oligonucleotide
  Target: LAMA2; (-) strand; PAM type: YTN; PAM sequence: TTG
aaaaatgcctttaaaaataa

SEQ ID NO: 267538 - DNA, 20 bp, Artificial Sequence
  Description of Artificial Sequence: Synthetic oligonucleotide
  Target: LAMA2; (-) strand; PAM type: YTN; PAM sequence: TTT
gaaaaatgcctttaaaaata

SEQ ID NO: 267539 - DNA, 20 bp, Artificial Sequence
  Description of Artificial Sequence: Synthetic oligonucleotide
  Target: LAMA2; (-) strand; PAM type: YTN; PAM sequence: TTG
tggcagaggtagggtttgaa

SEQ ID NO: 267540 - DNA, 20 bp, Artificial Sequence
  Description of Artificial Sequence: Synthetic oligonucleotide
  Target: LAMA2; (-) strand; PAM type: YTN; PAM sequence: TTT
gtggcagaggtagggtttga

SEQ ID NO: 267541 - DNA, 20 bp, Artificial Sequence
  Description of Artificial Sequence: Synthetic oligonucleotide
  Target: LAMA2; (-) strand; PAM type: YTN; PAM sequence: TTT
tgtggcagaggtagggtttg

SEQ ID NO: 267542 - DNA, 20 bp, Artificial Sequence
  Description of Artificial Sequence: Synthetic oligonucleotide
  Target: LAMA2; (-) strand; PAM type: YTN; PAM sequence: CTA
tggataggttttgtggcaga

SEQ ID NO: 267543 - DNA, 20 bp, Artificial Sequence
  Description of Artificial Sequence: Synthetic oligonucleotide
  Target: LAMA2; (-) strand; PAM type: YTN; PAM sequence: CTG
tgctatggataggttttgtg

SEQ ID NO: 267544 - DNA, 20 bp, Artificial Sequence
  Description of Artificial Sequence: Synthetic oligonucleotide
  Target: LAMA2; (-) strand; PAM type: YTN; PAM sequence: TTC
tgtgctatggataggttttg

SEQ ID NO: 267545 - DNA, 20 bp, Artificial Sequence
  Description of Artificial Sequence: Synthetic oligonucleotide
  Target: LAMA2; (-) strand; PAM type: YTN; PAM sequence: TTG
tatataaaatgtacaaaata

SEQ ID NO: 267546 - DNA, 20 bp, Artificial Sequence
  Description of Artificial Sequence: Synthetic oligonucleotide
  Target: LAMA2; (-) strand; PAM type: YTN; PAM sequence: TTC
gttgtatataaaatgtacaa

SEQ ID NO: 267547 - DNA, 20 bp, Artificial Sequence
  Description of Artificial Sequence: Synthetic oligonucleotide
  Target: LAMA2; (-) strand; PAM type: YTN; PAM sequence: CTG
tatagtaaaatgtgttcgtt

SEQ ID NO: 267548 - DNA, 20 bp, Artificial Sequence
  Description of Artificial Sequence: Synthetic oligonucleotide
  Target: LAMA2; (-) strand; PAM type: YTN; PAM sequence: TTC
tgtatagtaaaatgtgttcg

SEQ ID NO: 267549 - DNA, 20 bp, Artificial Sequence
  Description of Artificial Sequence: Synthetic oligonucleotide
  Target: LAMA2; (-) strand; PAM type: YTN; PAM sequence: TTG
aaataattctgtatagtaaa

SEQ ID NO: 267550 - DNA, 20 bp, Artificial Sequence
  Description of Artificial Sequence: Synthetic oligonucleotide
  Target: LAMA2; (-) strand; PAM type: YTN; PAM sequence: CTG
aaagaatgattgaaataatt

SEQ ID NO: 267551 - DNA, 20 bp, Artificial Sequence
  Description of Artificial Sequence: Synthetic oligonucleotide
  Target: LAMA2; (-) strand; PAM type: YTN; PAM sequence: CTC
ctgaaagaatgattgaaata

SEQ ID NO: 267552 - DNA, 20 bp, Artificial Sequence
  Description of Artificial Sequence: Synthetic oligonucleotide
  Target: LAMA2; (-) strand; PAM type: YTN; PAM sequence: TTC
atctcctgaaagaatgattg

SEQ ID NO: 267553 - DNA, 20 bp, Artificial Sequence
  Description of Artificial Sequence: Synthetic oligonucleotide
  Target: LAMA2; (-) strand; PAM type: YTN; PAM sequence: TTA
gtaaatgttcatctcctgaa

SEQ ID NO: 267554 - DNA, 20 bp, Artificial Sequence
  Description of Artificial Sequence: Synthetic oligonucleotide
  Target: LAMA2; (-) strand; PAM type: YTN; PAM sequence: CTT
agtaaatgttcatctcctga

SEQ ID NO: 267555 - DNA, 20 bp, Artificial Sequence
  Description of Artificial Sequence: Synthetic oligonucleotide
  Target: LAMA2; (-) strand; PAM type: YTN; PAM sequence: TTG
ggatgaagtatatgcttagt

SEQ ID NO: 267556 - DNA, 20 bp, Artificial Sequence
  Description of Artificial Sequence: Synthetic oligonucleotide
  Target: LAMA2; (-) strand; PAM type: YTN; PAM sequence: TTC
atagtgttgggatgaagtat

SEQ ID NO: 267557 - DNA, 20 bp, Artificial Sequence
  Description of Artificial Sequence: Synthetic oligonucleotide
  Target: LAMA2; (-) strand; PAM type: YTN; PAM sequence: TTA
ttcatagtgttgggatgaag

SEQ ID NO: 267558 - DNA, 20 bp, Artificial Sequence
  Description of Artificial Sequence: Synthetic oligonucleotide
  Target: LAMA2; (-) strand; PAM type: YTN; PAM sequence: TTT
attcatagtgttgggatgaa

SEQ ID NO: 267559 - DNA, 20 bp, Artificial Sequence
  Description of Artificial Sequence: Synthetic oligonucleotide
  Target: LAMA2; (-) strand; PAM type: YTN; PAM sequence: TTT
tattcatagtgttgggatga

SEQ ID NO: 267560 - DNA, 20 bp, Artificial Sequence
  Description of Artificial Sequence: Synthetic oligonucleotide
  Target: LAMA2; (-) strand; PAM type: YTN; PAM sequence: CTT
ttattcatagtgttgggatg

SEQ ID NO: 267561 - DNA, 20 bp, Artificial Sequence
  Description of Artificial Sequence: Synthetic oligonucleotide
  Target: LAMA2; (-) strand; PAM type: YTN; PAM sequence: TTA
tcttttattcatagtgttgg

SEQ ID NO: 267562 - DNA, 20 bp, Artificial Sequence
  Description of Artificial Sequence: Synthetic oligonucleotide
  Target: LAMA2; (-) strand; PAM type: YTN; PAM sequence: TTT
atcttttattcatagtgttg

SEQ ID NO: 267563 - DNA, 20 bp, Artificial Sequence
  Description of Artificial Sequence: Synthetic oligonucleotide
  Target: LAMA2; (-) strand; PAM type: YTN; PAM sequence: TTT
tatcttttattcatagtgtt

SEQ ID NO: 267564 - DNA, 20 bp, Artificial Sequence
  Description of Artificial Sequence: Synthetic oligonucleotide
  Target: LAMA2; (-) strand; PAM type: YTN; PAM sequence: CTT
ttatcttttattcatagtgt

SEQ ID NO: 267565 - DNA, 20 bp, Artificial Sequence
  Description of Artificial Sequence: Synthetic oligonucleotide
  Target: LAMA2; (-) strand; PAM type: YTN; PAM sequence: CTG
tgtgagacacagatatgtac

SEQ ID NO: 267566 - DNA, 20 bp, Artificial Sequence
  Description of Artificial Sequence: Synthetic oligonucleotide
  Target: LAMA2; (-) strand; PAM type: YTN; PAM sequence: TTC
tgtgtgagacacagatatgt

SEQ ID NO: 267567 - DNA, 20 bp, Artificial Sequence
  Description of Artificial Sequence: Synthetic oligonucleotide
  Target: LAMA2; (-) strand; PAM type: YTN; PAM sequence: TTA
caattctgtgtgagacacag

SEQ ID NO: 267568 - DNA, 20 bp, Artificial Sequence
  Description of Artificial Sequence: Synthetic oligonucleotide
  Target: LAMA2; (-) strand; PAM type: YTN; PAM sequence: TTT
acaattctgtgtgagacaca

SEQ ID NO: 267569 - DNA, 20 bp, Artificial Sequence
  Description of Artificial Sequence: Synthetic oligonucleotide
  Target: LAMA2; (-) strand; PAM type: YTN; PAM sequence: TTC
aaagaatttacaattctgtg

SEQ ID NO: 267570 - DNA, 20 bp, Artificial Sequence
  Description of Artificial Sequence: Synthetic oligonucleotide
  Target: LAMA2; (-) strand; PAM type: YTN; PAM sequence: CTT
caaagaatttacaattctgt

SEQ ID NO: 267571 - DNA, 20 bp, Artificial Sequence
  Description of Artificial Sequence: Synthetic oligonucleotide
  Target: LAMA2; (-) strand; PAM type: YTN; PAM sequence: TTA
ccttcaaagaatttacaatt

SEQ ID NO: 267572 - DNA, 20 bp, Artificial Sequence
  Description of Artificial Sequence: Synthetic oligonucleotide
  Target: LAMA2; (-) strand; PAM type: YTN; PAM sequence: TTT
accttcaaagaatttacaat

SEQ ID NO: 267573 - DNA, 20 bp, Artificial Sequence
  Description of Artificial Sequence: Synthetic oligonucleotide
  Target: LAMA2; (-) strand; PAM type: YTN; PAM sequence: TTA
tgtttaccttcaaagaattt

SEQ ID NO: 267574 - DNA, 20 bp, Artificial Sequence
  Description of Artificial Sequence: Synthetic oligonucleotide
  Target: LAMA2; (-) strand; PAM type: YTN; PAM sequence: TTG
aataaagaaagaaataagac

SEQ ID NO: 267575 - DNA, 20 bp, Artificial Sequence
  Description of Artificial Sequence: Synthetic oligonucleotide
  Target: LAMA2; (-) strand; PAM type: YTN; PAM sequence: CTT
gaataaagaaagaaataaga

SEQ ID NO: 267576 - DNA, 20 bp, Artificial Sequence
  Description of Artificial Sequence: Synthetic oligonucleotide
  Target: LAMA2; (-) strand; PAM type: YTN; PAM sequence: TTC
ttgaataaagaaagaaataa

SEQ ID NO: 267577 - DNA, 20 bp, Artificial Sequence
  Description of Artificial Sequence: Synthetic oligonucleotide
  Target: LAMA2; (-) strand; PAM type: YTN; PAM sequence: TTT
cttgaataaagaaagaaata

SEQ ID NO: 267578 - DNA, 20 bp, Artificial Sequence
  Description of Artificial Sequence: Synthetic oligonucleotide
  Target: LAMA2; (-) strand; PAM type: YTN; PAM sequence: TTT
tcttgaataaagaaagaaat

SEQ ID NO: 267579 - DNA, 20 bp, Artificial Sequence
  Description of Artificial Sequence: Synthetic oligonucleotide
  Target: LAMA2; (-) strand; PAM type: YTN; PAM sequence: TTT
ttcttgaataaagaaagaaa

SEQ ID NO: 267580 - DNA, 20 bp, Artificial Sequence
  Description of Artificial Sequence: Synthetic oligonucleotide
  Target: LAMA2; (-) strand; PAM type: YTN; PAM sequence: CTT
tttcttgaataaagaaagaa

SEQ ID NO: 267581 - DNA, 20 bp, Artificial Sequence
  Description of Artificial Sequence: Synthetic oligonucleotide
  Target: LAMA2; (-) strand; PAM type: YTN; PAM sequence: TTA
actttttcttgaataaagaa

SEQ ID NO: 267582 - DNA, 20 bp, Artificial Sequence
  Description of Artificial Sequence: Synthetic oligonucleotide
  Target: LAMA2; (-) strand; PAM type: YTN; PAM sequence: CTC
attaactttttcttgaataa

SEQ ID NO: 267583 - DNA, 20 bp, Artificial Sequence
  Description of Artificial Sequence: Synthetic oligonucleotide
  Target: LAMA2; (-) strand; PAM type: YTN; PAM sequence: TTG
ggccctcattaactttttct

SEQ ID NO: 267584 - DNA, 20 bp, Artificial Sequence
  Description of Artificial Sequence: Synthetic oligonucleotide
  Target: LAMA2; (-) strand; PAM type: YTN; PAM sequence: TTG
agttgggccctcattaactt

SEQ ID NO: 267585 - DNA, 20 bp, Artificial Sequence
  Description of Artificial Sequence: Synthetic oligonucleotide
  Target: LAMA2; (-) strand; PAM type: YTN; PAM sequence: CTA
gcattgagttgggccctcat

SEQ ID NO: 267586 - DNA, 20 bp, Artificial Sequence
  Description of Artificial Sequence: Synthetic oligonucleotide
  Target: LAMA2; (-) strand; PAM type: YTN; PAM sequence: TTC
ccagtacgaagagccatgcc

SEQ ID NO: 267587 - DNA, 20 bp, Artificial Sequence
  Description of Artificial Sequence: Synthetic oligonucleotide
  Target: LAMA2; (-) strand; PAM type: YTN; PAM sequence: TTA
tatattcccagtacgaagag

SEQ ID NO: 267588 - DNA, 20 bp, Artificial Sequence
  Description of Artificial Sequence: Synthetic oligonucleotide
  Target: LAMA2; (-) strand; PAM type: YTN; PAM sequence: CTT
atatattcccagtacgaaga

SEQ ID NO: 267589 - DNA, 20 bp, Artificial Sequence
  Description of Artificial Sequence: Synthetic oligonucleotide
  Target: LAMA2; (-) strand; PAM type: YTN; PAM sequence: TTC
acttatatattcccagtacg

SEQ ID NO: 267590 - DNA, 20 bp, Artificial Sequence
  Description of Artificial Sequence: Synthetic oligonucleotide
  Target: LAMA2; (-) strand; PAM type: YTN; PAM sequence: TTG
ttcacttatatattcccagt

SEQ ID NO: 267591 - DNA, 20 bp, Artificial Sequence
  Description of Artificial Sequence: Synthetic oligonucleotide
  Target: LAMA2; (-) strand; PAM type: YTN; PAM sequence: TTT
gttcacttatatattcccag

SEQ ID NO: 267592 - DNA, 20 bp, Artificial Sequence
  Description of Artificial Sequence: Synthetic oligonucleotide
  Target: LAMA2; (-) strand; PAM type: YTN; PAM sequence: TTT
tgttcacttatatattccca

SEQ ID NO: 267593 - DNA, 20 bp, Artificial Sequence
  Description of Artificial Sequence: Synthetic oligonucleotide
  Target: LAMA2; (-) strand; PAM type: YTN; PAM sequence: CTA
ggaaacacaggccgttttgt

SEQ ID NO: 267594 - DNA, 20 bp, Artificial Sequence
  Description of Artificial Sequence: Synthetic oligonucleotide
  Target: LAMA2; (-) strand; PAM type: YTN; PAM sequence: CTC
cagaaggctaggaaacacag

SEQ ID NO: 267595 - DNA, 20 bp, Artificial Sequence
  Description of Artificial Sequence: Synthetic oligonucleotide
  Target: LAMA2; (-) strand; PAM type: YTN; PAM sequence: TTA
taaaaaatacaagctccaga

SEQ ID NO: 267596 - DNA, 20 bp, Artificial Sequence
  Description of Artificial Sequence: Synthetic oligonucleotide
  Target: LAMA2; (-) strand; PAM type: YTN; PAM sequence: CTT
ataaaaaatacaagctccag

SEQ ID NO: 267597 - DNA, 20 bp, Artificial Sequence
  Description of Artificial Sequence: Synthetic oligonucleotide
  Target: LAMA2; (-) strand; PAM type: YTN; PAM sequence: CTC
ttataaaaaatacaagctcc

SEQ ID NO: 267598 - DNA, 20 bp, Artificial Sequence
  Description of Artificial Sequence: Synthetic oligonucleotide
  Target: LAMA2; (-) strand; PAM type: YTN; PAM sequence: CTC
tcttataaaaaatacaagct

SEQ ID NO: 267599 - DNA, 20 bp, Artificial Sequence
  Description of Artificial Sequence: Synthetic oligonucleotide
  Target: LAMA2; (-) strand; PAM type: YTN; PAM sequence: TTA
ctctcttataaaaaatacaa

SEQ ID NO: 267600 - DNA, 20 bp, Artificial Sequence
  Description of Artificial Sequence: Synthetic oligonucleotide
  Target: LAMA2; (-) strand; PAM type: YTN; PAM sequence: CTT
actctcttataaaaaataca

SEQ ID NO: 267601 - DNA, 20 bp, Artificial Sequence
  Description of Artificial Sequence: Synthetic oligonucleotide
  Target: LAMA2; (-) strand; PAM type: YTN; PAM sequence: TTA
tcttactctcttataaaaaa

SEQ ID NO: 267602 - DNA, 20 bp, Artificial Sequence
  Description of Artificial Sequence: Synthetic oligonucleotide
  Target: LAMA2; (-) strand; PAM type: YTN; PAM sequence: TTT
atcttactctcttataaaaa

SEQ ID NO: 267603 - DNA, 20 bp, Artificial Sequence
  Description of Artificial Sequence: Synthetic oligonucleotide
  Target: LAMA2; (-) strand; PAM type: YTN; PAM sequence: CTT
tatcttactctcttataaaa

SEQ ID NO: 267604 - DNA, 20 bp, Artificial Sequence
  Description of Artificial Sequence: Synthetic oligonucleotide
  Target: LAMA2; (-) strand; PAM type: YTN; PAM sequence: TTC
tttatcttactctcttataa

SEQ ID NO: 267605 - DNA, 20 bp, Artificial Sequence
  Description of Artificial Sequence: Synthetic oligonucleotide
  Target: LAMA2; (-) strand; PAM type: YTN; PAM sequence: TTT
ctttatcttactctcttata

SEQ ID NO: 267606 - DNA, 20 bp, Artificial Sequence
  Description of Artificial Sequence: Synthetic oligonucleotide
  Target: LAMA2; (-) strand; PAM type: YTN; PAM sequence: CTA
tttctttatcttactctctt

SEQ ID NO: 267607 - DNA, 20 bp, Artificial Sequence
  Description of Artificial Sequence: Synthetic oligonucleotide
  Target: LAMA2; (-) strand; PAM type: YTN; PAM sequence: TTA
tatatctatttctttatctt

SEQ ID NO: 267608 - DNA, 20 bp, Artificial Sequence
  Description of Artificial Sequence: Synthetic oligonucleotide
  Target: LAMA2; (-) strand; PAM type: YTN; PAM sequence: TTA
cattatatatctatttcttt

SEQ ID NO: 267609 - DNA, 20 bp, Artificial Sequence
  Description of Artificial Sequence: Synthetic oligonucleotide
  Target: LAMA2; (-) strand; PAM type: YTN; PAM sequence: CTG
atattacattatatatctat

SEQ ID NO: 267610 - DNA, 20 bp, Artificial Sequence
  Description of Artificial Sequence: Synthetic oligonucleotide
  Target: LAMA2; (-) strand; PAM type: YTN; PAM sequence: TTA
cctgatattacattatatat

SEQ ID NO: 267611 - DNA, 20 bp, Artificial Sequence
  Description of Artificial Sequence: Synthetic oligonucleotide
  Target: LAMA2; (-) strand; PAM type: YTN; PAM sequence: TTG
tcattacctgatattacatt

SEQ ID NO: 267612 - DNA, 20 bp, Artificial Sequence
  Description of Artificial Sequence: Synthetic oligonucleotide
  Target: LAMA2; (-) strand; PAM type: YTN; PAM sequence: CTT
gtcattacctgatattacat

SEQ ID NO: 267613 - DNA, 20 bp, Artificial Sequence
  Description of Artificial Sequence: Synthetic oligonucleotide
  Target: LAMA2; (-) strand; PAM type: YTN; PAM sequence: CTG
gtagtacttgtcattacctg

SEQ ID NO: 267614 - DNA, 20 bp, Artificial Sequence
  Description of Artificial Sequence: Synthetic oligonucleotide
  Target: LAMA2; (-) strand; PAM type: YTN; PAM sequence: CTC
ctggtagtacttgtcattac

SEQ ID NO: 267615 - DNA, 20 bp, Artificial Sequence
  Description of Artificial Sequence: Synthetic oligonucleotide
  Target: LAMA2; (-) strand; PAM type: YTN; PAM sequence: TTC
tcctggtagtacttgtcatt

SEQ ID NO: 267616 - DNA, 20 bp, Artificial Sequence
  Description of Artificial Sequence: Synthetic oligonucleotide
  Target: LAMA2; (-) strand; PAM type: YTN; PAM sequence: TTT
ctcctggtagtacttgtcat

SEQ ID NO: 267617 - DNA, 20 bp, Artificial Sequence
  Description of Artificial Sequence: Synthetic oligonucleotide
  Target: LAMA2; (-) strand; PAM type: YTN; PAM sequence: TTA
tttctcctggtagtacttgt

SEQ ID NO: 267618 - DNA, 20 bp, Artificial Sequence
  Description of Artificial Sequence: Synthetic oligonucleotide
  Target: LAMA2; (-) strand; PAM type: YTN; PAM sequence: TTT
atttctcctggtagtacttg

SEQ ID NO: 267619 - DNA, 20 bp, Artificial Sequence
  Description of Artificial Sequence: Synthetic oligonucleotide
  Target: LAMA2; (-) strand; PAM type: YTN; PAM sequence: CTT
tatttctcctggtagtactt

SEQ ID NO: 267620 - DNA, 20 bp, Artificial Sequence
  Description of Artificial Sequence: Synthetic oligonucleotide
  Target: LAMA2; (-) strand; PAM type: YTN; PAM sequence: CTC
ctttatttctcctggtagta

SEQ ID NO: 267621 - DNA, 20 bp, Artificial Sequence
  Description of Artificial Sequence: Synthetic oligonucleotide
  Target: LAMA2; (-) strand; PAM type: YTN; PAM sequence: TTG
agtctcctttatttctcctg

SEQ ID NO: 267622 - DNA, 20 bp, Artificial Sequence
  Description of Artificial Sequence: Synthetic oligonucleotide
  Target: LAMA2; (-) strand; PAM type: YTN; PAM sequence: CTT
gagtctcctttatttctcct

SEQ ID NO: 267623 - DNA, 20 bp, Artificial Sequence
  Description of Artificial Sequence: Synthetic oligonucleotide
  Target: LAMA2; (-) strand; PAM type: YTN; PAM sequence: TTC
cttgagtctcctttatttct

SEQ ID NO: 267624 - DNA, 20 bp, Artificial Sequence
  Description of Artificial Sequence: Synthetic oligonucleotide
  Target: LAMA2; (-) strand; PAM type: YTN; PAM sequence: CTA
agttccttgagtctccttta

SEQ ID NO: 267625 - DNA, 20 bp, Artificial Sequence
  Description of Artificial Sequence: Synthetic oligonucleotide
  Target: LAMA2; (-) strand; PAM type: YTN; PAM sequence: CTC
taagttccttgagtctcctt

SEQ ID NO: 267626 - DNA, 20 bp, Artificial Sequence
  Description of Artificial Sequence: Synthetic oligonucleotide
  Target: LAMA2; (-) strand; PAM type: YTN; PAM sequence: TTC
atcactctaagttccttgag

SEQ ID NO: 267627 - DNA, 20 bp, Artificial Sequence
  Description of Artificial Sequence: Synthetic oligonucleotide
  Target: LAMA2; (-) strand; PAM type: YTN; PAM sequence: CTT
catcactctaagttccttga

SEQ ID NO: 267628 - DNA, 20 bp, Artificial Sequence
  Description of Artificial Sequence: Synthetic oligonucleotide
  Target: LAMA2; (-) strand; PAM type: YTN; PAM sequence: CTA
aaatcataccttcatcactc

SEQ ID NO: 267629 - DNA, 20 bp, Artificial Sequence
  Description of Artificial Sequence: Synthetic oligonucleotide
  Target: LAMA2; (-) strand; PAM type: YTN; PAM sequence: CTC
atctaaaatcataccttcat

SEQ ID NO: 267630 - DNA, 20 bp, Artificial Sequence
  Description of Artificial Sequence: Synthetic oligonucleotide
  Target: LAMA2; (-) strand; PAM type: YTN; PAM sequence: TTG
tgaagatcatggaccacctc

SEQ ID NO: 267631 - DNA, 20 bp, Artificial Sequence
  Description of Artificial Sequence: Synthetic oligonucleotide
  Target: LAMA2; (-) strand; PAM type: YTN; PAM sequence: TTT
gtgaagatcatggaccacct

SEQ ID NO: 267632 - DNA, 20 bp, Artificial Sequence
  Description of Artificial Sequence: Synthetic oligonucleotide
  Target: LAMA2; (-) strand; PAM type: YTN; PAM sequence: CTG
tttgtgaagatcatggacca

SEQ ID NO: 267633 - DNA, 20 bp, Artificial Sequence
  Description of Artificial Sequence: Synthetic oligonucleotide
  Target: LAMA2; (-) strand; PAM type: YTN; PAM sequence: CTC
atctgtttgtgaagatcatg

SEQ ID NO: 267634 - DNA, 20 bp, Artificial Sequence
  Description of Artificial Sequence: Synthetic oligonucleotide
  Target: LAMA2; (-) strand; PAM type: YTN; PAM sequence: CTG
cacaagtctcatctgtttgt

SEQ ID NO: 267635 - DNA, 20 bp, Artificial Sequence
  Description of Artificial Sequence: Synthetic oligonucleotide
  Target: LAMA2; (-) strand; PAM type: YTN; PAM sequence: TTC
tgcacaagtctcatctgttt

SEQ ID NO: 267636 - DNA, 20 bp, Artificial Sequence
  Description of Artificial Sequence: Synthetic oligonucleotide
  Target: LAMA2; (-) strand; PAM type: YTN; PAM sequence: TTT
ctgcacaagtctcatctgtt

SEQ ID NO: 267637 - DNA, 20 bp, Artificial Sequence
  Description of Artificial Sequence: Synthetic oligonucleotide
  Target: LAMA2; (-) strand; PAM type: YTN; PAM sequence: TTC
acatttctgcacaagtctca

SEQ ID NO: 267638 - DNA, 20 bp, Artificial Sequence
  Description of Artificial Sequence: Synthetic oligonucleotide
  Target: LAMA2; (-) strand; PAM type: YTN; PAM sequence: CTC
acaccattcacatttctgca

SEQ ID NO: 267639 - DNA, 20 bp, Artificial Sequence
  Description of Artificial Sequence: Synthetic oligonucleotide
  Target: LAMA2; (-) strand; PAM type: YTN; PAM sequence: TTC
acatggctcacaccattcac

SEQ ID NO: 267640 - DNA, 20 bp, Artificial Sequence
  Description of Artificial Sequence: Synthetic oligonucleotide
  Target: LAMA2; (-) strand; PAM type: YTN; PAM sequence: CTG
caggtattcacatggctcac

SEQ ID NO: 267641 - DNA, 20 bp, Artificial Sequence
  Description of Artificial Sequence: Synthetic oligonucleotide
  Target: LAMA2; (-) strand; PAM type: YTN; PAM sequence: TTC
ctgcaggtattcacatggct

SEQ ID NO: 267642 - DNA, 20 bp, Artificial Sequence
  Description of Artificial Sequence: Synthetic oligonucleotide
  Target: LAMA2; (-) strand; PAM type: YTN; PAM sequence: CTT
cctgcaggtattcacatggc

SEQ ID NO: 267643 - DNA, 20 bp, Artificial Sequence
  Description of Artificial Sequence: Synthetic oligonucleotide
  Target: LAMA2; (-) strand; PAM type: YTN; PAM sequence: TTC
ttcctgcaggtattcacatg

SEQ ID NO: 267644 - DNA, 20 bp, Artificial Sequence
  Description of Artificial Sequence: Synthetic oligonucleotide
  Target: LAMA2; (-) strand; PAM type: YTN; PAM sequence: CTG
ttcttcctgcaggtattcac

SEQ ID NO: 267645 - DNA, 20 bp, Artificial Sequence
  Description of Artificial Sequence: Synthetic oligonucleotide
  Target: LAMA2; (-) strand; PAM type: YTN; PAM sequence: CTG
aggggactgttcttcctgca

SEQ ID NO: 267646 - DNA, 20 bp, Artificial Sequence
  Description of Artificial Sequence: Synthetic oligonucleotide
  Target: LAMA2; (-) strand; PAM type: YTN; PAM sequence: CTC
tgaggggactgttcttcctg

SEQ ID NO: 267647 - DNA, 20 bp, Artificial Sequence
  Description of Artificial Sequence: Synthetic oligonucleotide
  Target: LAMA2; (-) strand; PAM type: YTN; PAM sequence: TTC
tctgaggggactgttcttcc

SEQ ID NO: 267648 - DNA, 20 bp, Artificial Sequence
  Description of Artificial Sequence: Synthetic oligonucleotide
  Target: LAMA2; (-) strand; PAM type: YTN; PAM sequence: TTT
ctctgaggggactgttcttc

SEQ ID NO: 267649 - DNA, 20 bp, Artificial Sequence
  Description of Artificial Sequence: Synthetic oligonucleotide
  Target: LAMA2; (-) strand; PAM type: YTN; PAM sequence: TTT
tctctgaggggactgttctt

SEQ ID NO: 267650 - DNA, 20 bp, Artificial Sequence
  Description of Artificial Sequence: Synthetic oligonucleotide
  Target: LAMA2; (-) strand; PAM type: YTN; PAM sequence: TTT
ttctctgaggggactgttct

SEQ ID NO: 267651 - DNA, 20 bp, Artificial Sequence
  Description of Artificial Sequence: Synthetic oligonucleotide
  Target: LAMA2; (-) strand; PAM type: YTN; PAM sequence: TTT
tttctctgaggggactgttc

SEQ ID NO: 267652 - DNA, 20 bp, Artificial Sequence
  Description of Artificial Sequence: Synthetic oligonucleotide
  Target: LAMA2; (-) strand; PAM type: YTN; PAM sequence: CTT
ttttctctgaggggactgtt

SEQ ID NO: 267653 - DNA, 20 bp, Artificial Sequence
  Description of Artificial Sequence: Synthetic oligonucleotide
  Target: LAMA2; (-) strand; PAM type: YTN; PAM sequence: CTC
agggccagtgcagtgacttt

SEQ ID NO: 267654 - DNA, 20 bp, Artificial Sequence
  Description of Artificial Sequence: Synthetic oligonucleotide
  Target: LAMA2; (-) strand; PAM type: YTN; PAM sequence: CTG
tctcagggccagtgcagtga

SEQ ID NO: 267655 - DNA, 20 bp, Artificial Sequence
  Description of Artificial Sequence: Synthetic oligonucleotide
  Target: LAMA2; (-) strand; PAM type: YTN; PAM sequence: CTG
ccaagcatgggtctgtctca

SEQ ID NO: 267656 - DNA, 20 bp, Artificial Sequence
  Description of Artificial Sequence: Synthetic oligonucleotide
  Target: LAMA2; (-) strand; PAM type: YTN; PAM sequence: TTA
tctgccaagcatgggtctgt

SEQ ID NO: 267657 - DNA, 20 bp, Artificial Sequence
  Description of Artificial Sequence: Synthetic oligonucleotide
  Target: LAMA2; (-) strand; PAM type: YTN; PAM sequence: CTG
ttatctgccaagcatgggtc

SEQ ID NO: 267658 - DNA, 20 bp, Artificial Sequence
  Description of Artificial Sequence: Synthetic oligonucleotide
  Target: LAMA2; (-) strand; PAM type: YTN; PAM sequence: CTC
ctgttatctgccaagcatgg

SEQ ID NO: 267659 - DNA, 20 bp, Artificial Sequence
  Description of Artificial Sequence: Synthetic oligonucleotide
  Target: LAMA2; (-) strand; PAM type: YTN; PAM sequence: CTG
gcctcctgttatctgccaag

SEQ ID NO: 267660 - DNA, 20 bp, Artificial Sequence
  Description of Artificial Sequence: Synthetic oligonucleotide
  Target: LAMA2; (-) strand; PAM type: YTN; PAM sequence: TTC
caaccaccctggcctcctgt

SEQ ID NO: 267661 - DNA, 20 bp, Artificial Sequence
  Description of Artificial Sequence: Synthetic oligonucleotide
  Target: LAMA2; (-) strand; PAM type: YTN; PAM sequence: CTG
ttccaaccaccctggcctcc

SEQ ID NO: 267662 - DNA, 20 bp, Artificial Sequence
  Description of Artificial Sequence: Synthetic oligonucleotide
  Target: LAMA2; (-) strand; PAM type: YTN; PAM sequence: CTC
tgttccaaccaccctggcct

SEQ ID NO: 267663 - DNA, 20 bp, Artificial Sequence
  Description of Artificial Sequence: Synthetic oligonucleotide
  Target: LAMA2; (-) strand; PAM type: YTN; PAM sequence: TTC
actctgttccaaccaccctg

SEQ ID NO: 267664 - DNA, 20 bp, Artificial Sequence
  Description of Artificial Sequence: Synthetic oligonucleotide
  Target: LAMA2; (-) strand; PAM type: YTN; PAM sequence: CTC
attcactctgttccaaccac

SEQ ID NO: 267665 - DNA, 20 bp, Artificial Sequence
  Description of Artificial Sequence: Synthetic oligonucleotide
  Target: LAMA2; (-) strand; PAM type: YTN; PAM sequence: TTC
tcattcactctgttccaacc

SEQ ID NO: 267666 - DNA, 20 bp, Artificial Sequence
  Description of Artificial Sequence: Synthetic oligonucleotide
  Target: LAMA2; (-) strand; PAM type: YTN; PAM sequence: CTT
ctcattcactctgttccaac

SEQ ID NO: 267667 - DNA, 20 bp, Artificial Sequence
  Description of Artificial Sequence: Synthetic oligonucleotide
  Target: LAMA2; (-) strand; PAM type: YTN; PAM sequence: CTC
ttctcattcactctgttcca

SEQ ID NO: 267668 - DNA, 20 bp, Artificial Sequence
  Description of Artificial Sequence: Synthetic oligonucleotide
  Target: LAMA2; (-) strand; PAM type: YTN; PAM sequence: CTA
gccccctcttctcattcact

SEQ ID NO: 267669 - DNA, 20 bp, Artificial Sequence
  Description of Artificial Sequence: Synthetic oligonucleotide
  Target: LAMA2; (-) strand; PAM type: YTN; PAM sequence: CTC
ctagccccctcttctcattc

SEQ ID NO: 267670 - DNA, 20 bp, Artificial Sequence
  Description of Artificial Sequence: Synthetic oligonucleotide
  Target: LAMA2; (-) strand; PAM type: YTN; PAM sequence: TTC
atctcctagccccctcttct

SEQ ID NO: 267671 - DNA, 20 bp, Artificial Sequence
  Description of Artificial Sequence: Synthetic oligonucleotide
  Target: LAMA2; (-) strand; PAM type: YTN; PAM sequence: CTT
catctcctagccccctcttc

SEQ ID NO: 267672 - DNA, 20 bp, Artificial Sequence
  Description of Artificial Sequence: Synthetic oligonucleotide
  Target: LAMA2; (-) strand; PAM type: YTN; PAM sequence: CTG
acttcatctcctagccccct

SEQ ID NO: 267673 - DNA, 20 bp, Artificial Sequence
  Description of Artificial Sequence: Synthetic oligonucleotide
  Target: LAMA2; (-) strand; PAM type: YTN; PAM sequence: TTG
ctgacttcatctcctagccc

SEQ ID NO: 267674 - DNA, 20 bp, Artificial Sequence
  Description of Artificial Sequence: Synthetic oligonucleotide
  Target: LAMA2; (-) strand; PAM type: YTN; PAM sequence: TTT
gctgacttcatctcctagcc

SEQ ID NO: 267675 - DNA, 20 bp, Artificial Sequence
  Description of Artificial Sequence: Synthetic oligonucleotide
  Target: LAMA2; (-) strand; PAM type: YTN; PAM sequence: CTT
tgctgacttcatctcctagc

SEQ ID NO: 267676 - DNA, 20 bp, Artificial Sequence
  Description of Artificial Sequence: Synthetic oligonucleotide
  Target: LAMA2; (-) strand; PAM type: YTN; PAM sequence: TTA
gagctttgctgacttcatct

SEQ ID NO: 267677 - DNA, 20 bp, Artificial Sequence
  Description of Artificial Sequence: Synthetic oligonucleotide
  Target: LAMA2; (-) strand; PAM type: YTN; PAM sequence: TTC
attagagctttgctgacttc

SEQ ID NO: 267678 - DNA, 20 bp, Artificial Sequence
  Description of Artificial Sequence: Synthetic oligonucleotide
  Target: LAMA2; (-) strand; PAM type: YTN; PAM sequence: TTA
gatattcattagagctttgc

SEQ ID NO: 267679 - DNA, 20 bp, Artificial Sequence
  Description of Artificial Sequence: Synthetic oligonucleotide
  Target: LAMA2; (-) strand; PAM type: YTN; PAM sequence: CTC
aggagagttagatattcatt

SEQ ID NO: 267680 - DNA, 20 bp, Artificial Sequence
  Description of Artificial Sequence: Synthetic oligonucleotide
  Target: LAMA2; (-) strand; PAM type: YTN; PAM sequence: TTA
gccctcaggagagttagata

SEQ ID NO: 267681 - DNA, 20 bp, Artificial Sequence
  Description of Artificial Sequence: Synthetic oligonucleotide
  Target: LAMA2; (-) strand; PAM type: YTN; PAM sequence: TTT
agccctcaggagagttagat

SEQ ID NO: 267682 - DNA, 20 bp, Artificial Sequence
  Description of Artificial Sequence: Synthetic oligonucleotide
  Target: LAMA2; (-) strand; PAM type: YTN; PAM sequence: TTT
tagccctcaggagagttaga

SEQ ID NO: 267683 - DNA, 20 bp, Artificial Sequence
  Description of Artificial Sequence: Synthetic oligonucleotide
  Target: LAMA2; (-) strand; PAM type: YTN; PAM sequence: TTT
ttagccctcaggagagttag

SEQ ID NO: 267684 - DNA, 20 bp, Artificial Sequence
  Description of Artificial Sequence: Synthetic oligonucleotide
  Target: LAMA2; (-) strand; PAM type: YTN; PAM sequence: CTG
gaagatttttagccctcagg

SEQ ID NO: 267685 - DNA, 20 bp, Artificial Sequence
  Description of Artificial Sequence: Synthetic oligonucleotide
  Target: LAMA2; (-) strand; PAM type: YTN; PAM sequence: TTG
ccactggaagatttttagcc

SEQ ID NO: 267686 - DNA, 20 bp, Artificial Sequence
  Description of Artificial Sequence: Synthetic oligonucleotide
  Target: LAMA2; (-) strand; PAM type: YTN; PAM sequence: CTT
gccactggaagatttttagc

SEQ ID NO: 267687 - DNA, 20 bp, Artificial Sequence
  Description of Artificial Sequence: Synthetic oligonucleotide
  Target: LAMA2; (-) strand; PAM type: YTN; PAM sequence: CTC
ttgccactggaagattttta

SEQ ID NO: 267688 - DNA, 20 bp, Artificial Sequence
  Description of Artificial Sequence: Synthetic oligonucleotide
  Target: LAMA2; (-) strand; PAM type: YTN; PAM sequence: CTG
taccaagccacctcttgcca

SEQ ID NO: 267689 - DNA, 20 bp, Artificial Sequence
  Description of Artificial Sequence: Synthetic oligonucleotide
  Target: LAMA2; (-) strand; PAM type: YTN; PAM sequence: TTA
tcctgtaccaagccacctct

SEQ ID NO: 267690 - DNA, 20 bp, Artificial Sequence
  Description of Artificial Sequence: Synthetic oligonucleotide
  Target: LAMA2; (-) strand; PAM type: YTN; PAM sequence: CTG
gattatcctgtaccaagcca

SEQ ID NO: 267691 - DNA, 20 bp, Artificial Sequence
  Description of Artificial Sequence: Synthetic oligonucleotide
  Target: LAMA2; (-) strand; PAM type: YTN; PAM sequence: TTC
catcaataacaccactggat

SEQ ID NO: 267692 - DNA, 20 bp, Artificial Sequence
  Description of Artificial Sequence: Synthetic oligonucleotide
  Target: LAMA2; (-) strand; PAM type: YTN; PAM sequence: CTT
ccatcaataacaccactgga

SEQ ID NO: 267693 - DNA, 20 bp, Artificial Sequence
  Description of Artificial Sequence: Synthetic oligonucleotide
  Target: LAMA2; (-) strand; PAM type: YTN; PAM sequence: CTG
gtgcttccatcaataacacc

SEQ ID NO: 267694 - DNA, 20 bp, Artificial Sequence
  Description of Artificial Sequence: Synthetic oligonucleotide
  Target: LAMA2; (-) strand; PAM type: YTN; PAM sequence: CTG
ctggtgcttccatcaataac

SEQ ID NO: 267695 - DNA, 20 bp, Artificial Sequence
  Description of Artificial Sequence: Synthetic oligonucleotide
  Target: LAMA2; (-) strand; PAM type: YTN; PAM sequence: CTG
caaatgctgctggtgcttcc

SEQ ID NO: 267696 - DNA, 20 bp, Artificial Sequence
  Description of Artificial Sequence: Synthetic oligonucleotide
  Target: LAMA2; (-) strand; PAM type: YTN; PAM sequence: CTA
tctgcaaatgctgctggtgc

SEQ ID NO: 267697 - DNA, 20 bp, Artificial Sequence
  Description of Artificial Sequence: Synthetic oligonucleotide
  Target: LAMA2; (-) strand; PAM type: YTN; PAM sequence: CTC
ctatctgcaaatgctgctgg

SEQ ID NO: 267698 - DNA, 20 bp, Artificial Sequence
  Description of Artificial Sequence: Synthetic oligonucleotide
  Target: LAMA2; (-) strand; PAM type: YTN; PAM sequence: TTA
tctcctatctgcaaatgctg

SEQ ID NO: 267699 - DNA, 20 bp, Artificial Sequence
  Description of Artificial Sequence: Synthetic oligonucleotide
  Target: LAMA2; (-) strand; PAM type: YTN; PAM sequence: CTT
atctcctatctgcaaatgct

SEQ ID NO: 267700 - DNA, 20 bp, Artificial Sequence
  Description of Artificial Sequence: Synthetic oligonucleotide
  Target: LAMA2; (-) strand; PAM type: YTN; PAM sequence: CTC
cacttatctcctatctgcaa

SEQ ID NO: 267701 - DNA, 20 bp, Artificial Sequence
  Description of Artificial Sequence: Synthetic oligonucleotide
  Target: LAMA2; (-) strand; PAM type: YTN; PAM sequence: CTC
acactccacttatctcctat

SEQ ID NO: 267702 - DNA, 20 bp, Artificial Sequence
  Description of Artificial Sequence: Synthetic oligonucleotide
  Target: LAMA2; (-) strand; PAM type: YTN; PAM sequence: CTC
tcacactccacttatctcct

SEQ ID NO: 267703 - DNA, 20 bp, Artificial Sequence
  Description of Artificial Sequence: Synthetic oligonucleotide
  Target: LAMA2; (-) strand; PAM type: YTN; PAM sequence: CTC
tctcacactccacttatctc

SEQ ID NO: 267704 - DNA, 20 bp, Artificial Sequence
  Description of Artificial Sequence: Synthetic oligonucleotide
  Target: LAMA2; (-) strand; PAM type: YTN; PAM sequence: CTC
ctctctcacactccacttat

SEQ ID NO: 267705 - DNA, 20 bp, Artificial Sequence
  Description of Artificial Sequence: Synthetic oligonucleotide
  Target: LAMA2; (-) strand; PAM type: YTN; PAM sequence: CTG
ccaaaaaccatggtgtcaac

SEQ ID NO: 267706 - DNA, 20 bp, Artificial Sequence
  Description of Artificial Sequence: Synthetic oligonucleotide
  Target: LAMA2; (-) strand; PAM type: YTN; PAM sequence: CTC
tgccaaaaaccatggtgtca

SEQ ID NO: 267707 - DNA, 20 bp, Artificial Sequence
  Description of Artificial Sequence: Synthetic oligonucleotide
  Target: LAMA2; (-) strand; PAM type: YTN; PAM sequence: TTG
ctctgccaaaaaccatggtg

SEQ ID NO: 267708 - DNA, 20 bp, Artificial Sequence
  Description of Artificial Sequence: Synthetic oligonucleotide
  Target: LAMA2; (-) strand; PAM type: YTN; PAM sequence: TTT
gctctgccaaaaaccatggt

SEQ ID NO: 267709 - DNA, 20 bp, Artificial Sequence
  Description of Artificial Sequence: Synthetic oligonucleotide
  Target: LAMA2; (-) strand; PAM type: YTN; PAM sequence: TTC
catttgctctgccaaaaacc

SEQ ID NO: 267710 - DNA, 20 bp, Artificial Sequence
  Description of Artificial Sequence: Synthetic oligonucleotide
  Target: LAMA2; (-) strand; PAM type: YTN; PAM sequence: TTT
ccatttgctctgccaaaaac

SEQ ID NO: 267711 - DNA, 20 bp, Artificial Sequence
  Description of Artificial Sequence: Synthetic oligonucleotide
  Target: LAMA2; (-) strand; PAM type: YTN; PAM sequence: CTC
catgtttccatttgctctgc

SEQ ID NO: 267712 - DNA, 20 bp, Artificial Sequence
  Description of Artificial Sequence: Synthetic oligonucleotide
  Target: LAMA2; (-) strand; PAM type: YTN; PAM sequence: TTC
cccatcccagtcaacagcca

SEQ ID NO: 267713 - DNA, 20 bp, Artificial Sequence
  Description of Artificial Sequence: Synthetic oligonucleotide
  Target: LAMA2; (-) strand; PAM type: YTN; PAM sequence: TTT
ccccatcccagtcaacagcc

SEQ ID NO: 267714 - DNA, 20 bp, Artificial Sequence
  Description of Artificial Sequence: Synthetic oligonucleotide
  Target: LAMA2; (-) strand; PAM type: YTN; PAM sequence: TTT
tccccatcccagtcaacagc

SEQ ID NO: 267715 - DNA, 20 bp, Artificial Sequence
  Description of Artificial Sequence: Synthetic oligonucleotide
  Target: LAMA2; (-) strand; PAM type: YTN; PAM sequence: CTA
attttccccatcccagtcaa

SEQ ID NO: 267716 - DNA, 20 bp, Artificial Sequence
  Description of Artificial Sequence: Synthetic oligonucleotide
  Target: LAMA2; (-) strand; PAM type: YTN; PAM sequence: TTC
cctaattttccccatcccag

SEQ ID NO: 267717 - DNA, 20 bp, Artificial Sequence
  Description of Artificial Sequence: Synthetic oligonucleotide
  Target: LAMA2; (-) strand; PAM type: YTN; PAM sequence: TTT
ccctaattttccccatccca

SEQ ID NO: 267718 - DNA, 20 bp, Artificial Sequence
  Description of Artificial Sequence: Synthetic oligonucleotide
  Target: LAMA2; (-) strand; PAM type: YTN; PAM sequence: CTT
tccctaattttccccatccc

SEQ ID NO: 267719 - DNA, 20 bp, Artificial Sequence
  Description of Artificial Sequence: Synthetic oligonucleotide
  Target: LAMA2; (-) strand; PAM type: YTN; PAM sequence: CTC
caaaaatacaccagaccttt

SEQ ID NO: 267720 - DNA, 20 bp, Artificial Sequence
  Description of Artificial Sequence: Synthetic oligonucleotide
  Target: LAMA2; (-) strand; PAM type: YTN; PAM sequence: CTC
cccctccaaaaatacaccag

SEQ ID NO: 267721 - DNA, 20 bp, Artificial Sequence
  Description of Artificial Sequence: Synthetic oligonucleotide
  Target: LAMA2; (-) strand; PAM type: YTN; PAM sequence: TTC
tccccctccaaaaatacacc

SEQ ID NO: 267722 - DNA, 20 bp, Artificial Sequence
  Description of Artificial Sequence: Synthetic oligonucleotide
  Target: LAMA2; (-) strand; PAM type: YTN; PAM sequence: TTT
ctccccctccaaaaatacac

SEQ ID NO: 267723 - DNA, 20 bp, Artificial Sequence
  Description of Artificial Sequence: Synthetic oligonucleotide
  Target: LAMA2; (-) strand; PAM type: YTN; PAM sequence: CTA
aaagtaagtttctccccctc

SEQ ID NO: 267724 - DNA, 20 bp, Artificial Sequence
  Description of Artificial Sequence: Synthetic oligonucleotide
  Target: LAMA2; (-) strand; PAM type: YTN; PAM sequence: TTC
gcagatctaaaagtaagttt

SEQ ID NO: 267725 - DNA, 20 bp, Artificial Sequence
  Description of Artificial Sequence: Synthetic oligonucleotide
  Target: LAMA2; (-) strand; PAM type: YTN; PAM sequence: CTT
cgcagatctaaaagtaagtt

SEQ ID NO: 267726 - DNA, 20 bp, Artificial Sequence
  Description of Artificial Sequence: Synthetic oligonucleotide
  Target: LAMA2; (-) strand; PAM type: YTN; PAM sequence: CTA
ccttcgcagatctaaaagta

SEQ ID NO: 267727 - DNA, 20 bp, Artificial Sequence
  Description of Artificial Sequence: Synthetic oligonucleotide
  Target: LAMA2; (-) strand; PAM type: YTN; PAM sequence: TTG
tgcctaccttcgcagatcta

SEQ ID NO: 267728 - DNA, 20 bp, Artificial Sequence
  Description of Artificial Sequence: Synthetic oligonucleotide
  Target: LAMA2; (-) strand; PAM type: YTN; PAM sequence: TTA
aatattgtgcctaccttcgc

SEQ ID NO: 267729 - DNA, 20 bp, Artificial Sequence
  Description of Artificial Sequence: Synthetic oligonucleotide
  Target: LAMA2; (-) strand; PAM type: YTN; PAM sequence: TTT
aaatattgtgcctaccttcg

SEQ ID NO: 267730 - DNA, 20 bp, Artificial Sequence
  Description of Artificial Sequence: Synthetic oligonucleotide
  Target: LAMA2; (-) strand; PAM type: YTN; PAM sequence: CTA
agggatttaaatattgtgcc

SEQ ID NO: 267731 - DNA, 20 bp, Artificial Sequence
  Description of Artificial Sequence: Synthetic oligonucleotide
  Target: LAMA2; (-) strand; PAM type: YTN; PAM sequence: TTA
gtcctaagggatttaaatat

SEQ ID NO: 267732 - DNA, 20 bp, Artificial Sequence
  Description of Artificial Sequence: Synthetic oligonucleotide
  Target: LAMA2; (-) strand; PAM type: YTN; PAM sequence: CTT
agtcctaagggatttaaata

SEQ ID NO: 267733 - DNA, 20 bp, Artificial Sequence
  Description of Artificial Sequence: Synthetic oligonucleotide
  Target: LAMA2; (-) strand; PAM type: YTN; PAM sequence: CTC
acttagtcctaagggattta

SEQ ID NO: 267734 - DNA, 20 bp, Artificial Sequence
  Description of Artificial Sequence: Synthetic oligonucleotide
  Target: LAMA2; (-) strand; PAM type: YTN; PAM sequence: CTG
aatgatctcacttagtccta

SEQ ID NO: 267735 - DNA, 20 bp, Artificial Sequence
  Description of Artificial Sequence: Synthetic oligonucleotide
  Target: LAMA2; (-) strand; PAM type: YTN; PAM sequence: CTC
tgaatgatctcacttagtcc

SEQ ID NO: 267736 - DNA, 20 bp, Artificial Sequence
  Description of Artificial Sequence: Synthetic oligonucleotide
  Target: LAMA2; (-) strand; PAM type: YTN; PAM sequence: CTC
ctctgaatgatctcacttag

SEQ ID NO: 267737 - DNA, 20 bp, Artificial Sequence
  Description of Artificial Sequence: Synthetic oligonucleotide
  Target: LAMA2; (-) strand; PAM type: YTN; PAM sequence: CTC
tcctctgaatgatctcactt

SEQ ID NO: 267738 - DNA, 20 bp, Artificial Sequence
  Description of Artificial Sequence: Synthetic oligonucleotide
  Target: LAMA2; (-) strand; PAM type: YTN; PAM sequence: CTC
tctcctctgaatgatctcac

SEQ ID NO: 267739 - DNA, 20 bp, Artificial Sequence
  Description of Artificial Sequence: Synthetic oligonucleotide
  Target: LAMA2; (-) strand; PAM type: YTN; PAM sequence: CTC
ctctctcctctgaatgatct

SEQ ID NO: 267740 - DNA, 20 bp, Artificial Sequence
  Description of Artificial Sequence: Synthetic oligonucleotide
  Target: LAMA2; (-) strand; PAM type: YTN; PAM sequence: TTC
tcctctctcctctgaatgat

SEQ ID NO: 267741 - DNA, 20 bp, Artificial Sequence
  Description of Artificial Sequence: Synthetic oligonucleotide
  Target: LAMA2; (-) strand; PAM type: YTN; PAM sequence: CTT
ctcctctctcctctgaatga

SEQ ID NO: 267742 - DNA, 20 bp, Artificial Sequence
  Description of Artificial Sequence: Synthetic oligonucleotide
  Target: LAMA2; (-) strand; PAM type: YTN; PAM sequence: TTC
ccttctcctctctcctctga

SEQ ID NO: 267743 - DNA, 20 bp, Artificial Sequence
  Description of Artificial Sequence: Synthetic oligonucleotide
  Target: LAMA2; (-) strand; PAM type: YTN; PAM sequence: CTG
ttcccttctcctctctcctc

SEQ ID NO: 267744 - DNA, 20 bp, Artificial Sequence
  Description of Artificial Sequence: Synthetic oligonucleotide
  Target: LAMA2; (-) strand; PAM type: YTN; PAM sequence: TTC
tgttcccttctcctctctcc

SEQ ID NO: 267745 - DNA, 20 bp, Artificial Sequence
  Description of Artificial Sequence: Synthetic oligonucleotide
  Target: LAMA2; (-) strand; PAM type: YTN; PAM sequence: TTT
ctgttcccttctcctctctc

SEQ ID NO: 267746 - DNA, 20 bp, Artificial Sequence
  Description of Artificial Sequence: Synthetic oligonucleotide
  Target: LAMA2; (-) strand; PAM type: YTN; PAM sequence: CTG
atttctgttcccttctcctc

SEQ ID NO: 267747 - DNA, 20 bp, Artificial Sequence
  Description of Artificial Sequence: Synthetic oligonucleotide
  Target: LAMA2; (-) strand; PAM type: YTN; PAM sequence: TTC
tgatttctgttcccttctcc

SEQ ID NO: 267748 - DNA, 20 bp, Artificial Sequence
  Description of Artificial Sequence: Synthetic oligonucleotide
  Target: LAMA2; (-) strand; PAM type: YTN; PAM sequence: TTT
ctgatttctgttcccttctc

SEQ ID NO: 267749 - DNA, 20 bp, Artificial Sequence
  Description of Artificial Sequence: Synthetic oligonucleotide
  Target: LAMA2; (-) strand; PAM type: YTN; PAM sequence: TTT
tctgatttctgttcccttct

SEQ ID NO: 267750 - DNA, 20 bp, Artificial Sequence
  Description of Artificial Sequence: Synthetic oligonucleotide
  Target: LAMA2; (-) strand; PAM type: YTN; PAM sequence: TTC
agttttctgatttctgttcc

SEQ ID NO: 267751 - DNA, 20 bp, Artificial Sequence
  Description of Artificial Sequence: Synthetic oligonucleotide
  Target: LAMA2; (-) strand; PAM type: YTN; PAM sequence: TTC
acaattcagttttctgattt

SEQ ID NO: 267752 - DNA, 20 bp, Artificial Sequence
  Description of Artificial Sequence: Synthetic oligonucleotide
  Target: LAMA2; (-) strand; PAM type: YTN; PAM sequence: CTT
cacaattcagttttctgatt

SEQ ID NO: 267753 - DNA, 20 bp, Artificial Sequence
  Description of Artificial Sequence: Synthetic oligonucleotide
  Target: LAMA2; (-) strand; PAM type: YTN; PAM sequence: TTA
acgtgcttcacaattcagtt

SEQ ID NO: 267754 - DNA, 20 bp, Artificial Sequence
  Description of Artificial Sequence: Synthetic oligonucleotide
  Target: LAMA2; (-) strand; PAM type: YTN; PAM sequence: CTT
aacgtgcttcacaattcagt

SEQ ID NO: 267755 - DNA, 20 bp, Artificial Sequence
  Description of Artificial Sequence: Synthetic oligonucleotide
  Target: LAMA2; (-) strand; PAM type: YTN; PAM sequence: CTC
ttaacgtgcttcacaattca

SEQ ID NO: 267756 - DNA, 20 bp, Artificial Sequence
  Description of Artificial Sequence: Synthetic oligonucleotide
  Target: LAMA2; (-) strand; PAM type: YTN; PAM sequence: TTG
atctcttaacgtgcttcaca

SEQ ID NO: 267757 - DNA, 20 bp, Artificial Sequence
  Description of Artificial Sequence: Synthetic oligonucleotide
  Target: LAMA2; (-) strand; PAM type: YTN; PAM sequence: CTT
gatctcttaacgtgcttcac

SEQ ID NO: 267758 - DNA, 20 bp, Artificial Sequence
  Description of Artificial Sequence: Synthetic oligonucleotide
  Target: LAMA2; (-) strand; PAM type: YTN; PAM sequence: CTA
tggcatgtccttgatctctt

SEQ ID NO: 267759 - DNA, 20 bp, Artificial Sequence
  Description of Artificial Sequence: Synthetic oligonucleotide
  Target: LAMA2; (-) strand; PAM type: YTN; PAM sequence: TTG
gatctatggcatgtccttga

SEQ ID NO: 267760 - DNA, 20 bp, Artificial Sequence
  Description of Artificial Sequence: Synthetic oligonucleotide
  Target: LAMA2; (-) strand; PAM type: YTN; PAM sequence: TTG
ttggatctatggcatgtcct

SEQ ID NO: 267761 - DNA, 20 bp, Artificial Sequence
  Description of Artificial Sequence: Synthetic oligonucleotide
  Target: LAMA2; (-) strand; PAM type: YTN; PAM sequence: TTT
gttggatctatggcatgtcc

SEQ ID NO: 267762 - DNA, 20 bp, Artificial Sequence
  Description of Artificial Sequence: Synthetic oligonucleotide
  Target: LAMA2; (-) strand; PAM type: YTN; PAM sequence: CTT
tgttggatctatggcatgtc

SEQ ID NO: 267763 - DNA, 20 bp, Artificial Sequence
  Description of Artificial Sequence: Synthetic oligonucleotide
  Target: LAMA2; (-) strand; PAM type: YTN; PAM sequence: TTC
ctttgttggatctatggcat

SEQ ID NO: 267764 - DNA, 20 bp, Artificial Sequence
  Description of Artificial Sequence: Synthetic oligonucleotide
  Target: LAMA2; (-) strand; PAM type: YTN; PAM sequence: TTT
cctttgttggatctatggca

SEQ ID NO: 267765 - DNA, 20 bp, Artificial Sequence
  Description of Artificial Sequence: Synthetic oligonucleotide
  Target: LAMA2; (-) strand; PAM type: YTN; PAM sequence: TTC
agtttcctttgttggatcta

SEQ ID NO: 267766 - DNA, 20 bp, Artificial Sequence
  Description of Artificial Sequence: Synthetic oligonucleotide
  Target: LAMA2; (-) strand; PAM type: YTN; PAM sequence: TTT
cagtttcctttgttggatct

SEQ ID NO: 267767 - DNA, 20 bp, Artificial Sequence
  Description of Artificial Sequence: Synthetic oligonucleotide
  Target: LAMA2; (-) strand; PAM type: YTN; PAM sequence: TTT
tcagtttcctttgttggatc

SEQ ID NO: 267768 - DNA, 20 bp, Artificial Sequence
  Description of Artificial Sequence: Synthetic oligonucleotide
  Target: LAMA2; (-) strand; PAM type: YTN; PAM sequence: CTT
ttcagtttcctttgttggat

SEQ ID NO: 267769 - DNA, 20 bp, Artificial Sequence
  Description of Artificial Sequence: Synthetic oligonucleotide
  Target: LAMA2; (-) strand; PAM type: YTN; PAM sequence: TTC
cttttcagtttcctttgttg

SEQ ID NO: 267770 - DNA, 20 bp, Artificial Sequence
  Description of Artificial Sequence: Synthetic oligonucleotide
  Target: LAMA2; (-) strand; PAM type: YTN; PAM sequence: TTG
ttccttttcagtttcctttg

SEQ ID NO: 267771 - DNA, 20 bp, Artificial Sequence
  Description of Artificial Sequence: Synthetic oligonucleotide
  Target: LAMA2; (-) strand; PAM type: YTN; PAM sequence: TTG
gttgttccttttcagtttcc

SEQ ID NO: 267772 - DNA, 20 bp, Artificial Sequence
  Description of Artificial Sequence: Synthetic oligonucleotide
  Target: LAMA2; (-) strand; PAM type: YTN; PAM sequence: TTC
attggttgttccttttcagt

SEQ ID NO: 267773 - DNA, 20 bp, Artificial Sequence
  Description of Artificial Sequence: Synthetic oligonucleotide
  Target: LAMA2; (-) strand; PAM type: YTN; PAM sequence: TTA
tcccagttcattggttgttc

SEQ ID NO: 267774 - DNA, 20 bp, Artificial Sequence
  Description of Artificial Sequence: Synthetic oligonucleotide
  Target: LAMA2; (-) strand; PAM type: YTN; PAM sequence: TTT
atcccagttcattggttgtt

SEQ ID NO: 267775 - DNA, 20 bp, Artificial Sequence
  Description of Artificial Sequence: Synthetic oligonucleotide
  Target: LAMA2; (-) strand; PAM type: YTN; PAM sequence: TTT
tatcccagttcattggttgt

SEQ ID NO: 267776 - DNA, 20 bp, Artificial Sequence
  Description of Artificial Sequence: Synthetic oligonucleotide
  Target: LAMA2; (-) strand; PAM type: YTN; PAM sequence: TTT
ttatcccagttcattggttg

SEQ ID NO: 267777 - DNA, 20 bp, Artificial Sequence
  Description of Artificial Sequence: Synthetic oligonucleotide
  Target: LAMA2; (-) strand; PAM type: YTN; PAM sequence: CTG
gtttttatcccagttcattg

SEQ ID NO: 267778 - DNA, 20 bp, Artificial Sequence
  Description of Artificial Sequence: Synthetic oligonucleotide
  Target: LAMA2; (-) strand; PAM type: YTN; PAM sequence: TTC
tggtttttatcccagttcat

SEQ ID NO: 267779 - DNA, 20 bp, Artificial Sequence
  Description of Artificial Sequence: Synthetic oligonucleotide
  Target: LAMA2; (-) strand; PAM type: YTN; PAM sequence: CTT
ctggtttttatcccagttca

SEQ ID NO: 267780 - DNA, 20 bp, Artificial Sequence
  Description of Artificial Sequence: Synthetic oligonucleotide
  Target: LAMA2; (-) strand; PAM type: YTN; PAM sequence: TTC
cttctggtttttatcccagt

SEQ ID NO: 267781 - DNA, 20 bp, Artificial Sequence
  Description of Artificial Sequence: Synthetic oligonucleotide
  Target: LAMA2; (-) strand; PAM type: YTN; PAM sequence: TTT
ccttctggtttttatcccag

SEQ ID NO: 267782 - DNA, 20 bp, Artificial Sequence
  Description of Artificial Sequence: Synthetic oligonucleotide
  Target: LAMA2; (-) strand; PAM type: YTN; PAM sequence: CTG
gaaaccatttccttctggtt

SEQ ID NO: 267783 - DNA, 20 bp, Artificial Sequence
  Description of Artificial Sequence: Synthetic oligonucleotide
  Target: LAMA2; (-) strand; PAM type: YTN; PAM sequence: TTC
ctggaaaccatttccttctg

SEQ ID NO: 267784 - DNA, 20 bp, Artificial Sequence
  Description of Artificial Sequence: Synthetic oligonucleotide
  Target: LAMA2; (-) strand; PAM type: YTN; PAM sequence: CTT
cctggaaaccatttccttct

SEQ ID NO: 267785 - DNA, 20 bp, Artificial Sequence
  Description of Artificial Sequence: Synthetic oligonucleotide
  Target: LAMA2; (-) strand; PAM type: YTN; PAM sequence: CTG
cagagataaatgggcttcct

SEQ ID NO: 267786 - DNA, 20 bp, Artificial Sequence
  Description of Artificial Sequence: Synthetic oligonucleotide
  Target: LAMA2; (-) strand; PAM type: YTN; PAM sequence: CTA
tggacactgcagagataaat

SEQ ID NO: 267787 - DNA, 20 bp, Artificial Sequence
  Description of Artificial Sequence: Synthetic oligonucleotide
  Target: LAMA2; (-) strand; PAM type: YTN; PAM sequence: CTC
ctatggacactgcagagata

SEQ ID NO: 267788 - DNA, 20 bp, Artificial Sequence
  Description of Artificial Sequence: Synthetic oligonucleotide
  Target: LAMA2; (-) strand; PAM type: YTN; PAM sequence: CTG
tgtcatctcctatggacact

SEQ ID NO: 267789 - DNA, 20 bp, Artificial Sequence
  Description of Artificial Sequence: Synthetic oligonucleotide
  Target: LAMA2; (-) strand; PAM type: YTN; PAM sequence: CTC
tgtgtcatctcctatggaca

SEQ ID NO: 267790 - DNA, 20 bp, Artificial Sequence
  Description of Artificial Sequence: Synthetic oligonucleotide
  Target: LAMA2; (-) strand; PAM type: YTN; PAM sequence: CTC
tctgtgtcatctcctatgga

SEQ ID NO: 267791 - DNA, 20 bp, Artificial Sequence
  Description of Artificial Sequence: Synthetic oligonucleotide
  Target: LAMA2; (-) strand; PAM type: YTN; PAM sequence: TTG
ctctctgtgtcatctcctat

SEQ ID NO: 267792 - DNA, 20 bp, Artificial Sequence
  Description of Artificial Sequence: Synthetic oligonucleotide
  Target: LAMA2; (-) strand; PAM type: YTN; PAM sequence: CTT
gctctctgtgtcatctccta

SEQ ID NO: 267793 - DNA, 20 bp, Artificial Sequence
  Description of Artificial Sequence: Synthetic oligonucleotide
  Target: LAMA2; (-) strand; PAM type: YTN; PAM sequence: TTA
cagagcttgctctctgtgtc

SEQ ID NO: 267794 - DNA, 20 bp, Artificial Sequence
  Description of Artificial Sequence: Synthetic oligonucleotide
  Target: LAMA2; (-) strand; PAM type: YTN; PAM sequence: TTT
acagagcttgctctctgtgt

SEQ ID NO: 267795 - DNA, 20 bp, Artificial Sequence
  Description of Artificial Sequence: Synthetic oligonucleotide
  Target: LAMA2; (-) strand; PAM type: YTN; PAM sequence: TTA
aaatttacagagcttgctct

SEQ ID NO: 267796 - DNA, 20 bp, Artificial Sequence
  Description of Artificial Sequence: Synthetic oligonucleotide
  Target: LAMA2; (-) strand; PAM type: YTN; PAM sequence: TTT
aaaatttacagagcttgctc

SEQ ID NO: 267797 - DNA, 20 bp, Artificial Sequence
  Description of Artificial Sequence: Synthetic oligonucleotide
  Target: LAMA2; (-) strand; PAM type: YTN; PAM sequence: TTT
taaaatttacagagcttgct

SEQ ID NO: 267798 - DNA, 20 bp, Artificial Sequence
  Description of Artificial Sequence: Synthetic oligonucleotide
  Target: LAMA2; (-) strand; PAM type: YTN; PAM sequence: TTT
ttaaaatttacagagcttgc

SEQ ID NO: 267799 - DNA, 20 bp, Artificial Sequence
  Description of Artificial Sequence: Synthetic oligonucleotide
  Target: LAMA2; (-) strand; PAM type: YTN; PAM sequence: CTC
aacagaatttttaaaattta

SEQ ID NO: 267800 - DNA, 20 bp, Artificial Sequence
  Description of Artificial Sequence: Synthetic oligonucleotide
  Target: LAMA2; (-) strand; PAM type: YTN; PAM sequence: CTC
ccctcaacagaatttttaaa

SEQ ID NO: 267801 - DNA, 20 bp, Artificial Sequence
  Description of Artificial Sequence: Synthetic oligonucleotide
  Target: LAMA2; (-) strand; PAM type: YTN; PAM sequence: TTC
caaactcccctcaacagaat

SEQ ID NO: 267802 - DNA, 20 bp, Artificial Sequence
  Description of Artificial Sequence: Synthetic oligonucleotide
  Target: LAMA2; (-) strand; PAM type: YTN; PAM sequence: CTA
attccaaactcccctcaaca

SEQ ID NO: 267803 - DNA, 20 bp, Artificial Sequence
  Description of Artificial Sequence: Synthetic oligonucleotide
  Target: LAMA2; (-) strand; PAM type: YTN; PAM sequence: CTG
ctaattccaaactcccctca

SEQ ID NO: 267804 - DNA, 20 bp, Artificial Sequence
  Description of Artificial Sequence: Synthetic oligonucleotide
  Target: LAMA2; (-) strand; PAM type: YTN; PAM sequence: CTA
tggctgctaattccaaactc

SEQ ID NO: 267805 - DNA, 20 bp, Artificial Sequence
  Description of Artificial Sequence: Synthetic oligonucleotide
  Target: LAMA2; (-) strand; PAM type: YTN; PAM sequence: TTC
cctatggctgctaattccaa

SEQ ID NO: 267806 - DNA, 20 bp, Artificial Sequence
  Description of Artificial Sequence: Synthetic oligonucleotide
  Target: LAMA2; (-) strand; PAM type: YTN; PAM sequence: TTT
ccctatggctgctaattcca

SEQ ID NO: 267807 - DNA, 20 bp, Artificial Sequence
  Description of Artificial Sequence: Synthetic oligonucleotide
  Target: LAMA2; (-) strand; PAM type: YTN; PAM sequence: TTA
catttccctatggctgctaa

SEQ ID NO: 267808 - DNA, 20 bp, Artificial Sequence
  Description of Artificial Sequence: Synthetic oligonucleotide
  Target: LAMA2; (-) strand; PAM type: YTN; PAM sequence: TTT
acatttccctatggctgcta

SEQ ID NO: 267809 - DNA, 20 bp, Artificial Sequence
  Description of Artificial Sequence: Synthetic oligonucleotide
  Target: LAMA2; (-) strand; PAM type: YTN; PAM sequence: TTT
tacatttccctatggctgct

SEQ ID NO: 267810 - DNA, 20 bp, Artificial Sequence
  Description of Artificial Sequence: Synthetic oligonucleotide
  Target: LAMA2; (-) strand; PAM type: YTN; PAM sequence: CTT
ttacatttccctatggctgc

SEQ ID NO: 267811 - DNA, 20 bp, Artificial Sequence
  Description of Artificial Sequence: Synthetic oligonucleotide
  Target: LAMA2; (-) strand; PAM type: YTN; PAM sequence: CTC
atggtgaccatcttttacat

SEQ ID NO: 267812 - DNA, 20 bp, Artificial Sequence
  Description of Artificial Sequence: Synthetic oligonucleotide
  Target: LAMA2; (-) strand; PAM type: YTN; PAM sequence: TTC
tcatggtgaccatcttttac

SEQ ID NO: 267813 - DNA, 20 bp, Artificial Sequence
  Description of Artificial Sequence: Synthetic oligonucleotide
  Target: LAMA2; (-) strand; PAM type: YTN; PAM sequence: TTT
ctcatggtgaccatctttta

SEQ ID NO: 267814 - DNA, 20 bp, Artificial Sequence
  Description of Artificial Sequence: Synthetic oligonucleotide
  Target: LAMA2; (-) strand; PAM type: YTN; PAM sequence: TTT
tctcatggtgaccatctttt

SEQ ID NO: 267815 - DNA, 20 bp, Artificial Sequence
  Description of Artificial Sequence: Synthetic oligonucleotide
  Target: LAMA2; (-) strand; PAM type: YTN; PAM sequence: CTT
ttctcatggtgaccatcttt

SEQ ID NO: 267816 - DNA, 20 bp, Artificial Sequence
  Description of Artificial Sequence: Synthetic oligonucleotide
  Target: LAMA2; (-) strand; PAM type: YTN; PAM sequence: TTG
tgcttttctcatggtgacca

SEQ ID NO: 267817 - DNA, 20 bp, Artificial Sequence
  Description of Artificial Sequence: Synthetic oligonucleotide
  Target: LAMA2; (-) strand; PAM type: YTN; PAM sequence: CTT
gtgcttttctcatggtgacc

SEQ ID NO: 267818 - DNA, 20 bp, Artificial Sequence
  Description of Artificial Sequence: Synthetic oligonucleotide
  Target: LAMA2; (-) strand; PAM type: YTN; PAM sequence: CTC
agaaatccttgtgcttttct

SEQ ID NO: 267819 - DNA, 20 bp, Artificial Sequence
  Description of Artificial Sequence: Synthetic oligonucleotide
  Target: LAMA2; (-) strand; PAM type: YTN; PAM sequence: CTA
ctcagaaatccttgtgcttt

SEQ ID NO: 267820 - DNA, 20 bp, Artificial Sequence
  Description of Artificial Sequence: Synthetic oligonucleotide
  Target: LAMA2; (-) strand; PAM type: YTN; PAM sequence: CTG
cagggctactcagaaatcct

SEQ ID NO: 267821 - DNA, 20 bp, Artificial Sequence
  Description of Artificial Sequence: Synthetic oligonucleotide
  Target: LAMA2; (-) strand; PAM type: YTN; PAM sequence: TTG
tctgcagggctactcagaaa

SEQ ID NO: 267822 - DNA, 20 bp, Artificial Sequence
  Description of Artificial Sequence: Synthetic oligonucleotide
  Target: LAMA2; (-) strand; PAM type: YTN; PAM sequence: TTT
gtctgcagggctactcagaa

SEQ ID NO: 267823 - DNA, 20 bp, Artificial Sequence
  Description of Artificial Sequence: Synthetic oligonucleotide
  Target: LAMA2; (-) strand; PAM type: YTN; PAM sequence: TTT
tgtctgcagggctactcaga

SEQ ID NO: 267824 - DNA, 20 bp, Artificial Sequence
  Description of Artificial Sequence: Synthetic oligonucleotide
  Target: LAMA2; (-) strand; PAM type: YTN; PAM sequence: TTA
tcattttgtctgcagggcta

SEQ ID NO: 267825 - DNA, 20 bp, Artificial Sequence
  Description of Artificial Sequence: Synthetic oligonucleotide
  Target: LAMA2; (-) strand; PAM type: YTN; PAM sequence: CTC
aattatcattttgtctgcag

SEQ ID NO: 267826 - DNA, 20 bp, Artificial Sequence
  Description of Artificial Sequence: Synthetic oligonucleotide
  Target: LAMA2; (-) strand; PAM type: YTN; PAM sequence: CTC
tcaattatcattttgtctgc

SEQ ID NO: 267827 - DNA, 20 bp, Artificial Sequence
  Description of Artificial Sequence: Synthetic oligonucleotide
  Target: LAMA2; (-) strand; PAM type: YTN; PAM sequence: TTC
tctcaattatcattttgtct

SEQ ID NO: 267828 - DNA, 20 bp, Artificial Sequence
  Description of Artificial Sequence: Synthetic oligonucleotide
  Target: LAMA2; (-) strand; PAM type: YTN; PAM sequence: CTT
ctctcaattatcattttgtc

SEQ ID NO: 267829 - DNA, 20 bp, Artificial Sequence
  Description of Artificial Sequence: Synthetic oligonucleotide
  Target: LAMA2; (-) strand; PAM type: YTN; PAM sequence: CTA
atcttctctcaattatcatt

SEQ ID NO: 267830 - DNA, 20 bp, Artificial Sequence
  Description of Artificial Sequence: Synthetic oligonucleotide
  Target: LAMA2; (-) strand; PAM type: YTN; PAM sequence: CTC
cctaatcttctctcaattat

SEQ ID NO: 267831 - DNA, 20 bp, Artificial Sequence
  Description of Artificial Sequence: Synthetic oligonucleotide
  Target: LAMA2; (-) strand; PAM type: YTN; PAM sequence: TTC
acaactccctaatcttctct

SEQ ID NO: 267832 - DNA, 20 bp, Artificial Sequence
  Description of Artificial Sequence: Synthetic oligonucleotide
  Target: LAMA2; (-) strand; PAM type: YTN; PAM sequence: CTG
ttcacaactccctaatcttc

SEQ ID NO: 267833 - DNA, 20 bp, Artificial Sequence
  Description of Artificial Sequence: Synthetic oligonucleotide
  Target: LAMA2; (-) strand; PAM type: YTN; PAM sequence: TTC
tgttcacaactccctaatct

SEQ ID NO: 267834 - DNA, 20 bp, Artificial Sequence
  Description of Artificial Sequence: Synthetic oligonucleotide
  Target: LAMA2; (-) strand; PAM type: YTN; PAM sequence: TTT
ctgttcacaactccctaatc

SEQ ID NO: 267835 - DNA, 20 bp, Artificial Sequence
  Description of Artificial Sequence: Synthetic oligonucleotide
  Target: LAMA2; (-) strand; PAM type: YTN; PAM sequence: CTT
tctgttcacaactccctaat

SEQ ID NO: 267836 - DNA, 20 bp, Artificial Sequence
  Description of Artificial Sequence: Synthetic oligonucleotide
  Target: LAMA2; (-) strand; PAM type: YTN; PAM sequence: TTC
tttctgttcacaactcccta

SEQ ID NO: 267837 - DNA, 20 bp, Artificial Sequence
  Description of Artificial Sequence: Synthetic oligonucleotide
  Target: LAMA2; (-) strand; PAM type: YTN; PAM sequence: TTA
ttctttctgttcacaactcc

SEQ ID NO: 267838 - DNA, 20 bp, Artificial Sequence
  Description of Artificial Sequence: Synthetic oligonucleotide
  Target: LAMA2; (-) strand; PAM type: YTN; PAM sequence: TTT
attctttctgttcacaactc

SEQ ID NO: 267839 - DNA, 20 bp, Artificial Sequence
  Description of Artificial Sequence: Synthetic oligonucleotide
  Target: LAMA2; (-) strand; PAM type: YTN; PAM sequence: TTG
agtttattctttctgttcac

SEQ ID NO: 267840 - DNA, 20 bp, Artificial Sequence
  Description of Artificial Sequence: Synthetic oligonucleotide
  Target: LAMA2; (-) strand; PAM type: YTN; PAM sequence: CTT
gagtttattctttctgttca

SEQ ID NO: 267841 - DNA, 20 bp, Artificial Sequence
  Description of Artificial Sequence: Synthetic oligonucleotide
  Target: LAMA2; (-) strand; PAM type: YTN; PAM sequence: TTG
aagcttgagtttattctttc

SEQ ID NO: 267842 - DNA, 20 bp, Artificial Sequence
  Description of Artificial Sequence: Synthetic oligonucleotide
  Target: LAMA2; (-) strand; PAM type: YTN; PAM sequence: CTT
gaagcttgagtttattcttt

SEQ ID NO: 267843 - DNA, 20 bp, Artificial Sequence
  Description of Artificial Sequence: Synthetic oligonucleotide
  Target: LAMA2; (-) strand; PAM type: YTN; PAM sequence: CTC
acttgaagcttgagtttatt

SEQ ID NO: 267844 - DNA, 20 bp, Artificial Sequence
  Description of Artificial Sequence: Synthetic oligonucleotide
  Target: LAMA2; (-) strand; PAM type: YTN; PAM sequence: TTC
catctcacttgaagcttgag

SEQ ID NO: 267845 - DNA, 20 bp, Artificial Sequence
  Description of Artificial Sequence: Synthetic oligonucleotide
  Target: LAMA2; (-) strand; PAM type: YTN; PAM sequence: CTG
gagggagtagggattccatc

SEQ ID NO: 267846 - DNA, 20 bp, Artificial Sequence
  Description of Artificial Sequence: Synthetic oligonucleotide
  Target: LAMA2; (-) strand; PAM type: YTN; PAM sequence: TTC
tggagggagtagggattcca

SEQ ID NO: 267847 - DNA, 20 bp, Artificial Sequence
  Description of Artificial Sequence: Synthetic oligonucleotide
  Target: LAMA2; (-) strand; PAM type: YTN; PAM sequence: CTT
ctggagggagtagggattcc

SEQ ID NO: 267848 - DNA, 20 bp, Artificial Sequence
  Description of Artificial Sequence: Synthetic oligonucleotide
  Target: LAMA2; (-) strand; PAM type: YTN; PAM sequence: TTA
tatcacataaaaggtcttct

SEQ ID NO: 267849 - DNA, 20 bp, Artificial Sequence
  Description of Artificial Sequence: Synthetic oligonucleotide
  Target: LAMA2; (-) strand; PAM type: YTN; PAM sequence: CTT
atatcacataaaaggtcttc

SEQ ID NO: 267850 - DNA, 20 bp, Artificial Sequence
  Description of Artificial Sequence: Synthetic oligonucleotide
  Target: LAMA2; (-) strand; PAM type: YTN; PAM sequence: TTC
cttatatcacataaaaggtc

SEQ ID NO: 267851 - DNA, 20 bp, Artificial Sequence
  Description of Artificial Sequence: Synthetic oligonucleotide
  Target: LAMA2; (-) strand; PAM type: YTN; PAM sequence: TTT
ccttatatcacataaaaggt

SEQ ID NO: 267852 - DNA, 20 bp, Artificial Sequence
  Description of Artificial Sequence: Synthetic oligonucleotide
  Target: LAMA2; (-) strand; PAM type: YTN; PAM sequence: CTG
tttccttatatcacataaaa

SEQ ID NO: 267853 - DNA, 20 bp, Artificial Sequence
  Description of Artificial Sequence: Synthetic oligonucleotide
  Target: LAMA2; (-) strand; PAM type: YTN; PAM sequence: TTG
cactgtttccttatatcaca

SEQ ID NO: 267854 - DNA, 20 bp, Artificial Sequence
  Description of Artificial Sequence: Synthetic oligonucleotide
  Target: LAMA2; (-) strand; PAM type: YTN; PAM sequence: TTA
tggtggattgcactgtttcc

SEQ ID NO: 267855 - DNA, 20 bp, Artificial Sequence
  Description of Artificial Sequence: Synthetic oligonucleotide
  Target: LAMA2; (-) strand; PAM type: YTN; PAM sequence: TTA
tgatattatggtggattgca

SEQ ID NO: 267856 - DNA, 20 bp, Artificial Sequence
  Description of Artificial Sequence: Synthetic oligonucleotide
  Target: LAMA2; (-) strand; PAM type: YTN; PAM sequence: TTC
aaattatgatattatggtgg

SEQ ID NO: 267857 - DNA, 20 bp, Artificial Sequence
  Description of Artificial Sequence: Synthetic oligonucleotide
  Target: LAMA2; (-) strand; PAM type: YTN; PAM sequence: TTT
caaattatgatattatggtg

SEQ ID NO: 267858 - DNA, 20 bp, Artificial Sequence
  Description of Artificial Sequence: Synthetic oligonucleotide
  Target: LAMA2; (-) strand; PAM type: YTN; PAM sequence: TTT
tcaaattatgatattatggt

SEQ ID NO: 267859 - DNA, 20 bp, Artificial Sequence
  Description of Artificial Sequence: Synthetic oligonucleotide
  Target: LAMA2; (-) strand; PAM type: YTN; PAM sequence: TTT
ttcaaattatgatattatgg

SEQ ID NO: 267860 - DNA, 20 bp, Artificial Sequence
  Description of Artificial Sequence: Synthetic oligonucleotide
  Target: LAMA2; (-) strand; PAM type: YTN; PAM sequence: TTT
tttcaaattatgatattatg

SEQ ID NO: 267861 - DNA, 20 bp, Artificial Sequence
  Description of Artificial Sequence: Synthetic oligonucleotide
  Target: LAMA2; (-) strand; PAM type: YTN; PAM sequence: TTT
ttttcaaattatgatattat

SEQ ID NO: 267862 - DNA, 20 bp, Artificial Sequence
  Description of Artificial Sequence: Synthetic oligonucleotide
  Target: LAMA2; (-) strand; PAM type: YTN; PAM sequence: TTG
atacaatttttttcaaatta

SEQ ID NO: 267863 - DNA, 20 bp, Artificial Sequence
  Description of Artificial Sequence: Synthetic oligonucleotide
  Target: LAMA2; (-) strand; PAM type: YTN; PAM sequence: TTG
aatagttgatacaatttttt

SEQ ID NO: 267864 - DNA, 20 bp, Artificial Sequence
  Description of Artificial Sequence: Synthetic oligonucleotide
  Target: LAMA2; (-) strand; PAM type: YTN; PAM sequence: CTT
gaatagttgatacaattttt

SEQ ID NO: 267865 - DNA, 20 bp, Artificial Sequence
  Description of Artificial Sequence: Synthetic oligonucleotide
  Target: LAMA2; (-) strand; PAM type: YTN; PAM sequence: TTC
ttgaatagttgatacaattt

SEQ ID NO: 267866 - DNA, 20 bp, Artificial Sequence
  Description of Artificial Sequence: Synthetic oligonucleotide
  Target: LAMA2; (-) strand; PAM type: YTN; PAM sequence: CTG
tataggaatgtagtaattct

SEQ ID NO: 267867 - DNA, 20 bp, Artificial Sequence
  Description of Artificial Sequence: Synthetic oligonucleotide
  Target: LAMA2; (-) strand; PAM type: YTN; PAM sequence: TTA
ctgtataggaatgtagtaat

SEQ ID NO: 267868 - DNA, 20 bp, Artificial Sequence
  Description of Artificial Sequence: Synthetic oligonucleotide
  Target: LAMA2; (-) strand; PAM type: YTN; PAM sequence: TTT
actgtataggaatgtagtaa

SEQ ID NO: 267869 - DNA, 20 bp, Artificial Sequence
  Description of Artificial Sequence: Synthetic oligonucleotide
  Target: LAMA2; (-) strand; PAM type: YTN; PAM sequence: TTA
tagtaaaataatgaaatgtc

SEQ ID NO: 267870 - DNA, 20 bp, Artificial Sequence
  Description of Artificial Sequence: Synthetic oligonucleotide
  Target: LAMA2; (-) strand; PAM type: YTN; PAM sequence: TTC
gttatagtaaaataatgaaa

SEQ ID NO: 267871 - DNA, 20 bp, Artificial Sequence
  Description of Artificial Sequence: Synthetic oligonucleotide
  Target: LAMA2; (-) strand; PAM type: YTN; PAM sequence: TTT
cgttatagtaaaataatgaa

SEQ ID NO: 267872 - DNA, 20 bp, Artificial Sequence
  Description of Artificial Sequence: Synthetic oligonucleotide
  Target: LAMA2; (-) strand; PAM type: YTN; PAM sequence: TTA
catttcgttatagtaaaata

SEQ ID NO: 267873 - DNA, 20 bp, Artificial Sequence
  Description of Artificial Sequence: Synthetic oligonucleotide
  Target: LAMA2; (-) strand; PAM type: YTN; PAM sequence: TTA
aattacatttcgttatagta

SEQ ID NO: 267874 - DNA, 20 bp, Artificial Sequence
  Description of Artificial Sequence: Synthetic oligonucleotide
  Target: LAMA2; (-) strand; PAM type: YTN; PAM sequence: CTA
aagagccagtatgattaaat

SEQ ID NO: 267875 - DNA, 20 bp, Artificial Sequence
  Description of Artificial Sequence: Synthetic oligonucleotide
  Target: LAMA2; (-) strand; PAM type: YTN; PAM sequence: CTC
taaagagccagtatgattaa

SEQ ID NO: 267876 - DNA, 20 bp, Artificial Sequence
  Description of Artificial Sequence: Synthetic oligonucleotide
  Target: LAMA2; (-) strand; PAM type: YTN; PAM sequence: TTC
aagagaaactctaaagagcc

SEQ ID NO: 267877 - DNA, 20 bp, Artificial Sequence
  Description of Artificial Sequence: Synthetic oligonucleotide
  Target: LAMA2; (-) strand; PAM type: YTN; PAM sequence: TTT
caagagaaactctaaagagc

SEQ ID NO: 267878 - DNA, 20 bp, Artificial Sequence
  Description of Artificial Sequence: Synthetic oligonucleotide
  Target: LAMA2; (-) strand; PAM type: YTN; PAM sequence: TTA
gacatttcaagagaaactct

SEQ ID NO: 267879 - DNA, 20 bp, Artificial Sequence
  Description of Artificial Sequence: Synthetic oligonucleotide
  Target: LAMA2; (-) strand; PAM type: YTN; PAM sequence: TTT
agacatttcaagagaaactc

SEQ ID NO: 267880 - DNA, 20 bp, Artificial Sequence
  Description of Artificial Sequence: Synthetic oligonucleotide
  Target: LAMA2; (-) strand; PAM type: YTN; PAM sequence: TTT
tagacatttcaagagaaact

SEQ ID NO: 267881 - DNA, 20 bp, Artificial Sequence
  Description of Artificial Sequence: Synthetic oligonucleotide
  Target: LAMA2; (-) strand; PAM type: YTN; PAM sequence: CTA
agaaacagattttagacatt

SEQ ID NO: 267882 - DNA, 20 bp, Artificial Sequence
  Description of Artificial Sequence: Synthetic oligonucleotide
  Target: LAMA2; (-) strand; PAM type: YTN; PAM sequence: CTC
taagaaacagattttagaca

SEQ ID NO: 267883 - DNA, 20 bp, Artificial Sequence
  Description of Artificial Sequence: Synthetic oligonucleotide
  Target: LAMA2; (-) strand; PAM type: YTN; PAM sequence: TTA
tacatatatgggctctaaga

SEQ ID NO: 267884 - DNA, 20 bp, Artificial Sequence
  Description of Artificial Sequence: Synthetic oligonucleotide
  Target: LAMA2; (-) strand; PAM type: YTN; PAM sequence: CTT
atacatatatgggctctaag

SEQ ID NO: 267885 - DNA, 20 bp, Artificial Sequence
  Description of Artificial Sequence: Synthetic oligonucleotide
  Target: LAMA2; (-) strand; PAM type: YTN; PAM sequence: CTC
ttatacatatatgggctcta

SEQ ID NO: 267886 - DNA, 20 bp, Artificial Sequence
  Description of Artificial Sequence: Synthetic oligonucleotide
  Target: LAMA2; (-) strand; PAM type: YTN; PAM sequence: CTC
acgcacatgcacgcatacgc

SEQ ID NO: 267887 - DNA, 20 bp, Artificial Sequence
  Description of Artificial Sequence: Synthetic oligonucleotide
  Target: LAMA2; (-) strand; PAM type: YTN; PAM sequence: CTG
tgcatgcacactcacgcaca

SEQ ID NO: 267888 - DNA, 20 bp, Artificial Sequence
  Description of Artificial Sequence: Synthetic oligonucleotide
  Target: LAMA2; (-) strand; PAM type: YTN; PAM sequence: CTG
catctgtgcatgcacactca

SEQ ID NO: 267889 - DNA, 20 bp, Artificial Sequence
  Description of Artificial Sequence: Synthetic oligonucleotide
  Target: LAMA2; (-) strand; PAM type: YTN; PAM sequence: CTG
actgcatctgtgcatgcaca

SEQ ID NO: 267890 - DNA, 20 bp, Artificial Sequence
  Description of Artificial Sequence: Synthetic oligonucleotide
  Target: LAMA2; (-) strand; PAM type: YTN; PAM sequence: CTG
atactgactgcatctgtgca

SEQ ID NO: 267891 - DNA, 20 bp, Artificial Sequence
  Description of Artificial Sequence: Synthetic oligonucleotide
  Target: LAMA2; (-) strand; PAM type: YTN; PAM sequence: TTA
aagcctgatactgactgcat

SEQ ID NO: 267892 - DNA, 20 bp, Artificial Sequence
  Description of Artificial Sequence: Synthetic oligonucleotide
  Target: LAMA2; (-) strand; PAM type: YTN; PAM sequence: TTT
aaagcctgatactgactgca

SEQ ID NO: 267893 - DNA, 20 bp, Artificial Sequence
  Description of Artificial Sequence: Synthetic oligonucleotide
  Target: LAMA2; (-) strand; PAM type: YTN; PAM sequence: TTC
atttaaagcctgatactgac

SEQ ID NO: 267894 - DNA, 20 bp, Artificial Sequence
  Description of Artificial Sequence: Synthetic oligonucleotide
  Target: LAMA2; (-) strand; PAM type: YTN; PAM sequence: CTC
attcatttaaagcctgatac

SEQ ID NO: 267895 - DNA, 20 bp, Artificial Sequence
  Description of Artificial Sequence: Synthetic oligonucleotide
  Target: LAMA2; (-) strand; PAM type: YTN; PAM sequence: TTA
gctcattcatttaaagcctg

SEQ ID NO: 267896 - DNA, 20 bp, Artificial Sequence
  Description of Artificial Sequence: Synthetic oligonucleotide
  Target: LAMA2; (-) strand; PAM type: YTN; PAM sequence: TTT
agctcattcatttaaagcct

SEQ ID NO: 267897 - DNA, 20 bp, Artificial Sequence
  Description of Artificial Sequence: Synthetic oligonucleotide
  Target: LAMA2; (-) strand; PAM type: YTN; PAM sequence: TTT
tagctcattcatttaaagcc

SEQ ID NO: 267898 - DNA, 20 bp, Artificial Sequence
  Description of Artificial Sequence: Synthetic oligonucleotide
  Target: LAMA2; (-) strand; PAM type: YTN; PAM sequence: TTT
ttagctcattcatttaaagc

SEQ ID NO: 267899 - DNA, 20 bp, Artificial Sequence
  Description of Artificial Sequence: Synthetic oligonucleotide
  Target: LAMA2; (-) strand; PAM type: YTN; PAM sequence: CTG
ccaaatttttagctcattca

SEQ ID NO: 267900 - DNA, 20 bp, Artificial Sequence
  Description of Artificial Sequence: Synthetic oligonucleotide
  Target: LAMA2; (-) strand; PAM type: YTN; PAM sequence: CTC
tgccaaatttttagctcatt

SEQ ID NO: 267901 - DNA, 20 bp, Artificial Sequence
  Description of Artificial Sequence: Synthetic oligonucleotide
  Target: LAMA2; (-) strand; PAM type: YTN; PAM sequence: CTG
acacactctgccaaattttt

SEQ ID NO: 267902 - DNA, 20 bp, Artificial Sequence
  Description of Artificial Sequence: Synthetic oligonucleotide
  Target: LAMA2; (-) strand; PAM type: YTN; PAM sequence: TTA
taactgacacactctgccaa

SEQ ID NO: 267903 - DNA, 20 bp, Artificial Sequence
  Description of Artificial Sequence: Synthetic oligonucleotide
  Target: LAMA2; (-) strand; PAM type: YTN; PAM sequence: CTT
ataactgacacactctgcca

SEQ ID NO: 267904 - DNA, 20 bp, Artificial Sequence
  Description of Artificial Sequence: Synthetic oligonucleotide
  Target: LAMA2; (-) strand; PAM type: YTN; PAM sequence: TTC
acaaaaaataaacttataac

SEQ ID NO: 267905 - DNA, 20 bp, Artificial Sequence
  Description of Artificial Sequence: Synthetic oligonucleotide
  Target: LAMA2; (-) strand; PAM type: YTN; PAM sequence: CTT
cacaaaaaataaacttataa

SEQ ID NO: 267906 - DNA, 20 bp, Artificial Sequence
  Description of Artificial Sequence: Synthetic oligonucleotide
  Target: LAMA2; (-) strand; PAM type: YTN; PAM sequence: TTG
ccttcacaaaaaataaactt

SEQ ID NO: 267907 - DNA, 20 bp, Artificial Sequence
  Description of Artificial Sequence: Synthetic oligonucleotide
  Target: LAMA2; (-) strand; PAM type: YTN; PAM sequence: TTT
gccttcacaaaaaataaact

SEQ ID NO: 267908 - DNA, 20 bp, Artificial Sequence
  Description of Artificial Sequence: Synthetic oligonucleotide
  Target: LAMA2; (-) strand; PAM type: YTN; PAM sequence: TTT
tgccttcacaaaaaataaac

SEQ ID NO: 267909 - DNA, 20 bp, Artificial Sequence
  Description of Artificial Sequence: Synthetic oligonucleotide
  Target: LAMA2; (-) strand; PAM type: YTN; PAM sequence: TTT
ttgccttcacaaaaaataaa

SEQ ID NO: 267910 - DNA, 20 bp, Artificial Sequence
  Description of Artificial Sequence: Synthetic oligonucleotide
  Target: LAMA2; (-) strand; PAM type: YTN; PAM sequence: TTA
tttttgccttcacaaaaaat

SEQ ID NO: 267911 - DNA, 20 bp, Artificial Sequence
  Description of Artificial Sequence: Synthetic oligonucleotide
  Target: LAMA2; (-) strand; PAM type: YTN; PAM sequence: TTT
atttttgccttcacaaaaaa

SEQ ID NO: 267912 - DNA, 20 bp, Artificial Sequence
  Description of Artificial Sequence: Synthetic oligonucleotide
  Target: LAMA2; (-) strand; PAM type: YTN; PAM sequence: TTA
tccaacaaatttatttttgc

SEQ ID NO: 267913 - DNA, 20 bp, Artificial Sequence
  Description of Artificial Sequence: Synthetic oligonucleotide
  Target: LAMA2; (-) strand; PAM type: YTN; PAM sequence: CTC
acaaacgcattatccaacaa

SEQ ID NO: 267914 - DNA, 20 bp, Artificial Sequence
  Description of Artificial Sequence: Synthetic oligonucleotide
  Target: LAMA2; (-) strand; PAM type: YTN; PAM sequence: CTA
ctcacaaacgcattatccaa

SEQ ID NO: 267915 - DNA, 20 bp, Artificial Sequence
  Description of Artificial Sequence: Synthetic oligonucleotide
  Target: LAMA2; (-) strand; PAM type: YTN; PAM sequence: CTA
ctactcacaaacgcattatc

SEQ ID NO: 267916 - DNA, 20 bp, Artificial Sequence
  Description of Artificial Sequence: Synthetic oligonucleotide
  Target: LAMA2; (-) strand; PAM type: YTN; PAM sequence: TTG
atctactactcacaaacgca

SEQ ID NO: 267917 - DNA, 20 bp, Artificial Sequence
  Description of Artificial Sequence: Synthetic oligonucleotide
  Target: LAMA2; (-) strand; PAM type: YTN; PAM sequence: TTG
caaaatatgtgaacaaattg

SEQ ID NO: 267918 - DNA, 20 bp, Artificial Sequence
  Description of Artificial Sequence: Synthetic oligonucleotide
  Target: LAMA2; (-) strand; PAM type: YTN; PAM sequence: TTT
gcaaaatatgtgaacaaatt

SEQ ID NO: 267919 - DNA, 20 bp, Artificial Sequence
  Description of Artificial Sequence: Synthetic oligonucleotide
  Target: LAMA2; (-) strand; PAM type: YTN; PAM sequence: TTT
tgcaaaatatgtgaacaaat

SEQ ID NO: 267920 - DNA, 20 bp, Artificial Sequence
  Description of Artificial Sequence: Synthetic oligonucleotide
  Target: LAMA2; (-) strand; PAM type: YTN; PAM sequence: CTT
ttgcaaaatatgtgaacaaa

SEQ ID NO: 267921 - DNA, 20 bp, Artificial Sequence
  Description of Artificial Sequence: Synthetic oligonucleotide
  Target: LAMA2; (-) strand; PAM type: YTN; PAM sequence: CTA
acttttgcaaaatatgtgaa

SEQ ID NO: 267922 - DNA, 20 bp, Artificial Sequence
  Description of Artificial Sequence: Synthetic oligonucleotide
  Target: LAMA2; (-) strand; PAM type: YTN; PAM sequence: CTC
taacttttgcaaaatatgtg

SEQ ID NO: 267923 - DNA, 20 bp, Artificial Sequence
  Description of Artificial Sequence: Synthetic oligonucleotide
  Target: LAMA2; (-) strand; PAM type: YTN; PAM sequence: TTA
catcaatagtacatgaatga

SEQ ID NO: 267924 - DNA, 20 bp, Artificial Sequence
  Description of Artificial Sequence: Synthetic oligonucleotide
  Target: LAMA2; (-) strand; PAM type: YTN; PAM sequence: CTA
atgcgttacatcaatagtac

SEQ ID NO: 267925 - DNA, 20 bp, Artificial Sequence
  Description of Artificial Sequence: Synthetic oligonucleotide
  Target: LAMA2; (-) strand; PAM type: YTN; PAM sequence: TTC
taatgcgttacatcaatagt

SEQ ID NO: 267926 - DNA, 20 bp, Artificial Sequence
  Description of Artificial Sequence: Synthetic oligonucleotide
  Target: LAMA2; (-) strand; PAM type: YTN; PAM sequence: CTT
ctaatgcgttacatcaatag

SEQ ID NO: 267927 - DNA, 20 bp, Artificial Sequence
  Description of Artificial Sequence: Synthetic oligonucleotide
  Target: LAMA2; (-) strand; PAM type: YTN; PAM sequence: CTG
tcttctaatgcgttacatca

SEQ ID NO: 267928 - DNA, 20 bp, Artificial Sequence
  Description of Artificial Sequence: Synthetic oligonucleotide
  Target: LAMA2; (-) strand; PAM type: YTN; PAM sequence: TTA
actgtcttctaatgcgttac

SEQ ID NO: 267929 - DNA, 20 bp, Artificial Sequence
  Description of Artificial Sequence: Synthetic oligonucleotide
  Target: LAMA2; (-) strand; PAM type: YTN; PAM sequence: CTA
atgttaactgtcttctaatg

SEQ ID NO: 267930 - DNA, 20 bp, Artificial Sequence
  Description of Artificial Sequence: Synthetic oligonucleotide
  Target: LAMA2; (-) strand; PAM type: YTN; PAM sequence: TTA
ggacctaatgttaactgtct

SEQ ID NO: 267931 - DNA, 20 bp, Artificial Sequence
  Description of Artificial Sequence: Synthetic oligonucleotide
  Target: LAMA2; (-) strand; PAM type: YTN; PAM sequence: TTG
gtcaggtgccattaggacct

SEQ ID NO: 267932 - DNA, 20 bp, Artificial Sequence
  Description of Artificial Sequence: Synthetic oligonucleotide
  Target: LAMA2; (-) strand; PAM type: YTN; PAM sequence: TTT
ggtcaggtgccattaggacc

SEQ ID NO: 267933 - DNA, 20 bp, Artificial Sequence
  Description of Artificial Sequence: Synthetic oligonucleotide
  Target: LAMA2; (-) strand; PAM type: YTN; PAM sequence: TTT
tggtcaggtgccattaggac

SEQ ID NO: 267934 - DNA, 20 bp, Artificial Sequence
  Description of Artificial Sequence: Synthetic oligonucleotide
  Target: LAMA2; (-) strand; PAM type: YTN; PAM sequence: CTT
ttggtcaggtgccattagga

SEQ ID NO: 267935 - DNA, 20 bp, Artificial Sequence
  Description of Artificial Sequence: Synthetic oligonucleotide
  Target: LAMA2; (-) strand; PAM type: YTN; PAM sequence: CTC
cttttggtcaggtgccatta

SEQ ID NO: 267936 - DNA, 20 bp, Artificial Sequence
  Description of Artificial Sequence: Synthetic oligonucleotide
  Target: LAMA2; (-) strand; PAM type: YTN; PAM sequence: CTG
aaaacaggcaataaggtgta

SEQ ID NO: 267937 - DNA, 20 bp, Artificial Sequence
  Description of Artificial Sequence: Synthetic oligonucleotide
  Target: LAMA2; (-) strand; PAM type: YTN; PAM sequence: TTG
atgctgaaaacaggcaataa

SEQ ID NO: 267938 - DNA, 20 bp, Artificial Sequence
  Description of Artificial Sequence: Synthetic oligonucleotide
  Target: LAMA2; (-) strand; PAM type: YTN; PAM sequence: CTA
aatcagttgatgctgaaaac

SEQ ID NO: 267939 - DNA, 20 bp, Artificial Sequence
  Description of Artificial Sequence: Synthetic oligonucleotide
  Target: LAMA2; (-) strand; PAM type: YTN; PAM sequence: TTC
actaaatcagttgatgctga

SEQ ID NO: 267940 - DNA, 20 bp, Artificial Sequence
  Description of Artificial Sequence: Synthetic oligonucleotide
  Target: LAMA2; (-) strand; PAM type: YTN; PAM sequence: CTT
cactaaatcagttgatgctg

SEQ ID NO: 267941 - DNA, 20 bp, Artificial Sequence
  Description of Artificial Sequence: Synthetic oligonucleotide
  Target: LAMA2; (-) strand; PAM type: YTN; PAM sequence: CTG
cttcactaaatcagttgatg

SEQ ID NO: 267942 - DNA, 20 bp, Artificial Sequence
  Description of Artificial Sequence: Synthetic oligonucleotide
  Target: LAMA2; (-) strand; PAM type: YTN; PAM sequence: TTG
ctgcttcactaaatcagttg

SEQ ID NO: 267943 - DNA, 20 bp, Artificial Sequence
  Description of Artificial Sequence: Synthetic oligonucleotide
  Target: LAMA2; (-) strand; PAM type: YTN; PAM sequence: TTT
gctgcttcactaaatcagtt

SEQ ID NO: 267944 - DNA, 20 bp, Artificial Sequence
  Description of Artificial Sequence: Synthetic oligonucleotide
  Target: LAMA2; (-) strand; PAM type: YTN; PAM sequence: TTT
tgctgcttcactaaatcagt

SEQ ID NO: 267945 - DNA, 20 bp, Artificial Sequence
  Description of Artificial Sequence: Synthetic oligonucleotide
  Target: LAMA2; (-) strand; PAM type: YTN; PAM sequence: TTT
ttgctgcttcactaaatcag

SEQ ID NO: 267946 - DNA, 20 bp, Artificial Sequence
  Description of Artificial Sequence: Synthetic oligonucleotide
  Target: LAMA2; (-) strand; PAM type: YTN; PAM sequence: CTT
tttgctgcttcactaaatca

SEQ ID NO: 267947 - DNA, 20 bp, Artificial Sequence
  Description of Artificial Sequence: Synthetic oligonucleotide
  Target: LAMA2; (-) strand; PAM type: YTN; PAM sequence: TTC
tttttgctgcttcactaaat

SEQ ID NO: 267948 - DNA, 20 bp, Artificial Sequence
  Description of Artificial Sequence: Synthetic oligonucleotide
  Target: LAMA2; (-) strand; PAM type: YTN; PAM sequence: TTT
ctttttgctgcttcactaaa

SEQ ID NO: 267949 - DNA, 20 bp, Artificial Sequence
  Description of Artificial Sequence: Synthetic oligonucleotide
  Target: LAMA2; (-) strand; PAM type: YTN; PAM sequence: TTT
tctttttgctgcttcactaa

SEQ ID NO: 267950 - DNA, 20 bp, Artificial Sequence
  Description of Artificial Sequence: Synthetic oligonucleotide
  Target: LAMA2; (-) strand; PAM type: YTN; PAM sequence: TTT
ttctttttgctgcttcacta

SEQ ID NO: 267951 - DNA, 20 bp, Artificial Sequence
  Description of Artificial Sequence: Synthetic oligonucleotide
  Target: LAMA2; (-) strand; PAM type: YTN; PAM sequence: CTG
cacacaccatttttcttttt

SEQ ID NO: 267952 - DNA, 20 bp, Artificial Sequence
  Description of Artificial Sequence: Synthetic oligonucleotide
  Target: LAMA2; (-) strand; PAM type: YTN; PAM sequence: CTG
tggcagaaagataatgctgc

SEQ ID NO: 267953 - DNA, 20 bp, Artificial Sequence
  Description of Artificial Sequence: Synthetic oligonucleotide
  Target: LAMA2; (-) strand; PAM type: YTN; PAM sequence: TTA
aaaacatgtatctgtggcag

SEQ ID NO: 267954 - DNA, 20 bp, Artificial Sequence
  Description of Artificial Sequence: Synthetic oligonucleotide
  Target: LAMA2; (-) strand; PAM type: YTN; PAM sequence: TTG
gaaattaaaaacatgtatct

SEQ ID NO: 267955 - DNA, 20 bp, Artificial Sequence
  Description of Artificial Sequence: Synthetic oligonucleotide
  Target: LAMA2; (-) strand; PAM type: YTN; PAM sequence: CTT
ggaaattaaaaacatgtatc

SEQ ID NO: 267956 - DNA, 20 bp, Artificial Sequence
  Description of Artificial Sequence: Synthetic oligonucleotide
  Target: LAMA2; (-) strand; PAM type: YTN; PAM sequence: TTG
gaaacttggaaattaaaaac

SEQ ID NO: 267957 - DNA, 20 bp, Artificial Sequence
  Description of Artificial Sequence: Synthetic oligonucleotide
  Target: LAMA2; (-) strand; PAM type: YTN; PAM sequence: CTG
aatgatgcattggaaacttg

SEQ ID NO: 267958 - DNA, 20 bp, Artificial Sequence
  Description of Artificial Sequence: Synthetic oligonucleotide
  Target: LAMA2; (-) strand; PAM type: YTN; PAM sequence: TTA
gataaaactgaatgatgcat

SEQ ID NO: 267959 - DNA, 20 bp, Artificial Sequence
  Description of Artificial Sequence: Synthetic oligonucleotide
  Target: LAMA2; (-) strand; PAM type: YTN; PAM sequence: TTC
ccgttagataaaactgaatg

SEQ ID NO: 267960 - DNA, 20 bp, Artificial Sequence
  Description of Artificial Sequence: Synthetic oligonucleotide
  Target: LAMA2; (-) strand; PAM type: YTN; PAM sequence: CTG
cattcccgttagataaaact

SEQ ID NO: 267961 - DNA, 20 bp, Artificial Sequence
  Description of Artificial Sequence: Synthetic oligonucleotide
  Target: LAMA2; (-) strand; PAM type: YTN; PAM sequence: CTC
agctgcattcccgttagata

SEQ ID NO: 267962 - DNA, 20 bp, Artificial Sequence
  Description of Artificial Sequence: Synthetic oligonucleotide
  Target: LAMA2; (-) strand; PAM type: YTN; PAM sequence: CTC
tcagctgcattcccgttaga

SEQ ID NO: 267963 - DNA, 20 bp, Artificial Sequence
  Description of Artificial Sequence: Synthetic oligonucleotide
  Target: LAMA2; (-) strand; PAM type: YTN; PAM sequence: TTC
tctcagctgcattcccgtta

SEQ ID NO: 267964 - DNA, 20 bp, Artificial Sequence
  Description of Artificial Sequence: Synthetic oligonucleotide
  Target: LAMA2; (-) strand; PAM type: YTN; PAM sequence: CTT
ctctcagctgcattcccgtt

SEQ ID NO: 267965 - DNA, 20 bp, Artificial Sequence
  Description of Artificial Sequence: Synthetic oligonucleotide
  Target: LAMA2; (-) strand; PAM type: YTN; PAM sequence: TTA
caaacttctctcagctgcat

SEQ ID NO: 267966 - DNA, 20 bp, Artificial Sequence
  Description of Artificial Sequence: Synthetic oligonucleotide
  Target: LAMA2; (-) strand; PAM type: YTN; PAM sequence: TTG
ttacaaacttctctcagctg

SEQ ID NO: 267967 - DNA, 20 bp, Artificial Sequence
  Description of Artificial Sequence: Synthetic oligonucleotide
  Target: LAMA2; (-) strand; PAM type: YTN; PAM sequence: TTG
ggttgttacaaacttctctc

SEQ ID NO: 267968 - DNA, 20 bp, Artificial Sequence
  Description of Artificial Sequence: Synthetic oligonucleotide
  Target: LAMA2; (-) strand; PAM type: YTN; PAM sequence: TTT
gggttgttacaaacttctct

SEQ ID NO: 267969 - DNA, 20 bp, Artificial Sequence
  Description of Artificial Sequence: Synthetic oligonucleotide
  Target: LAMA2; (-) strand; PAM type: YTN; PAM sequence: TTT
tgggttgttacaaacttctc

SEQ ID NO: 267970 - DNA, 20 bp, Artificial Sequence
  Description of Artificial Sequence: Synthetic oligonucleotide
  Target: LAMA2; (-) strand; PAM type: YTN; PAM sequence: TTA
gcatgtagttttgggttgtt

SEQ ID NO: 267971 - DNA, 20 bp, Artificial Sequence
  Description of Artificial Sequence: Synthetic oligonucleotide
  Target: LAMA2; (-) strand; PAM type: YTN; PAM sequence: CTA
tattagcatgtagttttggg

SEQ ID NO: 267972 - DNA, 20 bp, Artificial Sequence
  Description of Artificial Sequence: Synthetic oligonucleotide
  Target: LAMA2; (-) strand; PAM type: YTN; PAM sequence: CTA
aactatattagcatgtagtt

SEQ ID NO: 267973 - DNA, 20 bp, Artificial Sequence
  Description of Artificial Sequence: Synthetic oligonucleotide
  Target: LAMA2; (-) strand; PAM type: YTN; PAM sequence: TTG
aaaactaaactatattagca

SEQ ID NO: 267974 - DNA, 20 bp, Artificial Sequence
  Description of Artificial Sequence: Synthetic oligonucleotide
  Target: LAMA2; (-) strand; PAM type: YTN; PAM sequence: CTT
gaaaactaaactatattagc

SEQ ID NO: 267975 - DNA, 20 bp, Artificial Sequence
  Description of Artificial Sequence: Synthetic oligonucleotide
  Target: LAMA2; (-) strand; PAM type: YTN; PAM sequence: CTC
cacaagacttgaaaactaaa

SEQ ID NO: 267976 - DNA, 20 bp, Artificial Sequence
  Description of Artificial Sequence: Synthetic oligonucleotide
  Target: LAMA2; (-) strand; PAM type: YTN; PAM sequence: TTA
aaaaaaaaaagactccacaa

SEQ ID NO: 267977 - DNA, 20 bp, Artificial Sequence
  Description of Artificial Sequence: Synthetic oligonucleotide
  Target: LAMA2; (-) strand; PAM type: YTN; PAM sequence: TTC
cattaaaaaaaaaaagactc

SEQ ID NO: 267978 - DNA, 20 bp, Artificial Sequence
  Description of Artificial Sequence: Synthetic oligonucleotide
  Target: LAMA2; (-) strand; PAM type: YTN; PAM sequence: TTA
ttccattaaaaaaaaaaaga

SEQ ID NO: 267979 - DNA, 20 bp, Artificial Sequence
  Description of Artificial Sequence: Synthetic oligonucleotide
  Target: LAMA2; (-) strand; PAM type: YTN; PAM sequence: CTT
attccattaaaaaaaaaaag

SEQ ID NO: 267980 - DNA, 20 bp, Artificial Sequence
  Description of Artificial Sequence: Synthetic oligonucleotide
  Target: LAMA2; (-) strand; PAM type: YTN; PAM sequence: CTG
atgatcttattccattaaaa

SEQ ID NO: 267981 - DNA, 20 bp, Artificial Sequence
  Description of Artificial Sequence: Synthetic oligonucleotide
  Target: LAMA2; (-) strand; PAM type: YTN; PAM sequence: TTC
tgatgatcttattccattaa

SEQ ID NO: 267982 - DNA, 20 bp, Artificial Sequence
  Description of Artificial Sequence: Synthetic oligonucleotide
  Target: LAMA2; (-) strand; PAM type: YTN; PAM sequence: TTT
ctgatgatcttattccatta

SEQ ID NO: 267983 - DNA, 20 bp, Artificial Sequence
  Description of Artificial Sequence: Synthetic oligonucleotide
  Target: LAMA2; (-) strand; PAM type: YTN; PAM sequence: CTG
gatttctgatgatcttattc

SEQ ID NO: 267984 - DNA, 20 bp, Artificial Sequence
  Description of Artificial Sequence: Synthetic oligonucleotide
  Target: LAMA2; (-) strand; PAM type: YTN; PAM sequence: CTC
ctggatttctgatgatctta

SEQ ID NO: 267985 - DNA, 20 bp, Artificial Sequence
  Description of Artificial Sequence: Synthetic oligonucleotide
  Target: LAMA2; (-) strand; PAM type: YTN; PAM sequence: TTG
ctcctggatttctgatgatc

SEQ ID NO: 267986 - DNA, 20 bp, Artificial Sequence
  Description of Artificial Sequence: Synthetic oligonucleotide
  Target: LAMA2; (-) strand; PAM type: YTN; PAM sequence: CTT
gctcctggatttctgatgat

SEQ ID NO: 267987 - DNA, 20 bp, Artificial Sequence
  Description of Artificial Sequence: Synthetic oligonucleotide
  Target: LAMA2; (-) strand; PAM type: YTN; PAM sequence: CTG
tcttgctcctggatttctga

SEQ ID NO: 267988 - DNA, 20 bp, Artificial Sequence
  Description of Artificial Sequence: Synthetic oligonucleotide
  Target: LAMA2; (-) strand; PAM type: YTN; PAM sequence: CTG
gtagaccacagccagtctgt

SEQ ID NO: 267989 - DNA, 20 bp, Artificial Sequence
  Description of Artificial Sequence: Synthetic oligonucleotide
  Target: LAMA2; (-) strand; PAM type: YTN; PAM sequence: CTA
caatgctggtagaccacagc

SEQ ID NO: 267990 - DNA, 20 bp, Artificial Sequence
  Description of Artificial Sequence: Synthetic oligonucleotide
  Target: LAMA2; (-) strand; PAM type: YTN; PAM sequence: TTA
ctacaatgctggtagaccac

SEQ ID NO: 267991 - DNA, 20 bp, Artificial Sequence
  Description of Artificial Sequence: Synthetic oligonucleotide
  Target: LAMA2; (-) strand; PAM type: YTN; PAM sequence: TTT
actacaatgctggtagacca

SEQ ID NO: 267992 - DNA, 20 bp, Artificial Sequence
  Description of Artificial Sequence: Synthetic oligonucleotide
  Target: LAMA2; (-) strand; PAM type: YTN; PAM sequence: TTT
tactacaatgctggtagacc

SEQ ID NO: 267993 - DNA, 20 bp, Artificial Sequence
  Description of Artificial Sequence: Synthetic oligonucleotide
  Target: LAMA2; (-) strand; PAM type: YTN; PAM sequence: TTT
ttactacaatgctggtagac

SEQ ID NO: 267994 - DNA, 20 bp, Artificial Sequence
  Description of Artificial Sequence: Synthetic oligonucleotide
  Target: LAMA2; (-) strand; PAM type: YTN; PAM sequence: TTC
cccaatgtttttactacaat

SEQ ID NO: 267995 - DNA, 20 bp, Artificial Sequence
  Description of Artificial Sequence: Synthetic oligonucleotide
  Target: LAMA2; (-) strand; PAM type: YTN; PAM sequence: CTT
ccccaatgtttttactacaa

SEQ ID NO: 267996 - DNA, 20 bp, Artificial Sequence
  Description of Artificial Sequence: Synthetic oligonucleotide
  Target: LAMA2; (-) strand; PAM type: YTN; PAM sequence: TTA
taaaacttccccaatgtttt

SEQ ID NO: 267997 - DNA, 20 bp, Artificial Sequence
  Description of Artificial Sequence: Synthetic oligonucleotide
  Target: LAMA2; (-) strand; PAM type: YTN; PAM sequence: CTT
ataaaacttccccaatgttt

SEQ ID NO: 267998 - DNA, 20 bp, Artificial Sequence
  Description of Artificial Sequence: Synthetic oligonucleotide
  Target: LAMA2; (-) strand; PAM type: YTN; PAM sequence: TTA
ggtcttataaaacttcccca

SEQ ID NO: 267999 - DNA, 20 bp, Artificial Sequence
  Description of Artificial Sequence: Synthetic oligonucleotide
  Target: LAMA2; (-) strand; PAM type: YTN; PAM sequence: CTA
ataattaggtcttataaaac

SEQ ID NO: 268000 - DNA, 20 bp, Artificial Sequence
  Description of Artificial Sequence: Synthetic oligonucleotide
  Target: LAMA2; (-) strand; PAM type: YTN; PAM sequence: TTC
taataattaggtcttataaa

SEQ ID NO: 268001 - DNA, 20 bp, Artificial Sequence
  Description of Artificial Sequence: Synthetic oligonucleotide
  Target: LAMA2; (-) strand; PAM type: YTN; PAM sequence: TTT
ctaataattaggtcttataa

SEQ ID NO: 268002 - DNA, 20 bp, Artificial Sequence
  Description of Artificial Sequence: Synthetic oligonucleotide
  Target: LAMA2; (-) strand; PAM type: YTN; PAM sequence: TTT
tctaataattaggtcttata

SEQ ID NO: 268003 - DNA, 20 bp, Artificial Sequence
  Description of Artificial Sequence: Synthetic oligonucleotide
  Target: LAMA2; (-) strand; PAM type: YTN; PAM sequence: TTA
tggtattttctaataattag

SEQ ID NO: 268004 - DNA, 20 bp, Artificial Sequence
  Description of Artificial Sequence: Synthetic oligonucleotide
  Target: LAMA2; (-) strand; PAM type: YTN; PAM sequence: TTT
atggtattttctaataatta

SEQ ID NO: 268005 - DNA, 20 bp, Artificial Sequence
  Description of Artificial Sequence: Synthetic oligonucleotide
  Target: LAMA2; (-) strand; PAM type: YTN; PAM sequence: TTT
tatggtattttctaataatt

SEQ ID NO: 268006 - DNA, 20 bp, Artificial Sequence
  Description of Artificial Sequence: Synthetic oligonucleotide
  Target: LAMA2; (-) strand; PAM type: YTN; PAM sequence: CTA
ttttatggtattttctaata

SEQ ID NO: 268007 - DNA, 20 bp, Artificial Sequence
  Description of Artificial Sequence: Synthetic oligonucleotide
  Target: LAMA2; (-) strand; PAM type: YTN; PAM sequence: CTA
tgaaaatgactattttatgg

SEQ ID NO: 268008 - DNA, 20 bp, Artificial Sequence
  Description of Artificial Sequence: Synthetic oligonucleotide
  Target: LAMA2; (-) strand; PAM type: YTN; PAM sequence: TTC
tatgaaaatgactattttat

SEQ ID NO: 268009 - DNA, 20 bp, Artificial Sequence
  Description of Artificial Sequence: Synthetic oligonucleotide
  Target: LAMA2; (-) strand; PAM type: YTN; PAM sequence: TTT
ctatgaaaatgactatttta

SEQ ID NO: 268010 - DNA, 20 bp, Artificial Sequence
  Description of Artificial Sequence: Synthetic oligonucleotide
  Target: LAMA2; (-) strand; PAM type: YTN; PAM sequence: TTT
tctatgaaaatgactatttt

SEQ ID NO: 268011 - DNA, 20 bp, Artificial Sequence
  Description of Artificial Sequence: Synthetic oligonucleotide
  Target: LAMA2; (-) strand; PAM type: YTN; PAM sequence: TTT
ttctatgaaaatgactattt

SEQ ID NO: 268012 - DNA, 20 bp, Artificial Sequence
  Description of Artificial Sequence: Synthetic oligonucleotide
  Target: LAMA2; (-) strand; PAM type: YTN; PAM sequence: CTT
tttctatgaaaatgactatt

SEQ ID NO: 268013 - DNA, 20 bp, Artificial Sequence
  Description of Artificial Sequence: Synthetic oligonucleotide
  Target: LAMA2; (-) strand; PAM type: YTN; PAM sequence: TTC
agtgtgaggaaagggaaagc

SEQ ID NO: 268014 - DNA, 20 bp, Artificial Sequence
  Description of Artificial Sequence: Synthetic oligonucleotide
  Target: LAMA2; (-) strand; PAM type: YTN; PAM sequence: TTG
aacacaaagtaatgtgattc

SEQ ID NO: 268015 - DNA, 20 bp, Artificial Sequence
  Description of Artificial Sequence: Synthetic oligonucleotide
  Target: LAMA2; (-) strand; PAM type: YTN; PAM sequence: CTT
gaacacaaagtaatgtgatt

SEQ ID NO: 268016 - DNA, 20 bp, Artificial Sequence
  Description of Artificial Sequence: Synthetic oligonucleotide
  Target: LAMA2; (-) strand; PAM type: YTN; PAM sequence: TTA
ccttgaacacaaagtaatgt

SEQ ID NO: 268017 - DNA, 20 bp, Artificial Sequence
  Description of Artificial Sequence: Synthetic oligonucleotide
  Target: LAMA2; (-) strand; PAM type: YTN; PAM sequence: TTT
accttgaacacaaagtaatg

SEQ ID NO: 268018 - DNA, 20 bp, Artificial Sequence
  Description of Artificial Sequence: Synthetic oligonucleotide
  Target: LAMA2; (-) strand; PAM type: YTN; PAM sequence: TTT
taccttgaacacaaagtaat

SEQ ID NO: 268019 - DNA, 20 bp, Artificial Sequence
  Description of Artificial Sequence: Synthetic oligonucleotide
  Target: LAMA2; (-) strand; PAM type: YTN; PAM sequence: CTA
cattttaccttgaacacaaa

SEQ ID NO: 268020 - DNA, 20 bp, Artificial Sequence
  Description of Artificial Sequence: Synthetic oligonucleotide
  Target: LAMA2; (-) strand; PAM type: YTN; PAM sequence: TTC
aaactacattttaccttgaa

SEQ ID NO: 268021 - DNA, 20 bp, Artificial Sequence
  Description of Artificial Sequence: Synthetic oligonucleotide
  Target: LAMA2; (-) strand; PAM type: YTN; PAM sequence: TTT
caaactacattttaccttga

SEQ ID NO: 268022 - DNA, 20 bp, Artificial Sequence
  Description of Artificial Sequence: Synthetic oligonucleotide
  Target: LAMA2; (-) strand; PAM type: YTN; PAM sequence: TTA
catccagatttcaaactaca

SEQ ID NO: 268023 - DNA, 20 bp, Artificial Sequence
  Description of Artificial Sequence: Synthetic oligonucleotide
  Target: LAMA2; (-) strand; PAM type: YTN; PAM sequence: TTT
acatccagatttcaaactac

SEQ ID NO: 268024 - DNA, 20 bp, Artificial Sequence
  Description of Artificial Sequence: Synthetic oligonucleotide
  Target: LAMA2; (-) strand; PAM type: YTN; PAM sequence: CTA
atttacatccagatttcaaa

SEQ ID NO: 268025 - DNA, 20 bp, Artificial Sequence
  Description of Artificial Sequence: Synthetic oligonucleotide
  Target: LAMA2; (-) strand; PAM type: YTN; PAM sequence: TTC
taatttacatccagatttca

SEQ ID NO: 268026 - DNA, 20 bp, Artificial Sequence
  Description of Artificial Sequence: Synthetic oligonucleotide
  Target: LAMA2; (-) strand; PAM type: YTN; PAM sequence: TTT
ctaatttacatccagatttc

SEQ ID NO: 268027 - DNA, 20 bp, Artificial Sequence
  Description of Artificial Sequence: Synthetic oligonucleotide
  Target: LAMA2; (-) strand; PAM type: YTN; PAM sequence: TTT
tctaatttacatccagattt

SEQ ID NO: 268028 - DNA, 20 bp, Artificial Sequence
  Description of Artificial Sequence: Synthetic oligonucleotide
  Target: LAMA2; (-) strand; PAM type: YTN; PAM sequence: CTT
ttctaatttacatccagatt

SEQ ID NO: 268029 - DNA, 20 bp, Artificial Sequence
  Description of Artificial Sequence: Synthetic oligonucleotide
  Target: LAMA2; (-) strand; PAM type: YTN; PAM sequence: TTG
gaataaaataatatcttttc

SEQ ID NO: 268030 - DNA, 20 bp, Artificial Sequence
  Description of Artificial Sequence: Synthetic oligonucleotide
  Target: LAMA2; (-) strand; PAM type: YTN; PAM sequence: CTT
ggaataaaataatatctttt

SEQ ID NO: 268031 - DNA, 20 bp, Artificial Sequence
  Description of Artificial Sequence: Synthetic oligonucleotide
  Target: LAMA2; (-) strand; PAM type: YTN; PAM sequence: TTC
acttggaataaaataatatc

SEQ ID NO: 268032 - DNA, 20 bp, Artificial Sequence
  Description of Artificial Sequence: Synthetic oligonucleotide
  Target: LAMA2; (-) strand; PAM type: YTN; PAM sequence: TTT
cacttggaataaaataatat

SEQ ID NO: 268033 - DNA, 20 bp, Artificial Sequence
  Description of Artificial Sequence: Synthetic oligonucleotide
  Target: LAMA2; (-) strand; PAM type: YTN; PAM sequence: TTC
aagacgtgaagtgtgaatac

SEQ ID NO: 268034 - DNA, 20 bp, Artificial Sequence
  Description of Artificial Sequence: Synthetic oligonucleotide
  Target: LAMA2; (-) strand; PAM type: YTN; PAM sequence: CTT
caagacgtgaagtgtgaata

SEQ ID NO: 268035 - DNA, 20 bp, Artificial Sequence
  Description of Artificial Sequence: Synthetic oligonucleotide
  Target: LAMA2; (-) strand; PAM type: YTN; PAM sequence: CTG
gtgcttcaagacgtgaagtg

SEQ ID NO: 268036 - DNA, 20 bp, Artificial Sequence
  Description of Artificial Sequence: Synthetic oligonucleotide
  Target: LAMA2; (-) strand; PAM type: YTN; PAM sequence: CTC
agcccaaatggccactggtg

SEQ ID NO: 268037 - DNA, 20 bp, Artificial Sequence
  Description of Artificial Sequence: Synthetic oligonucleotide
  Target: LAMA2; (-) strand; PAM type: YTN; PAM sequence: TTG
aaaactcagcccaaatggcc

SEQ ID NO: 268038 - DNA, 20 bp, Artificial Sequence
  Description of Artificial Sequence: Synthetic oligonucleotide
  Target: LAMA2; (-) strand; PAM type: YTN; PAM sequence: CTT
gaaaactcagcccaaatggc

SEQ ID NO: 268039 - DNA, 20 bp, Artificial Sequence
  Description of Artificial Sequence: Synthetic oligonucleotide
  Target: LAMA2; (-) strand; PAM type: YTN; PAM sequence: TTC
ttgaaaactcagcccaaatg

SEQ ID NO: 268040 - DNA, 20 bp, Artificial Sequence
  Description of Artificial Sequence: Synthetic oligonucleotide
  Target: LAMA2; (-) strand; PAM type: YTN; PAM sequence: TTT
cttgaaaactcagcccaaat

SEQ ID NO: 268041 - DNA, 20 bp, Artificial Sequence
  Description of Artificial Sequence: Synthetic oligonucleotide
  Target: LAMA2; (-) strand; PAM type: YTN; PAM sequence: TTT
tcttgaaaactcagcccaaa

SEQ ID NO: 268042 - DNA, 20 bp, Artificial Sequence
  Description of Artificial Sequence: Synthetic oligonucleotide
  Target: LAMA2; (-) strand; PAM type: YTN; PAM sequence: TTT
ttcttgaaaactcagcccaa

SEQ ID NO: 268043 - DNA, 20 bp, Artificial Sequence
  Description of Artificial Sequence: Synthetic oligonucleotide
  Target: LAMA2; (-) strand; PAM type: YTN; PAM sequence: TTT
tttcttgaaaactcagccca

SEQ ID NO: 268044 - DNA, 20 bp, Artificial Sequence
  Description of Artificial Sequence: Synthetic oligonucleotide
  Target: LAMA2; (-) strand; PAM type: YTN; PAM sequence: TTT
ttttcttgaaaactcagccc

SEQ ID NO: 268045 - DNA, 20 bp, Artificial Sequence
  Description of Artificial Sequence: Synthetic oligonucleotide
  Target: LAMA2; (-) strand; PAM type: YTN; PAM sequence: TTT
tttttcttgaaaactcagcc

SEQ ID NO: 268046 - DNA, 20 bp, Artificial Sequence
  Description of Artificial Sequence: Synthetic oligonucleotide
  Target: LAMA2; (-) strand; PAM type: YTN; PAM sequence: CTA
tataaattttttttcttgaa

SEQ ID NO: 268047 - DNA, 20 bp, Artificial Sequence
  Description of Artificial Sequence: Synthetic oligonucleotide
  Target: LAMA2; (-) strand; PAM type: YTN; PAM sequence: TTA
aaaaaagggcataaaatcta

SEQ ID NO: 268048 - DNA, 20 bp, Artificial Sequence
  Description of Artificial Sequence: Synthetic oligonucleotide
  Target: LAMA2; (-) strand; PAM type: YTN; PAM sequence: TTA
ggttaaaaaaagggcataaa

SEQ ID NO: 268049 - DNA, 20 bp, Artificial Sequence
  Description of Artificial Sequence: Synthetic oligonucleotide
  Target: LAMA2; (-) strand; PAM type: YTN; PAM sequence: CTT
aggttaaaaaaagggcataa

SEQ ID NO: 268050 - DNA, 20 bp, Artificial Sequence
  Description of Artificial Sequence: Synthetic oligonucleotide
  Target: LAMA2; (-) strand; PAM type: YTN; PAM sequence: CTC
ttaggttaaaaaaagggcat

SEQ ID NO: 268051 - DNA, 20 bp, Artificial Sequence
  Description of Artificial Sequence: Synthetic oligonucleotide
  Target: LAMA2; (-) strand; PAM type: YTN; PAM sequence: TTA
atatctcttaggttaaaaaa

SEQ ID NO: 268052 - DNA, 20 bp, Artificial Sequence
  Description of Artificial Sequence: Synthetic oligonucleotide
  Target: LAMA2; (-) strand; PAM type: YTN; PAM sequence: CTT
aatatctcttaggttaaaaa

SEQ ID NO: 268053 - DNA, 20 bp, Artificial Sequence
  Description of Artificial Sequence: Synthetic oligonucleotide
  Target: LAMA2; (-) strand; PAM type: YTN; PAM sequence: TTA
cttaatatctcttaggttaa

SEQ ID NO: 268054 - DNA, 20 bp, Artificial Sequence
  Description of Artificial Sequence: Synthetic oligonucleotide
  Target: LAMA2; (-) strand; PAM type: YTN; PAM sequence: CTA
ttacttaatatctcttaggt

SEQ ID NO: 268055 - DNA, 20 bp, Artificial Sequence
  Description of Artificial Sequence: Synthetic oligonucleotide
  Target: LAMA2; (-) strand; PAM type: YTN; PAM sequence: CTG
atagtggaatagctattact

SEQ ID NO: 268056 - DNA, 20 bp, Artificial Sequence
  Description of Artificial Sequence: Synthetic oligonucleotide
  Target: LAMA2; (-) strand; PAM type: YTN; PAM sequence: TTG
tctgatagtggaatagctat

SEQ ID NO: 268057 - DNA, 20 bp, Artificial Sequence
  Description of Artificial Sequence: Synthetic oligonucleotide
  Target: LAMA2; (-) strand; PAM type: YTN; PAM sequence: TTA
tgcacattgtctgatagtgg

SEQ ID NO: 268058 - DNA, 20 bp, Artificial Sequence
  Description of Artificial Sequence: Synthetic oligonucleotide
  Target: LAMA2; (-) strand; PAM type: YTN; PAM sequence: TTT
atgcacattgtctgatagtg

SEQ ID NO: 268059 - DNA, 20 bp, Artificial Sequence
  Description of Artificial Sequence: Synthetic oligonucleotide
  Target: LAMA2; (-) strand; PAM type: YTN; PAM sequence: CTA
gaatttatgcacattgtctg

SEQ ID NO: 268060 - DNA, 20 bp, Artificial Sequence
  Description of Artificial Sequence: Synthetic oligonucleotide
  Target: LAMA2; (-) strand; PAM type: YTN; PAM sequence: CTG
actagaatttatgcacattg

SEQ ID NO: 268061 - DNA, 20 bp, Artificial Sequence
  Description of Artificial Sequence: Synthetic oligonucleotide
  Target: LAMA2; (-) strand; PAM type: YTN; PAM sequence: CTA
atcaaaagaaaaatctgact

SEQ ID NO: 268062 - DNA, 20 bp, Artificial Sequence
  Description of Artificial Sequence: Synthetic oligonucleotide
  Target: LAMA2; (-) strand; PAM type: YTN; PAM sequence: TTC
actaatcaaaagaaaaatct

SEQ ID NO: 268063 - DNA, 20 bp, Artificial Sequence
  Description of Artificial Sequence: Synthetic oligonucleotide
  Target: LAMA2; (-) strand; PAM type: YTN; PAM sequence: TTG
ttcactaatcaaaagaaaaa

SEQ ID NO: 268064 - DNA, 20 bp, Artificial Sequence
  Description of Artificial Sequence: Synthetic oligonucleotide
  Target: LAMA2; (-) strand; PAM type: YTN; PAM sequence: CTA
ttgttcactaatcaaaagaa

SEQ ID NO: 268065 - DNA, 20 bp, Artificial Sequence
  Description of Artificial Sequence: Synthetic oligonucleotide
  Target: LAMA2; (-) strand; PAM type: YTN; PAM sequence: TTG
tcctattgttcactaatcaa

SEQ ID NO: 268066 - DNA, 20 bp, Artificial Sequence
  Description of Artificial Sequence: Synthetic oligonucleotide
  Target: LAMA2; (-) strand; PAM type: YTN; PAM sequence: CTA
aacatccagcaaaattgtcc

SEQ ID NO: 268067 - DNA, 20 bp, Artificial Sequence
  Description of Artificial Sequence: Synthetic oligonucleotide
  Target: LAMA2; (-) strand; PAM type: YTN; PAM sequence: TTA
ataatgatgtgacagccatg

SEQ ID NO: 268068 - DNA, 20 bp, Artificial Sequence
  Description of Artificial Sequence: Synthetic oligonucleotide
  Target: LAMA2; (-) strand; PAM type: YTN; PAM sequence: TTT
aataatgatgtgacagccat

SEQ ID NO: 268069 - DNA, 20 bp, Artificial Sequence
  Description of Artificial Sequence: Synthetic oligonucleotide
  Target: LAMA2; (-) strand; PAM type: YTN; PAM sequence: CTG
gaatttaataatgatgtgac

SEQ ID NO: 268070 - DNA, 20 bp, Artificial Sequence
  Description of Artificial Sequence: Synthetic oligonucleotide
  Target: LAMA2; (-) strand; PAM type: YTN; PAM sequence: TTC
tggaatttaataatgatgtg

SEQ ID NO: 268071 - DNA, 20 bp, Artificial Sequence
  Description of Artificial Sequence: Synthetic oligonucleotide
  Target: LAMA2; (-) strand; PAM type: YTN; PAM sequence: TTA
atattctggaatttaataat

SEQ ID NO: 268072 - DNA, 20 bp, Artificial Sequence
  Description of Artificial Sequence: Synthetic oligonucleotide
  Target: LAMA2; (-) strand; PAM type: YTN; PAM sequence: TTA
aaaatgcatcacacaaagca

SEQ ID NO: 268073 - DNA, 20 bp, Artificial Sequence
  Description of Artificial Sequence: Synthetic oligonucleotide
  Target: LAMA2; (-) strand; PAM type: YTN; PAM sequence: TTA
tgatggattaaaaatgcatc

SEQ ID NO: 268074 - DNA, 20 bp, Artificial Sequence
  Description of Artificial Sequence: Synthetic oligonucleotide
  Target: LAMA2; (-) strand; PAM type: YTN; PAM sequence: TTT
atgatggattaaaaatgcat

SEQ ID NO: 268075 - DNA, 20 bp, Artificial Sequence
  Description of Artificial Sequence: Synthetic oligonucleotide
  Target: LAMA2; (-) strand; PAM type: YTN; PAM sequence: TTG
gtttatgatggattaaaaat

SEQ ID NO: 268076 - DNA, 20 bp, Artificial Sequence
  Description of Artificial Sequence: Synthetic oligonucleotide
  Target: LAMA2; (-) strand; PAM type: YTN; PAM sequence: TTT
ggtttatgatggattaaaaa

SEQ ID NO: 268077 - DNA, 20 bp, Artificial Sequence
  Description of Artificial Sequence: Synthetic oligonucleotide
  Target: LAMA2; (-) strand; PAM type: YTN; PAM sequence: TTG
tttggtttatgatggattaa

SEQ ID NO: 268078 - DNA, 20 bp, Artificial Sequence
  Description of Artificial Sequence: Synthetic oligonucleotide
  Target: LAMA2; (-) strand; PAM type: YTN; PAM sequence: TTA
ataacagtaaacaaatatat

SEQ ID NO: 268079 - DNA, 20 bp, Artificial Sequence
  Description of Artificial Sequence: Synthetic oligonucleotide
  Target: LAMA2; (-) strand; PAM type: YTN; PAM sequence: CTA
ggacgtcacaatgaaaaacc

SEQ ID NO: 268080 - DNA, 20 bp, Artificial Sequence
  Description of Artificial Sequence: Synthetic oligonucleotide
  Target: LAMA2; (-) strand; PAM type: YTN; PAM sequence: TTA
aggctaggacgtcacaatga

SEQ ID NO: 268081 - DNA, 20 bp, Artificial Sequence
  Description of Artificial Sequence: Synthetic oligonucleotide
  Target: LAMA2; (-) strand; PAM type: YTN; PAM sequence: TTT
aaggctaggacgtcacaatg

SEQ ID NO: 268082 - DNA, 20 bp, Artificial Sequence
  Description of Artificial Sequence: Synthetic oligonucleotide
  Target: LAMA2; (-) strand; PAM type: YTN; PAM sequence: TTA
tttaaggctaggacgtcaca

SEQ ID NO: 268083 - DNA, 20 bp, Artificial Sequence
  Description of Artificial Sequence: Synthetic oligonucleotide
  Target: LAMA2; (-) strand; PAM type: YTN; PAM sequence: CTT
atttaaggctaggacgtcac

SEQ ID NO: 268084 - DNA, 20 bp, Artificial Sequence
  Description of Artificial Sequence: Synthetic oligonucleotide
  Target: LAMA2; (-) strand; PAM type: YTN; PAM sequence: TTC
ttatttaaggctaggacgtc

SEQ ID NO: 268085 - DNA, 20 bp, Artificial Sequence
  Description of Artificial Sequence: Synthetic oligonucleotide
  Target: LAMA2; (-) strand; PAM type: YTN; PAM sequence: CTG
aagttcttatttaaggctag

SEQ ID NO: 268086 - DNA, 20 bp, Artificial Sequence
  Description of Artificial Sequence: Synthetic oligonucleotide
  Target: LAMA2; (-) strand; PAM type: YTN; PAM sequence: TTG
ctgaagttcttatttaaggc

SEQ ID NO: 268087 - DNA, 20 bp, Artificial Sequence
  Description of Artificial Sequence: Synthetic oligonucleotide
  Target: LAMA2; (-) strand; PAM type: YTN; PAM sequence: TTA
ttgctgaagttcttatttaa

SEQ ID NO: 268088 - DNA, 20 bp, Artificial Sequence
  Description of Artificial Sequence: Synthetic oligonucleotide
  Target: LAMA2; (-) strand; PAM type: YTN; PAM sequence: TTA
taattattgctgaagttctt

SEQ ID NO: 268089 - DNA, 20 bp, Artificial Sequence
  Description of Artificial Sequence: Synthetic oligonucleotide
  Target: LAMA2; (-) strand; PAM type: YTN; PAM sequence: TTT
ataattattgctgaagttct

SEQ ID NO: 268090 - DNA, 20 bp, Artificial Sequence
  Description of Artificial Sequence: Synthetic oligonucleotide
  Target: LAMA2; (-) strand; PAM type: YTN; PAM sequence: CTT
tataattattgctgaagttc

SEQ ID NO: 268091 - DNA, 20 bp, Artificial Sequence
  Description of Artificial Sequence: Synthetic oligonucleotide
  Target: LAMA2; (-) strand; PAM type: YTN; PAM sequence: TTA
ggtagtaataaatgccatct

SEQ ID NO: 268092 - DNA, 20 bp, Artificial Sequence
  Description of Artificial Sequence: Synthetic oligonucleotide
  Target: LAMA2; (-) strand; PAM type: YTN; PAM sequence: TTT
aggtagtaataaatgccatc

SEQ ID NO: 268093 - DNA, 20 bp, Artificial Sequence
  Description of Artificial Sequence: Synthetic oligonucleotide
  Target: LAMA2; (-) strand; PAM type: YTN; PAM sequence: TTT
taggtagtaataaatgccat

SEQ ID NO: 268094 - DNA, 20 bp, Artificial Sequence
  Description of Artificial Sequence: Synthetic oligonucleotide
  Target: LAMA2; (-) strand; PAM type: YTN; PAM sequence: CTT
ttaggtagtaataaatgcca

SEQ ID NO: 268095 - DNA, 20 bp, Artificial Sequence
  Description of Artificial Sequence: Synthetic oligonucleotide
  Target: LAMA2; (-) strand; PAM type: YTN; PAM sequence: TTG
ggacatacttttaggtagta

SEQ ID NO: 268096 - DNA, 20 bp, Artificial Sequence
  Description of Artificial Sequence: Synthetic oligonucleotide
  Target: LAMA2; (-) strand; PAM type: YTN; PAM sequence: TTA
ttgggacatacttttaggta

SEQ ID NO: 268097 - DNA, 20 bp, Artificial Sequence
  Description of Artificial Sequence: Synthetic oligonucleotide
  Target: LAMA2; (-) strand; PAM type: YTN; PAM sequence: CTA
tccatgatcaaggttattgg

SEQ ID NO: 268098 - DNA, 20 bp, Artificial Sequence
  Description of Artificial Sequence: Synthetic oligonucleotide
  Target: LAMA2; (-) strand; PAM type: YTN; PAM sequence: TTC
ctatccatgatcaaggttat

SEQ ID NO: 268099 - DNA, 20 bp, Artificial Sequence
  Description of Artificial Sequence: Synthetic oligonucleotide
  Target: LAMA2; (-) strand; PAM type: YTN; PAM sequence: TTA
taaaatagtattcctatcca

SEQ ID NO: 268100 - DNA, 20 bp, Artificial Sequence
  Description of Artificial Sequence: Synthetic oligonucleotide
  Target: LAMA2; (-) strand; PAM type: YTN; PAM sequence: TTT
ataaaatagtattcctatcc

SEQ ID NO: 268101 - DNA, 20 bp, Artificial Sequence
  Description of Artificial Sequence: Synthetic oligonucleotide
  Target: LAMA2; (-) strand; PAM type: YTN; PAM sequence: TTT
tataaaatagtattcctatc

SEQ ID NO: 268102 - DNA, 20 bp, Artificial Sequence
  Description of Artificial Sequence: Synthetic oligonucleotide
  Target: LAMA2; (-) strand; PAM type: YTN; PAM sequence: TTA
ttttataaaatagtattcct

SEQ ID NO: 268103 - DNA, 20 bp, Artificial Sequence
  Description of Artificial Sequence: Synthetic oligonucleotide
  Target: LAMA2; (-) strand; PAM type: YTN; PAM sequence: TTT
attttataaaatagtattcc

SEQ ID NO: 268104 - DNA, 20 bp, Artificial Sequence
  Description of Artificial Sequence: Synthetic oligonucleotide
  Target: LAMA2; (-) strand; PAM type: YTN; PAM sequence: TTA
atccatttattttataaaat

SEQ ID NO: 268105 - DNA, 20 bp, Artificial Sequence
  Description of Artificial Sequence: Synthetic oligonucleotide
  Target: LAMA2; (-) strand; PAM type: YTN; PAM sequence: TTT
aatccatttattttataaaa

SEQ ID NO: 268106 - DNA, 20 bp, Artificial Sequence
  Description of Artificial Sequence: Synthetic oligonucleotide
  Target: LAMA2; (-) strand; PAM type: YTN; PAM sequence: TTG
caaaaaaagtttaatccatt

SEQ ID NO: 268107 - DNA, 20 bp, Artificial Sequence
  Description of Artificial Sequence: Synthetic oligonucleotide
  Target: LAMA2; (-) strand; PAM type: YTN; PAM sequence: CTG
aatcagaaagaaaaggattg

SEQ ID NO: 268108 - DNA, 20 bp, Artificial Sequence
  Description of Artificial Sequence: Synthetic oligonucleotide
  Target: LAMA2; (-) strand; PAM type: YTN; PAM sequence: CTG
aaactgaatcagaaagaaaa

SEQ ID NO: 268109 - DNA, 20 bp, Artificial Sequence
  Description of Artificial Sequence: Synthetic oligonucleotide
  Target: LAMA2; (-) strand; PAM type: YTN; PAM sequence: CTG
cgacacaagaggggctgaaa

SEQ ID NO: 268110 - DNA, 20 bp, Artificial Sequence
  Description of Artificial Sequence: Synthetic oligonucleotide
  Target: LAMA2; (-) strand; PAM type: YTN; PAM sequence: TTC
tgcgacacaagaggggctga

SEQ ID NO: 268111 - DNA, 20 bp, Artificial Sequence
  Description of Artificial Sequence: Synthetic oligonucleotide
  Target: LAMA2; (-) strand; PAM type: YTN; PAM sequence: CTT
ctgcgacacaagaggggctg

SEQ ID NO: 268112 - DNA, 20 bp, Artificial Sequence
  Description of Artificial Sequence: Synthetic oligonucleotide
  Target: LAMA2; (-) strand; PAM type: YTN; PAM sequence: TTC
atatccccgtggacaagccg

SEQ ID NO: 268113 - DNA, 20 bp, Artificial Sequence
  Description of Artificial Sequence: Synthetic oligonucleotide
  Target: LAMA2; (-) strand; PAM type: YTN; PAM sequence: CTT
catatccccgtggacaagcc

SEQ ID NO: 268114 - DNA, 20 bp, Artificial Sequence
  Description of Artificial Sequence: Synthetic oligonucleotide
  Target: LAMA2; (-) strand; PAM type: YTN; PAM sequence: CTG
gccttcatatccccgtggac

SEQ ID NO: 268115 - DNA, 20 bp, Artificial Sequence
  Description of Artificial Sequence: Synthetic oligonucleotide
  Target: LAMA2; (-) strand; PAM type: YTN; PAM sequence: TTC
acagtactggccttcatatc

SEQ ID NO: 268116 - DNA, 20 bp, Artificial Sequence
  Description of Artificial Sequence: Synthetic oligonucleotide
  Target: LAMA2; (-) strand; PAM type: YTN; PAM sequence: TTT
cacagtactggccttcatat

SEQ ID NO: 268117 - DNA, 20 bp, Artificial Sequence
  Description of Artificial Sequence: Synthetic oligonucleotide
  Target: LAMA2; (-) strand; PAM type: YTN; PAM sequence: CTT
tcacagtactggccttcata

SEQ ID NO: 268118 - DNA, 20 bp, Artificial Sequence
  Description of Artificial Sequence: Synthetic oligonucleotide
  Target: LAMA2; (-) strand; PAM type: YTN; PAM sequence: TTG
gtacctttcacagtactggc

SEQ ID NO: 268119 - DNA, 20 bp, Artificial Sequence
  Description of Artificial Sequence: Synthetic oligonucleotide
  Target: LAMA2; (-) strand; PAM type: YTN; PAM sequence: CTG
ttggtacctttcacagtact

SEQ ID NO: 268120 - DNA, 20 bp, Artificial Sequence
  Description of Artificial Sequence: Synthetic oligonucleotide
  Target: LAMA2; (-) strand; PAM type: YTN; PAM sequence: TTC
atggctgttggtacctttca

SEQ ID NO: 268121 - DNA, 20 bp, Artificial Sequence
  Description of Artificial Sequence: Synthetic oligonucleotide
  Target: LAMA2; (-) strand; PAM type: YTN; PAM sequence: TTT
catggctgttggtacctttc

SEQ ID NO: 268122 - DNA, 20 bp, Artificial Sequence
  Description of Artificial Sequence: Synthetic oligonucleotide
  Target: LAMA2; (-) strand; PAM type: YTN; PAM sequence: CTG
tacgtttcatggctgttggt

SEQ ID NO: 268123 - DNA, 20 bp, Artificial Sequence
  Description of Artificial Sequence: Synthetic oligonucleotide
  Target: LAMA2; (-) strand; PAM type: YTN; PAM sequence: CTC
tgtacgtttcatggctgttg

SEQ ID NO: 268124 - DNA, 20 bp, Artificial Sequence
  Description of Artificial Sequence: Synthetic oligonucleotide
  Target: LAMA2; (-) strand; PAM type: YTN; PAM sequence: TTA
ctctgtacgtttcatggctg

SEQ ID NO: 268125 - DNA, 20 bp, Artificial Sequence
  Description of Artificial Sequence: Synthetic oligonucleotide
  Target: LAMA2; (-) strand; PAM type: YTN; PAM sequence: CTA
catatcattactctgtacgt

SEQ ID NO: 268126 - DNA, 20 bp, Artificial Sequence
  Description of Artificial Sequence: Synthetic oligonucleotide
  Target: LAMA2; (-) strand; PAM type: YTN; PAM sequence: TTA
ccatatagtccctacatatc

SEQ ID NO: 268127 - DNA, 20 bp, Artificial Sequence
  Description of Artificial Sequence: Synthetic oligonucleotide
  Target: LAMA2; (-) strand; PAM type: YTN; PAM sequence: TTT
accatatagtccctacatat

SEQ ID NO: 268128 - DNA, 20 bp, Artificial Sequence
  Description of Artificial Sequence: Synthetic oligonucleotide
  Target: LAMA2; (-) strand; PAM type: YTN; PAM sequence: CTT
taccatatagtccctacata

SEQ ID NO: 268129 - DNA, 20 bp, Artificial Sequence
  Description of Artificial Sequence: Synthetic oligonucleotide
  Target: LAMA2; (-) strand; PAM type: YTN; PAM sequence: TTG
tgaccctttaccatatagtc

SEQ ID NO: 268130 - DNA, 20 bp, Artificial Sequence
  Description of Artificial Sequence: Synthetic oligonucleotide
  Target: LAMA2; (-) strand; PAM type: YTN; PAM sequence: CTA
ttgtgaccctttaccatata

SEQ ID NO: 268131 - DNA, 20 bp, Artificial Sequence
  Description of Artificial Sequence: Synthetic oligonucleotide
  Target: LAMA2; (-) strand; PAM type: YTN; PAM sequence: TTC
ctattgtgaccctttaccat

SEQ ID NO: 268132 - DNA, 20 bp, Artificial Sequence
  Description of Artificial Sequence: Synthetic oligonucleotide
  Target: LAMA2; (-) strand; PAM type: YTN; PAM sequence: TTT
cctattgtgaccctttacca

SEQ ID NO: 268133 - DNA, 20 bp, Artificial Sequence
  Description of Artificial Sequence: Synthetic oligonucleotide
  Target: LAMA2; (-) strand; PAM type: YTN; PAM sequence: TTT
tcctattgtgaccctttacc

SEQ ID NO: 268134 - DNA, 20 bp, Artificial Sequence
  Description of Artificial Sequence: Synthetic oligonucleotide
  Target: LAMA2; (-) strand; PAM type: YTN; PAM sequence: TTC
aaataatgaatgttttccta

SEQ ID NO: 268135 - DNA, 20 bp, Artificial Sequence
  Description of Artificial Sequence: Synthetic oligonucleotide
  Target: LAMA2; (-) strand; PAM type: YTN; PAM sequence: CTT
caaataatgaatgttttcct

SEQ ID NO: 268136 - DNA, 20 bp, Artificial Sequence
  Description of Artificial Sequence: Synthetic oligonucleotide
  Target: LAMA2; (-) strand; PAM type: YTN; PAM sequence: TTC
ttcaaataatgaatgttttc

SEQ ID NO: 268137 - DNA, 20 bp, Artificial Sequence
  Description of Artificial Sequence: Synthetic oligonucleotide
  Target: LAMA2; (-) strand; PAM type: YTN; PAM sequence: TTG
aagttcttcaaataatgaat

SEQ ID NO: 268138 - DNA, 20 bp, Artificial Sequence
  Description of Artificial Sequence: Synthetic oligonucleotide
  Target: LAMA2; (-) strand; PAM type: YTN; PAM sequence: CTA
aaggatatgcaaatattgaa

SEQ ID NO: 268139 - DNA, 20 bp, Artificial Sequence
  Description of Artificial Sequence: Synthetic oligonucleotide
  Target: LAMA2; (-) strand; PAM type: YTN; PAM sequence: TTC
taaaggatatgcaaatattg

SEQ ID NO: 268140 - DNA, 20 bp, Artificial Sequence
  Description of Artificial Sequence: Synthetic oligonucleotide
  Target: LAMA2; (-) strand; PAM type: YTN; PAM sequence: CTT
ctaaaggatatgcaaatatt

SEQ ID NO: 268141 - DNA, 20 bp, Artificial Sequence
  Description of Artificial Sequence: Synthetic oligonucleotide
  Target: LAMA2; (-) strand; PAM type: YTN; PAM sequence: TTA
aacttctaaaggatatgcaa

SEQ ID NO: 268142 - DNA, 20 bp, Artificial Sequence
  Description of Artificial Sequence: Synthetic oligonucleotide
  Target: LAMA2; (-) strand; PAM type: YTN; PAM sequence: TTT
aaacttctaaaggatatgca

SEQ ID NO: 268143 - DNA, 20 bp, Artificial Sequence
  Description of Artificial Sequence: Synthetic oligonucleotide
  Target: LAMA2; (-) strand; PAM type: YTN; PAM sequence: TTG
taatttaaacttctaaagga

SEQ ID NO: 268144 - DNA, 20 bp, Artificial Sequence
  Description of Artificial Sequence: Synthetic oligonucleotide
  Target: LAMA2; (-) strand; PAM type: YTN; PAM sequence: TTG
aaagcattgtaatttaaact

SEQ ID NO: 268145 - DNA, 20 bp, Artificial Sequence
  Description of Artificial Sequence: Synthetic oligonucleotide
  Target: LAMA2; (-) strand; PAM type: YTN; PAM sequence: TTT
gaaagcattgtaatttaaac

SEQ ID NO: 268146 - DNA, 20 bp, Artificial Sequence
  Description of Artificial Sequence: Synthetic oligonucleotide
  Target: LAMA2; (-) strand; PAM type: YTN; PAM sequence: TTT
tgaaagcattgtaatttaaa

SEQ ID NO: 268147 - DNA, 20 bp, Artificial Sequence
  Description of Artificial Sequence: Synthetic oligonucleotide
  Target: LAMA2; (-) strand; PAM type: YTN; PAM sequence: CTA
agatacacaagtggttttga

SEQ ID NO: 268148 - DNA, 20 bp, Artificial Sequence
  Description of Artificial Sequence: Synthetic oligonucleotide
  Target: LAMA2; (-) strand; PAM type: YTN; PAM sequence: TTC
taagatacacaagtggtttt

SEQ ID NO: 268149 - DNA, 20 bp, Artificial Sequence
  Description of Artificial Sequence: Synthetic oligonucleotide
  Target: LAMA2; (-) strand; PAM type: YTN; PAM sequence: TTG
gacaaattctaagatacaca

SEQ ID NO: 268150 - DNA, 20 bp, Artificial Sequence
  Description of Artificial Sequence: Synthetic oligonucleotide
  Target: LAMA2; (-) strand; PAM type: YTN; PAM sequence: TTT
ggacaaattctaagatacac

SEQ ID NO: 268151 - DNA, 20 bp, Artificial Sequence
  Description of Artificial Sequence: Synthetic oligonucleotide
  Target: LAMA2; (-) strand; PAM type: YTN; PAM sequence: CTT
tggacaaattctaagataca

SEQ ID NO: 268152 - DNA, 20 bp, Artificial Sequence
  Description of Artificial Sequence: Synthetic oligonucleotide
  Target: LAMA2; (-) strand; PAM type: YTN; PAM sequence: TTC
tttggacaaattctaagata

SEQ ID NO: 268153 - DNA, 20 bp, Artificial Sequence
  Description of Artificial Sequence: Synthetic oligonucleotide
  Target: LAMA2; (-) strand; PAM type: YTN; PAM sequence: TTT
ctttggacaaattctaagat

SEQ ID NO: 268154 - DNA, 20 bp, Artificial Sequence
  Description of Artificial Sequence: Synthetic oligonucleotide
  Target: LAMA2; (-) strand; PAM type: YTN; PAM sequence: CTT
tctttggacaaattctaaga

SEQ ID NO: 268155 - DNA, 20 bp, Artificial Sequence
  Description of Artificial Sequence: Synthetic oligonucleotide
  Target: LAMA2; (-) strand; PAM type: YTN; PAM sequence: CTA
aacatacggtggaaataaac

SEQ ID NO: 268156 - DNA, 20 bp, Artificial Sequence
  Description of Artificial Sequence: Synthetic oligonucleotide
  Target: LAMA2; (-) strand; PAM type: YTN; PAM sequence: TTG
ataaagtctaaacatacggt

SEQ ID NO: 268157 - DNA, 20 bp, Artificial Sequence
  Description of Artificial Sequence: Synthetic oligonucleotide
  Target: LAMA2; (-) strand; PAM type: YTN; PAM sequence: TTT
gataaagtctaaacatacgg

SEQ ID NO: 268158 - DNA, 20 bp, Artificial Sequence
  Description of Artificial Sequence: Synthetic oligonucleotide
  Target: LAMA2; (-) strand; PAM type: YTN; PAM sequence: CTT
tgataaagtctaaacatacg

SEQ ID NO: 268159 - DNA, 20 bp, Artificial Sequence
  Description of Artificial Sequence: Synthetic oligonucleotide
  Target: LAMA2; (-) strand; PAM type: YTN; PAM sequence: TTG
gaatctttgataaagtctaa

SEQ ID NO: 268160 - DNA, 20 bp, Artificial Sequence
  Description of Artificial Sequence: Synthetic oligonucleotide
  Target: LAMA2; (-) strand; PAM type: YTN; PAM sequence: TTT
ggaatctttgataaagtcta

SEQ ID NO: 268161 - DNA, 20 bp, Artificial Sequence
  Description of Artificial Sequence: Synthetic oligonucleotide
  Target: LAMA2; (-) strand; PAM type: YTN; PAM sequence: TTG
taaatagtttggaatctttg

SEQ ID NO: 268162 - DNA, 20 bp, Artificial Sequence
  Description of Artificial Sequence: Synthetic oligonucleotide
  Target: LAMA2; (-) strand; PAM type: YTN; PAM sequence: TTA
gataattgtaaatagtttgg

SEQ ID NO: 268163 - DNA, 20 bp, Artificial Sequence
  Description of Artificial Sequence: Synthetic oligonucleotide
  Target: LAMA2; (-) strand; PAM type: YTN; PAM sequence: CTA
aagcataagttagataattg

SEQ ID NO: 268164 - DNA, 20 bp, Artificial Sequence
  Description of Artificial Sequence: Synthetic oligonucleotide
  Target: LAMA2; (-) strand; PAM type: YTN; PAM sequence: TTA
tatatatatatatactaaag

SEQ ID NO: 268165 - DNA, 20 bp, Artificial Sequence
  Description of Artificial Sequence: Synthetic oligonucleotide
  Target: LAMA2; (-) strand; PAM type: YTN; PAM sequence: TTA
catataaaattatatatata

SEQ ID NO: 268166 - DNA, 20 bp, Artificial Sequence
  Description of Artificial Sequence: Synthetic oligonucleotide
  Target: LAMA2; (-) strand; PAM type: YTN; PAM sequence: TTT
acatataaaattatatatat

SEQ ID NO: 268167 - DNA, 20 bp, Artificial Sequence
  Description of Artificial Sequence: Synthetic oligonucleotide
  Target: LAMA2; (-) strand; PAM type: YTN; PAM sequence: TTA
tatttacatataaaattata

SEQ ID NO: 268168 - DNA, 20 bp, Artificial Sequence
  Description of Artificial Sequence: Synthetic oligonucleotide
  Target: LAMA2; (-) strand; PAM type: YTN; PAM sequence: TTA
tgaaatgttatatttacata

SEQ ID NO: 268169 - DNA, 20 bp, Artificial Sequence
  Description of Artificial Sequence: Synthetic oligonucleotide
  Target: LAMA2; (-) strand; PAM type: YTN; PAM sequence: CTT
atgaaatgttatatttacat

SEQ ID NO: 268170 - DNA, 20 bp, Artificial Sequence
  Description of Artificial Sequence: Synthetic oligonucleotide
  Target: LAMA2; (-) strand; PAM type: YTN; PAM sequence: TTC
ttatgaaatgttatatttac

SEQ ID NO: 268171 - DNA, 20 bp, Artificial Sequence
  Description of Artificial Sequence: Synthetic oligonucleotide
  Target: LAMA2; (-) strand; PAM type: YTN; PAM sequence: TTA
ttcttatgaaatgttatatt

SEQ ID NO: 268172 - DNA, 20 bp, Artificial Sequence
  Description of Artificial Sequence: Synthetic oligonucleotide
  Target: LAMA2; (-) strand; PAM type: YTN; PAM sequence: TTT
attcttatgaaatgttatat

SEQ ID NO: 268173 - DNA, 20 bp, Artificial Sequence
  Description of Artificial Sequence: Synthetic oligonucleotide
  Target: LAMA2; (-) strand; PAM type: YTN; PAM sequence: TTG
atttattcttatgaaatgtt

SEQ ID NO: 268174 - DNA, 20 bp, Artificial Sequence
  Description of Artificial Sequence: Synthetic oligonucleotide
  Target: LAMA2; (-) strand; PAM type: YTN; PAM sequence: TTG
aaaattgatttattcttatg

SEQ ID NO: 268175 - DNA, 20 bp, Artificial Sequence
  Description of Artificial Sequence: Synthetic oligonucleotide
  Target: LAMA2; (-) strand; PAM type: YTN; PAM sequence: TTT
gaaaattgatttattcttat

SEQ ID NO: 268176 - DNA, 20 bp, Artificial Sequence
  Description of Artificial Sequence: Synthetic oligonucleotide
  Target: LAMA2; (-) strand; PAM type: YTN; PAM sequence: TTT
tgaaaattgatttattctta

SEQ ID NO: 268177 - DNA, 20 bp, Artificial Sequence
  Description of Artificial Sequence: Synthetic oligonucleotide
  Target: LAMA2; (-) strand; PAM type: YTN; PAM sequence: CTT
ttgaaaattgatttattctt

SEQ ID NO: 268178 - DNA, 20 bp, Artificial Sequence
  Description of Artificial Sequence: Synthetic oligonucleotide
  Target: LAMA2; (-) strand; PAM type: YTN; PAM sequence: CTA
agcttttgaaaattgattta

SEQ ID NO: 268179 - DNA, 20 bp, Artificial Sequence
  Description of Artificial Sequence: Synthetic oligonucleotide
  Target: LAMA2; (-) strand; PAM type: YTN; PAM sequence: CTG
ctaagcttttgaaaattgat

SEQ ID NO: 268180 - DNA, 20 bp, Artificial Sequence
  Description of Artificial Sequence: Synthetic oligonucleotide
  Target: LAMA2; (-) strand; PAM type: YTN; PAM sequence: CTA
ctgctaagcttttgaaaatt

SEQ ID NO: 268181 - DNA, 20 bp, Artificial Sequence
  Description of Artificial Sequence: Synthetic oligonucleotide
  Target: LAMA2; (-) strand; PAM type: YTN; PAM sequence: TTA
gtagtaactactgctaagct

SEQ ID NO: 268182 - DNA, 20 bp, Artificial Sequence
  Description of Artificial Sequence: Synthetic oligonucleotide
  Target: LAMA2; (-) strand; PAM type: YTN; PAM sequence: TTA
ttagtagtaactactgctaa

SEQ ID NO: 268183 - DNA, 20 bp, Artificial Sequence
  Description of Artificial Sequence: Synthetic oligonucleotide
  Target: LAMA2; (-) strand; PAM type: YTN; PAM sequence: CTT
attagtagtaactactgcta

SEQ ID NO: 268184 - DNA, 20 bp, Artificial Sequence
  Description of Artificial Sequence: Synthetic oligonucleotide
  Target: LAMA2; (-) strand; PAM type: YTN; PAM sequence: TTC
ttattagtagtaactactgc

SEQ ID NO: 268185 - DNA, 20 bp, Artificial Sequence
  Description of Artificial Sequence: Synthetic oligonucleotide
  Target: LAMA2; (-) strand; PAM type: YTN; PAM sequence: TTT
cttattagtagtaactactg

SEQ ID NO: 268186 - DNA, 20 bp, Artificial Sequence
  Description of Artificial Sequence: Synthetic oligonucleotide
  Target: LAMA2; (-) strand; PAM type: YTN; PAM sequence: TTA
aaataagaaaagtgtagcca

SEQ ID NO: 268187 - DNA, 20 bp, Artificial Sequence
  Description of Artificial Sequence: Synthetic oligonucleotide
  Target: LAMA2; (-) strand; PAM type: YTN; PAM sequence: TTC
cagtgcattaaaataagaaa

SEQ ID NO: 268188 - DNA, 20 bp, Artificial Sequence
  Description of Artificial Sequence: Synthetic oligonucleotide
  Target: LAMA2; (-) strand; PAM type: YTN; PAM sequence: TTT
ccagtgcattaaaataagaa

SEQ ID NO: 268189 - DNA, 20 bp, Artificial Sequence
  Description of Artificial Sequence: Synthetic oligonucleotide
  Target: LAMA2; (-) strand; PAM type: YTN; PAM sequence: TTT
tccagtgcattaaaataaga

SEQ ID NO: 268190 - DNA, 20 bp, Artificial Sequence
  Description of Artificial Sequence: Synthetic oligonucleotide
  Target: LAMA2; (-) strand; PAM type: YTN; PAM sequence: TTC
cagacaatattttccagtgc

SEQ ID NO: 268191 - DNA, 20 bp, Artificial Sequence
  Description of Artificial Sequence: Synthetic oligonucleotide
  Target: LAMA2; (-) strand; PAM type: YTN; PAM sequence: CTT
ccagacaatattttccagtg

SEQ ID NO: 268192 - DNA, 20 bp, Artificial Sequence
  Description of Artificial Sequence: Synthetic oligonucleotide
  Target: LAMA2; (-) strand; PAM type: YTN; PAM sequence: TTA
cttccagacaatattttcca

SEQ ID NO: 268193 - DNA, 20 bp, Artificial Sequence
  Description of Artificial Sequence: Synthetic oligonucleotide
  Target: LAMA2; (-) strand; PAM type: YTN; PAM sequence: TTC
agttacttccagacaatatt

SEQ ID NO: 268194 - DNA, 20 bp, Artificial Sequence
  Description of Artificial Sequence: Synthetic oligonucleotide
  Target: LAMA2; (-) strand; PAM type: YTN; PAM sequence: TTC
agaacaatgacgtgaattca

SEQ ID NO: 268195 - DNA, 20 bp, Artificial Sequence
  Description of Artificial Sequence: Synthetic oligonucleotide
  Target: LAMA2; (-) strand; PAM type: YTN; PAM sequence: CTG
gtgtagtcatagtgttcaga

SEQ ID NO: 268196 - DNA, 20 bp, Artificial Sequence
  Description of Artificial Sequence: Synthetic oligonucleotide
  Target: LAMA2; (-) strand; PAM type: YTN; PAM sequence: TTG
ctggtgtagtcatagtgttc

SEQ ID NO: 268197 - DNA, 20 bp, Artificial Sequence
  Description of Artificial Sequence: Synthetic oligonucleotide
  Target: LAMA2; (-) strand; PAM type: YTN; PAM sequence: CTT
gctggtgtagtcatagtgtt

SEQ ID NO: 268198 - DNA, 20 bp, Artificial Sequence
  Description of Artificial Sequence: Synthetic oligonucleotide
  Target: LAMA2; (-) strand; PAM type: YTN; PAM sequence: TTA
tgtatacacttgctggtgta

SEQ ID NO: 268199 - DNA, 20 bp, Artificial Sequence
  Description of Artificial Sequence: Synthetic oligonucleotide
  Target: LAMA2; (-) strand; PAM type: YTN; PAM sequence: TTG
agttatgtatacacttgctg

SEQ ID NO: 268200 - DNA, 20 bp, Artificial Sequence
  Description of Artificial Sequence: Synthetic oligonucleotide
  Target: LAMA2; (-) strand; PAM type: YTN; PAM sequence: TTT
gagttatgtatacacttgct

SEQ ID NO: 268201 - DNA, 20 bp, Artificial Sequence
  Description of Artificial Sequence: Synthetic oligonucleotide
  Target: LAMA2; (-) strand; PAM type: YTN; PAM sequence: TTT
tgagttatgtatacacttgc

SEQ ID NO: 268202 - DNA, 20 bp, Artificial Sequence
  Description of Artificial Sequence: Synthetic oligonucleotide
  Target: LAMA2; (-) strand; PAM type: YTN; PAM sequence: TTA
tattttgagttatgtataca

SEQ ID NO: 268203 - DNA, 20 bp, Artificial Sequence
  Description of Artificial Sequence: Synthetic oligonucleotide
  Target: LAMA2; (-) strand; PAM type: YTN; PAM sequence: TTT
atattttgagttatgtatac

SEQ ID NO: 268204 - DNA, 20 bp, Artificial Sequence
  Description of Artificial Sequence: Synthetic oligonucleotide
  Target: LAMA2; (-) strand; PAM type: YTN; PAM sequence: CTA
tttatattttgagttatgta

SEQ ID NO: 268205 - DNA, 20 bp, Artificial Sequence
  Description of Artificial Sequence: Synthetic oligonucleotide
  Target: LAMA2; (-) strand; PAM type: YTN; PAM sequence: TTG
atactatttatattttgagt

SEQ ID NO: 268206 - DNA, 20 bp, Artificial Sequence
  Description of Artificial Sequence: Synthetic oligonucleotide
  Target: LAMA2; (-) strand; PAM type: YTN; PAM sequence: CTT
gatactatttatattttgag

SEQ ID NO: 268207 - DNA, 20 bp, Artificial Sequence
  Description of Artificial Sequence: Synthetic oligonucleotide
  Target: LAMA2; (-) strand; PAM type: YTN; PAM sequence: TTC
ttgatactatttatattttg

SEQ ID NO: 268208 - DNA, 20 bp, Artificial Sequence
  Description of Artificial Sequence: Synthetic oligonucleotide
  Target: LAMA2; (-) strand; PAM type: YTN; PAM sequence: TTA
aaaattcttgatactattta

SEQ ID NO: 268209 - DNA, 20 bp, Artificial Sequence
  Description of Artificial Sequence: Synthetic oligonucleotide
  Target: LAMA2; (-) strand; PAM type: YTN; PAM sequence: CTA
attaaaaattcttgatacta

SEQ ID NO: 268210 - DNA, 20 bp, Artificial Sequence
  Description of Artificial Sequence: Synthetic oligonucleotide
  Target: LAMA2; (-) strand; PAM type: YTN; PAM sequence: CTG
ggtactaattaaaaattctt

SEQ ID NO: 268211 - DNA, 20 bp, Artificial Sequence
  Description of Artificial Sequence: Synthetic oligonucleotide
  Target: LAMA2; (-) strand; PAM type: YTN; PAM sequence: TTG
tctgggtactaattaaaaat

SEQ ID NO: 268212 - DNA, 20 bp, Artificial Sequence
  Description of Artificial Sequence: Synthetic oligonucleotide
  Target: LAMA2; (-) strand; PAM type: YTN; PAM sequence: TTA
ttgtctgggtactaattaaa

SEQ ID NO: 268213 - DNA, 20 bp, Artificial Sequence
  Description of Artificial Sequence: Synthetic oligonucleotide
  Target: LAMA2; (-) strand; PAM type: YTN; PAM sequence: TTT
attgtctgggtactaattaa

SEQ ID NO: 268214 - DNA, 20 bp, Artificial Sequence
  Description of Artificial Sequence: Synthetic oligonucleotide
  Target: LAMA2; (-) strand; PAM type: YTN; PAM sequence: CTT
tattgtctgggtactaatta

SEQ ID NO: 268215 - DNA, 20 bp, Artificial Sequence
  Description of Artificial Sequence: Synthetic oligonucleotide
  Target: LAMA2; (-) strand; PAM type: YTN; PAM sequence: CTG
aataacaaatactttattgt

SEQ ID NO: 268216 - DNA, 20 bp, Artificial Sequence
  Description of Artificial Sequence: Synthetic oligonucleotide
  Target: LAMA2; (-) strand; PAM type: YTN; PAM sequence: TTG
aaaaggaaaactgaataaca

SEQ ID NO: 268217 - DNA, 20 bp, Artificial Sequence
  Description of Artificial Sequence: Synthetic oligonucleotide
  Target: LAMA2; (-) strand; PAM type: YTN; PAM sequence: CTA
ttgaaaaggaaaactgaata

SEQ ID NO: 268218 - DNA, 20 bp, Artificial Sequence
  Description of Artificial Sequence: Synthetic oligonucleotide
  Target: LAMA2; (-) strand; PAM type: YTN; PAM sequence: TTG
cctattgaaaaggaaaactg

SEQ ID NO: 268219 - DNA, 20 bp, Artificial Sequence
  Description of Artificial Sequence: Synthetic oligonucleotide
  Target: LAMA2; (-) strand; PAM type: YTN; PAM sequence: TTT
gcctattgaaaaggaaaact

SEQ ID NO: 268220 - DNA, 20 bp, Artificial Sequence
  Description of Artificial Sequence: Synthetic oligonucleotide
  Target: LAMA2; (-) strand; PAM type: YTN; PAM sequence: TTG
tttgcctattgaaaaggaaa

SEQ ID NO: 268221 - DNA, 20 bp, Artificial Sequence
  Description of Artificial Sequence: Synthetic oligonucleotide
  Target: LAMA2; (-) strand; PAM type: YTN; PAM sequence: TTA
aataatattgtttgcctatt

SEQ ID NO: 268222 - DNA, 20 bp, Artificial Sequence
  Description of Artificial Sequence: Synthetic oligonucleotide
  Target: LAMA2; (-) strand; PAM type: YTN; PAM sequence: TTT
aaataatattgtttgcctat

SEQ ID NO: 268223 - DNA, 20 bp, Artificial Sequence
  Description of Artificial Sequence: Synthetic oligonucleotide
  Target: LAMA2; (-) strand; PAM type: YTN; PAM sequence: TTC
ataagcaatatggtaagaga

SEQ ID NO: 268224 - DNA, 20 bp, Artificial Sequence
  Description of Artificial Sequence: Synthetic oligonucleotide
  Target: LAMA2; (-) strand; PAM type: YTN; PAM sequence: TTT
cataagcaatatggtaagag

SEQ ID NO: 268225 - DNA, 20 bp, Artificial Sequence
  Description of Artificial Sequence: Synthetic oligonucleotide
  Target: LAMA2; (-) strand; PAM type: YTN; PAM sequence: TTA
tgagatttcataagcaatat

SEQ ID NO: 268226 - DNA, 20 bp, Artificial Sequence
  Description of Artificial Sequence: Synthetic oligonucleotide
  Target: LAMA2; (-) strand; PAM type: YTN; PAM sequence: CTG
tatacatgcattatgagatt

SEQ ID NO: 268227 - DNA, 20 bp, Artificial Sequence
  Description of Artificial Sequence: Synthetic oligonucleotide
  Target: LAMA2; (-) strand; PAM type: YTN; PAM sequence: TTA
acagctgtatacatgcatta

SEQ ID NO: 268228 - DNA, 20 bp, Artificial Sequence
  Description of Artificial Sequence: Synthetic oligonucleotide
  Target: LAMA2; (-) strand; PAM type: YTN; PAM sequence: TTT
aacagctgtatacatgcatt

SEQ ID NO: 268229 - DNA, 20 bp, Artificial Sequence
  Description of Artificial Sequence: Synthetic oligonucleotide
  Target: LAMA2; (-) strand; PAM type: YTN; PAM sequence: TTC
aatttaacagctgtatacat

SEQ ID NO: 268230 - DNA, 20 bp, Artificial Sequence
  Description of Artificial Sequence: Synthetic oligonucleotide
  Target: LAMA2; (-) strand; PAM type: YTN; PAM sequence: CTG
agaattcaatttaacagctg

SEQ ID NO: 268231 - DNA, 20 bp, Artificial Sequence
  Description of Artificial Sequence: Synthetic oligonucleotide
  Target: LAMA2; (-) strand; PAM type: YTN; PAM sequence: TTA
cactgagaattcaatttaac

SEQ ID NO: 268232 - DNA, 20 bp, Artificial Sequence
  Description of Artificial Sequence: Synthetic oligonucleotide
  Target: LAMA2; (-) strand; PAM type: YTN; PAM sequence: TTG
gattacactgagaattcaat

SEQ ID NO: 268233 - DNA, 20 bp, Artificial Sequence
  Description of Artificial Sequence: Synthetic oligonucleotide
  Target: LAMA2; (-) strand; PAM type: YTN; PAM sequence: TTT
ggattacactgagaattcaa

SEQ ID NO: 268234 - DNA, 20 bp, Artificial Sequence
  Description of Artificial Sequence: Synthetic oligonucleotide
  Target: LAMA2; (-) strand; PAM type: YTN; PAM sequence: TTA
ccatttggattacactgaga

SEQ ID NO: 268235 - DNA, 20 bp, Artificial Sequence
  Description of Artificial Sequence: Synthetic oligonucleotide
  Target: LAMA2; (-) strand; PAM type: YTN; PAM sequence: TTT
accatttggattacactgag

SEQ ID NO: 268236 - DNA, 20 bp, Artificial Sequence
  Description of Artificial Sequence: Synthetic oligonucleotide
  Target: LAMA2; (-) strand; PAM type: YTN; PAM sequence: TTA
atttaccatttggattacac

SEQ ID NO: 268237 - DNA, 20 bp, Artificial Sequence
  Description of Artificial Sequence: Synthetic oligonucleotide
  Target: LAMA2; (-) strand; PAM type: YTN; PAM sequence: CTT
aatttaccatttggattaca

SEQ ID NO: 268238 - DNA, 20 bp, Artificial Sequence
  Description of Artificial Sequence: Synthetic oligonucleotide
  Target: LAMA2; (-) strand; PAM type: YTN; PAM sequence: CTC
cttaatttaccatttggatt

SEQ ID NO: 268239 - DNA, 20 bp, Artificial Sequence
  Description of Artificial Sequence: Synthetic oligonucleotide
  Target: LAMA2; (-) strand; PAM type: YTN; PAM sequence: CTG
tactccttaatttaccattt

SEQ ID NO: 268240 - DNA, 20 bp, Artificial Sequence
  Description of Artificial Sequence: Synthetic oligonucleotide
  Target: LAMA2; (-) strand; PAM type: YTN; PAM sequence: TTG
gaactgtactccttaattta

SEQ ID NO: 268241 - DNA, 20 bp, Artificial Sequence
  Description of Artificial Sequence: Synthetic oligonucleotide
  Target: LAMA2; (-) strand; PAM type: YTN; PAM sequence: TTT
ggaactgtactccttaattt

SEQ ID NO: 268242 - DNA, 20 bp, Artificial Sequence
  Description of Artificial Sequence: Synthetic oligonucleotide
  Target: LAMA2; (-) strand; PAM type: YTN; PAM sequence: CTA
gacaatcagtttggaactgt

SEQ ID NO: 268243 - DNA, 20 bp, Artificial Sequence
  Description of Artificial Sequence: Synthetic oligonucleotide
  Target: LAMA2; (-) strand; PAM type: YTN; PAM sequence: TTC
tagacaatcagtttggaact

SEQ ID NO: 268244 - DNA, 20 bp, Artificial Sequence
  Description of Artificial Sequence: Synthetic oligonucleotide
  Target: LAMA2; (-) strand; PAM type: YTN; PAM sequence: TTT
ctagacaatcagtttggaac

SEQ ID NO: 268245 - DNA, 20 bp, Artificial Sequence
  Description of Artificial Sequence: Synthetic oligonucleotide
  Target: LAMA2; (-) strand; PAM type: YTN; PAM sequence: TTT
tctagacaatcagtttggaa

SEQ ID NO: 268246 - DNA, 20 bp, Artificial Sequence
  Description of Artificial Sequence: Synthetic oligonucleotide
  Target: LAMA2; (-) strand; PAM type: YTN; PAM sequence: CTT
ttctagacaatcagtttgga

SEQ ID NO: 268247 - DNA, 20 bp, Artificial Sequence
  Description of Artificial Sequence: Synthetic oligonucleotide
  Target: LAMA2; (-) strand; PAM type: YTN; PAM sequence: TTG
caacttttctagacaatcag

SEQ ID NO: 268248 - DNA, 20 bp, Artificial Sequence
  Description of Artificial Sequence: Synthetic oligonucleotide
  Target: LAMA2; (-) strand; PAM type: YTN; PAM sequence: TTA
attgcaacttttctagacaa

SEQ ID NO: 268249 - DNA, 20 bp, Artificial Sequence
  Description of Artificial Sequence: Synthetic oligonucleotide
  Target: LAMA2; (-) strand; PAM type: YTN; PAM sequence: CTG
gaagatattaattgcaactt

SEQ ID NO: 268250 - DNA, 20 bp, Artificial Sequence
  Description of Artificial Sequence: Synthetic oligonucleotide
  Target: LAMA2; (-) strand; PAM type: YTN; PAM sequence: TTA
cagaaaatatatatctggaa

SEQ ID NO: 268251 - DNA, 20 bp, Artificial Sequence
  Description of Artificial Sequence: Synthetic oligonucleotide
  Target: LAMA2; (-) strand; PAM type: YTN; PAM sequence: CTT
acagaaaatatatatctgga

SEQ ID NO: 268252 - DNA, 20 bp, Artificial Sequence
  Description of Artificial Sequence: Synthetic oligonucleotide
  Target: LAMA2; (-) strand; PAM type: YTN; PAM sequence: CTG
atcttacagaaaatatatat

SEQ ID NO: 268253 - DNA, 20 bp, Artificial Sequence
  Description of Artificial Sequence: Synthetic oligonucleotide
  Target: LAMA2; (-) strand; PAM type: YTN; PAM sequence: TTG
aatatccaggatactgatct

SEQ ID NO: 268254 - DNA, 20 bp, Artificial Sequence
  Description of Artificial Sequence: Synthetic oligonucleotide
  Target: LAMA2; (-) strand; PAM type: YTN; PAM sequence: TTT
gaatatccaggatactgatc

SEQ ID NO: 268255 - DNA, 20 bp, Artificial Sequence
  Description of Artificial Sequence: Synthetic oligonucleotide
  Target: LAMA2; (-) strand; PAM type: YTN; PAM sequence: CTA
aaatataccaaaagtggtgg

SEQ ID NO: 268256 - DNA, 20 bp, Artificial Sequence
  Description of Artificial Sequence: Synthetic oligonucleotide
  Target: LAMA2; (-) strand; PAM type: YTN; PAM sequence: TTA
aagataatatctaaaatata

SEQ ID NO: 268257 - DNA, 20 bp, Artificial Sequence
  Description of Artificial Sequence: Synthetic oligonucleotide
  Target: LAMA2; (-) strand; PAM type: YTN; PAM sequence: TTA
cattaaagataatatctaaa

SEQ ID NO: 268258 - DNA, 20 bp, Artificial Sequence
  Description of Artificial Sequence: Synthetic oligonucleotide
  Target: LAMA2; (-) strand; PAM type: YTN; PAM sequence: CTG
ttacattaaagataatatct

SEQ ID NO: 268259 - DNA, 20 bp, Artificial Sequence
  Description of Artificial Sequence: Synthetic oligonucleotide
  Target: LAMA2; (-) strand; PAM type: YTN; PAM sequence: CTC
tgttacattaaagataatat

SEQ ID NO: 268260 - DNA, 20 bp, Artificial Sequence
  Description of Artificial Sequence: Synthetic oligonucleotide
  Target: LAMA2; (-) strand; PAM type: YTN; PAM sequence: CTC
tctgttacattaaagataat

SEQ ID NO: 268261 - DNA, 20 bp, Artificial Sequence
  Description of Artificial Sequence: Synthetic oligonucleotide
  Target: LAMA2; (-) strand; PAM type: YTN; PAM sequence: TTA
gtaactctctgttacattaa

SEQ ID NO: 268262 - DNA, 20 bp, Artificial Sequence
  Description of Artificial Sequence: Synthetic oligonucleotide
  Target: LAMA2; (-) strand; PAM type: YTN; PAM sequence: TTA
acattagtaactctctgtta

SEQ ID NO: 268263 - DNA, 20 bp, Artificial Sequence
  Description of Artificial Sequence: Synthetic oligonucleotide
  Target: LAMA2; (-) strand; PAM type: YTN; PAM sequence: TTA
gtagttaacattagtaactc

SEQ ID NO: 268264 - DNA, 20 bp, Artificial Sequence
  Description of Artificial Sequence: Synthetic oligonucleotide
  Target: LAMA2; (-) strand; PAM type: YTN; PAM sequence: CTA
tcatgtgtgtataatgttag

SEQ ID NO: 268265 - DNA, 20 bp, Artificial Sequence
  Description of Artificial Sequence: Synthetic oligonucleotide
  Target: LAMA2; (-) strand; PAM type: YTN; PAM sequence: CTA
aaactatcatgtgtgtataa

SEQ ID NO: 268266 - DNA, 20 bp, Artificial Sequence
  Description of Artificial Sequence: Synthetic oligonucleotide
  Target: LAMA2; (-) strand; PAM type: YTN; PAM sequence: TTA
tgctaaaactatcatgtgtg

SEQ ID NO: 268267 - DNA, 20 bp, Artificial Sequence
  Description of Artificial Sequence: Synthetic oligonucleotide
  Target: LAMA2; (-) strand; PAM type: YTN; PAM sequence: CTA
tcaattatgctaaaactatc

SEQ ID NO: 268268 - DNA, 20 bp, Artificial Sequence
  Description of Artificial Sequence: Synthetic oligonucleotide
  Target: LAMA2; (-) strand; PAM type: YTN; PAM sequence: CTG
ctatcaattatgctaaaact

SEQ ID NO: 268269 - DNA, 20 bp, Artificial Sequence
  Description of Artificial Sequence: Synthetic oligonucleotide
  Target: LAMA2; (-) strand; PAM type: YTN; PAM sequence: TTA
tactgctatcaattatgcta

SEQ ID NO: 268270 - DNA, 20 bp, Artificial Sequence
  Description of Artificial Sequence: Synthetic oligonucleotide
  Target: LAMA2; (-) strand; PAM type: YTN; PAM sequence: TTT
atactgctatcaattatgct

SEQ ID NO: 268271 - DNA, 20 bp, Artificial Sequence
  Description of Artificial Sequence: Synthetic oligonucleotide
  Target: LAMA2; (-) strand; PAM type: YTN; PAM sequence: TTT
tatactgctatcaattatgc

SEQ ID NO: 268272 - DNA, 20 bp, Artificial Sequence
  Description of Artificial Sequence: Synthetic oligonucleotide
  Target: LAMA2; (-) strand; PAM type: YTN; PAM sequence: CTT
ttatactgctatcaattatg

SEQ ID NO: 268273 - DNA, 20 bp, Artificial Sequence
  Description of Artificial Sequence: Synthetic oligonucleotide
  Target: LAMA2; (-) strand; PAM type: YTN; PAM sequence: CTA
aaacttttatactgctatca

SEQ ID NO: 268274 - DNA, 20 bp, Artificial Sequence
  Description of Artificial Sequence: Synthetic oligonucleotide
  Target: LAMA2; (-) strand; PAM type: YTN; PAM sequence: TTC
taaaacttttatactgctat

SEQ ID NO: 268275 - DNA, 20 bp, Artificial Sequence
  Description of Artificial Sequence: Synthetic oligonucleotide
  Target: LAMA2; (-) strand; PAM type: YTN; PAM sequence: TTT
ctaaaacttttatactgcta

SEQ ID NO: 268276 - DNA, 20 bp, Artificial Sequence
  Description of Artificial Sequence: Synthetic oligonucleotide
  Target: LAMA2; (-) strand; PAM type: YTN; PAM sequence: CTT
tctaaaacttttatactgct

SEQ ID NO: 268277 - DNA, 20 bp, Artificial Sequence
  Description of Artificial Sequence: Synthetic oligonucleotide
  Target: LAMA2; (-) strand; PAM type: YTN; PAM sequence: CTA
tggatctttctaaaactttt

SEQ ID NO: 268278 - DNA, 20 bp, Artificial Sequence
  Description of Artificial Sequence: Synthetic oligonucleotide
  Target: LAMA2; (-) strand; PAM type: YTN; PAM sequence: TTG
agcgaagtctatggatcttt

SEQ ID NO: 268279 - DNA, 20 bp, Artificial Sequence
  Description of Artificial Sequence: Synthetic oligonucleotide
  Target: LAMA2; (-) strand; PAM type: YTN; PAM sequence: TTG
gaattgagcgaagtctatgg

SEQ ID NO: 268280 - DNA, 20 bp, Artificial Sequence
  Description of Artificial Sequence: Synthetic oligonucleotide
  Target: LAMA2; (-) strand; PAM type: YTN; PAM sequence: CTG
ttggaattgagcgaagtcta

SEQ ID NO: 268281 - DNA, 20 bp, Artificial Sequence
  Description of Artificial Sequence: Synthetic oligonucleotide
  Target: LAMA2; (-) strand; PAM type: YTN; PAM sequence: CTG
aactgttggaattgagcgaa

SEQ ID NO: 268282 - DNA, 20 bp, Artificial Sequence
  Description of Artificial Sequence: Synthetic oligonucleotide
  Target: LAMA2; (-) strand; PAM type: YTN; PAM sequence: TTA
tagatgaggaaaatggaatg

SEQ ID NO: 268283 - DNA, 20 bp, Artificial Sequence
  Description of Artificial Sequence: Synthetic oligonucleotide
  Target: LAMA2; (-) strand; PAM type: YTN; PAM sequence: CTG
agattatagatgaggaaaat

SEQ ID NO: 268284 - DNA, 20 bp, Artificial Sequence
  Description of Artificial Sequence: Synthetic oligonucleotide
  Target: LAMA2; (-) strand; PAM type: YTN; PAM sequence: TTC
ctgagattatagatgaggaa

SEQ ID NO: 268285 - DNA, 20 bp, Artificial Sequence
  Description of Artificial Sequence: Synthetic oligonucleotide
  Target: LAMA2; (-) strand; PAM type: YTN; PAM sequence: CTA
tcaatgattcctgagattat

SEQ ID NO: 268286 - DNA, 20 bp, Artificial Sequence
  Description of Artificial Sequence: Synthetic oligonucleotide
  Target: LAMA2; (-) strand; PAM type: YTN; PAM sequence: TTA
gtgtaaagtaggtggcctat

SEQ ID NO: 268287 - DNA, 20 bp, Artificial Sequence
  Description of Artificial Sequence: Synthetic oligonucleotide
  Target: LAMA2; (-) strand; PAM type: YTN; PAM sequence: TTG
tcacaatattagtgtaaagt

SEQ ID NO: 268288 - DNA, 20 bp, Artificial Sequence
  Description of Artificial Sequence: Synthetic oligonucleotide
  Target: LAMA2; (-) strand; PAM type: YTN; PAM sequence: TTA
ttgtcacaatattagtgtaa

SEQ ID NO: 268289 - DNA, 20 bp, Artificial Sequence
  Description of Artificial Sequence: Synthetic oligonucleotide
  Target: LAMA2; (-) strand; PAM type: YTN; PAM sequence: CTT
attgtcacaatattagtgta

SEQ ID NO: 268290 - DNA, 20 bp, Artificial Sequence
  Description of Artificial Sequence: Synthetic oligonucleotide
  Target: LAMA2; (-) strand; PAM type: YTN; PAM sequence: TTA
cacacttattgtcacaatat

SEQ ID NO: 268291 - DNA, 20 bp, Artificial Sequence
  Description of Artificial Sequence: Synthetic oligonucleotide
  Target: LAMA2; (-) strand; PAM type: YTN; PAM sequence: TTT
acacacttattgtcacaata

SEQ ID NO: 268292 - DNA, 20 bp, Artificial Sequence
  Description of Artificial Sequence: Synthetic oligonucleotide
  Target: LAMA2; (-) strand; PAM type: YTN; PAM sequence: CTT
tacacacttattgtcacaat

SEQ ID NO: 268293 - DNA, 20 bp, Artificial Sequence
  Description of Artificial Sequence: Synthetic oligonucleotide
  Target: LAMA2; (-) strand; PAM type: YTN; PAM sequence: CTA
ggcagggcaccaacagtgtc

SEQ ID NO: 268294 - DNA, 20 bp, Artificial Sequence
  Description of Artificial Sequence: Synthetic oligonucleotide
  Target: LAMA2; (-) strand; PAM type: YTN; PAM sequence: TTC
agtgtaggtgcctaggcagg

SEQ ID NO: 268295 - DNA, 20 bp, Artificial Sequence
  Description of Artificial Sequence: Synthetic oligonucleotide
  Target: LAMA2; (-) strand; PAM type: YTN; PAM sequence: CTT
cagtgtaggtgcctaggcag

SEQ ID NO: 268296 - DNA, 20 bp, Artificial Sequence
  Description of Artificial Sequence: Synthetic oligonucleotide
  Target: LAMA2; (-) strand; PAM type: YTN; PAM sequence: TTG
gagagaaggcttcagtgtag

SEQ ID NO: 268297 - DNA, 20 bp, Artificial Sequence
  Description of Artificial Sequence: Synthetic oligonucleotide
  Target: LAMA2; (-) strand; PAM type: YTN; PAM sequence: CTG
ttggagagaaggcttcagtg

SEQ ID NO: 268298 - DNA, 20 bp, Artificial Sequence
  Description of Artificial Sequence: Synthetic oligonucleotide
  Target: LAMA2; (-) strand; PAM type: YTN; PAM sequence: TTC
tgttggagagaaggcttcag

SEQ ID NO: 268299 - DNA, 20 bp, Artificial Sequence
  Description of Artificial Sequence: Synthetic oligonucleotide
  Target: LAMA2; (-) strand; PAM type: YTN; PAM sequence: CTT
ctgttggagagaaggcttca

SEQ ID NO: 268300 - DNA, 20 bp, Artificial Sequence
  Description of Artificial Sequence: Synthetic oligonucleotide
  Target: LAMA2; (-) strand; PAM type: YTN; PAM sequence: CTC
ttctgttggagagaaggctt

SEQ ID NO: 268301 - DNA, 20 bp, Artificial Sequence
  Description of Artificial Sequence: Synthetic oligonucleotide
  Target: LAMA2; (-) strand; PAM type: YTN; PAM sequence: CTG
cctcttctgttggagagaag

SEQ ID NO: 268302 - DNA, 20 bp, Artificial Sequence
  Description of Artificial Sequence: Synthetic oligonucleotide
  Target: LAMA2; (-) strand; PAM type: YTN; PAM sequence: TTC
tgcctcttctgttggagaga

SEQ ID NO: 268303 - DNA, 20 bp, Artificial Sequence
  Description of Artificial Sequence: Synthetic oligonucleotide
  Target: LAMA2; (-) strand; PAM type: YTN; PAM sequence: TTT
ctgcctcttctgttggagag

SEQ ID NO: 268304 - DNA, 20 bp, Artificial Sequence
  Description of Artificial Sequence: Synthetic oligonucleotide
  Target: LAMA2; (-) strand; PAM type: YTN; PAM sequence: CTT
tctgcctcttctgttggaga

SEQ ID NO: 268305 - DNA, 20 bp, Artificial Sequence
  Description of Artificial Sequence: Synthetic oligonucleotide
  Target: LAMA2; (-) strand; PAM type: YTN; PAM sequence: TTC
aggcctttctgcctcttctg

SEQ ID NO: 268306 - DNA, 20 bp, Artificial Sequence
  Description of Artificial Sequence: Synthetic oligonucleotide
  Target: LAMA2; (-) strand; PAM type: YTN; PAM sequence: CTG
caggaagggcgggtaaacat

SEQ ID NO: 268307 - DNA, 20 bp, Artificial Sequence
  Description of Artificial Sequence: Synthetic oligonucleotide
  Target: LAMA2; (-) strand; PAM type: YTN; PAM sequence: TTA
gtcatgggccactgcaggaa

SEQ ID NO: 268308 - DNA, 20 bp, Artificial Sequence
  Description of Artificial Sequence: Synthetic oligonucleotide
  Target: LAMA2; (-) strand; PAM type: YTN; PAM sequence: CTG
gttagtcatgggccactgca

SEQ ID NO: 268309 - DNA, 20 bp, Artificial Sequence
  Description of Artificial Sequence: Synthetic oligonucleotide
  Target: LAMA2; (-) strand; PAM type: YTN; PAM sequence: CTC
acgctggttagtcatgggcc

SEQ ID NO: 268310 - DNA, 20 bp, Artificial Sequence
  Description of Artificial Sequence: Synthetic oligonucleotide
  Target: LAMA2; (-) strand; PAM type: YTN; PAM sequence: CTC
tcacgctggttagtcatggg

SEQ ID NO: 268311 - DNA, 20 bp, Artificial Sequence
  Description of Artificial Sequence: Synthetic oligonucleotide
  Target: LAMA2; (-) strand; PAM type: YTN; PAM sequence: TTG
tactctcacgctggttagtc

SEQ ID NO: 268312 - DNA, 20 bp, Artificial Sequence
  Description of Artificial Sequence: Synthetic oligonucleotide
  Target: LAMA2; (-) strand; PAM type: YTN; PAM sequence: TTT
gtactctcacgctggttagt

SEQ ID NO: 268313 - DNA, 20 bp, Artificial Sequence
  Description of Artificial Sequence: Synthetic oligonucleotide
  Target: LAMA2; (-) strand; PAM type: YTN; PAM sequence: TTT
tgtactctcacgctggttag

SEQ ID NO: 268314 - DNA, 20 bp, Artificial Sequence
  Description of Artificial Sequence: Synthetic oligonucleotide
  Target: LAMA2; (-) strand; PAM type: YTN; PAM sequence: CTT
ttgtactctcacgctggtta

SEQ ID NO: 268315 - DNA, 20 bp, Artificial Sequence
  Description of Artificial Sequence: Synthetic oligonucleotide
  Target: LAMA2; (-) strand; PAM type: YTN; PAM sequence: CTG
gacttttgtactctcacgct

SEQ ID NO: 268316 - DNA, 20 bp, Artificial Sequence
  Description of Artificial Sequence: Synthetic oligonucleotide
  Target: LAMA2; (-) strand; PAM type: YTN; PAM sequence: TTA
ggggccaaagagctggactt

SEQ ID NO: 268317 - DNA, 20 bp, Artificial Sequence
  Description of Artificial Sequence: Synthetic oligonucleotide
  Target: LAMA2; (-) strand; PAM type: YTN; PAM sequence: CTT
aggggccaaagagctggact

SEQ ID NO: 268318 - DNA, 20 bp, Artificial Sequence
  Description of Artificial Sequence: Synthetic oligonucleotide
  Target: LAMA2; (-) strand; PAM type: YTN; PAM sequence: TTC
cacttaggggccaaagagct

SEQ ID NO: 268319 - DNA, 20 bp, Artificial Sequence
  Description of Artificial Sequence: Synthetic oligonucleotide
  Target: LAMA2; (-) strand; PAM type: YTN; PAM sequence: TTG
ttccacttaggggccaaaga

SEQ ID NO: 268320 - DNA, 20 bp, Artificial Sequence
  Description of Artificial Sequence: Synthetic oligonucleotide
  Target: LAMA2; (-) strand; PAM type: YTN; PAM sequence: CTT
gttccacttaggggccaaag

SEQ ID NO: 268321 - DNA, 20 bp, Artificial Sequence
  Description of Artificial Sequence: Synthetic oligonucleotide
  Target: LAMA2; (-) strand; PAM type: YTN; PAM sequence: CTC
aaaacttgttccacttaggg

SEQ ID NO: 268322 - DNA, 20 bp, Artificial Sequence
  Description of Artificial Sequence: Synthetic oligonucleotide
  Target: LAMA2; (-) strand; PAM type: YTN; PAM sequence: CTG
gagcataaaataagatctca

SEQ ID NO: 268323 - DNA, 20 bp, Artificial Sequence
  Description of Artificial Sequence: Synthetic oligonucleotide
  Target: LAMA2; (-) strand; PAM type: YTN; PAM sequence: CTC
tggagcataaaataagatct

SEQ ID NO: 268324 - DNA, 20 bp, Artificial Sequence
  Description of Artificial Sequence: Synthetic oligonucleotide
  Target: LAMA2; (-) strand; PAM type: YTN; PAM sequence: TTC
catggagtgctctggagcat

SEQ ID NO: 268325 - DNA, 20 bp, Artificial Sequence
  Description of Artificial Sequence: Synthetic oligonucleotide
  Target: LAMA2; (-) strand; PAM type: YTN; PAM sequence: CTG
attccatggagtgctctgga

SEQ ID NO: 268326 - DNA, 20 bp, Artificial Sequence
  Description of Artificial Sequence: Synthetic oligonucleotide
  Target: LAMA2; (-) strand; PAM type: YTN; PAM sequence: TTA
gcctgattccatggagtgct

SEQ ID NO: 268327 - DNA, 20 bp, Artificial Sequence
  Description of Artificial Sequence: Synthetic oligonucleotide
  Target: LAMA2; (-) strand; PAM type: YTN; PAM sequence: CTT
agcctgattccatggagtgc

SEQ ID NO: 268328 - DNA, 20 bp, Artificial Sequence
  Description of Artificial Sequence: Synthetic oligonucleotide
  Target: LAMA2; (-) strand; PAM type: YTN; PAM sequence: TTC
aggtgatgtcccagtcttag

SEQ ID NO: 268329 - DNA, 20 bp, Artificial Sequence
  Description of Artificial Sequence: Synthetic oligonucleotide
  Target: LAMA2; (-) strand; PAM type: YTN; PAM sequence: TTT
caggtgatgtcccagtctta

SEQ ID NO: 268330 - DNA, 20 bp, Artificial Sequence
  Description of Artificial Sequence: Synthetic oligonucleotide
  Target: LAMA2; (-) strand; PAM type: YTN; PAM sequence: CTA
atcaagggtatgatttcagg

SEQ ID NO: 268331 - DNA, 20 bp, Artificial Sequence
  Description of Artificial Sequence: Synthetic oligonucleotide
  Target: LAMA2; (-) strand; PAM type: YTN; PAM sequence: CTC
taatcaagggtatgatttca

SEQ ID NO: 268332 - DNA, 20 bp, Artificial Sequence
  Description of Artificial Sequence: Synthetic oligonucleotide
  Target: LAMA2; (-) strand; PAM type: YTN; PAM sequence: CTA
gcaaaggagtgggtgaagca

SEQ ID NO: 268333 - DNA, 20 bp, Artificial Sequence
  Description of Artificial Sequence: Synthetic oligonucleotide
  Target: LAMA2; (-) strand; PAM type: YTN; PAM sequence: CTA
ggagaatctagcaaaggagt

SEQ ID NO: 268334 - DNA, 20 bp, Artificial Sequence
  Description of Artificial Sequence: Synthetic oligonucleotide
  Target: LAMA2; (-) strand; PAM type: YTN; PAM sequence: TTC
ctaggagaatctagcaaagg

SEQ ID NO: 268335 - DNA, 20 bp, Artificial Sequence
  Description of Artificial Sequence: Synthetic oligonucleotide
  Target: LAMA2; (-) strand; PAM type: YTN; PAM sequence: TTA
agtgttcctaggagaatcta

SEQ ID NO: 268336 - DNA, 20 bp, Artificial Sequence
  Description of Artificial Sequence: Synthetic oligonucleotide
  Target: LAMA2; (-) strand; PAM type: YTN; PAM sequence: TTT
aagtgttcctaggagaatct

SEQ ID NO: 268337 - DNA, 20 bp, Artificial Sequence
  Description of Artificial Sequence: Synthetic oligonucleotide
  Target: LAMA2; (-) strand; PAM type: YTN; PAM sequence: TTA
ccatttaagtgttcctagga

SEQ ID NO: 268338 - DNA, 20 bp, Artificial Sequence
  Description of Artificial Sequence: Synthetic oligonucleotide
  Target: LAMA2; (-) strand; PAM type: YTN; PAM sequence: CTT
accatttaagtgttcctagg

SEQ ID NO: 268339 - DNA, 20 bp, Artificial Sequence
  Description of Artificial Sequence: Synthetic oligonucleotide
  Target: LAMA2; (-) strand; PAM type: YTN; PAM sequence: TTA
caaagaagcttaccatttaa

SEQ ID NO: 268340 - DNA, 20 bp, Artificial Sequence
  Description of Artificial Sequence: Synthetic oligonucleotide
  Target: LAMA2; (-) strand; PAM type: YTN; PAM sequence: TTT
acaaagaagcttaccattta

SEQ ID NO: 268341 - DNA, 20 bp, Artificial Sequence
  Description of Artificial Sequence: Synthetic oligonucleotide
  Target: LAMA2; (-) strand; PAM type: YTN; PAM sequence: TTA
tatttacaaagaagcttacc

SEQ ID NO: 268342 - DNA, 20 bp, Artificial Sequence
  Description of Artificial Sequence: Synthetic oligonucleotide
  Target: LAMA2; (-) strand; PAM type: YTN; PAM sequence: TTT
atatttacaaagaagcttac

SEQ ID NO: 268343 - DNA, 20 bp, Artificial Sequence
  Description of Artificial Sequence: Synthetic oligonucleotide
  Target: LAMA2; (-) strand; PAM type: YTN; PAM sequence: TTA
gtttatatttacaaagaagc

SEQ ID NO: 268344 - DNA, 20 bp, Artificial Sequence
  Description of Artificial Sequence: Synthetic oligonucleotide
  Target: LAMA2; (-) strand; PAM type: YTN; PAM sequence: TTA
gtattagtttatatttacaa

SEQ ID NO: 268345 - DNA, 20 bp, Artificial Sequence
  Description of Artificial Sequence: Synthetic oligonucleotide
  Target: LAMA2; (-) strand; PAM type: YTN; PAM sequence: CTG
ataattagtattagtttata

SEQ ID NO: 268346 - DNA, 20 bp, Artificial Sequence
  Description of Artificial Sequence: Synthetic oligonucleotide
  Target: LAMA2; (-) strand; PAM type: YTN; PAM sequence: TTA
agtggatgctgataattagt

SEQ ID NO: 268347 - DNA, 20 bp, Artificial Sequence
  Description of Artificial Sequence: Synthetic oligonucleotide
  Target: LAMA2; (-) strand; PAM type: YTN; PAM sequence: CTT
aagtggatgctgataattag

SEQ ID NO: 268348 - DNA, 20 bp, Artificial Sequence
  Description of Artificial Sequence: Synthetic oligonucleotide
  Target: LAMA2; (-) strand; PAM type: YTN; PAM sequence: CTC
ttaagtggatgctgataatt

SEQ ID NO: 268349 - DNA, 20 bp, Artificial Sequence
  Description of Artificial Sequence: Synthetic oligonucleotide
  Target: LAMA2; (-) strand; PAM type: YTN; PAM sequence: TTA
tataaaacaagactcttaag

SEQ ID NO: 268350 - DNA, 20 bp, Artificial Sequence
  Description of Artificial Sequence: Synthetic oligonucleotide
  Target: LAMA2; (-) strand; PAM type: YTN; PAM sequence: CTG
gttatataaaacaagactct

SEQ ID NO: 268351 - DNA, 20 bp, Artificial Sequence
  Description of Artificial Sequence: Synthetic oligonucleotide
  Target: LAMA2; (-) strand; PAM type: YTN; PAM sequence: TTG
ctggttatataaaacaagac

SEQ ID NO: 268352 - DNA, 20 bp, Artificial Sequence
  Description of Artificial Sequence: Synthetic oligonucleotide
  Target: LAMA2; (-) strand; PAM type: YTN; PAM sequence: CTG
ttgctggttatataaaacaa

SEQ ID NO: 268353 - DNA, 20 bp, Artificial Sequence
  Description of Artificial Sequence: Synthetic oligonucleotide
  Target: LAMA2; (-) strand; PAM type: YTN; PAM sequence: TTA
atacagctgttgctggttat

SEQ ID NO: 268354 - DNA, 20 bp, Artificial Sequence
  Description of Artificial Sequence: Synthetic oligonucleotide
  Target: LAMA2; (-) strand; PAM type: YTN; PAM sequence: TTG
ccatgattaatacagctgtt

SEQ ID NO: 268355 - DNA, 20 bp, Artificial Sequence
  Description of Artificial Sequence: Synthetic oligonucleotide
  Target: LAMA2; (-) strand; PAM type: YTN; PAM sequence: TTA
ttgccatgattaatacagct

SEQ ID NO: 268356 - DNA, 20 bp, Artificial Sequence
  Description of Artificial Sequence: Synthetic oligonucleotide
  Target: LAMA2; (-) strand; PAM type: YTN; PAM sequence: CTT
attgccatgattaatacagc

SEQ ID NO: 268357 - DNA, 20 bp, Artificial Sequence
  Description of Artificial Sequence: Synthetic oligonucleotide
  Target: LAMA2; (-) strand; PAM type: YTN; PAM sequence: TTA
cttattgccatgattaatac

SEQ ID NO: 268358 - DNA, 20 bp, Artificial Sequence
  Description of Artificial Sequence: Synthetic oligonucleotide
  Target: LAMA2; (-) strand; PAM type: YTN; PAM sequence: TTA
gttacttattgccatgatta

SEQ ID NO: 268359 - DNA, 20 bp, Artificial Sequence
  Description of Artificial Sequence: Synthetic oligonucleotide
  Target: LAMA2; (-) strand; PAM type: YTN; PAM sequence: TTT
agttacttattgccatgatt

SEQ ID NO: 268360 - DNA, 20 bp, Artificial Sequence
  Description of Artificial Sequence: Synthetic oligonucleotide
  Target: LAMA2; (-) strand; PAM type: YTN; PAM sequence: TTA
tttagttacttattgccatg

SEQ ID NO: 268361 - DNA, 20 bp, Artificial Sequence
  Description of Artificial Sequence: Synthetic oligonucleotide
  Target: LAMA2; (-) strand; PAM type: YTN; PAM sequence: CTA
attatttagttacttattgc

SEQ ID NO: 268362 - DNA, 20 bp, Artificial Sequence
  Description of Artificial Sequence: Synthetic oligonucleotide
  Target: LAMA2; (-) strand; PAM type: YTN; PAM sequence: TTA
accctaattatttagttact

SEQ ID NO: 268363 - DNA, 20 bp, Artificial Sequence
  Description of Artificial Sequence: Synthetic oligonucleotide
  Target: LAMA2; (-) strand; PAM type: YTN; PAM sequence: CTT
aaccctaattatttagttac

SEQ ID NO: 268364 - DNA, 20 bp, Artificial Sequence
  Description of Artificial Sequence: Synthetic oligonucleotide
  Target: LAMA2; (-) strand; PAM type: YTN; PAM sequence: TTA
taaagcttaaccctaattat

SEQ ID NO: 268365 - DNA, 20 bp, Artificial Sequence
  Description of Artificial Sequence: Synthetic oligonucleotide
  Target: LAMA2; (-) strand; PAM type: YTN; PAM sequence: TTT
ataaagcttaaccctaatta

SEQ ID NO: 268366 - DNA, 20 bp, Artificial Sequence
  Description of Artificial Sequence: Synthetic oligonucleotide
  Target: LAMA2; (-) strand; PAM type: YTN; PAM sequence: TTG
ggatttataaagcttaaccc

SEQ ID NO: 268367 - DNA, 20 bp, Artificial Sequence
  Description of Artificial Sequence: Synthetic oligonucleotide
  Target: LAMA2; (-) strand; PAM type: YTN; PAM sequence: TTG
cattgggatttataaagctt

SEQ ID NO: 268368 - DNA, 20 bp, Artificial Sequence
  Description of Artificial Sequence: Synthetic oligonucleotide
  Target: LAMA2; (-) strand; PAM type: YTN; PAM sequence: TTA
caaatgtataaaaattgcat

SEQ ID NO: 268369 - DNA, 20 bp, Artificial Sequence
  Description of Artificial Sequence: Synthetic oligonucleotide
  Target: LAMA2; (-) strand; PAM type: YTN; PAM sequence: TTT
acaaatgtataaaaattgca

SEQ ID NO: 268370 - DNA, 20 bp, Artificial Sequence
  Description of Artificial Sequence: Synthetic oligonucleotide
  Target: LAMA2; (-) strand; PAM type: YTN; PAM sequence: TTT
tacaaatgtataaaaattgc

SEQ ID NO: 268371 - DNA, 20 bp, Artificial Sequence
  Description of Artificial Sequence: Synthetic oligonucleotide
  Target: LAMA2; (-) strand; PAM type: YTN; PAM sequence: TTA
gaaatatattttacaaatgt

SEQ ID NO: 268372 - DNA, 20 bp, Artificial Sequence
  Description of Artificial Sequence: Synthetic oligonucleotide
  Target: LAMA2; (-) strand; PAM type: YTN; PAM sequence: TTT
agaaatatattttacaaatg

SEQ ID NO: 268373 - DNA, 20 bp, Artificial Sequence
  Description of Artificial Sequence: Synthetic oligonucleotide
  Target: LAMA2; (-) strand; PAM type: YTN; PAM sequence: TTA
tttagaaatatattttacaa

SEQ ID NO: 268374 - DNA, 20 bp, Artificial Sequence
  Description of Artificial Sequence: Synthetic oligonucleotide
  Target: LAMA2; (-) strand; PAM type: YTN; PAM sequence: TTT
atttagaaatatattttaca

SEQ ID NO: 268375 - DNA, 20 bp, Artificial Sequence
  Description of Artificial Sequence: Synthetic oligonucleotide
  Target: LAMA2; (-) strand; PAM type: YTN; PAM sequence: TTA
ccacatacggatttatttag

SEQ ID NO: 268376 - DNA, 20 bp, Artificial Sequence
  Description of Artificial Sequence: Synthetic oligonucleotide
  Target: LAMA2; (-) strand; PAM type: YTN; PAM sequence: TTA
gagttaccacatacggattt

SEQ ID NO: 268377 - DNA, 20 bp, Artificial Sequence
  Description of Artificial Sequence: Synthetic oligonucleotide
  Target: LAMA2; (-) strand; PAM type: YTN; PAM sequence: TTT
agagttaccacatacggatt

SEQ ID NO: 268378 - DNA, 20 bp, Artificial Sequence
  Description of Artificial Sequence: Synthetic oligonucleotide
  Target: LAMA2; (-) strand; PAM type: YTN; PAM sequence: CTG
tgtttagagttaccacatac

SEQ ID NO: 268379 - DNA, 20 bp, Artificial Sequence
  Description of Artificial Sequence: Synthetic oligonucleotide
  Target: LAMA2; (-) strand; PAM type: YTN; PAM sequence: TTG
gatactgtgtttagagttac

SEQ ID NO: 268380 - DNA, 20 bp, Artificial Sequence
  Description of Artificial Sequence: Synthetic oligonucleotide
  Target: LAMA2; (-) strand; PAM type: YTN; PAM sequence: TTA
tatatatgcaaatattggat

SEQ ID NO: 268381 - DNA, 20 bp, Artificial Sequence
  Description of Artificial Sequence: Synthetic oligonucleotide
  Target: LAMA2; (-) strand; PAM type: YTN; PAM sequence: TTT
atatatatgcaaatattgga

SEQ ID NO: 268382 - DNA, 20 bp, Artificial Sequence
  Description of Artificial Sequence: Synthetic oligonucleotide
  Target: LAMA2; (-) strand; PAM type: YTN; PAM sequence: TTT
tatatatatgcaaatattgg

SEQ ID NO: 268383 - DNA, 20 bp, Artificial Sequence
  Description of Artificial Sequence: Synthetic oligonucleotide
  Target: LAMA2; (-) strand; PAM type: YTN; PAM sequence: CTG
ttttatatatatgcaaatat

SEQ ID NO: 268384 - DNA, 20 bp, Artificial Sequence
  Description of Artificial Sequence: Synthetic oligonucleotide
  Target: LAMA2; (-) strand; PAM type: YTN; PAM sequence: TTG
tgaatccactgttttatata

SEQ ID NO: 268385 - DNA, 20 bp, Artificial Sequence
  Description of Artificial Sequence: Synthetic oligonucleotide
  Target: LAMA2; (-) strand; PAM type: YTN; PAM sequence: TTG
gtatggaaattgtgaatcca

SEQ ID NO: 268386 - DNA, 20 bp, Artificial Sequence
  Description of Artificial Sequence: Synthetic oligonucleotide
  Target: LAMA2; (-) strand; PAM type: YTN; PAM sequence: CTG
ttggtatggaaattgtgaat

SEQ ID NO: 268387 - DNA, 20 bp, Artificial Sequence
  Description of Artificial Sequence: Synthetic oligonucleotide
  Target: LAMA2; (-) strand; PAM type: YTN; PAM sequence: TTC
tgttggtatggaaattgtga

SEQ ID NO: 268388 - DNA, 20 bp, Artificial Sequence
  Description of Artificial Sequence: Synthetic oligonucleotide
  Target: LAMA2; (-) strand; PAM type: YTN; PAM sequence: TTT
ctgttggtatggaaattgtg

SEQ ID NO: 268389 - DNA, 20 bp, Artificial Sequence
  Description of Artificial Sequence: Synthetic oligonucleotide
  Target: LAMA2; (-) strand; PAM type: YTN; PAM sequence: CTA
atttctgttggtatggaaat

SEQ ID NO: 268390 - DNA, 20 bp, Artificial Sequence
  Description of Artificial Sequence: Synthetic oligonucleotide
  Target: LAMA2; (-) strand; PAM type: YTN; PAM sequence: CTG
ctaatttctgttggtatgga

SEQ ID NO: 268391 - DNA, 20 bp, Artificial Sequence
  Description of Artificial Sequence: Synthetic oligonucleotide
  Target: LAMA2; (-) strand; PAM type: YTN; PAM sequence: TTG
ctgctaatttctgttggtat

SEQ ID NO: 268392 - DNA, 20 bp, Artificial Sequence
  Description of Artificial Sequence: Synthetic oligonucleotide
  Target: LAMA2; (-) strand; PAM type: YTN; PAM sequence: TTA
attgctgctaatttctgttg

SEQ ID NO: 268393 - DNA, 20 bp, Artificial Sequence
  Description of Artificial Sequence: Synthetic oligonucleotide
  Target: LAMA2; (-) strand; PAM type: YTN; PAM sequence: TTT
aattgctgctaatttctgtt

SEQ ID NO: 268394 - DNA, 20 bp, Artificial Sequence
  Description of Artificial Sequence: Synthetic oligonucleotide
  Target: LAMA2; (-) strand; PAM type: YTN; PAM sequence: TTA
tttaattgctgctaatttct

SEQ ID NO: 268395 - DNA, 20 bp, Artificial Sequence
  Description of Artificial Sequence: Synthetic oligonucleotide
  Target: LAMA2; (-) strand; PAM type: YTN; PAM sequence: CTA
tgagttatttaattgctgct

SEQ ID NO: 268396 - DNA, 20 bp, Artificial Sequence
  Description of Artificial Sequence: Synthetic oligonucleotide
  Target: LAMA2; (-) strand; PAM type: YTN; PAM sequence: TTG
ctatgagttatttaattgct

SEQ ID NO: 268397 - DNA, 20 bp, Artificial Sequence
  Description of Artificial Sequence: Synthetic oligonucleotide
  Target: LAMA2; (-) strand; PAM type: YTN; PAM sequence: TTG
gtgttgctatgagttattta

SEQ ID NO: 268398 - DNA, 20 bp, Artificial Sequence
  Description of Artificial Sequence: Synthetic oligonucleotide
  Target: LAMA2; (-) strand; PAM type: YTN; PAM sequence: TTT
ggtgttgctatgagttattt

SEQ ID NO: 268399 - DNA, 20 bp, Artificial Sequence
  Description of Artificial Sequence: Synthetic oligonucleotide
  Target: LAMA2; (-) strand; PAM type: YTN; PAM sequence: TTA
gatttggtgttgctatgagt

SEQ ID NO: 268400 - DNA, 20 bp, Artificial Sequence
  Description of Artificial Sequence: Synthetic oligonucleotide
  Target: LAMA2; (-) strand; PAM type: YTN; PAM sequence: TTT
agatttggtgttgctatgag

SEQ ID NO: 268401 - DNA, 20 bp, Artificial Sequence
  Description of Artificial Sequence: Synthetic oligonucleotide
  Target: LAMA2; (-) strand; PAM type: YTN; PAM sequence: TTT
tagatttggtgttgctatga

SEQ ID NO: 268402 - DNA, 20 bp, Artificial Sequence
  Description of Artificial Sequence: Synthetic oligonucleotide
  Target: LAMA2; (-) strand; PAM type: YTN; PAM sequence: TTT
ttagatttggtgttgctatg

SEQ ID NO: 268403 - DNA, 20 bp, Artificial Sequence
  Description of Artificial Sequence: Synthetic oligonucleotide
  Target: LAMA2; (-) strand; PAM type: YTN; PAM sequence: TTC
agaacaaatggaaatatttt

SEQ ID NO: 268404 - DNA, 20 bp, Artificial Sequence
  Description of Artificial Sequence: Synthetic oligonucleotide
  Target: LAMA2; (-) strand; PAM type: YTN; PAM sequence: CTT
cagaacaaatggaaatattt

SEQ ID NO: 268405 - DNA, 20 bp, Artificial Sequence
  Description of Artificial Sequence: Synthetic oligonucleotide
  Target: LAMA2; (-) strand; PAM type: YTN; PAM sequence: CTA
tatccaaaagatgtatatat

SEQ ID NO: 268406 - DNA, 20 bp, Artificial Sequence
  Description of Artificial Sequence: Synthetic oligonucleotide
  Target: LAMA2; (-) strand; PAM type: YTN; PAM sequence: CTA
tatctatatccaaaagatgt

SEQ ID NO: 268407 - DNA, 20 bp, Artificial Sequence
  Description of Artificial Sequence: Synthetic oligonucleotide
  Target: LAMA2; (-) strand; PAM type: YTN; PAM sequence: TTG
tatcacctatatctatatcc

SEQ ID NO: 268408 - DNA, 20 bp, Artificial Sequence
  Description of Artificial Sequence: Synthetic oligonucleotide
  Target: LAMA2; (-) strand; PAM type: YTN; PAM sequence: CTT
gtatcacctatatctatatc

SEQ ID NO: 268409 - DNA, 20 bp, Artificial Sequence
  Description of Artificial Sequence: Synthetic oligonucleotide
  Target: LAMA2; (-) strand; PAM type: YTN; PAM sequence: TTA
acaagtatgtacttgtatca

SEQ ID NO: 268410 - DNA, 20 bp, Artificial Sequence
  Description of Artificial Sequence: Synthetic oligonucleotide
  Target: LAMA2; (-) strand; PAM type: YTN; PAM sequence: CTG
gtgggtattaacaagtatgt

SEQ ID NO: 268411 - DNA, 20 bp, Artificial Sequence
  Description of Artificial Sequence: Synthetic oligonucleotide
  Target: LAMA2; (-) strand; PAM type: YTN; PAM sequence: CTC
actggtgggtattaacaagt

SEQ ID NO: 268412 - DNA, 20 bp, Artificial Sequence
  Description of Artificial Sequence: Synthetic oligonucleotide
  Target: LAMA2; (-) strand; PAM type: YTN; PAM sequence: CTA
accatgaataccaaagctca

SEQ ID NO: 268413 - DNA, 20 bp, Artificial Sequence
  Description of Artificial Sequence: Synthetic oligonucleotide
  Target: LAMA2; (-) strand; PAM type: YTN; PAM sequence: TTA
gtctaaccatgaataccaaa

SEQ ID NO: 268414 - DNA, 20 bp, Artificial Sequence
  Description of Artificial Sequence: Synthetic oligonucleotide
  Target: LAMA2; (-) strand; PAM type: YTN; PAM sequence: TTA
aaggtacaggaaataaatat

SEQ ID NO: 268415 - DNA, 20 bp, Artificial Sequence
  Description of Artificial Sequence: Synthetic oligonucleotide
  Target: LAMA2; (-) strand; PAM type: YTN; PAM sequence: TTT
aaaggtacaggaaataaata

SEQ ID NO: 268416 - DNA, 20 bp, Artificial Sequence
  Description of Artificial Sequence: Synthetic oligonucleotide
  Target: LAMA2; (-) strand; PAM type: YTN; PAM sequence: CTG
gtgtttaaaggtacaggaaa

SEQ ID NO: 268417 - DNA, 20 bp, Artificial Sequence
  Description of Artificial Sequence: Synthetic oligonucleotide
  Target: LAMA2; (-) strand; PAM type: YTN; PAM sequence: CTA
ctggtgtttaaaggtacagg

SEQ ID NO: 268418 - DNA, 20 bp, Artificial Sequence
  Description of Artificial Sequence: Synthetic oligonucleotide
  Target: LAMA2; (-) strand; PAM type: YTN; PAM sequence: TTA
gtcaccatcctactggtgtt

SEQ ID NO: 268419 - DNA, 20 bp, Artificial Sequence
  Description of Artificial Sequence: Synthetic oligonucleotide
  Target: LAMA2; (-) strand; PAM type: YTN; PAM sequence: TTT
agtcaccatcctactggtgt

SEQ ID NO: 268420 - DNA, 20 bp, Artificial Sequence
  Description of Artificial Sequence: Synthetic oligonucleotide
  Target: LAMA2; (-) strand; PAM type: YTN; PAM sequence: TTT
tagtcaccatcctactggtg

SEQ ID NO: 268421 - DNA, 20 bp, Artificial Sequence
  Description of Artificial Sequence: Synthetic oligonucleotide
  Target: LAMA2; (-) strand; PAM type: YTN; PAM sequence: CTT
ttagtcaccatcctactggt

SEQ ID NO: 268422 - DNA, 20 bp, Artificial Sequence
  Description of Artificial Sequence: Synthetic oligonucleotide
  Target: LAMA2; (-) strand; PAM type: YTN; PAM sequence: TTG
gtgtccagcgatgcttttag

SEQ ID NO: 268423 - DNA, 20 bp, Artificial Sequence
  Description of Artificial Sequence: Synthetic oligonucleotide
  Target: LAMA2; (-) strand; PAM type: YTN; PAM sequence: TTT
ggtgtccagcgatgctttta

SEQ ID NO: 268424 - DNA, 20 bp, Artificial Sequence
  Description of Artificial Sequence: Synthetic oligonucleotide
  Target: LAMA2; (-) strand; PAM type: YTN; PAM sequence: TTT
tggtgtccagcgatgctttt

SEQ ID NO: 268425 - DNA, 20 bp, Artificial Sequence
  Description of Artificial Sequence: Synthetic oligonucleotide
  Target: LAMA2; (-) strand; PAM type: YTN; PAM sequence: TTT
ttggtgtccagcgatgcttt

SEQ ID NO: 268426 - DNA, 20 bp, Artificial Sequence
  Description of Artificial Sequence: Synthetic oligonucleotide
  Target: LAMA2; (-) strand; PAM type: YTN; PAM sequence: CTT
tttggtgtccagcgatgctt

SEQ ID NO: 268427 - DNA, 20 bp, Artificial Sequence
  Description of Artificial Sequence: Synthetic oligonucleotide
  Target: LAMA2; (-) strand; PAM type: YTN; PAM sequence: CTG
tagataatctttttggtgtc

SEQ ID NO: 268428 - DNA, 20 bp, Artificial Sequence
  Description of Artificial Sequence: Synthetic oligonucleotide
  Target: LAMA2; (-) strand; PAM type: YTN; PAM sequence: TTA
ctgtagataatctttttggt

SEQ ID NO: 268429 - DNA, 20 bp, Artificial Sequence
  Description of Artificial Sequence: Synthetic oligonucleotide
  Target: LAMA2; (-) strand; PAM type: YTN; PAM sequence: TTC
atgaattactgtagataatc

SEQ ID NO: 268430 - DNA, 20 bp, Artificial Sequence
  Description of Artificial Sequence: Synthetic oligonucleotide
  Target: LAMA2; (-) strand; PAM type: YTN; PAM sequence: TTT
catgaattactgtagataat

SEQ ID NO: 268431 - DNA, 20 bp, Artificial Sequence
  Description of Artificial Sequence: Synthetic oligonucleotide
  Target: LAMA2; (-) strand; PAM type: YTN; PAM sequence: TTT
tcatgaattactgtagataa

SEQ ID NO: 268432 - DNA, 20 bp, Artificial Sequence
  Description of Artificial Sequence: Synthetic oligonucleotide
  Target: LAMA2; (-) strand; PAM type: YTN; PAM sequence: TTT
ttcatgaattactgtagata

SEQ ID NO: 268433 - DNA, 20 bp, Artificial Sequence
  Description of Artificial Sequence: Synthetic oligonucleotide
  Target: LAMA2; (-) strand; PAM type: YTN; PAM sequence: TTT
tttcatgaattactgtagat

SEQ ID NO: 268434 - DNA, 20 bp, Artificial Sequence
  Description of Artificial Sequence: Synthetic oligonucleotide
  Target: LAMA2; (-) strand; PAM type: YTN; PAM sequence: TTT
ttttcatgaattactgtaga

SEQ ID NO: 268435 - DNA, 20 bp, Artificial Sequence
  Description of Artificial Sequence: Synthetic oligonucleotide
  Target: LAMA2; (-) strand; PAM type: YTN; PAM sequence: TTT
tttttcatgaattactgtag

SEQ ID NO: 268436 - DNA, 20 bp, Artificial Sequence
  Description of Artificial Sequence: Synthetic oligonucleotide
  Target: LAMA2; (-) strand; PAM type: YTN; PAM sequence: TTT
ttttttcatgaattactgta

SEQ ID NO: 268437 - DNA, 20 bp, Artificial Sequence
  Description of Artificial Sequence: Synthetic oligonucleotide
  Target: LAMA2; (-) strand; PAM type: YTN; PAM sequence: CTA
tatcataatttttttttcat

SEQ ID NO: 268438 - DNA, 20 bp, Artificial Sequence
  Description of Artificial Sequence: Synthetic oligonucleotide
  Target: LAMA2; (-) strand; PAM type: YTN; PAM sequence: CTA
cagtgtataaatgtagctat

SEQ ID NO: 268439 - DNA, 20 bp, Artificial Sequence
  Description of Artificial Sequence: Synthetic oligonucleotide
  Target: LAMA2; (-) strand; PAM type: YTN; PAM sequence: TTG
tagaaaatggtaactacagt

SEQ ID NO: 268440 - DNA, 20 bp, Artificial Sequence
  Description of Artificial Sequence: Synthetic oligonucleotide
  Target: LAMA2; (-) strand; PAM type: YTN; PAM sequence: TTT
gtagaaaatggtaactacag

SEQ ID NO: 268441 - DNA, 20 bp, Artificial Sequence
  Description of Artificial Sequence: Synthetic oligonucleotide
  Target: LAMA2; (-) strand; PAM type: YTN; PAM sequence: TTT
tgtagaaaatggtaactaca

SEQ ID NO: 268442 - DNA, 20 bp, Artificial Sequence
  Description of Artificial Sequence: Synthetic oligonucleotide
  Target: LAMA2; (-) strand; PAM type: YTN; PAM sequence: CTT
ttgtagaaaatggtaactac

SEQ ID NO: 268443 - DNA, 20 bp, Artificial Sequence
  Description of Artificial Sequence: Synthetic oligonucleotide
  Target: LAMA2; (-) strand; PAM type: YTN; PAM sequence: CTA
tacacatgcttttgtagaaa

SEQ ID NO: 268444 - DNA, 20 bp, Artificial Sequence
  Description of Artificial Sequence: Synthetic oligonucleotide
  Target: LAMA2; (-) strand; PAM type: YTN; PAM sequence: TTC
tatacacatgcttttgtaga

SEQ ID NO: 268445 - DNA, 20 bp, Artificial Sequence
  Description of Artificial Sequence: Synthetic oligonucleotide
  Target: LAMA2; (-) strand; PAM type: YTN; PAM sequence: CTA
ttctatacacatgcttttgt

SEQ ID NO: 268446 - DNA, 20 bp, Artificial Sequence
  Description of Artificial Sequence: Synthetic oligonucleotide
  Target: LAMA2; (-) strand; PAM type: YTN; PAM sequence: CTA
gcctattctatacacatgct

SEQ ID NO: 268447 - DNA, 20 bp, Artificial Sequence
  Description of Artificial Sequence: Synthetic oligonucleotide
  Target: LAMA2; (-) strand; PAM type: YTN; PAM sequence: TTC
tagcctattctatacacatg

SEQ ID NO: 268448 - DNA, 20 bp, Artificial Sequence
  Description of Artificial Sequence: Synthetic oligonucleotide
  Target: LAMA2; (-) strand; PAM type: YTN; PAM sequence: CTT
ctagcctattctatacacat

SEQ ID NO: 268449 - DNA, 20 bp, Artificial Sequence
  Description of Artificial Sequence: Synthetic oligonucleotide
  Target: LAMA2; (-) strand; PAM type: YTN; PAM sequence: TTA
gtgtacccttctagcctatt

SEQ ID NO: 268450 - DNA, 20 bp, Artificial Sequence
  Description of Artificial Sequence: Synthetic oligonucleotide
  Target: LAMA2; (-) strand; PAM type: YTN; PAM sequence: TTT
agtgtacccttctagcctat

SEQ ID NO: 268451 - DNA, 20 bp, Artificial Sequence
  Description of Artificial Sequence: Synthetic oligonucleotide
  Target: LAMA2; (-) strand; PAM type: YTN; PAM sequence: TTT
tagtgtacccttctagccta

SEQ ID NO: 268452 - DNA, 20 bp, Artificial Sequence
  Description of Artificial Sequence: Synthetic oligonucleotide
  Target: LAMA2; (-) strand; PAM type: YTN; PAM sequence: TTA
ttttagtgtacccttctagc

SEQ ID NO: 268453 - DNA, 20 bp, Artificial Sequence
  Description of Artificial Sequence: Synthetic oligonucleotide
  Target: LAMA2; (-) strand; PAM type: YTN; PAM sequence: TTG
ttattttagtgtacccttct

SEQ ID NO: 268454 - DNA, 20 bp, Artificial Sequence
  Description of Artificial Sequence: Synthetic oligonucleotide
  Target: LAMA2; (-) strand; PAM type: YTN; PAM sequence: TTA
acacaataattgttatttta

SEQ ID NO: 268455 - DNA, 20 bp, Artificial Sequence
  Description of Artificial Sequence: Synthetic oligonucleotide
  Target: LAMA2; (-) strand; PAM type: YTN; PAM sequence: TTT
aacacaataattgttatttt

SEQ ID NO: 268456 - DNA, 20 bp, Artificial Sequence
  Description of Artificial Sequence: Synthetic oligonucleotide
  Target: LAMA2; (-) strand; PAM type: YTN; PAM sequence: CTT
taacacaataattgttattt

SEQ ID NO: 268457 - DNA, 20 bp, Artificial Sequence
  Description of Artificial Sequence: Synthetic oligonucleotide
  Target: LAMA2; (-) strand; PAM type: YTN; PAM sequence: CTG
ctttaacacaataattgtta

SEQ ID NO: 268458 - DNA, 20 bp, Artificial Sequence
  Description of Artificial Sequence: Synthetic oligonucleotide
  Target: LAMA2; (-) strand; PAM type: YTN; PAM sequence: TTC
tgctttaacacaataattgt

SEQ ID NO: 268459 - DNA, 20 bp, Artificial Sequence
  Description of Artificial Sequence: Synthetic oligonucleotide
  Target: LAMA2; (-) strand; PAM type: YTN; PAM sequence: CTG
taatcattctgctttaacac

SEQ ID NO: 268460 - DNA, 20 bp, Artificial Sequence
  Description of Artificial Sequence: Synthetic oligonucleotide
  Target: LAMA2; (-) strand; PAM type: YTN; PAM sequence: TTC
tgtaatcattctgctttaac

SEQ ID NO: 268461 - DNA, 20 bp, Artificial Sequence
  Description of Artificial Sequence: Synthetic oligonucleotide
  Target: LAMA2; (-) strand; PAM type: YTN; PAM sequence: TTT
ctgtaatcattctgctttaa

SEQ ID NO: 268462 - DNA, 20 bp, Artificial Sequence
  Description of Artificial Sequence: Synthetic oligonucleotide
  Target: LAMA2; (-) strand; PAM type: YTN; PAM sequence: TTT
tctgtaatcattctgcttta

SEQ ID NO: 268463 - DNA, 20 bp, Artificial Sequence
  Description of Artificial Sequence: Synthetic oligonucleotide
  Target: LAMA2; (-) strand; PAM type: YTN; PAM sequence: TTA
acaaataaattttctgtaat

SEQ ID NO: 268464 - DNA, 20 bp, Artificial Sequence
  Description of Artificial Sequence: Synthetic oligonucleotide
  Target: LAMA2; (-) strand; PAM type: YTN; PAM sequence: CTG
gatattaacaaataaatttt

SEQ ID NO: 268465 - DNA, 20 bp, Artificial Sequence
  Description of Artificial Sequence: Synthetic oligonucleotide
  Target: LAMA2; (-) strand; PAM type: YTN; PAM sequence: CTA
ctggatattaacaaataaat

SEQ ID NO: 268466 - DNA, 20 bp, Artificial Sequence
  Description of Artificial Sequence: Synthetic oligonucleotide
  Target: LAMA2; (-) strand; PAM type: YTN; PAM sequence: TTA
aatactactggatattaaca

SEQ ID NO: 268467 - DNA, 20 bp, Artificial Sequence
  Description of Artificial Sequence: Synthetic oligonucleotide
  Target: LAMA2; (-) strand; PAM type: YTN; PAM sequence: TTA
tcgattaaatactactggat

SEQ ID NO: 268468 - DNA, 20 bp, Artificial Sequence
  Description of Artificial Sequence: Synthetic oligonucleotide
  Target: LAMA2; (-) strand; PAM type: YTN; PAM sequence: TTT
atcgattaaatactactgga

SEQ ID NO: 268469 - DNA, 20 bp, Artificial Sequence
  Description of Artificial Sequence: Synthetic oligonucleotide
  Target: LAMA2; (-) strand; PAM type: YTN; PAM sequence: TTT
tatcgattaaatactactgg

SEQ ID NO: 268470 - DNA, 20 bp, Artificial Sequence
  Description of Artificial Sequence: Synthetic oligonucleotide
  Target: LAMA2; (-) strand; PAM type: YTN; PAM sequence: CTT
ttatcgattaaatactactg

SEQ ID NO: 268471 - DNA, 20 bp, Artificial Sequence
  Description of Artificial Sequence: Synthetic oligonucleotide
  Target: LAMA2; (-) strand; PAM type: YTN; PAM sequence: CTG
acagcttttatcgattaaat

SEQ ID NO: 268472 - DNA, 20 bp, Artificial Sequence
  Description of Artificial Sequence: Synthetic oligonucleotide
  Target: LAMA2; (-) strand; PAM type: YTN; PAM sequence: CTA
cacaaactgacagcttttat

SEQ ID NO: 268473 - DNA, 20 bp, Artificial Sequence
  Description of Artificial Sequence: Synthetic oligonucleotide
  Target: LAMA2; (-) strand; PAM type: YTN; PAM sequence: CTA
tgctacacaaactgacagct

SEQ ID NO: 268474 - DNA, 20 bp, Artificial Sequence
  Description of Artificial Sequence: Synthetic oligonucleotide
  Target: LAMA2; (-) strand; PAM type: YTN; PAM sequence: CTC
tatgctacacaaactgacag

SEQ ID NO: 268475 - DNA, 20 bp, Artificial Sequence
  Description of Artificial Sequence: Synthetic oligonucleotide
  Target: LAMA2; (-) strand; PAM type: YTN; PAM sequence: CTC
atctctatgctacacaaact

SEQ ID NO: 268476 - DNA, 20 bp, Artificial Sequence
  Description of Artificial Sequence: Synthetic oligonucleotide
  Target: LAMA2; (-) strand; PAM type: YTN; PAM sequence: CTG
ctcatctctatgctacacaa

SEQ ID NO: 268477 - DNA, 20 bp, Artificial Sequence
  Description of Artificial Sequence: Synthetic oligonucleotide
  Target: LAMA2; (-) strand; PAM type: YTN; PAM sequence: CTG
tatggccctgctcatctcta

SEQ ID NO: 268478 - DNA, 20 bp, Artificial Sequence
  Description of Artificial Sequence: Synthetic oligonucleotide
  Target: LAMA2; (-) strand; PAM type: YTN; PAM sequence: TTG
atactgtatggccctgctca

SEQ ID NO: 268479 - DNA, 20 bp, Artificial Sequence
  Description of Artificial Sequence: Synthetic oligonucleotide
  Target: LAMA2; (-) strand; PAM type: YTN; PAM sequence: TTT
gatactgtatggccctgctc

SEQ ID NO: 268480 - DNA, 20 bp, Artificial Sequence
  Description of Artificial Sequence: Synthetic oligonucleotide
  Target: LAMA2; (-) strand; PAM type: YTN; PAM sequence: CTC
acatttgatactgtatggcc

SEQ ID NO: 268481 - DNA, 20 bp, Artificial Sequence
  Description of Artificial Sequence: Synthetic oligonucleotide
  Target: LAMA2; (-) strand; PAM type: YTN; PAM sequence: TTA
agtcactcacatttgatact

SEQ ID NO: 268482 - DNA, 20 bp, Artificial Sequence
  Description of Artificial Sequence: Synthetic oligonucleotide
  Target: LAMA2; (-) strand; PAM type: YTN; PAM sequence: TTT
aagtcactcacatttgatac

SEQ ID NO: 268483 - DNA, 20 bp, Artificial Sequence
  Description of Artificial Sequence: Synthetic oligonucleotide
  Target: LAMA2; (-) strand; PAM type: YTN; PAM sequence: CTT
taagtcactcacatttgata

SEQ ID NO: 268484 - DNA, 20 bp, Artificial Sequence
  Description of Artificial Sequence: Synthetic oligonucleotide
  Target: LAMA2; (-) strand; PAM type: YTN; PAM sequence: CTG
gaaaaacactttaagtcact

SEQ ID NO: 268485 - DNA, 20 bp, Artificial Sequence
  Description of Artificial Sequence: Synthetic oligonucleotide
  Target: LAMA2; (-) strand; PAM type: YTN; PAM sequence: TTG
aggactggaaaaacacttta

SEQ ID NO: 268486 - DNA, 20 bp, Artificial Sequence
  Description of Artificial Sequence: Synthetic oligonucleotide
  Target: LAMA2; (-) strand; PAM type: YTN; PAM sequence: TTT
gaggactggaaaaacacttt

SEQ ID NO: 268487 - DNA, 20 bp, Artificial Sequence
  Description of Artificial Sequence: Synthetic oligonucleotide
  Target: LAMA2; (-) strand; PAM type: YTN; PAM sequence: CTA
taacaatgtttgaggactgg

SEQ ID NO: 268488 - DNA, 20 bp, Artificial Sequence
  Description of Artificial Sequence: Synthetic oligonucleotide
  Target: LAMA2; (-) strand; PAM type: YTN; PAM sequence: TTA
gagatgatgaatgcaaagct

SEQ ID NO: 268489 - DNA, 20 bp, Artificial Sequence
  Description of Artificial Sequence: Synthetic oligonucleotide
  Target: LAMA2; (-) strand; PAM type: YTN; PAM sequence: TTA
tatgttagagatgatgaatg

SEQ ID NO: 268490 - DNA, 20 bp, Artificial Sequence
  Description of Artificial Sequence: Synthetic oligonucleotide
  Target: LAMA2; (-) strand; PAM type: YTN; PAM sequence: TTT
atatgttagagatgatgaat

SEQ ID NO: 268491 - DNA, 20 bp, Artificial Sequence
  Description of Artificial Sequence: Synthetic oligonucleotide
  Target: LAMA2; (-) strand; PAM type: YTN; PAM sequence: CTG
atcatttatatgttagagat

SEQ ID NO: 268492 - DNA, 20 bp, Artificial Sequence
  Description of Artificial Sequence: Synthetic oligonucleotide
  Target: LAMA2; (-) strand; PAM type: YTN; PAM sequence: TTC
agagaaatataacctgatca

SEQ ID NO: 268493 - DNA, 20 bp, Artificial Sequence
  Description of Artificial Sequence: Synthetic oligonucleotide
  Target: LAMA2; (-) strand; PAM type: YTN; PAM sequence: TTT
cagagaaatataacctgatc

SEQ ID NO: 268494 - DNA, 20 bp, Artificial Sequence
  Description of Artificial Sequence: Synthetic oligonucleotide
  Target: LAMA2; (-) strand; PAM type: YTN; PAM sequence: TTT
tcagagaaatataacctgat

SEQ ID NO: 268495 - DNA, 20 bp, Artificial Sequence
  Description of Artificial Sequence: Synthetic oligonucleotide
  Target: LAMA2; (-) strand; PAM type: YTN; PAM sequence: TTT
ttcagagaaatataacctga

SEQ ID NO: 268496 - DNA, 20 bp, Artificial Sequence
  Description of Artificial Sequence: Synthetic oligonucleotide
  Target: LAMA2; (-) strand; PAM type: YTN; PAM sequence: CTG
aataaagcaatttttcagag

SEQ ID NO: 268497 - DNA, 20 bp, Artificial Sequence
  Description of Artificial Sequence: Synthetic oligonucleotide
  Target: LAMA2; (-) strand; PAM type: YTN; PAM sequence: TTA
atatagctgaataaagcaat

SEQ ID NO: 268498 - DNA, 20 bp, Artificial Sequence
  Description of Artificial Sequence: Synthetic oligonucleotide
  Target: LAMA2; (-) strand; PAM type: YTN; PAM sequence: TTT
aatatagctgaataaagcaa

SEQ ID NO: 268499 - DNA, 20 bp, Artificial Sequence
  Description of Artificial Sequence: Synthetic oligonucleotide
  Target: LAMA2; (-) strand; PAM type: YTN; PAM sequence: TTG
gtttaatatagctgaataaa

SEQ ID NO: 268500 - DNA, 20 bp, Artificial Sequence
  Description of Artificial Sequence: Synthetic oligonucleotide
  Target: LAMA2; (-) strand; PAM type: YTN; PAM sequence: TTT
ggtttaatatagctgaataa

SEQ ID NO: 268501 - DNA, 20 bp, Artificial Sequence
  Description of Artificial Sequence: Synthetic oligonucleotide
  Target: LAMA2; (-) strand; PAM type: YTN; PAM sequence: CTT
tggtttaatatagctgaata

SEQ ID NO: 268502 - DNA, 20 bp, Artificial Sequence
  Description of Artificial Sequence: Synthetic oligonucleotide
  Target: LAMA2; (-) strand; PAM type: YTN; PAM sequence: TTA
accaagaactttggtttaat

SEQ ID NO: 268503 - DNA, 20 bp, Artificial Sequence
  Description of Artificial Sequence: Synthetic oligonucleotide
  Target: LAMA2; (-) strand; PAM type: YTN; PAM sequence: TTT
aaccaagaactttggtttaa

SEQ ID NO: 268504 - DNA, 20 bp, Artificial Sequence
  Description of Artificial Sequence: Synthetic oligonucleotide
  Target: LAMA2; (-) strand; PAM type: YTN; PAM sequence: TTA
caataaaaatttaaccaaga

SEQ ID NO: 268505 - DNA, 20 bp, Artificial Sequence
  Description of Artificial Sequence: Synthetic oligonucleotide
  Target: LAMA2; (-) strand; PAM type: YTN; PAM sequence: TTG
gaaggttacaataaaaattt

SEQ ID NO: 268506 - DNA, 20 bp, Artificial Sequence
  Description of Artificial Sequence: Synthetic oligonucleotide
  Target: LAMA2; (-) strand; PAM type: YTN; PAM sequence: TTT
ggaaggttacaataaaaatt

SEQ ID NO: 268507 - DNA, 20 bp, Artificial Sequence
  Description of Artificial Sequence: Synthetic oligonucleotide
  Target: LAMA2; (-) strand; PAM type: YTN; PAM sequence: TTA
tttggaaggttacaataaaa

SEQ ID NO: 268508 - DNA, 20 bp, Artificial Sequence
  Description of Artificial Sequence: Synthetic oligonucleotide
  Target: LAMA2; (-) strand; PAM type: YTN; PAM sequence: TTT
atttggaaggttacaataaa

SEQ ID NO: 268509 - DNA, 20 bp, Artificial Sequence
  Description of Artificial Sequence: Synthetic oligonucleotide
  Target: LAMA2; (-) strand; PAM type: YTN; PAM sequence: CTG
gaacaaatttatttggaagg

SEQ ID NO: 268510 - DNA, 20 bp, Artificial Sequence
  Description of Artificial Sequence: Synthetic oligonucleotide
  Target: LAMA2; (-) strand; PAM type: YTN; PAM sequence: CTC
agcactggaacaaatttatt

SEQ ID NO: 268511 - DNA, 20 bp, Artificial Sequence
  Description of Artificial Sequence: Synthetic oligonucleotide
  Target: LAMA2; (-) strand; PAM type: YTN; PAM sequence: CTC
tcagcactggaacaaattta

SEQ ID NO: 268512 - DNA, 20 bp, Artificial Sequence
  Description of Artificial Sequence: Synthetic oligonucleotide
  Target: LAMA2; (-) strand; PAM type: YTN; PAM sequence: TTA
agaagctctcagcactggaa

SEQ ID NO: 268513 - DNA, 20 bp, Artificial Sequence
  Description of Artificial Sequence: Synthetic oligonucleotide
  Target: LAMA2; (-) strand; PAM type: YTN; PAM sequence: TTT
aagaagctctcagcactgga

SEQ ID NO: 268514 - DNA, 20 bp, Artificial Sequence
  Description of Artificial Sequence: Synthetic oligonucleotide
  Target: LAMA2; (-) strand; PAM type: YTN; PAM sequence: TTA
aatgatttaagaagctctca

SEQ ID NO: 268515 - DNA, 20 bp, Artificial Sequence
  Description of Artificial Sequence: Synthetic oligonucleotide
  Target: LAMA2; (-) strand; PAM type: YTN; PAM sequence: TTT
aaatgatttaagaagctctc

SEQ ID NO: 268516 - DNA, 20 bp, Artificial Sequence
  Description of Artificial Sequence: Synthetic oligonucleotide
  Target: LAMA2; (-) strand; PAM type: YTN; PAM sequence: CTG
agcaggtcgaaagatgattt

SEQ ID NO: 268517 - DNA, 20 bp, Artificial Sequence
  Description of Artificial Sequence: Synthetic oligonucleotide
  Target: LAMA2; (-) strand; PAM type: YTN; PAM sequence: CTG
atcagtctgagcaggtcgaa

SEQ ID NO: 268518 - DNA, 20 bp, Artificial Sequence
  Description of Artificial Sequence: Synthetic oligonucleotide
  Target: LAMA2; (-) strand; PAM type: YTN; PAM sequence: CTA
acctgatcagtctgagcagg

SEQ ID NO: 268519 - DNA, 20 bp, Artificial Sequence
  Description of Artificial Sequence: Synthetic oligonucleotide
  Target: LAMA2; (-) strand; PAM type: YTN; PAM sequence: TTA
gacctaacctgatcagtctg

SEQ ID NO: 268520 - DNA, 20 bp, Artificial Sequence
  Description of Artificial Sequence: Synthetic oligonucleotide
  Target: LAMA2; (-) strand; PAM type: YTN; PAM sequence: TTT
agacctaacctgatcagtct

SEQ ID NO: 268521 - DNA, 20 bp, Artificial Sequence
  Description of Artificial Sequence: Synthetic oligonucleotide
  Target: LAMA2; (-) strand; PAM type: YTN; PAM sequence: TTT
tagacctaacctgatcagtc

SEQ ID NO: 268522 - DNA, 20 bp, Artificial Sequence
  Description of Artificial Sequence: Synthetic oligonucleotide
  Target: LAMA2; (-) strand; PAM type: YTN; PAM sequence: TTA
agcagttttagacctaacct

SEQ ID NO: 268523 - DNA, 20 bp, Artificial Sequence
  Description of Artificial Sequence: Synthetic oligonucleotide
  Target: LAMA2; (-) strand; PAM type: YTN; PAM sequence: TTT
aagcagttttagacctaacc

SEQ ID NO: 268524 - DNA, 20 bp, Artificial Sequence
  Description of Artificial Sequence: Synthetic oligonucleotide
  Target: LAMA2; (-) strand; PAM type: YTN; PAM sequence: CTC
aagaaatttaagcagtttta

SEQ ID NO: 268525 - DNA, 20 bp, Artificial Sequence
  Description of Artificial Sequence: Synthetic oligonucleotide
  Target: LAMA2; (-) strand; PAM type: YTN; PAM sequence: TTA
cagggatactcaagaaattt

SEQ ID NO: 268526 - DNA, 20 bp, Artificial Sequence
  Description of Artificial Sequence: Synthetic oligonucleotide
  Target: LAMA2; (-) strand; PAM type: YTN; PAM sequence: CTA
tattacagggatactcaaga

SEQ ID NO: 268527 - DNA, 20 bp, Artificial Sequence
  Description of Artificial Sequence: Synthetic oligonucleotide
  Target: LAMA2; (-) strand; PAM type: YTN; PAM sequence: TTC
tatattacagggatactcaa

SEQ ID NO: 268528 - DNA, 20 bp, Artificial Sequence
  Description of Artificial Sequence: Synthetic oligonucleotide
  Target: LAMA2; (-) strand; PAM type: YTN; PAM sequence: TTT
ctatattacagggatactca

SEQ ID NO: 268529 - DNA, 20 bp, Artificial Sequence
  Description of Artificial Sequence: Synthetic oligonucleotide
  Target: LAMA2; (-) strand; PAM type: YTN; PAM sequence: TTG
aaaataaagtatgaggagag

SEQ ID NO: 268530 - DNA, 20 bp, Artificial Sequence
  Description of Artificial Sequence: Synthetic oligonucleotide
  Target: LAMA2; (-) strand; PAM type: YTN; PAM sequence: TTA
caagagtattgaaaataaag

SEQ ID NO: 268531 - DNA, 20 bp, Artificial Sequence
  Description of Artificial Sequence: Synthetic oligonucleotide
  Target: LAMA2; (-) strand; PAM type: YTN; PAM sequence: TTA
ttacaagagtattgaaaata

SEQ ID NO: 268532 - DNA, 20 bp, Artificial Sequence
  Description of Artificial Sequence: Synthetic oligonucleotide
  Target: LAMA2; (-) strand; PAM type: YTN; PAM sequence: TTT
attacaagagtattgaaaat

SEQ ID NO: 268533 - DNA, 20 bp, Artificial Sequence
  Description of Artificial Sequence: Synthetic oligonucleotide
  Target: LAMA2; (-) strand; PAM type: YTN; PAM sequence: TTC
aaagagtttattacaagagt

SEQ ID NO: 268534 - DNA, 20 bp, Artificial Sequence
  Description of Artificial Sequence: Synthetic oligonucleotide
  Target: LAMA2; (-) strand; PAM type: YTN; PAM sequence: TTA
aatgttcaaagagtttatta

SEQ ID NO: 268535 - DNA, 20 bp, Artificial Sequence
  Description of Artificial Sequence: Synthetic oligonucleotide
  Target: LAMA2; (-) strand; PAM type: YTN; PAM sequence: TTG
attaaatgttcaaagagttt

SEQ ID NO: 268536 - DNA, 20 bp, Artificial Sequence
  Description of Artificial Sequence: Synthetic oligonucleotide
  Target: LAMA2; (-) strand; PAM type: YTN; PAM sequence: TTC
agattgattaaatgttcaaa

SEQ ID NO: 268537 - DNA, 20 bp, Artificial Sequence
  Description of Artificial Sequence: Synthetic oligonucleotide
  Target: LAMA2; (-) strand; PAM type: YTN; PAM sequence: CTA
agcagattcagattgattaa

SEQ ID NO: 268538 - DNA, 20 bp, Artificial Sequence
  Description of Artificial Sequence: Synthetic oligonucleotide
  Target: LAMA2; (-) strand; PAM type: YTN; PAM sequence: TTC
taagcagattcagattgatt

SEQ ID NO: 268539 - DNA, 20 bp, Artificial Sequence
  Description of Artificial Sequence: Synthetic oligonucleotide
  Target: LAMA2; (-) strand; PAM type: YTN; PAM sequence: TTG
tattctaagcagattcagat

SEQ ID NO: 268540 - DNA, 20 bp, Artificial Sequence
  Description of Artificial Sequence: Synthetic oligonucleotide
  Target: LAMA2; (-) strand; PAM type: YTN; PAM sequence: TTA
taggtaaaataattgtattc

SEQ ID NO: 268541 - DNA, 20 bp, Artificial Sequence
  Description of Artificial Sequence: Synthetic oligonucleotide
  Target: LAMA2; (-) strand; PAM type: YTN; PAM sequence: TTT
ataggtaaaataattgtatt

SEQ ID NO: 268542 - DNA, 20 bp, Artificial Sequence
  Description of Artificial Sequence: Synthetic oligonucleotide
  Target: LAMA2; (-) strand; PAM type: YTN; PAM sequence: TTA
acatttataggtaaaataat

SEQ ID NO: 268543 - DNA, 20 bp, Artificial Sequence
  Description of Artificial Sequence: Synthetic oligonucleotide
  Target: LAMA2; (-) strand; PAM type: YTN; PAM sequence: CTT
aacatttataggtaaaataa

SEQ ID NO: 268544 - DNA, 20 bp, Artificial Sequence
  Description of Artificial Sequence: Synthetic oligonucleotide
  Target: LAMA2; (-) strand; PAM type: YTN; PAM sequence: TTC
ttaacatttataggtaaaat

SEQ ID NO: 268545 - DNA, 20 bp, Artificial Sequence
  Description of Artificial Sequence: Synthetic oligonucleotide
  Target: LAMA2; (-) strand; PAM type: YTN; PAM sequence: CTT
cttaacatttataggtaaaa

SEQ ID NO: 268546 - DNA, 20 bp, Artificial Sequence
  Description of Artificial Sequence: Synthetic oligonucleotide
  Target: LAMA2; (-) strand; PAM type: YTN; PAM sequence: TTA
aatggcttcttaacatttat

SEQ ID NO: 268547 - DNA, 20 bp, Artificial Sequence
  Description of Artificial Sequence: Synthetic oligonucleotide
  Target: LAMA2; (-) strand; PAM type: YTN; PAM sequence: CTT
aaatggcttcttaacattta

SEQ ID NO: 268548 - DNA, 20 bp, Artificial Sequence
  Description of Artificial Sequence: Synthetic oligonucleotide
  Target: LAMA2; (-) strand; PAM type: YTN; PAM sequence: TTA
agtaagtccacttaaatggc

SEQ ID NO: 268549 - DNA, 20 bp, Artificial Sequence
  Description of Artificial Sequence: Synthetic oligonucleotide
  Target: LAMA2; (-) strand; PAM type: YTN; PAM sequence: TTT
aagtaagtccacttaaatgg

SEQ ID NO: 268550 - DNA, 20 bp, Artificial Sequence
  Description of Artificial Sequence: Synthetic oligonucleotide
  Target: LAMA2; (-) strand; PAM type: YTN; PAM sequence: CTG
aaagtagcatttaagtaagt

SEQ ID NO: 268551 - DNA, 20 bp, Artificial Sequence
  Description of Artificial Sequence: Synthetic oligonucleotide
  Target: LAMA2; (-) strand; PAM type: YTN; PAM sequence: TTC
aatgaaagagtacaaatact

SEQ ID NO: 268552 - DNA, 20 bp, Artificial Sequence
  Description of Artificial Sequence: Synthetic oligonucleotide
  Target: LAMA2; (-) strand; PAM type: YTN; PAM sequence: TTT
caatgaaagagtacaaatac

SEQ ID NO: 268553 - DNA, 20 bp, Artificial Sequence
  Description of Artificial Sequence: Synthetic oligonucleotide
  Target: LAMA2; (-) strand; PAM type: YTN; PAM sequence: TTT
tcaatgaaagagtacaaata

SEQ ID NO: 268554 - DNA, 20 bp, Artificial Sequence
  Description of Artificial Sequence: Synthetic oligonucleotide
  Target: LAMA2; (-) strand; PAM type: YTN; PAM sequence: TTT
ttcaatgaaagagtacaaat

SEQ ID NO: 268555 - DNA, 20 bp, Artificial Sequence
  Description of Artificial Sequence: Synthetic oligonucleotide
  Target: LAMA2; (-) strand; PAM type: YTN; PAM sequence: TTT
tttcaatgaaagagtacaaa

SEQ ID NO: 268556 - DNA, 20 bp, Artificial Sequence
  Description of Artificial Sequence: Synthetic oligonucleotide
  Target: LAMA2; (-) strand; PAM type: YTN; PAM sequence: TTT
ttttcaatgaaagagtacaa

SEQ ID NO: 268557 - DNA, 20 bp, Artificial Sequence
  Description of Artificial Sequence: Synthetic oligonucleotide
  Target: LAMA2; (-) strand; PAM type: YTN; PAM sequence: TTA
tttttttcaatgaaagagta

SEQ ID NO: 268558 - DNA, 20 bp, Artificial Sequence
  Description of Artificial Sequence: Synthetic oligonucleotide
  Target: LAMA2; (-) strand; PAM type: YTN; PAM sequence: TTG
attatttttttcaatgaaag

SEQ ID NO: 268559 - DNA, 20 bp, Artificial Sequence
  Description of Artificial Sequence: Synthetic oligonucleotide
  Target: LAMA2; (-) strand; PAM type: YTN; PAM sequence: TTT
gattatttttttcaatgaaa

SEQ ID NO: 268560 - DNA, 20 bp, Artificial Sequence
  Description of Artificial Sequence: Synthetic oligonucleotide
  Target: LAMA2; (-) strand; PAM type: YTN; PAM sequence: TTT
tgattatttttttcaatgaa

SEQ ID NO: 268561 - DNA, 20 bp, Artificial Sequence
  Description of Artificial Sequence: Synthetic oligonucleotide
  Target: LAMA2; (-) strand; PAM type: YTN; PAM sequence: TTT
ttgattatttttttcaatga

SEQ ID NO: 268562 - DNA, 20 bp, Artificial Sequence
  Description of Artificial Sequence: Synthetic oligonucleotide
  Target: LAMA2; (-) strand; PAM type: YTN; PAM sequence: TTC
atgtttttgattattttttt

SEQ ID NO: 268563 - DNA, 20 bp, Artificial Sequence
  Description of Artificial Sequence: Synthetic oligonucleotide
  Target: LAMA2; (-) strand; PAM type: YTN; PAM sequence: TTA
tacattcatgtttttgatta

SEQ ID NO: 268564 - DNA, 20 bp, Artificial Sequence
  Description of Artificial Sequence: Synthetic oligonucleotide
  Target: LAMA2; (-) strand; PAM type: YTN; PAM sequence: TTT
atacattcatgtttttgatt

SEQ ID NO: 268565 - DNA, 20 bp, Artificial Sequence
  Description of Artificial Sequence: Synthetic oligonucleotide
  Target: LAMA2; (-) strand; PAM type: YTN; PAM sequence: TTT
tatacattcatgtttttgat

SEQ ID NO: 268566 - DNA, 20 bp, Artificial Sequence
  Description of Artificial Sequence: Synthetic oligonucleotide
  Target: LAMA2; (-) strand; PAM type: YTN; PAM sequence: CTT
ttatacattcatgtttttga

SEQ ID NO: 268567 - DNA, 20 bp, Artificial Sequence
  Description of Artificial Sequence: Synthetic oligonucleotide
  Target: LAMA2; (-) strand; PAM type: YTN; PAM sequence: TTA
ggcttttatacattcatgtt

SEQ ID NO: 268568 - DNA, 20 bp, Artificial Sequence
  Description of Artificial Sequence: Synthetic oligonucleotide
  Target: LAMA2; (-) strand; PAM type: YTN; PAM sequence: TTG
tgacattaggcttttataca

SEQ ID NO: 268569 - DNA, 20 bp, Artificial Sequence
  Description of Artificial Sequence: Synthetic oligonucleotide
  Target: LAMA2; (-) strand; PAM type: YTN; PAM sequence: TTT
gtgacattaggcttttatac

SEQ ID NO: 268570 - DNA, 20 bp, Artificial Sequence
  Description of Artificial Sequence: Synthetic oligonucleotide
  Target: LAMA2; (-) strand; PAM type: YTN; PAM sequence: TTA
gaaaaggcaaaacatgaaga

SEQ ID NO: 268571 - DNA, 20 bp, Artificial Sequence
  Description of Artificial Sequence: Synthetic oligonucleotide
  Target: LAMA2; (-) strand; PAM type: YTN; PAM sequence: CTG
gttagaaaaggcaaaacatg

SEQ ID NO: 268572 - DNA, 20 bp, Artificial Sequence
  Description of Artificial Sequence: Synthetic oligonucleotide
  Target: LAMA2; (-) strand; PAM type: YTN; PAM sequence: CTG
tgctggttagaaaaggcaaa

SEQ ID NO: 268573 - DNA, 20 bp, Artificial Sequence
  Description of Artificial Sequence: Synthetic oligonucleotide
  Target: LAMA2; (-) strand; PAM type: YTN; PAM sequence: TTC
accctgtgctggttagaaaa

SEQ ID NO: 268574 - DNA, 20 bp, Artificial Sequence
  Description of Artificial Sequence: Synthetic oligonucleotide
  Target: LAMA2; (-) strand; PAM type: YTN; PAM sequence: TTA
attcaccctgtgctggttag

SEQ ID NO: 268575 - DNA, 20 bp, Artificial Sequence
  Description of Artificial Sequence: Synthetic oligonucleotide
  Target: LAMA2; (-) strand; PAM type: YTN; PAM sequence: CTG
tgaaagttaattcaccctgt

SEQ ID NO: 268576 - DNA, 20 bp, Artificial Sequence
  Description of Artificial Sequence: Synthetic oligonucleotide
  Target: LAMA2; (-) strand; PAM type: YTN; PAM sequence: CTG
actgtgaaagttaattcacc

SEQ ID NO: 268577 - DNA, 20 bp, Artificial Sequence
  Description of Artificial Sequence: Synthetic oligonucleotide
  Target: LAMA2; (-) strand; PAM type: YTN; PAM sequence: CTG
catggctgactgtgaaagtt

SEQ ID NO: 268578 - DNA, 20 bp, Artificial Sequence
  Description of Artificial Sequence: Synthetic oligonucleotide
  Target: LAMA2; (-) strand; PAM type: YTN; PAM sequence: CTG
tgaaatctgcatggctgact

SEQ ID NO: 268579 - DNA, 20 bp, Artificial Sequence
  Description of Artificial Sequence: Synthetic oligonucleotide
  Target: LAMA2; (-) strand; PAM type: YTN; PAM sequence: CTG
agactgtgaaatctgcatgg

SEQ ID NO: 268580 - DNA, 20 bp, Artificial Sequence
  Description of Artificial Sequence: Synthetic oligonucleotide
  Target: LAMA2; (-) strand; PAM type: YTN; PAM sequence: CTG
cctgagactgtgaaatctgc

SEQ ID NO: 268581 - DNA, 20 bp, Artificial Sequence
  Description of Artificial Sequence: Synthetic oligonucleotide
  Target: LAMA2; (-) strand; PAM type: YTN; PAM sequence: TTA
gctgcctgagactgtgaaat

SEQ ID NO: 268582 - DNA, 20 bp, Artificial Sequence
  Description of Artificial Sequence: Synthetic oligonucleotide
  Target: LAMA2; (-) strand; PAM type: YTN; PAM sequence: TTT
agctgcctgagactgtgaaa

SEQ ID NO: 268583 - DNA, 20 bp, Artificial Sequence
  Description of Artificial Sequence: Synthetic oligonucleotide
  Target: LAMA2; (-) strand; PAM type: YTN; PAM sequence: CTT
tagctgcctgagactgtgaa

SEQ ID NO: 268584 - DNA, 20 bp, Artificial Sequence
  Description of Artificial Sequence: Synthetic oligonucleotide
  Target: LAMA2; (-) strand; PAM type: YTN; PAM sequence: CTG
gcaagataatcatagaccat

SEQ ID NO: 268585 - DNA, 20 bp, Artificial Sequence
  Description of Artificial Sequence: Synthetic oligonucleotide
  Target: LAMA2; (-) strand; PAM type: YTN; PAM sequence: CTA
taaatactggcaagataatc

SEQ ID NO: 268586 - DNA, 20 bp, Artificial Sequence
  Description of Artificial Sequence: Synthetic oligonucleotide
  Target: LAMA2; (-) strand; PAM type: YTN; PAM sequence: TTG
gagccaaaagctataaatac

SEQ ID NO: 268587 - DNA, 20 bp, Artificial Sequence
  Description of Artificial Sequence: Synthetic oligonucleotide
  Target: LAMA2; (-) strand; PAM type: YTN; PAM sequence: TTG
agagacagtaggggattgga

SEQ ID NO: 268588 - DNA, 20 bp, Artificial Sequence
  Description of Artificial Sequence: Synthetic oligonucleotide
  Target: LAMA2; (-) strand; PAM type: YTN; PAM sequence: TTC
aacaggcaagtatgtgagga

SEQ ID NO: 268589 - DNA, 20 bp, Artificial Sequence
  Description of Artificial Sequence: Synthetic oligonucleotide
  Target: LAMA2; (-) strand; PAM type: YTN; PAM sequence: TTG
ttcaacaggcaagtatgtga

SEQ ID NO: 268590 - DNA, 20 bp, Artificial Sequence
  Description of Artificial Sequence: Synthetic oligonucleotide
  Target: LAMA2; (-) strand; PAM type: YTN; PAM sequence: TTT
gttcaacaggcaagtatgtg

SEQ ID NO: 268591 - DNA, 20 bp, Artificial Sequence
  Description of Artificial Sequence: Synthetic oligonucleotide
  Target: LAMA2; (-) strand; PAM type: YTN; PAM sequence: TTT
tgttcaacaggcaagtatgt

SEQ ID NO: 268592 - DNA, 20 bp, Artificial Sequence
  Description of Artificial Sequence: Synthetic oligonucleotide
  Target: LAMA2; (-) strand; PAM type: YTN; PAM sequence: TTT
ttgttcaacaggcaagtatg

SEQ ID NO: 268593 - DNA, 20 bp, Artificial Sequence
  Description of Artificial Sequence: Synthetic oligonucleotide
  Target: LAMA2; (-) strand; PAM type: YTN; PAM sequence: TTA
gaatttttgttcaacaggca

SEQ ID NO: 268594 - DNA, 20 bp, Artificial Sequence
  Description of Artificial Sequence: Synthetic oligonucleotide
  Target: LAMA2; (-) strand; PAM type: YTN; PAM sequence: TTA
tatatggtcagtgtaaatat

SEQ ID NO: 268595 - DNA, 20 bp, Artificial Sequence
  Description of Artificial Sequence: Synthetic oligonucleotide
  Target: LAMA2; (-) strand; PAM type: YTN; PAM sequence: TTT
atatatggtcagtgtaaata

SEQ ID NO: 268596 - DNA, 20 bp, Artificial Sequence
  Description of Artificial Sequence: Synthetic oligonucleotide
  Target: LAMA2; (-) strand; PAM type: YTN; PAM sequence: TTT
tatatatggtcagtgtaaat

SEQ ID NO: 268597 - DNA, 20 bp, Artificial Sequence
  Description of Artificial Sequence: Synthetic oligonucleotide
  Target: LAMA2; (-) strand; PAM type: YTN; PAM sequence: TTG
gacaacaagttttatatatg

SEQ ID NO: 268598 - DNA, 20 bp, Artificial Sequence
  Description of Artificial Sequence: Synthetic oligonucleotide
  Target: LAMA2; (-) strand; PAM type: YTN; PAM sequence: TTA
atatagtgtcccagattgga

SEQ ID NO: 268599 - DNA, 20 bp, Artificial Sequence
  Description of Artificial Sequence: Synthetic oligonucleotide
  Target: LAMA2; (-) strand; PAM type: YTN; PAM sequence: TTT
aatatagtgtcccagattgg

SEQ ID NO: 268600 - DNA, 20 bp, Artificial Sequence
  Description of Artificial Sequence: Synthetic oligonucleotide
  Target: LAMA2; (-) strand; PAM type: YTN; PAM sequence: TTT
taatatagtgtcccagattg

SEQ ID NO: 268601 - DNA, 20 bp, Artificial Sequence
  Description of Artificial Sequence: Synthetic oligonucleotide
  Target: LAMA2; (-) strand; PAM type: YTN; PAM sequence: TTT
ttaatatagtgtcccagatt

SEQ ID NO: 268602 - DNA, 20 bp, Artificial Sequence
  Description of Artificial Sequence: Synthetic oligonucleotide
  Target: LAMA2; (-) strand; PAM type: YTN; PAM sequence: CTG
tttttaatatagtgtcccag

SEQ ID NO: 268603 - DNA, 20 bp, Artificial Sequence
  Description of Artificial Sequence: Synthetic oligonucleotide
  Target: LAMA2; (-) strand; PAM type: YTN; PAM sequence: CTG
cctgtttttaatatagtgtc

SEQ ID NO: 268604 - DNA, 20 bp, Artificial Sequence
  Description of Artificial Sequence: Synthetic oligonucleotide
  Target: LAMA2; (-) strand; PAM type: YTN; PAM sequence: CTA
aaaacactgcctgtttttaa

SEQ ID NO: 268605 - DNA, 20 bp, Artificial Sequence
  Description of Artificial Sequence: Synthetic oligonucleotide
  Target: LAMA2; (-) strand; PAM type: YTN; PAM sequence: TTG
ctaaaaacactgcctgtttt

SEQ ID NO: 268606 - DNA, 20 bp, Artificial Sequence
  Description of Artificial Sequence: Synthetic oligonucleotide
  Target: LAMA2; (-) strand; PAM type: YTN; PAM sequence: TTA
attgctaaaaacactgcctg

SEQ ID NO: 268607 - DNA, 20 bp, Artificial Sequence
  Description of Artificial Sequence: Synthetic oligonucleotide
  Target: LAMA2; (-) strand; PAM type: YTN; PAM sequence: CTT
aattgctaaaaacactgcct

SEQ ID NO: 268608 - DNA, 20 bp, Artificial Sequence
  Description of Artificial Sequence: Synthetic oligonucleotide
  Target: LAMA2; (-) strand; PAM type: YTN; PAM sequence: TTG
gcttaattgctaaaaacact

SEQ ID NO: 268609 - DNA, 20 bp, Artificial Sequence
  Description of Artificial Sequence: Synthetic oligonucleotide
  Target: LAMA2; (-) strand; PAM type: YTN; PAM sequence: TTT
ggcttaattgctaaaaacac

SEQ ID NO: 268610 - DNA, 20 bp, Artificial Sequence
  Description of Artificial Sequence: Synthetic oligonucleotide
  Target: LAMA2; (-) strand; PAM type: YTN; PAM sequence: TTT
tggcttaattgctaaaaaca

SEQ ID NO: 268611 - DNA, 20 bp, Artificial Sequence
  Description of Artificial Sequence: Synthetic oligonucleotide
  Target: LAMA2; (-) strand; PAM type: YTN; PAM sequence: TTG
ttttggcttaattgctaaaa

SEQ ID NO: 268612 - DNA, 20 bp, Artificial Sequence
  Description of Artificial Sequence: Synthetic oligonucleotide
  Target: LAMA2; (-) strand; PAM type: YTN; PAM sequence: CTG
ttgttttggcttaattgcta

SEQ ID NO: 268613 - DNA, 20 bp, Artificial Sequence
  Description of Artificial Sequence: Synthetic oligonucleotide
  Target: LAMA2; (-) strand; PAM type: YTN; PAM sequence: TTA
cctgttgttttggcttaatt

SEQ ID NO: 268614 - DNA, 20 bp, Artificial Sequence
  Description of Artificial Sequence: Synthetic oligonucleotide
  Target: LAMA2; (-) strand; PAM type: YTN; PAM sequence: CTA
ttacctgttgttttggctta

SEQ ID NO: 268615 - DNA, 20 bp, Artificial Sequence
  Description of Artificial Sequence: Synthetic oligonucleotide
  Target: LAMA2; (-) strand; PAM type: YTN; PAM sequence: TTC
ctattacctgttgttttggc

SEQ ID NO: 268616 - DNA, 20 bp, Artificial Sequence
  Description of Artificial Sequence: Synthetic oligonucleotide
  Target: LAMA2; (-) strand; PAM type: YTN; PAM sequence: TTT
cctattacctgttgttttgg

SEQ ID NO: 268617 - DNA, 20 bp, Artificial Sequence
  Description of Artificial Sequence: Synthetic oligonucleotide
  Target: LAMA2; (-) strand; PAM type: YTN; PAM sequence: TTG
cccaggacaatttcctatta

SEQ ID NO: 268618 - DNA, 20 bp, Artificial Sequence
  Description of Artificial Sequence: Synthetic oligonucleotide
  Target: LAMA2; (-) strand; PAM type: YTN; PAM sequence: TTT
gcccaggacaatttcctatt

SEQ ID NO: 268619 - DNA, 20 bp, Artificial Sequence
  Description of Artificial Sequence: Synthetic oligonucleotide
  Target: LAMA2; (-) strand; PAM type: YTN; PAM sequence: CTG
gtttgcccaggacaatttcc

SEQ ID NO: 268620 - DNA, 20 bp, Artificial Sequence
  Description of Artificial Sequence: Synthetic oligonucleotide
  Target: LAMA2; (-) strand; PAM type: YTN; PAM sequence: TTC
tggtttgcccaggacaattt

SEQ ID NO: 268621 - DNA, 20 bp, Artificial Sequence
  Description of Artificial Sequence: Synthetic oligonucleotide
  Target: LAMA2; (-) strand; PAM type: YTN; PAM sequence: CTA
gcagggccatacattctggt

SEQ ID NO: 268622 - DNA, 20 bp, Artificial Sequence
  Description of Artificial Sequence: Synthetic oligonucleotide
  Target: LAMA2; (-) strand; PAM type: YTN; PAM sequence: TTA
cacaatgctagcagggccat

SEQ ID NO: 268623 - DNA, 20 bp, Artificial Sequence
  Description of Artificial Sequence: Synthetic oligonucleotide
  Target: LAMA2; (-) strand; PAM type: YTN; PAM sequence: TTT
acacaatgctagcagggcca

SEQ ID NO: 268624 - DNA, 20 bp, Artificial Sequence
  Description of Artificial Sequence: Synthetic oligonucleotide
  Target: LAMA2; (-) strand; PAM type: YTN; PAM sequence: CTT
tacacaatgctagcagggcc

SEQ ID NO: 268625 - DNA, 20 bp, Artificial Sequence
  Description of Artificial Sequence: Synthetic oligonucleotide
  Target: LAMA2; (-) strand; PAM type: YTN; PAM sequence: TTG
gtaactttacacaatgctag

SEQ ID NO: 268626 - DNA, 20 bp, Artificial Sequence
  Description of Artificial Sequence: Synthetic oligonucleotide
  Target: LAMA2; (-) strand; PAM type: YTN; PAM sequence: TTT
ggtaactttacacaatgcta

SEQ ID NO: 268627 - DNA, 20 bp, Artificial Sequence
  Description of Artificial Sequence: Synthetic oligonucleotide
  Target: LAMA2; (-) strand; PAM type: YTN; PAM sequence: CTG
gaagtttggtaactttacac

SEQ ID NO: 268628 - DNA, 20 bp, Artificial Sequence
  Description of Artificial Sequence: Synthetic oligonucleotide
  Target: LAMA2; (-) strand; PAM type: YTN; PAM sequence: TTA
tgacactggaagtttggtaa

SEQ ID NO: 268629 - DNA, 20 bp, Artificial Sequence
  Description of Artificial Sequence: Synthetic oligonucleotide
  Target: LAMA2; (-) strand; PAM type: YTN; PAM sequence: CTC
cgtgttatgacactggaagt

SEQ ID NO: 268630 - DNA, 20 bp, Artificial Sequence
  Description of Artificial Sequence: Synthetic oligonucleotide
  Target: LAMA2; (-) strand; PAM type: YTN; PAM sequence: TTC
actccgtgttatgacactgg

SEQ ID NO: 268631 - DNA, 20 bp, Artificial Sequence
  Description of Artificial Sequence: Synthetic oligonucleotide
  Target: LAMA2; (-) strand; PAM type: YTN; PAM sequence: TTT
cactccgtgttatgacactg

SEQ ID NO: 268632 - DNA, 20 bp, Artificial Sequence
  Description of Artificial Sequence: Synthetic oligonucleotide
  Target: LAMA2; (-) strand; PAM type: YTN; PAM sequence: CTA
agtgtatttcactccgtgtt

SEQ ID NO: 268633 - DNA, 20 bp, Artificial Sequence
  Description of Artificial Sequence: Synthetic oligonucleotide
  Target: LAMA2; (-) strand; PAM type: YTN; PAM sequence: TTC
acctaagtgtatttcactcc

SEQ ID NO: 268634 - DNA, 20 bp, Artificial Sequence
  Description of Artificial Sequence: Synthetic oligonucleotide
  Target: LAMA2; (-) strand; PAM type: YTN; PAM sequence: CTA
tgcatccattcacctaagtg

SEQ ID NO: 268635 - DNA, 20 bp, Artificial Sequence
  Description of Artificial Sequence: Synthetic oligonucleotide
  Target: LAMA2; (-) strand; PAM type: YTN; PAM sequence: TTC
cacgtatctatgcatccatt

SEQ ID NO: 268636 - DNA, 20 bp, Artificial Sequence
  Description of Artificial Sequence: Synthetic oligonucleotide
  Target: LAMA2; (-) strand; PAM type: YTN; PAM sequence: CTT
ccacgtatctatgcatccat

SEQ ID NO: 268637 - DNA, 20 bp, Artificial Sequence
  Description of Artificial Sequence: Synthetic oligonucleotide
  Target: LAMA2; (-) strand; PAM type: YTN; PAM sequence: CTC
ttccacgtatctatgcatcc

SEQ ID NO: 268638 - DNA, 20 bp, Artificial Sequence
  Description of Artificial Sequence: Synthetic oligonucleotide
  Target: LAMA2; (-) strand; PAM type: YTN; PAM sequence: TTG
actcttccacgtatctatgc

SEQ ID NO: 268639 - DNA, 20 bp, Artificial Sequence
  Description of Artificial Sequence: Synthetic oligonucleotide
  Target: LAMA2; (-) strand; PAM type: YTN; PAM sequence: TTA
attgactcttccacgtatct

SEQ ID NO: 268640 - DNA, 20 bp, Artificial Sequence
  Description of Artificial Sequence: Synthetic oligonucleotide
  Target: LAMA2; (-) strand; PAM type: YTN; PAM sequence: CTA
aatgcagtccattaattgac

SEQ ID NO: 268641 - DNA, 20 bp, Artificial Sequence
  Description of Artificial Sequence: Synthetic oligonucleotide
  Target: LAMA2; (-) strand; PAM type: YTN; PAM sequence: CTG
gatgaaccctaaatgcagtc

SEQ ID NO: 268642 - DNA, 20 bp, Artificial Sequence
  Description of Artificial Sequence: Synthetic oligonucleotide
  Target: LAMA2; (-) strand; PAM type: YTN; PAM sequence: TTG
gaaaagtagaaagagaatcc

SEQ ID NO: 268643 - DNA, 20 bp, Artificial Sequence
  Description of Artificial Sequence: Synthetic oligonucleotide
  Target: LAMA2; (-) strand; PAM type: YTN; PAM sequence: TTT
ggaaaagtagaaagagaatc

SEQ ID NO: 268644 - DNA, 20 bp, Artificial Sequence
  Description of Artificial Sequence: Synthetic oligonucleotide
  Target: LAMA2; (-) strand; PAM type: YTN; PAM sequence: CTG
atttggaaaagtagaaagag

SEQ ID NO: 268645 - DNA, 20 bp, Artificial Sequence
  Description of Artificial Sequence: Synthetic oligonucleotide
  Target: LAMA2; (-) strand; PAM type: YTN; PAM sequence: TTA
atgatatgcaaacaaaatat

SEQ ID NO: 268646 - DNA, 20 bp, Artificial Sequence
  Description of Artificial Sequence: Synthetic oligonucleotide
  Target: LAMA2; (-) strand; PAM type: YTN; PAM sequence: CTG
tggaagtgggttaatgatat

SEQ ID NO: 268647 - DNA, 20 bp, Artificial Sequence
  Description of Artificial Sequence: Synthetic oligonucleotide
  Target: LAMA2; (-) strand; PAM type: YTN; PAM sequence: TTC
atgtgtatctgtggaagtgg

SEQ ID NO: 268648 - DNA, 20 bp, Artificial Sequence
  Description of Artificial Sequence: Synthetic oligonucleotide
  Target: LAMA2; (-) strand; PAM type: YTN; PAM sequence: TTT
catgtgtatctgtggaagtg

SEQ ID NO: 268649 - DNA, 20 bp, Artificial Sequence
  Description of Artificial Sequence: Synthetic oligonucleotide
  Target: LAMA2; (-) strand; PAM type: YTN; PAM sequence: TTT
tcatgtgtatctgtggaagt

SEQ ID NO: 268650 - DNA, 20 bp, Artificial Sequence
  Description of Artificial Sequence: Synthetic oligonucleotide
  Target: LAMA2; (-) strand; PAM type: YTN; PAM sequence: TTT
ttcatgtgtatctgtggaag

SEQ ID NO: 268651 - DNA, 20 bp, Artificial Sequence
  Description of Artificial Sequence: Synthetic oligonucleotide
  Target: LAMA2; (-) strand; PAM type: YTN; PAM sequence: CTC
aagatggatttttcatgtgt

SEQ ID NO: 268652 - DNA, 20 bp, Artificial Sequence
  Description of Artificial Sequence: Synthetic oligonucleotide
  Target: LAMA2; (-) strand; PAM type: YTN; PAM sequence: TTC
ctcaagatggatttttcatg

SEQ ID NO: 268653 - DNA, 20 bp, Artificial Sequence
  Description of Artificial Sequence: Synthetic oligonucleotide
  Target: LAMA2; (-) strand; PAM type: YTN; PAM sequence: CTT
cctcaagatggatttttcat

SEQ ID NO: 268654 - DNA, 20 bp, Artificial Sequence
  Description of Artificial Sequence: Synthetic oligonucleotide
  Target: LAMA2; (-) strand; PAM type: YTN; PAM sequence: TTG
ccatatcttcctcaagatgg

SEQ ID NO: 268655 - DNA, 20 bp, Artificial Sequence
  Description of Artificial Sequence: Synthetic oligonucleotide
  Target: LAMA2; (-) strand; PAM type: YTN; PAM sequence: TTT
gccatatcttcctcaagatg

SEQ ID NO: 268656 - DNA, 20 bp, Artificial Sequence
  Description of Artificial Sequence: Synthetic oligonucleotide
  Target: LAMA2; (-) strand; PAM type: YTN; PAM sequence: TTT
tgccatatcttcctcaagat

SEQ ID NO: 268657 - DNA, 20 bp, Artificial Sequence
  Description of Artificial Sequence: Synthetic oligonucleotide
  Target: LAMA2; (-) strand; PAM type: YTN; PAM sequence: TTT
ttgccatatcttcctcaaga

SEQ ID NO: 268658 - DNA, 20 bp, Artificial Sequence
  Description of Artificial Sequence: Synthetic oligonucleotide
  Target: LAMA2; (-) strand; PAM type: YTN; PAM sequence: CTT
tttgccatatcttcctcaag

SEQ ID NO: 268659 - DNA, 20 bp, Artificial Sequence
  Description of Artificial Sequence: Synthetic oligonucleotide
  Target: LAMA2; (-) strand; PAM type: YTN; PAM sequence: TTC
tttttgccatatcttcctca

SEQ ID NO: 268660 - DNA, 20 bp, Artificial Sequence
  Description of Artificial Sequence: Synthetic oligonucleotide
  Target: LAMA2; (-) strand; PAM type: YTN; PAM sequence: TTT
ctttttgccatatcttcctc

SEQ ID NO: 268661 - DNA, 20 bp, Artificial Sequence
  Description of Artificial Sequence: Synthetic oligonucleotide
  Target: LAMA2; (-) strand; PAM type: YTN; PAM sequence: TTT
tctttttgccatatcttcct

SEQ ID NO: 268662 - DNA, 20 bp, Artificial Sequence
  Description of Artificial Sequence: Synthetic oligonucleotide
  Target: LAMA2; (-) strand; PAM type: YTN; PAM sequence: CTT
ttctttttgccatatcttcc

SEQ ID NO: 268663 - DNA, 20 bp, Artificial Sequence
  Description of Artificial Sequence: Synthetic oligonucleotide
  Target: LAMA2; (-) strand; PAM type: YTN; PAM sequence: TTC
atcttttctttttgccatat

SEQ ID NO: 268664 - DNA, 20 bp, Artificial Sequence
  Description of Artificial Sequence: Synthetic oligonucleotide
  Target: LAMA2; (-) strand; PAM type: YTN; PAM sequence: TTA
ttcatcttttctttttgcca

SEQ ID NO: 268665 - DNA, 20 bp, Artificial Sequence
  Description of Artificial Sequence: Synthetic oligonucleotide
  Target: LAMA2; (-) strand; PAM type: YTN; PAM sequence: TTT
attcatcttttctttttgcc

SEQ ID NO: 268666 - DNA, 20 bp, Artificial Sequence
  Description of Artificial Sequence: Synthetic oligonucleotide
  Target: LAMA2; (-) strand; PAM type: YTN; PAM sequence: TTT
tattcatcttttctttttgc

SEQ ID NO: 268667 - DNA, 20 bp, Artificial Sequence
  Description of Artificial Sequence: Synthetic oligonucleotide
  Target: LAMA2; (-) strand; PAM type: YTN; PAM sequence: CTT
ttattcatcttttctttttg

SEQ ID NO: 268668 - DNA, 20 bp, Artificial Sequence
  Description of Artificial Sequence: Synthetic oligonucleotide
  Target: LAMA2; (-) strand; PAM type: YTN; PAM sequence: TTA
cttttattcatcttttcttt

SEQ ID NO: 268669 - DNA, 20 bp, Artificial Sequence
  Description of Artificial Sequence: Synthetic oligonucleotide
  Target: LAMA2; (-) strand; PAM type: YTN; PAM sequence: TTT
acttttattcatcttttctt

SEQ ID NO: 268670 - DNA, 20 bp, Artificial Sequence
  Description of Artificial Sequence: Synthetic oligonucleotide
  Target: LAMA2; (-) strand; PAM type: YTN; PAM sequence: CTG
tttacttttattcatctttt

SEQ ID NO: 268671 - DNA, 20 bp, Artificial Sequence
  Description of Artificial Sequence: Synthetic oligonucleotide
  Target: LAMA2; (-) strand; PAM type: YTN; PAM sequence: TTC
tgtttacttttattcatctt

SEQ ID NO: 268672 - DNA, 20 bp, Artificial Sequence
  Description of Artificial Sequence: Synthetic oligonucleotide
  Target: LAMA2; (-) strand; PAM type: YTN; PAM sequence: TTT
ctgtttacttttattcatct

SEQ ID NO: 268673 - DNA, 20 bp, Artificial Sequence
  Description of Artificial Sequence: Synthetic oligonucleotide
  Target: LAMA2; (-) strand; PAM type: YTN; PAM sequence: TTT
tctgtttacttttattcatc

SEQ ID NO: 268674 - DNA, 20 bp, Artificial Sequence
  Description of Artificial Sequence: Synthetic oligonucleotide
  Target: LAMA2; (-) strand; PAM type: YTN; PAM sequence: CTC
agattttctgtttactttta

SEQ ID NO: 268675 - DNA, 20 bp, Artificial Sequence
  Description of Artificial Sequence: Synthetic oligonucleotide
  Target: LAMA2; (-) strand; PAM type: YTN; PAM sequence: CTA
ctcagattttctgtttactt

SEQ ID NO: 268676 - DNA, 20 bp, Artificial Sequence
  Description of Artificial Sequence: Synthetic oligonucleotide
  Target: LAMA2; (-) strand; PAM type: YTN; PAM sequence: TTA
agtggcaataggctactcag

SEQ ID NO: 268677 - DNA, 20 bp, Artificial Sequence
  Description of Artificial Sequence: Synthetic oligonucleotide
  Target: LAMA2; (-) strand; PAM type: YTN; PAM sequence: TTA
ccaatgaggcaaaagaggca

SEQ ID NO: 268678 - DNA, 20 bp, Artificial Sequence
  Description of Artificial Sequence: Synthetic oligonucleotide
  Target: LAMA2; (-) strand; PAM type: YTN; PAM sequence: TTT
accaatgaggcaaaagaggc

SEQ ID NO: 268679 - DNA, 20 bp, Artificial Sequence
  Description of Artificial Sequence: Synthetic oligonucleotide
  Target: LAMA2; (-) strand; PAM type: YTN; PAM sequence: TTT
taccaatgaggcaaaagagg

SEQ ID NO: 268680 - DNA, 20 bp, Artificial Sequence
  Description of Artificial Sequence: Synthetic oligonucleotide
  Target: LAMA2; (-) strand; PAM type: YTN; PAM sequence: TTA
attttaccaatgaggcaaaa

SEQ ID NO: 268681 - DNA, 20 bp, Artificial Sequence
  Description of Artificial Sequence: Synthetic oligonucleotide
  Target: LAMA2; (-) strand; PAM type: YTN; PAM sequence: CTC
aaaataaccaaataatacaa

SEQ ID NO: 268682 - DNA, 20 bp, Artificial Sequence
  Description of Artificial Sequence: Synthetic oligonucleotide
  Target: LAMA2; (-) strand; PAM type: YTN; PAM sequence: TTC
agatctcaaaataaccaaat

SEQ ID NO: 268683 - DNA, 20 bp, Artificial Sequence
  Description of Artificial Sequence: Synthetic oligonucleotide
  Target: LAMA2; (-) strand; PAM type: YTN; PAM sequence: TTT
cagatctcaaaataaccaaa

SEQ ID NO: 268684 - DNA, 20 bp, Artificial Sequence
  Description of Artificial Sequence: Synthetic oligonucleotide
  Target: LAMA2; (-) strand; PAM type: YTN; PAM sequence: CTC
atgaatttcagatctcaaaa

SEQ ID NO: 268685 - DNA, 20 bp, Artificial Sequence
  Description of Artificial Sequence: Synthetic oligonucleotide
  Target: LAMA2; (-) strand; PAM type: YTN; PAM sequence: CTA
tactcatgaatttcagatct

SEQ ID NO: 268686 - DNA, 20 bp, Artificial Sequence
  Description of Artificial Sequence: Synthetic oligonucleotide
  Target: LAMA2; (-) strand; PAM type: YTN; PAM sequence: TTC
cctatactcatgaatttcag

SEQ ID NO: 268687 - DNA, 20 bp, Artificial Sequence
  Description of Artificial Sequence: Synthetic oligonucleotide
  Target: LAMA2; (-) strand; PAM type: YTN; PAM sequence: CTT
ccctatactcatgaatttca

SEQ ID NO: 268688 - DNA, 20 bp, Artificial Sequence
  Description of Artificial Sequence: Synthetic oligonucleotide
  Target: LAMA2; (-) strand; PAM type: YTN; PAM sequence: CTG
ggcttccctatactcatgaa

SEQ ID NO: 268689 - DNA, 20 bp, Artificial Sequence
  Description of Artificial Sequence: Synthetic oligonucleotide
  Target: LAMA2; (-) strand; PAM type: YTN; PAM sequence: TTC
tgggcttccctatactcatg

SEQ ID NO: 268690 - DNA, 20 bp, Artificial Sequence
  Description of Artificial Sequence: Synthetic oligonucleotide
  Target: LAMA2; (-) strand; PAM type: YTN; PAM sequence: CTT
ctgggcttccctatactcat

SEQ ID NO: 268691 - DNA, 20 bp, Artificial Sequence
  Description of Artificial Sequence: Synthetic oligonucleotide
  Target: LAMA2; (-) strand; PAM type: YTN; PAM sequence: TTG
acttctgggcttccctatac

SEQ ID NO: 268692 - DNA, 20 bp, Artificial Sequence
  Description of Artificial Sequence: Synthetic oligonucleotide
  Target: LAMA2; (-) strand; PAM type: YTN; PAM sequence: CTA
tattgacttctgggcttccc

SEQ ID NO: 268693 - DNA, 20 bp, Artificial Sequence
  Description of Artificial Sequence: Synthetic oligonucleotide
  Target: LAMA2; (-) strand; PAM type: YTN; PAM sequence: TTC
tatattgacttctgggcttc

SEQ ID NO: 268694 - DNA, 20 bp, Artificial Sequence
  Description of Artificial Sequence: Synthetic oligonucleotide
  Target: LAMA2; (-) strand; PAM type: YTN; PAM sequence: TTA
gagatgagtgcaattctata

SEQ ID NO: 268695 - DNA, 20 bp, Artificial Sequence
  Description of Artificial Sequence: Synthetic oligonucleotide
  Target: LAMA2; (-) strand; PAM type: YTN; PAM sequence: TTG
tataattagagatgagtgca

SEQ ID NO: 268696 - DNA, 20 bp, Artificial Sequence
  Description of Artificial Sequence: Synthetic oligonucleotide
  Target: LAMA2; (-) strand; PAM type: YTN; PAM sequence: CTT
gtataattagagatgagtgc

SEQ ID NO: 268697 - DNA, 20 bp, Artificial Sequence
  Description of Artificial Sequence: Synthetic oligonucleotide
  Target: LAMA2; (-) strand; PAM type: YTN; PAM sequence: CTC
ttgtataattagagatgagt

SEQ ID NO: 268698 - DNA, 20 bp, Artificial Sequence
  Description of Artificial Sequence: Synthetic oligonucleotide
  Target: LAMA2; (-) strand; PAM type: YTN; PAM sequence: TTA
agtcctcttgtataattaga

SEQ ID NO: 268699 - DNA, 20 bp, Artificial Sequence
  Description of Artificial Sequence: Synthetic oligonucleotide
  Target: LAMA2; (-) strand; PAM type: YTN; PAM sequence: TTG
ttaagtcctcttgtataatt

SEQ ID NO: 268700 - DNA, 20 bp, Artificial Sequence
  Description of Artificial Sequence: Synthetic oligonucleotide
  Target: LAMA2; (-) strand; PAM type: YTN; PAM sequence: TTT
gttaagtcctcttgtataat

SEQ ID NO: 268701 - DNA, 20 bp, Artificial Sequence
  Description of Artificial Sequence: Synthetic oligonucleotide
  Target: LAMA2; (-) strand; PAM type: YTN; PAM sequence: TTT
tgttaagtcctcttgtataa

SEQ ID NO: 268702 - DNA, 20 bp, Artificial Sequence
  Description of Artificial Sequence: Synthetic oligonucleotide
  Target: LAMA2; (-) strand; PAM type: YTN; PAM sequence: TTT
ttgttaagtcctcttgtata

SEQ ID NO: 268703 - DNA, 20 bp, Artificial Sequence
  Description of Artificial Sequence: Synthetic oligonucleotide
  Target: LAMA2; (-) strand; PAM type: YTN; PAM sequence: TTT
tttgttaagtcctcttgtat

SEQ ID NO: 268704 - DNA, 20 bp, Artificial Sequence
  Description of Artificial Sequence: Synthetic oligonucleotide
  Target: LAMA2; (-) strand; PAM type: YTN; PAM sequence: CTT
ttttgttaagtcctcttgta

SEQ ID NO: 268705 - DNA, 20 bp, Artificial Sequence
  Description of Artificial Sequence: Synthetic oligonucleotide
  Target: LAMA2; (-) strand; PAM type: YTN; PAM sequence: CTA
gatcataaacttttttgtta

SEQ ID NO: 268706 - DNA, 20 bp, Artificial Sequence
  Description of Artificial Sequence: Synthetic oligonucleotide
  Target: LAMA2; (-) strand; PAM type: YTN; PAM sequence: CTC
tagatcataaacttttttgt

SEQ ID NO: 268707 - DNA, 20 bp, Artificial Sequence
  Description of Artificial Sequence: Synthetic oligonucleotide
  Target: LAMA2; (-) strand; PAM type: YTN; PAM sequence: CTG
ctctagatcataaacttttt

SEQ ID NO: 268708 - DNA, 20 bp, Artificial Sequence
  Description of Artificial Sequence: Synthetic oligonucleotide
  Target: LAMA2; (-) strand; PAM type: YTN; PAM sequence: CTG
tgactgctctagatcataaa

SEQ ID NO: 268709 - DNA, 20 bp, Artificial Sequence
  Description of Artificial Sequence: Synthetic oligonucleotide
  Target: LAMA2; (-) strand; PAM type: YTN; PAM sequence: TTG
tctgtgactgctctagatca

SEQ ID NO: 268710 - DNA, 20 bp, Artificial Sequence
  Description of Artificial Sequence: Synthetic oligonucleotide
  Target: LAMA2; (-) strand; PAM type: YTN; PAM sequence: TTT
gtctgtgactgctctagatc

SEQ ID NO: 268711 - DNA, 20 bp, Artificial Sequence
  Description of Artificial Sequence: Synthetic oligonucleotide
  Target: LAMA2; (-) strand; PAM type: YTN; PAM sequence: CTG
tgggtcatagtttgtctgtg

SEQ ID NO: 268712 - DNA, 20 bp, Artificial Sequence
  Description of Artificial Sequence: Synthetic oligonucleotide
  Target: LAMA2; (-) strand; PAM type: YTN; PAM sequence: TTG
gcctgtgggtcatagtttgt

SEQ ID NO: 268713 - DNA, 20 bp, Artificial Sequence
  Description of Artificial Sequence: Synthetic oligonucleotide
  Target: LAMA2; (-) strand; PAM type: YTN; PAM sequence: TTT
ggcctgtgggtcatagtttg

SEQ ID NO: 268714 - DNA, 20 bp, Artificial Sequence
  Description of Artificial Sequence: Synthetic oligonucleotide
  Target: LAMA2; (-) strand; PAM type: YTN; PAM sequence: TTG
agtgccatacagaatcagaa

SEQ ID NO: 268715 - DNA, 20 bp, Artificial Sequence
  Description of Artificial Sequence: Synthetic oligonucleotide
  Target: LAMA2; (-) strand; PAM type: YTN; PAM sequence: TTA
attgagtgccatacagaatc

SEQ ID NO: 268716 - DNA, 20 bp, Artificial Sequence
  Description of Artificial Sequence: Synthetic oligonucleotide
  Target: LAMA2; (-) strand; PAM type: YTN; PAM sequence: CTT
aattgagtgccatacagaat

SEQ ID NO: 268717 - DNA, 20 bp, Artificial Sequence
  Description of Artificial Sequence: Synthetic oligonucleotide
  Target: LAMA2; (-) strand; PAM type: YTN; PAM sequence: TTC
ttaattgagtgccatacaga

SEQ ID NO: 268718 - DNA, 20 bp, Artificial Sequence
  Description of Artificial Sequence: Synthetic oligonucleotide
  Target: LAMA2; (-) strand; PAM type: YTN; PAM sequence: CTG
taacaacagttcttaattga

SEQ ID NO: 268719 - DNA, 20 bp, Artificial Sequence
  Description of Artificial Sequence: Synthetic oligonucleotide
  Target: LAMA2; (-) strand; PAM type: YTN; PAM sequence: CTG
acctgtaacaacagttctta

SEQ ID NO: 268720 - DNA, 20 bp, Artificial Sequence
  Description of Artificial Sequence: Synthetic oligonucleotide
  Target: LAMA2; (-) strand; PAM type: YTN; PAM sequence: TTG
taaatgctgacctgtaacaa

SEQ ID NO: 268721 - DNA, 20 bp, Artificial Sequence
  Description of Artificial Sequence: Synthetic oligonucleotide
  Target: LAMA2; (-) strand; PAM type: YTN; PAM sequence: TTG
attgtaaatgctgacctgta

SEQ ID NO: 268722 - DNA, 20 bp, Artificial Sequence
  Description of Artificial Sequence: Synthetic oligonucleotide
  Target: LAMA2; (-) strand; PAM type: YTN; PAM sequence: CTG
tcatcaaattgattgtaaat

SEQ ID NO: 268723 - DNA, 20 bp, Artificial Sequence
  Description of Artificial Sequence: Synthetic oligonucleotide
  Target: LAMA2; (-) strand; PAM type: YTN; PAM sequence: CTC
ctgtcatcaaattgattgta

SEQ ID NO: 268724 - DNA, 20 bp, Artificial Sequence
  Description of Artificial Sequence: Synthetic oligonucleotide
  Target: LAMA2; (-) strand; PAM type: YTN; PAM sequence: TTA
gtgcctcctgtcatcaaatt

SEQ ID NO: 268725 - DNA, 20 bp, Artificial Sequence
  Description of Artificial Sequence: Synthetic oligonucleotide
  Target: LAMA2; (-) strand; PAM type: YTN; PAM sequence: CTT
agtgcctcctgtcatcaaat

SEQ ID NO: 268726 - DNA, 20 bp, Artificial Sequence
  Description of Artificial Sequence: Synthetic oligonucleotide
  Target: LAMA2; (-) strand; PAM type: YTN; PAM sequence: TTA
taacttagtgcctcctgtca

SEQ ID NO: 268727 - DNA, 20 bp, Artificial Sequence
  Description of Artificial Sequence: Synthetic oligonucleotide
  Target: LAMA2; (-) strand; PAM type: YTN; PAM sequence: TTG
ggttataacttagtgcctcc

SEQ ID NO: 268728 - DNA, 20 bp, Artificial Sequence
  Description of Artificial Sequence: Synthetic oligonucleotide
  Target: LAMA2; (-) strand; PAM type: YTN; PAM sequence: TTT
gggttataacttagtgcctc

SEQ ID NO: 268729 - DNA, 20 bp, Artificial Sequence
  Description of Artificial Sequence: Synthetic oligonucleotide
  Target: LAMA2; (-) strand; PAM type: YTN; PAM sequence: TTC
atttgggttataacttagtg

SEQ ID NO: 268730 - DNA, 20 bp, Artificial Sequence
  Description of Artificial Sequence: Synthetic oligonucleotide
  Target: LAMA2; (-) strand; PAM type: YTN; PAM sequence: CTT
catttgggttataacttagt

SEQ ID NO: 268731 - DNA, 20 bp, Artificial Sequence
  Description of Artificial Sequence: Synthetic oligonucleotide
  Target: LAMA2; (-) strand; PAM type: YTN; PAM sequence: TTA
tccttcatttgggttataac

SEQ ID NO: 268732 - DNA, 20 bp, Artificial Sequence
  Description of Artificial Sequence: Synthetic oligonucleotide
  Target: LAMA2; (-) strand; PAM type: YTN; PAM sequence: TTG
aaattatccttcatttgggt

SEQ ID NO: 268733 - DNA, 20 bp, Artificial Sequence
  Description of Artificial Sequence: Synthetic oligonucleotide
  Target: LAMA2; (-) strand; PAM type: YTN; PAM sequence: TTT
gaaattatccttcatttggg

SEQ ID NO: 268734 - DNA, 20 bp, Artificial Sequence
  Description of Artificial Sequence: Synthetic oligonucleotide
  Target: LAMA2; (-) strand; PAM type: YTN; PAM sequence: CTG
aggtttgaaattatccttca

SEQ ID NO: 268735 - DNA, 20 bp, Artificial Sequence
  Description of Artificial Sequence: Synthetic oligonucleotide
  Target: LAMA2; (-) strand; PAM type: YTN; PAM sequence: TTC
ctgaggtttgaaattatcct

SEQ ID NO: 268736 - DNA, 20 bp, Artificial Sequence
  Description of Artificial Sequence: Synthetic oligonucleotide
  Target: LAMA2; (-) strand; PAM type: YTN; PAM sequence: CTT
cctgaggtttgaaattatcc

SEQ ID NO: 268737 - DNA, 20 bp, Artificial Sequence
  Description of Artificial Sequence: Synthetic oligonucleotide
  Target: LAMA2; (-) strand; PAM type: YTN; PAM sequence: TTC
ttcctgaggtttgaaattat

SEQ ID NO: 268738 - DNA, 20 bp, Artificial Sequence
  Description of Artificial Sequence: Synthetic oligonucleotide
  Target: LAMA2; (-) strand; PAM type: YTN; PAM sequence: TTG
gattcttcctgaggtttgaa

SEQ ID NO: 268739 - DNA, 20 bp, Artificial Sequence
  Description of Artificial Sequence: Synthetic oligonucleotide
  Target: LAMA2; (-) strand; PAM type: YTN; PAM sequence: CTA
atgagaagaattggattctt

SEQ ID NO: 268740 - DNA, 20 bp, Artificial Sequence
  Description of Artificial Sequence: Synthetic oligonucleotide
  Target: LAMA2; (-) strand; PAM type: YTN; PAM sequence: CTA
ctaatgagaagaattggatt

SEQ ID NO: 268741 - DNA, 20 bp, Artificial Sequence
  Description of Artificial Sequence: Synthetic oligonucleotide
  Target: LAMA2; (-) strand; PAM type: YTN; PAM sequence: TTG
taatatcaggctactaatga

SEQ ID NO: 268742 - DNA, 20 bp, Artificial Sequence
  Description of Artificial Sequence: Synthetic oligonucleotide
  Target: LAMA2; (-) strand; PAM type: YTN; PAM sequence: TTT
gtaatatcaggctactaatg

SEQ ID NO: 268743 - DNA, 20 bp, Artificial Sequence
  Description of Artificial Sequence: Synthetic oligonucleotide
  Target: LAMA2; (-) strand; PAM type: YTN; PAM sequence: CTT
tgtaatatcaggctactaat

SEQ ID NO: 268744 - DNA, 20 bp, Artificial Sequence
  Description of Artificial Sequence: Synthetic oligonucleotide
  Target: LAMA2; (-) strand; PAM type: YTN; PAM sequence: TTA
ctttgtaatatcaggctact

SEQ ID NO: 268745 - DNA, 20 bp, Artificial Sequence
  Description of Artificial Sequence: Synthetic oligonucleotide
  Target: LAMA2; (-) strand; PAM type: YTN; PAM sequence: TTA
aattactttgtaatatcagg

SEQ ID NO: 268746 - DNA, 20 bp, Artificial Sequence
  Description of Artificial Sequence: Synthetic oligonucleotide
  Target: LAMA2; (-) strand; PAM type: YTN; PAM sequence: TTA
ataataataataataataat

SEQ ID NO: 268747 - DNA, 20 bp, Artificial Sequence
  Description of Artificial Sequence: Synthetic oligonucleotide
  Target: LAMA2; (-) strand; PAM type: YTN; PAM sequence: TTG
aaaacattaataataataat

SEQ ID NO: 268748 - DNA, 20 bp, Artificial Sequence
  Description of Artificial Sequence: Synthetic oligonucleotide
  Target: LAMA2; (-) strand; PAM type: YTN; PAM sequence: TTG
atggaattgaaaacattaat

SEQ ID NO: 268749 - DNA, 20 bp, Artificial Sequence
  Description of Artificial Sequence: Synthetic oligonucleotide
  Target: LAMA2; (-) strand; PAM type: YTN; PAM sequence: TTG
ttgatggaattgaaaacatt

SEQ ID NO: 268750 - DNA, 20 bp, Artificial Sequence
  Description of Artificial Sequence: Synthetic oligonucleotide
  Target: LAMA2; (-) strand; PAM type: YTN; PAM sequence: CTG
ttgttgatggaattgaaaac

SEQ ID NO: 268751 - DNA, 20 bp, Artificial Sequence
  Description of Artificial Sequence: Synthetic oligonucleotide
  Target: LAMA2; (-) strand; PAM type: YTN; PAM sequence: CTG
ctgttgttgatggaattgaa

SEQ ID NO: 268752 - DNA, 20 bp, Artificial Sequence
  Description of Artificial Sequence: Synthetic oligonucleotide
  Target: LAMA2; (-) strand; PAM type: YTN; PAM sequence: TTC
tgctgttgttgatggaattg

SEQ ID NO: 268753 - DNA, 20 bp, Artificial Sequence
  Description of Artificial Sequence: Synthetic oligonucleotide
  Target: LAMA2; (-) strand; PAM type: YTN; PAM sequence: CTA
aagcattctgctgttgttga

SEQ ID NO: 268754 - DNA, 20 bp, Artificial Sequence
  Description of Artificial Sequence: Synthetic oligonucleotide
  Target: LAMA2; (-) strand; PAM type: YTN; PAM sequence: TTC
taaagcattctgctgttgtt

SEQ ID NO: 268755 - DNA, 20 bp, Artificial Sequence
  Description of Artificial Sequence: Synthetic oligonucleotide
  Target: LAMA2; (-) strand; PAM type: YTN; PAM sequence: TTA
tgccgtgaaaaagaaataaa

SEQ ID NO: 268756 - DNA, 20 bp, Artificial Sequence
  Description of Artificial Sequence: Synthetic oligonucleotide
  Target: LAMA2; (-) strand; PAM type: YTN; PAM sequence: TTG
caggacataggaaaaatcaa

SEQ ID NO: 268757 - DNA, 20 bp, Artificial Sequence
  Description of Artificial Sequence: Synthetic oligonucleotide
  Target: LAMA2; (-) strand; PAM type: YTN; PAM sequence: TTT
gcaggacataggaaaaatca

SEQ ID NO: 268758 - DNA, 20 bp, Artificial Sequence
  Description of Artificial Sequence: Synthetic oligonucleotide
  Target: LAMA2; (-) strand; PAM type: YTN; PAM sequence: CTT
tgcaggacataggaaaaatc

SEQ ID NO: 268759 - DNA, 20 bp, Artificial Sequence
  Description of Artificial Sequence: Synthetic oligonucleotide
  Target: LAMA2; (-) strand; PAM type: YTN; PAM sequence: CTG
taaagggtcagatagtaaac

SEQ ID NO: 268760 - DNA, 20 bp, Artificial Sequence
  Description of Artificial Sequence: Synthetic oligonucleotide
  Target: LAMA2; (-) strand; PAM type: YTN; PAM sequence: TTC
ctgtaaagggtcagatagta

SEQ ID NO: 268761 - DNA, 20 bp, Artificial Sequence
  Description of Artificial Sequence: Synthetic oligonucleotide
  Target: LAMA2; (-) strand; PAM type: YTN; PAM sequence: TTT
cctgtaaagggtcagatagt

SEQ ID NO: 268762 - DNA, 20 bp, Artificial Sequence
  Description of Artificial Sequence: Synthetic oligonucleotide
  Target: LAMA2; (-) strand; PAM type: YTN; PAM sequence: TTT
tcctgtaaagggtcagatag

SEQ ID NO: 268763 - DNA, 20 bp, Artificial Sequence
  Description of Artificial Sequence: Synthetic oligonucleotide
  Target: LAMA2; (-) strand; PAM type: YTN; PAM sequence: CTT
ttcctgtaaagggtcagata

SEQ ID NO: 268764 - DNA, 20 bp, Artificial Sequence
  Description of Artificial Sequence: Synthetic oligonucleotide
  Target: LAMA2; (-) strand; PAM type: YTN; PAM sequence: TTA
acttttcctgtaaagggtca

SEQ ID NO: 268765 - DNA, 20 bp, Artificial Sequence
  Description of Artificial Sequence: Synthetic oligonucleotide
  Target: LAMA2; (-) strand; PAM type: YTN; PAM sequence: TTA
gttaacttttcctgtaaagg

SEQ ID NO: 268766 - DNA, 20 bp, Artificial Sequence
  Description of Artificial Sequence: Synthetic oligonucleotide
  Target: LAMA2; (-) strand; PAM type: YTN; PAM sequence: CTG
atagcaagagtccatacatt

SEQ ID NO: 268767 - DNA, 20 bp, Artificial Sequence
  Description of Artificial Sequence: Synthetic oligonucleotide
  Target: LAMA2; (-) strand; PAM type: YTN; PAM sequence: TTG
atgcaacaaaactgatagca

SEQ ID NO: 268768 - DNA, 20 bp, Artificial Sequence
  Description of Artificial Sequence: Synthetic oligonucleotide
  Target: LAMA2; (-) strand; PAM type: YTN; PAM sequence: TTT
gatgcaacaaaactgatagc

SEQ ID NO: 268769 - DNA, 20 bp, Artificial Sequence
  Description of Artificial Sequence: Synthetic oligonucleotide
  Target: LAMA2; (-) strand; PAM type: YTN; PAM sequence: TTT
tgatgcaacaaaactgatag

SEQ ID NO: 268770 - DNA, 20 bp, Artificial Sequence
  Description of Artificial Sequence: Synthetic oligonucleotide
  Target: LAMA2; (-) strand; PAM type: YTN; PAM sequence: TTG
ttttgatgcaacaaaactga

SEQ ID NO: 268771 - DNA, 20 bp, Artificial Sequence
  Description of Artificial Sequence: Synthetic oligonucleotide
  Target: LAMA2; (-) strand; PAM type: YTN; PAM sequence: TTT
gttttgatgcaacaaaactg

SEQ ID NO: 268772 - DNA, 20 bp, Artificial Sequence
  Description of Artificial Sequence: Synthetic oligonucleotide
  Target: LAMA2; (-) strand; PAM type: YTN; PAM sequence: TTT
tgttttgatgcaacaaaact

SEQ ID NO: 268773 - DNA, 20 bp, Artificial Sequence
  Description of Artificial Sequence: Synthetic oligonucleotide
  Target: LAMA2; (-) strand; PAM type: YTN; PAM sequence: CTT
ttgttttgatgcaacaaaac

SEQ ID NO: 268774 - DNA, 20 bp, Artificial Sequence
  Description of Artificial Sequence: Synthetic oligonucleotide
  Target: LAMA2; (-) strand; PAM type: YTN; PAM sequence: TTG
tgtgtggtcttttgttttga

SEQ ID NO: 268775 - DNA, 20 bp, Artificial Sequence
  Description of Artificial Sequence: Synthetic oligonucleotide
  Target: LAMA2; (-) strand; PAM type: YTN; PAM sequence: TTG
ttgtgtgtggtcttttgttt

SEQ ID NO: 268776 - DNA, 20 bp, Artificial Sequence
  Description of Artificial Sequence: Synthetic oligonucleotide
  Target: LAMA2; (-) strand; PAM type: YTN; PAM sequence: CTC
cacattgttgtgtgtggtct

SEQ ID NO: 268777 - DNA, 20 bp, Artificial Sequence
  Description of Artificial Sequence: Synthetic oligonucleotide
  Target: LAMA2; (-) strand; PAM type: YTN; PAM sequence: TTA
atagcaagtcatgtctccac

SEQ ID NO: 268778 - DNA, 20 bp, Artificial Sequence
  Description of Artificial Sequence: Synthetic oligonucleotide
  Target: LAMA2; (-) strand; PAM type: YTN; PAM sequence: TTG
aaacagtgacaaagcaaaag

SEQ ID NO: 268779 - DNA, 20 bp, Artificial Sequence
  Description of Artificial Sequence: Synthetic oligonucleotide
  Target: LAMA2; (-) strand; PAM type: YTN; PAM sequence: CTG
aattgaaacagtgacaaagc

SEQ ID NO: 268780 - DNA, 20 bp, Artificial Sequence
  Description of Artificial Sequence: Synthetic oligonucleotide
  Target: LAMA2; (-) strand; PAM type: YTN; PAM sequence: CTG
ccagtatagccaggggcaca

SEQ ID NO: 268781 - DNA, 20 bp, Artificial Sequence
  Description of Artificial Sequence: Synthetic oligonucleotide
  Target: LAMA2; (-) strand; PAM type: YTN; PAM sequence: CTG
gactgccagtatagccaggg

SEQ ID NO: 268782 - DNA, 20 bp, Artificial Sequence
  Description of Artificial Sequence: Synthetic oligonucleotide
  Target: LAMA2; (-) strand; PAM type: YTN; PAM sequence: TTG
cctggactgccagtatagcc

SEQ ID NO: 268783 - DNA, 20 bp, Artificial Sequence
  Description of Artificial Sequence: Synthetic oligonucleotide
  Target: LAMA2; (-) strand; PAM type: YTN; PAM sequence: CTC
cagggttgcctggactgcca

SEQ ID NO: 268784 - DNA, 20 bp, Artificial Sequence
  Description of Artificial Sequence: Synthetic oligonucleotide
  Target: LAMA2; (-) strand; PAM type: YTN; PAM sequence: TTG
gcaggagcctccagggttgc

SEQ ID NO: 268785 - DNA, 20 bp, Artificial Sequence
  Description of Artificial Sequence: Synthetic oligonucleotide
  Target: LAMA2; (-) strand; PAM type: YTN; PAM sequence: CTT
ggcaggagcctccagggttg

SEQ ID NO: 268786 - DNA, 20 bp, Artificial Sequence
  Description of Artificial Sequence: Synthetic oligonucleotide
  Target: LAMA2; (-) strand; PAM type: YTN; PAM sequence: TTC
ttggcaggagcctccagggt

SEQ ID NO: 268787 - DNA, 20 bp, Artificial Sequence
  Description of Artificial Sequence: Synthetic oligonucleotide
  Target: LAMA2; (-) strand; PAM type: YTN; PAM sequence: CTC
acattcttggcaggagcctc

SEQ ID NO: 268788 - DNA, 20 bp, Artificial Sequence
  Description of Artificial Sequence: Synthetic oligonucleotide
  Target: LAMA2; (-) strand; PAM type: YTN; PAM sequence: CTG
tgacagggtcacagggcaca

SEQ ID NO: 268789 - DNA, 20 bp, Artificial Sequence
  Description of Artificial Sequence: Synthetic oligonucleotide
  Target: LAMA2; (-) strand; PAM type: YTN; PAM sequence: CTC
caggtcggcacgtgcagaat

SEQ ID NO: 268790 - DNA, 20 bp, Artificial Sequence
  Description of Artificial Sequence: Synthetic oligonucleotide
  Target: LAMA2; (-) strand; PAM type: YTN; PAM sequence: TTC
ccgtggctccaggtcggcac

SEQ ID NO: 268791 - DNA, 20 bp, Artificial Sequence
  Description of Artificial Sequence: Synthetic oligonucleotide
  Target: LAMA2; (-) strand; PAM type: YTN; PAM sequence: CTT
cccgtggctccaggtcggca

SEQ ID NO: 268792 - DNA, 20 bp, Artificial Sequence
  Description of Artificial Sequence: Synthetic oligonucleotide
  Target: LAMA2; (-) strand; PAM type: YTN; PAM sequence: TTC
cttcccgtggctccaggtcg

SEQ ID NO: 268793 - DNA, 20 bp, Artificial Sequence
  Description of Artificial Sequence: Synthetic oligonucleotide
  Target: LAMA2; (-) strand; PAM type: YTN; PAM sequence: CTT
ccttcccgtggctccaggtc

SEQ ID NO: 268794 - DNA, 20 bp, Artificial Sequence
  Description of Artificial Sequence: Synthetic oligonucleotide
  Target: LAMA2; (-) strand; PAM type: YTN; PAM sequence: TTG
cagccgtcacacttccttcc

SEQ ID NO: 268795 - DNA, 20 bp, Artificial Sequence
  Description of Artificial Sequence: Synthetic oligonucleotide
  Target: LAMA2; (-) strand; PAM type: YTN; PAM sequence: CTT
gcagccgtcacacttccttc

SEQ ID NO: 268796 - DNA, 20 bp, Artificial Sequence
  Description of Artificial Sequence: Synthetic oligonucleotide
  Target: LAMA2; (-) strand; PAM type: YTN; PAM sequence: CTC
gcgtgcatgccagtgcttgc

SEQ ID NO: 268797 - DNA, 20 bp, Artificial Sequence
  Description of Artificial Sequence: Synthetic oligonucleotide
  Target: LAMA2; (-) strand; PAM type: YTN; PAM sequence: CTC
ccagccctcgcgtgcatgcc

SEQ ID NO: 268798 - DNA, 20 bp, Artificial Sequence
  Description of Artificial Sequence: Synthetic oligonucleotide
  Target: LAMA2; (-) strand; PAM type: YTN; PAM sequence: TTA
gtatacgtacaaacacactc

SEQ ID NO: 268799 - DNA, 20 bp, Artificial Sequence
  Description of Artificial Sequence: Synthetic oligonucleotide
  Target: LAMA2; (-) strand; PAM type: YTN; PAM sequence: CTA
acagcaaagttagtatacgt

SEQ ID NO: 268800 - DNA, 20 bp, Artificial Sequence
  Description of Artificial Sequence: Synthetic oligonucleotide
  Target: LAMA2; (-) strand; PAM type: YTN; PAM sequence: CTC
caaaactaacagcaaagtta

SEQ ID NO: 268801 - DNA, 20 bp, Artificial Sequence
  Description of Artificial Sequence: Synthetic oligonucleotide
  Target: LAMA2; (-) strand; PAM type: YTN; PAM sequence: CTG
gaatcaaggcctccaaaact

SEQ ID NO: 268802 - DNA, 20 bp, Artificial Sequence
  Description of Artificial Sequence: Synthetic oligonucleotide
  Target: LAMA2; (-) strand; PAM type: YTN; PAM sequence: TTG
gaaatgagacagaactggaa

SEQ ID NO: 268803 - DNA, 20 bp, Artificial Sequence
  Description of Artificial Sequence: Synthetic oligonucleotide
  Target: LAMA2; (-) strand; PAM type: YTN; PAM sequence: CTC
attggaaatgagacagaact

SEQ ID NO: 268804 - DNA, 20 bp, Artificial Sequence
  Description of Artificial Sequence: Synthetic oligonucleotide
  Target: LAMA2; (-) strand; PAM type: YTN; PAM sequence: TTC
tcattggaaatgagacagaa

SEQ ID NO: 268805 - DNA, 20 bp, Artificial Sequence
  Description of Artificial Sequence: Synthetic oligonucleotide
  Target: LAMA2; (-) strand; PAM type: YTN; PAM sequence: TTT
ctcattggaaatgagacaga

SEQ ID NO: 268806 - DNA, 20 bp, Artificial Sequence
  Description of Artificial Sequence: Synthetic oligonucleotide
  Target: LAMA2; (-) strand; PAM type: YTN; PAM sequence: CTT
tctcattggaaatgagacag

SEQ ID NO: 268807 - DNA, 20 bp, Artificial Sequence
  Description of Artificial Sequence: Synthetic oligonucleotide
  Target: LAMA2; (-) strand; PAM type: YTN; PAM sequence: CTC
tttctcattggaaatgagac

SEQ ID NO: 268808 - DNA, 20 bp, Artificial Sequence
  Description of Artificial Sequence: Synthetic oligonucleotide
  Target: LAMA2; (-) strand; PAM type: YTN; PAM sequence: TTG
caaaaaaaaaaaaaaaggcg

SEQ ID NO: 268809 - DNA, 20 bp, Artificial Sequence
  Description of Artificial Sequence: Synthetic oligonucleotide
  Target: LAMA2; (-) strand; PAM type: YTN; PAM sequence: CTA
ttgcaaaaaaaaaaaaaaag

SEQ ID NO: 268810 - DNA, 20 bp, Artificial Sequence
  Description of Artificial Sequence: Synthetic oligonucleotide
  Target: LAMA2; (-) strand; PAM type: YTN; PAM sequence: CTC
agcaggatggacacgcaatc

SEQ ID NO: 268811 - DNA, 20 bp, Artificial Sequence
  Description of Artificial Sequence: Synthetic oligonucleotide
  Target: LAMA2; (-) strand; PAM type: YTN; PAM sequence: TTG
gctcagcaggatggacacgc

SEQ ID NO: 268812 - DNA, 20 bp, Artificial Sequence
  Description of Artificial Sequence: Synthetic oligonucleotide
  Target: LAMA2; (-) strand; PAM type: YTN; PAM sequence: CTT
ggctcagcaggatggacacg

SEQ ID NO: 268813 - DNA, 20 bp, Artificial Sequence
  Description of Artificial Sequence: Synthetic oligonucleotide
  Target: LAMA2; (-) strand; PAM type: YTN; PAM sequence: TTC
ttggctcagcaggatggaca

SEQ ID NO: 268814 - DNA, 20 bp, Artificial Sequence
  Description of Artificial Sequence: Synthetic oligonucleotide
  Target: LAMA2; (-) strand; PAM type: YTN; PAM sequence: CTG
ttcttggctcagcaggatgg

SEQ ID NO: 268815 - DNA, 20 bp, Artificial Sequence
  Description of Artificial Sequence: Synthetic oligonucleotide
  Target: LAMA2; (-) strand; PAM type: YTN; PAM sequence: CTC
agctgttcttggctcagcag

SEQ ID NO: 268816 - DNA, 20 bp, Artificial Sequence
  Description of Artificial Sequence: Synthetic oligonucleotide
  Target: LAMA2; (-) strand; PAM type: YTN; PAM sequence: TTC
tcagctgttcttggctcagc

SEQ ID NO: 268817 - DNA, 20 bp, Artificial Sequence
  Description of Artificial Sequence: Synthetic oligonucleotide
  Target: LAMA2; (-) strand; PAM type: YTN; PAM sequence: TTT
ctcagctgttcttggctcag

SEQ ID NO: 268818 - DNA, 20 bp, Artificial Sequence
  Description of Artificial Sequence: Synthetic oligonucleotide
  Target: LAMA2; (-) strand; PAM type: YTN; PAM sequence: TTT
tctcagctgttcttggctca

SEQ ID NO: 268819 - DNA, 20 bp, Artificial Sequence
  Description of Artificial Sequence: Synthetic oligonucleotide
  Target: LAMA2; (-) strand; PAM type: YTN; PAM sequence: CTG
aggattttctcagctgttct

SEQ ID NO: 268820 - DNA, 20 bp, Artificial Sequence
  Description of Artificial Sequence: Synthetic oligonucleotide
  Target: LAMA2; (-) strand; PAM type: YTN; PAM sequence: CTA
aagcacactgaggattttct

SEQ ID NO: 268821 - DNA, 20 bp, Artificial Sequence
  Description of Artificial Sequence: Synthetic oligonucleotide
  Target: LAMA2; (-) strand; PAM type: YTN; PAM sequence: CTG
actaaagcacactgaggatt

SEQ ID NO: 268822 - DNA, 20 bp, Artificial Sequence
  Description of Artificial Sequence: Synthetic oligonucleotide
  Target: LAMA2; (-) strand; PAM type: YTN; PAM sequence: TTC
aatgaactgactaaagcaca

SEQ ID NO: 268823 - DNA, 20 bp, Artificial Sequence
  Description of Artificial Sequence: Synthetic oligonucleotide
  Target: LAMA2; (-) strand; PAM type: YTN; PAM sequence: TTT
caatgaactgactaaagcac

SEQ ID NO: 268824 - DNA, 20 bp, Artificial Sequence
  Description of Artificial Sequence: Synthetic oligonucleotide
  Target: LAMA2; (-) strand; PAM type: YTN; PAM sequence: CTT
tcaatgaactgactaaagca

SEQ ID NO: 268825 - DNA, 20 bp, Artificial Sequence
  Description of Artificial Sequence: Synthetic oligonucleotide
  Target: LAMA2; (-) strand; PAM type: YTN; PAM sequence: TTG
taggtctttcaatgaactga

SEQ ID NO: 268826 - DNA, 20 bp, Artificial Sequence
  Description of Artificial Sequence: Synthetic oligonucleotide
  Target: LAMA2; (-) strand; PAM type: YTN; PAM sequence: TTC
attgtaggtctttcaatgaa

SEQ ID NO: 268827 - DNA, 20 bp, Artificial Sequence
  Description of Artificial Sequence: Synthetic oligonucleotide
  Target: LAMA2; (-) strand; PAM type: YTN; PAM sequence: CTT
cattgtaggtctttcaatga

SEQ ID NO: 268828 - DNA, 20 bp, Artificial Sequence
  Description of Artificial Sequence: Synthetic oligonucleotide
  Target: LAMA2; (-) strand; PAM type: YTN; PAM sequence: CTC
caggagcttcattgtaggtc

SEQ ID NO: 268829 - DNA, 20 bp, Artificial Sequence
  Description of Artificial Sequence: Synthetic oligonucleotide
  Target: LAMA2; (-) strand; PAM type: YTN; PAM sequence: CTG
agatggacaaatcaaataaa

SEQ ID NO: 268830 - DNA, 20 bp, Artificial Sequence
  Description of Artificial Sequence: Synthetic oligonucleotide
  Target: LAMA2; (-) strand; PAM type: YTN; PAM sequence: CTG
taaaccctgagatggacaaa

SEQ ID NO: 268831 - DNA, 20 bp, Artificial Sequence
  Description of Artificial Sequence: Synthetic oligonucleotide
  Target: LAMA2; (-) strand; PAM type: YTN; PAM sequence: TTG
aggcaaaactgtaaaccctg

SEQ ID NO: 268832 - DNA, 20 bp, Artificial Sequence
  Description of Artificial Sequence: Synthetic oligonucleotide
  Target: LAMA2; (-) strand; PAM type: YTN; PAM sequence: CTT
gaggcaaaactgtaaaccct

SEQ ID NO: 268833 - DNA, 20 bp, Artificial Sequence
  Description of Artificial Sequence: Synthetic oligonucleotide
  Target: LAMA2; (-) strand; PAM type: YTN; PAM sequence: CTG
tcacaaaggcaatgccaact

SEQ ID NO: 268834 - DNA, 20 bp, Artificial Sequence
  Description of Artificial Sequence: Synthetic oligonucleotide
  Target: LAMA2; (-) strand; PAM type: YTN; PAM sequence: TTA
atctgtcacaaaggcaatgc

SEQ ID NO: 268835 - DNA, 20 bp, Artificial Sequence
  Description of Artificial Sequence: Synthetic oligonucleotide
  Target: LAMA2; (-) strand; PAM type: YTN; PAM sequence: TTT
aatctgtcacaaaggcaatg

SEQ ID NO: 268836 - DNA, 20 bp, Artificial Sequence
  Description of Artificial Sequence: Synthetic oligonucleotide
  Target: LAMA2; (-) strand; PAM type: YTN; PAM sequence: CTT
taatctgtcacaaaggcaat

SEQ ID NO: 268837 - DNA, 20 bp, Artificial Sequence
  Description of Artificial Sequence: Synthetic oligonucleotide
  Target: LAMA2; (-) strand; PAM type: YTN; PAM sequence: CTC
acatctttaatctgtcacaa

SEQ ID NO: 268838 - DNA, 20 bp, Artificial Sequence
  Description of Artificial Sequence: Synthetic oligonucleotide
  Target: LAMA2; (-) strand; PAM type: YTN; PAM sequence: TTA
atacactcacatctttaatc

SEQ ID NO: 268839 - DNA, 20 bp, Artificial Sequence
  Description of Artificial Sequence: Synthetic oligonucleotide
  Target: LAMA2; (-) strand; PAM type: YTN; PAM sequence: TTT
aatacactcacatctttaat

SEQ ID NO: 268840 - DNA, 20 bp, Artificial Sequence
  Description of Artificial Sequence: Synthetic oligonucleotide
  Target: LAMA2; (-) strand; PAM type: YTN; PAM sequence: TTT
taatacactcacatctttaa

SEQ ID NO: 268841 - DNA, 20 bp, Artificial Sequence
  Description of Artificial Sequence: Synthetic oligonucleotide
  Target: LAMA2; (-) strand; PAM type: YTN; PAM sequence: TTT
ttaatacactcacatcttta

SEQ ID NO: 268842 - DNA, 20 bp, Artificial Sequence
  Description of Artificial Sequence: Synthetic oligonucleotide
  Target: LAMA2; (-) strand; PAM type: YTN; PAM sequence: TTT
tttaatacactcacatcttt

SEQ ID NO: 268843 - DNA, 20 bp, Artificial Sequence
  Description of Artificial Sequence: Synthetic oligonucleotide
  Target: LAMA2; (-) strand; PAM type: YTN; PAM sequence: CTA
aattttttaatacactcaca

SEQ ID NO: 268844 - DNA, 20 bp, Artificial Sequence
  Description of Artificial Sequence: Synthetic oligonucleotide
  Target: LAMA2; (-) strand; PAM type: YTN; PAM sequence: TTC
taaattttttaatacactca

SEQ ID NO: 268845 - DNA, 20 bp, Artificial Sequence
  Description of Artificial Sequence: Synthetic oligonucleotide
  Target: LAMA2; (-) strand; PAM type: YTN; PAM sequence: TTC
aggaggattctaaatttttt

SEQ ID NO: 268846 - DNA, 20 bp, Artificial Sequence
  Description of Artificial Sequence: Synthetic oligonucleotide
  Target: LAMA2; (-) strand; PAM type: YTN; PAM sequence: TTA
caaattcaggaggattctaa

SEQ ID NO: 268847 - DNA, 20 bp, Artificial Sequence
  Description of Artificial Sequence: Synthetic oligonucleotide
  Target: LAMA2; (-) strand; PAM type: YTN; PAM sequence: CTG
tccagtcgattacaaattca

SEQ ID NO: 268848 - DNA, 20 bp, Artificial Sequence
  Description of Artificial Sequence: Synthetic oligonucleotide
  Target: LAMA2; (-) strand; PAM type: YTN; PAM sequence: TTA
aagtatctgtccagtcgatt

SEQ ID NO: 268849 - DNA, 20 bp, Artificial Sequence
  Description of Artificial Sequence: Synthetic oligonucleotide
  Target: LAMA2; (-) strand; PAM type: YTN; PAM sequence: CTT
aaagtatctgtccagtcgat

SEQ ID NO: 268850 - DNA, 20 bp, Artificial Sequence
  Description of Artificial Sequence: Synthetic oligonucleotide
  Target: LAMA2; (-) strand; PAM type: YTN; PAM sequence: TTC
aaggcttaaagtatctgtcc

SEQ ID NO: 268851 - DNA, 20 bp, Artificial Sequence
  Description of Artificial Sequence: Synthetic oligonucleotide
  Target: LAMA2; (-) strand; PAM type: YTN; PAM sequence: TTG
tcattcaaggcttaaagtat

SEQ ID NO: 268852 - DNA, 20 bp, Artificial Sequence
  Description of Artificial Sequence: Synthetic oligonucleotide
  Target: LAMA2; (-) strand; PAM type: YTN; PAM sequence: CTG
ggaaaagaaacatcagttgt

SEQ ID NO: 268853 - DNA, 20 bp, Artificial Sequence
  Description of Artificial Sequence: Synthetic oligonucleotide
  Target: LAMA2; (-) strand; PAM type: YTN; PAM sequence: TTC
ataaaagctgggaaaagaaa

SEQ ID NO: 268854 - DNA, 20 bp, Artificial Sequence
  Description of Artificial Sequence: Synthetic oligonucleotide
  Target: LAMA2; (-) strand; PAM type: YTN; PAM sequence: TTT
cataaaagctgggaaaagaa

SEQ ID NO: 268855 - DNA, 20 bp, Artificial Sequence
  Description of Artificial Sequence: Synthetic oligonucleotide
  Target: LAMA2; (-) strand; PAM type: YTN; PAM sequence: TTT
tcataaaagctgggaaaaga

SEQ ID NO: 268856 - DNA, 20 bp, Artificial Sequence
  Description of Artificial Sequence: Synthetic oligonucleotide
  Target: LAMA2; (-) strand; PAM type: YTN; PAM sequence: TTA
tgaagcagtatgcccatgga

SEQ ID NO: 268857 - DNA, 20 bp, Artificial Sequence
  Description of Artificial Sequence: Synthetic oligonucleotide
  Target: LAMA2; (-) strand; PAM type: YTN; PAM sequence: TTC
aagagaaaattatgaagcag

SEQ ID NO: 268858 - DNA, 20 bp, Artificial Sequence
  Description of Artificial Sequence: Synthetic oligonucleotide
  Target: LAMA2; (-) strand; PAM type: YTN; PAM sequence: TTG
tagttcaagagaaaattatg

SEQ ID NO: 268859 - DNA, 20 bp, Artificial Sequence
  Description of Artificial Sequence: Synthetic oligonucleotide
  Target: LAMA2; (-) strand; PAM type: YTN; PAM sequence: TTT
gtagttcaagagaaaattat

SEQ ID NO: 268860 - DNA, 20 bp, Artificial Sequence
  Description of Artificial Sequence: Synthetic oligonucleotide
  Target: LAMA2; (-) strand; PAM type: YTN; PAM sequence: TTT
tgtagttcaagagaaaatta

SEQ ID NO: 268861 - DNA, 20 bp, Artificial Sequence
  Description of Artificial Sequence: Synthetic oligonucleotide
  Target: LAMA2; (-) strand; PAM type: YTN; PAM sequence: TTA
cgggttttgtagttcaagag

SEQ ID NO: 268862 - DNA, 20 bp, Artificial Sequence
  Description of Artificial Sequence: Synthetic oligonucleotide
  Target: LAMA2; (-) strand; PAM type: YTN; PAM sequence: CTT
acgggttttgtagttcaaga

SEQ ID NO: 268863 - DNA, 20 bp, Artificial Sequence
  Description of Artificial Sequence: Synthetic oligonucleotide
  Target: LAMA2; (-) strand; PAM type: YTN; PAM sequence: CTG
cttacgggttttgtagttca

SEQ ID NO: 268864 - DNA, 20 bp, Artificial Sequence
  Description of Artificial Sequence: Synthetic oligonucleotide
  Target: LAMA2; (-) strand; PAM type: YTN; PAM sequence: TTA
ctgcttacgggttttgtagt

SEQ ID NO: 268865 - DNA, 20 bp, Artificial Sequence
  Description of Artificial Sequence: Synthetic oligonucleotide
  Target: LAMA2; (-) strand; PAM type: YTN; PAM sequence: TTG
ttactgcttacgggttttgt

SEQ ID NO: 268866 - DNA, 20 bp, Artificial Sequence
  Description of Artificial Sequence: Synthetic oligonucleotide
  Target: LAMA2; (-) strand; PAM type: YTN; PAM sequence: TTC
attgttactgcttacgggtt

SEQ ID NO: 268867 - DNA, 20 bp, Artificial Sequence
  Description of Artificial Sequence: Synthetic oligonucleotide
  Target: LAMA2; (-) strand; PAM type: YTN; PAM sequence: CTT
cattgttactgcttacgggt

SEQ ID NO: 268868 - DNA, 20 bp, Artificial Sequence
  Description of Artificial Sequence: Synthetic oligonucleotide
  Target: LAMA2; (-) strand; PAM type: YTN; PAM sequence: TTG
acttcattgttactgcttac

SEQ ID NO: 268869 - DNA, 20 bp, Artificial Sequence
  Description of Artificial Sequence: Synthetic oligonucleotide
  Target: LAMA2; (-) strand; PAM type: YTN; PAM sequence: CTT
gacttcattgttactgctta

SEQ ID NO: 268870 - DNA, 20 bp, Artificial Sequence
  Description of Artificial Sequence: Synthetic oligonucleotide
  Target: LAMA2; (-) strand; PAM type: YTN; PAM sequence: CTG
tacgtgagtaaaaatacttg

SEQ ID NO: 268871 - DNA, 20 bp, Artificial Sequence
  Description of Artificial Sequence: Synthetic oligonucleotide
  Target: LAMA2; (-) strand; PAM type: YTN; PAM sequence: TTA
ctgtacgtgagtaaaaatac

SEQ ID NO: 268872 - DNA, 20 bp, Artificial Sequence
  Description of Artificial Sequence: Synthetic oligonucleotide
  Target: LAMA2; (-) strand; PAM type: YTN; PAM sequence: CTT
actgtacgtgagtaaaaata

SEQ ID NO: 268873 - DNA, 20 bp, Artificial Sequence
  Description of Artificial Sequence: Synthetic oligonucleotide
  Target: LAMA2; (-) strand; PAM type: YTN; PAM sequence: CTC
cacttactgtacgtgagtaa

SEQ ID NO: 268874 - DNA, 20 bp, Artificial Sequence
  Description of Artificial Sequence: Synthetic oligonucleotide
  Target: LAMA2; (-) strand; PAM type: YTN; PAM sequence: CTC
tccacttactgtacgtgagt

SEQ ID NO: 268875 - DNA, 20 bp, Artificial Sequence
  Description of Artificial Sequence: Synthetic oligonucleotide
  Target: LAMA2; (-) strand; PAM type: YTN; PAM sequence: CTG
ctctccacttactgtacgtg

SEQ ID NO: 268876 - DNA, 20 bp, Artificial Sequence
  Description of Artificial Sequence: Synthetic oligonucleotide
  Target: LAMA2; (-) strand; PAM type: YTN; PAM sequence: CTA
gcgaatccagaatcagtaag

SEQ ID NO: 268877 - DNA, 20 bp, Artificial Sequence
  Description of Artificial Sequence: Synthetic oligonucleotide
  Target: LAMA2; (-) strand; PAM type: YTN; PAM sequence: TTC
aatatggcactagcgaatcc

SEQ ID NO: 268878 - DNA, 20 bp, Artificial Sequence
  Description of Artificial Sequence: Synthetic oligonucleotide
  Target: LAMA2; (-) strand; PAM type: YTN; PAM sequence: TTT
caatatggcactagcgaatc

SEQ ID NO: 268879 - DNA, 20 bp, Artificial Sequence
  Description of Artificial Sequence: Synthetic oligonucleotide
  Target: LAMA2; (-) strand; PAM type: YTN; PAM sequence: CTT
tcaatatggcactagcgaat

SEQ ID NO: 268880 - DNA, 20 bp, Artificial Sequence
  Description of Artificial Sequence: Synthetic oligonucleotide
  Target: LAMA2; (-) strand; PAM type: YTN; PAM sequence: TTC
aatgtactttcaatatggca

SEQ ID NO: 268881 - DNA, 20 bp, Artificial Sequence
  Description of Artificial Sequence: Synthetic oligonucleotide
  Target: LAMA2; (-) strand; PAM type: YTN; PAM sequence: TTT
caatgtactttcaatatggc

SEQ ID NO: 268882 - DNA, 20 bp, Artificial Sequence
  Description of Artificial Sequence: Synthetic oligonucleotide
  Target: LAMA2; (-) strand; PAM type: YTN; PAM sequence: CTG
atttcaatgtactttcaata

SEQ ID NO: 268883 - DNA, 20 bp, Artificial Sequence
  Description of Artificial Sequence: Synthetic oligonucleotide
  Target: LAMA2; (-) strand; PAM type: YTN; PAM sequence: CTA
ctgatttcaatgtactttca

SEQ ID NO: 268884 - DNA, 20 bp, Artificial Sequence
  Description of Artificial Sequence: Synthetic oligonucleotide
  Target: LAMA2; (-) strand; PAM type: YTN; PAM sequence: TTA
gctactgatttcaatgtact

SEQ ID NO: 268885 - DNA, 20 bp, Artificial Sequence
  Description of Artificial Sequence: Synthetic oligonucleotide
  Target: LAMA2; (-) strand; PAM type: YTN; PAM sequence: TTT
agctactgatttcaatgtac

SEQ ID NO: 268886 - DNA, 20 bp, Artificial Sequence
  Description of Artificial Sequence: Synthetic oligonucleotide
  Target: LAMA2; (-) strand; PAM type: YTN; PAM sequence: TTA
tatttagctactgatttcaa

SEQ ID NO: 268887 - DNA, 20 bp, Artificial Sequence
  Description of Artificial Sequence: Synthetic oligonucleotide
  Target: LAMA2; (-) strand; PAM type: YTN; PAM sequence: TTG
aatgtatgcaagatccaaga

SEQ ID NO: 268888 - DNA, 20 bp, Artificial Sequence
  Description of Artificial Sequence: Synthetic oligonucleotide
  Target: LAMA2; (-) strand; PAM type: YTN; PAM sequence: TTT
gaatgtatgcaagatccaag

SEQ ID NO: 268889 - DNA, 20 bp, Artificial Sequence
  Description of Artificial Sequence: Synthetic oligonucleotide
  Target: LAMA2; (-) strand; PAM type: YTN; PAM sequence: TTG
gatttgaatgtatgcaagat

SEQ ID NO: 268890 - DNA, 20 bp, Artificial Sequence
  Description of Artificial Sequence: Synthetic oligonucleotide
  Target: LAMA2; (-) strand; PAM type: YTN; PAM sequence: TTT
ggatttgaatgtatgcaaga

SEQ ID NO: 268891 - DNA, 20 bp, Artificial Sequence
  Description of Artificial Sequence: Synthetic oligonucleotide
  Target: LAMA2; (-) strand; PAM type: YTN; PAM sequence: TTT
tggatttgaatgtatgcaag

SEQ ID NO: 268892 - DNA, 20 bp, Artificial Sequence
  Description of Artificial Sequence: Synthetic oligonucleotide
  Target: LAMA2; (-) strand; PAM type: YTN; PAM sequence: CTA
ttttggatttgaatgtatgc

SEQ ID NO: 268893 - DNA, 20 bp, Artificial Sequence
  Description of Artificial Sequence: Synthetic oligonucleotide
  Target: LAMA2; (-) strand; PAM type: YTN; PAM sequence: TTA
taaataacctattttggatt

SEQ ID NO: 268894 - DNA, 20 bp, Artificial Sequence
  Description of Artificial Sequence: Synthetic oligonucleotide
  Target: LAMA2; (-) strand; PAM type: YTN; PAM sequence: TTT
ataaataacctattttggat

SEQ ID NO: 268895 - DNA, 20 bp, Artificial Sequence
  Description of Artificial Sequence: Synthetic oligonucleotide
  Target: LAMA2; (-) strand; PAM type: YTN; PAM sequence: TTA
aatttataaataacctattt

SEQ ID NO: 268896 - DNA, 20 bp, Artificial Sequence
  Description of Artificial Sequence: Synthetic oligonucleotide
  Target: LAMA2; (-) strand; PAM type: YTN; PAM sequence: CTT
aaatttataaataacctatt

SEQ ID NO: 268897 - DNA, 20 bp, Artificial Sequence
  Description of Artificial Sequence: Synthetic oligonucleotide
  Target: LAMA2; (-) strand; PAM type: YTN; PAM sequence: TTC
cttaaatttataaataacct

SEQ ID NO: 268898 - DNA, 20 bp, Artificial Sequence
  Description of Artificial Sequence: Synthetic oligonucleotide
  Target: LAMA2; (-) strand; PAM type: YTN; PAM sequence: CTT
ccttaaatttataaataacc

SEQ ID NO: 268899 - DNA, 20 bp, Artificial Sequence
  Description of Artificial Sequence: Synthetic oligonucleotide
  Target: LAMA2; (-) strand; PAM type: YTN; PAM sequence: CTC
cttccttaaatttataaata

SEQ ID NO: 268900 - DNA, 20 bp, Artificial Sequence
  Description of Artificial Sequence: Synthetic oligonucleotide
  Target: LAMA2; (-) strand; PAM type: YTN; PAM sequence: CTA
tagaagagcactccttcctt

SEQ ID NO: 268901 - DNA, 20 bp, Artificial Sequence
  Description of Artificial Sequence: Synthetic oligonucleotide
  Target: LAMA2; (-) strand; PAM type: YTN; PAM sequence: TTG
aggaaaagaatactatagaa

SEQ ID NO: 268902 - DNA, 20 bp, Artificial Sequence
  Description of Artificial Sequence: Synthetic oligonucleotide
  Target: LAMA2; (-) strand; PAM type: YTN; PAM sequence: CTT
gaggaaaagaatactataga

SEQ ID NO: 268903 - DNA, 20 bp, Artificial Sequence
  Description of Artificial Sequence: Synthetic oligonucleotide
  Target: LAMA2; (-) strand; PAM type: YTN; PAM sequence: TTC
cttgaggaaaagaatactat

SEQ ID NO: 268904 - DNA, 20 bp, Artificial Sequence
  Description of Artificial Sequence: Synthetic oligonucleotide
  Target: LAMA2; (-) strand; PAM type: YTN; PAM sequence: TTT
ccttgaggaaaagaatacta

SEQ ID NO: 268905 - DNA, 20 bp, Artificial Sequence
  Description of Artificial Sequence: Synthetic oligonucleotide
  Target: LAMA2; (-) strand; PAM type: YTN; PAM sequence: CTA
aaataaatttccttgaggaa

SEQ ID NO: 268906 - DNA, 20 bp, Artificial Sequence
  Description of Artificial Sequence: Synthetic oligonucleotide
  Target: LAMA2; (-) strand; PAM type: YTN; PAM sequence: TTG
aaataaaaggtgctaaaata

SEQ ID NO: 268907 - DNA, 20 bp, Artificial Sequence
  Description of Artificial Sequence: Synthetic oligonucleotide
  Target: LAMA2; (-) strand; PAM type: YTN; PAM sequence: TTA
caataggtaaatgttgaaat

SEQ ID NO: 268908 - DNA, 20 bp, Artificial Sequence
  Description of Artificial Sequence: Synthetic oligonucleotide
  Target: LAMA2; (-) strand; PAM type: YTN; PAM sequence: CTA
ttacaataggtaaatgttga

SEQ ID NO: 268909 - DNA, 20 bp, Artificial Sequence
  Description of Artificial Sequence: Synthetic oligonucleotide
  Target: LAMA2; (-) strand; PAM type: YTN; PAM sequence: TTG
acatgcacaaatactattac

SEQ ID NO: 268910 - DNA, 20 bp, Artificial Sequence
  Description of Artificial Sequence: Synthetic oligonucleotide
  Target: LAMA2; (-) strand; PAM type: YTN; PAM sequence: CTA
aaacaagaaatgttgacatg

SEQ ID NO: 268911 - DNA, 20 bp, Artificial Sequence
  Description of Artificial Sequence: Synthetic oligonucleotide
  Target: LAMA2; (-) strand; PAM type: YTN; PAM sequence: CTC
aaacaatatgctaaaacaag

SEQ ID NO: 268912 - DNA, 20 bp, Artificial Sequence
  Description of Artificial Sequence: Synthetic oligonucleotide
  Target: LAMA2; (-) strand; PAM type: YTN; PAM sequence: TTA
gactcaaacaatatgctaaa

SEQ ID NO: 268913 - DNA, 20 bp, Artificial Sequence
  Description of Artificial Sequence: Synthetic oligonucleotide
  Target: LAMA2; (-) strand; PAM type: YTN; PAM sequence: TTT
agactcaaacaatatgctaa

SEQ ID NO: 268914 - DNA, 20 bp, Artificial Sequence
  Description of Artificial Sequence: Synthetic oligonucleotide
  Target: LAMA2; (-) strand; PAM type: YTN; PAM sequence: TTA
agatttagactcaaacaata

SEQ ID NO: 268915 - DNA, 20 bp, Artificial Sequence
  Description of Artificial Sequence: Synthetic oligonucleotide
  Target: LAMA2; (-) strand; PAM type: YTN; PAM sequence: CTA
ttaagatttagactcaaaca

SEQ ID NO: 268916 - DNA, 20 bp, Artificial Sequence
  Description of Artificial Sequence: Synthetic oligonucleotide
  Target: LAMA2; (-) strand; PAM type: YTN; PAM sequence: TTA
agatactattaagatttaga

SEQ ID NO: 268917 - DNA, 20 bp, Artificial Sequence
  Description of Artificial Sequence: Synthetic oligonucleotide
  Target: LAMA2; (-) strand; PAM type: YTN; PAM sequence: TTT
aagatactattaagatttag

SEQ ID NO: 268918 - DNA, 20 bp, Artificial Sequence
  Description of Artificial Sequence: Synthetic oligonucleotide
  Target: LAMA2; (-) strand; PAM type: YTN; PAM sequence: CTA
tttaagatactattaagatt

SEQ ID NO: 268919 - DNA, 20 bp, Artificial Sequence
  Description of Artificial Sequence: Synthetic oligonucleotide
  Target: LAMA2; (-) strand; PAM type: YTN; PAM sequence: TTC
tatttaagatactattaaga

SEQ ID NO: 268920 - DNA, 20 bp, Artificial Sequence
  Description of Artificial Sequence: Synthetic oligonucleotide
  Target: LAMA2; (-) strand; PAM type: YTN; PAM sequence: CTT
ctatttaagatactattaag

SEQ ID NO: 268921 - DNA, 20 bp, Artificial Sequence
  Description of Artificial Sequence: Synthetic oligonucleotide
  Target: LAMA2; (-) strand; PAM type: YTN; PAM sequence: TTC
ttctatttaagatactatta

SEQ ID NO: 268922 - DNA, 20 bp, Artificial Sequence
  Description of Artificial Sequence: Synthetic oligonucleotide
  Target: LAMA2; (-) strand; PAM type: YTN; PAM sequence: CTA
gaacataaacaaaaattctt

SEQ ID NO: 268923 - DNA, 20 bp, Artificial Sequence
  Description of Artificial Sequence: Synthetic oligonucleotide
  Target: LAMA2; (-) strand; PAM type: YTN; PAM sequence: TTA
taaaactagaacataaacaa

SEQ ID NO: 268924 - DNA, 20 bp, Artificial Sequence
  Description of Artificial Sequence: Synthetic oligonucleotide
  Target: LAMA2; (-) strand; PAM type: YTN; PAM sequence: CTT
ataaaactagaacataaaca

SEQ ID NO: 268925 - DNA, 20 bp, Artificial Sequence
  Description of Artificial Sequence: Synthetic oligonucleotide
  Target: LAMA2; (-) strand; PAM type: YTN; PAM sequence: CTC
ttataaaactagaacataaa

SEQ ID NO: 268926 - DNA, 20 bp, Artificial Sequence
  Description of Artificial Sequence: Synthetic oligonucleotide
  Target: LAMA2; (-) strand; PAM type: YTN; PAM sequence: TTA
actcttataaaactagaaca

SEQ ID NO: 268927 - DNA, 20 bp, Artificial Sequence
  Description of Artificial Sequence: Synthetic oligonucleotide
  Target: LAMA2; (-) strand; PAM type: YTN; PAM sequence: CTG
aggttaactcttataaaact

SEQ ID NO: 268928 - DNA, 20 bp, Artificial Sequence
  Description of Artificial Sequence: Synthetic oligonucleotide
  Target: LAMA2; (-) strand; PAM type: YTN; PAM sequence: TTC
tgaggttaactcttataaaa

SEQ ID NO: 268929 - DNA, 20 bp, Artificial Sequence
  Description of Artificial Sequence: Synthetic oligonucleotide
  Target: LAMA2; (-) strand; PAM type: YTN; PAM sequence: CTT
ctgaggttaactcttataaa

SEQ ID NO: 268930 - DNA, 20 bp, Artificial Sequence
  Description of Artificial Sequence: Synthetic oligonucleotide
  Target: LAMA2; (-) strand; PAM type: YTN; PAM sequence: TTA
gcttctgaggttaactctta

SEQ ID NO: 268931 - DNA, 20 bp, Artificial Sequence
  Description of Artificial Sequence: Synthetic oligonucleotide
  Target: LAMA2; (-) strand; PAM type: YTN; PAM sequence: TTT
agcttctgaggttaactctt

SEQ ID NO: 268932 - DNA, 20 bp, Artificial Sequence
  Description of Artificial Sequence: Synthetic oligonucleotide
  Target: LAMA2; (-) strand; PAM type: YTN; PAM sequence: CTT
tagcttctgaggttaactct

SEQ ID NO: 268933 - DNA, 20 bp, Artificial Sequence
  Description of Artificial Sequence: Synthetic oligonucleotide
  Target: LAMA2; (-) strand; PAM type: YTN; PAM sequence: TTA
atccagctttagcttctgag

SEQ ID NO: 268934 - DNA, 20 bp, Artificial Sequence
  Description of Artificial Sequence: Synthetic oligonucleotide
  Target: LAMA2; (-) strand; PAM type: YTN; PAM sequence: TTT
aatccagctttagcttctga

SEQ ID NO: 268935 - DNA, 20 bp, Artificial Sequence
  Description of Artificial Sequence: Synthetic oligonucleotide
  Target: LAMA2; (-) strand; PAM type: YTN; PAM sequence: TTT
taatccagctttagcttctg

SEQ ID NO: 268936 - DNA, 20 bp, Artificial Sequence
  Description of Artificial Sequence: Synthetic oligonucleotide
  Target: LAMA2; (-) strand; PAM type: YTN; PAM sequence: TTT
ttaatccagctttagcttct

SEQ ID NO: 268937 - DNA, 20 bp, Artificial Sequence
  Description of Artificial Sequence: Synthetic oligonucleotide
  Target: LAMA2; (-) strand; PAM type: YTN; PAM sequence: TTT
tttaatccagctttagcttc

SEQ ID NO: 268938 - DNA, 20 bp, Artificial Sequence
  Description of Artificial Sequence: Synthetic oligonucleotide
  Target: LAMA2; (-) strand; PAM type: YTN; PAM sequence: TTG
gtgtattttttaatccagct

SEQ ID NO: 268939 - DNA, 20 bp, Artificial Sequence
  Description of Artificial Sequence: Synthetic oligonucleotide
  Target: LAMA2; (-) strand; PAM type: YTN; PAM sequence: TTT
ggtgtattttttaatccagc

SEQ ID NO: 268940 - DNA, 20 bp, Artificial Sequence
  Description of Artificial Sequence: Synthetic oligonucleotide
  Target: LAMA2; (-) strand; PAM type: YTN; PAM sequence: TTT
tggtgtattttttaatccag

SEQ ID NO: 268941 - DNA, 20 bp, Artificial Sequence
  Description of Artificial Sequence: Synthetic oligonucleotide
  Target: LAMA2; (-) strand; PAM type: YTN; PAM sequence: TTT
ttggtgtattttttaatcca

SEQ ID NO: 268942 - DNA, 20 bp, Artificial Sequence
  Description of Artificial Sequence: Synthetic oligonucleotide
  Target: LAMA2; (-) strand; PAM type: YTN; PAM sequence: CTT
tttggtgtattttttaatcc

SEQ ID NO: 268943 - DNA, 20 bp, Artificial Sequence
  Description of Artificial Sequence: Synthetic oligonucleotide
  Target: LAMA2; (-) strand; PAM type: YTN; PAM sequence: TTA
actttttggtgtatttttta

SEQ ID NO: 268944 - DNA, 20 bp, Artificial Sequence
  Description of Artificial Sequence: Synthetic oligonucleotide
  Target: LAMA2; (-) strand; PAM type: YTN; PAM sequence: CTT
aactttttggtgtatttttt

SEQ ID NO: 268945 - DNA, 20 bp, Artificial Sequence
  Description of Artificial Sequence: Synthetic oligonucleotide
  Target: LAMA2; (-) strand; PAM type: YTN; PAM sequence: TTC
ccaaataacacccagtctta

SEQ ID NO: 268946 - DNA, 20 bp, Artificial Sequence
  Description of Artificial Sequence: Synthetic oligonucleotide
  Target: LAMA2; (-) strand; PAM type: YTN; PAM sequence: TTT
cccaaataacacccagtctt

SEQ ID NO: 268947 - DNA, 20 bp, Artificial Sequence
  Description of Artificial Sequence: Synthetic oligonucleotide
  Target: LAMA2; (-) strand; PAM type: YTN; PAM sequence: TTT
tcccaaataacacccagtct

SEQ ID NO: 268948 - DNA, 20 bp, Artificial Sequence
  Description of Artificial Sequence: Synthetic oligonucleotide
  Target: LAMA2; (-) strand; PAM type: YTN; PAM sequence: CTA
ttttcccaaataacacccag

SEQ ID NO: 268949 - DNA, 20 bp, Artificial Sequence
  Description of Artificial Sequence: Synthetic oligonucleotide
  Target: LAMA2; (-) strand; PAM type: YTN; PAM sequence: TTA
aaatctattttcccaaataa

SEQ ID NO: 268950 - DNA, 20 bp, Artificial Sequence
  Description of Artificial Sequence: Synthetic oligonucleotide
  Target: LAMA2; (-) strand; PAM type: YTN; PAM sequence: TTT
aaaatctattttcccaaata

SEQ ID NO: 268951 - DNA, 20 bp, Artificial Sequence
  Description of Artificial Sequence: Synthetic oligonucleotide
  Target: LAMA2; (-) strand; PAM type: YTN; PAM sequence: TTT
taaaatctattttcccaaat

SEQ ID NO: 268952 - DNA, 20 bp, Artificial Sequence
  Description of Artificial Sequence: Synthetic oligonucleotide
  Target: LAMA2; (-) strand; PAM type: YTN; PAM sequence: TTA
aaatacaaagaaaaaatgat

SEQ ID NO: 268953 - DNA, 20 bp, Artificial Sequence
  Description of Artificial Sequence: Synthetic oligonucleotide
  Target: LAMA2; (-) strand; PAM type: YTN; PAM sequence: TTA
aagatggttaaaatacaaag

SEQ ID NO: 268954 - DNA, 20 bp, Artificial Sequence
  Description of Artificial Sequence: Synthetic oligonucleotide
  Target: LAMA2; (-) strand; PAM type: YTN; PAM sequence: TTC
attaaagatggttaaaatac

SEQ ID NO: 268955 - DNA, 20 bp, Artificial Sequence
  Description of Artificial Sequence: Synthetic oligonucleotide
  Target: LAMA2; (-) strand; PAM type: YTN; PAM sequence: TTT
cattaaagatggttaaaata

SEQ ID NO: 268956 - DNA, 20 bp, Artificial Sequence
  Description of Artificial Sequence: Synthetic oligonucleotide
  Target: LAMA2; (-) strand; PAM type: YTN; PAM sequence: TTT
tcattaaagatggttaaaat

SEQ ID NO: 268957 - DNA, 20 bp, Artificial Sequence
  Description of Artificial Sequence: Synthetic oligonucleotide
  Target: LAMA2; (-) strand; PAM type: YTN; PAM sequence: TTC
agtgtaatacattttcatta

SEQ ID NO: 268958 - DNA, 20 bp, Artificial Sequence
  Description of Artificial Sequence: Synthetic oligonucleotide
  Target: LAMA2; (-) strand; PAM type: YTN; PAM sequence: TTT
cagtgtaatacattttcatt

SEQ ID NO: 268959 - DNA, 20 bp, Artificial Sequence
  Description of Artificial Sequence: Synthetic oligonucleotide
  Target: LAMA2; (-) strand; PAM type: YTN; PAM sequence: TTT
tcagtgtaatacattttcat

SEQ ID NO: 268960 - DNA, 20 bp, Artificial Sequence
  Description of Artificial Sequence: Synthetic oligonucleotide
  Target: LAMA2; (-) strand; PAM type: YTN; PAM sequence: TTA
ttttcagtgtaatacatttt

SEQ ID NO: 268961 - DNA, 20 bp, Artificial Sequence
  Description of Artificial Sequence: Synthetic oligonucleotide
  Target: LAMA2; (-) strand; PAM type: YTN; PAM sequence: TTT
attttcagtgtaatacattt

SEQ ID NO: 268962 - DNA, 20 bp, Artificial Sequence
  Description of Artificial Sequence: Synthetic oligonucleotide
  Target: LAMA2; (-) strand; PAM type: YTN; PAM sequence: TTC
acatttattttcagtgtaat

SEQ ID NO: 268963 - DNA, 20 bp, Artificial Sequence
  Description of Artificial Sequence: Synthetic oligonucleotide
  Target: LAMA2; (-) strand; PAM type: YTN; PAM sequence: CTT
cacatttattttcagtgtaa

SEQ ID NO: 268964 - DNA, 20 bp, Artificial Sequence
  Description of Artificial Sequence: Synthetic oligonucleotide
  Target: LAMA2; (-) strand; PAM type: YTN; PAM sequence: CTA
ccttcacatttattttcagt

SEQ ID NO: 268965 - DNA, 20 bp, Artificial Sequence
  Description of Artificial Sequence: Synthetic oligonucleotide
  Target: LAMA2; (-) strand; PAM type: YTN; PAM sequence: CTC
acctaccttcacatttattt

SEQ ID NO: 268966 - DNA, 20 bp, Artificial Sequence
  Description of Artificial Sequence: Synthetic oligonucleotide
  Target: LAMA2; (-) strand; PAM type: YTN; PAM sequence: CTC
tcacctaccttcacatttat

SEQ ID NO: 268967 - DNA, 20 bp, Artificial Sequence
  Description of Artificial Sequence: Synthetic oligonucleotide
  Target: LAMA2; (-) strand; PAM type: YTN; PAM sequence: CTC
ccctctcacctaccttcaca

SEQ ID NO: 268968 - DNA, 20 bp, Artificial Sequence
  Description of Artificial Sequence: Synthetic oligonucleotide
  Target: LAMA2; (-) strand; PAM type: YTN; PAM sequence: CTC
tcccctctcacctaccttca

SEQ ID NO: 268969 - DNA, 20 bp, Artificial Sequence
  Description of Artificial Sequence: Synthetic oligonucleotide
  Target: LAMA2; (-) strand; PAM type: YTN; PAM sequence: TTA
atctctcccctctcacctac

SEQ ID NO: 268970 - DNA, 20 bp, Artificial Sequence
  Description of Artificial Sequence: Synthetic oligonucleotide
  Target: LAMA2; (-) strand; PAM type: YTN; PAM sequence: TTT
aatctctcccctctcaccta

SEQ ID NO: 268971 - DNA, 20 bp, Artificial Sequence
  Description of Artificial Sequence: Synthetic oligonucleotide
  Target: LAMA2; (-) strand; PAM type: YTN; PAM sequence: TTG
acagtacatttaatctctcc

SEQ ID NO: 268972 - DNA, 20 bp, Artificial Sequence
  Description of Artificial Sequence: Synthetic oligonucleotide
  Target: LAMA2; (-) strand; PAM type: YTN; PAM sequence: TTT
gacagtacatttaatctctc

SEQ ID NO: 268973 - DNA, 20 bp, Artificial Sequence
  Description of Artificial Sequence: Synthetic oligonucleotide
  Target: LAMA2; (-) strand; PAM type: YTN; PAM sequence: CTA
aatatgacaatataaatgta

SEQ ID NO: 268974 - DNA, 20 bp, Artificial Sequence
  Description of Artificial Sequence: Synthetic oligonucleotide
  Target: LAMA2; (-) strand; PAM type: YTN; PAM sequence: CTA
tcaactaaatatgacaatat

SEQ ID NO: 268975 - DNA, 20 bp, Artificial Sequence
  Description of Artificial Sequence: Synthetic oligonucleotide
  Target: LAMA2; (-) strand; PAM type: YTN; PAM sequence: TTA
gtgtgtatatactatcaact

SEQ ID NO: 268976 - DNA, 20 bp, Artificial Sequence
  Description of Artificial Sequence: Synthetic oligonucleotide
  Target: LAMA2; (-) strand; PAM type: YTN; PAM sequence: TTG
ggaagaattagtgtgtatat

SEQ ID NO: 268977 - DNA, 20 bp, Artificial Sequence
  Description of Artificial Sequence: Synthetic oligonucleotide
  Target: LAMA2; (-) strand; PAM type: YTN; PAM sequence: CTT
gggaagaattagtgtgtata

SEQ ID NO: 268978 - DNA, 20 bp, Artificial Sequence
  Description of Artificial Sequence: Synthetic oligonucleotide
  Target: LAMA2; (-) strand; PAM type: YTN; PAM sequence: TTA
tacttgggaagaattagtgt

SEQ ID NO: 268979 - DNA, 20 bp, Artificial Sequence
  Description of Artificial Sequence: Synthetic oligonucleotide
  Target: LAMA2; (-) strand; PAM type: YTN; PAM sequence: TTA
aaatatatcattatacttgg

SEQ ID NO: 268980 - DNA, 20 bp, Artificial Sequence
  Description of Artificial Sequence: Synthetic oligonucleotide
  Target: LAMA2; (-) strand; PAM type: YTN; PAM sequence: TTA
tcattaaaatatatcattat

SEQ ID NO: 268981 - DNA, 20 bp, Artificial Sequence
  Description of Artificial Sequence: Synthetic oligonucleotide
  Target: LAMA2; (-) strand; PAM type: YTN; PAM sequence: TTA
attatcattaaaatatatca

SEQ ID NO: 268982 - DNA, 20 bp, Artificial Sequence
  Description of Artificial Sequence: Synthetic oligonucleotide
  Target: LAMA2; (-) strand; PAM type: YTN; PAM sequence: TTT
aattatcattaaaatatatc

SEQ ID NO: 268983 - DNA, 20 bp, Artificial Sequence
  Description of Artificial Sequence: Synthetic oligonucleotide
  Target: LAMA2; (-) strand; PAM type: YTN; PAM sequence: CTT
taattatcattaaaatatat

SEQ ID NO: 268984 - DNA, 20 bp, Artificial Sequence
  Description of Artificial Sequence: Synthetic oligonucleotide
  Target: LAMA2; (-) strand; PAM type: YTN; PAM sequence: TTC
tttaattatcattaaaatat

SEQ ID NO: 268985 - DNA, 20 bp, Artificial Sequence
  Description of Artificial Sequence: Synthetic oligonucleotide
  Target: LAMA2; (-) strand; PAM type: YTN; PAM sequence: CTT
ctttaattatcattaaaata

SEQ ID NO: 268986 - DNA, 20 bp, Artificial Sequence
  Description of Artificial Sequence: Synthetic oligonucleotide
  Target: LAMA2; (-) strand; PAM type: YTN; PAM sequence: CTA
cttctttaattatcattaaa

SEQ ID NO: 268987 - DNA, 20 bp, Artificial Sequence
  Description of Artificial Sequence: Synthetic oligonucleotide
  Target: LAMA2; (-) strand; PAM type: YTN; PAM sequence: TTG
atagtctacttctttaatta

SEQ ID NO: 268988 - DNA, 20 bp, Artificial Sequence
  Description of Artificial Sequence: Synthetic oligonucleotide
  Target: LAMA2; (-) strand; PAM type: YTN; PAM sequence: TTT
gatagtctacttctttaatt

SEQ ID NO: 268989 - DNA, 20 bp, Artificial Sequence
  Description of Artificial Sequence: Synthetic oligonucleotide
  Target: LAMA2; (-) strand; PAM type: YTN; PAM sequence: CTT
tgatagtctacttctttaat

SEQ ID NO: 268990 - DNA, 20 bp, Artificial Sequence
  Description of Artificial Sequence: Synthetic oligonucleotide
  Target: LAMA2; (-) strand; PAM type: YTN; PAM sequence: TTA
taaaatactttgatagtcta

SEQ ID NO: 268991 - DNA, 20 bp, Artificial Sequence
  Description of Artificial Sequence: Synthetic oligonucleotide
  Target: LAMA2; (-) strand; PAM type: YTN; PAM sequence: TTG
aaagcaatattataaaatac

SEQ ID NO: 268992 - DNA, 20 bp, Artificial Sequence
  Description of Artificial Sequence: Synthetic oligonucleotide
  Target: LAMA2; (-) strand; PAM type: YTN; PAM sequence: CTT
gaaagcaatattataaaata

SEQ ID NO: 268993 - DNA, 20 bp, Artificial Sequence
  Description of Artificial Sequence: Synthetic oligonucleotide
  Target: LAMA2; (-) strand; PAM type: YTN; PAM sequence: TTG
acttgaaagcaatattataa

SEQ ID NO: 268994 - DNA, 20 bp, Artificial Sequence
  Description of Artificial Sequence: Synthetic oligonucleotide
  Target: LAMA2; (-) strand; PAM type: YTN; PAM sequence: TTT
gacttgaaagcaatattata

SEQ ID NO: 268995 - DNA, 20 bp, Artificial Sequence
  Description of Artificial Sequence: Synthetic oligonucleotide
  Target: LAMA2; (-) strand; PAM type: YTN; PAM sequence: TTA
tttgacttgaaagcaatatt

SEQ ID NO: 268996 - DNA, 20 bp, Artificial Sequence
  Description of Artificial Sequence: Synthetic oligonucleotide
  Target: LAMA2; (-) strand; PAM type: YTN; PAM sequence: TTT
atttgacttgaaagcaatat

SEQ ID NO: 268997 - DNA, 20 bp, Artificial Sequence
  Description of Artificial Sequence: Synthetic oligonucleotide
  Target: LAMA2; (-) strand; PAM type: YTN; PAM sequence: TTA
ataatttatttgacttgaaa

SEQ ID NO: 268998 - DNA, 20 bp, Artificial Sequence
  Description of Artificial Sequence: Synthetic oligonucleotide
  Target: LAMA2; (-) strand; PAM type: YTN; PAM sequence: TTA
tgtgcatgttaataatttat

SEQ ID NO: 268999 - DNA, 20 bp, Artificial Sequence
  Description of Artificial Sequence: Synthetic oligonucleotide
  Target: LAMA2; (-) strand; PAM type: YTN; PAM sequence: TTA
attatgtgcatgttaataat

SEQ ID NO: 269000 - DNA, 20 bp, Artificial Sequence
  Description of Artificial Sequence: Synthetic oligonucleotide
  Target: LAMA2; (-) strand; PAM type: YTN; PAM sequence: CTA
gttaattatgtgcatgttaa

SEQ ID NO: 269001 - DNA, 20 bp, Artificial Sequence
  Description of Artificial Sequence: Synthetic oligonucleotide
  Target: LAMA2; (-) strand; PAM type: YTN; PAM sequence: TTA
tctagttaattatgtgcatg

SEQ ID NO: 269002 - DNA, 20 bp, Artificial Sequence
  Description of Artificial Sequence: Synthetic oligonucleotide
  Target: LAMA2; (-) strand; PAM type: YTN; PAM sequence: CTA
tatattatctagttaattat

SEQ ID NO: 269003 - DNA, 20 bp, Artificial Sequence
  Description of Artificial Sequence: Synthetic oligonucleotide
  Target: LAMA2; (-) strand; PAM type: YTN; PAM sequence: TTA
agaatatctatatattatct

SEQ ID NO: 269004 - DNA, 20 bp, Artificial Sequence
  Description of Artificial Sequence: Synthetic oligonucleotide
  Target: LAMA2; (-) strand; PAM type: YTN; PAM sequence: TTA
cattaagaatatctatatat

SEQ ID NO: 269005 - DNA, 20 bp, Artificial Sequence
  Description of Artificial Sequence: Synthetic oligonucleotide
  Target: LAMA2; (-) strand; PAM type: YTN; PAM sequence: TTT
acattaagaatatctatata

SEQ ID NO: 269006 - DNA, 20 bp, Artificial Sequence
  Description of Artificial Sequence: Synthetic oligonucleotide
  Target: LAMA2; (-) strand; PAM type: YTN; PAM sequence: CTG
tttacattaagaatatctat

SEQ ID NO: 269007 - DNA, 20 bp, Artificial Sequence
  Description of Artificial Sequence: Synthetic oligonucleotide
  Target: LAMA2; (-) strand; PAM type: YTN; PAM sequence: TTC
aaggactgtttacattaaga

SEQ ID NO: 269008 - DNA, 20 bp, Artificial Sequence
  Description of Artificial Sequence: Synthetic oligonucleotide
  Target: LAMA2; (-) strand; PAM type: YTN; PAM sequence: TTA
ataattcaaggactgtttac

SEQ ID NO: 269009 - DNA, 20 bp, Artificial Sequence
  Description of Artificial Sequence: Synthetic oligonucleotide
  Target: LAMA2; (-) strand; PAM type: YTN; PAM sequence: TTA
ataaaagtgatgattaataa

SEQ ID NO: 269010 - DNA, 20 bp, Artificial Sequence
  Description of Artificial Sequence: Synthetic oligonucleotide
  Target: LAMA2; (-) strand; PAM type: YTN; PAM sequence: CTG
gatagttaataaaagtgatg

SEQ ID NO: 269011 - DNA, 20 bp, Artificial Sequence
  Description of Artificial Sequence: Synthetic oligonucleotide
  Target: LAMA2; (-) strand; PAM type: YTN; PAM sequence: TTC
tggatagttaataaaagtga

SEQ ID NO: 269012 - DNA, 20 bp, Artificial Sequence
  Description of Artificial Sequence: Synthetic oligonucleotide
  Target: LAMA2; (-) strand; PAM type: YTN; PAM sequence: CTT
ctggatagttaataaaagtg

SEQ ID NO: 269013 - DNA, 20 bp, Artificial Sequence
  Description of Artificial Sequence: Synthetic oligonucleotide
  Target: LAMA2; (-) strand; PAM type: YTN; PAM sequence: TTG
cttctggatagttaataaaa

SEQ ID NO: 269014 - DNA, 20 bp, Artificial Sequence
  Description of Artificial Sequence: Synthetic oligonucleotide
  Target: LAMA2; (-) strand; PAM type: YTN; PAM sequence: TTT
gcttctggatagttaataaa

SEQ ID NO: 269015 - DNA, 20 bp, Artificial Sequence
  Description of Artificial Sequence: Synthetic oligonucleotide
  Target: LAMA2; (-) strand; PAM type: YTN; PAM sequence: TTC
aagtttgcttctggatagtt

SEQ ID NO: 269016 - DNA, 20 bp, Artificial Sequence
  Description of Artificial Sequence: Synthetic oligonucleotide
  Target: LAMA2; (-) strand; PAM type: YTN; PAM sequence: TTT
caagtttgcttctggatagt

SEQ ID NO: 269017 - DNA, 20 bp, Artificial Sequence
  Description of Artificial Sequence: Synthetic oligonucleotide
  Target: LAMA2; (-) strand; PAM type: YTN; PAM sequence: TTA
tttcaagtttgcttctggat

SEQ ID NO: 269018 - DNA, 20 bp, Artificial Sequence
  Description of Artificial Sequence: Synthetic oligonucleotide
  Target: LAMA2; (-) strand; PAM type: YTN; PAM sequence: TTT
atttcaagtttgcttctgga

SEQ ID NO: 269019 - DNA, 20 bp, Artificial Sequence
  Description of Artificial Sequence: Synthetic oligonucleotide
  Target: LAMA2; (-) strand; PAM type: YTN; PAM sequence: TTT
tatttcaagtttgcttctgg

SEQ ID NO: 269020 - DNA, 20 bp, Artificial Sequence
  Description of Artificial Sequence: Synthetic oligonucleotide
  Target: LAMA2; (-) strand; PAM type: YTN; PAM sequence: TTT
ttatttcaagtttgcttctg

SEQ ID NO: 269021 - DNA, 20 bp, Artificial Sequence
  Description of Artificial Sequence: Synthetic oligonucleotide
  Target: LAMA2; (-) strand; PAM type: YTN; PAM sequence: CTT
tttatttcaagtttgcttct

SEQ ID NO: 269022 - DNA, 20 bp, Artificial Sequence
  Description of Artificial Sequence: Synthetic oligonucleotide
  Target: LAMA2; (-) strand; PAM type: YTN; PAM sequence: TTA
atatgatctttttatttcaa

SEQ ID NO: 269023 - DNA, 20 bp, Artificial Sequence
  Description of Artificial Sequence: Synthetic oligonucleotide
  Target: LAMA2; (-) strand; PAM type: YTN; PAM sequence: TTA
acattaatatgatcttttta

SEQ ID NO: 269024 - DNA, 20 bp, Artificial Sequence
  Description of Artificial Sequence: Synthetic oligonucleotide
  Target: LAMA2; (-) strand; PAM type: YTN; PAM sequence: CTT
aacattaatatgatcttttt

SEQ ID NO: 269025 - DNA, 20 bp, Artificial Sequence
  Description of Artificial Sequence: Synthetic oligonucleotide
  Target: LAMA2; (-) strand; PAM type: YTN; PAM sequence: TTG
tgcttaacattaatatgatc

SEQ ID NO: 269026 - DNA, 20 bp, Artificial Sequence
  Description of Artificial Sequence: Synthetic oligonucleotide
  Target: LAMA2; (-) strand; PAM type: YTN; PAM sequence: TTT
gtgcttaacattaatatgat

SEQ ID NO: 269027 - DNA, 20 bp, Artificial Sequence
  Description of Artificial Sequence: Synthetic oligonucleotide
  Target: LAMA2; (-) strand; PAM type: YTN; PAM sequence: TTT
tgtgcttaacattaatatga

SEQ ID NO: 269028 - DNA, 20 bp, Artificial Sequence
  Description of Artificial Sequence: Synthetic oligonucleotide
  Target: LAMA2; (-) strand; PAM type: YTN; PAM sequence: TTT
ttgtgcttaacattaatatg

SEQ ID NO: 269029 - DNA, 20 bp, Artificial Sequence
  Description of Artificial Sequence: Synthetic oligonucleotide
  Target: LAMA2; (-) strand; PAM type: YTN; PAM sequence: TTA
atttttgtgcttaacattaa

SEQ ID NO: 269030 - DNA, 20 bp, Artificial Sequence
  Description of Artificial Sequence: Synthetic oligonucleotide
  Target: LAMA2; (-) strand; PAM type: YTN; PAM sequence: TTT
aatttttgtgcttaacatta

SEQ ID NO: 269031 - DNA, 20 bp, Artificial Sequence
  Description of Artificial Sequence: Synthetic oligonucleotide
  Target: LAMA2; (-) strand; PAM type: YTN; PAM sequence: TTG
tttaatttttgtgcttaaca

SEQ ID NO: 269032 - DNA, 20 bp, Artificial Sequence
  Description of Artificial Sequence: Synthetic oligonucleotide
  Target: LAMA2; (-) strand; PAM type: YTN; PAM sequence: CTA
ttgtttaatttttgtgctta

SEQ ID NO: 269033 - DNA, 20 bp, Artificial Sequence
  Description of Artificial Sequence: Synthetic oligonucleotide
  Target: LAMA2; (-) strand; PAM type: YTN; PAM sequence: TTA
atgtactattgtttaatttt

SEQ ID NO: 269034 - DNA, 20 bp, Artificial Sequence
  Description of Artificial Sequence: Synthetic oligonucleotide
  Target: LAMA2; (-) strand; PAM type: YTN; PAM sequence: TTT
aatgtactattgtttaattt

SEQ ID NO: 269035 - DNA, 20 bp, Artificial Sequence
  Description of Artificial Sequence: Synthetic oligonucleotide
  Target: LAMA2; (-) strand; PAM type: YTN; PAM sequence: TTT
taatgtactattgtttaatt

SEQ ID NO: 269036 - DNA, 20 bp, Artificial Sequence
  Description of Artificial Sequence: Synthetic oligonucleotide
  Target: LAMA2; (-) strand; PAM type: YTN; PAM sequence: CTA
ccccagattttaatgtacta

SEQ ID NO: 269037 - DNA, 20 bp, Artificial Sequence
  Description of Artificial Sequence: Synthetic oligonucleotide
  Target: LAMA2; (-) strand; PAM type: YTN; PAM sequence: TTA
tctaccccagattttaatgt

SEQ ID NO: 269038 - DNA, 20 bp, Artificial Sequence
  Description of Artificial Sequence: Synthetic oligonucleotide
  Target: LAMA2; (-) strand; PAM type: YTN; PAM sequence: TTA
tattatctaccccagatttt

SEQ ID NO: 269039 - DNA, 20 bp, Artificial Sequence
  Description of Artificial Sequence: Synthetic oligonucleotide
  Target: LAMA2; (-) strand; PAM type: YTN; PAM sequence: TTC
cccaaataatcccattatat

SEQ ID NO: 269040 - DNA, 20 bp, Artificial Sequence
  Description of Artificial Sequence: Synthetic oligonucleotide
  Target: LAMA2; (-) strand; PAM type: YTN; PAM sequence: TTA
aaagaaatgttccccaaata

SEQ ID NO: 269041 - DNA, 20 bp, Artificial Sequence
  Description of Artificial Sequence: Synthetic oligonucleotide
  Target: LAMA2; (-) strand; PAM type: YTN; PAM sequence: TTT
aaaagaaatgttccccaaat

SEQ ID NO: 269042 - DNA, 20 bp, Artificial Sequence
  Description of Artificial Sequence: Synthetic oligonucleotide
  Target: LAMA2; (-) strand; PAM type: YTN; PAM sequence: CTT
taaaagaaatgttccccaaa

SEQ ID NO: 269043 - DNA, 20 bp, Artificial Sequence
  Description of Artificial Sequence: Synthetic oligonucleotide
  Target: LAMA2; (-) strand; PAM type: YTN; PAM sequence: CTC
tttaaaagaaatgttcccca

SEQ ID NO: 269044 - DNA, 20 bp, Artificial Sequence
  Description of Artificial Sequence: Synthetic oligonucleotide
  Target: LAMA2; (-) strand; PAM type: YTN; PAM sequence: TTC
tctttaaaagaaatgttccc

SEQ ID NO: 269045 - DNA, 20 bp, Artificial Sequence
  Description of Artificial Sequence: Synthetic oligonucleotide
  Target: LAMA2; (-) strand; PAM type: YTN; PAM sequence: TTG
atgggcagaatgccaattct

SEQ ID NO: 269046 - DNA, 20 bp, Artificial Sequence
  Description of Artificial Sequence: Synthetic oligonucleotide
  Target: LAMA2; (-) strand; PAM type: YTN; PAM sequence: TTG
ttgatgggcagaatgccaat

SEQ ID NO: 269047 - DNA, 20 bp, Artificial Sequence
  Description of Artificial Sequence: Synthetic oligonucleotide
  Target: LAMA2; (-) strand; PAM type: YTN; PAM sequence: TTG
ttgttgatgggcagaatgcc

SEQ ID NO: 269048 - DNA, 20 bp, Artificial Sequence
  Description of Artificial Sequence: Synthetic oligonucleotide
  Target: LAMA2; (-) strand; PAM type: YTN; PAM sequence: TTG
atcatcaacaataaatgaaa

SEQ ID NO: 269049 - DNA, 20 bp, Artificial Sequence
  Description of Artificial Sequence: Synthetic oligonucleotide
  Target: LAMA2; (-) strand; PAM type: YTN; PAM sequence: TTA
aaaaagtattgatcatcaac

SEQ ID NO: 269050 - DNA, 20 bp, Artificial Sequence
  Description of Artificial Sequence: Synthetic oligonucleotide
  Target: LAMA2; (-) strand; PAM type: YTN; PAM sequence: TTC
aaaatgttaaaaaagtattg

SEQ ID NO: 269051 - DNA, 20 bp, Artificial Sequence
  Description of Artificial Sequence: Synthetic oligonucleotide
  Target: LAMA2; (-) strand; PAM type: YTN; PAM sequence: CTA
atgataaatgtattcaaaat

SEQ ID NO: 269052 - DNA, 20 bp, Artificial Sequence
  Description of Artificial Sequence: Synthetic oligonucleotide
  Target: LAMA2; (-) strand; PAM type: YTN; PAM sequence: TTC
taatgataaatgtattcaaa

SEQ ID NO: 269053 - DNA, 20 bp, Artificial Sequence
  Description of Artificial Sequence: Synthetic oligonucleotide
  Target: LAMA2; (-) strand; PAM type: YTN; PAM sequence: TTT
ctaatgataaatgtattcaa

SEQ ID NO: 269054 - DNA, 20 bp, Artificial Sequence
  Description of Artificial Sequence: Synthetic oligonucleotide
  Target: LAMA2; (-) strand; PAM type: YTN; PAM sequence: TTA
cgatttctaatgataaatgt

SEQ ID NO: 269055 - DNA, 20 bp, Artificial Sequence
  Description of Artificial Sequence: Synthetic oligonucleotide
  Target: LAMA2; (-) strand; PAM type: YTN; PAM sequence: TTA
gaaacccacatatgtgatag

SEQ ID NO: 269056 - DNA, 20 bp, Artificial Sequence
  Description of Artificial Sequence: Synthetic oligonucleotide
  Target: LAMA2; (-) strand; PAM type: YTN; PAM sequence: TTA
atatcacatgggacaagtgg

SEQ ID NO: 269057 - DNA, 20 bp, Artificial Sequence
  Description of Artificial Sequence: Synthetic oligonucleotide
  Target: LAMA2; (-) strand; PAM type: YTN; PAM sequence: CTT
aatatcacatgggacaagtg

SEQ ID NO: 269058 - DNA, 20 bp, Artificial Sequence
  Description of Artificial Sequence: Synthetic oligonucleotide
  Target: LAMA2; (-) strand; PAM type: YTN; PAM sequence: TTC
ttaatatcacatgggacaag

SEQ ID NO: 269059 - DNA, 20 bp, Artificial Sequence
  Description of Artificial Sequence: Synthetic oligonucleotide
  Target: LAMA2; (-) strand; PAM type: YTN; PAM sequence: TTT
cttaatatcacatgggacaa

SEQ ID NO: 269060 - DNA, 20 bp, Artificial Sequence
  Description of Artificial Sequence: Synthetic oligonucleotide
  Target: LAMA2; (-) strand; PAM type: YTN; PAM sequence: TTT
tcttaatatcacatgggaca

SEQ ID NO: 269061 - DNA, 20 bp, Artificial Sequence
  Description of Artificial Sequence: Synthetic oligonucleotide
  Target: LAMA2; (-) strand; PAM type: YTN; PAM sequence: CTT
ttcttaatatcacatgggac

SEQ ID NO: 269062 - DNA, 20 bp, Artificial Sequence
  Description of Artificial Sequence: Synthetic oligonucleotide
  Target: LAMA2; (-) strand; PAM type: YTN; PAM sequence: TTG
gcccttttcttaatatcaca

SEQ ID NO: 269063 - DNA, 20 bp, Artificial Sequence
  Description of Artificial Sequence: Synthetic oligonucleotide
  Target: LAMA2; (-) strand; PAM type: YTN; PAM sequence: CTG
gaggattggcccttttctta

SEQ ID NO: 269064 - DNA, 20 bp, Artificial Sequence
  Description of Artificial Sequence: Synthetic oligonucleotide
  Target: LAMA2; (-) strand; PAM type: YTN; PAM sequence: TTG
taactggaggattggccctt

SEQ ID NO: 269065 - DNA, 20 bp, Artificial Sequence
  Description of Artificial Sequence: Synthetic oligonucleotide
  Target: LAMA2; (-) strand; PAM type: YTN; PAM sequence: TTT
gtaactggaggattggccct

SEQ ID NO: 269066 - DNA, 20 bp, Artificial Sequence
  Description of Artificial Sequence: Synthetic oligonucleotide
  Target: LAMA2; (-) strand; PAM type: YTN; PAM sequence: CTT
tgtaactggaggattggccc

SEQ ID NO: 269067 - DNA, 20 bp, Artificial Sequence
  Description of Artificial Sequence: Synthetic oligonucleotide
  Target: LAMA2; (-) strand; PAM type: YTN; PAM sequence: CTG
gtgtagctttgtaactggag

SEQ ID NO: 269068 - DNA, 20 bp, Artificial Sequence
  Description of Artificial Sequence: Synthetic oligonucleotide
  Target: LAMA2; (-) strand; PAM type: YTN; PAM sequence: TTA
taaaactggtgtagctttgt

SEQ ID NO: 269069 - DNA, 20 bp, Artificial Sequence
  Description of Artificial Sequence: Synthetic oligonucleotide
  Target: LAMA2; (-) strand; PAM type: YTN; PAM sequence: TTG
tggggcaagaataaagcaaa

SEQ ID NO: 269070 - DNA, 20 bp, Artificial Sequence
  Description of Artificial Sequence: Synthetic oligonucleotide
  Target: LAMA2; (-) strand; PAM type: YTN; PAM sequence: CTT
gtggggcaagaataaagcaa

SEQ ID NO: 269071 - DNA, 20 bp, Artificial Sequence
  Description of Artificial Sequence: Synthetic oligonucleotide
  Target: LAMA2; (-) strand; PAM type: YTN; PAM sequence: TTC
cttgtggggcaagaataaag

SEQ ID NO: 269072 - DNA, 20 bp, Artificial Sequence
  Description of Artificial Sequence: Synthetic oligonucleotide
  Target: LAMA2; (-) strand; PAM type: YTN; PAM sequence: TTT
ccttgtggggcaagaataaa

SEQ ID NO: 269073 - DNA, 20 bp, Artificial Sequence
  Description of Artificial Sequence: Synthetic oligonucleotide
  Target: LAMA2; (-) strand; PAM type: YTN; PAM sequence: CTG
taaatacatttccttgtggg

SEQ ID NO: 269074 - DNA, 20 bp, Artificial Sequence
  Description of Artificial Sequence: Synthetic oligonucleotide
  Target: LAMA2; (-) strand; PAM type: YTN; PAM sequence: CTA
aataccatgtataacccctg

SEQ ID NO: 269075 - DNA, 20 bp, Artificial Sequence
  Description of Artificial Sequence: Synthetic oligonucleotide
  Target: LAMA2; (-) strand; PAM type: YTN; PAM sequence: CTG
aactaaataccatgtataac

SEQ ID NO: 269076 - DNA, 20 bp, Artificial Sequence
  Description of Artificial Sequence: Synthetic oligonucleotide
  Target: LAMA2; (-) strand; PAM type: YTN; PAM sequence: TTC
cagtccagcaactgaactaa

SEQ ID NO: 269077 - DNA, 20 bp, Artificial Sequence
  Description of Artificial Sequence: Synthetic oligonucleotide
  Target: LAMA2; (-) strand; PAM type: YTN; PAM sequence: CTT
ccagtccagcaactgaacta

SEQ ID NO: 269078 - DNA, 20 bp, Artificial Sequence
  Description of Artificial Sequence: Synthetic oligonucleotide
  Target: LAMA2; (-) strand; PAM type: YTN; PAM sequence: TTA
aaaagaatataaacacttcc

SEQ ID NO: 269079 - DNA, 20 bp, Artificial Sequence
  Description of Artificial Sequence: Synthetic oligonucleotide
  Target: LAMA2; (-) strand; PAM type: YTN; PAM sequence: TTT
aaaaagaatataaacacttc

SEQ ID NO: 269080 - DNA, 20 bp, Artificial Sequence
  Description of Artificial Sequence: Synthetic oligonucleotide
  Target: LAMA2; (-) strand; PAM type: YTN; PAM sequence: TTT
taaaaagaatataaacactt

SEQ ID NO: 269081 - DNA, 20 bp, Artificial Sequence
  Description of Artificial Sequence: Synthetic oligonucleotide
  Target: LAMA2; (-) strand; PAM type: YTN; PAM sequence: CTT
ttaaaaagaatataaacact

SEQ ID NO: 269082 - DNA, 20 bp, Artificial Sequence
  Description of Artificial Sequence: Synthetic oligonucleotide
  Target: LAMA2; (-) strand; PAM type: YTN; PAM sequence: TTC
ttttaaaaagaatataaaca

SEQ ID NO: 269083 - DNA, 20 bp, Artificial Sequence
  Description of Artificial Sequence: Synthetic oligonucleotide
  Target: LAMA2; (-) strand; PAM type: YTN; PAM sequence: CTA
ttcttttaaaaagaatataa

SEQ ID NO: 269084 - DNA, 20 bp, Artificial Sequence
  Description of Artificial Sequence: Synthetic oligonucleotide
  Target: LAMA2; (-) strand; PAM type: YTN; PAM sequence: CTG
ctattcttttaaaaagaata

SEQ ID NO: 269085 - DNA, 20 bp, Artificial Sequence
  Description of Artificial Sequence: Synthetic oligonucleotide
  Target: LAMA2; (-) strand; PAM type: YTN; PAM sequence: CTG
gaataaaaactgctattctt

SEQ ID NO: 269086 - DNA, 20 bp, Artificial Sequence
  Description of Artificial Sequence: Synthetic oligonucleotide
  Target: LAMA2; (-) strand; PAM type: YTN; PAM sequence: TTC
tggaataaaaactgctattc

SEQ ID NO: 269087 - DNA, 20 bp, Artificial Sequence
  Description of Artificial Sequence: Synthetic oligonucleotide
  Target: LAMA2; (-) strand; PAM type: YTN; PAM sequence: TTT
ctggaataaaaactgctatt

SEQ ID NO: 269088 - DNA, 20 bp, Artificial Sequence
  Description of Artificial Sequence: Synthetic oligonucleotide
  Target: LAMA2; (-) strand; PAM type: YTN; PAM sequence: TTT
tctggaataaaaactgctat

SEQ ID NO: 269089 - DNA, 20 bp, Artificial Sequence
  Description of Artificial Sequence: Synthetic oligonucleotide
  Target: LAMA2; (-) strand; PAM type: YTN; PAM sequence: TTT
ttctggaataaaaactgcta

SEQ ID NO: 269090 - DNA, 20 bp, Artificial Sequence
  Description of Artificial Sequence: Synthetic oligonucleotide
  Target: LAMA2; (-) strand; PAM type: YTN; PAM sequence: TTT
tttctggaataaaaactgct

SEQ ID NO: 269091 - DNA, 20 bp, Artificial Sequence
  Description of Artificial Sequence: Synthetic oligonucleotide
  Target: LAMA2; (-) strand; PAM type: YTN; PAM sequence: TTT
ttttctggaataaaaactgc

SEQ ID NO: 269092 - DNA, 20 bp, Artificial Sequence
  Description of Artificial Sequence: Synthetic oligonucleotide
  Target: LAMA2; (-) strand; PAM type: YTN; PAM sequence: TTA
atatttttttctggaataaa

SEQ ID NO: 269093 - DNA, 20 bp, Artificial Sequence
  Description of Artificial Sequence: Synthetic oligonucleotide
  Target: LAMA2; (-) strand; PAM type: YTN; PAM sequence: TTT
aatatttttttctggaataa

SEQ ID NO: 269094 - DNA, 20 bp, Artificial Sequence
  Description of Artificial Sequence: Synthetic oligonucleotide
  Target: LAMA2; (-) strand; PAM type: YTN; PAM sequence: CTA
taatttaatatttttttctg

SEQ ID NO: 269095 - DNA, 20 bp, Artificial Sequence
  Description of Artificial Sequence: Synthetic oligonucleotide
  Target: LAMA2; (-) strand; PAM type: YTN; PAM sequence: CTA
gatatcaaaaacaatcctat

SEQ ID NO: 269096 - DNA, 20 bp, Artificial Sequence
  Description of Artificial Sequence: Synthetic oligonucleotide
  Target: LAMA2; (-) strand; PAM type: YTN; PAM sequence: TTA
gcaaaagagtctagatatca

SEQ ID NO: 269097 - DNA, 20 bp, Artificial Sequence
  Description of Artificial Sequence: Synthetic oligonucleotide
  Target: LAMA2; (-) strand; PAM type: YTN; PAM sequence: TTT
agcaaaagagtctagatatc

SEQ ID NO: 269098 - DNA, 20 bp, Artificial Sequence
  Description of Artificial Sequence: Synthetic oligonucleotide
  Target: LAMA2; (-) strand; PAM type: YTN; PAM sequence: CTT
tagcaaaagagtctagatat

SEQ ID NO: 269099 - DNA, 20 bp, Artificial Sequence
  Description of Artificial Sequence: Synthetic oligonucleotide
  Target: LAMA2; (-) strand; PAM type: YTN; PAM sequence: CTG
tgctttagcaaaagagtcta

SEQ ID NO: 269100 - DNA, 20 bp, Artificial Sequence
  Description of Artificial Sequence: Synthetic oligonucleotide
  Target: LAMA2; (-) strand; PAM type: YTN; PAM sequence: TTA
actgtgctttagcaaaagag

SEQ ID NO: 269101 - DNA, 20 bp, Artificial Sequence
  Description of Artificial Sequence: Synthetic oligonucleotide
  Target: LAMA2; (-) strand; PAM type: YTN; PAM sequence: TTA
taagataattaactgtgctt

SEQ ID NO: 269102 - DNA, 20 bp, Artificial Sequence
  Description of Artificial Sequence: Synthetic oligonucleotide
  Target: LAMA2; (-) strand; PAM type: YTN; PAM sequence: CTA
tacagcataattataagata

SEQ ID NO: 269103 - DNA, 20 bp, Artificial Sequence
  Description of Artificial Sequence: Synthetic oligonucleotide
  Target: LAMA2; (-) strand; PAM type: YTN; PAM sequence: TTA
agagcagtatatggaaaatc

SEQ ID NO: 269104 - DNA, 20 bp, Artificial Sequence
  Description of Artificial Sequence: Synthetic oligonucleotide
  Target: LAMA2; (-) strand; PAM type: YTN; PAM sequence: CTT
aagagcagtatatggaaaat

SEQ ID NO: 269105 - DNA, 20 bp, Artificial Sequence
  Description of Artificial Sequence: Synthetic oligonucleotide
  Target: LAMA2; (-) strand; PAM type: YTN; PAM sequence: CTA
atgcttaagagcagtatatg

SEQ ID NO: 269106 - DNA, 20 bp, Artificial Sequence
  Description of Artificial Sequence: Synthetic oligonucleotide
  Target: LAMA2; (-) strand; PAM type: YTN; PAM sequence: CTA
gaagtaagtggaaatcacta

SEQ ID NO: 269107 - DNA, 20 bp, Artificial Sequence
  Description of Artificial Sequence: Synthetic oligonucleotide
  Target: LAMA2; (-) strand; PAM type: YTN; PAM sequence: TTC
ctagaagtaagtggaaatca

SEQ ID NO: 269108 - DNA, 20 bp, Artificial Sequence
  Description of Artificial Sequence: Synthetic oligonucleotide
  Target: LAMA2; (-) strand; PAM type: YTN; PAM sequence: TTA
gtgaaaggtgaagagaaaac

SEQ ID NO: 269109 - DNA, 20 bp, Artificial Sequence
  Description of Artificial Sequence: Synthetic oligonucleotide
  Target: LAMA2; (-) strand; PAM type: YTN; PAM sequence: TTT
agtgaaaggtgaagagaaaa

SEQ ID NO: 269110 - DNA, 20 bp, Artificial Sequence
  Description of Artificial Sequence: Synthetic oligonucleotide
  Target: LAMA2; (-) strand; PAM type: YTN; PAM sequence: TTA
gtttagtgaaaggtgaagag

SEQ ID NO: 269111 - DNA, 20 bp, Artificial Sequence
  Description of Artificial Sequence: Synthetic oligonucleotide
  Target: LAMA2; (-) strand; PAM type: YTN; PAM sequence: TTA
gagttagtttagtgaaaggt

SEQ ID NO: 269112 - DNA, 20 bp, Artificial Sequence
  Description of Artificial Sequence: Synthetic oligonucleotide
  Target: LAMA2; (-) strand; PAM type: YTN; PAM sequence: CTT
agagttagtttagtgaaagg

SEQ ID NO: 269113 - DNA, 20 bp, Artificial Sequence
  Description of Artificial Sequence: Synthetic oligonucleotide
  Target: LAMA2; (-) strand; PAM type: YTN; PAM sequence: TTC
ttagagttagtttagtgaaa

SEQ ID NO: 269114 - DNA, 20 bp, Artificial Sequence
  Description of Artificial Sequence: Synthetic oligonucleotide
  Target: LAMA2; (-) strand; PAM type: YTN; PAM sequence: CTG
tgtaacaattcttagagtta

SEQ ID NO: 269115 - DNA, 20 bp, Artificial Sequence
  Description of Artificial Sequence: Synthetic oligonucleotide
  Target: LAMA2; (-) strand; PAM type: YTN; PAM sequence: CTC
tgtgtaacaattcttagagt

SEQ ID NO: 269116 - DNA, 20 bp, Artificial Sequence
  Description of Artificial Sequence: Synthetic oligonucleotide
  Target: LAMA2; (-) strand; PAM type: YTN; PAM sequence: CTA
aagatactctgtgtaacaat

SEQ ID NO: 269117 - DNA, 20 bp, Artificial Sequence
  Description of Artificial Sequence: Synthetic oligonucleotide
  Target: LAMA2; (-) strand; PAM type: YTN; PAM sequence: TTA
gaagaagagaaaagatgaaa

SEQ ID NO: 269118 - DNA, 20 bp, Artificial Sequence
  Description of Artificial Sequence: Synthetic oligonucleotide
  Target: LAMA2; (-) strand; PAM type: YTN; PAM sequence: TTT
agaagaagagaaaagatgaa

SEQ ID NO: 269119 - DNA, 20 bp, Artificial Sequence
  Description of Artificial Sequence: Synthetic oligonucleotide
  Target: LAMA2; (-) strand; PAM type: YTN; PAM sequence: TTT
tagaagaagagaaaagatga

SEQ ID NO: 269120 - DNA, 20 bp, Artificial Sequence
  Description of Artificial Sequence: Synthetic oligonucleotide
  Target: LAMA2; (-) strand; PAM type: YTN; PAM sequence: TTC
cataacgggagaaattttag

SEQ ID NO: 269121 - DNA, 20 bp, Artificial Sequence
  Description of Artificial Sequence: Synthetic oligonucleotide
  Target: LAMA2; (-) strand; PAM type: YTN; PAM sequence: TTT
ccataacgggagaaatttta

SEQ ID NO: 269122 - DNA, 20 bp, Artificial Sequence
  Description of Artificial Sequence: Synthetic oligonucleotide
  Target: LAMA2; (-) strand; PAM type: YTN; PAM sequence: TTT
tccataacgggagaaatttt

SEQ ID NO: 269123 - DNA, 20 bp, Artificial Sequence
  Description of Artificial Sequence: Synthetic oligonucleotide
  Target: LAMA2; (-) strand; PAM type: YTN; PAM sequence: TTT
ttccataacgggagaaattt

SEQ ID NO: 269124 - DNA, 20 bp, Artificial Sequence
  Description of Artificial Sequence: Synthetic oligonucleotide
  Target: LAMA2; (-) strand; PAM type: YTN; PAM sequence: CTG
ggaaaggccaagatcataga

SEQ ID NO: 269125 - DNA, 20 bp, Artificial Sequence
  Description of Artificial Sequence: Synthetic oligonucleotide
  Target: LAMA2; (-) strand; PAM type: YTN; PAM sequence: CTA
ggagtagaagtagaaaccga

SEQ ID NO: 269126 - DNA, 20 bp, Artificial Sequence
  Description of Artificial Sequence: Synthetic oligonucleotide
  Target: LAMA2; (-) strand; PAM type: YTN; PAM sequence: TTC
aaaactaggagtagaagtag

SEQ ID NO: 269127 - DNA, 20 bp, Artificial Sequence
  Description of Artificial Sequence: Synthetic oligonucleotide
  Target: LAMA2; (-) strand; PAM type: YTN; PAM sequence: TTT
caaaactaggagtagaagta

SEQ ID NO: 269128 - DNA, 20 bp, Artificial Sequence
  Description of Artificial Sequence: Synthetic oligonucleotide
  Target: LAMA2; (-) strand; PAM type: YTN; PAM sequence: CTG
atttcaaaactaggagtaga

SEQ ID NO: 269129 - DNA, 20 bp, Artificial Sequence
  Description of Artificial Sequence: Synthetic oligonucleotide
  Target: LAMA2; (-) strand; PAM type: YTN; PAM sequence: TTA
tctgatttcaaaactaggag

SEQ ID NO: 269130 - DNA, 20 bp, Artificial Sequence
  Description of Artificial Sequence: Synthetic oligonucleotide
  Target: LAMA2; (-) strand; PAM type: YTN; PAM sequence: TTT
atctgatttcaaaactagga

SEQ ID NO: 269131 - DNA, 20 bp, Artificial Sequence
  Description of Artificial Sequence: Synthetic oligonucleotide
  Target: LAMA2; (-) strand; PAM type: YTN; PAM sequence: TTT
tatctgatttcaaaactagg

SEQ ID NO: 269132 - DNA, 20 bp, Artificial Sequence
  Description of Artificial Sequence: Synthetic oligonucleotide
  Target: LAMA2; (-) strand; PAM type: YTN; PAM sequence: TTA
ttttatctgatttcaaaact

SEQ ID NO: 269133 - DNA, 20 bp, Artificial Sequence
  Description of Artificial Sequence: Synthetic oligonucleotide
  Target: LAMA2; (-) strand; PAM type: YTN; PAM sequence: CTT
attttatctgatttcaaaac

SEQ ID NO: 269134 - DNA, 20 bp, Artificial Sequence
  Description of Artificial Sequence: Synthetic oligonucleotide
  Target: LAMA2; (-) strand; PAM type: YTN; PAM sequence: TTG
tgtcttattttatctgattt

SEQ ID NO: 269135 - DNA, 20 bp, Artificial Sequence
  Description of Artificial Sequence: Synthetic oligonucleotide
  Target: LAMA2; (-) strand; PAM type: YTN; PAM sequence: CTT
gtgtcttattttatctgatt

SEQ ID NO: 269136 - DNA, 20 bp, Artificial Sequence
  Description of Artificial Sequence: Synthetic oligonucleotide
  Target: LAMA2; (-) strand; PAM type: YTN; PAM sequence: CTC
acttgtgtcttattttatct

SEQ ID NO: 269137 - DNA, 20 bp, Artificial Sequence
  Description of Artificial Sequence: Synthetic oligonucleotide
  Target: LAMA2; (-) strand; PAM type: YTN; PAM sequence: TTA
catcctcacttgtgtcttat

SEQ ID NO: 269138 - DNA, 20 bp, Artificial Sequence
  Description of Artificial Sequence: Synthetic oligonucleotide
  Target: LAMA2; (-) strand; PAM type: YTN; PAM sequence: TTG
agaataagtcagaattacat

SEQ ID NO: 269139 - DNA, 20 bp, Artificial Sequence
  Description of Artificial Sequence: Synthetic oligonucleotide
  Target: LAMA2; (-) strand; PAM type: YTN; PAM sequence: TTA
aaaggaaaattgagaataag

SEQ ID NO: 269140 - DNA, 20 bp, Artificial Sequence
  Description of Artificial Sequence: Synthetic oligonucleotide
  Target: LAMA2; (-) strand; PAM type: YTN; PAM sequence: TTA
aggatacagaaatatattaa

SEQ ID NO: 269141 - DNA, 20 bp, Artificial Sequence
  Description of Artificial Sequence: Synthetic oligonucleotide
  Target: LAMA2; (-) strand; PAM type: YTN; PAM sequence: CTT
aaggatacagaaatatatta

SEQ ID NO: 269142 - DNA, 20 bp, Artificial Sequence
  Description of Artificial Sequence: Synthetic oligonucleotide
  Target: LAMA2; (-) strand; PAM type: YTN; PAM sequence: TTA
gcttaaggatacagaaatat

SEQ ID NO: 269143 - DNA, 20 bp, Artificial Sequence
  Description of Artificial Sequence: Synthetic oligonucleotide
  Target: LAMA2; (-) strand; PAM type: YTN; PAM sequence: TTT
agcttaaggatacagaaata

SEQ ID NO: 269144 - DNA, 20 bp, Artificial Sequence
  Description of Artificial Sequence: Synthetic oligonucleotide
  Target: LAMA2; (-) strand; PAM type: YTN; PAM sequence: CTA
atttagcttaaggatacaga

SEQ ID NO: 269145 - DNA, 20 bp, Artificial Sequence
  Description of Artificial Sequence: Synthetic oligonucleotide
  Target: LAMA2; (-) strand; PAM type: YTN; PAM sequence: TTG
cactaatttagcttaaggat

SEQ ID NO: 269146 - DNA, 20 bp, Artificial Sequence
  Description of Artificial Sequence: Synthetic oligonucleotide
  Target: LAMA2; (-) strand; PAM type: YTN; PAM sequence: CTT
gcactaatttagcttaagga

SEQ ID NO: 269147 - DNA, 20 bp, Artificial Sequence
  Description of Artificial Sequence: Synthetic oligonucleotide
  Target: LAMA2; (-) strand; PAM type: YTN; PAM sequence: CTC
ttgcactaatttagcttaag

SEQ ID NO: 269148 - DNA, 20 bp, Artificial Sequence
  Description of Artificial Sequence: Synthetic oligonucleotide
  Target: LAMA2; (-) strand; PAM type: YTN; PAM sequence: TTG
gtctcttgcactaatttagc

SEQ ID NO: 269149 - DNA, 20 bp, Artificial Sequence
  Description of Artificial Sequence: Synthetic oligonucleotide
  Target: LAMA2; (-) strand; PAM type: YTN; PAM sequence: TTT
ggtctcttgcactaatttag

SEQ ID NO: 269150 - DNA, 20 bp, Artificial Sequence
  Description of Artificial Sequence: Synthetic oligonucleotide
  Target: LAMA2; (-) strand; PAM type: YTN; PAM sequence: TTT
tggtctcttgcactaattta

SEQ ID NO: 269151 - DNA, 20 bp, Artificial Sequence
  Description of Artificial Sequence: Synthetic oligonucleotide
  Target: LAMA2; (-) strand; PAM type: YTN; PAM sequence: TTT
ttggtctcttgcactaattt

SEQ ID NO: 269152 - DNA, 20 bp, Artificial Sequence
  Description of Artificial Sequence: Synthetic oligonucleotide
  Target: LAMA2; (-) strand; PAM type: YTN; PAM sequence: TTT
tttggtctcttgcactaatt

SEQ ID NO: 269153 - DNA, 20 bp, Artificial Sequence
  Description of Artificial Sequence: Synthetic oligonucleotide
  Target: LAMA2; (-) strand; PAM type: YTN; PAM sequence: CTG
cagatcaaacaccccaggtg

SEQ ID NO: 269154 - DNA, 20 bp, Artificial Sequence
  Description of Artificial Sequence: Synthetic oligonucleotide
  Target: LAMA2; (-) strand; PAM type: YTN; PAM sequence: CTA
aaacaggtcctgcagatcaa

SEQ ID NO: 269155 - DNA, 20 bp, Artificial Sequence
  Description of Artificial Sequence: Synthetic oligonucleotide
  Target: LAMA2; (-) strand; PAM type: YTN; PAM sequence: TTA
catgtgctaaaacaggtcct

SEQ ID NO: 269156 - DNA, 20 bp, Artificial Sequence
  Description of Artificial Sequence: Synthetic oligonucleotide
  Target: LAMA2; (-) strand; PAM type: YTN; PAM sequence: TTC
caccatgattacatgtgcta

SEQ ID NO: 269157 - DNA, 20 bp, Artificial Sequence
  Description of Artificial Sequence: Synthetic oligonucleotide
  Target: LAMA2; (-) strand; PAM type: YTN; PAM sequence: TTA
tgcaattccaccatgattac

SEQ ID NO: 269158 - DNA, 20 bp, Artificial Sequence
  Description of Artificial Sequence: Synthetic oligonucleotide
  Target: LAMA2; (-) strand; PAM type: YTN; PAM sequence: CTT
atgcaattccaccatgatta

SEQ ID NO: 269159 - DNA, 20 bp, Artificial Sequence
  Description of Artificial Sequence: Synthetic oligonucleotide
  Target: LAMA2; (-) strand; PAM type: YTN; PAM sequence: CTC
acccccaggccttatgcaat

SEQ ID NO: 269160 - DNA, 20 bp, Artificial Sequence
  Description of Artificial Sequence: Synthetic oligonucleotide
  Target: LAMA2; (-) strand; PAM type: YTN; PAM sequence: CTC
tcacccccaggccttatgca

SEQ ID NO: 269161 - DNA, 20 bp, Artificial Sequence
  Description of Artificial Sequence: Synthetic oligonucleotide
  Target: LAMA2; (-) strand; PAM type: YTN; PAM sequence: TTA
ctctcacccccaggccttat

SEQ ID NO: 269162 - DNA, 20 bp, Artificial Sequence
  Description of Artificial Sequence: Synthetic oligonucleotide
  Target: LAMA2; (-) strand; PAM type: YTN; PAM sequence: CTT
actctcacccccaggcctta

SEQ ID NO: 269163 - DNA, 20 bp, Artificial Sequence
  Description of Artificial Sequence: Synthetic oligonucleotide
  Target: LAMA2; (-) strand; PAM type: YTN; PAM sequence: CTC
ccttactctcacccccaggc

SEQ ID NO: 269164 - DNA, 20 bp, Artificial Sequence
  Description of Artificial Sequence: Synthetic oligonucleotide
  Target: LAMA2; (-) strand; PAM type: YTN; PAM sequence: CTA
cctcccttactctcaccccc

SEQ ID NO: 269165 - DNA, 20 bp, Artificial Sequence
  Description of Artificial Sequence: Synthetic oligonucleotide
  Target: LAMA2; (-) strand; PAM type: YTN; PAM sequence: CTA
gagccaagctacctccctta

SEQ ID NO: 269166 - DNA, 20 bp, Artificial Sequence
  Description of Artificial Sequence: Synthetic oligonucleotide
  Target: LAMA2; (-) strand; PAM type: YTN; PAM sequence: TTG
ctagagccaagctacctccc

SEQ ID NO: 269167 - DNA, 20 bp, Artificial Sequence
  Description of Artificial Sequence: Synthetic oligonucleotide
  Target: LAMA2; (-) strand; PAM type: YTN; PAM sequence: CTT
gctagagccaagctacctcc

SEQ ID NO: 269168 - DNA, 20 bp, Artificial Sequence
  Description of Artificial Sequence: Synthetic oligonucleotide
  Target: LAMA2; (-) strand; PAM type: YTN; PAM sequence: CTC
ttgctagagccaagctacct

SEQ ID NO: 269169 - DNA, 20 bp, Artificial Sequence
  Description of Artificial Sequence: Synthetic oligonucleotide
  Target: LAMA2; (-) strand; PAM type: YTN; PAM sequence: TTC
tcttgctagagccaagctac

SEQ ID NO: 269170 - DNA, 20 bp, Artificial Sequence
  Description of Artificial Sequence: Synthetic oligonucleotide
  Target: LAMA2; (-) strand; PAM type: YTN; PAM sequence: CTA
aattctcttgctagagccaa

SEQ ID NO: 269171 - DNA, 20 bp, Artificial Sequence
  Description of Artificial Sequence: Synthetic oligonucleotide
  Target: LAMA2; (-) strand; PAM type: YTN; PAM sequence: CTA
catctaaattctcttgctag

SEQ ID NO: 269172 - DNA, 20 bp, Artificial Sequence
  Description of Artificial Sequence: Synthetic oligonucleotide
  Target: LAMA2; (-) strand; PAM type: YTN; PAM sequence: TTA
ctacatctaaattctcttgc

SEQ ID NO: 269173 - DNA, 20 bp, Artificial Sequence
  Description of Artificial Sequence: Synthetic oligonucleotide
  Target: LAMA2; (-) strand; PAM type: YTN; PAM sequence: CTT
actacatctaaattctcttg

SEQ ID NO: 269174 - DNA, 20 bp, Artificial Sequence
  Description of Artificial Sequence: Synthetic oligonucleotide
  Target: LAMA2; (-) strand; PAM type: YTN; PAM sequence: CTC
ttactacatctaaattctct

SEQ ID NO: 269175 - DNA, 20 bp, Artificial Sequence
  Description of Artificial Sequence: Synthetic oligonucleotide
  Target: LAMA2; (-) strand; PAM type: YTN; PAM sequence: TTC
tcttactacatctaaattct

SEQ ID NO: 269176 - DNA, 20 bp, Artificial Sequence
  Description of Artificial Sequence: Synthetic oligonucleotide
  Target: LAMA2; (-) strand; PAM type: YTN; PAM sequence: TTT
ctcttactacatctaaattc

SEQ ID NO: 269177 - DNA, 20 bp, Artificial Sequence
  Description of Artificial Sequence: Synthetic oligonucleotide
  Target: LAMA2; (-) strand; PAM type: YTN; PAM sequence: CTG
cagacatttctcttactaca

SEQ ID NO: 269178 - DNA, 20 bp, Artificial Sequence
  Description of Artificial Sequence: Synthetic oligonucleotide
  Target: LAMA2; (-) strand; PAM type: YTN; PAM sequence: CTA
acaacaagcactgcagacat

SEQ ID NO: 269179 - DNA, 20 bp, Artificial Sequence
  Description of Artificial Sequence: Synthetic oligonucleotide
  Target: LAMA2; (-) strand; PAM type: YTN; PAM sequence: CTA
tactaacaacaagcactgca

SEQ ID NO: 269180 - DNA, 20 bp, Artificial Sequence
  Description of Artificial Sequence: Synthetic oligonucleotide
  Target: LAMA2; (-) strand; PAM type: YTN; PAM sequence: CTG
tagtcagtactatactaaca

SEQ ID NO: 269181 - DNA, 20 bp, Artificial Sequence
  Description of Artificial Sequence: Synthetic oligonucleotide
  Target: LAMA2; (-) strand; PAM type: YTN; PAM sequence: TTC
ctgtagtcagtactatacta

SEQ ID NO: 269182 - DNA, 20 bp, Artificial Sequence
  Description of Artificial Sequence: Synthetic oligonucleotide
  Target: LAMA2; (-) strand; PAM type: YTN; PAM sequence: TTT
cctgtagtcagtactatact

SEQ ID NO: 269183 - DNA, 20 bp, Artificial Sequence
  Description of Artificial Sequence: Synthetic oligonucleotide
  Target: LAMA2; (-) strand; PAM type: YTN; PAM sequence: TTA
tttcctgtagtcagtactat

SEQ ID NO: 269184 - DNA, 20 bp, Artificial Sequence
  Description of Artificial Sequence: Synthetic oligonucleotide
  Target: LAMA2; (-) strand; PAM type: YTN; PAM sequence: TTT
atttcctgtagtcagtacta

SEQ ID NO: 269185 - DNA, 20 bp, Artificial Sequence
  Description of Artificial Sequence: Synthetic oligonucleotide
  Target: LAMA2; (-) strand; PAM type: YTN; PAM sequence: CTA
agcaataggagaaagtttat

SEQ ID NO: 269186 - DNA, 20 bp, Artificial Sequence
  Description of Artificial Sequence: Synthetic oligonucleotide
  Target: LAMA2; (-) strand; PAM type: YTN; PAM sequence: TTC
taagcaataggagaaagttt

SEQ ID NO: 269187 - DNA, 20 bp, Artificial Sequence
  Description of Artificial Sequence: Synthetic oligonucleotide
  Target: LAMA2; (-) strand; PAM type: YTN; PAM sequence: TTA
ttctaagcaataggagaaag

SEQ ID NO: 269188 - DNA, 20 bp, Artificial Sequence
  Description of Artificial Sequence: Synthetic oligonucleotide
  Target: LAMA2; (-) strand; PAM type: YTN; PAM sequence: CTT
attctaagcaataggagaaa

SEQ ID NO: 269189 - DNA, 20 bp, Artificial Sequence
  Description of Artificial Sequence: Synthetic oligonucleotide
  Target: LAMA2; (-) strand; PAM type: YTN; PAM sequence: TTA
cttattctaagcaataggag

SEQ ID NO: 269190 - DNA, 20 bp, Artificial Sequence
  Description of Artificial Sequence: Synthetic oligonucleotide
  Target: LAMA2; (-) strand; PAM type: YTN; PAM sequence: TTT
acttattctaagcaatagga

SEQ ID NO: 269191 - DNA, 20 bp, Artificial Sequence
  Description of Artificial Sequence: Synthetic oligonucleotide
  Target: LAMA2; (-) strand; PAM type: YTN; PAM sequence: CTG
agtgtttacttattctaagc

SEQ ID NO: 269192 - DNA, 20 bp, Artificial Sequence
  Description of Artificial Sequence: Synthetic oligonucleotide
  Target: LAMA2; (-) strand; PAM type: YTN; PAM sequence: CTA
aactgagtgtttacttattc

SEQ ID NO: 269193 - DNA, 20 bp, Artificial Sequence
  Description of Artificial Sequence: Synthetic oligonucleotide
  Target: LAMA2; (-) strand; PAM type: YTN; PAM sequence: CTA
ctaaactgagtgtttactta

SEQ ID NO: 269194 - DNA, 20 bp, Artificial Sequence
  Description of Artificial Sequence: Synthetic oligonucleotide
  Target: LAMA2; (-) strand; PAM type: YTN; PAM sequence: TTG
tacaatacatgctactaaac

SEQ ID NO: 269195 - DNA, 20 bp, Artificial Sequence
  Description of Artificial Sequence: Synthetic oligonucleotide
  Target: LAMA2; (-) strand; PAM type: YTN; PAM sequence: CTT
gtacaatacatgctactaaa

SEQ ID NO: 269196 - DNA, 20 bp, Artificial Sequence
  Description of Artificial Sequence: Synthetic oligonucleotide
  Target: LAMA2; (-) strand; PAM type: YTN; PAM sequence: CTC
ttgtacaatacatgctacta

SEQ ID NO: 269197 - DNA, 20 bp, Artificial Sequence
  Description of Artificial Sequence: Synthetic oligonucleotide
  Target: LAMA2; (-) strand; PAM type: YTN; PAM sequence: TTA
actcttgtacaatacatgct

SEQ ID NO: 269198 - DNA, 20 bp, Artificial Sequence
  Description of Artificial Sequence: Synthetic oligonucleotide
  Target: LAMA2; (-) strand; PAM type: YTN; PAM sequence: CTA
aaggaagcaaaattaactct

SEQ ID NO: 269199 - DNA, 20 bp, Artificial Sequence
  Description of Artificial Sequence: Synthetic oligonucleotide
  Target: LAMA2; (-) strand; PAM type: YTN; PAM sequence: TTC
ccagggaagtaactaaagga

SEQ ID NO: 269200 - DNA, 20 bp, Artificial Sequence
  Description of Artificial Sequence: Synthetic oligonucleotide
  Target: LAMA2; (-) strand; PAM type: YTN; PAM sequence: TTT
cccagggaagtaactaaagg

SEQ ID NO: 269201 - DNA, 20 bp, Artificial Sequence
  Description of Artificial Sequence: Synthetic oligonucleotide
  Target: LAMA2; (-) strand; PAM type: YTN; PAM sequence: TTA
tatttcccagggaagtaact

SEQ ID NO: 269202 - DNA, 20 bp, Artificial Sequence
  Description of Artificial Sequence: Synthetic oligonucleotide
  Target: LAMA2; (-) strand; PAM type: YTN; PAM sequence: CTA
aattatatttcccagggaag

SEQ ID NO: 269203 - DNA, 20 bp, Artificial Sequence
  Description of Artificial Sequence: Synthetic oligonucleotide
  Target: LAMA2; (-) strand; PAM type: YTN; PAM sequence: TTG
aaatacacaaatccatgatg

SEQ ID NO: 269204 - DNA, 20 bp, Artificial Sequence
  Description of Artificial Sequence: Synthetic oligonucleotide
  Target: LAMA2; (-) strand; PAM type: YTN; PAM sequence: TTT
gaaatacacaaatccatgat

SEQ ID NO: 269205 - DNA, 20 bp, Artificial Sequence
  Description of Artificial Sequence: Synthetic oligonucleotide
  Target: LAMA2; (-) strand; PAM type: YTN; PAM sequence: TTT
tgaaatacacaaatccatga

SEQ ID NO: 269206 - DNA, 20 bp, Artificial Sequence
  Description of Artificial Sequence: Synthetic oligonucleotide
  Target: LAMA2; (-) strand; PAM type: YTN; PAM sequence: TTT
ttgaaatacacaaatccatg

SEQ ID NO: 269207 - DNA, 20 bp, Artificial Sequence
  Description of Artificial Sequence: Synthetic oligonucleotide
  Target: LAMA2; (-) strand; PAM type: YTN; PAM sequence: CTG
tttttgaaatacacaaatcc

SEQ ID NO: 269208 - DNA, 20 bp, Artificial Sequence
  Description of Artificial Sequence: Synthetic oligonucleotide
  Target: LAMA2; (-) strand; PAM type: YTN; PAM sequence: TTC
tgtttttgaaatacacaaat

SEQ ID NO: 269209 - DNA, 20 bp, Artificial Sequence
  Description of Artificial Sequence: Synthetic oligonucleotide
  Target: LAMA2; (-) strand; PAM type: YTN; PAM sequence: TTT
ctgtttttgaaatacacaaa

SEQ ID NO: 269210 - DNA, 20 bp, Artificial Sequence
  Description of Artificial Sequence: Synthetic oligonucleotide
  Target: LAMA2; (-) strand; PAM type: YTN; PAM sequence: TTT
tctgtttttgaaatacacaa

SEQ ID NO: 269211 - DNA, 20 bp, Artificial Sequence
  Description of Artificial Sequence: Synthetic oligonucleotide
  Target: LAMA2; (-) strand; PAM type: YTN; PAM sequence: CTT
ttctgtttttgaaatacaca

SEQ ID NO: 269212 - DNA, 20 bp, Artificial Sequence
  Description of Artificial Sequence: Synthetic oligonucleotide
  Target: LAMA2; (-) strand; PAM type: YTN; PAM sequence: TTC
ttttctgtttttgaaataca

SEQ ID NO: 269213 - DNA, 20 bp, Artificial Sequence
  Description of Artificial Sequence: Synthetic oligonucleotide
  Target: LAMA2; (-) strand; PAM type: YTN; PAM sequence: TTT
cttttctgtttttgaaatac

SEQ ID NO: 269214 - DNA, 20 bp, Artificial Sequence
  Description of Artificial Sequence: Synthetic oligonucleotide
  Target: LAMA2; (-) strand; PAM type: YTN; PAM sequence: TTT
tcttttctgtttttgaaata

SEQ ID NO: 269215 - DNA, 20 bp, Artificial Sequence
  Description of Artificial Sequence: Synthetic oligonucleotide
  Target: LAMA2; (-) strand; PAM type: YTN; PAM sequence: CTT
ttcttttctgtttttgaaat

SEQ ID NO: 269216 - DNA, 20 bp, Artificial Sequence
  Description of Artificial Sequence: Synthetic oligonucleotide
  Target: LAMA2; (-) strand; PAM type: YTN; PAM sequence: TTC
ttttcttttctgtttttgaa

SEQ ID NO: 269217 - DNA, 20 bp, Artificial Sequence
  Description of Artificial Sequence: Synthetic oligonucleotide
  Target: LAMA2; (-) strand; PAM type: YTN; PAM sequence: TTT
cttttcttttctgtttttga

SEQ ID NO: 269218 - DNA, 20 bp, Artificial Sequence
  Description of Artificial Sequence: Synthetic oligonucleotide
  Target: LAMA2; (-) strand; PAM type: YTN; PAM sequence: CTT
tcttttcttttctgtttttg

SEQ ID NO: 269219 - DNA, 20 bp, Artificial Sequence
  Description of Artificial Sequence: Synthetic oligonucleotide
  Target: LAMA2; (-) strand; PAM type: YTN; PAM sequence: CTC
tttcttttcttttctgtttt

SEQ ID NO: 269220 - DNA, 20 bp, Artificial Sequence
  Description of Artificial Sequence: Synthetic oligonucleotide
  Target: LAMA2; (-) strand; PAM type: YTN; PAM sequence: CTC
tctttcttttcttttctgtt

SEQ ID NO: 269221 - DNA, 20 bp, Artificial Sequence
  Description of Artificial Sequence: Synthetic oligonucleotide
  Target: LAMA2; (-) strand; PAM type: YTN; PAM sequence: CTG
tctctctttcttttcttttc

SEQ ID NO: 269222 - DNA, 20 bp, Artificial Sequence
  Description of Artificial Sequence: Synthetic oligonucleotide
  Target: LAMA2; (-) strand; PAM type: YTN; PAM sequence: TTC
tgtctctctttcttttcttt

SEQ ID NO: 269223 - DNA, 20 bp, Artificial Sequence
  Description of Artificial Sequence: Synthetic oligonucleotide
  Target: LAMA2; (-) strand; PAM type: YTN; PAM sequence: TTT
ctgtctctctttcttttctt

SEQ ID NO: 269224 - DNA, 20 bp, Artificial Sequence
  Description of Artificial Sequence: Synthetic oligonucleotide
  Target: LAMA2; (-) strand; PAM type: YTN; PAM sequence: TTA
tcatgcatttctgtctctct

SEQ ID NO: 269225 - DNA, 20 bp, Artificial Sequence
  Description of Artificial Sequence: Synthetic oligonucleotide
  Target: LAMA2; (-) strand; PAM type: YTN; PAM sequence: TTT
atcatgcatttctgtctctc

SEQ ID NO: 269226 - DNA, 20 bp, Artificial Sequence
  Description of Artificial Sequence: Synthetic oligonucleotide
  Target: LAMA2; (-) strand; PAM type: YTN; PAM sequence: TTA
ggtcatttatcatgcatttc

SEQ ID NO: 269227 - DNA, 20 bp, Artificial Sequence
  Description of Artificial Sequence: Synthetic oligonucleotide
  Target: LAMA2; (-) strand; PAM type: YTN; PAM sequence: CTT
aggtcatttatcatgcattt

SEQ ID NO: 269228 - DNA, 20 bp, Artificial Sequence
  Description of Artificial Sequence: Synthetic oligonucleotide
  Target: LAMA2; (-) strand; PAM type: YTN; PAM sequence: CTG
agatcacacaatgatcaggc

SEQ ID NO: 269229 - DNA, 20 bp, Artificial Sequence
  Description of Artificial Sequence: Synthetic oligonucleotide
  Target: LAMA2; (-) strand; PAM type: YTN; PAM sequence: TTA
cctgagatcacacaatgatc

SEQ ID NO: 269230 - DNA, 20 bp, Artificial Sequence
  Description of Artificial Sequence: Synthetic oligonucleotide
  Target: LAMA2; (-) strand; PAM type: YTN; PAM sequence: TTC
accaatatgcaaattacctg

SEQ ID NO: 269231 - DNA, 20 bp, Artificial Sequence
  Description of Artificial Sequence: Synthetic oligonucleotide
  Target: LAMA2; (-) strand; PAM type: YTN; PAM sequence: TTT
caccaatatgcaaattacct

SEQ ID NO: 269232 - DNA, 20 bp, Artificial Sequence
  Description of Artificial Sequence: Synthetic oligonucleotide
  Target: LAMA2; (-) strand; PAM type: YTN; PAM sequence: CTT
tcaccaatatgcaaattacc

SEQ ID NO: 269233 - DNA, 20 bp, Artificial Sequence
  Description of Artificial Sequence: Synthetic oligonucleotide
  Target: LAMA2; (-) strand; PAM type: YTN; PAM sequence: TTC
ctttcaccaatatgcaaatt

SEQ ID NO: 269234 - DNA, 20 bp, Artificial Sequence
  Description of Artificial Sequence: Synthetic oligonucleotide
  Target: LAMA2; (-) strand; PAM type: YTN; PAM sequence: TTA
cagtgagtgtatagattcct

SEQ ID NO: 269235 - DNA, 20 bp, Artificial Sequence
  Description of Artificial Sequence: Synthetic oligonucleotide
  Target: LAMA2; (-) strand; PAM type: YTN; PAM sequence: TTT
acagtgagtgtatagattcc

SEQ ID NO: 269236 - DNA, 20 bp, Artificial Sequence
  Description of Artificial Sequence: Synthetic oligonucleotide
  Target: LAMA2; (-) strand; PAM type: YTN; PAM sequence: CTA
aatttacagtgagtgtatag

SEQ ID NO: 269237 - DNA, 20 bp, Artificial Sequence
  Description of Artificial Sequence: Synthetic oligonucleotide
  Target: LAMA2; (-) strand; PAM type: YTN; PAM sequence: CTA
aactaaatttacagtgagtg

SEQ ID NO: 269238 - DNA, 20 bp, Artificial Sequence
  Description of Artificial Sequence: Synthetic oligonucleotide
  Target: LAMA2; (-) strand; PAM type: YTN; PAM sequence: TTG
agaaataagagcctaaacta

SEQ ID NO: 269239 - DNA, 20 bp, Artificial Sequence
  Description of Artificial Sequence: Synthetic oligonucleotide
  Target: LAMA2; (-) strand; PAM type: YTN; PAM sequence: TTT
gagaaataagagcctaaact

SEQ ID NO: 269240 - DNA, 20 bp, Artificial Sequence
  Description of Artificial Sequence: Synthetic oligonucleotide
  Target: LAMA2; (-) strand; PAM type: YTN; PAM sequence: CTT
tgagaaataagagcctaaac

SEQ ID NO: 269241 - DNA, 20 bp, Artificial Sequence
  Description of Artificial Sequence: Synthetic oligonucleotide
  Target: LAMA2; (-) strand; PAM type: YTN; PAM sequence: TTA
tatactttgagaaataagag

SEQ ID NO: 269242 - DNA, 20 bp, Artificial Sequence
  Description of Artificial Sequence: Synthetic oligonucleotide
  Target: LAMA2; (-) strand; PAM type: YTN; PAM sequence: TTT
atatactttgagaaataaga

SEQ ID NO: 269243 - DNA, 20 bp, Artificial Sequence
  Description of Artificial Sequence: Synthetic oligonucleotide
  Target: LAMA2; (-) strand; PAM type: YTN; PAM sequence: TTT
tatatactttgagaaataag

SEQ ID NO: 269244 - DNA, 20 bp, Artificial Sequence
  Description of Artificial Sequence: Synthetic oligonucleotide
  Target: LAMA2; (-) strand; PAM type: YTN; PAM sequence: TTC
agcagaattttatatacttt

SEQ ID NO: 269245 - DNA, 20 bp, Artificial Sequence
  Description of Artificial Sequence: Synthetic oligonucleotide
  Target: LAMA2; (-) strand; PAM type: YTN; PAM sequence: CTT
cagcagaattttatatactt

SEQ ID NO: 269246 - DNA, 20 bp, Artificial Sequence
  Description of Artificial Sequence: Synthetic oligonucleotide
  Target: LAMA2; (-) strand; PAM type: YTN; PAM sequence: CTC
ttcagcagaattttatatac

SEQ ID NO: 269247 - DNA, 20 bp, Artificial Sequence
  Description of Artificial Sequence: Synthetic oligonucleotide
  Target: LAMA2; (-) strand; PAM type: YTN; PAM sequence: CTG
atctcttcagcagaatttta

SEQ ID NO: 269248 - DNA, 20 bp, Artificial Sequence
  Description of Artificial Sequence: Synthetic oligonucleotide
  Target: LAMA2; (-) strand; PAM type: YTN; PAM sequence: TTG
cctgatctcttcagcagaat

SEQ ID NO: 269249 - DNA, 20 bp, Artificial Sequence
  Description of Artificial Sequence: Synthetic oligonucleotide
  Target: LAMA2; (-) strand; PAM type: YTN; PAM sequence: TTT
gcctgatctcttcagcagaa

SEQ ID NO: 269250 - DNA, 20 bp, Artificial Sequence
  Description of Artificial Sequence: Synthetic oligonucleotide
  Target: LAMA2; (-) strand; PAM type: YTN; PAM sequence: TTT
tgcctgatctcttcagcaga

SEQ ID NO: 269251 - DNA, 20 bp, Artificial Sequence
  Description of Artificial Sequence: Synthetic oligonucleotide
  Target: LAMA2; (-) strand; PAM type: YTN; PAM sequence: TTG
ttttgcctgatctcttcagc

SEQ ID NO: 269252 - DNA, 20 bp, Artificial Sequence
  Description of Artificial Sequence: Synthetic oligonucleotide
  Target: LAMA2; (-) strand; PAM type: YTN; PAM sequence: TTT
gttttgcctgatctcttcag

SEQ ID NO: 269253 - DNA, 20 bp, Artificial Sequence
  Description of Artificial Sequence: Synthetic oligonucleotide
  Target: LAMA2; (-) strand; PAM type: YTN; PAM sequence: CTT
tgttttgcctgatctcttca

SEQ ID NO: 269254 - DNA, 20 bp, Artificial Sequence
  Description of Artificial Sequence: Synthetic oligonucleotide
  Target: LAMA2; (-) strand; PAM type: YTN; PAM sequence: TTG
gctttgttttgcctgatctc

SEQ ID NO: 269255 - DNA, 20 bp, Artificial Sequence
  Description of Artificial Sequence: Synthetic oligonucleotide
  Target: LAMA2; (-) strand; PAM type: YTN; PAM sequence: CTG
cattggctttgttttgcctg

SEQ ID NO: 269256 - DNA, 20 bp, Artificial Sequence
  Description of Artificial Sequence: Synthetic oligonucleotide
  Target: LAMA2; (-) strand; PAM type: YTN; PAM sequence: TTC
ctgcattggctttgttttgc

SEQ ID NO: 269257 - DNA, 20 bp, Artificial Sequence
  Description of Artificial Sequence: Synthetic oligonucleotide
  Target: LAMA2; (-) strand; PAM type: YTN; PAM sequence: TTC
acagttcctgcattggcttt

SEQ ID NO: 269258 - DNA, 20 bp, Artificial Sequence
  Description of Artificial Sequence: Synthetic oligonucleotide
  Target: LAMA2; (-) strand; PAM type: YTN; PAM sequence: TTT
cacagttcctgcattggctt

SEQ ID NO: 269259 - DNA, 20 bp, Artificial Sequence
  Description of Artificial Sequence: Synthetic oligonucleotide
  Target: LAMA2; (-) strand; PAM type: YTN; PAM sequence: CTT
tcacagttcctgcattggct

SEQ ID NO: 269260 - DNA, 20 bp, Artificial Sequence
  Description of Artificial Sequence: Synthetic oligonucleotide
  Target: LAMA2; (-) strand; PAM type: YTN; PAM sequence: TTA
gggaccaaggtgtccaaggg

SEQ ID NO: 269261 - DNA, 20 bp, Artificial Sequence
  Description of Artificial Sequence: Synthetic oligonucleotide
  Target: LAMA2; (-) strand; PAM type: YTN; PAM sequence: TTT
agggaccaaggtgtccaagg

SEQ ID NO: 269262 - DNA, 20 bp, Artificial Sequence
  Description of Artificial Sequence: Synthetic oligonucleotide
  Target: LAMA2; (-) strand; PAM type: YTN; PAM sequence: TTT
tagggaccaaggtgtccaag

SEQ ID NO: 269263 - DNA, 20 bp, Artificial Sequence
  Description of Artificial Sequence: Synthetic oligonucleotide
  Target: LAMA2; (-) strand; PAM type: YTN; PAM sequence: CTT
ttagggaccaaggtgtccaa

SEQ ID NO: 269264 - DNA, 20 bp, Artificial Sequence
  Description of Artificial Sequence: Synthetic oligonucleotide
  Target: LAMA2; (-) strand; PAM type: YTN; PAM sequence: CTA
taagtatcttttagggacca

SEQ ID NO: 269265 - DNA, 20 bp, Artificial Sequence
  Description of Artificial Sequence: Synthetic oligonucleotide
  Target: LAMA2; (-) strand; PAM type: YTN; PAM sequence: CTG
gaagctataagtatctttta

SEQ ID NO: 269266 - DNA, 20 bp, Artificial Sequence
  Description of Artificial Sequence: Synthetic oligonucleotide
  Target: LAMA2; (-) strand; PAM type: YTN; PAM sequence: CTG
tccctggaagctataagtat

SEQ ID NO: 269267 - DNA, 20 bp, Artificial Sequence
  Description of Artificial Sequence: Synthetic oligonucleotide
  Target: LAMA2; (-) strand; PAM type: YTN; PAM sequence: CTG
gcaactgtccctggaagcta

SEQ ID NO: 269268 - DNA, 20 bp, Artificial Sequence
  Description of Artificial Sequence: Synthetic oligonucleotide
  Target: LAMA2; (-) strand; PAM type: YTN; PAM sequence: TTG
gatccagtaaaatccagggg

SEQ ID NO: 269269 - DNA, 20 bp, Artificial Sequence
  Description of Artificial Sequence: Synthetic oligonucleotide
  Target: LAMA2; (-) strand; PAM type: YTN; PAM sequence: TTT
ggatccagtaaaatccaggg

SEQ ID NO: 269270 - DNA, 20 bp, Artificial Sequence
  Description of Artificial Sequence: Synthetic oligonucleotide
  Target: LAMA2; (-) strand; PAM type: YTN; PAM sequence: TTT
tggatccagtaaaatccagg

SEQ ID NO: 269271 - DNA, 20 bp, Artificial Sequence
  Description of Artificial Sequence: Synthetic oligonucleotide
  Target: LAMA2; (-) strand; PAM type: YTN; PAM sequence: TTC
cattttggatccagtaaaat

SEQ ID NO: 269272 - DNA, 20 bp, Artificial Sequence
  Description of Artificial Sequence: Synthetic oligonucleotide
  Target: LAMA2; (-) strand; PAM type: YTN; PAM sequence: CTG
caaaaaattccattttggat

SEQ ID NO: 269273 - DNA, 20 bp, Artificial Sequence
  Description of Artificial Sequence: Synthetic oligonucleotide
  Target: LAMA2; (-) strand; PAM type: YTN; PAM sequence: CTG
tgtgctgcaaaaaattccat

SEQ ID NO: 269274 - DNA, 20 bp, Artificial Sequence
  Description of Artificial Sequence: Synthetic oligonucleotide
  Target: LAMA2; (-) strand; PAM type: YTN; PAM sequence: TTC
atgatagtagtgaaaatcca

SEQ ID NO: 269275 - DNA, 20 bp, Artificial Sequence
  Description of Artificial Sequence: Synthetic oligonucleotide
  Target: LAMA2; (-) strand; PAM type: YTN; PAM sequence: CTT
catgatagtagtgaaaatcc

SEQ ID NO: 269276 - DNA, 20 bp, Artificial Sequence
  Description of Artificial Sequence: Synthetic oligonucleotide
  Target: LAMA2; (-) strand; PAM type: YTN; PAM sequence: TTC
ttcatgatagtagtgaaaat

SEQ ID NO: 269277 - DNA, 20 bp, Artificial Sequence
  Description of Artificial Sequence: Synthetic oligonucleotide
  Target: LAMA2; (-) strand; PAM type: YTN; PAM sequence: TTG
tatacattcttcatgatagt

SEQ ID NO: 269278 - DNA, 20 bp, Artificial Sequence
  Description of Artificial Sequence: Synthetic oligonucleotide
  Target: LAMA2; (-) strand; PAM type: YTN; PAM sequence: TTT
gtatacattcttcatgatag

SEQ ID NO: 269279 - DNA, 20 bp, Artificial Sequence
  Description of Artificial Sequence: Synthetic oligonucleotide
  Target: LAMA2; (-) strand; PAM type: YTN; PAM sequence: TTA
tttgtatacattcttcatga

SEQ ID NO: 269280 - DNA, 20 bp, Artificial Sequence
  Description of Artificial Sequence: Synthetic oligonucleotide
  Target: LAMA2; (-) strand; PAM type: YTN; PAM sequence: CTA
acgtggacacagattatttg

SEQ ID NO: 269281 - DNA, 20 bp, Artificial Sequence
  Description of Artificial Sequence: Synthetic oligonucleotide
  Target: LAMA2; (-) strand; PAM type: YTN; PAM sequence: TTC
ctaacgtggacacagattat

SEQ ID NO: 269282 - DNA, 20 bp, Artificial Sequence
  Description of Artificial Sequence: Synthetic oligonucleotide
  Target: LAMA2; (-) strand; PAM type: YTN; PAM sequence: CTA
aataggttcctaacgtggac

SEQ ID NO: 269283 - DNA, 20 bp, Artificial Sequence
  Description of Artificial Sequence: Synthetic oligonucleotide
  Target: LAMA2; (-) strand; PAM type: YTN; PAM sequence: CTG
tgatgtctaaataggttcct

SEQ ID NO: 269284 - DNA, 20 bp, Artificial Sequence
  Description of Artificial Sequence: Synthetic oligonucleotide
  Target: LAMA2; (-) strand; PAM type: YTN; PAM sequence: CTA
tgagagactgtgatgtctaa

SEQ ID NO: 269285 - DNA, 20 bp, Artificial Sequence
  Description of Artificial Sequence: Synthetic oligonucleotide
  Target: LAMA2; (-) strand; PAM type: YTN; PAM sequence: CTA
actatgagagactgtgatgt

SEQ ID NO: 269286 - DNA, 20 bp, Artificial Sequence
  Description of Artificial Sequence: Synthetic oligonucleotide
  Target: LAMA2; (-) strand; PAM type: YTN; PAM sequence: TTA
ggtcactaactatgagagac

SEQ ID NO: 269287 - DNA, 20 bp, Artificial Sequence
  Description of Artificial Sequence: Synthetic oligonucleotide
  Target: LAMA2; (-) strand; PAM type: YTN; PAM sequence: TTT
aggtcactaactatgagaga

SEQ ID NO: 269288 - DNA, 20 bp, Artificial Sequence
  Description of Artificial Sequence: Synthetic oligonucleotide
  Target: LAMA2; (-) strand; PAM type: YTN; PAM sequence: CTG
aatttaggtcactaactatg

SEQ ID NO: 269289 - DNA, 20 bp, Artificial Sequence
  Description of Artificial Sequence: Synthetic oligonucleotide
  Target: LAMA2; (-) strand; PAM type: YTN; PAM sequence: CTG
catggtggggctgaatttag

SEQ ID NO: 269290 - DNA, 20 bp, Artificial Sequence
  Description of Artificial Sequence: Synthetic oligonucleotide
  Target: LAMA2; (-) strand; PAM type: YTN; PAM sequence: CTC
tgcatggtggggctgaattt

SEQ ID NO: 269291 - DNA, 20 bp, Artificial Sequence
  Description of Artificial Sequence: Synthetic oligonucleotide
  Target: LAMA2; (-) strand; PAM type: YTN; PAM sequence: CTG
actctgcatggtggggctga

SEQ ID NO: 269292 - DNA, 20 bp, Artificial Sequence
  Description of Artificial Sequence: Synthetic oligonucleotide
  Target: LAMA2; (-) strand; PAM type: YTN; PAM sequence: CTC
aggaactgactctgcatggt

SEQ ID NO: 269293 - DNA, 20 bp, Artificial Sequence
  Description of Artificial Sequence: Synthetic oligonucleotide
  Target: LAMA2; (-) strand; PAM type: YTN; PAM sequence: TTA
tgctcaggaactgactctgc

SEQ ID NO: 269294 - DNA, 20 bp, Artificial Sequence
  Description of Artificial Sequence: Synthetic oligonucleotide
  Target: LAMA2; (-) strand; PAM type: YTN; PAM sequence: TTA
gttatgctcaggaactgact

SEQ ID NO: 269295 - DNA, 20 bp, Artificial Sequence
  Description of Artificial Sequence: Synthetic oligonucleotide
  Target: LAMA2; (-) strand; PAM type: YTN; PAM sequence: CTT
agttatgctcaggaactgac

SEQ ID NO: 269296 - DNA, 20 bp, Artificial Sequence
  Description of Artificial Sequence: Synthetic oligonucleotide
  Target: LAMA2; (-) strand; PAM type: YTN; PAM sequence: TTG
cttagttatgctcaggaact

SEQ ID NO: 269297 - DNA, 20 bp, Artificial Sequence
  Description of Artificial Sequence: Synthetic oligonucleotide
  Target: LAMA2; (-) strand; PAM type: YTN; PAM sequence: TTG
aaggtgaataaattgcttag

SEQ ID NO: 269298 - DNA, 20 bp, Artificial Sequence
  Description of Artificial Sequence: Synthetic oligonucleotide
  Target: LAMA2; (-) strand; PAM type: YTN; PAM sequence: TTT
gaaggtgaataaattgctta

SEQ ID NO: 269299 - DNA, 20 bp, Artificial Sequence
  Description of Artificial Sequence: Synthetic oligonucleotide
  Target: LAMA2; (-) strand; PAM type: YTN; PAM sequence: CTG
gaatttgaaggtgaataaat

SEQ ID NO: 269300 - DNA, 20 bp, Artificial Sequence
  Description of Artificial Sequence: Synthetic oligonucleotide
  Target: LAMA2; (-) strand; PAM type: YTN; PAM sequence: TTA
gagaatgcctggaatttgaa

SEQ ID NO: 269301 - DNA, 20 bp, Artificial Sequence
  Description of Artificial Sequence: Synthetic oligonucleotide
  Target: LAMA2; (-) strand; PAM type: YTN; PAM sequence: TTT
agagaatgcctggaatttga

SEQ ID NO: 269302 - DNA, 20 bp, Artificial Sequence
  Description of Artificial Sequence: Synthetic oligonucleotide
  Target: LAMA2; (-) strand; PAM type: YTN; PAM sequence: CTT
tagagaatgcctggaatttg

SEQ ID NO: 269303 - DNA, 20 bp, Artificial Sequence
  Description of Artificial Sequence: Synthetic oligonucleotide
  Target: LAMA2; (-) strand; PAM type: YTN; PAM sequence: CTG
tgtggtaaaagggactttag

SEQ ID NO: 269304 - DNA, 20 bp, Artificial Sequence
  Description of Artificial Sequence: Synthetic oligonucleotide
  Target: LAMA2; (-) strand; PAM type: YTN; PAM sequence: TTA
tgatgaaccctgtgtggtaa

SEQ ID NO: 269305 - DNA, 20 bp, Artificial Sequence
  Description of Artificial Sequence: Synthetic oligonucleotide
  Target: LAMA2; (-) strand; PAM type: YTN; PAM sequence: CTA
ttatgatgaaccctgtgtgg

SEQ ID NO: 269306 - DNA, 20 bp, Artificial Sequence
  Description of Artificial Sequence: Synthetic oligonucleotide
  Target: LAMA2; (-) strand; PAM type: YTN; PAM sequence: TTA
ctattatgatgaaccctgtg

SEQ ID NO: 269307 - DNA, 20 bp, Artificial Sequence
  Description of Artificial Sequence: Synthetic oligonucleotide
  Target: LAMA2; (-) strand; PAM type: YTN; PAM sequence: TTA
aataaaattactattatgat

SEQ ID NO: 269308 - DNA, 20 bp, Artificial Sequence
  Description of Artificial Sequence: Synthetic oligonucleotide
  Target: LAMA2; (-) strand; PAM type: YTN; PAM sequence: TTT
aaataaaattactattatga

SEQ ID NO: 269309 - DNA, 20 bp, Artificial Sequence
  Description of Artificial Sequence: Synthetic oligonucleotide
  Target: LAMA2; (-) strand; PAM type: YTN; PAM sequence: CTT
taaataaaattactattatg

SEQ ID NO: 269310 - DNA, 20 bp, Artificial Sequence
  Description of Artificial Sequence: Synthetic oligonucleotide
  Target: LAMA2; (-) strand; PAM type: YTN; PAM sequence: CTC
agtcaaggtgagcctttaaa

SEQ ID NO: 269311 - DNA, 20 bp, Artificial Sequence
  Description of Artificial Sequence: Synthetic oligonucleotide
  Target: LAMA2; (-) strand; PAM type: YTN; PAM sequence: TTC
tcagtcaaggtgagccttta

SEQ ID NO: 269312 - DNA, 20 bp, Artificial Sequence
  Description of Artificial Sequence: Synthetic oligonucleotide
  Target: LAMA2; (-) strand; PAM type: YTN; PAM sequence: CTG
gcaaatggtaagttctcagt

SEQ ID NO: 269313 - DNA, 20 bp, Artificial Sequence
  Description of Artificial Sequence: Synthetic oligonucleotide
  Target: LAMA2; (-) strand; PAM type: YTN; PAM sequence: TTA
atatagtgcctggcaaatgg

SEQ ID NO: 269314 - DNA, 20 bp, Artificial Sequence
  Description of Artificial Sequence: Synthetic oligonucleotide
  Target: LAMA2; (-) strand; PAM type: YTN; PAM sequence: CTT
aatatagtgcctggcaaatg

SEQ ID NO: 269315 - DNA, 20 bp, Artificial Sequence
  Description of Artificial Sequence: Synthetic oligonucleotide
  Target: LAMA2; (-) strand; PAM type: YTN; PAM sequence: TTA
caagaatgaaagaaccacgt

SEQ ID NO: 269316 - DNA, 20 bp, Artificial Sequence
  Description of Artificial Sequence: Synthetic oligonucleotide
  Target: LAMA2; (-) strand; PAM type: YTN; PAM sequence: TTA
tcacacagtggggatgataa

SEQ ID NO: 269317 - DNA, 20 bp, Artificial Sequence
  Description of Artificial Sequence: Synthetic oligonucleotide
  Target: LAMA2; (-) strand; PAM type: YTN; PAM sequence: CTT
atcacacagtggggatgata

SEQ ID NO: 269318 - DNA, 20 bp, Artificial Sequence
  Description of Artificial Sequence: Synthetic oligonucleotide
  Target: LAMA2; (-) strand; PAM type: YTN; PAM sequence: CTC
ttatcacacagtggggatga

SEQ ID NO: 269319 - DNA, 20 bp, Artificial Sequence
  Description of Artificial Sequence: Synthetic oligonucleotide
  Target: LAMA2; (-) strand; PAM type: YTN; PAM sequence: TTC
tcttatcacacagtggggat

SEQ ID NO: 269320 - DNA, 20 bp, Artificial Sequence
  Description of Artificial Sequence: Synthetic oligonucleotide
  Target: LAMA2; (-) strand; PAM type: YTN; PAM sequence: TTC
agttctcttatcacacagtg

SEQ ID NO: 269321 - DNA, 20 bp, Artificial Sequence
  Description of Artificial Sequence: Synthetic oligonucleotide
  Target: LAMA2; (-) strand; PAM type: YTN; PAM sequence: CTA
aattcagttctcttatcaca

SEQ ID NO: 269322 - DNA, 20 bp, Artificial Sequence
  Description of Artificial Sequence: Synthetic oligonucleotide
  Target: LAMA2; (-) strand; PAM type: YTN; PAM sequence: CTA
cctaaattcagttctcttat

SEQ ID NO: 269323 - DNA, 20 bp, Artificial Sequence
  Description of Artificial Sequence: Synthetic oligonucleotide
  Target: LAMA2; (-) strand; PAM type: YTN; PAM sequence: TTA
acctacctaaattcagttct

SEQ ID NO: 269324 - DNA, 20 bp, Artificial Sequence
  Description of Artificial Sequence: Synthetic oligonucleotide
  Target: LAMA2; (-) strand; PAM type: YTN; PAM sequence: CTT
aacctacctaaattcagttc

SEQ ID NO: 269325 - DNA, 20 bp, Artificial Sequence
  Description of Artificial Sequence: Synthetic oligonucleotide
  Target: LAMA2; (-) strand; PAM type: YTN; PAM sequence: CTG
agaaaatgacttaacctacc

SEQ ID NO: 269326 - DNA, 20 bp, Artificial Sequence
  Description of Artificial Sequence: Synthetic oligonucleotide
  Target: LAMA2; (-) strand; PAM type: YTN; PAM sequence: CTG
aaaagtcactgagaaaatga

SEQ ID NO: 269327 - DNA, 20 bp, Artificial Sequence
  Description of Artificial Sequence: Synthetic oligonucleotide
  Target: LAMA2; (-) strand; PAM type: YTN; PAM sequence: CTA
ctgaaaagtcactgagaaaa

SEQ ID NO: 269328 - DNA, 20 bp, Artificial Sequence
  Description of Artificial Sequence: Synthetic oligonucleotide
  Target: LAMA2; (-) strand; PAM type: YTN; PAM sequence: CTC
aaatcacggatctactgaaa

SEQ ID NO: 269329 - DNA, 20 bp, Artificial Sequence
  Description of Artificial Sequence: Synthetic oligonucleotide
  Target: LAMA2; (-) strand; PAM type: YTN; PAM sequence: CTG
acccatgctcaaatcacgga

SEQ ID NO: 269330 - DNA, 20 bp, Artificial Sequence
  Description of Artificial Sequence: Synthetic oligonucleotide
  Target: LAMA2; (-) strand; PAM type: YTN; PAM sequence: TTG
taagactgacccatgctcaa

SEQ ID NO: 269331 - DNA, 20 bp, Artificial Sequence
  Description of Artificial Sequence: Synthetic oligonucleotide
  Target: LAMA2; (-) strand; PAM type: YTN; PAM sequence: TTT
gtaagactgacccatgctca

SEQ ID NO: 269332 - DNA, 20 bp, Artificial Sequence
  Description of Artificial Sequence: Synthetic oligonucleotide
  Target: LAMA2; (-) strand; PAM type: YTN; PAM sequence: TTA
agaaaataagatttgtaaga

SEQ ID NO: 269333 - DNA, 20 bp, Artificial Sequence
  Description of Artificial Sequence: Synthetic oligonucleotide
  Target: LAMA2; (-) strand; PAM type: YTN; PAM sequence: TTA
tcagtagccagcatagaggt

SEQ ID NO: 269334 - DNA, 20 bp, Artificial Sequence
  Description of Artificial Sequence: Synthetic oligonucleotide
  Target: LAMA2; (-) strand; PAM type: YTN; PAM sequence: TTT
atcagtagccagcatagagg

SEQ ID NO: 269335 - DNA, 20 bp, Artificial Sequence
  Description of Artificial Sequence: Synthetic oligonucleotide
  Target: LAMA2; (-) strand; PAM type: YTN; PAM sequence: CTG
tttatcagtagccagcatag

SEQ ID NO: 269336 - DNA, 20 bp, Artificial Sequence
  Description of Artificial Sequence: Synthetic oligonucleotide
  Target: LAMA2; (-) strand; PAM type: YTN; PAM sequence: CTC
tgtttatcagtagccagcat

SEQ ID NO: 269337 - DNA, 20 bp, Artificial Sequence
  Description of Artificial Sequence: Synthetic oligonucleotide
  Target: LAMA2; (-) strand; PAM type: YTN; PAM sequence: TTC
tctgtttatcagtagccagc

SEQ ID NO: 269338 - DNA, 20 bp, Artificial Sequence
  Description of Artificial Sequence: Synthetic oligonucleotide
  Target: LAMA2; (-) strand; PAM type: YTN; PAM sequence: TTT
ctctgtttatcagtagccag

SEQ ID NO: 269339 - DNA, 20 bp, Artificial Sequence
  Description of Artificial Sequence: Synthetic oligonucleotide
  Target: LAMA2; (-) strand; PAM type: YTN; PAM sequence: CTT
tctctgtttatcagtagcca

SEQ ID NO: 269340 - DNA, 20 bp, Artificial Sequence
  Description of Artificial Sequence: Synthetic oligonucleotide
  Target: LAMA2; (-) strand; PAM type: YTN; PAM sequence: TTG
ctttctctgtttatcagtag

SEQ ID NO: 269341 - DNA, 20 bp, Artificial Sequence
  Description of Artificial Sequence: Synthetic oligonucleotide
  Target: LAMA2; (-) strand; PAM type: YTN; PAM sequence: TTT
gctttctctgtttatcagta

SEQ ID NO: 269342 - DNA, 20 bp, Artificial Sequence
  Description of Artificial Sequence: Synthetic oligonucleotide
  Target: LAMA2; (-) strand; PAM type: YTN; PAM sequence: CTA
aaccacgtttgctttctctg

SEQ ID NO: 269343 - DNA, 20 bp, Artificial Sequence
  Description of Artificial Sequence: Synthetic oligonucleotide
  Target: LAMA2; (-) strand; PAM type: YTN; PAM sequence: CTG
gctaaaccacgtttgctttc

SEQ ID NO: 269344 - DNA, 20 bp, Artificial Sequence
  Description of Artificial Sequence: Synthetic oligonucleotide
  Target: LAMA2; (-) strand; PAM type: YTN; PAM sequence: TTG
aatatactggctaaaccacg

SEQ ID NO: 269345 - DNA, 20 bp, Artificial Sequence
  Description of Artificial Sequence: Synthetic oligonucleotide
  Target: LAMA2; (-) strand; PAM type: YTN; PAM sequence: TTA
atgttgaatatactggctaa

SEQ ID NO: 269346 - DNA, 20 bp, Artificial Sequence
  Description of Artificial Sequence: Synthetic oligonucleotide
  Target: LAMA2; (-) strand; PAM type: YTN; PAM sequence: TTC
attaatgttgaatatactgg

SEQ ID NO: 269347 - DNA, 20 bp, Artificial Sequence
  Description of Artificial Sequence: Synthetic oligonucleotide
  Target: LAMA2; (-) strand; PAM type: YTN; PAM sequence: CTG
aattcattaatgttgaatat

SEQ ID NO: 269348 - DNA, 20 bp, Artificial Sequence
  Description of Artificial Sequence: Synthetic oligonucleotide
  Target: LAMA2; (-) strand; PAM type: YTN; PAM sequence: CTA
aacatggaagcagtaaatga

SEQ ID NO: 269349 - DNA, 20 bp, Artificial Sequence
  Description of Artificial Sequence: Synthetic oligonucleotide
  Target: LAMA2; (-) strand; PAM type: YTN; PAM sequence: CTC
taaacatggaagcagtaaat

SEQ ID NO: 269350 - DNA, 20 bp, Artificial Sequence
  Description of Artificial Sequence: Synthetic oligonucleotide
  Target: LAMA2; (-) strand; PAM type: YTN; PAM sequence: TTA
atcgaggtagaatgggctct

SEQ ID NO: 269351 - DNA, 20 bp, Artificial Sequence
  Description of Artificial Sequence: Synthetic oligonucleotide
  Target: LAMA2; (-) strand; PAM type: YTN; PAM sequence: TTT
aatcgaggtagaatgggctc

SEQ ID NO: 269352 - DNA, 20 bp, Artificial Sequence
  Description of Artificial Sequence: Synthetic oligonucleotide
  Target: LAMA2; (-) strand; PAM type: YTN; PAM sequence: TTT
taatcgaggtagaatgggct

SEQ ID NO: 269353 - DNA, 20 bp, Artificial Sequence
  Description of Artificial Sequence: Synthetic oligonucleotide
  Target: LAMA2; (-) strand; PAM type: YTN; PAM sequence: TTT
ttaatcgaggtagaatgggc

SEQ ID NO: 269354 - DNA, 20 bp, Artificial Sequence
  Description of Artificial Sequence: Synthetic oligonucleotide
  Target: LAMA2; (-) strand; PAM type: YTN; PAM sequence: TTA
tttttaatcgaggtagaatg

SEQ ID NO: 269355 - DNA, 20 bp, Artificial Sequence
  Description of Artificial Sequence: Synthetic oligonucleotide
  Target: LAMA2; (-) strand; PAM type: YTN; PAM sequence: TTT
atttttaatcgaggtagaat

SEQ ID NO: 269356 - DNA, 20 bp, Artificial Sequence
  Description of Artificial Sequence: Synthetic oligonucleotide
  Target: LAMA2; (-) strand; PAM type: YTN; PAM sequence: TTA
tatttatttttaatcgaggt

SEQ ID NO: 269357 - DNA, 20 bp, Artificial Sequence
  Description of Artificial Sequence: Synthetic oligonucleotide
  Target: LAMA2; (-) strand; PAM type: YTN; PAM sequence: TTT
atatttatttttaatcgagg

SEQ ID NO: 269358 - DNA, 20 bp, Artificial Sequence
  Description of Artificial Sequence: Synthetic oligonucleotide
  Target: LAMA2; (-) strand; PAM type: YTN; PAM sequence: TTT
tatatttatttttaatcgag

SEQ ID NO: 269359 - DNA, 20 bp, Artificial Sequence
  Description of Artificial Sequence: Synthetic oligonucleotide
  Target: LAMA2; (-) strand; PAM type: YTN; PAM sequence: CTC
gttttatatttatttttaat

SEQ ID NO: 269360 - DNA, 20 bp, Artificial Sequence
  Description of Artificial Sequence: Synthetic oligonucleotide
  Target: LAMA2; (-) strand; PAM type: YTN; PAM sequence: TTA
gctcgttttatatttatttt

SEQ ID NO: 269361 - DNA, 20 bp, Artificial Sequence
  Description of Artificial Sequence: Synthetic oligonucleotide
  Target: LAMA2; (-) strand; PAM type: YTN; PAM sequence: TTT
agctcgttttatatttattt

SEQ ID NO: 269362 - DNA, 20 bp, Artificial Sequence
  Description of Artificial Sequence: Synthetic oligonucleotide
  Target: LAMA2; (-) strand; PAM type: YTN; PAM sequence: TTT
tagctcgttttatatttatt

SEQ ID NO: 269363 - DNA, 20 bp, Artificial Sequence
  Description of Artificial Sequence: Synthetic oligonucleotide
  Target: LAMA2; (-) strand; PAM type: YTN; PAM sequence: TTG
taattttagctcgttttata

SEQ ID NO: 269364 - DNA, 20 bp, Artificial Sequence
  Description of Artificial Sequence: Synthetic oligonucleotide
  Target: LAMA2; (-) strand; PAM type: YTN; PAM sequence: TTT
gtaattttagctcgttttat

SEQ ID NO: 269365 - DNA, 20 bp, Artificial Sequence
  Description of Artificial Sequence: Synthetic oligonucleotide
  Target: LAMA2; (-) strand; PAM type: YTN; PAM sequence: TTT
tgtaattttagctcgtttta

SEQ ID NO: 269366 - DNA, 20 bp, Artificial Sequence
  Description of Artificial Sequence: Synthetic oligonucleotide
  Target: LAMA2; (-) strand; PAM type: YTN; PAM sequence: CTC
attttgtaattttagctcgt

SEQ ID NO: 269367 - DNA, 20 bp, Artificial Sequence
  Description of Artificial Sequence: Synthetic oligonucleotide
  Target: LAMA2; (-) strand; PAM type: YTN; PAM sequence: TTC
tcattttgtaattttagctc

SEQ ID NO: 269368 - DNA, 20 bp, Artificial Sequence
  Description of Artificial Sequence: Synthetic oligonucleotide
  Target: LAMA2; (-) strand; PAM type: YTN; PAM sequence: TTT
ctcattttgtaattttagct

SEQ ID NO: 269369 - DNA, 20 bp, Artificial Sequence
  Description of Artificial Sequence: Synthetic oligonucleotide
  Target: LAMA2; (-) strand; PAM type: YTN; PAM sequence: TTA
aaatttctcattttgtaatt

SEQ ID NO: 269370 - DNA, 20 bp, Artificial Sequence
  Description of Artificial Sequence: Synthetic oligonucleotide
  Target: LAMA2; (-) strand; PAM type: YTN; PAM sequence: CTT
aaaatttctcattttgtaat

SEQ ID NO: 269371 - DNA, 20 bp, Artificial Sequence
  Description of Artificial Sequence: Synthetic oligonucleotide
  Target: LAMA2; (-) strand; PAM type: YTN; PAM sequence: TTA
catacacttaaaatttctca

SEQ ID NO: 269372 - DNA, 20 bp, Artificial Sequence
  Description of Artificial Sequence: Synthetic oligonucleotide
  Target: LAMA2; (-) strand; PAM type: YTN; PAM sequence: CTG
agattacatacacttaaaat

SEQ ID NO: 269373 - DNA, 20 bp, Artificial Sequence
  Description of Artificial Sequence: Synthetic oligonucleotide
  Target: LAMA2; (-) strand; PAM type: YTN; PAM sequence: TTA
ctgagattacatacacttaa

SEQ ID NO: 269374 - DNA, 20 bp, Artificial Sequence
  Description of Artificial Sequence: Synthetic oligonucleotide
  Target: LAMA2; (-) strand; PAM type: YTN; PAM sequence: TTA
gcagaaaataaatgtcatta

SEQ ID NO: 269375 - DNA, 20 bp, Artificial Sequence
  Description of Artificial Sequence: Synthetic oligonucleotide
  Target: LAMA2; (-) strand; PAM type: YTN; PAM sequence: CTC
aatgattagcagaaaataaa

SEQ ID NO: 269376 - DNA, 20 bp, Artificial Sequence
  Description of Artificial Sequence: Synthetic oligonucleotide
  Target: LAMA2; (-) strand; PAM type: YTN; PAM sequence: TTA
gaggagtctcaatgattagc

SEQ ID NO: 269377 - DNA, 20 bp, Artificial Sequence
  Description of Artificial Sequence: Synthetic oligonucleotide
  Target: LAMA2; (-) strand; PAM type: YTN; PAM sequence: CTT
agaggagtctcaatgattag

SEQ ID NO: 269378 - DNA, 20 bp, Artificial Sequence
  Description of Artificial Sequence: Synthetic oligonucleotide
  Target: LAMA2; (-) strand; PAM type: YTN; PAM sequence: TTA
aatcttagaggagtctcaat

SEQ ID NO: 269379 - DNA, 20 bp, Artificial Sequence
  Description of Artificial Sequence: Synthetic oligonucleotide
  Target: LAMA2; (-) strand; PAM type: YTN; PAM sequence: TTT
aaatcttagaggagtctcaa

SEQ ID NO: 269380 - DNA, 20 bp, Artificial Sequence
  Description of Artificial Sequence: Synthetic oligonucleotide
  Target: LAMA2; (-) strand; PAM type: YTN; PAM sequence: TTT
taaatcttagaggagtctca

SEQ ID NO: 269381 - DNA, 20 bp, Artificial Sequence
  Description of Artificial Sequence: Synthetic oligonucleotide
  Target: LAMA2; (-) strand; PAM type: YTN; PAM sequence: CTA
ccataaatgccataatgttt

SEQ ID NO: 269382 - DNA, 20 bp, Artificial Sequence
  Description of Artificial Sequence: Synthetic oligonucleotide
  Target: LAMA2; (-) strand; PAM type: YTN; PAM sequence: CTG
atgaaaaggaatctaccata

SEQ ID NO: 269383 - DNA, 20 bp, Artificial Sequence
  Description of Artificial Sequence: Synthetic oligonucleotide
  Target: LAMA2; (-) strand; PAM type: YTN; PAM sequence: CTC
tgatgaaaaggaatctacca

SEQ ID NO: 269384 - DNA, 20 bp, Artificial Sequence
  Description of Artificial Sequence: Synthetic oligonucleotide
  Target: LAMA2; (-) strand; PAM type: YTN; PAM sequence: TTG
acaatctctgatgaaaagga

SEQ ID NO: 269385 - DNA, 20 bp, Artificial Sequence
  Description of Artificial Sequence: Synthetic oligonucleotide
  Target: LAMA2; (-) strand; PAM type: YTN; PAM sequence: CTT
gacaatctctgatgaaaagg

SEQ ID NO: 269386 - DNA, 20 bp, Artificial Sequence
  Description of Artificial Sequence: Synthetic oligonucleotide
  Target: LAMA2; (-) strand; PAM type: YTN; PAM sequence: CTA
cttgacaatctctgatgaaa

SEQ ID NO: 269387 - DNA, 20 bp, Artificial Sequence
  Description of Artificial Sequence: Synthetic oligonucleotide
  Target: LAMA2; (-) strand; PAM type: YTN; PAM sequence: CTC
tacttgacaatctctgatga

SEQ ID NO: 269388 - DNA, 20 bp, Artificial Sequence
  Description of Artificial Sequence: Synthetic oligonucleotide
  Target: LAMA2; (-) strand; PAM type: YTN; PAM sequence: CTG
catagaagacagtctctact

SEQ ID NO: 269389 - DNA, 20 bp, Artificial Sequence
  Description of Artificial Sequence: Synthetic oligonucleotide
  Target: LAMA2; (-) strand; PAM type: YTN; PAM sequence: TTC
tgcatagaagacagtctcta

SEQ ID NO: 269390 - DNA, 20 bp, Artificial Sequence
  Description of Artificial Sequence: Synthetic oligonucleotide
  Target: LAMA2; (-) strand; PAM type: YTN; PAM sequence: CTT
ctgcatagaagacagtctct

SEQ ID NO: 269391 - DNA, 20 bp, Artificial Sequence
  Description of Artificial Sequence: Synthetic oligonucleotide
  Target: LAMA2; (-) strand; PAM type: YTN; PAM sequence: TTC
ttctgcatagaagacagtct

SEQ ID NO: 269392 - DNA, 20 bp, Artificial Sequence
  Description of Artificial Sequence: Synthetic oligonucleotide
  Target: LAMA2; (-) strand; PAM type: YTN; PAM sequence: TTT
cttctgcatagaagacagtc

SEQ ID NO: 269393 - DNA, 20 bp, Artificial Sequence
  Description of Artificial Sequence: Synthetic oligonucleotide
  Target: LAMA2; (-) strand; PAM type: YTN; PAM sequence: TTT
tcttctgcatagaagacagt

SEQ ID NO: 269394 - DNA, 20 bp, Artificial Sequence
  Description of Artificial Sequence: Synthetic oligonucleotide
  Target: LAMA2; (-) strand; PAM type: YTN; PAM sequence: CTT
ttcttctgcatagaagacag

SEQ ID NO: 269395 - DNA, 20 bp, Artificial Sequence
  Description of Artificial Sequence: Synthetic oligonucleotide
  Target: LAMA2; (-) strand; PAM type: YTN; PAM sequence: CTA
gtatcttttcttctgcatag

SEQ ID NO: 269396 - DNA, 20 bp, Artificial Sequence
  Description of Artificial Sequence: Synthetic oligonucleotide
  Target: LAMA2; (-) strand; PAM type: YTN; PAM sequence: CTG
ggcacccagctagtatcttt

SEQ ID NO: 269397 - DNA, 20 bp, Artificial Sequence
  Description of Artificial Sequence: Synthetic oligonucleotide
  Target: LAMA2; (-) strand; PAM type: YTN; PAM sequence: TTA
atctgggcacccagctagta

SEQ ID NO: 269398 - DNA, 20 bp, Artificial Sequence
  Description of Artificial Sequence: Synthetic oligonucleotide
  Target: LAMA2; (-) strand; PAM type: YTN; PAM sequence: CTG
tgaagttaatctgggcaccc

SEQ ID NO: 269399 - DNA, 20 bp, Artificial Sequence
  Description of Artificial Sequence: Synthetic oligonucleotide
  Target: LAMA2; (-) strand; PAM type: YTN; PAM sequence: TTA
gaaaaaaagaggctgtgaag

SEQ ID NO: 269400 - DNA, 20 bp, Artificial Sequence
  Description of Artificial Sequence: Synthetic oligonucleotide
  Target: LAMA2; (-) strand; PAM type: YTN; PAM sequence: TTT
agaaaaaaagaggctgtgaa

SEQ ID NO: 269401 - DNA, 20 bp, Artificial Sequence
  Description of Artificial Sequence: Synthetic oligonucleotide
  Target: LAMA2; (-) strand; PAM type: YTN; PAM sequence: TTT
tagaaaaaaagaggctgtga

SEQ ID NO: 269402 - DNA, 20 bp, Artificial Sequence
  Description of Artificial Sequence: Synthetic oligonucleotide
  Target: LAMA2; (-) strand; PAM type: YTN; PAM sequence: CTT
ttagaaaaaaagaggctgtg

SEQ ID NO: 269403 - DNA, 20 bp, Artificial Sequence
  Description of Artificial Sequence: Synthetic oligonucleotide
  Target: LAMA2; (-) strand; PAM type: YTN; PAM sequence: TTC
cttttagaaaaaaagaggct

SEQ ID NO: 269404 - DNA, 20 bp, Artificial Sequence
  Description of Artificial Sequence: Synthetic oligonucleotide
  Target: LAMA2; (-) strand; PAM type: YTN; PAM sequence: CTG
tcccaaataattccttttag

SEQ ID NO: 269405 - DNA, 20 bp, Artificial Sequence
  Description of Artificial Sequence: Synthetic oligonucleotide
  Target: LAMA2; (-) strand; PAM type: YTN; PAM sequence: TTG
taaagctgtcccaaataatt

SEQ ID NO: 269406 - DNA, 20 bp, Artificial Sequence
  Description of Artificial Sequence: Synthetic oligonucleotide
  Target: LAMA2; (-) strand; PAM type: YTN; PAM sequence: TTA
cataacattgtaaagctgtc

SEQ ID NO: 269407 - DNA, 20 bp, Artificial Sequence
  Description of Artificial Sequence: Synthetic oligonucleotide
  Target: LAMA2; (-) strand; PAM type: YTN; PAM sequence: CTT
acataacattgtaaagctgt

SEQ ID NO: 269408 - DNA, 20 bp, Artificial Sequence
  Description of Artificial Sequence: Synthetic oligonucleotide
  Target: LAMA2; (-) strand; PAM type: YTN; PAM sequence: CTC
accaacttacataacattgt

SEQ ID NO: 269409 - DNA, 20 bp, Artificial Sequence
  Description of Artificial Sequence: Synthetic oligonucleotide
  Target: LAMA2; (-) strand; PAM type: YTN; PAM sequence: TTC
agaactcaccaacttacata

SEQ ID NO: 269410 - DNA, 20 bp, Artificial Sequence
  Description of Artificial Sequence: Synthetic oligonucleotide
  Target: LAMA2; (-) strand; PAM type: YTN; PAM sequence: CTT
cagaactcaccaacttacat

SEQ ID NO: 269411 - DNA, 20 bp, Artificial Sequence
  Description of Artificial Sequence: Synthetic oligonucleotide
  Target: LAMA2; (-) strand; PAM type: YTN; PAM sequence: CTC
ttcagaactcaccaacttac

SEQ ID NO: 269412 - DNA, 20 bp, Artificial Sequence
  Description of Artificial Sequence: Synthetic oligonucleotide
  Target: LAMA2; (-) strand; PAM type: YTN; PAM sequence: TTA
ataaaatatctcttcagaac

SEQ ID NO: 269413 - DNA, 20 bp, Artificial Sequence
  Description of Artificial Sequence: Synthetic oligonucleotide
  Target: LAMA2; (-) strand; PAM type: YTN; PAM sequence: TTG
ggaaattaataaaatatctc

SEQ ID NO: 269414 - DNA, 20 bp, Artificial Sequence
  Description of Artificial Sequence: Synthetic oligonucleotide
  Target: LAMA2; (-) strand; PAM type: YTN; PAM sequence: TTT
gggaaattaataaaatatct

SEQ ID NO: 269415 - DNA, 20 bp, Artificial Sequence
  Description of Artificial Sequence: Synthetic oligonucleotide
  Target: LAMA2; (-) strand; PAM type: YTN; PAM sequence: TTA
atttgggaaattaataaaat

SEQ ID NO: 269416 - DNA, 20 bp, Artificial Sequence
  Description of Artificial Sequence: Synthetic oligonucleotide
  Target: LAMA2; (-) strand; PAM type: YTN; PAM sequence: CTT
aatttgggaaattaataaaa

SEQ ID NO: 269417 - DNA, 20 bp, Artificial Sequence
  Description of Artificial Sequence: Synthetic oligonucleotide
  Target: LAMA2; (-) strand; PAM type: YTN; PAM sequence: TTA
tcaagaagaaatcttaattt

SEQ ID NO: 269418 - DNA, 20 bp, Artificial Sequence
  Description of Artificial Sequence: Synthetic oligonucleotide
  Target: LAMA2; (-) strand; PAM type: YTN; PAM sequence: CTT
atcaagaagaaatcttaatt

SEQ ID NO: 269419 - DNA, 20 bp, Artificial Sequence
  Description of Artificial Sequence: Synthetic oligonucleotide
  Target: LAMA2; (-) strand; PAM type: YTN; PAM sequence: TTA
acttatcaagaagaaatctt

SEQ ID NO: 269420 - DNA, 20 bp, Artificial Sequence
  Description of Artificial Sequence: Synthetic oligonucleotide
  Target: LAMA2; (-) strand; PAM type: YTN; PAM sequence: TTG
tattaacttatcaagaagaa

SEQ ID NO: 269421 - DNA, 20 bp, Artificial Sequence
  Description of Artificial Sequence: Synthetic oligonucleotide
  Target: LAMA2; (-) strand; PAM type: YTN; PAM sequence: TTT
gtattaacttatcaagaaga

SEQ ID NO: 269422 - DNA, 20 bp, Artificial Sequence
  Description of Artificial Sequence: Synthetic oligonucleotide
  Target: LAMA2; (-) strand; PAM type: YTN; PAM sequence: TTG
aaagaggaggatggatttgt

SEQ ID NO: 269423 - DNA, 20 bp, Artificial Sequence
  Description of Artificial Sequence: Synthetic oligonucleotide
  Target: LAMA2; (-) strand; PAM type: YTN; PAM sequence: CTA
tgaatgacagttgaaagagg

SEQ ID NO: 269424 - DNA, 20 bp, Artificial Sequence
  Description of Artificial Sequence: Synthetic oligonucleotide
  Target: LAMA2; (-) strand; PAM type: YTN; PAM sequence: TTA
taaaatgacatgtgaactat

SEQ ID NO: 269425 - DNA, 20 bp, Artificial Sequence
  Description of Artificial Sequence: Synthetic oligonucleotide
  Target: LAMA2; (-) strand; PAM type: YTN; PAM sequence: TTT
ataaaatgacatgtgaacta

SEQ ID NO: 269426 - DNA, 20 bp, Artificial Sequence
  Description of Artificial Sequence: Synthetic oligonucleotide
  Target: LAMA2; (-) strand; PAM type: YTN; PAM sequence: TTT
tataaaatgacatgtgaact

SEQ ID NO: 269427 - DNA, 20 bp, Artificial Sequence
  Description of Artificial Sequence: Synthetic oligonucleotide
  Target: LAMA2; (-) strand; PAM type: YTN; PAM sequence: CTC
attttataaaatgacatgtg

SEQ ID NO: 269428 - DNA, 20 bp, Artificial Sequence
  Description of Artificial Sequence: Synthetic oligonucleotide
  Target: LAMA2; (-) strand; PAM type: YTN; PAM sequence: TTC
tcattttataaaatgacatg

SEQ ID NO: 269429 - DNA, 20 bp, Artificial Sequence
  Description of Artificial Sequence: Synthetic oligonucleotide
  Target: LAMA2; (-) strand; PAM type: YTN; PAM sequence: TTG
ttctcattttataaaatgac

SEQ ID NO: 269430 - DNA, 20 bp, Artificial Sequence
  Description of Artificial Sequence: Synthetic oligonucleotide
  Target: LAMA2; (-) strand; PAM type: YTN; PAM sequence: TTA
gttgttctcattttataaaa

SEQ ID NO: 269431 - DNA, 20 bp, Artificial Sequence
  Description of Artificial Sequence: Synthetic oligonucleotide
  Target: LAMA2; (-) strand; PAM type: YTN; PAM sequence: TTG
aaggcaggttagttgttctc

SEQ ID NO: 269432 - DNA, 20 bp, Artificial Sequence
  Description of Artificial Sequence: Synthetic oligonucleotide
  Target: LAMA2; (-) strand; PAM type: YTN; PAM sequence: CTT
gaaggcaggttagttgttct

SEQ ID NO: 269433 - DNA, 20 bp, Artificial Sequence
  Description of Artificial Sequence: Synthetic oligonucleotide
  Target: LAMA2; (-) strand; PAM type: YTN; PAM sequence: TTC
ttgaaggcaggttagttgtt

SEQ ID NO: 269434 - DNA, 20 bp, Artificial Sequence
  Description of Artificial Sequence: Synthetic oligonucleotide
  Target: LAMA2; (-) strand; PAM type: YTN; PAM sequence: TTT
cttgaaggcaggttagttgt

SEQ ID NO: 269435 - DNA, 20 bp, Artificial Sequence
  Description of Artificial Sequence: Synthetic oligonucleotide
  Target: LAMA2; (-) strand; PAM type: YTN; PAM sequence: TTA
agtttcttgaaggcaggtta

SEQ ID NO: 269436 - DNA, 20 bp, Artificial Sequence
  Description of Artificial Sequence: Synthetic oligonucleotide
  Target: LAMA2; (-) strand; PAM type: YTN; PAM sequence: TTT
aagtttcttgaaggcaggtt

SEQ ID NO: 269437 - DNA, 20 bp, Artificial Sequence
  Description of Artificial Sequence: Synthetic oligonucleotide
  Target: LAMA2; (-) strand; PAM type: YTN; PAM sequence: TTT
taagtttcttgaaggcaggt

SEQ ID NO: 269438 - DNA, 20 bp, Artificial Sequence
  Description of Artificial Sequence: Synthetic oligonucleotide
  Target: LAMA2; (-) strand; PAM type: YTN; PAM sequence: TTT
ttaagtttcttgaaggcagg

SEQ ID NO: 269439 - DNA, 20 bp, Artificial Sequence
  Description of Artificial Sequence: Synthetic oligonucleotide
  Target: LAMA2; (-) strand; PAM type: YTN; PAM sequence: TTC
atttttaagtttcttgaagg

SEQ ID NO: 269440 - DNA, 20 bp, Artificial Sequence
  Description of Artificial Sequence: Synthetic oligonucleotide
  Target: LAMA2; (-) strand; PAM type: YTN; PAM sequence: TTG
ttcatttttaagtttcttga

SEQ ID NO: 269441 - DNA, 20 bp, Artificial Sequence
  Description of Artificial Sequence: Synthetic oligonucleotide
  Target: LAMA2; (-) strand; PAM type: YTN; PAM sequence: TTT
gttcatttttaagtttcttg

SEQ ID NO: 269442 - DNA, 20 bp, Artificial Sequence
  Description of Artificial Sequence: Synthetic oligonucleotide
  Target: LAMA2; (-) strand; PAM type: YTN; PAM sequence: CTT
tgttcatttttaagtttctt

SEQ ID NO: 269443 - DNA, 20 bp, Artificial Sequence
  Description of Artificial Sequence: Synthetic oligonucleotide
  Target: LAMA2; (-) strand; PAM type: YTN; PAM sequence: TTC
tttgttcatttttaagtttc

SEQ ID NO: 269444 - DNA, 20 bp, Artificial Sequence
  Description of Artificial Sequence: Synthetic oligonucleotide
  Target: LAMA2; (-) strand; PAM type: YTN; PAM sequence: CTT
ctttgttcatttttaagttt

SEQ ID NO: 269445 - DNA, 20 bp, Artificial Sequence
  Description of Artificial Sequence: Synthetic oligonucleotide
  Target: LAMA2; (-) strand; PAM type: YTN; PAM sequence: TTA
agcaaataatggcttctttg

SEQ ID NO: 269446 - DNA, 20 bp, Artificial Sequence
  Description of Artificial Sequence: Synthetic oligonucleotide
  Target: LAMA2; (-) strand; PAM type: YTN; PAM sequence: CTG
ttaagcaaataatggcttct

SEQ ID NO: 269447 - DNA, 20 bp, Artificial Sequence
  Description of Artificial Sequence: Synthetic oligonucleotide
  Target: LAMA2; (-) strand; PAM type: YTN; PAM sequence: TTA
ctgttaagcaaataatggct

SEQ ID NO: 269448 - DNA, 20 bp, Artificial Sequence
  Description of Artificial Sequence: Synthetic oligonucleotide
  Target: LAMA2; (-) strand; PAM type: YTN; PAM sequence: TTT
actgttaagcaaataatggc

SEQ ID NO: 269449 - DNA, 20 bp, Artificial Sequence
  Description of Artificial Sequence: Synthetic oligonucleotide
  Target: LAMA2; (-) strand; PAM type: YTN; PAM sequence: CTT
tactgttaagcaaataatgg

SEQ ID NO: 269450 - DNA, 20 bp, Artificial Sequence
  Description of Artificial Sequence: Synthetic oligonucleotide
  Target: LAMA2; (-) strand; PAM type: YTN; PAM sequence: CTA
aactttactgttaagcaaat

SEQ ID NO: 269451 - DNA, 20 bp, Artificial Sequence
  Description of Artificial Sequence: Synthetic oligonucleotide
  Target: LAMA2; (-) strand; PAM type: YTN; PAM sequence: TTC
aaaatactaaactttactgt

SEQ ID NO: 269452 - DNA, 20 bp, Artificial Sequence
  Description of Artificial Sequence: Synthetic oligonucleotide
  Target: LAMA2; (-) strand; PAM type: YTN; PAM sequence: TTT
caaaatactaaactttactg

SEQ ID NO: 269453 - DNA, 20 bp, Artificial Sequence
  Description of Artificial Sequence: Synthetic oligonucleotide
  Target: LAMA2; (-) strand; PAM type: YTN; PAM sequence: TTG
tgtttcaaaatactaaactt

SEQ ID NO: 269454 - DNA, 20 bp, Artificial Sequence
  Description of Artificial Sequence: Synthetic oligonucleotide
  Target: LAMA2; (-) strand; PAM type: YTN; PAM sequence: TTT
gtgtttcaaaatactaaact

SEQ ID NO: 269455 - DNA, 20 bp, Artificial Sequence
  Description of Artificial Sequence: Synthetic oligonucleotide
  Target: LAMA2; (-) strand; PAM type: YTN; PAM sequence: TTT
tgtgtttcaaaatactaaac

SEQ ID NO: 269456 - DNA, 20 bp, Artificial Sequence
  Description of Artificial Sequence: Synthetic oligonucleotide
  Target: LAMA2; (-) strand; PAM type: YTN; PAM sequence: TTA
cagaaaataggatatgaaca

SEQ ID NO: 269457 - DNA, 20 bp, Artificial Sequence
  Description of Artificial Sequence: Synthetic oligonucleotide
  Target: LAMA2; (-) strand; PAM type: YTN; PAM sequence: TTT
acagaaaataggatatgaac

SEQ ID NO: 269458 - DNA, 20 bp, Artificial Sequence
  Description of Artificial Sequence: Synthetic oligonucleotide
  Target: LAMA2; (-) strand; PAM type: YTN; PAM sequence: TTA
atgatatgagtttacagaaa

SEQ ID NO: 269459 - DNA, 20 bp, Artificial Sequence
  Description of Artificial Sequence: Synthetic oligonucleotide
  Target: LAMA2; (-) strand; PAM type: YTN; PAM sequence: CTG
tgttaatgatatgagtttac

SEQ ID NO: 269460 - DNA, 20 bp, Artificial Sequence
  Description of Artificial Sequence: Synthetic oligonucleotide
  Target: LAMA2; (-) strand; PAM type: YTN; PAM sequence: TTC
tgtgttaatgatatgagttt

SEQ ID NO: 269461 - DNA, 20 bp, Artificial Sequence
  Description of Artificial Sequence: Synthetic oligonucleotide
  Target: LAMA2; (-) strand; PAM type: YTN; PAM sequence: TTA
ttctgtgttaatgatatgag

SEQ ID NO: 269462 - DNA, 20 bp, Artificial Sequence
  Description of Artificial Sequence: Synthetic oligonucleotide
  Target: LAMA2; (-) strand; PAM type: YTN; PAM sequence: TTA
aacatcacatgggttattct

SEQ ID NO: 269463 - DNA, 20 bp, Artificial Sequence
  Description of Artificial Sequence: Synthetic oligonucleotide
  Target: LAMA2; (-) strand; PAM type: YTN; PAM sequence: TTT
aaacatcacatgggttattc

SEQ ID NO: 269464 - DNA, 20 bp, Artificial Sequence
  Description of Artificial Sequence: Synthetic oligonucleotide
  Target: LAMA2; (-) strand; PAM type: YTN; PAM sequence: TTT
taaacatcacatgggttatt

SEQ ID NO: 269465 - DNA, 20 bp, Artificial Sequence
  Description of Artificial Sequence: Synthetic oligonucleotide
  Target: LAMA2; (-) strand; PAM type: YTN; PAM sequence: CTA
ttttaaacatcacatgggtt

SEQ ID NO: 269466 - DNA, 20 bp, Artificial Sequence
  Description of Artificial Sequence: Synthetic oligonucleotide
  Target: LAMA2; (-) strand; PAM type: YTN; PAM sequence: CTC
ataatctattttaaacatca

SEQ ID NO: 269467 - DNA, 20 bp, Artificial Sequence
  Description of Artificial Sequence: Synthetic oligonucleotide
  Target: LAMA2; (-) strand; PAM type: YTN; PAM sequence: CTA
tgccactcataatctatttt

SEQ ID NO: 269468 - DNA, 20 bp, Artificial Sequence
  Description of Artificial Sequence: Synthetic oligonucleotide
  Target: LAMA2; (-) strand; PAM type: YTN; PAM sequence: TTA
ctatgccactcataatctat

SEQ ID NO: 269469 - DNA, 20 bp, Artificial Sequence
  Description of Artificial Sequence: Synthetic oligonucleotide
  Target: LAMA2; (-) strand; PAM type: YTN; PAM sequence: TTT
actatgccactcataatcta

SEQ ID NO: 269470 - DNA, 20 bp, Artificial Sequence
  Description of Artificial Sequence: Synthetic oligonucleotide
  Target: LAMA2; (-) strand; PAM type: YTN; PAM sequence: TTT
tactatgccactcataatct

SEQ ID NO: 269471 - DNA, 20 bp, Artificial Sequence
  Description of Artificial Sequence: Synthetic oligonucleotide
  Target: LAMA2; (-) strand; PAM type: YTN; PAM sequence: CTA
ggagagtaatacattttact

SEQ ID NO: 269472 - DNA, 20 bp, Artificial Sequence
  Description of Artificial Sequence: Synthetic oligonucleotide
  Target: LAMA2; (-) strand; PAM type: YTN; PAM sequence: CTC
taggagagtaatacatttta

SEQ ID NO: 269473 - DNA, 20 bp, Artificial Sequence
  Description of Artificial Sequence: Synthetic oligonucleotide
  Target: LAMA2; (-) strand; PAM type: YTN; PAM sequence: TTC
tctaggagagtaatacattt

SEQ ID NO: 269474 - DNA, 20 bp, Artificial Sequence
  Description of Artificial Sequence: Synthetic oligonucleotide
  Target: LAMA2; (-) strand; PAM type: YTN; PAM sequence: CTG
ttctctaggagagtaataca

SEQ ID NO: 269475 - DNA, 20 bp, Artificial Sequence
  Description of Artificial Sequence: Synthetic oligonucleotide
  Target: LAMA2; (-) strand; PAM type: YTN; PAM sequence: TTC
tgttctctaggagagtaata

SEQ ID NO: 269476 - DNA, 20 bp, Artificial Sequence
  Description of Artificial Sequence: Synthetic oligonucleotide
  Target: LAMA2; (-) strand; PAM type: YTN; PAM sequence: TTT
ctgttctctaggagagtaat

SEQ ID NO: 269477 - DNA, 20 bp, Artificial Sequence
  Description of Artificial Sequence: Synthetic oligonucleotide
  Target: LAMA2; (-) strand; PAM type: YTN; PAM sequence: TTA
atttctgttctctaggagag

SEQ ID NO: 269478 - DNA, 20 bp, Artificial Sequence
  Description of Artificial Sequence: Synthetic oligonucleotide
  Target: LAMA2; (-) strand; PAM type: YTN; PAM sequence: TTT
aatttctgttctctaggaga

SEQ ID NO: 269479 - DNA, 20 bp, Artificial Sequence
  Description of Artificial Sequence: Synthetic oligonucleotide
  Target: LAMA2; (-) strand; PAM type: YTN; PAM sequence: TTT
taatttctgttctctaggag

SEQ ID NO: 269480 - DNA, 20 bp, Artificial Sequence
  Description of Artificial Sequence: Synthetic oligonucleotide
  Target: LAMA2; (-) strand; PAM type: YTN; PAM sequence: CTA
attttaatttctgttctcta

SEQ ID NO: 269481 - DNA, 20 bp, Artificial Sequence
  Description of Artificial Sequence: Synthetic oligonucleotide
  Target: LAMA2; (-) strand; PAM type: YTN; PAM sequence: TTG
ccaacagatactaattttaa

SEQ ID NO: 269482 - DNA, 20 bp, Artificial Sequence
  Description of Artificial Sequence: Synthetic oligonucleotide
  Target: LAMA2; (-) strand; PAM type: YTN; PAM sequence: CTT
gccaacagatactaatttta

SEQ ID NO: 269483 - DNA, 20 bp, Artificial Sequence
  Description of Artificial Sequence: Synthetic oligonucleotide
  Target: LAMA2; (-) strand; PAM type: YTN; PAM sequence: TTA
tgaagtaatatcttgccaac

SEQ ID NO: 269484 - DNA, 20 bp, Artificial Sequence
  Description of Artificial Sequence: Synthetic oligonucleotide
  Target: LAMA2; (-) strand; PAM type: YTN; PAM sequence: TTT
atgaagtaatatcttgccaa

SEQ ID NO: 269485 - DNA, 20 bp, Artificial Sequence
  Description of Artificial Sequence: Synthetic oligonucleotide
  Target: LAMA2; (-) strand; PAM type: YTN; PAM sequence: TTT
tatgaagtaatatcttgcca

SEQ ID NO: 269486 - DNA, 20 bp, Artificial Sequence
  Description of Artificial Sequence: Synthetic oligonucleotide
  Target: LAMA2; (-) strand; PAM type: YTN; PAM sequence: TTT
ttatgaagtaatatcttgcc

SEQ ID NO: 269487 - DNA, 20 bp, Artificial Sequence
  Description of Artificial Sequence: Synthetic oligonucleotide
  Target: LAMA2; (-) strand; PAM type: YTN; PAM sequence: TTC
aggcaatttttatgaagtaa

SEQ ID NO: 269488 - DNA, 20 bp, Artificial Sequence
  Description of Artificial Sequence: Synthetic oligonucleotide
  Target: LAMA2; (-) strand; PAM type: YTN; PAM sequence: TTT
caggcaatttttatgaagta

SEQ ID NO: 269489 - DNA, 20 bp, Artificial Sequence
  Description of Artificial Sequence: Synthetic oligonucleotide
  Target: LAMA2; (-) strand; PAM type: YTN; PAM sequence: CTA
tttcaggcaatttttatgaa

SEQ ID NO: 269490 - DNA, 20 bp, Artificial Sequence
  Description of Artificial Sequence: Synthetic oligonucleotide
  Target: LAMA2; (-) strand; PAM type: YTN; PAM sequence: TTA
taaaatgctatttcaggcaa

SEQ ID NO: 269491 - DNA, 20 bp, Artificial Sequence
  Description of Artificial Sequence: Synthetic oligonucleotide
  Target: LAMA2; (-) strand; PAM type: YTN; PAM sequence: TTT
ataaaatgctatttcaggca

SEQ ID NO: 269492 - DNA, 20 bp, Artificial Sequence
  Description of Artificial Sequence: Synthetic oligonucleotide
  Target: LAMA2; (-) strand; PAM type: YTN; PAM sequence: TTG
atatttataaaatgctattt

SEQ ID NO: 269493 - DNA, 20 bp, Artificial Sequence
  Description of Artificial Sequence: Synthetic oligonucleotide
  Target: LAMA2; (-) strand; PAM type: YTN; PAM sequence: TTT
gatatttataaaatgctatt

SEQ ID NO: 269494 - DNA, 20 bp, Artificial Sequence
  Description of Artificial Sequence: Synthetic oligonucleotide
  Target: LAMA2; (-) strand; PAM type: YTN; PAM sequence: TTA
aaaataggcaacaccaattt

SEQ ID NO: 269495 - DNA, 20 bp, Artificial Sequence
  Description of Artificial Sequence: Synthetic oligonucleotide
  Target: LAMA2; (-) strand; PAM type: YTN; PAM sequence: CTA
tgcagtgattaaaaataggc

SEQ ID NO: 269496 - DNA, 20 bp, Artificial Sequence
  Description of Artificial Sequence: Synthetic oligonucleotide
  Target: LAMA2; (-) strand; PAM type: YTN; PAM sequence: CTG
atatatcccaaaaaccccac

SEQ ID NO: 269497 - DNA, 20 bp, Artificial Sequence
  Description of Artificial Sequence: Synthetic oligonucleotide
  Target: LAMA2; (-) strand; PAM type: YTN; PAM sequence: CTA
taaataataaaagctgatat

SEQ ID NO: 269498 - DNA, 20 bp, Artificial Sequence
  Description of Artificial Sequence: Synthetic oligonucleotide
  Target: LAMA2; (-) strand; PAM type: YTN; PAM sequence: TTG
tgactataaataataaaagc

SEQ ID NO: 269499 - DNA, 20 bp, Artificial Sequence
  Description of Artificial Sequence: Synthetic oligonucleotide
  Target: LAMA2; (-) strand; PAM type: YTN; PAM sequence: TTA
agtaaattgtgactataaat

SEQ ID NO: 269500 - DNA, 20 bp, Artificial Sequence
  Description of Artificial Sequence: Synthetic oligonucleotide
  Target: LAMA2; (-) strand; PAM type: YTN; PAM sequence: TTT
aagtaaattgtgactataaa

SEQ ID NO: 269501 - DNA, 20 bp, Artificial Sequence
  Description of Artificial Sequence: Synthetic oligonucleotide
  Target: LAMA2; (-) strand; PAM type: YTN; PAM sequence: TTA
gaatttaagtaaattgtgac

SEQ ID NO: 269502 - DNA, 20 bp, Artificial Sequence
  Description of Artificial Sequence: Synthetic oligonucleotide
  Target: LAMA2; (-) strand; PAM type: YTN; PAM sequence: TTA
aataaatatatgttagaatt

SEQ ID NO: 269503 - DNA, 20 bp, Artificial Sequence
  Description of Artificial Sequence: Synthetic oligonucleotide
  Target: LAMA2; (-) strand; PAM type: YTN; PAM sequence: TTT
aaataaatatatgttagaat

SEQ ID NO: 269504 - DNA, 20 bp, Artificial Sequence
  Description of Artificial Sequence: Synthetic oligonucleotide
  Target: LAMA2; (-) strand; PAM type: YTN; PAM sequence: TTT
taaataaatatatgttagaa

SEQ ID NO: 269505 - DNA, 20 bp, Artificial Sequence
  Description of Artificial Sequence: Synthetic oligonucleotide
  Target: LAMA2; (-) strand; PAM type: YTN; PAM sequence: TTA
ttttaaataaatatatgtta

SEQ ID NO: 269506 - DNA, 20 bp, Artificial Sequence
  Description of Artificial Sequence: Synthetic oligonucleotide
  Target: LAMA2; (-) strand; PAM type: YTN; PAM sequence: TTT
attttaaataaatatatgtt

SEQ ID NO: 269507 - DNA, 20 bp, Artificial Sequence
  Description of Artificial Sequence: Synthetic oligonucleotide
  Target: LAMA2; (-) strand; PAM type: YTN; PAM sequence: TTT
tattttaaataaatatatgt

SEQ ID NO: 269508 - DNA, 20 bp, Artificial Sequence
  Description of Artificial Sequence: Synthetic oligonucleotide
  Target: LAMA2; (-) strand; PAM type: YTN; PAM sequence: TTG
gcaagcaaagtgtatgtttt

SEQ ID NO: 269509 - DNA, 20 bp, Artificial Sequence
  Description of Artificial Sequence: Synthetic oligonucleotide
  Target: LAMA2; (-) strand; PAM type: YTN; PAM sequence: TTG
caaattggcaagcaaagtgt

SEQ ID NO: 269510 - DNA, 20 bp, Artificial Sequence
  Description of Artificial Sequence: Synthetic oligonucleotide
  Target: LAMA2; (-) strand; PAM type: YTN; PAM sequence: TTT
gcaaattggcaagcaaagtg

SEQ ID NO: 269511 - DNA, 20 bp, Artificial Sequence
  Description of Artificial Sequence: Synthetic oligonucleotide
  Target: LAMA2; (-) strand; PAM type: YTN; PAM sequence: TTT
tgcaaattggcaagcaaagt

SEQ ID NO: 269512 - DNA, 20 bp, Artificial Sequence
  Description of Artificial Sequence: Synthetic oligonucleotide
  Target: LAMA2; (-) strand; PAM type: YTN; PAM sequence: CTT
ttgcaaattggcaagcaaag

SEQ ID NO: 269513 - DNA, 20 bp, Artificial Sequence
  Description of Artificial Sequence: Synthetic oligonucleotide
  Target: LAMA2; (-) strand; PAM type: YTN; PAM sequence: TTC
atgatcacttttgcaaattg

SEQ ID NO: 269514 - DNA, 20 bp, Artificial Sequence
  Description of Artificial Sequence: Synthetic oligonucleotide
  Target: LAMA2; (-) strand; PAM type: YTN; PAM sequence: TTG
caagtagaaaacatagttca

SEQ ID NO: 269515 - DNA, 20 bp, Artificial Sequence
  Description of Artificial Sequence: Synthetic oligonucleotide
  Target: LAMA2; (-) strand; PAM type: YTN; PAM sequence: CTC
aggttgcaagtagaaaacat

SEQ ID NO: 269516 - DNA, 20 bp, Artificial Sequence
  Description of Artificial Sequence: Synthetic oligonucleotide
  Target: LAMA2; (-) strand; PAM type: YTN; PAM sequence: TTA
tctcaggttgcaagtagaaa

SEQ ID NO: 269517 - DNA, 20 bp, Artificial Sequence
  Description of Artificial Sequence: Synthetic oligonucleotide
  Target: LAMA2; (-) strand; PAM type: YTN; PAM sequence: CTT
atctcaggttgcaagtagaa

SEQ ID NO: 269518 - DNA, 20 bp, Artificial Sequence
  Description of Artificial Sequence: Synthetic oligonucleotide
  Target: LAMA2; (-) strand; PAM type: YTN; PAM sequence: CTA
ggcttatctcaggttgcaag

SEQ ID NO: 269519 - DNA, 20 bp, Artificial Sequence
  Description of Artificial Sequence: Synthetic oligonucleotide
  Target: LAMA2; (-) strand; PAM type: YTN; PAM sequence: TTA
gctaggcttatctcaggttg

SEQ ID NO: 269520 - DNA, 20 bp, Artificial Sequence
  Description of Artificial Sequence: Synthetic oligonucleotide
  Target: LAMA2; (-) strand; PAM type: YTN; PAM sequence: TTT
agctaggcttatctcaggtt

SEQ ID NO: 269521 - DNA, 20 bp, Artificial Sequence
  Description of Artificial Sequence: Synthetic oligonucleotide
  Target: LAMA2; (-) strand; PAM type: YTN; PAM sequence: TTA
ccacatttagctaggcttat

SEQ ID NO: 269522 - DNA, 20 bp, Artificial Sequence
  Description of Artificial Sequence: Synthetic oligonucleotide
  Target: LAMA2; (-) strand; PAM type: YTN; PAM sequence: TTA
aggaaaattaccacatttag

SEQ ID NO: 269523 - DNA, 20 bp, Artificial Sequence
  Description of Artificial Sequence: Synthetic oligonucleotide
  Target: LAMA2; (-) strand; PAM type: YTN; PAM sequence: TTA
cagagttaaggaaaattacc

SEQ ID NO: 269524 - DNA, 20 bp, Artificial Sequence
  Description of Artificial Sequence: Synthetic oligonucleotide
  Target: LAMA2; (-) strand; PAM type: YTN; PAM sequence: TTT
acagagttaaggaaaattac

SEQ ID NO: 269525 - DNA, 20 bp, Artificial Sequence
  Description of Artificial Sequence: Synthetic oligonucleotide
  Target: LAMA2; (-) strand; PAM type: YTN; PAM sequence: TTT
tacagagttaaggaaaatta

SEQ ID NO: 269526 - DNA, 20 bp, Artificial Sequence
  Description of Artificial Sequence: Synthetic oligonucleotide
  Target: LAMA2; (-) strand; PAM type: YTN; PAM sequence: TTG
ccaattttacagagttaagg

SEQ ID NO: 269527 - DNA, 20 bp, Artificial Sequence
  Description of Artificial Sequence: Synthetic oligonucleotide
  Target: LAMA2; (-) strand; PAM type: YTN; PAM sequence: TTG
gaagttgccaattttacaga

SEQ ID NO: 269528 - DNA, 20 bp, Artificial Sequence
  Description of Artificial Sequence: Synthetic oligonucleotide
  Target: LAMA2; (-) strand; PAM type: YTN; PAM sequence: TTC
accaagtggttggaagttgc

SEQ ID NO: 269529 - DNA, 20 bp, Artificial Sequence
  Description of Artificial Sequence: Synthetic oligonucleotide
  Target: LAMA2; (-) strand; PAM type: YTN; PAM sequence: TTT
caccaagtggttggaagttg

SEQ ID NO: 269530 - DNA, 20 bp, Artificial Sequence
  Description of Artificial Sequence: Synthetic oligonucleotide
  Target: LAMA2; (-) strand; PAM type: YTN; PAM sequence: TTC
cggtttcaccaagtggttgg

SEQ ID NO: 269531 - DNA, 20 bp, Artificial Sequence
  Description of Artificial Sequence: Synthetic oligonucleotide
  Target: LAMA2; (-) strand; PAM type: YTN; PAM sequence: CTT
ccggtttcaccaagtggttg

SEQ ID NO: 269532 - DNA, 20 bp, Artificial Sequence
  Description of Artificial Sequence: Synthetic oligonucleotide
  Target: LAMA2; (-) strand; PAM type: YTN; PAM sequence: TTC
agacttccggtttcaccaag

SEQ ID NO: 269533 - DNA, 20 bp, Artificial Sequence
  Description of Artificial Sequence: Synthetic oligonucleotide
  Target: LAMA2; (-) strand; PAM type: YTN; PAM sequence: CTT
cagacttccggtttcaccaa

SEQ ID NO: 269534 - DNA, 20 bp, Artificial Sequence
  Description of Artificial Sequence: Synthetic oligonucleotide
  Target: LAMA2; (-) strand; PAM type: YTN; PAM sequence: CTG
tagatcaagataggataaaa

SEQ ID NO: 269535 - DNA, 20 bp, Artificial Sequence
  Description of Artificial Sequence: Synthetic oligonucleotide
  Target: LAMA2; (-) strand; PAM type: YTN; PAM sequence: CTC
tgtagatcaagataggataa

SEQ ID NO: 269536 - DNA, 20 bp, Artificial Sequence
  Description of Artificial Sequence: Synthetic oligonucleotide
  Target: LAMA2; (-) strand; PAM type: YTN; PAM sequence: TTA
tatctctgtagatcaagata

SEQ ID NO: 269537 - DNA, 20 bp, Artificial Sequence
  Description of Artificial Sequence: Synthetic oligonucleotide
  Target: LAMA2; (-) strand; PAM type: YTN; PAM sequence: TTG
attatatctctgtagatcaa

SEQ ID NO: 269538 - DNA, 20 bp, Artificial Sequence
  Description of Artificial Sequence: Synthetic oligonucleotide
  Target: LAMA2; (-) strand; PAM type: YTN; PAM sequence: TTA
aaaacgacaatgttgattat

SEQ ID NO: 269539 - DNA, 20 bp, Artificial Sequence
  Description of Artificial Sequence: Synthetic oligonucleotide
  Target: LAMA2; (-) strand; PAM type: YTN; PAM sequence: CTA
ttaaaaacgacaatgttgat

SEQ ID NO: 269540 - DNA, 20 bp, Artificial Sequence
  Description of Artificial Sequence: Synthetic oligonucleotide
  Target: LAMA2; (-) strand; PAM type: YTN; PAM sequence: CTG
gctattaaaaacgacaatgt

SEQ ID NO: 269541 - DNA, 20 bp, Artificial Sequence
  Description of Artificial Sequence: Synthetic oligonucleotide
  Target: LAMA2; (-) strand; PAM type: YTN; PAM sequence: TTG
gtggcaactggctattaaaa

SEQ ID NO: 269542 - DNA, 20 bp, Artificial Sequence
  Description of Artificial Sequence: Synthetic oligonucleotide
  Target: LAMA2; (-) strand; PAM type: YTN; PAM sequence: TTT
ggtggcaactggctattaaa

SEQ ID NO: 269543 - DNA, 20 bp, Artificial Sequence
  Description of Artificial Sequence: Synthetic oligonucleotide
  Target: LAMA2; (-) strand; PAM type: YTN; PAM sequence: CTT
tggtggcaactggctattaa

SEQ ID NO: 269544 - DNA, 20 bp, Artificial Sequence
  Description of Artificial Sequence: Synthetic oligonucleotide
  Target: LAMA2; (-) strand; PAM type: YTN; PAM sequence: TTG
tgatcagatctttggtggca

SEQ ID NO: 269545 - DNA, 20 bp, Artificial Sequence
  Description of Artificial Sequence: Synthetic oligonucleotide
  Target: LAMA2; (-) strand; PAM type: YTN; PAM sequence: TTA
ttgtgatcagatctttggtg

SEQ ID NO: 269546 - DNA, 20 bp, Artificial Sequence
  Description of Artificial Sequence: Synthetic oligonucleotide
  Target: LAMA2; (-) strand; PAM type: YTN; PAM sequence: CTG
cattattgtgatcagatctt

SEQ ID NO: 269547 - DNA, 20 bp, Artificial Sequence
  Description of Artificial Sequence: Synthetic oligonucleotide
  Target: LAMA2; (-) strand; PAM type: YTN; PAM sequence: CTC
tgcattattgtgatcagatc

SEQ ID NO: 269548 - DNA, 20 bp, Artificial Sequence
  Description of Artificial Sequence: Synthetic oligonucleotide
  Target: LAMA2; (-) strand; PAM type: YTN; PAM sequence: CTA
gtgataatatataaaggtct

SEQ ID NO: 269549 - DNA, 20 bp, Artificial Sequence
  Description of Artificial Sequence: Synthetic oligonucleotide
  Target: LAMA2; (-) strand; PAM type: YTN; PAM sequence: TTC
tagtgataatatataaaggt

SEQ ID NO: 269550 - DNA, 20 bp, Artificial Sequence
  Description of Artificial Sequence: Synthetic oligonucleotide
  Target: LAMA2; (-) strand; PAM type: YTN; PAM sequence: TTA
taaatgtacaacagtgttct

SEQ ID NO: 269551 - DNA, 20 bp, Artificial Sequence
  Description of Artificial Sequence: Synthetic oligonucleotide
  Target: LAMA2; (-) strand; PAM type: YTN; PAM sequence: TTG
attataaatgtacaacagtg

SEQ ID NO: 269552 - DNA, 20 bp, Artificial Sequence
  Description of Artificial Sequence: Synthetic oligonucleotide
  Target: LAMA2; (-) strand; PAM type: YTN; PAM sequence: TTT
gattataaatgtacaacagt

SEQ ID NO: 269553 - DNA, 20 bp, Artificial Sequence
  Description of Artificial Sequence: Synthetic oligonucleotide
  Target: LAMA2; (-) strand; PAM type: YTN; PAM sequence: TTT
tgattataaatgtacaacag

SEQ ID NO: 269554 - DNA, 20 bp, Artificial Sequence
  Description of Artificial Sequence: Synthetic oligonucleotide
  Target: LAMA2; (-) strand; PAM type: YTN; PAM sequence: TTT
ttgattataaatgtacaaca

SEQ ID NO: 269555 - DNA, 20 bp, Artificial Sequence
  Description of Artificial Sequence: Synthetic oligonucleotide
  Target: LAMA2; (-) strand; PAM type: YTN; PAM sequence: TTA
atcatttttgattataaatg

SEQ ID NO: 269556 - DNA, 20 bp, Artificial Sequence
  Description of Artificial Sequence: Synthetic oligonucleotide
  Target: LAMA2; (-) strand; PAM type: YTN; PAM sequence: TTA
ttaatcatttttgattataa

SEQ ID NO: 269557 - DNA, 20 bp, Artificial Sequence
  Description of Artificial Sequence: Synthetic oligonucleotide
  Target: LAMA2; (-) strand; PAM type: YTN; PAM sequence: CTG
ccattattaatcatttttga

SEQ ID NO: 269558 - DNA, 20 bp, Artificial Sequence
  Description of Artificial Sequence: Synthetic oligonucleotide
  Target: LAMA2; (-) strand; PAM type: YTN; PAM sequence: CTC
ccatatatagggggcaatca

SEQ ID NO: 269559 - DNA, 20 bp, Artificial Sequence
  Description of Artificial Sequence: Synthetic oligonucleotide
  Target: LAMA2; (-) strand; PAM type: YTN; PAM sequence: CTG
ctcccatatatagggggcaa

SEQ ID NO: 269560 - DNA, 20 bp, Artificial Sequence
  Description of Artificial Sequence: Synthetic oligonucleotide
  Target: LAMA2; (-) strand; PAM type: YTN; PAM sequence: TTC
tgctcccatatatagggggc

SEQ ID NO: 269561 - DNA, 20 bp, Artificial Sequence
  Description of Artificial Sequence: Synthetic oligonucleotide
  Target: LAMA2; (-) strand; PAM type: YTN; PAM sequence: TTT
ctgctcccatatataggggg

SEQ ID NO: 269562 - DNA, 20 bp, Artificial Sequence
  Description of Artificial Sequence: Synthetic oligonucleotide
  Target: LAMA2; (-) strand; PAM type: YTN; PAM sequence: TTG
tttctgctcccatatatagg

SEQ ID NO: 269563 - DNA, 20 bp, Artificial Sequence
  Description of Artificial Sequence: Synthetic oligonucleotide
  Target: LAMA2; (-) strand; PAM type: YTN; PAM sequence: TTT
gtttctgctcccatatatag

SEQ ID NO: 269564 - DNA, 20 bp, Artificial Sequence
  Description of Artificial Sequence: Synthetic oligonucleotide
  Target: LAMA2; (-) strand; PAM type: YTN; PAM sequence: TTT
tgtttctgctcccatatata

SEQ ID NO: 269565 - DNA, 20 bp, Artificial Sequence
  Description of Artificial Sequence: Synthetic oligonucleotide
  Target: LAMA2; (-) strand; PAM type: YTN; PAM sequence: CTA
ttttgtttctgctcccatat

SEQ ID NO: 269566 - DNA, 20 bp, Artificial Sequence
  Description of Artificial Sequence: Synthetic oligonucleotide
  Target: LAMA2; (-) strand; PAM type: YTN; PAM sequence: TTC
tattttgtttctgctcccat

SEQ ID NO: 269567 - DNA, 20 bp, Artificial Sequence
  Description of Artificial Sequence: Synthetic oligonucleotide
  Target: LAMA2; (-) strand; PAM type: YTN; PAM sequence: TTA
cagtgataaccacattctat

SEQ ID NO: 269568 - DNA, 20 bp, Artificial Sequence
  Description of Artificial Sequence: Synthetic oligonucleotide
  Target: LAMA2; (-) strand; PAM type: YTN; PAM sequence: TTC
attacagtgataaccacatt

SEQ ID NO: 269569 - DNA, 20 bp, Artificial Sequence
  Description of Artificial Sequence: Synthetic oligonucleotide
  Target: LAMA2; (-) strand; PAM type: YTN; PAM sequence: TTT
cattacagtgataaccacat

SEQ ID NO: 269570 - DNA, 20 bp, Artificial Sequence
  Description of Artificial Sequence: Synthetic oligonucleotide
  Target: LAMA2; (-) strand; PAM type: YTN; PAM sequence: TTT
tcattacagtgataaccaca

SEQ ID NO: 269571 - DNA, 20 bp, Artificial Sequence
  Description of Artificial Sequence: Synthetic oligonucleotide
  Target: LAMA2; (-) strand; PAM type: YTN; PAM sequence: CTG
ttttcattacagtgataacc

SEQ ID NO: 269572 - DNA, 20 bp, Artificial Sequence
  Description of Artificial Sequence: Synthetic oligonucleotide
  Target: LAMA2; (-) strand; PAM type: YTN; PAM sequence: TTC
agaatagtaagtcctgtttt

SEQ ID NO: 269573 - DNA, 20 bp, Artificial Sequence
  Description of Artificial Sequence: Synthetic oligonucleotide
  Target: LAMA2; (-) strand; PAM type: YTN; PAM sequence: TTT
cagaatagtaagtcctgttt

SEQ ID NO: 269574 - DNA, 20 bp, Artificial Sequence
  Description of Artificial Sequence: Synthetic oligonucleotide
  Target: LAMA2; (-) strand; PAM type: YTN; PAM sequence: TTT
tcagaatagtaagtcctgtt

SEQ ID NO: 269575 - DNA, 20 bp, Artificial Sequence
  Description of Artificial Sequence: Synthetic oligonucleotide
  Target: LAMA2; (-) strand; PAM type: YTN; PAM sequence: TTT
ttcagaatagtaagtcctgt

SEQ ID NO: 269576 - DNA, 20 bp, Artificial Sequence
  Description of Artificial Sequence: Synthetic oligonucleotide
  Target: LAMA2; (-) strand; PAM type: YTN; PAM sequence: TTA
tcatcatttttcagaatagt

SEQ ID NO: 269577 - DNA, 20 bp, Artificial Sequence
  Description of Artificial Sequence: Synthetic oligonucleotide
  Target: LAMA2; (-) strand; PAM type: YTN; PAM sequence: TTT
atcatcatttttcagaatag

SEQ ID NO: 269578 - DNA, 20 bp, Artificial Sequence
  Description of Artificial Sequence: Synthetic oligonucleotide
  Target: LAMA2; (-) strand; PAM type: YTN; PAM sequence: CTG
atgtttatcatcatttttca

SEQ ID NO: 269579 - DNA, 20 bp, Artificial Sequence
  Description of Artificial Sequence: Synthetic oligonucleotide
  Target: LAMA2; (-) strand; PAM type: YTN; PAM sequence: CTG
gagatcaactgatgtttatc

SEQ ID NO: 269580 - DNA, 20 bp, Artificial Sequence
  Description of Artificial Sequence: Synthetic oligonucleotide
  Target: LAMA2; (-) strand; PAM type: YTN; PAM sequence: TTA
gatcagtaatcagcatctgg

SEQ ID NO: 269581 - DNA, 20 bp, Artificial Sequence
  Description of Artificial Sequence: Synthetic oligonucleotide
  Target: LAMA2; (-) strand; PAM type: YTN; PAM sequence: TTA
gggggtacaacaagcaaagt

SEQ ID NO: 269582 - DNA, 20 bp, Artificial Sequence
  Description of Artificial Sequence: Synthetic oligonucleotide
  Target: LAMA2; (-) strand; PAM type: YTN; PAM sequence: TTT
agggggtacaacaagcaaag

SEQ ID NO: 269583 - DNA, 20 bp, Artificial Sequence
  Description of Artificial Sequence: Synthetic oligonucleotide
  Target: LAMA2; (-) strand; PAM type: YTN; PAM sequence: TTG
agcagtgagtacgagcagag

SEQ ID NO: 269584 - DNA, 20 bp, Artificial Sequence
  Description of Artificial Sequence: Synthetic oligonucleotide
  Target: LAMA2; (-) strand; PAM type: YTN; PAM sequence: CTT
gagcagtgagtacgagcaga

SEQ ID NO: 269585 - DNA, 20 bp, Artificial Sequence
  Description of Artificial Sequence: Synthetic oligonucleotide
  Target: LAMA2; (-) strand; PAM type: YTN; PAM sequence: TTA
cttgagcagtgagtacgagc

SEQ ID NO: 269586 - DNA, 20 bp, Artificial Sequence
  Description of Artificial Sequence: Synthetic oligonucleotide
  Target: LAMA2; (-) strand; PAM type: YTN; PAM sequence: CTT
acttgagcagtgagtacgag

SEQ ID NO: 269587 - DNA, 20 bp, Artificial Sequence
  Description of Artificial Sequence: Synthetic oligonucleotide
  Target: LAMA2; (-) strand; PAM type: YTN; PAM sequence: TTC
aaataagaacttacttgagc

SEQ ID NO: 269588 - DNA, 20 bp, Artificial Sequence
  Description of Artificial Sequence: Synthetic oligonucleotide
  Target: LAMA2; (-) strand; PAM type: YTN; PAM sequence: TTT
caaataagaacttacttgag

SEQ ID NO: 269589 - DNA, 20 bp, Artificial Sequence
  Description of Artificial Sequence: Synthetic oligonucleotide
  Target: LAMA2; (-) strand; PAM type: YTN; PAM sequence: CTT
tcaaataagaacttacttga

SEQ ID NO: 269590 - DNA, 20 bp, Artificial Sequence
  Description of Artificial Sequence: Synthetic oligonucleotide
  Target: LAMA2; (-) strand; PAM type: YTN; PAM sequence: CTG
tcctttcaaataagaactta

SEQ ID NO: 269591 - DNA, 20 bp, Artificial Sequence
  Description of Artificial Sequence: Synthetic oligonucleotide
  Target: LAMA2; (-) strand; PAM type: YTN; PAM sequence: TTA
ctgtcctttcaaataagaac

SEQ ID NO: 269592 - DNA, 20 bp, Artificial Sequence
  Description of Artificial Sequence: Synthetic oligonucleotide
  Target: LAMA2; (-) strand; PAM type: YTN; PAM sequence: CTT
actgtcctttcaaataagaa

SEQ ID NO: 269593 - DNA, 20 bp, Artificial Sequence
  Description of Artificial Sequence: Synthetic oligonucleotide
  Target: LAMA2; (-) strand; PAM type: YTN; PAM sequence: CTA
tgacatacttactgtccttt

SEQ ID NO: 269594 - DNA, 20 bp, Artificial Sequence
  Description of Artificial Sequence: Synthetic oligonucleotide
  Target: LAMA2; (-) strand; PAM type: YTN; PAM sequence: CTA
cagaaaactatgacatactt

SEQ ID NO: 269595 - DNA, 20 bp, Artificial Sequence
  Description of Artificial Sequence: Synthetic oligonucleotide
  Target: LAMA2; (-) strand; PAM type: YTN; PAM sequence: TTA
gactacagaaaactatgaca

SEQ ID NO: 269596 - DNA, 20 bp, Artificial Sequence
  Description of Artificial Sequence: Synthetic oligonucleotide
  Target: LAMA2; (-) strand; PAM type: YTN; PAM sequence: CTT
agactacagaaaactatgac

SEQ ID NO: 269597 - DNA, 20 bp, Artificial Sequence
  Description of Artificial Sequence: Synthetic oligonucleotide
  Target: LAMA2; (-) strand; PAM type: YTN; PAM sequence: CTG
gatgtgaacaacatgacaca

SEQ ID NO: 269598 - DNA, 20 bp, Artificial Sequence
  Description of Artificial Sequence: Synthetic oligonucleotide
  Target: LAMA2; (-) strand; PAM type: YTN; PAM sequence: CTA
acacctggatgtgaacaaca

SEQ ID NO: 269599 - DNA, 20 bp, Artificial Sequence
  Description of Artificial Sequence: Synthetic oligonucleotide
  Target: LAMA2; (-) strand; PAM type: YTN; PAM sequence: TTG
cctaacacctggatgtgaac

SEQ ID NO: 269600 - DNA, 20 bp, Artificial Sequence
  Description of Artificial Sequence: Synthetic oligonucleotide
  Target: LAMA2; (-) strand; PAM type: YTN; PAM sequence: TTA
tagattgcctaacacctgga

SEQ ID NO: 269601 - DNA, 20 bp, Artificial Sequence
  Description of Artificial Sequence: Synthetic oligonucleotide
  Target: LAMA2; (-) strand; PAM type: YTN; PAM sequence: TTT
atagattgcctaacacctgg

SEQ ID NO: 269602 - DNA, 20 bp, Artificial Sequence
  Description of Artificial Sequence: Synthetic oligonucleotide
  Target: LAMA2; (-) strand; PAM type: YTN; PAM sequence: TTT
tatagattgcctaacacctg

SEQ ID NO: 269603 - DNA, 20 bp, Artificial Sequence
  Description of Artificial Sequence: Synthetic oligonucleotide
  Target: LAMA2; (-) strand; PAM type: YTN; PAM sequence: CTA
acaaaacaaatgagtagaag

SEQ ID NO: 269604 - DNA, 20 bp, Artificial Sequence
  Description of Artificial Sequence: Synthetic oligonucleotide
  Target: LAMA2; (-) strand; PAM type: YTN; PAM sequence: TTA
ctaacaaaacaaatgagtag

SEQ ID NO: 269605 - DNA, 20 bp, Artificial Sequence
  Description of Artificial Sequence: Synthetic oligonucleotide
  Target: LAMA2; (-) strand; PAM type: YTN; PAM sequence: TTT
actaacaaaacaaatgagta

SEQ ID NO: 269606 - DNA, 20 bp, Artificial Sequence
  Description of Artificial Sequence: Synthetic oligonucleotide
  Target: LAMA2; (-) strand; PAM type: YTN; PAM sequence: TTT
tactaacaaaacaaatgagt

SEQ ID NO: 269607 - DNA, 20 bp, Artificial Sequence
  Description of Artificial Sequence: Synthetic oligonucleotide
  Target: LAMA2; (-) strand; PAM type: YTN; PAM sequence: CTT
ttactaacaaaacaaatgag

SEQ ID NO: 269608 - DNA, 20 bp, Artificial Sequence
  Description of Artificial Sequence: Synthetic oligonucleotide
  Target: LAMA2; (-) strand; PAM type: YTN; PAM sequence: CTC
aaatatcttttactaacaaa

SEQ ID NO: 269609 - DNA, 20 bp, Artificial Sequence
  Description of Artificial Sequence: Synthetic oligonucleotide
  Target: LAMA2; (-) strand; PAM type: YTN; PAM sequence: TTG
acaacaagaaactcaaatat

SEQ ID NO: 269610 - DNA, 20 bp, Artificial Sequence
  Description of Artificial Sequence: Synthetic oligonucleotide
  Target: LAMA2; (-) strand; PAM type: YTN; PAM sequence: CTA
aggttgacaacaagaaactc

SEQ ID NO: 269611 - DNA, 20 bp, Artificial Sequence
  Description of Artificial Sequence: Synthetic oligonucleotide
  Target: LAMA2; (-) strand; PAM type: YTN; PAM sequence: CTG
gaccaatgctaaggttgaca

SEQ ID NO: 269612 - DNA, 20 bp, Artificial Sequence
  Description of Artificial Sequence: Synthetic oligonucleotide
  Target: LAMA2; (-) strand; PAM type: YTN; PAM sequence: TTA
gcctggaccaatgctaaggt

SEQ ID NO: 269613 - DNA, 20 bp, Artificial Sequence
  Description of Artificial Sequence: Synthetic oligonucleotide
  Target: LAMA2; (-) strand; PAM type: YTN; PAM sequence: TTG
ttagcctggaccaatgctaa

SEQ ID NO: 269614 - DNA, 20 bp, Artificial Sequence
  Description of Artificial Sequence: Synthetic oligonucleotide
  Target: LAMA2; (-) strand; PAM type: YTN; PAM sequence: TTC
cacacattgttagcctggac

SEQ ID NO: 269615 - DNA, 20 bp, Artificial Sequence
  Description of Artificial Sequence: Synthetic oligonucleotide
  Target: LAMA2; (-) strand; PAM type: YTN; PAM sequence: TTG
ccattccacacattgttagc

SEQ ID NO: 269616 - DNA, 20 bp, Artificial Sequence
  Description of Artificial Sequence: Synthetic oligonucleotide
  Target: LAMA2; (-) strand; PAM type: YTN; PAM sequence: CTA
gaatcacggtgatagttgcc

SEQ ID NO: 269617 - DNA, 20 bp, Artificial Sequence
  Description of Artificial Sequence: Synthetic oligonucleotide
  Target: LAMA2; (-) strand; PAM type: YTN; PAM sequence: CTA
ggaaaatcatctagaatcac

SEQ ID NO: 269618 - DNA, 20 bp, Artificial Sequence
  Description of Artificial Sequence: Synthetic oligonucleotide
  Target: LAMA2; (-) strand; PAM type: YTN; PAM sequence: CTA
acaactaggaaaatcatcta

SEQ ID NO: 269619 - DNA, 20 bp, Artificial Sequence
  Description of Artificial Sequence: Synthetic oligonucleotide
  Target: LAMA2; (-) strand; PAM type: YTN; PAM sequence: CTC
taacaactaggaaaatcatc

SEQ ID NO: 269620 - DNA, 20 bp, Artificial Sequence
  Description of Artificial Sequence: Synthetic oligonucleotide
  Target: LAMA2; (-) strand; PAM type: YTN; PAM sequence: CTG
atctctaacaactaggaaaa

SEQ ID NO: 269621 - DNA, 20 bp, Artificial Sequence
  Description of Artificial Sequence: Synthetic oligonucleotide
  Target: LAMA2; (-) strand; PAM type: YTN; PAM sequence: CTG
agactgatctctaacaacta

SEQ ID NO: 269622 - DNA, 20 bp, Artificial Sequence
  Description of Artificial Sequence: Synthetic oligonucleotide
  Target: LAMA2; (-) strand; PAM type: YTN; PAM sequence: CTC
aataatatacaaaccactga

SEQ ID NO: 269623 - DNA, 20 bp, Artificial Sequence
  Description of Artificial Sequence: Synthetic oligonucleotide
  Target: LAMA2; (-) strand; PAM type: YTN; PAM sequence: TTC
ctcaataatatacaaaccac

SEQ ID NO: 269624 - DNA, 20 bp, Artificial Sequence
  Description of Artificial Sequence: Synthetic oligonucleotide
  Target: LAMA2; (-) strand; PAM type: YTN; PAM sequence: CTT
cctcaataatatacaaacca

SEQ ID NO: 269625 - DNA, 20 bp, Artificial Sequence
  Description of Artificial Sequence: Synthetic oligonucleotide
  Target: LAMA2; (-) strand; PAM type: YTN; PAM sequence: CTA
gcagaacagcttcctcaata

SEQ ID NO: 269626 - DNA, 20 bp, Artificial Sequence
  Description of Artificial Sequence: Synthetic oligonucleotide
  Target: LAMA2; (-) strand; PAM type: YTN; PAM sequence: TTA
atcagctagcagaacagctt

SEQ ID NO: 269627 - DNA, 20 bp, Artificial Sequence
  Description of Artificial Sequence: Synthetic oligonucleotide
  Target: LAMA2; (-) strand; PAM type: YTN; PAM sequence: CTT
aatcagctagcagaacagct

SEQ ID NO: 269628 - DNA, 20 bp, Artificial Sequence
  Description of Artificial Sequence: Synthetic oligonucleotide
  Target: LAMA2; (-) strand; PAM type: YTN; PAM sequence: CTC
cttaatcagctagcagaaca

SEQ ID NO: 269629 - DNA, 20 bp, Artificial Sequence
  Description of Artificial Sequence: Synthetic oligonucleotide
  Target: LAMA2; (-) strand; PAM type: YTN; PAM sequence: CTG
tgcaactccttaatcagcta

SEQ ID NO: 269630 - DNA, 20 bp, Artificial Sequence
  Description of Artificial Sequence: Synthetic oligonucleotide
  Target: LAMA2; (-) strand; PAM type: YTN; PAM sequence: TTC
aactgtgcaactccttaatc

SEQ ID NO: 269631 - DNA, 20 bp, Artificial Sequence
  Description of Artificial Sequence: Synthetic oligonucleotide
  Target: LAMA2; (-) strand; PAM type: YTN; PAM sequence: CTA
tacgataattcaactgtgca

SEQ ID NO: 269632 - DNA, 20 bp, Artificial Sequence
  Description of Artificial Sequence: Synthetic oligonucleotide
  Target: LAMA2; (-) strand; PAM type: YTN; PAM sequence: CTC
tatacgataattcaactgtg

SEQ ID NO: 269633 - DNA, 20 bp, Artificial Sequence
  Description of Artificial Sequence: Synthetic oligonucleotide
  Target: LAMA2; (-) strand; PAM type: YTN; PAM sequence: CTG
tctctatacgataattcaac

SEQ ID NO: 269634 - DNA, 20 bp, Artificial Sequence
  Description of Artificial Sequence: Synthetic oligonucleotide
  Target: LAMA2; (-) strand; PAM type: YTN; PAM sequence: CTG
aaaacaaaggcaacagtgat

SEQ ID NO: 269635 - DNA, 20 bp, Artificial Sequence
  Description of Artificial Sequence: Synthetic oligonucleotide
  Target: LAMA2; (-) strand; PAM type: YTN; PAM sequence: TTG
ctgaaaacaaaggcaacagt

SEQ ID NO: 269636 - DNA, 20 bp, Artificial Sequence
  Description of Artificial Sequence: Synthetic oligonucleotide
  Target: LAMA2; (-) strand; PAM type: YTN; PAM sequence: CTT
gctgaaaacaaaggcaacag

SEQ ID NO: 269637 - DNA, 20 bp, Artificial Sequence
  Description of Artificial Sequence: Synthetic oligonucleotide
  Target: LAMA2; (-) strand; PAM type: YTN; PAM sequence: TTC
aaataaaacttgctgaaaac

SEQ ID NO: 269638 - DNA, 20 bp, Artificial Sequence
  Description of Artificial Sequence: Synthetic oligonucleotide
  Target: LAMA2; (-) strand; PAM type: YTN; PAM sequence: CTT
caaataaaacttgctgaaaa

SEQ ID NO: 269639 - DNA, 20 bp, Artificial Sequence
  Description of Artificial Sequence: Synthetic oligonucleotide
  Target: LAMA2; (-) strand; PAM type: YTN; PAM sequence: CTC
ttcaaataaaacttgctgaa

SEQ ID NO: 269640 - DNA, 20 bp, Artificial Sequence
  Description of Artificial Sequence: Synthetic oligonucleotide
  Target: LAMA2; (-) strand; PAM type: YTN; PAM sequence: TTA
ctcttcaaataaaacttgct

SEQ ID NO: 269641 - DNA, 20 bp, Artificial Sequence
  Description of Artificial Sequence: Synthetic oligonucleotide
  Target: LAMA2; (-) strand; PAM type: YTN; PAM sequence: TTT
actcttcaaataaaacttgc

SEQ ID NO: 269642 - DNA, 20 bp, Artificial Sequence
  Description of Artificial Sequence: Synthetic oligonucleotide
  Target: LAMA2; (-) strand; PAM type: YTN; PAM sequence: TTA
gtttactcttcaaataaaac

SEQ ID NO: 269643 - DNA, 20 bp, Artificial Sequence
  Description of Artificial Sequence: Synthetic oligonucleotide
  Target: LAMA2; (-) strand; PAM type: YTN; PAM sequence: TTT
agtttactcttcaaataaaa

SEQ ID NO: 269644 - DNA, 20 bp, Artificial Sequence
  Description of Artificial Sequence: Synthetic oligonucleotide
  Target: LAMA2; (-) strand; PAM type: YTN; PAM sequence: TTG
caatcaaagtagagtttagt

SEQ ID NO: 269645 - DNA, 20 bp, Artificial Sequence
  Description of Artificial Sequence: Synthetic oligonucleotide
  Target: LAMA2; (-) strand; PAM type: YTN; PAM sequence: TTG
ccagagtagaaattgcaatc

SEQ ID NO: 269646 - DNA, 20 bp, Artificial Sequence
  Description of Artificial Sequence: Synthetic oligonucleotide
  Target: LAMA2; (-) strand; PAM type: YTN; PAM sequence: CTT
gccagagtagaaattgcaat

SEQ ID NO: 269647 - DNA, 20 bp, Artificial Sequence
  Description of Artificial Sequence: Synthetic oligonucleotide
  Target: LAMA2; (-) strand; PAM type: YTN; PAM sequence: CTG
agccttgccagagtagaaat

SEQ ID NO: 269648 - DNA, 20 bp, Artificial Sequence
  Description of Artificial Sequence: Synthetic oligonucleotide
  Target: LAMA2; (-) strand; PAM type: YTN; PAM sequence: CTC
ctgagccttgccagagtaga

SEQ ID NO: 269649 - DNA, 20 bp, Artificial Sequence
  Description of Artificial Sequence: Synthetic oligonucleotide
  Target: LAMA2; (-) strand; PAM type: YTN; PAM sequence: TTC
aaggtcaataaaacctcctg

SEQ ID NO: 269650 - DNA, 20 bp, Artificial Sequence
  Description of Artificial Sequence: Synthetic oligonucleotide
  Target: LAMA2; (-) strand; PAM type: YTN; PAM sequence: TTT
caaggtcaataaaacctcct

SEQ ID NO: 269651 - DNA, 20 bp, Artificial Sequence
  Description of Artificial Sequence: Synthetic oligonucleotide
  Target: LAMA2; (-) strand; PAM type: YTN; PAM sequence: CTT
tcaaggtcaataaaacctcc

SEQ ID NO: 269652 - DNA, 20 bp, Artificial Sequence
  Description of Artificial Sequence: Synthetic oligonucleotide
  Target: LAMA2; (-) strand; PAM type: YTN; PAM sequence: TTG
tctttcaaggtcaataaaac

SEQ ID NO: 269653 - DNA, 20 bp, Artificial Sequence
  Description of Artificial Sequence: Synthetic oligonucleotide
  Target: LAMA2; (-) strand; PAM type: YTN; PAM sequence: TTT
gtctttcaaggtcaataaaa

SEQ ID NO: 269654 - DNA, 20 bp, Artificial Sequence
  Description of Artificial Sequence: Synthetic oligonucleotide
  Target: LAMA2; (-) strand; PAM type: YTN; PAM sequence: TTA
gtttgtctttcaaggtcaat

SEQ ID NO: 269655 - DNA, 20 bp, Artificial Sequence
  Description of Artificial Sequence: Synthetic oligonucleotide
  Target: LAMA2; (-) strand; PAM type: YTN; PAM sequence: TTT
agtttgtctttcaaggtcaa

SEQ ID NO: 269656 - DNA, 20 bp, Artificial Sequence
  Description of Artificial Sequence: Synthetic oligonucleotide
  Target: LAMA2; (-) strand; PAM type: YTN; PAM sequence: TTT
tagtttgtctttcaaggtca

SEQ ID NO: 269657 - DNA, 20 bp, Artificial Sequence
  Description of Artificial Sequence: Synthetic oligonucleotide
  Target: LAMA2; (-) strand; PAM type: YTN; PAM sequence: TTA
tgtgattttagtttgtcttt

SEQ ID NO: 269658 - DNA, 20 bp, Artificial Sequence
  Description of Artificial Sequence: Synthetic oligonucleotide
  Target: LAMA2; (-) strand; PAM type: YTN; PAM sequence: TTA
agattatgtgattttagttt

SEQ ID NO: 269659 - DNA, 20 bp, Artificial Sequence
  Description of Artificial Sequence: Synthetic oligonucleotide
  Target: LAMA2; (-) strand; PAM type: YTN; PAM sequence: TTT
aagattatgtgattttagtt

SEQ ID NO: 269660 - DNA, 20 bp, Artificial Sequence
  Description of Artificial Sequence: Synthetic oligonucleotide
  Target: LAMA2; (-) strand; PAM type: YTN; PAM sequence: CTT
taagattatgtgattttagt

SEQ ID NO: 269661 - DNA, 20 bp, Artificial Sequence
  Description of Artificial Sequence: Synthetic oligonucleotide
  Target: LAMA2; (-) strand; PAM type: YTN; PAM sequence: TTC
caactttaagattatgtgat

SEQ ID NO: 269662 - DNA, 20 bp, Artificial Sequence
  Description of Artificial Sequence: Synthetic oligonucleotide
  Target: LAMA2; (-) strand; PAM type: YTN; PAM sequence: CTT
ccaactttaagattatgtga

SEQ ID NO: 269663 - DNA, 20 bp, Artificial Sequence
  Description of Artificial Sequence: Synthetic oligonucleotide
  Target: LAMA2; (-) strand; PAM type: YTN; PAM sequence: TTC
ttccaactttaagattatgt

SEQ ID NO: 269664 - DNA, 20 bp, Artificial Sequence
  Description of Artificial Sequence: Synthetic oligonucleotide
  Target: LAMA2; (-) strand; PAM type: YTN; PAM sequence: TTT
cttccaactttaagattatg

SEQ ID NO: 269665 - DNA, 20 bp, Artificial Sequence
  Description of Artificial Sequence: Synthetic oligonucleotide
  Target: LAMA2; (-) strand; PAM type: YTN; PAM sequence: TTA
tttcttccaactttaagatt

SEQ ID NO: 269666 - DNA, 20 bp, Artificial Sequence
  Description of Artificial Sequence: Synthetic oligonucleotide
  Target: LAMA2; (-) strand; PAM type: YTN; PAM sequence: CTT
atttcttccaactttaagat

SEQ ID NO: 269667 - DNA, 20 bp, Artificial Sequence
  Description of Artificial Sequence: Synthetic oligonucleotide
  Target: LAMA2; (-) strand; PAM type: YTN; PAM sequence: TTA
cttatttcttccaactttaa

SEQ ID NO: 269668 - DNA, 20 bp, Artificial Sequence
  Description of Artificial Sequence: Synthetic oligonucleotide
  Target: LAMA2; (-) strand; PAM type: YTN; PAM sequence: TTT
acttatttcttccaacttta

SEQ ID NO: 269669 - DNA, 20 bp, Artificial Sequence
  Description of Artificial Sequence: Synthetic oligonucleotide
  Target: LAMA2; (-) strand; PAM type: YTN; PAM sequence: CTA
gtttacttatttcttccaac

SEQ ID NO: 269670 - DNA, 20 bp, Artificial Sequence
  Description of Artificial Sequence: Synthetic oligonucleotide
  Target: LAMA2; (-) strand; PAM type: YTN; PAM sequence: CTA
ggctagtttacttatttctt

SEQ ID NO: 269671 - DNA, 20 bp, Artificial Sequence
  Description of Artificial Sequence: Synthetic oligonucleotide
  Target: LAMA2; (-) strand; PAM type: YTN; PAM sequence: TTG
tggatgtcacagaaaaagag

SEQ ID NO: 269672 - DNA, 20 bp, Artificial Sequence
  Description of Artificial Sequence: Synthetic oligonucleotide
  Target: LAMA2; (-) strand; PAM type: YTN; PAM sequence: TTT
gtggatgtcacagaaaaaga

SEQ ID NO: 269673 - DNA, 20 bp, Artificial Sequence
  Description of Artificial Sequence: Synthetic oligonucleotide
  Target: LAMA2; (-) strand; PAM type: YTN; PAM sequence: TTT
tgtggatgtcacagaaaaag

SEQ ID NO: 269674 - DNA, 20 bp, Artificial Sequence
  Description of Artificial Sequence: Synthetic oligonucleotide
  Target: LAMA2; (-) strand; PAM type: YTN; PAM sequence: CTG
ttttgtggatgtcacagaaa

SEQ ID NO: 269675 - DNA, 20 bp, Artificial Sequence
  Description of Artificial Sequence: Synthetic oligonucleotide
  Target: LAMA2; (-) strand; PAM type: YTN; PAM sequence: CTG
tctgttttgtggatgtcaca

SEQ ID NO: 269676 - DNA, 20 bp, Artificial Sequence
  Description of Artificial Sequence: Synthetic oligonucleotide
  Target: LAMA2; (-) strand; PAM type: YTN; PAM sequence: TTA
ggatgctgtctgttttgtgg

SEQ ID NO: 269677 - DNA, 20 bp, Artificial Sequence
  Description of Artificial Sequence: Synthetic oligonucleotide
  Target: LAMA2; (-) strand; PAM type: YTN; PAM sequence: TTG
cattaggatgctgtctgttt

SEQ ID NO: 269678 - DNA, 20 bp, Artificial Sequence
  Description of Artificial Sequence: Synthetic oligonucleotide
  Target: LAMA2; (-) strand; PAM type: YTN; PAM sequence: CTT
gcattaggatgctgtctgtt

SEQ ID NO: 269679 - DNA, 20 bp, Artificial Sequence
  Description of Artificial Sequence: Synthetic oligonucleotide
  Target: LAMA2; (-) strand; PAM type: YTN; PAM sequence: TTC
cttgcattaggatgctgtct

SEQ ID NO: 269680 - DNA, 20 bp, Artificial Sequence
  Description of Artificial Sequence: Synthetic oligonucleotide
  Target: LAMA2; (-) strand; PAM type: YTN; PAM sequence: CTT
ccttgcattaggatgctgtc

SEQ ID NO: 269681 - DNA, 20 bp, Artificial Sequence
  Description of Artificial Sequence: Synthetic oligonucleotide
  Target: LAMA2; (-) strand; PAM type: YTN; PAM sequence: TTC
ataacaccatgcttccttgc

SEQ ID NO: 269682 - DNA, 20 bp, Artificial Sequence
  Description of Artificial Sequence: Synthetic oligonucleotide
  Target: LAMA2; (-) strand; PAM type: YTN; PAM sequence: CTT
cataacaccatgcttccttg

SEQ ID NO: 269683 - DNA, 20 bp, Artificial Sequence
  Description of Artificial Sequence: Synthetic oligonucleotide
  Target: LAMA2; (-) strand; PAM type: YTN; PAM sequence: CTG
tagccacttcataacaccat

SEQ ID NO: 269684 - DNA, 20 bp, Artificial Sequence
  Description of Artificial Sequence: Synthetic oligonucleotide
  Target: LAMA2; (-) strand; PAM type: YTN; PAM sequence: TTC
tgtagccacttcataacacc

SEQ ID NO: 269685 - DNA, 20 bp, Artificial Sequence
  Description of Artificial Sequence: Synthetic oligonucleotide
  Target: LAMA2; (-) strand; PAM type: YTN; PAM sequence: CTT
ctgtagccacttcataacac

SEQ ID NO: 269686 - DNA, 20 bp, Artificial Sequence
  Description of Artificial Sequence: Synthetic oligonucleotide
  Target: LAMA2; (-) strand; PAM type: YTN; PAM sequence: TTC
aaaccttctgtagccacttc

SEQ ID NO: 269687 - DNA, 20 bp, Artificial Sequence
  Description of Artificial Sequence: Synthetic oligonucleotide
  Target: LAMA2; (-) strand; PAM type: YTN; PAM sequence: TTT
caaaccttctgtagccactt

SEQ ID NO: 269688 - DNA, 20 bp, Artificial Sequence
  Description of Artificial Sequence: Synthetic oligonucleotide
  Target: LAMA2; (-) strand; PAM type: YTN; PAM sequence: CTA
ggtttcaaaccttctgtagc

SEQ ID NO: 269689 - DNA, 20 bp, Artificial Sequence
  Description of Artificial Sequence: Synthetic oligonucleotide
  Target: LAMA2; (-) strand; PAM type: YTN; PAM sequence: TTG
caagctaggtttcaaacctt

SEQ ID NO: 269690 - DNA, 20 bp, Artificial Sequence
  Description of Artificial Sequence: Synthetic oligonucleotide
  Target: LAMA2; (-) strand; PAM type: YTN; PAM sequence: TTA
aataatgtcacacaaattgc

SEQ ID NO: 269691 - DNA, 20 bp, Artificial Sequence
  Description of Artificial Sequence: Synthetic oligonucleotide
  Target: LAMA2; (-) strand; PAM type: YTN; PAM sequence: TTA
ggaaattaaataatgtcaca

SEQ ID NO: 269692 - DNA, 20 bp, Artificial Sequence
  Description of Artificial Sequence: Synthetic oligonucleotide
  Target: LAMA2; (-) strand; PAM type: YTN; PAM sequence: TTT
aggaaattaaataatgtcac

SEQ ID NO: 269693 - DNA, 20 bp, Artificial Sequence
  Description of Artificial Sequence: Synthetic oligonucleotide
  Target: LAMA2; (-) strand; PAM type: YTN; PAM sequence: TTA
cagaggatgaaaatgaggtt

SEQ ID NO: 269694 - DNA, 20 bp, Artificial Sequence
  Description of Artificial Sequence: Synthetic oligonucleotide
  Target: LAMA2; (-) strand; PAM type: YTN; PAM sequence: TTT
acagaggatgaaaatgaggt

SEQ ID NO: 269695 - DNA, 20 bp, Artificial Sequence
  Description of Artificial Sequence: Synthetic oligonucleotide
  Target: LAMA2; (-) strand; PAM type: YTN; PAM sequence: TTT
tacagaggatgaaaatgagg

SEQ ID NO: 269696 - DNA, 20 bp, Artificial Sequence
  Description of Artificial Sequence: Synthetic oligonucleotide
  Target: LAMA2; (-) strand; PAM type: YTN; PAM sequence: TTA
catccattttacagaggatg

SEQ ID NO: 269697 - DNA, 20 bp, Artificial Sequence
  Description of Artificial Sequence: Synthetic oligonucleotide
  Target: LAMA2; (-) strand; PAM type: YTN; PAM sequence: TTT
acatccattttacagaggat

SEQ ID NO: 269698 - DNA, 20 bp, Artificial Sequence
  Description of Artificial Sequence: Synthetic oligonucleotide
  Target: LAMA2; (-) strand; PAM type: YTN; PAM sequence: TTT
tacatccattttacagagga

SEQ ID NO: 269699 - DNA, 20 bp, Artificial Sequence
  Description of Artificial Sequence: Synthetic oligonucleotide
  Target: LAMA2; (-) strand; PAM type: YTN; PAM sequence: TTC
acatacatgtatgtagcatt

SEQ ID NO: 269700 - DNA, 20 bp, Artificial Sequence
  Description of Artificial Sequence: Synthetic oligonucleotide
  Target: LAMA2; (-) strand; PAM type: YTN; PAM sequence: CTT
cacatacatgtatgtagcat

SEQ ID NO: 269701 - DNA, 20 bp, Artificial Sequence
  Description of Artificial Sequence: Synthetic oligonucleotide
  Target: LAMA2; (-) strand; PAM type: YTN; PAM sequence: TTA
gatacttcacatacatgtat

SEQ ID NO: 269702 - DNA, 20 bp, Artificial Sequence
  Description of Artificial Sequence: Synthetic oligonucleotide
  Target: LAMA2; (-) strand; PAM type: YTN; PAM sequence: CTT
agatacttcacatacatgta

SEQ ID NO: 269703 - DNA, 20 bp, Artificial Sequence
  Description of Artificial Sequence: Synthetic oligonucleotide
  Target: LAMA2; (-) strand; PAM type: YTN; PAM sequence: TTA
tgcttagatacttcacatac

SEQ ID NO: 269704 - DNA, 20 bp, Artificial Sequence
  Description of Artificial Sequence: Synthetic oligonucleotide
  Target: LAMA2; (-) strand; PAM type: YTN; PAM sequence: CTA
ttatgcttagatacttcaca

SEQ ID NO: 269705 - DNA, 20 bp, Artificial Sequence
  Description of Artificial Sequence: Synthetic oligonucleotide
  Target: LAMA2; (-) strand; PAM type: YTN; PAM sequence: TTG
agcacctattatgcttagat

SEQ ID NO: 269706 - DNA, 20 bp, Artificial Sequence
  Description of Artificial Sequence: Synthetic oligonucleotide
  Target: LAMA2; (-) strand; PAM type: YTN; PAM sequence: TTA
ttgagcacctattatgctta

SEQ ID NO: 269707 - DNA, 20 bp, Artificial Sequence
  Description of Artificial Sequence: Synthetic oligonucleotide
  Target: LAMA2; (-) strand; PAM type: YTN; PAM sequence: TTT
attgagcacctattatgctt

SEQ ID NO: 269708 - DNA, 20 bp, Artificial Sequence
  Description of Artificial Sequence: Synthetic oligonucleotide
  Target: LAMA2; (-) strand; PAM type: YTN; PAM sequence: CTA
gaatttattgagcacctatt

SEQ ID NO: 269709 - DNA, 20 bp, Artificial Sequence
  Description of Artificial Sequence: Synthetic oligonucleotide
  Target: LAMA2; (-) strand; PAM type: YTN; PAM sequence: TTG
gggaaaaaaatggtcacata

SEQ ID NO: 269710 - DNA, 20 bp, Artificial Sequence
  Description of Artificial Sequence: Synthetic oligonucleotide
  Target: LAMA2; (-) strand; PAM type: YTN; PAM sequence: TTT
ggggaaaaaaatggtcacat

SEQ ID NO: 269711 - DNA, 20 bp, Artificial Sequence
  Description of Artificial Sequence: Synthetic oligonucleotide
  Target: LAMA2; (-) strand; PAM type: YTN; PAM sequence: CTT
tggggaaaaaaatggtcaca

SEQ ID NO: 269712 - DNA, 20 bp, Artificial Sequence
  Description of Artificial Sequence: Synthetic oligonucleotide
  Target: LAMA2; (-) strand; PAM type: YTN; PAM sequence: TTG
cacaaaacatcaggtctttg

SEQ ID NO: 269713 - DNA, 20 bp, Artificial Sequence
  Description of Artificial Sequence: Synthetic oligonucleotide
  Target: LAMA2; (-) strand; PAM type: YTN; PAM sequence: CTG
atgcgttgcacaaaacatca

SEQ ID NO: 269714 - DNA, 20 bp, Artificial Sequence
  Description of Artificial Sequence: Synthetic oligonucleotide
  Target: LAMA2; (-) strand; PAM type: YTN; PAM sequence: TTC
atcagaaactgatgcgttgc

SEQ ID NO: 269715 - DNA, 20 bp, Artificial Sequence
  Description of Artificial Sequence: Synthetic oligonucleotide
  Target: LAMA2; (-) strand; PAM type: YTN; PAM sequence: TTT
catcagaaactgatgcgttg

SEQ ID NO: 269716 - DNA, 20 bp, Artificial Sequence
  Description of Artificial Sequence: Synthetic oligonucleotide
  Target: LAMA2; (-) strand; PAM type: YTN; PAM sequence: CTA
aagaaaatatttcatcagaa

SEQ ID NO: 269717 - DNA, 20 bp, Artificial Sequence
  Description of Artificial Sequence: Synthetic oligonucleotide
  Target: LAMA2; (-) strand; PAM type: YTN; PAM sequence: CTA
aactaaagaaaatatttcat

SEQ ID NO: 269718 - DNA, 20 bp, Artificial Sequence
  Description of Artificial Sequence: Synthetic oligonucleotide
  Target: LAMA2; (-) strand; PAM type: YTN; PAM sequence: CTG
aaagtcagcctaaactaaag

SEQ ID NO: 269719 - DNA, 20 bp, Artificial Sequence
  Description of Artificial Sequence: Synthetic oligonucleotide
  Target: LAMA2; (-) strand; PAM type: YTN; PAM sequence: TTA
gagatagtaacaggaaactg

SEQ ID NO: 269720 - DNA, 20 bp, Artificial Sequence
  Description of Artificial Sequence: Synthetic oligonucleotide
  Target: LAMA2; (-) strand; PAM type: YTN; PAM sequence: CTA
gaattagagatagtaacagg

SEQ ID NO: 269721 - DNA, 20 bp, Artificial Sequence
  Description of Artificial Sequence: Synthetic oligonucleotide
  Target: LAMA2; (-) strand; PAM type: YTN; PAM sequence: TTG
aagaacctagaattagagat

SEQ ID NO: 269722 - DNA, 20 bp, Artificial Sequence
  Description of Artificial Sequence: Synthetic oligonucleotide
  Target: LAMA2; (-) strand; PAM type: YTN; PAM sequence: CTT
gaagaacctagaattagaga

SEQ ID NO: 269723 - DNA, 20 bp, Artificial Sequence
  Description of Artificial Sequence: Synthetic oligonucleotide
  Target: LAMA2; (-) strand; PAM type: YTN; PAM sequence: TTC
agtgacttgaagaacctaga

SEQ ID NO: 269724 - DNA, 20 bp, Artificial Sequence
  Description of Artificial Sequence: Synthetic oligonucleotide
  Target: LAMA2; (-) strand; PAM type: YTN; PAM sequence: TTT
cagtgacttgaagaacctag

SEQ ID NO: 269725 - DNA, 20 bp, Artificial Sequence
  Description of Artificial Sequence: Synthetic oligonucleotide
  Target: LAMA2; (-) strand; PAM type: YTN; PAM sequence: TTT
tcagtgacttgaagaaccta

SEQ ID NO: 269726 - DNA, 20 bp, Artificial Sequence
  Description of Artificial Sequence: Synthetic oligonucleotide
  Target: LAMA2; (-) strand; PAM type: YTN; PAM sequence: TTA
aagacaggagaaatgtaagg

SEQ ID NO: 269727 - DNA, 20 bp, Artificial Sequence
  Description of Artificial Sequence: Synthetic oligonucleotide
  Target: LAMA2; (-) strand; PAM type: YTN; PAM sequence: CTT
aaagacaggagaaatgtaag

SEQ ID NO: 269728 - DNA, 20 bp, Artificial Sequence
  Description of Artificial Sequence: Synthetic oligonucleotide
  Target: LAMA2; (-) strand; PAM type: YTN; PAM sequence: CTA
taaataatgcatgtgaaggg

SEQ ID NO: 269729 - DNA, 20 bp, Artificial Sequence
  Description of Artificial Sequence: Synthetic oligonucleotide
  Target: LAMA2; (-) strand; PAM type: YTN; PAM sequence: TTA
tgaatctataaataatgcat

SEQ ID NO: 269730 - DNA, 20 bp, Artificial Sequence
  Description of Artificial Sequence: Synthetic oligonucleotide
  Target: LAMA2; (-) strand; PAM type: YTN; PAM sequence: TTT
atgaatctataaataatgca

SEQ ID NO: 269731 - DNA, 20 bp, Artificial Sequence
  Description of Artificial Sequence: Synthetic oligonucleotide
  Target: LAMA2; (-) strand; PAM type: YTN; PAM sequence: TTA
cagatgagaaaaatagtcac

SEQ ID NO: 269732 - DNA, 20 bp, Artificial Sequence
  Description of Artificial Sequence: Synthetic oligonucleotide
  Target: LAMA2; (-) strand; PAM type: YTN; PAM sequence: TTT
acagatgagaaaaatagtca

SEQ ID NO: 269733 - DNA, 20 bp, Artificial Sequence
  Description of Artificial Sequence: Synthetic oligonucleotide
  Target: LAMA2; (-) strand; PAM type: YTN; PAM sequence: TTT
tacagatgagaaaaatagtc

SEQ ID NO: 269734 - DNA, 20 bp, Artificial Sequence
  Description of Artificial Sequence: Synthetic oligonucleotide
  Target: LAMA2; (-) strand; PAM type: YTN; PAM sequence: CTC
attttacagatgagaaaaat

SEQ ID NO: 269735 - DNA, 20 bp, Artificial Sequence
  Description of Artificial Sequence: Synthetic oligonucleotide
  Target: LAMA2; (-) strand; PAM type: YTN; PAM sequence: TTC
atatcctcattttacagatg

SEQ ID NO: 269736 - DNA, 20 bp, Artificial Sequence
  Description of Artificial Sequence: Synthetic oligonucleotide
  Target: LAMA2; (-) strand; PAM type: YTN; PAM sequence: CTA
tgaggtaagtaccattcata

SEQ ID NO: 269737 - DNA, 20 bp, Artificial Sequence
  Description of Artificial Sequence: Synthetic oligonucleotide
  Target: LAMA2; (-) strand; PAM type: YTN; PAM sequence: TTC
tatgaggtaagtaccattca

SEQ ID NO: 269738 - DNA, 20 bp, Artificial Sequence
  Description of Artificial Sequence: Synthetic oligonucleotide
  Target: LAMA2; (-) strand; PAM type: YTN; PAM sequence: TTA
aagcaattctatgaggtaag

SEQ ID NO: 269739 - DNA, 20 bp, Artificial Sequence
  Description of Artificial Sequence: Synthetic oligonucleotide
  Target: LAMA2; (-) strand; PAM type: YTN; PAM sequence: TTT
aaagcaattctatgaggtaa

SEQ ID NO: 269740 - DNA, 20 bp, Artificial Sequence
  Description of Artificial Sequence: Synthetic oligonucleotide
  Target: LAMA2; (-) strand; PAM type: YTN; PAM sequence: TTA
atatttaaagcaattctatg

SEQ ID NO: 269741 - DNA, 20 bp, Artificial Sequence
  Description of Artificial Sequence: Synthetic oligonucleotide
  Target: LAMA2; (-) strand; PAM type: YTN; PAM sequence: CTT
aatatttaaagcaattctat

SEQ ID NO: 269742 - DNA, 20 bp, Artificial Sequence
  Description of Artificial Sequence: Synthetic oligonucleotide
  Target: LAMA2; (-) strand; PAM type: YTN; PAM sequence: CTC
acttaatatttaaagcaatt

SEQ ID NO: 269743 - DNA, 20 bp, Artificial Sequence
  Description of Artificial Sequence: Synthetic oligonucleotide
  Target: LAMA2; (-) strand; PAM type: YTN; PAM sequence: TTA
tctcacttaatatttaaagc

SEQ ID NO: 269744 - DNA, 20 bp, Artificial Sequence
  Description of Artificial Sequence: Synthetic oligonucleotide
  Target: LAMA2; (-) strand; PAM type: YTN; PAM sequence: TTG
ccatcattatctcacttaat

SEQ ID NO: 269745 - DNA, 20 bp, Artificial Sequence
  Description of Artificial Sequence: Synthetic oligonucleotide
  Target: LAMA2; (-) strand; PAM type: YTN; PAM sequence: TTT
gccatcattatctcacttaa

SEQ ID NO: 269746 - DNA, 20 bp, Artificial Sequence
  Description of Artificial Sequence: Synthetic oligonucleotide
  Target: LAMA2; (-) strand; PAM type: YTN; PAM sequence: CTT
tgccatcattatctcactta

SEQ ID NO: 269747 - DNA, 20 bp, Artificial Sequence
  Description of Artificial Sequence: Synthetic oligonucleotide
  Target: LAMA2; (-) strand; PAM type: YTN; PAM sequence: TTA
tactttgccatcattatctc

SEQ ID NO: 269748 - DNA, 20 bp, Artificial Sequence
  Description of Artificial Sequence: Synthetic oligonucleotide
  Target: LAMA2; (-) strand; PAM type: YTN; PAM sequence: CTG
gcaatgtattatactttgcc

SEQ ID NO: 269749 - DNA, 20 bp, Artificial Sequence
  Description of Artificial Sequence: Synthetic oligonucleotide
  Target: LAMA2; (-) strand; PAM type: YTN; PAM sequence: CTA
catgactggcaatgtattat

SEQ ID NO: 269750 - DNA, 20 bp, Artificial Sequence
  Description of Artificial Sequence: Synthetic oligonucleotide
  Target: LAMA2; (-) strand; PAM type: YTN; PAM sequence: CTA
cacaacagtcactacatgac

SEQ ID NO: 269751 - DNA, 20 bp, Artificial Sequence
  Description of Artificial Sequence: Synthetic oligonucleotide
  Target: LAMA2; (-) strand; PAM type: YTN; PAM sequence: TTA
tctacacaacagtcactaca

SEQ ID NO: 269752 - DNA, 20 bp, Artificial Sequence
  Description of Artificial Sequence: Synthetic oligonucleotide
  Target: LAMA2; (-) strand; PAM type: YTN; PAM sequence: TTT
atctacacaacagtcactac

SEQ ID NO: 269753 - DNA, 20 bp, Artificial Sequence
  Description of Artificial Sequence: Synthetic oligonucleotide
  Target: LAMA2; (-) strand; PAM type: YTN; PAM sequence: TTT
tatctacacaacagtcacta

SEQ ID NO: 269754 - DNA, 20 bp, Artificial Sequence
  Description of Artificial Sequence: Synthetic oligonucleotide
  Target: LAMA2; (-) strand; PAM type: YTN; PAM sequence: TTT
ttatctacacaacagtcact

SEQ ID NO: 269755 - DNA, 20 bp, Artificial Sequence
  Description of Artificial Sequence: Synthetic oligonucleotide
  Target: LAMA2; (-) strand; PAM type: YTN; PAM sequence: CTA
taaataataatgggataata

SEQ ID NO: 269756 - DNA, 20 bp, Artificial Sequence
  Description of Artificial Sequence: Synthetic oligonucleotide
  Target: LAMA2; (-) strand; PAM type: YTN; PAM sequence: TTG
aaagtactataaataataat

SEQ ID NO: 269757 - DNA, 20 bp, Artificial Sequence
  Description of Artificial Sequence: Synthetic oligonucleotide
  Target: LAMA2; (-) strand; PAM type: YTN; PAM sequence: TTT
gaaagtactataaataataa

SEQ ID NO: 269758 - DNA, 20 bp, Artificial Sequence
  Description of Artificial Sequence: Synthetic oligonucleotide
  Target: LAMA2; (-) strand; PAM type: YTN; PAM sequence: CTT
tgaaagtactataaataata

SEQ ID NO: 269759 - DNA, 20 bp, Artificial Sequence
  Description of Artificial Sequence: Synthetic oligonucleotide
  Target: LAMA2; (-) strand; PAM type: YTN; PAM sequence: CTA
atggaaactttgaaagtact

SEQ ID NO: 269760 - DNA, 20 bp, Artificial Sequence
  Description of Artificial Sequence: Synthetic oligonucleotide
  Target: LAMA2; (-) strand; PAM type: YTN; PAM sequence: TTC
aaaacactaatggaaacttt

SEQ ID NO: 269761 - DNA, 20 bp, Artificial Sequence
  Description of Artificial Sequence: Synthetic oligonucleotide
  Target: LAMA2; (-) strand; PAM type: YTN; PAM sequence: CTT
caaaacactaatggaaactt

SEQ ID NO: 269762 - DNA, 20 bp, Artificial Sequence
  Description of Artificial Sequence: Synthetic oligonucleotide
  Target: LAMA2; (-) strand; PAM type: YTN; PAM sequence: CTC
ttcaaaacactaatggaaac

SEQ ID NO: 269763 - DNA, 20 bp, Artificial Sequence
  Description of Artificial Sequence: Synthetic oligonucleotide
  Target: LAMA2; (-) strand; PAM type: YTN; PAM sequence: TTC
aaagatggtgtaactcttca

SEQ ID NO: 269764 - DNA, 20 bp, Artificial Sequence
  Description of Artificial Sequence: Synthetic oligonucleotide
  Target: LAMA2; (-) strand; PAM type: YTN; PAM sequence: TTC
aatgtggttcaaagatggtg

SEQ ID NO: 269765 - DNA, 20 bp, Artificial Sequence
  Description of Artificial Sequence: Synthetic oligonucleotide
  Target: LAMA2; (-) strand; PAM type: YTN; PAM sequence: CTA
tatataatacatgggaaaac

SEQ ID NO: 269766 - DNA, 20 bp, Artificial Sequence
  Description of Artificial Sequence: Synthetic oligonucleotide
  Target: LAMA2; (-) strand; PAM type: YTN; PAM sequence: TTC
tatatataatacatgggaaa

SEQ ID NO: 269767 - DNA, 20 bp, Artificial Sequence
  Description of Artificial Sequence: Synthetic oligonucleotide
  Target: LAMA2; (-) strand; PAM type: YTN; PAM sequence: TTA
aataaaattctatatataat

SEQ ID NO: 269768 - DNA, 20 bp, Artificial Sequence
  Description of Artificial Sequence: Synthetic oligonucleotide
  Target: LAMA2; (-) strand; PAM type: YTN; PAM sequence: TTA
tatatattaaataaaattct

SEQ ID NO: 269769 - DNA, 20 bp, Artificial Sequence
  Description of Artificial Sequence: Synthetic oligonucleotide
  Target: LAMA2; (-) strand; PAM type: YTN; PAM sequence: TTT
atatatattaaataaaattc

SEQ ID NO: 269770 - DNA, 20 bp, Artificial Sequence
  Description of Artificial Sequence: Synthetic oligonucleotide
  Target: LAMA2; (-) strand; PAM type: YTN; PAM sequence: TTT
tatatatattaaataaaatt

SEQ ID NO: 269771 - DNA, 20 bp, Artificial Sequence
  Description of Artificial Sequence: Synthetic oligonucleotide
  Target: LAMA2; (-) strand; PAM type: YTN; PAM sequence: TTG
atatatgtgttttatatata

SEQ ID NO: 269772 - DNA, 20 bp, Artificial Sequence
  Description of Artificial Sequence: Synthetic oligonucleotide
  Target: LAMA2; (-) strand; PAM type: YTN; PAM sequence: TTA
aatattgatatatgtgtttt

SEQ ID NO: 269773 - DNA, 20 bp, Artificial Sequence
  Description of Artificial Sequence: Synthetic oligonucleotide
  Target: LAMA2; (-) strand; PAM type: YTN; PAM sequence: TTA
tatattaaatattgatatat

SEQ ID NO: 269774 - DNA, 20 bp, Artificial Sequence
  Description of Artificial Sequence: Synthetic oligonucleotide
  Target: LAMA2; (-) strand; PAM type: YTN; PAM sequence: TTT
atatattaaatattgatata

SEQ ID NO: 269775 - DNA, 20 bp, Artificial Sequence
  Description of Artificial Sequence: Synthetic oligonucleotide
  Target: LAMA2; (-) strand; PAM type: YTN; PAM sequence: TTT
tatatattaaatattgatat

SEQ ID NO: 269776 - DNA, 20 bp, Artificial Sequence
  Description of Artificial Sequence: Synthetic oligonucleotide
  Target: LAMA2; (-) strand; PAM type: YTN; PAM sequence: TTT
ttatatattaaatattgata

SEQ ID NO: 269777 - DNA, 20 bp, Artificial Sequence
  Description of Artificial Sequence: Synthetic oligonucleotide
  Target: LAMA2; (-) strand; PAM type: YTN; PAM sequence: TTA
tatatttttatatattaaat

SEQ ID NO: 269778 - DNA, 20 bp, Artificial Sequence
  Description of Artificial Sequence: Synthetic oligonucleotide
  Target: LAMA2; (-) strand; PAM type: YTN; PAM sequence: TTT
atatatttttatatattaaa

SEQ ID NO: 269779 - DNA, 20 bp, Artificial Sequence
  Description of Artificial Sequence: Synthetic oligonucleotide
  Target: LAMA2; (-) strand; PAM type: YTN; PAM sequence: TTT
tatatatttttatatattaa

SEQ ID NO: 269780 - DNA, 20 bp, Artificial Sequence
  Description of Artificial Sequence: Synthetic oligonucleotide
  Target: LAMA2; (-) strand; PAM type: YTN; PAM sequence: TTA
tatgtatatattttatatat

SEQ ID NO: 269781 - DNA, 20 bp, Artificial Sequence
  Description of Artificial Sequence: Synthetic oligonucleotide
  Target: LAMA2; (-) strand; PAM type: YTN; PAM sequence: TTT
atatgtatatattttatata

SEQ ID NO: 269782 - DNA, 20 bp, Artificial Sequence
  Description of Artificial Sequence: Synthetic oligonucleotide
  Target: LAMA2; (-) strand; PAM type: YTN; PAM sequence: TTT
tatatgtatatattttatat

SEQ ID NO: 269783 - DNA, 20 bp, Artificial Sequence
  Description of Artificial Sequence: Synthetic oligonucleotide
  Target: LAMA2; (-) strand; PAM type: YTN; PAM sequence: TTA
tgatatgtgttttatatgta

SEQ ID NO: 269784 - DNA, 20 bp, Artificial Sequence
  Description of Artificial Sequence: Synthetic oligonucleotide
  Target: LAMA2; (-) strand; PAM type: YTN; PAM sequence: TTT
atgatatgtgttttatatgt

SEQ ID NO: 269785 - DNA, 20 bp, Artificial Sequence
  Description of Artificial Sequence: Synthetic oligonucleotide
  Target: LAMA2; (-) strand; PAM type: YTN; PAM sequence: TTT
tatgatatgtgttttatatg

SEQ ID NO: 269786 - DNA, 20 bp, Artificial Sequence
  Description of Artificial Sequence: Synthetic oligonucleotide
  Target: LAMA2; (-) strand; PAM type: YTN; PAM sequence: TTA
tatatatgttttatgatatg

SEQ ID NO: 269787 - DNA, 20 bp, Artificial Sequence
  Description of Artificial Sequence: Synthetic oligonucleotide
  Target: LAMA2; (-) strand; PAM type: YTN; PAM sequence: TTT
atatatatgttttatgatat

SEQ ID NO: 269788 - DNA, 20 bp, Artificial Sequence
  Description of Artificial Sequence: Synthetic oligonucleotide
  Target: LAMA2; (-) strand; PAM type: YTN; PAM sequence: TTT
tatatatatgttttatgata

SEQ ID NO: 269789 - DNA, 20 bp, Artificial Sequence
  Description of Artificial Sequence: Synthetic oligonucleotide
  Target: LAMA2; (-) strand; PAM type: YTN; PAM sequence: TTA
tgttttatatatatgtttta

SEQ ID NO: 269790 - DNA, 20 bp, Artificial Sequence
  Description of Artificial Sequence: Synthetic oligonucleotide
  Target: LAMA2; (-) strand; PAM type: YTN; PAM sequence: TTT
atgttttatatatatgtttt

SEQ ID NO: 269791 - DNA, 20 bp, Artificial Sequence
  Description of Artificial Sequence: Synthetic oligonucleotide
  Target: LAMA2; (-) strand; PAM type: YTN; PAM sequence: TTG
tcgacataccaagtaacgat

SEQ ID NO: 269792 - DNA, 20 bp, Artificial Sequence
  Description of Artificial Sequence: Synthetic oligonucleotide
  Target: LAMA2; (-) strand; PAM type: YTN; PAM sequence: TTT
gtcgacataccaagtaacga

SEQ ID NO: 269793 - DNA, 20 bp, Artificial Sequence
  Description of Artificial Sequence: Synthetic oligonucleotide
  Target: LAMA2; (-) strand; PAM type: YTN; PAM sequence: CTG
atgaatttgtcgacatacca

SEQ ID NO: 269794 - DNA, 20 bp, Artificial Sequence
  Description of Artificial Sequence: Synthetic oligonucleotide
  Target: LAMA2; (-) strand; PAM type: YTN; PAM sequence: CTG
agactgatgaatttgtcgac

SEQ ID NO: 269795 - DNA, 20 bp, Artificial Sequence
  Description of Artificial Sequence: Synthetic oligonucleotide
  Target: LAMA2; (-) strand; PAM type: YTN; PAM sequence: CTC
agctgagactgatgaatttg

SEQ ID NO: 269796 - DNA, 20 bp, Artificial Sequence
  Description of Artificial Sequence: Synthetic oligonucleotide
  Target: LAMA2; (-) strand; PAM type: YTN; PAM sequence: CTG
tagacctcagctgagactga

SEQ ID NO: 269797 - DNA, 20 bp, Artificial Sequence
  Description of Artificial Sequence: Synthetic oligonucleotide
  Target: LAMA2; (-) strand; PAM type: YTN; PAM sequence: TTG
aatagagaggaaagctgtag

SEQ ID NO: 269798 - DNA, 20 bp, Artificial Sequence
  Description of Artificial Sequence: Synthetic oligonucleotide
  Target: LAMA2; (-) strand; PAM type: YTN; PAM sequence: TTT
gaatagagaggaaagctgta

SEQ ID NO: 269799 - DNA, 20 bp, Artificial Sequence
  Description of Artificial Sequence: Synthetic oligonucleotide
  Target: LAMA2; (-) strand; PAM type: YTN; PAM sequence: CTT
tgaatagagaggaaagctgt

SEQ ID NO: 269800 - DNA, 20 bp, Artificial Sequence
  Description of Artificial Sequence: Synthetic oligonucleotide
  Target: LAMA2; (-) strand; PAM type: YTN; PAM sequence: TTC
tttgaatagagaggaaagct

SEQ ID NO: 269801 - DNA, 20 bp, Artificial Sequence
  Description of Artificial Sequence: Synthetic oligonucleotide
  Target: LAMA2; (-) strand; PAM type: YTN; PAM sequence: TTT
ctttgaatagagaggaaagc

SEQ ID NO: 269802 - DNA, 20 bp, Artificial Sequence
  Description of Artificial Sequence: Synthetic oligonucleotide
  Target: LAMA2; (-) strand; PAM type: YTN; PAM sequence: CTG
tcatttctttgaatagagag

SEQ ID NO: 269803 - DNA, 20 bp, Artificial Sequence
  Description of Artificial Sequence: Synthetic oligonucleotide
  Target: LAMA2; (-) strand; PAM type: YTN; PAM sequence: TTA
acctgtcatttctttgaata

SEQ ID NO: 269804 - DNA, 20 bp, Artificial Sequence
  Description of Artificial Sequence: Synthetic oligonucleotide
  Target: LAMA2; (-) strand; PAM type: YTN; PAM sequence: TTT
aacctgtcatttctttgaat

SEQ ID NO: 269805 - DNA, 20 bp, Artificial Sequence
  Description of Artificial Sequence: Synthetic oligonucleotide
  Target: LAMA2; (-) strand; PAM type: YTN; PAM sequence: TTT
taacctgtcatttctttgaa

SEQ ID NO: 269806 - DNA, 20 bp, Artificial Sequence
  Description of Artificial Sequence: Synthetic oligonucleotide
  Target: LAMA2; (-) strand; PAM type: YTN; PAM sequence: CTT
ttaacctgtcatttctttga

SEQ ID NO: 269807 - DNA, 20 bp, Artificial Sequence
  Description of Artificial Sequence: Synthetic oligonucleotide
  Target: LAMA2; (-) strand; PAM type: YTN; PAM sequence: TTA
agaagaccttttaacctgtc

SEQ ID NO: 269808 - DNA, 20 bp, Artificial Sequence
  Description of Artificial Sequence: Synthetic oligonucleotide
  Target: LAMA2; (-) strand; PAM type: YTN; PAM sequence: TTC
cagagtcattaagaagacct

SEQ ID NO: 269809 - DNA, 20 bp, Artificial Sequence
  Description of Artificial Sequence: Synthetic oligonucleotide
  Target: LAMA2; (-) strand; PAM type: YTN; PAM sequence: TTG
attccagagtcattaagaag

SEQ ID NO: 269810 - DNA, 20 bp, Artificial Sequence
  Description of Artificial Sequence: Synthetic oligonucleotide
  Target: LAMA2; (-) strand; PAM type: YTN; PAM sequence: TTT
gattccagagtcattaagaa

SEQ ID NO: 269811 - DNA, 20 bp, Artificial Sequence
  Description of Artificial Sequence: Synthetic oligonucleotide
  Target: LAMA2; (-) strand; PAM type: YTN; PAM sequence: CTC
aaataaaaatttgattccag

SEQ ID NO: 269812 - DNA, 20 bp, Artificial Sequence
  Description of Artificial Sequence: Synthetic oligonucleotide
  Target: LAMA2; (-) strand; PAM type: YTN; PAM sequence: TTC
tcaaataaaaatttgattcc

SEQ ID NO: 269813 - DNA, 20 bp, Artificial Sequence
  Description of Artificial Sequence: Synthetic oligonucleotide
  Target: LAMA2; (-) strand; PAM type: YTN; PAM sequence: CTT
ctcaaataaaaatttgattc

SEQ ID NO: 269814 - DNA, 20 bp, Artificial Sequence
  Description of Artificial Sequence: Synthetic oligonucleotide
  Target: LAMA2; (-) strand; PAM type: YTN; PAM sequence: TTA
aaataaatatcttctcaaat

SEQ ID NO: 269815 - DNA, 20 bp, Artificial Sequence
  Description of Artificial Sequence: Synthetic oligonucleotide
  Target: LAMA2; (-) strand; PAM type: YTN; PAM sequence: TTT
aaaataaatatcttctcaaa

SEQ ID NO: 269816 - DNA, 20 bp, Artificial Sequence
  Description of Artificial Sequence: Synthetic oligonucleotide
  Target: LAMA2; (-) strand; PAM type: YTN; PAM sequence: TTT
taaaataaatatcttctcaa

SEQ ID NO: 269817 - DNA, 20 bp, Artificial Sequence
  Description of Artificial Sequence: Synthetic oligonucleotide
  Target: LAMA2; (-) strand; PAM type: YTN; PAM sequence: CTA
ttttaaaataaatatcttct

SEQ ID NO: 269818 - DNA, 20 bp, Artificial Sequence
  Description of Artificial Sequence: Synthetic oligonucleotide
  Target: LAMA2; (-) strand; PAM type: YTN; PAM sequence: TTC
tattttaaaataaatatctt

SEQ ID NO: 269819 - DNA, 20 bp, Artificial Sequence
  Description of Artificial Sequence: Synthetic oligonucleotide
  Target: LAMA2; (-) strand; PAM type: YTN; PAM sequence: TTA
gtcattctattttaaaataa

SEQ ID NO: 269820 - DNA, 20 bp, Artificial Sequence
  Description of Artificial Sequence: Synthetic oligonucleotide
  Target: LAMA2; (-) strand; PAM type: YTN; PAM sequence: TTT
agtcattctattttaaaata

SEQ ID NO: 269821 - DNA, 20 bp, Artificial Sequence
  Description of Artificial Sequence: Synthetic oligonucleotide
  Target: LAMA2; (-) strand; PAM type: YTN; PAM sequence: TTA
agatgtatttagtcattcta

SEQ ID NO: 269822 - DNA, 20 bp, Artificial Sequence
  Description of Artificial Sequence: Synthetic oligonucleotide
  Target: LAMA2; (-) strand; PAM type: YTN; PAM sequence: TTA
ttaagatgtatttagtcatt

SEQ ID NO: 269823 - DNA, 20 bp, Artificial Sequence
  Description of Artificial Sequence: Synthetic oligonucleotide
  Target: LAMA2; (-) strand; PAM type: YTN; PAM sequence: CTT
attaagatgtatttagtcat

SEQ ID NO: 269824 - DNA, 20 bp, Artificial Sequence
  Description of Artificial Sequence: Synthetic oligonucleotide
  Target: LAMA2; (-) strand; PAM type: YTN; PAM sequence: TTA
gggcttattaagatgtattt

SEQ ID NO: 269825 - DNA, 20 bp, Artificial Sequence
  Description of Artificial Sequence: Synthetic oligonucleotide
  Target: LAMA2; (-) strand; PAM type: YTN; PAM sequence: TTT
agggcttattaagatgtatt

SEQ ID NO: 269826 - DNA, 20 bp, Artificial Sequence
  Description of Artificial Sequence: Synthetic oligonucleotide
  Target: LAMA2; (-) strand; PAM type: YTN; PAM sequence: TTA
gcatatatttagggcttatt

SEQ ID NO: 269827 - DNA, 20 bp, Artificial Sequence
  Description of Artificial Sequence: Synthetic oligonucleotide
  Target: LAMA2; (-) strand; PAM type: YTN; PAM sequence: TTA
cattagcatatatttagggc

SEQ ID NO: 269828 - DNA, 20 bp, Artificial Sequence
  Description of Artificial Sequence: Synthetic oligonucleotide
  Target: LAMA2; (-) strand; PAM type: YTN; PAM sequence: TTT
acattagcatatatttaggg

SEQ ID NO: 269829 - DNA, 20 bp, Artificial Sequence
  Description of Artificial Sequence: Synthetic oligonucleotide
  Target: LAMA2; (-) strand; PAM type: YTN; PAM sequence: TTT
tacattagcatatatttagg

SEQ ID NO: 269830 - DNA, 20 bp, Artificial Sequence
  Description of Artificial Sequence: Synthetic oligonucleotide
  Target: LAMA2; (-) strand; PAM type: YTN; PAM sequence: CTT
ttacattagcatatatttag

SEQ ID NO: 269831 - DNA, 20 bp, Artificial Sequence
  Description of Artificial Sequence: Synthetic oligonucleotide
  Target: LAMA2; (-) strand; PAM type: YTN; PAM sequence: TTC
aaaaagaaacttttacatta

SEQ ID NO: 269832 - DNA, 20 bp, Artificial Sequence
  Description of Artificial Sequence: Synthetic oligonucleotide
  Target: LAMA2; (-) strand; PAM type: YTN; PAM sequence: CTT
caaaaagaaacttttacatt

SEQ ID NO: 269833 - DNA, 20 bp, Artificial Sequence
  Description of Artificial Sequence: Synthetic oligonucleotide
  Target: LAMA2; (-) strand; PAM type: YTN; PAM sequence: TTC
cccttcaaaaagaaactttt

SEQ ID NO: 269834 - DNA, 20 bp, Artificial Sequence
  Description of Artificial Sequence: Synthetic oligonucleotide
  Target: LAMA2; (-) strand; PAM type: YTN; PAM sequence: TTT
ccccttcaaaaagaaacttt

SEQ ID NO: 269835 - DNA, 20 bp, Artificial Sequence
  Description of Artificial Sequence: Synthetic oligonucleotide
  Target: LAMA2; (-) strand; PAM type: YTN; PAM sequence: TTT
tccccttcaaaaagaaactt

SEQ ID NO: 269836 - DNA, 20 bp, Artificial Sequence
  Description of Artificial Sequence: Synthetic oligonucleotide
  Target: LAMA2; (-) strand; PAM type: YTN; PAM sequence: TTT
ttccccttcaaaaagaaact

SEQ ID NO: 269837 - DNA, 20 bp, Artificial Sequence
  Description of Artificial Sequence: Synthetic oligonucleotide
  Target: LAMA2; (-) strand; PAM type: YTN; PAM sequence: CTT
tttccccttcaaaaagaaac

SEQ ID NO: 269838 - DNA, 20 bp, Artificial Sequence
  Description of Artificial Sequence: Synthetic oligonucleotide
  Target: LAMA2; (-) strand; PAM type: YTN; PAM sequence: TTC
cctttttccccttcaaaaag

SEQ ID NO: 269839 - DNA, 20 bp, Artificial Sequence
  Description of Artificial Sequence: Synthetic oligonucleotide
  Target: LAMA2; (-) strand; PAM type: YTN; PAM sequence: CTT
ccctttttccccttcaaaaa

SEQ ID NO: 269840 - DNA, 20 bp, Artificial Sequence
  Description of Artificial Sequence: Synthetic oligonucleotide
  Target: LAMA2; (-) strand; PAM type: YTN; PAM sequence: CTC
acttccctttttccccttca

SEQ ID NO: 269841 - DNA, 20 bp, Artificial Sequence
  Description of Artificial Sequence: Synthetic oligonucleotide
  Target: LAMA2; (-) strand; PAM type: YTN; PAM sequence: TTC
tcacttccctttttcccctt

SEQ ID NO: 269842 - DNA, 20 bp, Artificial Sequence
  Description of Artificial Sequence: Synthetic oligonucleotide
  Target: LAMA2; (-) strand; PAM type: YTN; PAM sequence: TTT
ctcacttccctttttcccct

SEQ ID NO: 269843 - DNA, 20 bp, Artificial Sequence
  Description of Artificial Sequence: Synthetic oligonucleotide
  Target: LAMA2; (-) strand; PAM type: YTN; PAM sequence: CTA
tttctcacttccctttttcc

SEQ ID NO: 269844 - DNA, 20 bp, Artificial Sequence
  Description of Artificial Sequence: Synthetic oligonucleotide
  Target: LAMA2; (-) strand; PAM type: YTN; PAM sequence: TTC
tatttctcacttcccttttt

SEQ ID NO: 269845 - DNA, 20 bp, Artificial Sequence
  Description of Artificial Sequence: Synthetic oligonucleotide
  Target: LAMA2; (-) strand; PAM type: YTN; PAM sequence: TTT
ctatttctcacttccctttt

SEQ ID NO: 269846 - DNA, 20 bp, Artificial Sequence
  Description of Artificial Sequence: Synthetic oligonucleotide
  Target: LAMA2; (-) strand; PAM type: YTN; PAM sequence: TTT
tctatttctcacttcccttt

SEQ ID NO: 269847 - DNA, 20 bp, Artificial Sequence
  Description of Artificial Sequence: Synthetic oligonucleotide
  Target: LAMA2; (-) strand; PAM type: YTN; PAM sequence: CTG
aattttctatttctcacttc

SEQ ID NO: 269848 - DNA, 20 bp, Artificial Sequence
  Description of Artificial Sequence: Synthetic oligonucleotide
  Target: LAMA2; (-) strand; PAM type: YTN; PAM sequence: CTG
gatctgaattttctatttct

SEQ ID NO: 269849 - DNA, 20 bp, Artificial Sequence
  Description of Artificial Sequence: Synthetic oligonucleotide
  Target: LAMA2; (-) strand; PAM type: YTN; PAM sequence: TTC
cctggatctgaattttctat

SEQ ID NO: 269850 - DNA, 20 bp, Artificial Sequence
  Description of Artificial Sequence: Synthetic oligonucleotide
  Target: LAMA2; (-) strand; PAM type: YTN; PAM sequence: TTG
acggttccctggatctgaat

SEQ ID NO: 269851 - DNA, 20 bp, Artificial Sequence
  Description of Artificial Sequence: Synthetic oligonucleotide
  Target: LAMA2; (-) strand; PAM type: YTN; PAM sequence: CTA
gatgaatgccattgacggtt

SEQ ID NO: 269852 - DNA, 20 bp, Artificial Sequence
  Description of Artificial Sequence: Synthetic oligonucleotide
  Target: LAMA2; (-) strand; PAM type: YTN; PAM sequence: CTC
ctagatgaatgccattgacg

SEQ ID NO: 269853 - DNA, 20 bp, Artificial Sequence
  Description of Artificial Sequence: Synthetic oligonucleotide
  Target: LAMA2; (-) strand; PAM type: YTN; PAM sequence: CTC
tcctagatgaatgccattga

SEQ ID NO: 269854 - DNA, 20 bp, Artificial Sequence
  Description of Artificial Sequence: Synthetic oligonucleotide
  Target: LAMA2; (-) strand; PAM type: YTN; PAM sequence: TTA
actctcctagatgaatgcca

SEQ ID NO: 269855 - DNA, 20 bp, Artificial Sequence
  Description of Artificial Sequence: Synthetic oligonucleotide
  Target: LAMA2; (-) strand; PAM type: YTN; PAM sequence: TTA
aattaactctcctagatgaa

SEQ ID NO: 269856 - DNA, 20 bp, Artificial Sequence
  Description of Artificial Sequence: Synthetic oligonucleotide
  Target: LAMA2; (-) strand; PAM type: YTN; PAM sequence: TTA
atgtgtgtatgttaaattaa

SEQ ID NO: 269857 - DNA, 20 bp, Artificial Sequence
  Description of Artificial Sequence: Synthetic oligonucleotide
  Target: LAMA2; (-) strand; PAM type: YTN; PAM sequence: TTA
tgtgttaatgtgtgtatgtt

SEQ ID NO: 269858 - DNA, 20 bp, Artificial Sequence
  Description of Artificial Sequence: Synthetic oligonucleotide
  Target: LAMA2; (-) strand; PAM type: YTN; PAM sequence: TTA
acaaaagataaaattatgtg

SEQ ID NO: 269859 - DNA, 20 bp, Artificial Sequence
  Description of Artificial Sequence: Synthetic oligonucleotide
  Target: LAMA2; (-) strand; PAM type: YTN; PAM sequence: TTT
aacaaaagataaaattatgt

SEQ ID NO: 269860 - DNA, 20 bp, Artificial Sequence
  Description of Artificial Sequence: Synthetic oligonucleotide
  Target: LAMA2; (-) strand; PAM type: YTN; PAM sequence: TTT
taacaaaagataaaattatg

SEQ ID NO: 269861 - DNA, 20 bp, Artificial Sequence
  Description of Artificial Sequence: Synthetic oligonucleotide
  Target: LAMA2; (-) strand; PAM type: YTN; PAM sequence: TTT
ttaacaaaagataaaattat

SEQ ID NO: 269862 - DNA, 20 bp, Artificial Sequence
  Description of Artificial Sequence: Synthetic oligonucleotide
  Target: LAMA2; (-) strand; PAM type: YTN; PAM sequence: CTA
atcaaataggaataaaatga

SEQ ID NO: 269863 - DNA, 20 bp, Artificial Sequence
  Description of Artificial Sequence: Synthetic oligonucleotide
  Target: LAMA2; (-) strand; PAM type: YTN; PAM sequence: CTC
taatcaaataggaataaaat

SEQ ID NO: 269864 - DNA, 20 bp, Artificial Sequence
  Description of Artificial Sequence: Synthetic oligonucleotide
  Target: LAMA2; (-) strand; PAM type: YTN; PAM sequence: CTG
ctctaatcaaataggaataa

SEQ ID NO: 269865 - DNA, 20 bp, Artificial Sequence
  Description of Artificial Sequence: Synthetic oligonucleotide
  Target: LAMA2; (-) strand; PAM type: YTN; PAM sequence: CTC
tgctctaatcaaataggaat

SEQ ID NO: 269866 - DNA, 20 bp, Artificial Sequence
  Description of Artificial Sequence: Synthetic oligonucleotide
  Target: LAMA2; (-) strand; PAM type: YTN; PAM sequence: TTC
tctgctctaatcaaatagga

SEQ ID NO: 269867 - DNA, 20 bp, Artificial Sequence
  Description of Artificial Sequence: Synthetic oligonucleotide
  Target: LAMA2; (-) strand; PAM type: YTN; PAM sequence: TTA
ggtagcgatacataaattct

SEQ ID NO: 269868 - DNA, 20 bp, Artificial Sequence
  Description of Artificial Sequence: Synthetic oligonucleotide
  Target: LAMA2; (-) strand; PAM type: YTN; PAM sequence: TTT
aggtagcgatacataaattc

SEQ ID NO: 269869 - DNA, 20 bp, Artificial Sequence
  Description of Artificial Sequence: Synthetic oligonucleotide
  Target: LAMA2; (-) strand; PAM type: YTN; PAM sequence: TTT
taggtagcgatacataaatt

SEQ ID NO: 269870 - DNA, 20 bp, Artificial Sequence
  Description of Artificial Sequence: Synthetic oligonucleotide
  Target: LAMA2; (-) strand; PAM type: YTN; PAM sequence: TTA
accaattttaggtagcgata

SEQ ID NO: 269871 - DNA, 20 bp, Artificial Sequence
  Description of Artificial Sequence: Synthetic oligonucleotide
  Target: LAMA2; (-) strand; PAM type: YTN; PAM sequence: CTA
ttaaccaattttaggtagcg

SEQ ID NO: 269872 - DNA, 20 bp, Artificial Sequence
  Description of Artificial Sequence: Synthetic oligonucleotide
  Target: LAMA2; (-) strand; PAM type: YTN; PAM sequence: TTG
aaagggcgaaagctattaac

SEQ ID NO: 269873 - DNA, 20 bp, Artificial Sequence
  Description of Artificial Sequence: Synthetic oligonucleotide
  Target: LAMA2; (-) strand; PAM type: YTN; PAM sequence: TTT
gaaagggcgaaagctattaa

SEQ ID NO: 269874 - DNA, 20 bp, Artificial Sequence
  Description of Artificial Sequence: Synthetic oligonucleotide
  Target: LAMA2; (-) strand; PAM type: YTN; PAM sequence: TTT
tgaaagggcgaaagctatta

SEQ ID NO: 269875 - DNA, 20 bp, Artificial Sequence
  Description of Artificial Sequence: Synthetic oligonucleotide
  Target: LAMA2; (-) strand; PAM type: YTN; PAM sequence: TTT
ttgaaagggcgaaagctatt

SEQ ID NO: 269876 - DNA, 20 bp, Artificial Sequence
  Description of Artificial Sequence: Synthetic oligonucleotide
  Target: LAMA2; (-) strand; PAM type: YTN; PAM sequence: CTG
agtatttttgaaagggcgaa

SEQ ID NO: 269877 - DNA, 20 bp, Artificial Sequence
  Description of Artificial Sequence: Synthetic oligonucleotide
  Target: LAMA2; (-) strand; PAM type: YTN; PAM sequence: CTA
aaatgaggacactgagtatt

SEQ ID NO: 269878 - DNA, 20 bp, Artificial Sequence
  Description of Artificial Sequence: Synthetic oligonucleotide
  Target: LAMA2; (-) strand; PAM type: YTN; PAM sequence: CTG
aagctaaaatgaggacactg

SEQ ID NO: 269879 - DNA, 20 bp, Artificial Sequence
  Description of Artificial Sequence: Synthetic oligonucleotide
  Target: LAMA2; (-) strand; PAM type: YTN; PAM sequence: CTG
catccaaaccaaagaagctg

SEQ ID NO: 269880 - DNA, 20 bp, Artificial Sequence
  Description of Artificial Sequence: Synthetic oligonucleotide
  Target: LAMA2; (-) strand; PAM type: YTN; PAM sequence: CTG
tcacaaaaaaaatcacacac

SEQ ID NO: 269881 - DNA, 20 bp, Artificial Sequence
  Description of Artificial Sequence: Synthetic oligonucleotide
  Target: LAMA2; (-) strand; PAM type: YTN; PAM sequence: TTA
ctgtcacaaaaaaaatcaca

SEQ ID NO: 269882 - DNA, 20 bp, Artificial Sequence
  Description of Artificial Sequence: Synthetic oligonucleotide
  Target: LAMA2; (-) strand; PAM type: YTN; PAM sequence: CTT
actgtcacaaaaaaaatcac

SEQ ID NO: 269883 - DNA, 20 bp, Artificial Sequence
  Description of Artificial Sequence: Synthetic oligonucleotide
  Target: LAMA2; (-) strand; PAM type: YTN; PAM sequence: CTG
gcttactgtcacaaaaaaaa

SEQ ID NO: 269884 - DNA, 20 bp, Artificial Sequence
  Description of Artificial Sequence: Synthetic oligonucleotide
  Target: LAMA2; (-) strand; PAM type: YTN; PAM sequence: CTA
ctggcttactgtcacaaaaa

SEQ ID NO: 269885 - DNA, 20 bp, Artificial Sequence
  Description of Artificial Sequence: Synthetic oligonucleotide
  Target: LAMA2; (-) strand; PAM type: YTN; PAM sequence: TTC
cccatgcataataactactg

SEQ ID NO: 269886 - DNA, 20 bp, Artificial Sequence
  Description of Artificial Sequence: Synthetic oligonucleotide
  Target: LAMA2; (-) strand; PAM type: YTN; PAM sequence: CTA
ccaggattccccatgcataa

SEQ ID NO: 269887 - DNA, 20 bp, Artificial Sequence
  Description of Artificial Sequence: Synthetic oligonucleotide
  Target: LAMA2; (-) strand; PAM type: YTN; PAM sequence: TTC
taccaggattccccatgcat

SEQ ID NO: 269888 - DNA, 20 bp, Artificial Sequence
  Description of Artificial Sequence: Synthetic oligonucleotide
  Target: LAMA2; (-) strand; PAM type: YTN; PAM sequence: TTT
ctaccaggattccccatgca

SEQ ID NO: 269889 - DNA, 20 bp, Artificial Sequence
  Description of Artificial Sequence: Synthetic oligonucleotide
  Target: LAMA2; (-) strand; PAM type: YTN; PAM sequence: CTG
catttctaccaggattcccc

SEQ ID NO: 269890 - DNA, 20 bp, Artificial Sequence
  Description of Artificial Sequence: Synthetic oligonucleotide
  Target: LAMA2; (-) strand; PAM type: YTN; PAM sequence: TTA
gcacaaaatactgcatttct

SEQ ID NO: 269891 - DNA, 20 bp, Artificial Sequence
  Description of Artificial Sequence: Synthetic oligonucleotide
  Target: LAMA2; (-) strand; PAM type: YTN; PAM sequence: TTA
gcaattagcacaaaatactg

SEQ ID NO: 269892 - DNA, 20 bp, Artificial Sequence
  Description of Artificial Sequence: Synthetic oligonucleotide
  Target: LAMA2; (-) strand; PAM type: YTN; PAM sequence: CTG
ttagcaattagcacaaaata

SEQ ID NO: 269893 - DNA, 20 bp, Artificial Sequence
  Description of Artificial Sequence: Synthetic oligonucleotide
  Target: LAMA2; (-) strand; PAM type: YTN; PAM sequence: TTC
tgttagcaattagcacaaaa

SEQ ID NO: 269894 - DNA, 20 bp, Artificial Sequence
  Description of Artificial Sequence: Synthetic oligonucleotide
  Target: LAMA2; (-) strand; PAM type: YTN; PAM sequence: TTT
ctgttagcaattagcacaaa

SEQ ID NO: 269895 - DNA, 20 bp, Artificial Sequence
  Description of Artificial Sequence: Synthetic oligonucleotide
  Target: LAMA2; (-) strand; PAM type: YTN; PAM sequence: CTT
tctgttagcaattagcacaa

SEQ ID NO: 269896 - DNA, 20 bp, Artificial Sequence
  Description of Artificial Sequence: Synthetic oligonucleotide
  Target: LAMA2; (-) strand; PAM type: YTN; PAM sequence: TTA
cagatctttctgttagcaat

SEQ ID NO: 269897 - DNA, 20 bp, Artificial Sequence
  Description of Artificial Sequence: Synthetic oligonucleotide
  Target: LAMA2; (-) strand; PAM type: YTN; PAM sequence: CTG
ggcacatgtaaggggcaaat

SEQ ID NO: 269898 - DNA, 20 bp, Artificial Sequence
  Description of Artificial Sequence: Synthetic oligonucleotide
  Target: LAMA2; (-) strand; PAM type: YTN; PAM sequence: TTA
tggctgggcacatgtaaggg

SEQ ID NO: 269899 - DNA, 20 bp, Artificial Sequence
  Description of Artificial Sequence: Synthetic oligonucleotide
  Target: LAMA2; (-) strand; PAM type: YTN; PAM sequence: TTG
ttatggctgggcacatgtaa

SEQ ID NO: 269900 - DNA, 20 bp, Artificial Sequence
  Description of Artificial Sequence: Synthetic oligonucleotide
  Target: LAMA2; (-) strand; PAM type: YTN; PAM sequence: TTC
agattgttatggctgggcac

SEQ ID NO: 269901 - DNA, 20 bp, Artificial Sequence
  Description of Artificial Sequence: Synthetic oligonucleotide
  Target: LAMA2; (-) strand; PAM type: YTN; PAM sequence: CTA
aattcagattgttatggctg

SEQ ID NO: 269902 - DNA, 20 bp, Artificial Sequence
  Description of Artificial Sequence: Synthetic oligonucleotide
  Target: LAMA2; (-) strand; PAM type: YTN; PAM sequence: TTA
acaaacacagtactaaattc

SEQ ID NO: 269903 - DNA, 20 bp, Artificial Sequence
  Description of Artificial Sequence: Synthetic oligonucleotide
  Target: LAMA2; (-) strand; PAM type: YTN; PAM sequence: CTA
atattaacaaacacagtact

SEQ ID NO: 269904 - DNA, 20 bp, Artificial Sequence
  Description of Artificial Sequence: Synthetic oligonucleotide
  Target: LAMA2; (-) strand; PAM type: YTN; PAM sequence: TTG
tgtctaatattaacaaacac

SEQ ID NO: 269905 - DNA, 20 bp, Artificial Sequence
  Description of Artificial Sequence: Synthetic oligonucleotide
  Target: LAMA2; (-) strand; PAM type: YTN; PAM sequence: TTT
gtgtctaatattaacaaaca

SEQ ID NO: 269906 - DNA, 20 bp, Artificial Sequence
  Description of Artificial Sequence: Synthetic oligonucleotide
  Target: LAMA2; (-) strand; PAM type: YTN; PAM sequence: CTA
taaaagtgtcaggataaatt

SEQ ID NO: 269907 - DNA, 20 bp, Artificial Sequence
  Description of Artificial Sequence: Synthetic oligonucleotide
  Target: LAMA2; (-) strand; PAM type: YTN; PAM sequence: TTG
cctataaaagtgtcaggata

SEQ ID NO: 269908 - DNA, 20 bp, Artificial Sequence
  Description of Artificial Sequence: Synthetic oligonucleotide
  Target: LAMA2; (-) strand; PAM type: YTN; PAM sequence: TTT
gcctataaaagtgtcaggat

SEQ ID NO: 269909 - DNA, 20 bp, Artificial Sequence
  Description of Artificial Sequence: Synthetic oligonucleotide
  Target: LAMA2; (-) strand; PAM type: YTN; PAM sequence: CTT
tgcctataaaagtgtcagga

SEQ ID NO: 269910 - DNA, 20 bp, Artificial Sequence
  Description of Artificial Sequence: Synthetic oligonucleotide
  Target: LAMA2; (-) strand; PAM type: YTN; PAM sequence: TTC
cgaggctttgcctataaaag

SEQ ID NO: 269911 - DNA, 20 bp, Artificial Sequence
  Description of Artificial Sequence: Synthetic oligonucleotide
  Target: LAMA2; (-) strand; PAM type: YTN; PAM sequence: TTT
ccgaggctttgcctataaaa

SEQ ID NO: 269912 - DNA, 20 bp, Artificial Sequence
  Description of Artificial Sequence: Synthetic oligonucleotide
  Target: LAMA2; (-) strand; PAM type: YTN; PAM sequence: CTA
aatgtttccgaggctttgcc

SEQ ID NO: 269913 - DNA, 20 bp, Artificial Sequence
  Description of Artificial Sequence: Synthetic oligonucleotide
  Target: LAMA2; (-) strand; PAM type: YTN; PAM sequence: TTA
catgactaaatgtttccgag

SEQ ID NO: 269914 - DNA, 20 bp, Artificial Sequence
  Description of Artificial Sequence: Synthetic oligonucleotide
  Target: LAMA2; (-) strand; PAM type: YTN; PAM sequence: TTT
acatgactaaatgtttccga

SEQ ID NO: 269915 - DNA, 20 bp, Artificial Sequence
  Description of Artificial Sequence: Synthetic oligonucleotide
  Target: LAMA2; (-) strand; PAM type: YTN; PAM sequence: TTT
tacatgactaaatgtttccg

SEQ ID NO: 269916 - DNA, 20 bp, Artificial Sequence
  Description of Artificial Sequence: Synthetic oligonucleotide
  Target: LAMA2; (-) strand; PAM type: YTN; PAM sequence: TTA
tattttacatgactaaatgt

SEQ ID NO: 269917 - DNA, 20 bp, Artificial Sequence
  Description of Artificial Sequence: Synthetic oligonucleotide
  Target: LAMA2; (-) strand; PAM type: YTN; PAM sequence: TTC
aagaccatgattatatttta

SEQ ID NO: 269918 - DNA, 20 bp, Artificial Sequence
  Description of Artificial Sequence: Synthetic oligonucleotide
  Target: LAMA2; (-) strand; PAM type: YTN; PAM sequence: TTT
caagaccatgattatatttt

SEQ ID NO: 269919 - DNA, 20 bp, Artificial Sequence
  Description of Artificial Sequence: Synthetic oligonucleotide
  Target: LAMA2; (-) strand; PAM type: YTN; PAM sequence: CTA
aaatgcacaggagcaaaagc

SEQ ID NO: 269920 - DNA, 20 bp, Artificial Sequence
  Description of Artificial Sequence: Synthetic oligonucleotide
  Target: LAMA2; (-) strand; PAM type: YTN; PAM sequence: CTG
cctaaaatgcacaggagcaa

SEQ ID NO: 269921 - DNA, 20 bp, Artificial Sequence
  Description of Artificial Sequence: Synthetic oligonucleotide
  Target: LAMA2; (-) strand; PAM type: YTN; PAM sequence: TTA
caaagtgaaatcctgcctaa

SEQ ID NO: 269922 - DNA, 20 bp, Artificial Sequence
  Description of Artificial Sequence: Synthetic oligonucleotide
  Target: LAMA2; (-) strand; PAM type: YTN; PAM sequence: CTA
ataaggttacaaagtgaaat

SEQ ID NO: 269923 - DNA, 20 bp, Artificial Sequence
  Description of Artificial Sequence: Synthetic oligonucleotide
  Target: LAMA2; (-) strand; PAM type: YTN; PAM sequence: TTC
agcaatactaataaggttac

SEQ ID NO: 269924 - DNA, 20 bp, Artificial Sequence
  Description of Artificial Sequence: Synthetic oligonucleotide
  Target: LAMA2; (-) strand; PAM type: YTN; PAM sequence: CTC
caaattcagcaatactaata

SEQ ID NO: 269925 - DNA, 20 bp, Artificial Sequence
  Description of Artificial Sequence: Synthetic oligonucleotide
  Target: LAMA2; (-) strand; PAM type: YTN; PAM sequence: TTC
tccaaattcagcaatactaa

SEQ ID NO: 269926 - DNA, 20 bp, Artificial Sequence
  Description of Artificial Sequence: Synthetic oligonucleotide
  Target: LAMA2; (-) strand; PAM type: YTN; PAM sequence: TTC
caaaccattctccaaattca

SEQ ID NO: 269927 - DNA, 20 bp, Artificial Sequence
  Description of Artificial Sequence: Synthetic oligonucleotide
  Target: LAMA2; (-) strand; PAM type: YTN; PAM sequence: TTT
ccaaaccattctccaaattc

SEQ ID NO: 269928 - DNA, 20 bp, Artificial Sequence
  Description of Artificial Sequence: Synthetic oligonucleotide
  Target: LAMA2; (-) strand; PAM type: YTN; PAM sequence: CTT
tccaaaccattctccaaatt

SEQ ID NO: 269929 - DNA, 20 bp, Artificial Sequence
  Description of Artificial Sequence: Synthetic oligonucleotide
  Target: LAMA2; (-) strand; PAM type: YTN; PAM sequence: CTC
aaagaacctttccaaaccat

SEQ ID NO: 269930 - DNA, 20 bp, Artificial Sequence
  Description of Artificial Sequence: Synthetic oligonucleotide
  Target: LAMA2; (-) strand; PAM type: YTN; PAM sequence: TTA
caatcaggacctcaaagaac

SEQ ID NO: 269931 - DNA, 20 bp, Artificial Sequence
  Description of Artificial Sequence: Synthetic oligonucleotide
  Target: LAMA2; (-) strand; PAM type: YTN; PAM sequence: CTT
acaatcaggacctcaaagaa

SEQ ID NO: 269932 - DNA, 20 bp, Artificial Sequence
  Description of Artificial Sequence: Synthetic oligonucleotide
  Target: LAMA2; (-) strand; PAM type: YTN; PAM sequence: CTA
tcttacaatcaggacctcaa

SEQ ID NO: 269933 - DNA, 20 bp, Artificial Sequence
  Description of Artificial Sequence: Synthetic oligonucleotide
  Target: LAMA2; (-) strand; PAM type: YTN; PAM sequence: CTC
agtgtaaatgaacacctatc

SEQ ID NO: 269934 - DNA, 20 bp, Artificial Sequence
  Description of Artificial Sequence: Synthetic oligonucleotide
  Target: LAMA2; (-) strand; PAM type: YTN; PAM sequence: TTG
ataaagtgcagtaatggctc

SEQ ID NO: 269935 - DNA, 20 bp, Artificial Sequence
  Description of Artificial Sequence: Synthetic oligonucleotide
  Target: LAMA2; (-) strand; PAM type: YTN; PAM sequence: TTT
gataaagtgcagtaatggct

SEQ ID NO: 269936 - DNA, 20 bp, Artificial Sequence
  Description of Artificial Sequence: Synthetic oligonucleotide
  Target: LAMA2; (-) strand; PAM type: YTN; PAM sequence: CTT
tgataaagtgcagtaatggc

SEQ ID NO: 269937 - DNA, 20 bp, Artificial Sequence
  Description of Artificial Sequence: Synthetic oligonucleotide
  Target: LAMA2; (-) strand; PAM type: YTN; PAM sequence: TTC
tttgataaagtgcagtaatg

SEQ ID NO: 269938 - DNA, 20 bp, Artificial Sequence
  Description of Artificial Sequence: Synthetic oligonucleotide
  Target: LAMA2; (-) strand; PAM type: YTN; PAM sequence: CTG
ttctttgataaagtgcagta

SEQ ID NO: 269939 - DNA, 20 bp, Artificial Sequence
  Description of Artificial Sequence: Synthetic oligonucleotide
  Target: LAMA2; (-) strand; PAM type: YTN; PAM sequence: CTG
taaacaactgttctttgata

SEQ ID NO: 269940 - DNA, 20 bp, Artificial Sequence
  Description of Artificial Sequence: Synthetic oligonucleotide
  Target: LAMA2; (-) strand; PAM type: YTN; PAM sequence: TTC
tgtaaacaactgttctttga

SEQ ID NO: 269941 - DNA, 20 bp, Artificial Sequence
  Description of Artificial Sequence: Synthetic oligonucleotide
  Target: LAMA2; (-) strand; PAM type: YTN; PAM sequence: TTC
acattctgtaaacaactgtt

SEQ ID NO: 269942 - DNA, 20 bp, Artificial Sequence
  Description of Artificial Sequence: Synthetic oligonucleotide
  Target: LAMA2; (-) strand; PAM type: YTN; PAM sequence: CTG
aagagtgtgtagagacatgg

SEQ ID NO: 269943 - DNA, 20 bp, Artificial Sequence
  Description of Artificial Sequence: Synthetic oligonucleotide
  Target: LAMA2; (-) strand; PAM type: YTN; PAM sequence: CTA
tcatagggaaaatctgaaga

SEQ ID NO: 269944 - DNA, 20 bp, Artificial Sequence
  Description of Artificial Sequence: Synthetic oligonucleotide
  Target: LAMA2; (-) strand; PAM type: YTN; PAM sequence: TTA
ctatcatagggaaaatctga

SEQ ID NO: 269945 - DNA, 20 bp, Artificial Sequence
  Description of Artificial Sequence: Synthetic oligonucleotide
  Target: LAMA2; (-) strand; PAM type: YTN; PAM sequence: TTT
actatcatagggaaaatctg

SEQ ID NO: 269946 - DNA, 20 bp, Artificial Sequence
  Description of Artificial Sequence: Synthetic oligonucleotide
  Target: LAMA2; (-) strand; PAM type: YTN; PAM sequence: TTA
aaaccaaatgtaatttacta

SEQ ID NO: 269947 - DNA, 20 bp, Artificial Sequence
  Description of Artificial Sequence: Synthetic oligonucleotide
  Target: LAMA2; (-) strand; PAM type: YTN; PAM sequence: TTG
gaaatggaatgcaaattaaa

SEQ ID NO: 269948 - DNA, 20 bp, Artificial Sequence
  Description of Artificial Sequence: Synthetic oligonucleotide
  Target: LAMA2; (-) strand; PAM type: YTN; PAM sequence: CTG
gcaacaaacattggaaatgg

SEQ ID NO: 269949 - DNA, 20 bp, Artificial Sequence
  Description of Artificial Sequence: Synthetic oligonucleotide
  Target: LAMA2; (-) strand; PAM type: YTN; PAM sequence: CTC
aaaaagtccaaagtgtctgg

SEQ ID NO: 269950 - DNA, 20 bp, Artificial Sequence
  Description of Artificial Sequence: Synthetic oligonucleotide
  Target: LAMA2; (-) strand; PAM type: YTN; PAM sequence: TTG
ccctcaaaaagtccaaagtg

SEQ ID NO: 269951 - DNA, 20 bp, Artificial Sequence
  Description of Artificial Sequence: Synthetic oligonucleotide
  Target: LAMA2; (-) strand; PAM type: YTN; PAM sequence: TTT
gccctcaaaaagtccaaagt

SEQ ID NO: 269952 - DNA, 20 bp, Artificial Sequence
  Description of Artificial Sequence: Synthetic oligonucleotide
  Target: LAMA2; (-) strand; PAM type: YTN; PAM sequence: TTA
tttgccctcaaaaagtccaa

SEQ ID NO: 269953 - DNA, 20 bp, Artificial Sequence
  Description of Artificial Sequence: Synthetic oligonucleotide
  Target: LAMA2; (-) strand; PAM type: YTN; PAM sequence: TTT
atttgccctcaaaaagtcca

SEQ ID NO: 269954 - DNA, 20 bp, Artificial Sequence
  Description of Artificial Sequence: Synthetic oligonucleotide
  Target: LAMA2; (-) strand; PAM type: YTN; PAM sequence: TTT
tatttgccctcaaaaagtcc

SEQ ID NO: 269955 - DNA, 20 bp, Artificial Sequence
  Description of Artificial Sequence: Synthetic oligonucleotide
  Target: LAMA2; (-) strand; PAM type: YTN; PAM sequence: CTT
ttatttgccctcaaaaagtc

SEQ ID NO: 269956 - DNA, 20 bp, Artificial Sequence
  Description of Artificial Sequence: Synthetic oligonucleotide
  Target: LAMA2; (-) strand; PAM type: YTN; PAM sequence: CTA
cttttatttgccctcaaaaa

SEQ ID NO: 269957 - DNA, 20 bp, Artificial Sequence
  Description of Artificial Sequence: Synthetic oligonucleotide
  Target: LAMA2; (-) strand; PAM type: YTN; PAM sequence: TTA
caccagaagctacttttatt

SEQ ID NO: 269958 - DNA, 20 bp, Artificial Sequence
  Description of Artificial Sequence: Synthetic oligonucleotide
  Target: LAMA2; (-) strand; PAM type: YTN; PAM sequence: CTT
acaccagaagctacttttat

SEQ ID NO: 269959 - DNA, 20 bp, Artificial Sequence
  Description of Artificial Sequence: Synthetic oligonucleotide
  Target: LAMA2; (-) strand; PAM type: YTN; PAM sequence: TTC
acttacaccagaagctactt

SEQ ID NO: 269960 - DNA, 20 bp, Artificial Sequence
  Description of Artificial Sequence: Synthetic oligonucleotide
  Target: LAMA2; (-) strand; PAM type: YTN; PAM sequence: TTT
cacttacaccagaagctact

SEQ ID NO: 269961 - DNA, 20 bp, Artificial Sequence
  Description of Artificial Sequence: Synthetic oligonucleotide
  Target: LAMA2; (-) strand; PAM type: YTN; PAM sequence: CTG
acacaaaatatttcacttac

SEQ ID NO: 269962 - DNA, 20 bp, Artificial Sequence
  Description of Artificial Sequence: Synthetic oligonucleotide
  Target: LAMA2; (-) strand; PAM type: YTN; PAM sequence: TTC
tgacacaaaatatttcactt

SEQ ID NO: 269963 - DNA, 20 bp, Artificial Sequence
  Description of Artificial Sequence: Synthetic oligonucleotide
  Target: LAMA2; (-) strand; PAM type: YTN; PAM sequence: TTA
ttctgacacaaaatatttca

SEQ ID NO: 269964 - DNA, 20 bp, Artificial Sequence
  Description of Artificial Sequence: Synthetic oligonucleotide
  Target: LAMA2; (-) strand; PAM type: YTN; PAM sequence: TTT
attctgacacaaaatatttc

SEQ ID NO: 269965 - DNA, 20 bp, Artificial Sequence
  Description of Artificial Sequence: Synthetic oligonucleotide
  Target: LAMA2; (-) strand; PAM type: YTN; PAM sequence: TTT
tattctgacacaaaatattt

SEQ ID NO: 269966 - DNA, 20 bp, Artificial Sequence
  Description of Artificial Sequence: Synthetic oligonucleotide
  Target: LAMA2; (-) strand; PAM type: YTN; PAM sequence: CTA
ttttattctgacacaaaata

SEQ ID NO: 269967 - DNA, 20 bp, Artificial Sequence
  Description of Artificial Sequence: Synthetic oligonucleotide
  Target: LAMA2; (-) strand; PAM type: YTN; PAM sequence: TTG
ctattttattctgacacaaa

SEQ ID NO: 269968 - DNA, 20 bp, Artificial Sequence
  Description of Artificial Sequence: Synthetic oligonucleotide
  Target: LAMA2; (-) strand; PAM type: YTN; PAM sequence: TTT
gctattttattctgacacaa

SEQ ID NO: 269969 - DNA, 20 bp, Artificial Sequence
  Description of Artificial Sequence: Synthetic oligonucleotide
  Target: LAMA2; (-) strand; PAM type: YTN; PAM sequence: TTA
cataatggtttgctatttta

SEQ ID NO: 269970 - DNA, 20 bp, Artificial Sequence
  Description of Artificial Sequence: Synthetic oligonucleotide
  Target: LAMA2; (-) strand; PAM type: YTN; PAM sequence: TTT
acataatggtttgctatttt

SEQ ID NO: 269971 - DNA, 20 bp, Artificial Sequence
  Description of Artificial Sequence: Synthetic oligonucleotide
  Target: LAMA2; (-) strand; PAM type: YTN; PAM sequence: CTT
tacataatggtttgctattt

SEQ ID NO: 269972 - DNA, 20 bp, Artificial Sequence
  Description of Artificial Sequence: Synthetic oligonucleotide
  Target: LAMA2; (-) strand; PAM type: YTN; PAM sequence: TTA
taaggtaaacacatggggaa

SEQ ID NO: 269973 - DNA, 20 bp, Artificial Sequence
  Description of Artificial Sequence: Synthetic oligonucleotide
  Target: LAMA2; (-) strand; PAM type: YTN; PAM sequence: CTC
atgaagttataaggtaaaca

SEQ ID NO: 269974 - DNA, 20 bp, Artificial Sequence
  Description of Artificial Sequence: Synthetic oligonucleotide
  Target: LAMA2; (-) strand; PAM type: YTN; PAM sequence: CTA
gctcatgaagttataaggta

SEQ ID NO: 269975 - DNA, 20 bp, Artificial Sequence
  Description of Artificial Sequence: Synthetic oligonucleotide
  Target: LAMA2; (-) strand; PAM type: YTN; PAM sequence: CTG
tacaagtctagctcatgaag

SEQ ID NO: 269976 - DNA, 20 bp, Artificial Sequence
  Description of Artificial Sequence: Synthetic oligonucleotide
  Target: LAMA2; (-) strand; PAM type: YTN; PAM sequence: TTC
tgtacaagtctagctcatga

SEQ ID NO: 269977 - DNA, 20 bp, Artificial Sequence
  Description of Artificial Sequence: Synthetic oligonucleotide
  Target: LAMA2; (-) strand; PAM type: YTN; PAM sequence: CTT
ctgtacaagtctagctcatg

SEQ ID NO: 269978 - DNA, 20 bp, Artificial Sequence
  Description of Artificial Sequence: Synthetic oligonucleotide
  Target: LAMA2; (-) strand; PAM type: YTN; PAM sequence: TTC
aaagcttctgtacaagtcta

SEQ ID NO: 269979 - DNA, 20 bp, Artificial Sequence
  Description of Artificial Sequence: Synthetic oligonucleotide
  Target: LAMA2; (-) strand; PAM type: YTN; PAM sequence: TTT
caaagcttctgtacaagtct

SEQ ID NO: 269980 - DNA, 20 bp, Artificial Sequence
  Description of Artificial Sequence: Synthetic oligonucleotide
  Target: LAMA2; (-) strand; PAM type: YTN; PAM sequence: TTT
tcaaagcttctgtacaagtc

SEQ ID NO: 269981 - DNA, 20 bp, Artificial Sequence
  Description of Artificial Sequence: Synthetic oligonucleotide
  Target: LAMA2; (-) strand; PAM type: YTN; PAM sequence: TTT
ttcaaagcttctgtacaagt

SEQ ID NO: 269982 - DNA, 20 bp, Artificial Sequence
  Description of Artificial Sequence: Synthetic oligonucleotide
  Target: LAMA2; (-) strand; PAM type: YTN; PAM sequence: TTT
tttcaaagcttctgtacaag

SEQ ID NO: 269983 - DNA, 20 bp, Artificial Sequence
  Description of Artificial Sequence: Synthetic oligonucleotide
  Target: LAMA2; (-) strand; PAM type: YTN; PAM sequence: TTA
tgaatatgacagccatgggg

SEQ ID NO: 269984 - DNA, 20 bp, Artificial Sequence
  Description of Artificial Sequence: Synthetic oligonucleotide
  Target: LAMA2; (-) strand; PAM type: YTN; PAM sequence: CTT
atgaatatgacagccatggg

SEQ ID NO: 269985 - DNA, 20 bp, Artificial Sequence
  Description of Artificial Sequence: Synthetic oligonucleotide
  Target: LAMA2; (-) strand; PAM type: YTN; PAM sequence: CTG
aatgggtcagagagacttat

SEQ ID NO: 269986 - DNA, 20 bp, Artificial Sequence
  Description of Artificial Sequence: Synthetic oligonucleotide
  Target: LAMA2; (-) strand; PAM type: YTN; PAM sequence: CTG
tctgaatgggtcagagagac

SEQ ID NO: 269987 - DNA, 20 bp, Artificial Sequence
  Description of Artificial Sequence: Synthetic oligonucleotide
  Target: LAMA2; (-) strand; PAM type: YTN; PAM sequence: CTA
acatctgtctgaatgggtca

SEQ ID NO: 269988 - DNA, 20 bp, Artificial Sequence
  Description of Artificial Sequence: Synthetic oligonucleotide
  Target: LAMA2; (-) strand; PAM type: YTN; PAM sequence: CTC
caagcaatatactaacatct

SEQ ID NO: 269989 - DNA, 20 bp, Artificial Sequence
  Description of Artificial Sequence: Synthetic oligonucleotide
  Target: LAMA2; (-) strand; PAM type: YTN; PAM sequence: TTA
tagtacgctccaagcaatat

SEQ ID NO: 269990 - DNA, 20 bp, Artificial Sequence
  Description of Artificial Sequence: Synthetic oligonucleotide
  Target: LAMA2; (-) strand; PAM type: YTN; PAM sequence: TTT
atagtacgctccaagcaata

SEQ ID NO: 269991 - DNA, 20 bp, Artificial Sequence
  Description of Artificial Sequence: Synthetic oligonucleotide
  Target: LAMA2; (-) strand; PAM type: YTN; PAM sequence: TTT
tatagtacgctccaagcaat

SEQ ID NO: 269992 - DNA, 20 bp, Artificial Sequence
  Description of Artificial Sequence: Synthetic oligonucleotide
  Target: LAMA2; (-) strand; PAM type: YTN; PAM sequence: TTC
cataagtgaaaggtaagttt

SEQ ID NO: 269993 - DNA, 20 bp, Artificial Sequence
  Description of Artificial Sequence: Synthetic oligonucleotide
  Target: LAMA2; (-) strand; PAM type: YTN; PAM sequence: TTT
ccataagtgaaaggtaagtt

SEQ ID NO: 269994 - DNA, 20 bp, Artificial Sequence
  Description of Artificial Sequence: Synthetic oligonucleotide
  Target: LAMA2; (-) strand; PAM type: YTN; PAM sequence: TTG
gggaacaaagtacaagcaca

SEQ ID NO: 269995 - DNA, 20 bp, Artificial Sequence
  Description of Artificial Sequence: Synthetic oligonucleotide
  Target: LAMA2; (-) strand; PAM type: YTN; PAM sequence: TTT
ggggaacaaagtacaagcac

SEQ ID NO: 269996 - DNA, 20 bp, Artificial Sequence
  Description of Artificial Sequence: Synthetic oligonucleotide
  Target: LAMA2; (-) strand; PAM type: YTN; PAM sequence: TTT
tggggaacaaagtacaagca

SEQ ID NO: 269997 - DNA, 20 bp, Artificial Sequence
  Description of Artificial Sequence: Synthetic oligonucleotide
  Target: LAMA2; (-) strand; PAM type: YTN; PAM sequence: TTT
ttggggaacaaagtacaagc

SEQ ID NO: 269998 - DNA, 20 bp, Artificial Sequence
  Description of Artificial Sequence: Synthetic oligonucleotide
  Target: LAMA2; (-) strand; PAM type: YTN; PAM sequence: CTT
tttggggaacaaagtacaag

SEQ ID NO: 269999 - DNA, 20 bp, Artificial Sequence
  Description of Artificial Sequence: Synthetic oligonucleotide
  Target: LAMA2; (-) strand; PAM type: YTN; PAM sequence: TTG
ctttttggggaacaaagtac

SEQ ID NO: 270000 - DNA, 20 bp, Artificial Sequence
  Description of Artificial Sequence: Synthetic oligonucleotide
  Target: LAMA2; (-) strand; PAM type: YTN; PAM sequence: TTT
gctttttggggaacaaagta

SEQ ID NO: 270001 - DNA, 20 bp, Artificial Sequence
  Description of Artificial Sequence: Synthetic oligonucleotide
  Target: LAMA2; (-) strand; PAM type: YTN; PAM sequence: CTG
tatttgctttttggggaaca

SEQ ID NO: 270002 - DNA, 20 bp, Artificial Sequence
  Description of Artificial Sequence: Synthetic oligonucleotide
  Target: LAMA2; (-) strand; PAM type: YTN; PAM sequence: TTA
tggtatctgtatttgctttt

SEQ ID NO: 270003 - DNA, 20 bp, Artificial Sequence
  Description of Artificial Sequence: Synthetic oligonucleotide
  Target: LAMA2; (-) strand; PAM type: YTN; PAM sequence: CTT
atggtatctgtatttgcttt

SEQ ID NO: 270004 - DNA, 20 bp, Artificial Sequence
  Description of Artificial Sequence: Synthetic oligonucleotide
  Target: LAMA2; (-) strand; PAM type: YTN; PAM sequence: TTA
tcccatgtcttatggtatct

SEQ ID NO: 270005 - DNA, 20 bp, Artificial Sequence
  Description of Artificial Sequence: Synthetic oligonucleotide
  Target: LAMA2; (-) strand; PAM type: YTN; PAM sequence: TTA
ttatcccatgtcttatggta

SEQ ID NO: 270006 - DNA, 20 bp, Artificial Sequence
  Description of Artificial Sequence: Synthetic oligonucleotide
  Target: LAMA2; (-) strand; PAM type: YTN; PAM sequence: TTA
ttattatcccatgtcttatg

SEQ ID NO: 270007 - DNA, 20 bp, Artificial Sequence
  Description of Artificial Sequence: Synthetic oligonucleotide
  Target: LAMA2; (-) strand; PAM type: YTN; PAM sequence: TTT
attattatcccatgtcttat

SEQ ID NO: 270008 - DNA, 20 bp, Artificial Sequence
  Description of Artificial Sequence: Synthetic oligonucleotide
  Target: LAMA2; (-) strand; PAM type: YTN; PAM sequence: CTG
tgtccaaaggtttattatta

SEQ ID NO: 270009 - DNA, 20 bp, Artificial Sequence
  Description of Artificial Sequence: Synthetic oligonucleotide
  Target: LAMA2; (-) strand; PAM type: YTN; PAM sequence: TTC
tgtgtccaaaggtttattat

SEQ ID NO: 270010 - DNA, 20 bp, Artificial Sequence
  Description of Artificial Sequence: Synthetic oligonucleotide
  Target: LAMA2; (-) strand; PAM type: YTN; PAM sequence: TTT
ctgtgtccaaaggtttatta

SEQ ID NO: 270011 - DNA, 20 bp, Artificial Sequence
  Description of Artificial Sequence: Synthetic oligonucleotide
  Target: LAMA2; (-) strand; PAM type: YTN; PAM sequence: TTA
tgtttctgtgtccaaaggtt

SEQ ID NO: 270012 - DNA, 20 bp, Artificial Sequence
  Description of Artificial Sequence: Synthetic oligonucleotide
  Target: LAMA2; (-) strand; PAM type: YTN; PAM sequence: TTT
atgtttctgtgtccaaaggt

SEQ ID NO: 270013 - DNA, 20 bp, Artificial Sequence
  Description of Artificial Sequence: Synthetic oligonucleotide
  Target: LAMA2; (-) strand; PAM type: YTN; PAM sequence: TTT
tatgtttctgtgtccaaagg

SEQ ID NO: 270014 - DNA, 20 bp, Artificial Sequence
  Description of Artificial Sequence: Synthetic oligonucleotide
  Target: LAMA2; (-) strand; PAM type: YTN; PAM sequence: TTC
cattttatgtttctgtgtcc

SEQ ID NO: 270015 - DNA, 20 bp, Artificial Sequence
  Description of Artificial Sequence: Synthetic oligonucleotide
  Target: LAMA2; (-) strand; PAM type: YTN; PAM sequence: CTC
atacattccattttatgttt

SEQ ID NO: 270016 - DNA, 20 bp, Artificial Sequence
  Description of Artificial Sequence: Synthetic oligonucleotide
  Target: LAMA2; (-) strand; PAM type: YTN; PAM sequence: TTC
aagggctcatacattccatt

SEQ ID NO: 270017 - DNA, 20 bp, Artificial Sequence
  Description of Artificial Sequence: Synthetic oligonucleotide
  Target: LAMA2; (-) strand; PAM type: YTN; PAM sequence: TTT
caagggctcatacattccat

SEQ ID NO: 270018 - DNA, 20 bp, Artificial Sequence
  Description of Artificial Sequence: Synthetic oligonucleotide
  Target: LAMA2; (-) strand; PAM type: YTN; PAM sequence: CTT
tcaagggctcatacattcca

SEQ ID NO: 270019 - DNA, 20 bp, Artificial Sequence
  Description of Artificial Sequence: Synthetic oligonucleotide
  Target: LAMA2; (-) strand; PAM type: YTN; PAM sequence: CTC
tttcaagggctcatacattc

SEQ ID NO: 270020 - DNA, 20 bp, Artificial Sequence
  Description of Artificial Sequence: Synthetic oligonucleotide
  Target: LAMA2; (-) strand; PAM type: YTN; PAM sequence: TTG
ctctttcaagggctcataca

SEQ ID NO: 270021 - DNA, 20 bp, Artificial Sequence
  Description of Artificial Sequence: Synthetic oligonucleotide
  Target: LAMA2; (-) strand; PAM type: YTN; PAM sequence: TTA
attgctctttcaagggctca

SEQ ID NO: 270022 - DNA, 20 bp, Artificial Sequence
  Description of Artificial Sequence: Synthetic oligonucleotide
  Target: LAMA2; (-) strand; PAM type: YTN; PAM sequence: TTT
aattgctctttcaagggctc

SEQ ID NO: 270023 - DNA, 20 bp, Artificial Sequence
  Description of Artificial Sequence: Synthetic oligonucleotide
  Target: LAMA2; (-) strand; PAM type: YTN; PAM sequence: TTG
aaatgaaaatgtatttaatt

SEQ ID NO: 270024 - DNA, 20 bp, Artificial Sequence
  Description of Artificial Sequence: Synthetic oligonucleotide
  Target: LAMA2; (-) strand; PAM type: YTN; PAM sequence: CTG
ttgaaatgaaaatgtattta

SEQ ID NO: 270025 - DNA, 20 bp, Artificial Sequence
  Description of Artificial Sequence: Synthetic oligonucleotide
  Target: LAMA2; (-) strand; PAM type: YTN; PAM sequence: TTC
agctgttgaaatgaaaatgt

SEQ ID NO: 270026 - DNA, 20 bp, Artificial Sequence
  Description of Artificial Sequence: Synthetic oligonucleotide
  Target: LAMA2; (-) strand; PAM type: YTN; PAM sequence: CTT
cagctgttgaaatgaaaatg

SEQ ID NO: 270027 - DNA, 20 bp, Artificial Sequence
  Description of Artificial Sequence: Synthetic oligonucleotide
  Target: LAMA2; (-) strand; PAM type: YTN; PAM sequence: CTC
atcttcagctgttgaaatga

SEQ ID NO: 270028 - DNA, 20 bp, Artificial Sequence
  Description of Artificial Sequence: Synthetic oligonucleotide
  Target: LAMA2; (-) strand; PAM type: YTN; PAM sequence: TTC
ctcatcttcagctgttgaaa

SEQ ID NO: 270029 - DNA, 20 bp, Artificial Sequence
  Description of Artificial Sequence: Synthetic oligonucleotide
  Target: LAMA2; (-) strand; PAM type: YTN; PAM sequence: TTG
gttcctcatcttcagctgtt

SEQ ID NO: 270030 - DNA, 20 bp, Artificial Sequence
  Description of Artificial Sequence: Synthetic oligonucleotide
  Target: LAMA2; (-) strand; PAM type: YTN; PAM sequence: TTT
ggttcctcatcttcagctgt

SEQ ID NO: 270031 - DNA, 20 bp, Artificial Sequence
  Description of Artificial Sequence: Synthetic oligonucleotide
  Target: LAMA2; (-) strand; PAM type: YTN; PAM sequence: TTT
tggttcctcatcttcagctg

SEQ ID NO: 270032 - DNA, 20 bp, Artificial Sequence
  Description of Artificial Sequence: Synthetic oligonucleotide
  Target: LAMA2; (-) strand; PAM type: YTN; PAM sequence: CTG
ttttggttcctcatcttcag

SEQ ID NO: 270033 - DNA, 20 bp, Artificial Sequence
  Description of Artificial Sequence: Synthetic oligonucleotide
  Target: LAMA2; (-) strand; PAM type: YTN; PAM sequence: CTG
cccatctgttttggttcctc

SEQ ID NO: 270034 - DNA, 20 bp, Artificial Sequence
  Description of Artificial Sequence: Synthetic oligonucleotide
  Target: LAMA2; (-) strand; PAM type: YTN; PAM sequence: CTA
tcccctgcccatctgttttg

SEQ ID NO: 270035 - DNA, 20 bp, Artificial Sequence
  Description of Artificial Sequence: Synthetic oligonucleotide
  Target: LAMA2; (-) strand; PAM type: YTN; PAM sequence: TTC
tatcccctgcccatctgttt

SEQ ID NO: 270036 - DNA, 20 bp, Artificial Sequence
  Description of Artificial Sequence: Synthetic oligonucleotide
  Target: LAMA2; (-) strand; PAM type: YTN; PAM sequence: TTA
ttctatcccctgcccatctg

SEQ ID NO: 270037 - DNA, 20 bp, Artificial Sequence
  Description of Artificial Sequence: Synthetic oligonucleotide
  Target: LAMA2; (-) strand; PAM type: YTN; PAM sequence: TTT
attctatcccctgcccatct

SEQ ID NO: 270038 - DNA, 20 bp, Artificial Sequence
  Description of Artificial Sequence: Synthetic oligonucleotide
  Target: LAMA2; (-) strand; PAM type: YTN; PAM sequence: CTC
atttattctatcccctgccc

SEQ ID NO: 270039 - DNA, 20 bp, Artificial Sequence
  Description of Artificial Sequence: Synthetic oligonucleotide
  Target: LAMA2; (-) strand; PAM type: YTN; PAM sequence: CTC
tcatttattctatcccctgc

SEQ ID NO: 270040 - DNA, 20 bp, Artificial Sequence
  Description of Artificial Sequence: Synthetic oligonucleotide
  Target: LAMA2; (-) strand; PAM type: YTN; PAM sequence: TTC
tctcatttattctatcccct

SEQ ID NO: 270041 - DNA, 20 bp, Artificial Sequence
  Description of Artificial Sequence: Synthetic oligonucleotide
  Target: LAMA2; (-) strand; PAM type: YTN; PAM sequence: TTT
ctctcatttattctatcccc

SEQ ID NO: 270042 - DNA, 20 bp, Artificial Sequence
  Description of Artificial Sequence: Synthetic oligonucleotide
  Target: LAMA2; (-) strand; PAM type: YTN; PAM sequence: TTT
tctctcatttattctatccc

SEQ ID NO: 270043 - DNA, 20 bp, Artificial Sequence
  Description of Artificial Sequence: Synthetic oligonucleotide
  Target: LAMA2; (-) strand; PAM type: YTN; PAM sequence: TTT
ttctctcatttattctatcc

SEQ ID NO: 270044 - DNA, 20 bp, Artificial Sequence
  Description of Artificial Sequence: Synthetic oligonucleotide
  Target: LAMA2; (-) strand; PAM type: YTN; PAM sequence: CTG
atttttctctcatttattct

SEQ ID NO: 270045 - DNA, 20 bp, Artificial Sequence
  Description of Artificial Sequence: Synthetic oligonucleotide
  Target: LAMA2; (-) strand; PAM type: YTN; PAM sequence: CTA
gaatgccaagaggcatgatg

SEQ ID NO: 270046 - DNA, 20 bp, Artificial Sequence
  Description of Artificial Sequence: Synthetic oligonucleotide
  Target: LAMA2; (-) strand; PAM type: YTN; PAM sequence: CTA
cggtgtactagaatgccaag

SEQ ID NO: 270047 - DNA, 20 bp, Artificial Sequence
  Description of Artificial Sequence: Synthetic oligonucleotide
  Target: LAMA2; (-) strand; PAM type: YTN; PAM sequence: CTG
taatatgctacggtgtacta

SEQ ID NO: 270048 - DNA, 20 bp, Artificial Sequence
  Description of Artificial Sequence: Synthetic oligonucleotide
  Target: LAMA2; (-) strand; PAM type: YTN; PAM sequence: CTG
atgtactgtaatatgctacg

SEQ ID NO: 270049 - DNA, 20 bp, Artificial Sequence
  Description of Artificial Sequence: Synthetic oligonucleotide
  Target: LAMA2; (-) strand; PAM type: YTN; PAM sequence: CTA
gagctgatgtactgtaatat

SEQ ID NO: 270050 - DNA, 20 bp, Artificial Sequence
  Description of Artificial Sequence: Synthetic oligonucleotide
  Target: LAMA2; (-) strand; PAM type: YTN; PAM sequence: TTC
atacaagaataaatcaggga

SEQ ID NO: 270051 - DNA, 20 bp, Artificial Sequence
  Description of Artificial Sequence: Synthetic oligonucleotide
  Target: LAMA2; (-) strand; PAM type: YTN; PAM sequence: CTT
catacaagaataaatcaggg

SEQ ID NO: 270052 - DNA, 20 bp, Artificial Sequence
  Description of Artificial Sequence: Synthetic oligonucleotide
  Target: LAMA2; (-) strand; PAM type: YTN; PAM sequence: TTA
cttcatacaagaataaatca

SEQ ID NO: 270053 - DNA, 20 bp, Artificial Sequence
  Description of Artificial Sequence: Synthetic oligonucleotide
  Target: LAMA2; (-) strand; PAM type: YTN; PAM sequence: TTT
acttcatacaagaataaatc

SEQ ID NO: 270054 - DNA, 20 bp, Artificial Sequence
  Description of Artificial Sequence: Synthetic oligonucleotide
  Target: LAMA2; (-) strand; PAM type: YTN; PAM sequence: TTT
tacttcatacaagaataaat

SEQ ID NO: 270055 - DNA, 20 bp, Artificial Sequence
  Description of Artificial Sequence: Synthetic oligonucleotide
  Target: LAMA2; (-) strand; PAM type: YTN; PAM sequence: TTT
ttacttcatacaagaataaa

SEQ ID NO: 270056 - DNA, 20 bp, Artificial Sequence
  Description of Artificial Sequence: Synthetic oligonucleotide
  Target: LAMA2; (-) strand; PAM type: YTN; PAM sequence: CTC
agtttttacttcatacaaga

SEQ ID NO: 270057 - DNA, 20 bp, Artificial Sequence
  Description of Artificial Sequence: Synthetic oligonucleotide
  Target: LAMA2; (-) strand; PAM type: YTN; PAM sequence: TTC
tcagtttttacttcatacaa

SEQ ID NO: 270058 - DNA, 20 bp, Artificial Sequence
  Description of Artificial Sequence: Synthetic oligonucleotide
  Target: LAMA2; (-) strand; PAM type: YTN; PAM sequence: TTT
ctcagtttttacttcataca

SEQ ID NO: 270059 - DNA, 20 bp, Artificial Sequence
  Description of Artificial Sequence: Synthetic oligonucleotide
  Target: LAMA2; (-) strand; PAM type: YTN; PAM sequence: TTT
tctcagtttttacttcatac

SEQ ID NO: 270060 - DNA, 20 bp, Artificial Sequence
  Description of Artificial Sequence: Synthetic oligonucleotide
  Target: LAMA2; (-) strand; PAM type: YTN; PAM sequence: CTA
tcgttttctcagtttttact

SEQ ID NO: 270061 - DNA, 20 bp, Artificial Sequence
  Description of Artificial Sequence: Synthetic oligonucleotide
  Target: LAMA2; (-) strand; PAM type: YTN; PAM sequence: TTC
caaggaaagtacctatcgtt

SEQ ID NO: 270062 - DNA, 20 bp, Artificial Sequence
  Description of Artificial Sequence: Synthetic oligonucleotide
  Target: LAMA2; (-) strand; PAM type: YTN; PAM sequence: TTT
ccaaggaaagtacctatcgt

SEQ ID NO: 270063 - DNA, 20 bp, Artificial Sequence
  Description of Artificial Sequence: Synthetic oligonucleotide
  Target: LAMA2; (-) strand; PAM type: YTN; PAM sequence: TTC
cagaaatttccaaggaaagt

SEQ ID NO: 270064 - DNA, 20 bp, Artificial Sequence
  Description of Artificial Sequence: Synthetic oligonucleotide
  Target: LAMA2; (-) strand; PAM type: YTN; PAM sequence: CTA
gatggttccagaaatttcca

SEQ ID NO: 270065 - DNA, 20 bp, Artificial Sequence
  Description of Artificial Sequence: Synthetic oligonucleotide
  Target: LAMA2; (-) strand; PAM type: YTN; PAM sequence: TTA
ctagatggttccagaaattt

SEQ ID NO: 270066 - DNA, 20 bp, Artificial Sequence
  Description of Artificial Sequence: Synthetic oligonucleotide
  Target: LAMA2; (-) strand; PAM type: YTN; PAM sequence: CTT
actagatggttccagaaatt

SEQ ID NO: 270067 - DNA, 20 bp, Artificial Sequence
  Description of Artificial Sequence: Synthetic oligonucleotide
  Target: LAMA2; (-) strand; PAM type: YTN; PAM sequence: CTC
cttactagatggttccagaa

SEQ ID NO: 270068 - DNA, 20 bp, Artificial Sequence
  Description of Artificial Sequence: Synthetic oligonucleotide
  Target: LAMA2; (-) strand; PAM type: YTN; PAM sequence: CTA
gatactccttactagatggt

SEQ ID NO: 270069 - DNA, 20 bp, Artificial Sequence
  Description of Artificial Sequence: Synthetic oligonucleotide
  Target: LAMA2; (-) strand; PAM type: YTN; PAM sequence: TTG
ataacaggatggctagatac

SEQ ID NO: 270070 - DNA, 20 bp, Artificial Sequence
  Description of Artificial Sequence: Synthetic oligonucleotide
  Target: LAMA2; (-) strand; PAM type: YTN; PAM sequence: TTG
ttgataacaggatggctaga

SEQ ID NO: 270071 - DNA, 20 bp, Artificial Sequence
  Description of Artificial Sequence: Synthetic oligonucleotide
  Target: LAMA2; (-) strand; PAM type: YTN; PAM sequence: TTT
gttgataacaggatggctag

SEQ ID NO: 270072 - DNA, 20 bp, Artificial Sequence
  Description of Artificial Sequence: Synthetic oligonucleotide
  Target: LAMA2; (-) strand; PAM type: YTN; PAM sequence: TTG
aatcagtttgttgataacag

SEQ ID NO: 270073 - DNA, 20 bp, Artificial Sequence
  Description of Artificial Sequence: Synthetic oligonucleotide
  Target: LAMA2; (-) strand; PAM type: YTN; PAM sequence: TTC
caagaaggaattgaatcagt

SEQ ID NO: 270074 - DNA, 20 bp, Artificial Sequence
  Description of Artificial Sequence: Synthetic oligonucleotide
  Target: LAMA2; (-) strand; PAM type: YTN; PAM sequence: TTT
ccaagaaggaattgaatcag

SEQ ID NO: 270075 - DNA, 20 bp, Artificial Sequence
  Description of Artificial Sequence: Synthetic oligonucleotide
  Target: LAMA2; (-) strand; PAM type: YTN; PAM sequence: CTA
tttccaagaaggaattgaat

SEQ ID NO: 270076 - DNA, 20 bp, Artificial Sequence
  Description of Artificial Sequence: Synthetic oligonucleotide
  Target: LAMA2; (-) strand; PAM type: YTN; PAM sequence: CTA
cctatttccaagaaggaatt

SEQ ID NO: 270077 - DNA, 20 bp, Artificial Sequence
  Description of Artificial Sequence: Synthetic oligonucleotide
  Target: LAMA2; (-) strand; PAM type: YTN; PAM sequence: TTA
ataatatataacctacctat

SEQ ID NO: 270078 - DNA, 20 bp, Artificial Sequence
  Description of Artificial Sequence: Synthetic oligonucleotide
  Target: LAMA2; (-) strand; PAM type: YTN; PAM sequence: TTT
aataatatataacctaccta

SEQ ID NO: 270079 - DNA, 20 bp, Artificial Sequence
  Description of Artificial Sequence: Synthetic oligonucleotide
  Target: LAMA2; (-) strand; PAM type: YTN; PAM sequence: TTA
tttaataatatataacctac

SEQ ID NO: 270080 - DNA, 20 bp, Artificial Sequence
  Description of Artificial Sequence: Synthetic oligonucleotide
  Target: LAMA2; (-) strand; PAM type: YTN; PAM sequence: TTT
atttaataatatataaccta

SEQ ID NO: 270081 - DNA, 20 bp, Artificial Sequence
  Description of Artificial Sequence: Synthetic oligonucleotide
  Target: LAMA2; (-) strand; PAM type: YTN; PAM sequence: TTA
atttatttaataatatataa

SEQ ID NO: 270082 - DNA, 20 bp, Artificial Sequence
  Description of Artificial Sequence: Synthetic oligonucleotide
  Target: LAMA2; (-) strand; PAM type: YTN; PAM sequence: TTT
aatttatttaataatatata

SEQ ID NO: 270083 - DNA, 20 bp, Artificial Sequence
  Description of Artificial Sequence: Synthetic oligonucleotide
  Target: LAMA2; (-) strand; PAM type: YTN; PAM sequence: CTT
taatttatttaataatatat

SEQ ID NO: 270084 - DNA, 20 bp, Artificial Sequence
  Description of Artificial Sequence: Synthetic oligonucleotide
  Target: LAMA2; (-) strand; PAM type: YTN; PAM sequence: TTC
tttaatttatttaataatat

SEQ ID NO: 270085 - DNA, 20 bp, Artificial Sequence
  Description of Artificial Sequence: Synthetic oligonucleotide
  Target: LAMA2; (-) strand; PAM type: YTN; PAM sequence: TTA
ttctttaatttatttaataa

SEQ ID NO: 270086 - DNA, 20 bp, Artificial Sequence
  Description of Artificial Sequence: Synthetic oligonucleotide
  Target: LAMA2; (-) strand; PAM type: YTN; PAM sequence: TTA
aattattctttaatttattt

SEQ ID NO: 270087 - DNA, 20 bp, Artificial Sequence
  Description of Artificial Sequence: Synthetic oligonucleotide
  Target: LAMA2; (-) strand; PAM type: YTN; PAM sequence: TTG
atagcaaacattaaattatt

SEQ ID NO: 270088 - DNA, 20 bp, Artificial Sequence
  Description of Artificial Sequence: Synthetic oligonucleotide
  Target: LAMA2; (-) strand; PAM type: YTN; PAM sequence: TTT
gatagcaaacattaaattat

SEQ ID NO: 270089 - DNA, 20 bp, Artificial Sequence
  Description of Artificial Sequence: Synthetic oligonucleotide
  Target: LAMA2; (-) strand; PAM type: YTN; PAM sequence: CTT
tgatagcaaacattaaatta

SEQ ID NO: 270090 - DNA, 20 bp, Artificial Sequence
  Description of Artificial Sequence: Synthetic oligonucleotide
  Target: LAMA2; (-) strand; PAM type: YTN; PAM sequence: TTA
gggcagtgtgtgcctttgat

SEQ ID NO: 270091 - DNA, 20 bp, Artificial Sequence
  Description of Artificial Sequence: Synthetic oligonucleotide
  Target: LAMA2; (-) strand; PAM type: YTN; PAM sequence: TTT
agggcagtgtgtgcctttga

SEQ ID NO: 270092 - DNA, 20 bp, Artificial Sequence
  Description of Artificial Sequence: Synthetic oligonucleotide
  Target: LAMA2; (-) strand; PAM type: YTN; PAM sequence: TTT
tagggcagtgtgtgcctttg

SEQ ID NO: 270093 - DNA, 20 bp, Artificial Sequence
  Description of Artificial Sequence: Synthetic oligonucleotide
  Target: LAMA2; (-) strand; PAM type: YTN; PAM sequence: TTT
ttagggcagtgtgtgccttt

SEQ ID NO: 270094 - DNA, 20 bp, Artificial Sequence
  Description of Artificial Sequence: Synthetic oligonucleotide
  Target: LAMA2; (-) strand; PAM type: YTN; PAM sequence: CTT
tttagggcagtgtgtgcctt

SEQ ID NO: 270095 - DNA, 20 bp, Artificial Sequence
  Description of Artificial Sequence: Synthetic oligonucleotide
  Target: LAMA2; (-) strand; PAM type: YTN; PAM sequence: TTC
accatgctttttagggcagt

SEQ ID NO: 270096 - DNA, 20 bp, Artificial Sequence
  Description of Artificial Sequence: Synthetic oligonucleotide
  Target: LAMA2; (-) strand; PAM type: YTN; PAM sequence: TTT
caccatgctttttagggcag

SEQ ID NO: 270097 - DNA, 20 bp, Artificial Sequence
  Description of Artificial Sequence: Synthetic oligonucleotide
  Target: LAMA2; (-) strand; PAM type: YTN; PAM sequence: TTG
gtaatgataataggatgttt

SEQ ID NO: 270098 - DNA, 20 bp, Artificial Sequence
  Description of Artificial Sequence: Synthetic oligonucleotide
  Target: LAMA2; (-) strand; PAM type: YTN; PAM sequence: CTT
ggtaatgataataggatgtt

SEQ ID NO: 270099 - DNA, 20 bp, Artificial Sequence
  Description of Artificial Sequence: Synthetic oligonucleotide
  Target: LAMA2; (-) strand; PAM type: YTN; PAM sequence: TTA
aagatacttggtaatgataa

SEQ ID NO: 270100 - DNA, 20 bp, Artificial Sequence
  Description of Artificial Sequence: Synthetic oligonucleotide
  Target: LAMA2; (-) strand; PAM type: YTN; PAM sequence: TTT
aaagatacttggtaatgata

SEQ ID NO: 270101 - DNA, 20 bp, Artificial Sequence
  Description of Artificial Sequence: Synthetic oligonucleotide
  Target: LAMA2; (-) strand; PAM type: YTN; PAM sequence: CTT
taaagatacttggtaatgat

SEQ ID NO: 270102 - DNA, 20 bp, Artificial Sequence
  Description of Artificial Sequence: Synthetic oligonucleotide
  Target: LAMA2; (-) strand; PAM type: YTN; PAM sequence: CTC
caagatctttaaagatactt

SEQ ID NO: 270103 - DNA, 20 bp, Artificial Sequence
  Description of Artificial Sequence: Synthetic oligonucleotide
  Target: LAMA2; (-) strand; PAM type: YTN; PAM sequence: TTC
acctccaagatctttaaaga

SEQ ID NO: 270104 - DNA, 20 bp, Artificial Sequence
  Description of Artificial Sequence: Synthetic oligonucleotide
  Target: LAMA2; (-) strand; PAM type: YTN; PAM sequence: TTT
cacctccaagatctttaaag

SEQ ID NO: 270105 - DNA, 20 bp, Artificial Sequence
  Description of Artificial Sequence: Synthetic oligonucleotide
  Target: LAMA2; (-) strand; PAM type: YTN; PAM sequence: TTT
tcacctccaagatctttaaa

SEQ ID NO: 270106 - DNA, 20 bp, Artificial Sequence
  Description of Artificial Sequence: Synthetic oligonucleotide
  Target: LAMA2; (-) strand; PAM type: YTN; PAM sequence: TTT
ttcacctccaagatctttaa

SEQ ID NO: 270107 - DNA, 20 bp, Artificial Sequence
  Description of Artificial Sequence: Synthetic oligonucleotide
  Target: LAMA2; (-) strand; PAM type: YTN; PAM sequence: TTT
tttcacctccaagatcttta

SEQ ID NO: 270108 - DNA, 20 bp, Artificial Sequence
  Description of Artificial Sequence: Synthetic oligonucleotide
  Target: LAMA2; (-) strand; PAM type: YTN; PAM sequence: CTT
ttttcacctccaagatcttt

SEQ ID NO: 270109 - DNA, 20 bp, Artificial Sequence
  Description of Artificial Sequence: Synthetic oligonucleotide
  Target: LAMA2; (-) strand; PAM type: YTN; PAM sequence: CTC
ttttttcacctccaagatct

SEQ ID NO: 270110 - DNA, 20 bp, Artificial Sequence
  Description of Artificial Sequence: Synthetic oligonucleotide
  Target: LAMA2; (-) strand; PAM type: YTN; PAM sequence: TTG
ctcttttttcacctccaaga

SEQ ID NO: 270111 - DNA, 20 bp, Artificial Sequence
  Description of Artificial Sequence: Synthetic oligonucleotide
  Target: LAMA2; (-) strand; PAM type: YTN; PAM sequence: TTT
gctcttttttcacctccaag

SEQ ID NO: 270112 - DNA, 20 bp, Artificial Sequence
  Description of Artificial Sequence: Synthetic oligonucleotide
  Target: LAMA2; (-) strand; PAM type: YTN; PAM sequence: CTA
ggatgcaagcaagcaatttg

SEQ ID NO: 270113 - DNA, 20 bp, Artificial Sequence
  Description of Artificial Sequence: Synthetic oligonucleotide
  Target: LAMA2; (-) strand; PAM type: YTN; PAM sequence: TTC
ctaggatgcaagcaagcaat

SEQ ID NO: 270114 - DNA, 20 bp, Artificial Sequence
  Description of Artificial Sequence: Synthetic oligonucleotide
  Target: LAMA2; (-) strand; PAM type: YTN; PAM sequence: TTG
ggcagatgttcctaggatgc

SEQ ID NO: 270115 - DNA, 20 bp, Artificial Sequence
  Description of Artificial Sequence: Synthetic oligonucleotide
  Target: LAMA2; (-) strand; PAM type: YTN; PAM sequence: TTT
gggcagatgttcctaggatg

SEQ ID NO: 270116 - DNA, 20 bp, Artificial Sequence
  Description of Artificial Sequence: Synthetic oligonucleotide
  Target: LAMA2; (-) strand; PAM type: YTN; PAM sequence: TTT
tgggcagatgttcctaggat

SEQ ID NO: 270117 - DNA, 20 bp, Artificial Sequence
  Description of Artificial Sequence: Synthetic oligonucleotide
  Target: LAMA2; (-) strand; PAM type: YTN; PAM sequence: CTA
gtgaagatgtattttgggca

SEQ ID NO: 270118 - DNA, 20 bp, Artificial Sequence
  Description of Artificial Sequence: Synthetic oligonucleotide
  Target: LAMA2; (-) strand; PAM type: YTN; PAM sequence: CTC
tagtgaagatgtattttggg

SEQ ID NO: 270119 - DNA, 20 bp, Artificial Sequence
  Description of Artificial Sequence: Synthetic oligonucleotide
  Target: LAMA2; (-) strand; PAM type: YTN; PAM sequence: TTG
acctctagtgaagatgtatt

SEQ ID NO: 270120 - DNA, 20 bp, Artificial Sequence
  Description of Artificial Sequence: Synthetic oligonucleotide
  Target: LAMA2; (-) strand; PAM type: YTN; PAM sequence: TTT
gacctctagtgaagatgtat

SEQ ID NO: 270121 - DNA, 20 bp, Artificial Sequence
  Description of Artificial Sequence: Synthetic oligonucleotide
  Target: LAMA2; (-) strand; PAM type: YTN; PAM sequence: TTC
catttgacctctagtgaaga

SEQ ID NO: 270122 - DNA, 20 bp, Artificial Sequence
  Description of Artificial Sequence: Synthetic oligonucleotide
  Target: LAMA2; (-) strand; PAM type: YTN; PAM sequence: TTA
aaagttccatttgacctcta

SEQ ID NO: 270123 - DNA, 20 bp, Artificial Sequence
  Description of Artificial Sequence: Synthetic oligonucleotide
  Target: LAMA2; (-) strand; PAM type: YTN; PAM sequence: TTT
aaaagttccatttgacctct

SEQ ID NO: 270124 - DNA, 20 bp, Artificial Sequence
  Description of Artificial Sequence: Synthetic oligonucleotide
  Target: LAMA2; (-) strand; PAM type: YTN; PAM sequence: TTT
taaaagttccatttgacctc

SEQ ID NO: 270125 - DNA, 20 bp, Artificial Sequence
  Description of Artificial Sequence: Synthetic oligonucleotide
  Target: LAMA2; (-) strand; PAM type: YTN; PAM sequence: TTG
ttttaaaagttccatttgac

SEQ ID NO: 270126 - DNA, 20 bp, Artificial Sequence
  Description of Artificial Sequence: Synthetic oligonucleotide
  Target: LAMA2; (-) strand; PAM type: YTN; PAM sequence: TTC
atcattgttttaaaagttcc

SEQ ID NO: 270127 - DNA, 20 bp, Artificial Sequence
  Description of Artificial Sequence: Synthetic oligonucleotide
  Target: LAMA2; (-) strand; PAM type: YTN; PAM sequence: CTG
agcccaagttcatcattgtt

SEQ ID NO: 270128 - DNA, 20 bp, Artificial Sequence
  Description of Artificial Sequence: Synthetic oligonucleotide
  Target: LAMA2; (-) strand; PAM type: YTN; PAM sequence: CTC
actgagcccaagttcatcat

SEQ ID NO: 270129 - DNA, 20 bp, Artificial Sequence
  Description of Artificial Sequence: Synthetic oligonucleotide
  Target: LAMA2; (-) strand; PAM type: YTN; PAM sequence: CTC
tcactgagcccaagttcatc

SEQ ID NO: 270130 - DNA, 20 bp, Artificial Sequence
  Description of Artificial Sequence: Synthetic oligonucleotide
  Target: LAMA2; (-) strand; PAM type: YTN; PAM sequence: TTC
tctcactgagcccaagttca

SEQ ID NO: 270131 - DNA, 20 bp, Artificial Sequence
  Description of Artificial Sequence: Synthetic oligonucleotide
  Target: LAMA2; (-) strand; PAM type: YTN; PAM sequence: CTT
ctctcactgagcccaagttc

SEQ ID NO: 270132 - DNA, 20 bp, Artificial Sequence
  Description of Artificial Sequence: Synthetic oligonucleotide
  Target: LAMA2; (-) strand; PAM type: YTN; PAM sequence: TTC
ttctctcactgagcccaagt

SEQ ID NO: 270133 - DNA, 20 bp, Artificial Sequence
  Description of Artificial Sequence: Synthetic oligonucleotide
  Target: LAMA2; (-) strand; PAM type: YTN; PAM sequence: TTA
tgaagaataggaaggttctt

SEQ ID NO: 270134 - DNA, 20 bp, Artificial Sequence
  Description of Artificial Sequence: Synthetic oligonucleotide
  Target: LAMA2; (-) strand; PAM type: YTN; PAM sequence: TTA
ggaattatgaagaataggaa

SEQ ID NO: 270135 - DNA, 20 bp, Artificial Sequence
  Description of Artificial Sequence: Synthetic oligonucleotide
  Target: LAMA2; (-) strand; PAM type: YTN; PAM sequence: TTA
ttaggaattatgaagaatag

SEQ ID NO: 270136 - DNA, 20 bp, Artificial Sequence
  Description of Artificial Sequence: Synthetic oligonucleotide
  Target: LAMA2; (-) strand; PAM type: YTN; PAM sequence: TTT
attaggaattatgaagaata

SEQ ID NO: 270137 - DNA, 20 bp, Artificial Sequence
  Description of Artificial Sequence: Synthetic oligonucleotide
  Target: LAMA2; (-) strand; PAM type: YTN; PAM sequence: TTT
tattaggaattatgaagaat

SEQ ID NO: 270138 - DNA, 20 bp, Artificial Sequence
  Description of Artificial Sequence: Synthetic oligonucleotide
  Target: LAMA2; (-) strand; PAM type: YTN; PAM sequence: TTA
taattttattaggaattatg

SEQ ID NO: 270139 - DNA, 20 bp, Artificial Sequence
  Description of Artificial Sequence: Synthetic oligonucleotide
  Target: LAMA2; (-) strand; PAM type: YTN; PAM sequence: TTA
aaaacagcagtagtaacaat

SEQ ID NO: 270140 - DNA, 20 bp, Artificial Sequence
  Description of Artificial Sequence: Synthetic oligonucleotide
  Target: LAMA2; (-) strand; PAM type: YTN; PAM sequence: TTC
ataggttaaaaacagcagta

SEQ ID NO: 270141 - DNA, 20 bp, Artificial Sequence
  Description of Artificial Sequence: Synthetic oligonucleotide
  Target: LAMA2; (-) strand; PAM type: YTN; PAM sequence: CTG
caattcataggttaaaaaca

SEQ ID NO: 270142 - DNA, 20 bp, Artificial Sequence
  Description of Artificial Sequence: Synthetic oligonucleotide
  Target: LAMA2; (-) strand; PAM type: YTN; PAM sequence: TTC
aagctgcaattcataggtta

SEQ ID NO: 270143 - DNA, 20 bp, Artificial Sequence
  Description of Artificial Sequence: Synthetic oligonucleotide
  Target: LAMA2; (-) strand; PAM type: YTN; PAM sequence: TTT
caagctgcaattcataggtt

SEQ ID NO: 270144 - DNA, 20 bp, Artificial Sequence
  Description of Artificial Sequence: Synthetic oligonucleotide
  Target: LAMA2; (-) strand; PAM type: YTN; PAM sequence: CTT
tcaagctgcaattcataggt

SEQ ID NO: 270145 - DNA, 20 bp, Artificial Sequence
  Description of Artificial Sequence: Synthetic oligonucleotide
  Target: LAMA2; (-) strand; PAM type: YTN; PAM sequence: TTC
agatcagagactttcaagct

SEQ ID NO: 270146 - DNA, 20 bp, Artificial Sequence
  Description of Artificial Sequence: Synthetic oligonucleotide
  Target: LAMA2; (-) strand; PAM type: YTN; PAM sequence: TTG
cacatgtgattcagatcaga

SEQ ID NO: 270147 - DNA, 20 bp, Artificial Sequence
  Description of Artificial Sequence: Synthetic oligonucleotide
  Target: LAMA2; (-) strand; PAM type: YTN; PAM sequence: TTT
gcacatgtgattcagatcag

SEQ ID NO: 270148 - DNA, 20 bp, Artificial Sequence
  Description of Artificial Sequence: Synthetic oligonucleotide
  Target: LAMA2; (-) strand; PAM type: YTN; PAM sequence: TTT
tgcacatgtgattcagatca

SEQ ID NO: 270149 - DNA, 20 bp, Artificial Sequence
  Description of Artificial Sequence: Synthetic oligonucleotide
  Target: LAMA2; (-) strand; PAM type: YTN; PAM sequence: TTC
aagttttgcacatgtgattc

SEQ ID NO: 270150 - DNA, 20 bp, Artificial Sequence
  Description of Artificial Sequence: Synthetic oligonucleotide
  Target: LAMA2; (-) strand; PAM type: YTN; PAM sequence: TTT
caagttttgcacatgtgatt

SEQ ID NO: 270151 - DNA, 20 bp, Artificial Sequence
  Description of Artificial Sequence: Synthetic oligonucleotide
  Target: LAMA2; (-) strand; PAM type: YTN; PAM sequence: TTT
tcaagttttgcacatgtgat

SEQ ID NO: 270152 - DNA, 20 bp, Artificial Sequence
  Description of Artificial Sequence: Synthetic oligonucleotide
  Target: LAMA2; (-) strand; PAM type: YTN; PAM sequence: TTT
ttcaagttttgcacatgtga

SEQ ID NO: 270153 - DNA, 20 bp, Artificial Sequence
  Description of Artificial Sequence: Synthetic oligonucleotide
  Target: LAMA2; (-) strand; PAM type: YTN; PAM sequence: CTT
tttcaagttttgcacatgtg

SEQ ID NO: 270154 - DNA, 20 bp, Artificial Sequence
  Description of Artificial Sequence: Synthetic oligonucleotide
  Target: LAMA2; (-) strand; PAM type: YTN; PAM sequence: CTG
acacactttttcaagttttg

SEQ ID NO: 270155 - DNA, 20 bp, Artificial Sequence
  Description of Artificial Sequence: Synthetic oligonucleotide
  Target: LAMA2; (-) strand; PAM type: YTN; PAM sequence: CTG
atacaatcgataactgacac

SEQ ID NO: 270156 - DNA, 20 bp, Artificial Sequence
  Description of Artificial Sequence: Synthetic oligonucleotide
  Target: LAMA2; (-) strand; PAM type: YTN; PAM sequence: TTG
gaatgtataactgatacaat

SEQ ID NO: 270157 - DNA, 20 bp, Artificial Sequence
  Description of Artificial Sequence: Synthetic oligonucleotide
  Target: LAMA2; (-) strand; PAM type: YTN; PAM sequence: TTT
ggaatgtataactgatacaa

SEQ ID NO: 270158 - DNA, 20 bp, Artificial Sequence
  Description of Artificial Sequence: Synthetic oligonucleotide
  Target: LAMA2; (-) strand; PAM type: YTN; PAM sequence: CTT
tggaatgtataactgataca

SEQ ID NO: 270159 - DNA, 20 bp, Artificial Sequence
  Description of Artificial Sequence: Synthetic oligonucleotide
  Target: LAMA2; (-) strand; PAM type: YTN; PAM sequence: CTA
aactttggaatgtataactg

SEQ ID NO: 270160 - DNA, 20 bp, Artificial Sequence
  Description of Artificial Sequence: Synthetic oligonucleotide
  Target: LAMA2; (-) strand; PAM type: YTN; PAM sequence: CTA
ctaaactttggaatgtataa

SEQ ID NO: 270161 - DNA, 20 bp, Artificial Sequence
  Description of Artificial Sequence: Synthetic oligonucleotide
  Target: LAMA2; (-) strand; PAM type: YTN; PAM sequence: TTA
agctactaaactttggaatg

SEQ ID NO: 270162 - DNA, 20 bp, Artificial Sequence
  Description of Artificial Sequence: Synthetic oligonucleotide
  Target: LAMA2; (-) strand; PAM type: YTN; PAM sequence: TTT
aagctactaaactttggaat

SEQ ID NO: 270163 - DNA, 20 bp, Artificial Sequence
  Description of Artificial Sequence: Synthetic oligonucleotide
  Target: LAMA2; (-) strand; PAM type: YTN; PAM sequence: TTT
taagctactaaactttggaa

SEQ ID NO: 270164 - DNA, 20 bp, Artificial Sequence
  Description of Artificial Sequence: Synthetic oligonucleotide
  Target: LAMA2; (-) strand; PAM type: YTN; PAM sequence: TTG
ttttaagctactaaactttg

SEQ ID NO: 270165 - DNA, 20 bp, Artificial Sequence
  Description of Artificial Sequence: Synthetic oligonucleotide
  Target: LAMA2; (-) strand; PAM type: YTN; PAM sequence: TTG
ttgttttaagctactaaact

SEQ ID NO: 270166 - DNA, 20 bp, Artificial Sequence
  Description of Artificial Sequence: Synthetic oligonucleotide
  Target: LAMA2; (-) strand; PAM type: YTN; PAM sequence: CTT
gttgttttaagctactaaac

SEQ ID NO: 270167 - DNA, 20 bp, Artificial Sequence
  Description of Artificial Sequence: Synthetic oligonucleotide
  Target: LAMA2; (-) strand; PAM type: YTN; PAM sequence: CTA
cagaatcatgagagtgtatg

SEQ ID NO: 270168 - DNA, 20 bp, Artificial Sequence
  Description of Artificial Sequence: Synthetic oligonucleotide
  Target: LAMA2; (-) strand; PAM type: YTN; PAM sequence: TTG
ccaacctacagaatcatgag

SEQ ID NO: 270169 - DNA, 20 bp, Artificial Sequence
  Description of Artificial Sequence: Synthetic oligonucleotide
  Target: LAMA2; (-) strand; PAM type: YTN; PAM sequence: CTC
agcccaaattgccaacctac

SEQ ID NO: 270170 - DNA, 20 bp, Artificial Sequence
  Description of Artificial Sequence: Synthetic oligonucleotide
  Target: LAMA2; (-) strand; PAM type: YTN; PAM sequence: CTG
agctcagcccaaattgccaa

SEQ ID NO: 270171 - DNA, 20 bp, Artificial Sequence
  Description of Artificial Sequence: Synthetic oligonucleotide
  Target: LAMA2; (-) strand; PAM type: YTN; PAM sequence: CTG
tccaactgagctcagcccaa

SEQ ID NO: 270172 - DNA, 20 bp, Artificial Sequence
  Description of Artificial Sequence: Synthetic oligonucleotide
  Target: LAMA2; (-) strand; PAM type: YTN; PAM sequence: CTA
ggcgtgacagtggaagatct

SEQ ID NO: 270173 - DNA, 20 bp, Artificial Sequence
  Description of Artificial Sequence: Synthetic oligonucleotide
  Target: LAMA2; (-) strand; PAM type: YTN; PAM sequence: CTG
ggagcccctaggcgtgacag

SEQ ID NO: 270174 - DNA, 20 bp, Artificial Sequence
  Description of Artificial Sequence: Synthetic oligonucleotide
  Target: LAMA2; (-) strand; PAM type: YTN; PAM sequence: TTG
aggccatctgggagccccta

SEQ ID NO: 270175 - DNA, 20 bp, Artificial Sequence
  Description of Artificial Sequence: Synthetic oligonucleotide
  Target: LAMA2; (-) strand; PAM type: YTN; PAM sequence: CTT
gaggccatctgggagcccct

SEQ ID NO: 270176 - DNA, 20 bp, Artificial Sequence
  Description of Artificial Sequence: Synthetic oligonucleotide
  Target: LAMA2; (-) strand; PAM type: YTN; PAM sequence: TTG
ggcttgaggccatctgggag

SEQ ID NO: 270177 - DNA, 20 bp, Artificial Sequence
  Description of Artificial Sequence: Synthetic oligonucleotide
  Target: LAMA2; (-) strand; PAM type: YTN; PAM sequence: TTT
gggcttgaggccatctggga

SEQ ID NO: 270178 - DNA, 20 bp, Artificial Sequence
  Description of Artificial Sequence: Synthetic oligonucleotide
  Target: LAMA2; (-) strand; PAM type: YTN; PAM sequence: TTG
aggccccaatttgggcttga

SEQ ID NO: 270179 - DNA, 20 bp, Artificial Sequence
  Description of Artificial Sequence: Synthetic oligonucleotide
  Target: LAMA2; (-) strand; PAM type: YTN; PAM sequence: TTG
aggaagggaggcaacgtgag

SEQ ID NO: 270180 - DNA, 20 bp, Artificial Sequence
  Description of Artificial Sequence: Synthetic oligonucleotide
  Target: LAMA2; (-) strand; PAM type: YTN; PAM sequence: CTT
gaggaagggaggcaacgtga

SEQ ID NO: 270181 - DNA, 20 bp, Artificial Sequence
  Description of Artificial Sequence: Synthetic oligonucleotide
  Target: LAMA2; (-) strand; PAM type: YTN; PAM sequence: CTC
cttgaggaagggaggcaacg

SEQ ID NO: 270182 - DNA, 20 bp, Artificial Sequence
  Description of Artificial Sequence: Synthetic oligonucleotide
  Target: LAMA2; (-) strand; PAM type: YTN; PAM sequence: TTA
gcctccttgaggaagggagg

SEQ ID NO: 270183 - DNA, 20 bp, Artificial Sequence
  Description of Artificial Sequence: Synthetic oligonucleotide
  Target: LAMA2; (-) strand; PAM type: YTN; PAM sequence: TTC
agaacaatcccaggttagcc

SEQ ID NO: 270184 - DNA, 20 bp, Artificial Sequence
  Description of Artificial Sequence: Synthetic oligonucleotide
  Target: LAMA2; (-) strand; PAM type: YTN; PAM sequence: CTT
cagaacaatcccaggttagc

SEQ ID NO: 270185 - DNA, 20 bp, Artificial Sequence
  Description of Artificial Sequence: Synthetic oligonucleotide
  Target: LAMA2; (-) strand; PAM type: YTN; PAM sequence: CTG
ccttcagaacaatcccaggt

SEQ ID NO: 270186 - DNA, 20 bp, Artificial Sequence
  Description of Artificial Sequence: Synthetic oligonucleotide
  Target: LAMA2; (-) strand; PAM type: YTN; PAM sequence: CTG
ctgccttcagaacaatccca

SEQ ID NO: 270187 - DNA, 20 bp, Artificial Sequence
  Description of Artificial Sequence: Synthetic oligonucleotide
  Target: LAMA2; (-) strand; PAM type: YTN; PAM sequence: TTG
gacccctgctgccttcagaa

SEQ ID NO: 270188 - DNA, 20 bp, Artificial Sequence
  Description of Artificial Sequence: Synthetic oligonucleotide
  Target: LAMA2; (-) strand; PAM type: YTN; PAM sequence: CTT
ggacccctgctgccttcaga

SEQ ID NO: 270189 - DNA, 20 bp, Artificial Sequence
  Description of Artificial Sequence: Synthetic oligonucleotide
  Target: LAMA2; (-) strand; PAM type: YTN; PAM sequence: CTC
ttggacccctgctgccttca

SEQ ID NO: 270190 - DNA, 20 bp, Artificial Sequence
  Description of Artificial Sequence: Synthetic oligonucleotide
  Target: LAMA2; (-) strand; PAM type: YTN; PAM sequence: TTC
acactcttggacccctgctg

SEQ ID NO: 270191 - DNA, 20 bp, Artificial Sequence
  Description of Artificial Sequence: Synthetic oligonucleotide
  Target: LAMA2; (-) strand; PAM type: YTN; PAM sequence: TTT
cacactcttggacccctgct

SEQ ID NO: 270192 - DNA, 20 bp, Artificial Sequence
  Description of Artificial Sequence: Synthetic oligonucleotide
  Target: LAMA2; (-) strand; PAM type: YTN; PAM sequence: CTT
tcacactcttggacccctgc

SEQ ID NO: 270193 - DNA, 20 bp, Artificial Sequence
  Description of Artificial Sequence: Synthetic oligonucleotide
  Target: LAMA2; (-) strand; PAM type: YTN; PAM sequence: CTG
ctttcacactcttggacccc

SEQ ID NO: 270194 - DNA, 20 bp, Artificial Sequence
  Description of Artificial Sequence: Synthetic oligonucleotide
  Target: LAMA2; (-) strand; PAM type: YTN; PAM sequence: TTC
tgctttcacactcttggacc

SEQ ID NO: 270195 - DNA, 20 bp, Artificial Sequence
  Description of Artificial Sequence: Synthetic oligonucleotide
  Target: LAMA2; (-) strand; PAM type: YTN; PAM sequence: TTT
ctgctttcacactcttggac

SEQ ID NO: 270196 - DNA, 20 bp, Artificial Sequence
  Description of Artificial Sequence: Synthetic oligonucleotide
  Target: LAMA2; (-) strand; PAM type: YTN; PAM sequence: CTT
tctgctttcacactcttgga

SEQ ID NO: 270197 - DNA, 20 bp, Artificial Sequence
  Description of Artificial Sequence: Synthetic oligonucleotide
  Target: LAMA2; (-) strand; PAM type: YTN; PAM sequence: TTG
cactttctgctttcacactc

SEQ ID NO: 270198 - DNA, 20 bp, Artificial Sequence
  Description of Artificial Sequence: Synthetic oligonucleotide
  Target: LAMA2; (-) strand; PAM type: YTN; PAM sequence: TTT
gcactttctgctttcacact

SEQ ID NO: 270199 - DNA, 20 bp, Artificial Sequence
  Description of Artificial Sequence: Synthetic oligonucleotide
  Target: LAMA2; (-) strand; PAM type: YTN; PAM sequence: TTG
aaatttgcactttctgcttt

SEQ ID NO: 270200 - DNA, 20 bp, Artificial Sequence
  Description of Artificial Sequence: Synthetic oligonucleotide
  Target: LAMA2; (-) strand; PAM type: YTN; PAM sequence: CTG
accaacagaatgtggcagag

SEQ ID NO: 270201 - DNA, 20 bp, Artificial Sequence
  Description of Artificial Sequence: Synthetic oligonucleotide
  Target: LAMA2; (-) strand; PAM type: YTN; PAM sequence: CTC
tgaccaacagaatgtggcag

SEQ ID NO: 270202 - DNA, 20 bp, Artificial Sequence
  Description of Artificial Sequence: Synthetic oligonucleotide
  Target: LAMA2; (-) strand; PAM type: YTN; PAM sequence: TTG
caacatactctgaccaacag

SEQ ID NO: 270203 - DNA, 20 bp, Artificial Sequence
  Description of Artificial Sequence: Synthetic oligonucleotide
  Target: LAMA2; (-) strand; PAM type: YTN; PAM sequence: TTT
gcaacatactctgaccaaca

SEQ ID NO: 270204 - DNA, 20 bp, Artificial Sequence
  Description of Artificial Sequence: Synthetic oligonucleotide
  Target: LAMA2; (-) strand; PAM type: YTN; PAM sequence: CTT
tgcaacatactctgaccaac

SEQ ID NO: 270205 - DNA, 20 bp, Artificial Sequence
  Description of Artificial Sequence: Synthetic oligonucleotide
  Target: LAMA2; (-) strand; PAM type: YTN; PAM sequence: TTA
gctttgcaacatactctgac

SEQ ID NO: 270206 - DNA, 20 bp, Artificial Sequence
  Description of Artificial Sequence: Synthetic oligonucleotide
  Target: LAMA2; (-) strand; PAM type: YTN; PAM sequence: CTG
ggttagctttgcaacatact

SEQ ID NO: 270207 - DNA, 20 bp, Artificial Sequence
  Description of Artificial Sequence: Synthetic oligonucleotide
  Target: LAMA2; (-) strand; PAM type: YTN; PAM sequence: TTG
aatctgggttagctttgcaa

SEQ ID NO: 270208 - DNA, 20 bp, Artificial Sequence
  Description of Artificial Sequence: Synthetic oligonucleotide
  Target: LAMA2; (-) strand; PAM type: YTN; PAM sequence: CTT
gaatctgggttagctttgca

SEQ ID NO: 270209 - DNA, 20 bp, Artificial Sequence
  Description of Artificial Sequence: Synthetic oligonucleotide
  Target: LAMA2; (-) strand; PAM type: YTN; PAM sequence: TTC
cccttgaatctgggttagct

SEQ ID NO: 270210 - DNA, 20 bp, Artificial Sequence
  Description of Artificial Sequence: Synthetic oligonucleotide
  Target: LAMA2; (-) strand; PAM type: YTN; PAM sequence: CTT
ccccttgaatctgggttagc

SEQ ID NO: 270211 - DNA, 20 bp, Artificial Sequence
  Description of Artificial Sequence: Synthetic oligonucleotide
  Target: LAMA2; (-) strand; PAM type: YTN; PAM sequence: TTC
ccttccccttgaatctgggt

SEQ ID NO: 270212 - DNA, 20 bp, Artificial Sequence
  Description of Artificial Sequence: Synthetic oligonucleotide
  Target: LAMA2; (-) strand; PAM type: YTN; PAM sequence: CTT
cccttccccttgaatctggg

SEQ ID NO: 270213 - DNA, 20 bp, Artificial Sequence
  Description of Artificial Sequence: Synthetic oligonucleotide
  Target: LAMA2; (-) strand; PAM type: YTN; PAM sequence: CTA
cttcccttccccttgaatct

SEQ ID NO: 270214 - DNA, 20 bp, Artificial Sequence
  Description of Artificial Sequence: Synthetic oligonucleotide
  Target: LAMA2; (-) strand; PAM type: YTN; PAM sequence: TTA
agatgtgaagtctacttccc

SEQ ID NO: 270215 - DNA, 20 bp, Artificial Sequence
  Description of Artificial Sequence: Synthetic oligonucleotide
  Target: LAMA2; (-) strand; PAM type: YTN; PAM sequence: CTC
acattaagatgtgaagtcta

SEQ ID NO: 270216 - DNA, 20 bp, Artificial Sequence
  Description of Artificial Sequence: Synthetic oligonucleotide
  Target: LAMA2; (-) strand; PAM type: YTN; PAM sequence: TTG
ccacacctcacattaagatg

SEQ ID NO: 270217 - DNA, 20 bp, Artificial Sequence
  Description of Artificial Sequence: Synthetic oligonucleotide
  Target: LAMA2; (-) strand; PAM type: YTN; PAM sequence: TTT
gccacacctcacattaagat

SEQ ID NO: 270218 - DNA, 20 bp, Artificial Sequence
  Description of Artificial Sequence: Synthetic oligonucleotide
  Target: LAMA2; (-) strand; PAM type: YTN; PAM sequence: CTT
tgccacacctcacattaaga

SEQ ID NO: 270219 - DNA, 20 bp, Artificial Sequence
  Description of Artificial Sequence: Synthetic oligonucleotide
  Target: LAMA2; (-) strand; PAM type: YTN; PAM sequence: TTC
tttgccacacctcacattaa

SEQ ID NO: 270220 - DNA, 20 bp, Artificial Sequence
  Description of Artificial Sequence: Synthetic oligonucleotide
  Target: LAMA2; (-) strand; PAM type: YTN; PAM sequence: CTT
ctttgccacacctcacatta

SEQ ID NO: 270221 - DNA, 20 bp, Artificial Sequence
  Description of Artificial Sequence: Synthetic oligonucleotide
  Target: LAMA2; (-) strand; PAM type: YTN; PAM sequence: TTA
atacttctttgccacacctc

SEQ ID NO: 270222 - DNA, 20 bp, Artificial Sequence
  Description of Artificial Sequence: Synthetic oligonucleotide
  Target: LAMA2; (-) strand; PAM type: YTN; PAM sequence: CTG
ttaatacttctttgccacac

SEQ ID NO: 270223 - DNA, 20 bp, Artificial Sequence
  Description of Artificial Sequence: Synthetic oligonucleotide
  Target: LAMA2; (-) strand; PAM type: YTN; PAM sequence: TTA
ctgttaatacttctttgcca

SEQ ID NO: 270224 - DNA, 20 bp, Artificial Sequence
  Description of Artificial Sequence: Synthetic oligonucleotide
  Target: LAMA2; (-) strand; PAM type: YTN; PAM sequence: CTC
aaaaaaaaaaaaaaaaaaag

SEQ ID NO: 270225 - DNA, 20 bp, Artificial Sequence
  Description of Artificial Sequence: Synthetic oligonucleotide
  Target: LAMA2; (-) strand; PAM type: YTN; PAM sequence: CTC
catctcaaaaaaaaaaaaaa

SEQ ID NO: 270226 - DNA, 20 bp, Artificial Sequence
  Description of Artificial Sequence: Synthetic oligonucleotide
  Target: LAMA2; (-) strand; PAM type: YTN; PAM sequence: CTG
ggaaacagagtgagactcca

SEQ ID NO: 270227 - DNA, 20 bp, Artificial Sequence
  Description of Artificial Sequence: Synthetic oligonucleotide
  Target: LAMA2; (-) strand; PAM type: YTN; PAM sequence: TTC
agcctgggaaacagagtgag

SEQ ID NO: 270228 - DNA, 20 bp, Artificial Sequence
  Description of Artificial Sequence: Synthetic oligonucleotide
  Target: LAMA2; (-) strand; PAM type: YTN; PAM sequence: CTT
cagcctgggaaacagagtga

SEQ ID NO: 270229 - DNA, 20 bp, Artificial Sequence
  Description of Artificial Sequence: Synthetic oligonucleotide
  Target: LAMA2; (-) strand; PAM type: YTN; PAM sequence: CTG
cacttcagcctgggaaacag

SEQ ID NO: 270230 - DNA, 20 bp, Artificial Sequence
  Description of Artificial Sequence: Synthetic oligonucleotide
  Target: LAMA2; (-) strand; PAM type: YTN; PAM sequence: CTA
gatcatgccactgcacttca

SEQ ID NO: 270231 - DNA, 20 bp, Artificial Sequence
  Description of Artificial Sequence: Synthetic oligonucleotide
  Target: LAMA2; (-) strand; PAM type: YTN; PAM sequence: CTG
cagtgagcctagatcatgcc

SEQ ID NO: 270232 - DNA, 20 bp, Artificial Sequence
  Description of Artificial Sequence: Synthetic oligonucleotide
  Target: LAMA2; (-) strand; PAM type: YTN; PAM sequence: TTG
aacccaggaggtagaggctg

SEQ ID NO: 270233 - DNA, 20 bp, Artificial Sequence
  Description of Artificial Sequence: Synthetic oligonucleotide
  Target: LAMA2; (-) strand; PAM type: YTN; PAM sequence: CTT
gaacccaggaggtagaggct

SEQ ID NO: 270234 - DNA, 20 bp, Artificial Sequence
  Description of Artificial Sequence: Synthetic oligonucleotide
  Target: LAMA2; (-) strand; PAM type: YTN; PAM sequence: CTG
agggaggagtatcacttgaa

SEQ ID NO: 270235 - DNA, 20 bp, Artificial Sequence
  Description of Artificial Sequence: Synthetic oligonucleotide
  Target: LAMA2; (-) strand; PAM type: YTN; PAM sequence: CTC
gggaggctgagggaggagta

SEQ ID NO: 270236 - DNA, 20 bp, Artificial Sequence
  Description of Artificial Sequence: Synthetic oligonucleotide
  Target: LAMA2; (-) strand; PAM type: YTN; PAM sequence: CTA
ctcgggaggctgagggagga

SEQ ID NO: 270237 - DNA, 20 bp, Artificial Sequence
  Description of Artificial Sequence: Synthetic oligonucleotide
  Target: LAMA2; (-) strand; PAM type: YTN; PAM sequence: CTA
gtcccgctactcgggaggct

SEQ ID NO: 270238 - DNA, 20 bp, Artificial Sequence
  Description of Artificial Sequence: Synthetic oligonucleotide
  Target: LAMA2; (-) strand; PAM type: YTN; PAM sequence: CTC
tagtcccgctactcgggagg

SEQ ID NO: 270239 - DNA, 20 bp, Artificial Sequence
  Description of Artificial Sequence: Synthetic oligonucleotide
  Target: LAMA2; (-) strand; PAM type: YTN; PAM sequence: TTA
gccaggtgtggtggcatgtg

SEQ ID NO: 270240 - DNA, 20 bp, Artificial Sequence
  Description of Artificial Sequence: Synthetic oligonucleotide
  Target: LAMA2; (-) strand; PAM type: YTN; PAM sequence: CTA
aaaatacaaaaattagccag

SEQ ID NO: 270241 - DNA, 20 bp, Artificial Sequence
  Description of Artificial Sequence: Synthetic oligonucleotide
  Target: LAMA2; (-) strand; PAM type: YTN; PAM sequence: CTA
ctaaaaatacaaaaattagc

SEQ ID NO: 270242 - DNA, 20 bp, Artificial Sequence
  Description of Artificial Sequence: Synthetic oligonucleotide
  Target: LAMA2; (-) strand; PAM type: YTN; PAM sequence: CTC
tactaaaaatacaaaaatta

SEQ ID NO: 270243 - DNA, 20 bp, Artificial Sequence
  Description of Artificial Sequence: Synthetic oligonucleotide
  Target: LAMA2; (-) strand; PAM type: YTN; PAM sequence: CTG
gccaacatggtgaaacccca

SEQ ID NO: 270244 - DNA, 20 bp, Artificial Sequence
  Description of Artificial Sequence: Synthetic oligonucleotide
  Target: LAMA2; (-) strand; PAM type: YTN; PAM sequence: TTG
agaccagcctggccaacatg

SEQ ID NO: 270245 - DNA, 20 bp, Artificial Sequence
  Description of Artificial Sequence: Synthetic oligonucleotide
  Target: LAMA2; (-) strand; PAM type: YTN; PAM sequence: TTT
gagaccagcctggccaacat

SEQ ID NO: 270246 - DNA, 20 bp, Artificial Sequence
  Description of Artificial Sequence: Synthetic oligonucleotide
  Target: LAMA2; (-) strand; PAM type: YTN; PAM sequence: TTG
aggtgagaagtttgagacca

SEQ ID NO: 270247 - DNA, 20 bp, Artificial Sequence
  Description of Artificial Sequence: Synthetic oligonucleotide
  Target: LAMA2; (-) strand; PAM type: YTN; PAM sequence: CTT
gaggtgagaagtttgagacc

SEQ ID NO: 270248 - DNA, 20 bp, Artificial Sequence
  Description of Artificial Sequence: Synthetic oligonucleotide
  Target: LAMA2; (-) strand; PAM type: YTN; PAM sequence: TTG
agatgggcagatcacttgag

SEQ ID NO: 270249 - DNA, 20 bp, Artificial Sequence
  Description of Artificial Sequence: Synthetic oligonucleotide
  Target: LAMA2; (-) strand; PAM type: YTN; PAM sequence: CTT
gagatgggcagatcacttga

SEQ ID NO: 270250 - DNA, 20 bp, Artificial Sequence
  Description of Artificial Sequence: Synthetic oligonucleotide
  Target: LAMA2; (-) strand; PAM type: YTN; PAM sequence: CTG
taatccaagcagtatgggag

SEQ ID NO: 270251 - DNA, 20 bp, Artificial Sequence
  Description of Artificial Sequence: Synthetic oligonucleotide
  Target: LAMA2; (-) strand; PAM type: YTN; PAM sequence: CTC
aggcctgtaatccaagcagt

SEQ ID NO: 270252 - DNA, 20 bp, Artificial Sequence
  Description of Artificial Sequence: Synthetic oligonucleotide
  Target: LAMA2; (-) strand; PAM type: YTN; PAM sequence: CTG
ggtgtggtggctcaggcctg

SEQ ID NO: 270253 - DNA, 20 bp, Artificial Sequence
  Description of Artificial Sequence: Synthetic oligonucleotide
  Target: LAMA2; (-) strand; PAM type: YTN; PAM sequence: CTG
gctgggtgtggtggctcagg

SEQ ID NO: 270254 - DNA, 20 bp, Artificial Sequence
  Description of Artificial Sequence: Synthetic oligonucleotide
  Target: LAMA2; (-) strand; PAM type: YTN; PAM sequence: CTA
ctggctgggtgtggtggctc

SEQ ID NO: 270255 - DNA, 20 bp, Artificial Sequence
  Description of Artificial Sequence: Synthetic oligonucleotide
  Target: LAMA2; (-) strand; PAM type: YTN; PAM sequence: TTA
ctactggctgggtgtggtgg

SEQ ID NO: 270256 - DNA, 20 bp, Artificial Sequence
  Description of Artificial Sequence: Synthetic oligonucleotide
  Target: LAMA2; (-) strand; PAM type: YTN; PAM sequence: TTA
aaaatggttactactggctg

SEQ ID NO: 270257 - DNA, 20 bp, Artificial Sequence
  Description of Artificial Sequence: Synthetic oligonucleotide
  Target: LAMA2; (-) strand; PAM type: YTN; PAM sequence: CTG
gggacaattaaaaatggtta

SEQ ID NO: 270258 - DNA, 20 bp, Artificial Sequence
  Description of Artificial Sequence: Synthetic oligonucleotide
  Target: LAMA2; (-) strand; PAM type: YTN; PAM sequence: TTC
tggggacaattaaaaatggt

SEQ ID NO: 270259 - DNA, 20 bp, Artificial Sequence
  Description of Artificial Sequence: Synthetic oligonucleotide
  Target: LAMA2; (-) strand; PAM type: YTN; PAM sequence: TTT
ctggggacaattaaaaatgg

SEQ ID NO: 270260 - DNA, 20 bp, Artificial Sequence
  Description of Artificial Sequence: Synthetic oligonucleotide
  Target: LAMA2; (-) strand; PAM type: YTN; PAM sequence: CTG
acagatcaaagcgatgatca

SEQ ID NO: 270261 - DNA, 20 bp, Artificial Sequence
  Description of Artificial Sequence: Synthetic oligonucleotide
  Target: LAMA2; (-) strand; PAM type: YTN; PAM sequence: TTA
ggaggaaagaacaccatgac

SEQ ID NO: 270262 - DNA, 20 bp, Artificial Sequence
  Description of Artificial Sequence: Synthetic oligonucleotide
  Target: LAMA2; (-) strand; PAM type: YTN; PAM sequence: TTT
aggaggaaagaacaccatga

SEQ ID NO: 270263 - DNA, 20 bp, Artificial Sequence
  Description of Artificial Sequence: Synthetic oligonucleotide
  Target: LAMA2; (-) strand; PAM type: YTN; PAM sequence: CTT
taggaggaaagaacaccatg

SEQ ID NO: 270264 - DNA, 20 bp, Artificial Sequence
  Description of Artificial Sequence: Synthetic oligonucleotide
  Target: LAMA2; (-) strand; PAM type: YTN; PAM sequence: CTC
aggaaagggagagatggacg

SEQ ID NO: 270265 - DNA, 20 bp, Artificial Sequence
  Description of Artificial Sequence: Synthetic oligonucleotide
  Target: LAMA2; (-) strand; PAM type: YTN; PAM sequence: TTG
actcaggaaagggagagatg

SEQ ID NO: 270266 - DNA, 20 bp, Artificial Sequence
  Description of Artificial Sequence: Synthetic oligonucleotide
  Target: LAMA2; (-) strand; PAM type: YTN; PAM sequence: TTT
gactcaggaaagggagagat

SEQ ID NO: 270267 - DNA, 20 bp, Artificial Sequence
  Description of Artificial Sequence: Synthetic oligonucleotide
  Target: LAMA2; (-) strand; PAM type: YTN; PAM sequence: TTT
tgactcaggaaagggagaga

SEQ ID NO: 270268 - DNA, 20 bp, Artificial Sequence
  Description of Artificial Sequence: Synthetic oligonucleotide
  Target: LAMA2; (-) strand; PAM type: YTN; PAM sequence: TTC
agttttgactcaggaaaggg

SEQ ID NO: 270269 - DNA, 20 bp, Artificial Sequence
  Description of Artificial Sequence: Synthetic oligonucleotide
  Target: LAMA2; (-) strand; PAM type: YTN; PAM sequence: TTT
cagttttgactcaggaaagg

SEQ ID NO: 270270 - DNA, 20 bp, Artificial Sequence
  Description of Artificial Sequence: Synthetic oligonucleotide
  Target: LAMA2; (-) strand; PAM type: YTN; PAM sequence: CTG
aaggatttcagttttgactc

SEQ ID NO: 270271 - DNA, 20 bp, Artificial Sequence
  Description of Artificial Sequence: Synthetic oligonucleotide
  Target: LAMA2; (-) strand; PAM type: YTN; PAM sequence: CTG
cctgaaggatttcagttttg

SEQ ID NO: 270272 - DNA, 20 bp, Artificial Sequence
  Description of Artificial Sequence: Synthetic oligonucleotide
  Target: LAMA2; (-) strand; PAM type: YTN; PAM sequence: TTC
agatacctgcctgaaggatt

SEQ ID NO: 270273 - DNA, 20 bp, Artificial Sequence
  Description of Artificial Sequence: Synthetic oligonucleotide
  Target: LAMA2; (-) strand; PAM type: YTN; PAM sequence: CTA
ttcagatacctgcctgaagg

SEQ ID NO: 270274 - DNA, 20 bp, Artificial Sequence
  Description of Artificial Sequence: Synthetic oligonucleotide
  Target: LAMA2; (-) strand; PAM type: YTN; PAM sequence: CTG
tccgatcaacaagaatgact

SEQ ID NO: 270275 - DNA, 20 bp, Artificial Sequence
  Description of Artificial Sequence: Synthetic oligonucleotide
  Target: LAMA2; (-) strand; PAM type: YTN; PAM sequence: TTG
cagaggcagagactgtccga

SEQ ID NO: 270276 - DNA, 20 bp, Artificial Sequence
  Description of Artificial Sequence: Synthetic oligonucleotide
  Target: LAMA2; (-) strand; PAM type: YTN; PAM sequence: TTG
tgattgcagaggcagagact

SEQ ID NO: 270277 - DNA, 20 bp, Artificial Sequence
  Description of Artificial Sequence: Synthetic oligonucleotide
  Target: LAMA2; (-) strand; PAM type: YTN; PAM sequence: CTT
gtgattgcagaggcagagac

SEQ ID NO: 270278 - DNA, 20 bp, Artificial Sequence
  Description of Artificial Sequence: Synthetic oligonucleotide
  Target: LAMA2; (-) strand; PAM type: YTN; PAM sequence: CTA
tcttgtgattgcagaggcag

SEQ ID NO: 270279 - DNA, 20 bp, Artificial Sequence
  Description of Artificial Sequence: Synthetic oligonucleotide
  Target: LAMA2; (-) strand; PAM type: YTN; PAM sequence: TTA
gagacagaaagagaactatc

SEQ ID NO: 270280 - DNA, 20 bp, Artificial Sequence
  Description of Artificial Sequence: Synthetic oligonucleotide
  Target: LAMA2; (-) strand; PAM type: YTN; PAM sequence: TTT
agagacagaaagagaactat

SEQ ID NO: 270281 - DNA, 20 bp, Artificial Sequence
  Description of Artificial Sequence: Synthetic oligonucleotide
  Target: LAMA2; (-) strand; PAM type: YTN; PAM sequence: TTA
aaaacaatggtttagagaca

SEQ ID NO: 270282 - DNA, 20 bp, Artificial Sequence
  Description of Artificial Sequence: Synthetic oligonucleotide
  Target: LAMA2; (-) strand; PAM type: YTN; PAM sequence: CTC
acagatgtgtgaggaacagg

SEQ ID NO: 270283 - DNA, 20 bp, Artificial Sequence
  Description of Artificial Sequence: Synthetic oligonucleotide
  Target: LAMA2; (-) strand; PAM type: YTN; PAM sequence: CTG
aatgtgagaacaagatagaa

SEQ ID NO: 270284 - DNA, 20 bp, Artificial Sequence
  Description of Artificial Sequence: Synthetic oligonucleotide
  Target: LAMA2; (-) strand; PAM type: YTN; PAM sequence: TTC
tgaatgtgagaacaagatag

SEQ ID NO: 270285 - DNA, 20 bp, Artificial Sequence
  Description of Artificial Sequence: Synthetic oligonucleotide
  Target: LAMA2; (-) strand; PAM type: YTN; PAM sequence: CTT
ctgaatgtgagaacaagata

SEQ ID NO: 270286 - DNA, 20 bp, Artificial Sequence
  Description of Artificial Sequence: Synthetic oligonucleotide
  Target: LAMA2; (-) strand; PAM type: YTN; PAM sequence: TTG
gccggaagaaaacttctgaa

SEQ ID NO: 270287 - DNA, 20 bp, Artificial Sequence
  Description of Artificial Sequence: Synthetic oligonucleotide
  Target: LAMA2; (-) strand; PAM type: YTN; PAM sequence: TTG
gggttggccggaagaaaact

SEQ ID NO: 270288 - DNA, 20 bp, Artificial Sequence
  Description of Artificial Sequence: Synthetic oligonucleotide
  Target: LAMA2; (-) strand; PAM type: YTN; PAM sequence: TTA
ggagagaagagagaggggaa

SEQ ID NO: 270289 - DNA, 20 bp, Artificial Sequence
  Description of Artificial Sequence: Synthetic oligonucleotide
  Target: LAMA2; (-) strand; PAM type: YTN; PAM sequence: TTG
agcatggcatgtgcccaagt

SEQ ID NO: 270290 - DNA, 20 bp, Artificial Sequence
  Description of Artificial Sequence: Synthetic oligonucleotide
  Target: LAMA2; (-) strand; PAM type: YTN; PAM sequence: TTT
gagcatggcatgtgcccaag

SEQ ID NO: 270291 - DNA, 20 bp, Artificial Sequence
  Description of Artificial Sequence: Synthetic oligonucleotide
  Target: LAMA2; (-) strand; PAM type: YTN; PAM sequence: TTA
atgtttgagcatggcatgtg

SEQ ID NO: 270292 - DNA, 20 bp, Artificial Sequence
  Description of Artificial Sequence: Synthetic oligonucleotide
  Target: LAMA2; (-) strand; PAM type: YTN; PAM sequence: TTG
gacaaagagaatggcaaggg

SEQ ID NO: 270293 - DNA, 20 bp, Artificial Sequence
  Description of Artificial Sequence: Synthetic oligonucleotide
  Target: LAMA2; (-) strand; PAM type: YTN; PAM sequence: TTT
ggacaaagagaatggcaagg

SEQ ID NO: 270294 - DNA, 20 bp, Artificial Sequence
  Description of Artificial Sequence: Synthetic oligonucleotide
  Target: LAMA2; (-) strand; PAM type: YTN; PAM sequence: CTT
tggacaaagagaatggcaag

SEQ ID NO: 270295 - DNA, 20 bp, Artificial Sequence
  Description of Artificial Sequence: Synthetic oligonucleotide
  Target: LAMA2; (-) strand; PAM type: YTN; PAM sequence: TTG
tgagagaagggtatcaaaac

SEQ ID NO: 270296 - DNA, 20 bp, Artificial Sequence
  Description of Artificial Sequence: Synthetic oligonucleotide
  Target: LAMA2; (-) strand; PAM type: YTN; PAM sequence: TTT
gtgagagaagggtatcaaaa

SEQ ID NO: 270297 - DNA, 20 bp, Artificial Sequence
  Description of Artificial Sequence: Synthetic oligonucleotide
  Target: LAMA2; (-) strand; PAM type: YTN; PAM sequence: TTT
tgtgagagaagggtatcaaa

SEQ ID NO: 270298 - DNA, 20 bp, Artificial Sequence
  Description of Artificial Sequence: Synthetic oligonucleotide
  Target: LAMA2; (-) strand; PAM type: YTN; PAM sequence: TTT
ttgtgagagaagggtatcaa

SEQ ID NO: 270299 - DNA, 20 bp, Artificial Sequence
  Description of Artificial Sequence: Synthetic oligonucleotide
  Target: LAMA2; (-) strand; PAM type: YTN; PAM sequence: CTA
atatttttgtgagagaaggg

SEQ ID NO: 270300 - DNA, 20 bp, Artificial Sequence
  Description of Artificial Sequence: Synthetic oligonucleotide
  Target: LAMA2; (-) strand; PAM type: YTN; PAM sequence: TTG
tgggctaatatttttgtgag

SEQ ID NO: 270301 - DNA, 20 bp, Artificial Sequence
  Description of Artificial Sequence: Synthetic oligonucleotide
  Target: LAMA2; (-) strand; PAM type: YTN; PAM sequence: TTT
gtgggctaatatttttgtga

SEQ ID NO: 270302 - DNA, 20 bp, Artificial Sequence
  Description of Artificial Sequence: Synthetic oligonucleotide
  Target: LAMA2; (-) strand; PAM type: YTN; PAM sequence: TTC
agtaaatatttgtgggctaa

SEQ ID NO: 270303 - DNA, 20 bp, Artificial Sequence
  Description of Artificial Sequence: Synthetic oligonucleotide
  Target: LAMA2; (-) strand; PAM type: YTN; PAM sequence: TTA
atattcagtaaatatttgtg

SEQ ID NO: 270304 - DNA, 20 bp, Artificial Sequence
  Description of Artificial Sequence: Synthetic oligonucleotide
  Target: LAMA2; (-) strand; PAM type: YTN; PAM sequence: TTG
tacacagttaatattcagta

SEQ ID NO: 270305 - DNA, 20 bp, Artificial Sequence
  Description of Artificial Sequence: Synthetic oligonucleotide
  Target: LAMA2; (-) strand; PAM type: YTN; PAM sequence: CTT
gtacacagttaatattcagt

SEQ ID NO: 270306 - DNA, 20 bp, Artificial Sequence
  Description of Artificial Sequence: Synthetic oligonucleotide
  Target: LAMA2; (-) strand; PAM type: YTN; PAM sequence: CTA
ggaaagggtcttgtacacag

SEQ ID NO: 270307 - DNA, 20 bp, Artificial Sequence
  Description of Artificial Sequence: Synthetic oligonucleotide
  Target: LAMA2; (-) strand; PAM type: YTN; PAM sequence: TTA
tggtgcctaggaaagggtct

SEQ ID NO: 270308 - DNA, 20 bp, Artificial Sequence
  Description of Artificial Sequence: Synthetic oligonucleotide
  Target: LAMA2; (-) strand; PAM type: YTN; PAM sequence: TTG
gttatggtgcctaggaaagg

SEQ ID NO: 270309 - DNA, 20 bp, Artificial Sequence
  Description of Artificial Sequence: Synthetic oligonucleotide
  Target: LAMA2; (-) strand; PAM type: YTN; PAM sequence: CTT
ggttatggtgcctaggaaag

SEQ ID NO: 270310 - DNA, 20 bp, Artificial Sequence
  Description of Artificial Sequence: Synthetic oligonucleotide
  Target: LAMA2; (-) strand; PAM type: YTN; PAM sequence: TTA
aacaccttggttatggtgcc

SEQ ID NO: 270311 - DNA, 20 bp, Artificial Sequence
  Description of Artificial Sequence: Synthetic oligonucleotide
  Target: LAMA2; (-) strand; PAM type: YTN; PAM sequence: CTT
aaacaccttggttatggtgc

SEQ ID NO: 270312 - DNA, 20 bp, Artificial Sequence
  Description of Artificial Sequence: Synthetic oligonucleotide
  Target: LAMA2; (-) strand; PAM type: YTN; PAM sequence: TTA
aagaagggaccttaaacacc

SEQ ID NO: 270313 - DNA, 20 bp, Artificial Sequence
  Description of Artificial Sequence: Synthetic oligonucleotide
  Target: LAMA2; (-) strand; PAM type: YTN; PAM sequence: CTC
gttaaagaagggaccttaaa

SEQ ID NO: 270314 - DNA, 20 bp, Artificial Sequence
  Description of Artificial Sequence: Synthetic oligonucleotide
  Target: LAMA2; (-) strand; PAM type: YTN; PAM sequence: TTC
ctcgttaaagaagggacctt

SEQ ID NO: 270315 - DNA, 20 bp, Artificial Sequence
  Description of Artificial Sequence: Synthetic oligonucleotide
  Target: LAMA2; (-) strand; PAM type: YTN; PAM sequence: CTT
cctcgttaaagaagggacct

SEQ ID NO: 270316 - DNA, 20 bp, Artificial Sequence
  Description of Artificial Sequence: Synthetic oligonucleotide
  Target: LAMA2; (-) strand; PAM type: YTN; PAM sequence: TTC
ttcctcgttaaagaagggac

SEQ ID NO: 270317 - DNA, 20 bp, Artificial Sequence
  Description of Artificial Sequence: Synthetic oligonucleotide
  Target: LAMA2; (-) strand; PAM type: YTN; PAM sequence: TTT
cttcctcgttaaagaaggga

SEQ ID NO: 270318 - DNA, 20 bp, Artificial Sequence
  Description of Artificial Sequence: Synthetic oligonucleotide
  Target: LAMA2; (-) strand; PAM type: YTN; PAM sequence: CTT
tcttcctcgttaaagaaggg

SEQ ID NO: 270319 - DNA, 20 bp, Artificial Sequence
  Description of Artificial Sequence: Synthetic oligonucleotide
  Target: LAMA2; (-) strand; PAM type: YTN; PAM sequence: TTC
tttcttcctcgttaaagaag

SEQ ID NO: 270320 - DNA, 20 bp, Artificial Sequence
  Description of Artificial Sequence: Synthetic oligonucleotide
  Target: LAMA2; (-) strand; PAM type: YTN; PAM sequence: TTA
tatattctttcttcctcgtt

SEQ ID NO: 270321 - DNA, 20 bp, Artificial Sequence
  Description of Artificial Sequence: Synthetic oligonucleotide
  Target: LAMA2; (-) strand; PAM type: YTN; PAM sequence: TTT
atatattctttcttcctcgt

SEQ ID NO: 270322 - DNA, 20 bp, Artificial Sequence
  Description of Artificial Sequence: Synthetic oligonucleotide
  Target: LAMA2; (-) strand; PAM type: YTN; PAM sequence: TTA
tttatatattctttcttcct

SEQ ID NO: 270323 - DNA, 20 bp, Artificial Sequence
  Description of Artificial Sequence: Synthetic oligonucleotide
  Target: LAMA2; (-) strand; PAM type: YTN; PAM sequence: TTT
atttatatattctttcttcc

SEQ ID NO: 270324 - DNA, 20 bp, Artificial Sequence
  Description of Artificial Sequence: Synthetic oligonucleotide
  Target: LAMA2; (-) strand; PAM type: YTN; PAM sequence: TTA
atttatttatatattctttc

SEQ ID NO: 270325 - DNA, 20 bp, Artificial Sequence
  Description of Artificial Sequence: Synthetic oligonucleotide
  Target: LAMA2; (-) strand; PAM type: YTN; PAM sequence: CTT
aatttatttatatattcttt

SEQ ID NO: 270326 - DNA, 20 bp, Artificial Sequence
  Description of Artificial Sequence: Synthetic oligonucleotide
  Target: LAMA2; (-) strand; PAM type: YTN; PAM sequence: TTA
cttaatttatttatatattc

SEQ ID NO: 270327 - DNA, 20 bp, Artificial Sequence
  Description of Artificial Sequence: Synthetic oligonucleotide
  Target: LAMA2; (-) strand; PAM type: YTN; PAM sequence: TTA
ttacttaatttatttatata

SEQ ID NO: 270328 - DNA, 20 bp, Artificial Sequence
  Description of Artificial Sequence: Synthetic oligonucleotide
  Target: LAMA2; (-) strand; PAM type: YTN; PAM sequence: CTA
cattattacttaatttattt

SEQ ID NO: 270329 - DNA, 20 bp, Artificial Sequence
  Description of Artificial Sequence: Synthetic oligonucleotide
  Target: LAMA2; (-) strand; PAM type: YTN; PAM sequence: TTG
ggctacattattacttaatt

SEQ ID NO: 270330 - DNA, 20 bp, Artificial Sequence
  Description of Artificial Sequence: Synthetic oligonucleotide
  Target: LAMA2; (-) strand; PAM type: YTN; PAM sequence: TTT
gggctacattattacttaat

SEQ ID NO: 270331 - DNA, 20 bp, Artificial Sequence
  Description of Artificial Sequence: Synthetic oligonucleotide
  Target: LAMA2; (-) strand; PAM type: YTN; PAM sequence: CTG
tttgggctacattattactt

SEQ ID NO: 270332 - DNA, 20 bp, Artificial Sequence
  Description of Artificial Sequence: Synthetic oligonucleotide
  Target: LAMA2; (-) strand; PAM type: YTN; PAM sequence: TTA
tgcctgtttgggctacatta

SEQ ID NO: 270333 - DNA, 20 bp, Artificial Sequence
  Description of Artificial Sequence: Synthetic oligonucleotide
  Target: LAMA2; (-) strand; PAM type: YTN; PAM sequence: CTT
atgcctgtttgggctacatt

SEQ ID NO: 270334 - DNA, 20 bp, Artificial Sequence
  Description of Artificial Sequence: Synthetic oligonucleotide
  Target: LAMA2; (-) strand; PAM type: YTN; PAM sequence: TTA
acacttatgcctgtttgggc

SEQ ID NO: 270335 - DNA, 20 bp, Artificial Sequence
  Description of Artificial Sequence: Synthetic oligonucleotide
  Target: LAMA2; (-) strand; PAM type: YTN; PAM sequence: CTT
aacacttatgcctgtttggg

SEQ ID NO: 270336 - DNA, 20 bp, Artificial Sequence
  Description of Artificial Sequence: Synthetic oligonucleotide
  Target: LAMA2; (-) strand; PAM type: YTN; PAM sequence: TTC
ttaacacttatgcctgtttg

SEQ ID NO: 270337 - DNA, 20 bp, Artificial Sequence
  Description of Artificial Sequence: Synthetic oligonucleotide
  Target: LAMA2; (-) strand; PAM type: YTN; PAM sequence: TTT
cttaacacttatgcctgttt

SEQ ID NO: 270338 - DNA, 20 bp, Artificial Sequence
  Description of Artificial Sequence: Synthetic oligonucleotide
  Target: LAMA2; (-) strand; PAM type: YTN; PAM sequence: CTT
tcttaacacttatgcctgtt

SEQ ID NO: 270339 - DNA, 20 bp, Artificial Sequence
  Description of Artificial Sequence: Synthetic oligonucleotide
  Target: LAMA2; (-) strand; PAM type: YTN; PAM sequence: TTG
ctttcttaacacttatgcct

SEQ ID NO: 270340 - DNA, 20 bp, Artificial Sequence
  Description of Artificial Sequence: Synthetic oligonucleotide
  Target: LAMA2; (-) strand; PAM type: YTN; PAM sequence: TTT
gctttcttaacacttatgcc

SEQ ID NO: 270341 - DNA, 20 bp, Artificial Sequence
  Description of Artificial Sequence: Synthetic oligonucleotide
  Target: LAMA2; (-) strand; PAM type: YTN; PAM sequence: CTT
tgctttcttaacacttatgc

SEQ ID NO: 270342 - DNA, 20 bp, Artificial Sequence
  Description of Artificial Sequence: Synthetic oligonucleotide
  Target: LAMA2; (-) strand; PAM type: YTN; PAM sequence: TTC
ctttgctttcttaacactta

SEQ ID NO: 270343 - DNA, 20 bp, Artificial Sequence
  Description of Artificial Sequence: Synthetic oligonucleotide
  Target: LAMA2; (-) strand; PAM type: YTN; PAM sequence: TTT
cctttgctttcttaacactt

SEQ ID NO: 270344 - DNA, 20 bp, Artificial Sequence
  Description of Artificial Sequence: Synthetic oligonucleotide
  Target: LAMA2; (-) strand; PAM type: YTN; PAM sequence: CTG
catttcctttgctttcttaa

SEQ ID NO: 270345 - DNA, 20 bp, Artificial Sequence
  Description of Artificial Sequence: Synthetic oligonucleotide
  Target: LAMA2; (-) strand; PAM type: YTN; PAM sequence: CTA
ctgcatttcctttgctttct

SEQ ID NO: 270346 - DNA, 20 bp, Artificial Sequence
  Description of Artificial Sequence: Synthetic oligonucleotide
  Target: LAMA2; (-) strand; PAM type: YTN; PAM sequence: CTG
cgccagtcactactgcattt

SEQ ID NO: 270347 - DNA, 20 bp, Artificial Sequence
  Description of Artificial Sequence: Synthetic oligonucleotide
  Target: LAMA2; (-) strand; PAM type: YTN; PAM sequence: CTA
taccctgcgccagtcactac

SEQ ID NO: 270348 - DNA, 20 bp, Artificial Sequence
  Description of Artificial Sequence: Synthetic oligonucleotide
  Target: LAMA2; (-) strand; PAM type: YTN; PAM sequence: CTC
cccaccacccccagccctat

SEQ ID NO: 270349 - DNA, 20 bp, Artificial Sequence
  Description of Artificial Sequence: Synthetic oligonucleotide
  Target: LAMA2; (-) strand; PAM type: YTN; PAM sequence: CTG
aaactccccaccacccccag

SEQ ID NO: 270350 - DNA, 20 bp, Artificial Sequence
  Description of Artificial Sequence: Synthetic oligonucleotide
  Target: LAMA2; (-) strand; PAM type: YTN; PAM sequence: TTA
cctgaaactccccaccaccc

SEQ ID NO: 270351 - DNA, 20 bp, Artificial Sequence
  Description of Artificial Sequence: Synthetic oligonucleotide
  Target: LAMA2; (-) strand; PAM type: YTN; PAM sequence: CTG
ttacctgaaactccccacca

SEQ ID NO: 270352 - DNA, 20 bp, Artificial Sequence
  Description of Artificial Sequence: Synthetic oligonucleotide
  Target: LAMA2; (-) strand; PAM type: YTN; PAM sequence: TTA
ctgttacctgaaactcccca

SEQ ID NO: 270353 - DNA, 20 bp, Artificial Sequence
  Description of Artificial Sequence: Synthetic oligonucleotide
  Target: LAMA2; (-) strand; PAM type: YTN; PAM sequence: CTA
aaattactgttacctgaaac

SEQ ID NO: 270354 - DNA, 20 bp, Artificial Sequence
  Description of Artificial Sequence: Synthetic oligonucleotide
  Target: LAMA2; (-) strand; PAM type: YTN; PAM sequence: TTC
taaaattactgttacctgaa

SEQ ID NO: 270355 - DNA, 20 bp, Artificial Sequence
  Description of Artificial Sequence: Synthetic oligonucleotide
  Target: LAMA2; (-) strand; PAM type: YTN; PAM sequence: CTG
atgattctaaaattactgtt

SEQ ID NO: 270356 - DNA, 20 bp, Artificial Sequence
  Description of Artificial Sequence: Synthetic oligonucleotide
  Target: LAMA2; (-) strand; PAM type: YTN; PAM sequence: TTC
agagagcaagtccctgatga

SEQ ID NO: 270357 - DNA, 20 bp, Artificial Sequence
  Description of Artificial Sequence: Synthetic oligonucleotide
  Target: LAMA2; (-) strand; PAM type: YTN; PAM sequence: TTT
cagagagcaagtccctgatg

SEQ ID NO: 270358 - DNA, 20 bp, Artificial Sequence
  Description of Artificial Sequence: Synthetic oligonucleotide
  Target: LAMA2; (-) strand; PAM type: YTN; PAM sequence: TTT
tcagagagcaagtccctgat

SEQ ID NO: 270359 - DNA, 20 bp, Artificial Sequence
  Description of Artificial Sequence: Synthetic oligonucleotide
  Target: LAMA2; (-) strand; PAM type: YTN; PAM sequence: TTT
ttcagagagcaagtccctga

SEQ ID NO: 270360 - DNA, 20 bp, Artificial Sequence
  Description of Artificial Sequence: Synthetic oligonucleotide
  Target: LAMA2; (-) strand; PAM type: YTN; PAM sequence: CTT
tttcagagagcaagtccctg

SEQ ID NO: 270361 - DNA, 20 bp, Artificial Sequence
  Description of Artificial Sequence: Synthetic oligonucleotide
  Target: LAMA2; (-) strand; PAM type: YTN; PAM sequence: CTC
aagtgtcactttttcagaga

SEQ ID NO: 270362 - DNA, 20 bp, Artificial Sequence
  Description of Artificial Sequence: Synthetic oligonucleotide
  Target: LAMA2; (-) strand; PAM type: YTN; PAM sequence: TTC
aggtcaagtgctcaagtgtc

SEQ ID NO: 270363 - DNA, 20 bp, Artificial Sequence
  Description of Artificial Sequence: Synthetic oligonucleotide
  Target: LAMA2; (-) strand; PAM type: YTN; PAM sequence: CTA
ggtgttcaggtcaagtgctc

SEQ ID NO: 270364 - DNA, 20 bp, Artificial Sequence
  Description of Artificial Sequence: Synthetic oligonucleotide
  Target: LAMA2; (-) strand; PAM type: YTN; PAM sequence: TTC
ctaggtgttcaggtcaagtg

SEQ ID NO: 270365 - DNA, 20 bp, Artificial Sequence
  Description of Artificial Sequence: Synthetic oligonucleotide
  Target: LAMA2; (-) strand; PAM type: YTN; PAM sequence: CTG
gttcctaggtgttcaggtca

SEQ ID NO: 270366 - DNA, 20 bp, Artificial Sequence
  Description of Artificial Sequence: Synthetic oligonucleotide
  Target: LAMA2; (-) strand; PAM type: YTN; PAM sequence: CTC
ccacctggttcctaggtgtt

SEQ ID NO: 270367 - DNA, 20 bp, Artificial Sequence
  Description of Artificial Sequence: Synthetic oligonucleotide
  Target: LAMA2; (-) strand; PAM type: YTN; PAM sequence: TTC
tcccacctggttcctaggtg

SEQ ID NO: 270368 - DNA, 20 bp, Artificial Sequence
  Description of Artificial Sequence: Synthetic oligonucleotide
  Target: LAMA2; (-) strand; PAM type: YTN; PAM sequence: CTT
ctcccacctggttcctaggt

SEQ ID NO: 270369 - DNA, 20 bp, Artificial Sequence
  Description of Artificial Sequence: Synthetic oligonucleotide
  Target: LAMA2; (-) strand; PAM type: YTN; PAM sequence: TTG
gtcttctcccacctggttcc

SEQ ID NO: 270370 - DNA, 20 bp, Artificial Sequence
  Description of Artificial Sequence: Synthetic oligonucleotide
  Target: LAMA2; (-) strand; PAM type: YTN; PAM sequence: CTT
ggtcttctcccacctggttc

SEQ ID NO: 270371 - DNA, 20 bp, Artificial Sequence
  Description of Artificial Sequence: Synthetic oligonucleotide
  Target: LAMA2; (-) strand; PAM type: YTN; PAM sequence: CTC
ccttggtcttctcccacctg

SEQ ID NO: 270372 - DNA, 20 bp, Artificial Sequence
  Description of Artificial Sequence: Synthetic oligonucleotide
  Target: LAMA2; (-) strand; PAM type: YTN; PAM sequence: TTC
tcccttggtcttctcccacc

SEQ ID NO: 270373 - DNA, 20 bp, Artificial Sequence
  Description of Artificial Sequence: Synthetic oligonucleotide
  Target: LAMA2; (-) strand; PAM type: YTN; PAM sequence: CTT
ctcccttggtcttctcccac

SEQ ID NO: 270374 - DNA, 20 bp, Artificial Sequence
  Description of Artificial Sequence: Synthetic oligonucleotide
  Target: LAMA2; (-) strand; PAM type: YTN; PAM sequence: TTC
ttctcccttggtcttctccc

SEQ ID NO: 270375 - DNA, 20 bp, Artificial Sequence
  Description of Artificial Sequence: Synthetic oligonucleotide
  Target: LAMA2; (-) strand; PAM type: YTN; PAM sequence: CTA
gaattcttctcccttggtct

SEQ ID NO: 270376 - DNA, 20 bp, Artificial Sequence
  Description of Artificial Sequence: Synthetic oligonucleotide
  Target: LAMA2; (-) strand; PAM type: YTN; PAM sequence: CTA
cctagaattcttctcccttg

SEQ ID NO: 270377 - DNA, 20 bp, Artificial Sequence
  Description of Artificial Sequence: Synthetic oligonucleotide
  Target: LAMA2; (-) strand; PAM type: YTN; PAM sequence: CTC
tacctagaattcttctccct

SEQ ID NO: 270378 - DNA, 20 bp, Artificial Sequence
  Description of Artificial Sequence: Synthetic oligonucleotide
  Target: LAMA2; (-) strand; PAM type: YTN; PAM sequence: TTC
tctacctagaattcttctcc

SEQ ID NO: 270379 - DNA, 20 bp, Artificial Sequence
  Description of Artificial Sequence: Synthetic oligonucleotide
  Target: LAMA2; (-) strand; PAM type: YTN; PAM sequence: CTT
ctctacctagaattcttctc

SEQ ID NO: 270380 - DNA, 20 bp, Artificial Sequence
  Description of Artificial Sequence: Synthetic oligonucleotide
  Target: LAMA2; (-) strand; PAM type: YTN; PAM sequence: CTG
tcttctctacctagaattct

SEQ ID NO: 270381 - DNA, 20 bp, Artificial Sequence
  Description of Artificial Sequence: Synthetic oligonucleotide
  Target: LAMA2; (-) strand; PAM type: YTN; PAM sequence: TTG
ctgtcttctctacctagaat

SEQ ID NO: 270382 - DNA, 20 bp, Artificial Sequence
  Description of Artificial Sequence: Synthetic oligonucleotide
  Target: LAMA2; (-) strand; PAM type: YTN; PAM sequence: CTT
gctgtcttctctacctagaa

SEQ ID NO: 270383 - DNA, 20 bp, Artificial Sequence
  Description of Artificial Sequence: Synthetic oligonucleotide
  Target: LAMA2; (-) strand; PAM type: YTN; PAM sequence: TTG
cttgctgtcttctctaccta

SEQ ID NO: 270384 - DNA, 20 bp, Artificial Sequence
  Description of Artificial Sequence: Synthetic oligonucleotide
  Target: LAMA2; (-) strand; PAM type: YTN; PAM sequence: TTT
gcttgctgtcttctctacct

SEQ ID NO: 270385 - DNA, 20 bp, Artificial Sequence
  Description of Artificial Sequence: Synthetic oligonucleotide
  Target: LAMA2; (-) strand; PAM type: YTN; PAM sequence: TTT
tgcttgctgtcttctctacc

SEQ ID NO: 270386 - DNA, 20 bp, Artificial Sequence
  Description of Artificial Sequence: Synthetic oligonucleotide
  Target: LAMA2; (-) strand; PAM type: YTN; PAM sequence: CTT
ttgcttgctgtcttctctac

SEQ ID NO: 270387 - DNA, 20 bp, Artificial Sequence
  Description of Artificial Sequence: Synthetic oligonucleotide
  Target: LAMA2; (-) strand; PAM type: YTN; PAM sequence: TTG
gaagaggtccttttgcttgc

SEQ ID NO: 270388 - DNA, 20 bp, Artificial Sequence
  Description of Artificial Sequence: Synthetic oligonucleotide
  Target: LAMA2; (-) strand; PAM type: YTN; PAM sequence: TTT
ggaagaggtccttttgcttg

SEQ ID NO: 270389 - DNA, 20 bp, Artificial Sequence
  Description of Artificial Sequence: Synthetic oligonucleotide
  Target: LAMA2; (-) strand; PAM type: YTN; PAM sequence: TTC
aagggagcaaggatttggaa

SEQ ID NO: 270390 - DNA, 20 bp, Artificial Sequence
  Description of Artificial Sequence: Synthetic oligonucleotide
  Target: LAMA2; (-) strand; PAM type: YTN; PAM sequence: CTT
caagggagcaaggatttgga

SEQ ID NO: 270391 - DNA, 20 bp, Artificial Sequence
  Description of Artificial Sequence: Synthetic oligonucleotide
  Target: LAMA2; (-) strand; PAM type: YTN; PAM sequence: CTC
aatcttcaagggagcaagga

SEQ ID NO: 270392 - DNA, 20 bp, Artificial Sequence
  Description of Artificial Sequence: Synthetic oligonucleotide
  Target: LAMA2; (-) strand; PAM type: YTN; PAM sequence: TTA
tagggatgctcaatcttcaa

SEQ ID NO: 270393 - DNA, 20 bp, Artificial Sequence
  Description of Artificial Sequence: Synthetic oligonucleotide
  Target: LAMA2; (-) strand; PAM type: YTN; PAM sequence: CTG
gaccaggtgataaattatag

SEQ ID NO: 270394 - DNA, 20 bp, Artificial Sequence
  Description of Artificial Sequence: Synthetic oligonucleotide
  Target: LAMA2; (-) strand; PAM type: YTN; PAM sequence: TTG
aaaaaccatgtagccaaagg

SEQ ID NO: 270395 - DNA, 20 bp, Artificial Sequence
  Description of Artificial Sequence: Synthetic oligonucleotide
  Target: LAMA2; (-) strand; PAM type: YTN; PAM sequence: TTC
cagtaattgaaaaaccatgt

SEQ ID NO: 270396 - DNA, 20 bp, Artificial Sequence
  Description of Artificial Sequence: Synthetic oligonucleotide
  Target: LAMA2; (-) strand; PAM type: YTN; PAM sequence: TTA
aaaatattccagtaattgaa

SEQ ID NO: 270397 - DNA, 20 bp, Artificial Sequence
  Description of Artificial Sequence: Synthetic oligonucleotide
  Target: LAMA2; (-) strand; PAM type: YTN; PAM sequence: TTT
aaaaatattccagtaattga

SEQ ID NO: 270398 - DNA, 20 bp, Artificial Sequence
  Description of Artificial Sequence: Synthetic oligonucleotide
  Target: LAMA2; (-) strand; PAM type: YTN; PAM sequence: TTT
taaaaatattccagtaattg

SEQ ID NO: 270399 - DNA, 20 bp, Artificial Sequence
  Description of Artificial Sequence: Synthetic oligonucleotide
  Target: LAMA2; (-) strand; PAM type: YTN; PAM sequence: CTG
tattttaaaaatattccagt

SEQ ID NO: 270400 - DNA, 20 bp, Artificial Sequence
  Description of Artificial Sequence: Synthetic oligonucleotide
  Target: LAMA2; (-) strand; PAM type: YTN; PAM sequence: CTG
ggatcataggcgtgaaccac

SEQ ID NO: 270401 - DNA, 20 bp, Artificial Sequence
  Description of Artificial Sequence: Synthetic oligonucleotide
  Target: LAMA2; (-) strand; PAM type: YTN; PAM sequence: TTC
cccaagtgctgggatcatag

SEQ ID NO: 270402 - DNA, 20 bp, Artificial Sequence
  Description of Artificial Sequence: Synthetic oligonucleotide
  Target: LAMA2; (-) strand; PAM type: YTN; PAM sequence: CTT
ccccaagtgctgggatcata

SEQ ID NO: 270403 - DNA, 20 bp, Artificial Sequence
  Description of Artificial Sequence: Synthetic oligonucleotide
  Target: LAMA2; (-) strand; PAM type: YTN; PAM sequence: CTC
agcttccccaagtgctggga

SEQ ID NO: 270404 - DNA, 20 bp, Artificial Sequence
  Description of Artificial Sequence: Synthetic oligonucleotide
  Target: LAMA2; (-) strand; PAM type: YTN; PAM sequence: CTC
ccacctcagcttccccaagt

SEQ ID NO: 270405 - DNA, 20 bp, Artificial Sequence
  Description of Artificial Sequence: Synthetic oligonucleotide
  Target: LAMA2; (-) strand; PAM type: YTN; PAM sequence: CTC
aagtgatcctcccacctcag

SEQ ID NO: 270406 - DNA, 20 bp, Artificial Sequence
  Description of Artificial Sequence: Synthetic oligonucleotide
  Target: LAMA2; (-) strand; PAM type: YTN; PAM sequence: CTG
gcctcaagtgatcctcccac

SEQ ID NO: 270407 - DNA, 20 bp, Artificial Sequence
  Description of Artificial Sequence: Synthetic oligonucleotide
  Target: LAMA2; (-) strand; PAM type: YTN; PAM sequence: CTC
ctggcctcaagtgatcctcc

SEQ ID NO: 270408 - DNA, 20 bp, Artificial Sequence
  Description of Artificial Sequence: Synthetic oligonucleotide
  Target: LAMA2; (-) strand; PAM type: YTN; PAM sequence: CTG
atgtcagactcctggcctca

SEQ ID NO: 270409 - DNA, 20 bp, Artificial Sequence
  Description of Artificial Sequence: Synthetic oligonucleotide
  Target: LAMA2; (-) strand; PAM type: YTN; PAM sequence: CTG
gctgatgtcagactcctggc

SEQ ID NO: 270410 - DNA, 20 bp, Artificial Sequence
  Description of Artificial Sequence: Synthetic oligonucleotide
  Target: LAMA2; (-) strand; PAM type: YTN; PAM sequence: TTG
ccctggctgatgtcagactc

SEQ ID NO: 270411 - DNA, 20 bp, Artificial Sequence
  Description of Artificial Sequence: Synthetic oligonucleotide
  Target: LAMA2; (-) strand; PAM type: YTN; PAM sequence: CTG
tgttgccctggctgatgtca

SEQ ID NO: 270412 - DNA, 20 bp, Artificial Sequence
  Description of Artificial Sequence: Synthetic oligonucleotide
  Target: LAMA2; (-) strand; PAM type: YTN; PAM sequence: TTG
ctgtgttgccctggctgatg

SEQ ID NO: 270413 - DNA, 20 bp, Artificial Sequence
  Description of Artificial Sequence: Synthetic oligonucleotide
  Target: LAMA2; (-) strand; PAM type: YTN; PAM sequence: CTT
gctgtgttgccctggctgat

SEQ ID NO: 270414 - DNA, 20 bp, Artificial Sequence
  Description of Artificial Sequence: Synthetic oligonucleotide
  Target: LAMA2; (-) strand; PAM type: YTN; PAM sequence: TTA
acatagagatggggtcttgc

SEQ ID NO: 270415 - DNA, 20 bp, Artificial Sequence
  Description of Artificial Sequence: Synthetic oligonucleotide
  Target: LAMA2; (-) strand; PAM type: YTN; PAM sequence: TTT
aacatagagatggggtcttg

SEQ ID NO: 270416 - DNA, 20 bp, Artificial Sequence
  Description of Artificial Sequence: Synthetic oligonucleotide
  Target: LAMA2; (-) strand; PAM type: YTN; PAM sequence: TTT
taacatagagatggggtctt

SEQ ID NO: 270417 - DNA, 20 bp, Artificial Sequence
  Description of Artificial Sequence: Synthetic oligonucleotide
  Target: LAMA2; (-) strand; PAM type: YTN; PAM sequence: TTT
ttaacatagagatggggtct

SEQ ID NO: 270418 - DNA, 20 bp, Artificial Sequence
  Description of Artificial Sequence: Synthetic oligonucleotide
  Target: LAMA2; (-) strand; PAM type: YTN; PAM sequence: TTT
tttaacatagagatggggtc

SEQ ID NO: 270419 - DNA, 20 bp, Artificial Sequence
  Description of Artificial Sequence: Synthetic oligonucleotide
  Target: LAMA2; (-) strand; PAM type: YTN; PAM sequence: CTA
gttttttaacatagagatgg

SEQ ID NO: 270420 - DNA, 20 bp, Artificial Sequence
  Description of Artificial Sequence: Synthetic oligonucleotide
  Target: LAMA2; (-) strand; PAM type: YTN; PAM sequence: CTA
caggcacatgccaccacatc

SEQ ID NO: 270421 - DNA, 20 bp, Artificial Sequence
  Description of Artificial Sequence: Synthetic oligonucleotide
  Target: LAMA2; (-) strand; PAM type: YTN; PAM sequence: TTG
agactacaggcacatgccac

SEQ ID NO: 270422 - DNA, 20 bp, Artificial Sequence
  Description of Artificial Sequence: Synthetic oligonucleotide
  Target: LAMA2; (-) strand; PAM type: YTN; PAM sequence: CTC
ccgagtggttgagactacag

SEQ ID NO: 270423 - DNA, 20 bp, Artificial Sequence
  Description of Artificial Sequence: Synthetic oligonucleotide
  Target: LAMA2; (-) strand; PAM type: YTN; PAM sequence: CTC
agcctcccgagtggttgaga

SEQ ID NO: 270424 - DNA, 20 bp, Artificial Sequence
  Description of Artificial Sequence: Synthetic oligonucleotide
  Target: LAMA2; (-) strand; PAM type: YTN; PAM sequence: CTG
cctcagcctcccgagtggtt

SEQ ID NO: 270425 - DNA, 20 bp, Artificial Sequence
  Description of Artificial Sequence: Synthetic oligonucleotide
  Target: LAMA2; (-) strand; PAM type: YTN; PAM sequence: CTC
ctgcctcagcctcccgagtg

SEQ ID NO: 270426 - DNA, 20 bp, Artificial Sequence
  Description of Artificial Sequence: Synthetic oligonucleotide
  Target: LAMA2; (-) strand; PAM type: YTN; PAM sequence: CTA
aagtgatcctcctgcctcag

SEQ ID NO: 270427 - DNA, 20 bp, Artificial Sequence
  Description of Artificial Sequence: Synthetic oligonucleotide
  Target: LAMA2; (-) strand; PAM type: YTN; PAM sequence: CTG
ggctaaagtgatcctcctgc

SEQ ID NO: 270428 - DNA, 20 bp, Artificial Sequence
  Description of Artificial Sequence: Synthetic oligonucleotide
  Target: LAMA2; (-) strand; PAM type: YTN; PAM sequence: CTC
ctgggctaaagtgatcctcc

SEQ ID NO: 270429 - DNA, 20 bp, Artificial Sequence
  Description of Artificial Sequence: Synthetic oligonucleotide
  Target: LAMA2; (-) strand; PAM type: YTN; PAM sequence: CTC
aaactcctgggctaaagtga

SEQ ID NO: 270430 - DNA, 20 bp, Artificial Sequence
  Description of Artificial Sequence: Synthetic oligonucleotide
  Target: LAMA2; (-) strand; PAM type: YTN; PAM sequence: CTG
cggcctcaaactcctgggct

SEQ ID NO: 270431 - DNA, 20 bp, Artificial Sequence
  Description of Artificial Sequence: Synthetic oligonucleotide
  Target: LAMA2; (-) strand; PAM type: YTN; PAM sequence: CTC
actgcggcctcaaactcctg

SEQ ID NO: 270432 - DNA, 20 bp, Artificial Sequence
  Description of Artificial Sequence: Synthetic oligonucleotide
  Target: LAMA2; (-) strand; PAM type: YTN; PAM sequence: CTG
gagtacagtggtgtgatcat

SEQ ID NO: 270433 - DNA, 20 bp, Artificial Sequence
  Description of Artificial Sequence: Synthetic oligonucleotide
  Target: LAMA2; (-) strand; PAM type: YTN; PAM sequence: CTG
ccacccatgctggagtacag

SEQ ID NO: 270434 - DNA, 20 bp, Artificial Sequence
  Description of Artificial Sequence: Synthetic oligonucleotide
  Target: LAMA2; (-) strand; PAM type: YTN; PAM sequence: CTC
tgccacccatgctggagtac

SEQ ID NO: 270435 - DNA, 20 bp, Artificial Sequence
  Description of Artificial Sequence: Synthetic oligonucleotide
  Target: LAMA2; (-) strand; PAM type: YTN; PAM sequence: TTG
ctctgccacccatgctggag

SEQ ID NO: 270436 - DNA, 20 bp, Artificial Sequence
  Description of Artificial Sequence: Synthetic oligonucleotide
  Target: LAMA2; (-) strand; PAM type: YTN; PAM sequence: CTT
gctctgccacccatgctgga

SEQ ID NO: 270437 - DNA, 20 bp, Artificial Sequence
  Description of Artificial Sequence: Synthetic oligonucleotide
  Target: LAMA2; (-) strand; PAM type: YTN; PAM sequence: CTG
agacagggtcttgctctgcc

SEQ ID NO: 270438 - DNA, 20 bp, Artificial Sequence
  Description of Artificial Sequence: Synthetic oligonucleotide
  Target: LAMA2; (-) strand; PAM type: YTN; PAM sequence: TTC
tgagacagggtcttgctctg

SEQ ID NO: 270439 - DNA, 20 bp, Artificial Sequence
  Description of Artificial Sequence: Synthetic oligonucleotide
  Target: LAMA2; (-) strand; PAM type: YTN; PAM sequence: TTT
ctgagacagggtcttgctct

SEQ ID NO: 270440 - DNA, 20 bp, Artificial Sequence
  Description of Artificial Sequence: Synthetic oligonucleotide
  Target: LAMA2; (-) strand; PAM type: YTN; PAM sequence: TTT
tctgagacagggtcttgctc

SEQ ID NO: 270441 - DNA, 20 bp, Artificial Sequence
  Description of Artificial Sequence: Synthetic oligonucleotide
  Target: LAMA2; (-) strand; PAM type: YTN; PAM sequence: TTT
ttctgagacagggtcttgct

SEQ ID NO: 270442 - DNA, 20 bp, Artificial Sequence
  Description of Artificial Sequence: Synthetic oligonucleotide
  Target: LAMA2; (-) strand; PAM type: YTN; PAM sequence: TTT
tttctgagacagggtcttgc

SEQ ID NO: 270443 - DNA, 20 bp, Artificial Sequence
  Description of Artificial Sequence: Synthetic oligonucleotide
  Target: LAMA2; (-) strand; PAM type: YTN; PAM sequence: TTT
ttttctgagacagggtcttg

SEQ ID NO: 270444 - DNA, 20 bp, Artificial Sequence
  Description of Artificial Sequence: Synthetic oligonucleotide
  Target: LAMA2; (-) strand; PAM type: YTN; PAM sequence: TTA
tttttttctgagacagggtc

SEQ ID NO: 270445 - DNA, 20 bp, Artificial Sequence
  Description of Artificial Sequence: Synthetic oligonucleotide
  Target: LAMA2; (-) strand; PAM type: YTN; PAM sequence: TTT
atttttttctgagacagggt

SEQ ID NO: 270446 - DNA, 20 bp, Artificial Sequence
  Description of Artificial Sequence: Synthetic oligonucleotide
  Target: LAMA2; (-) strand; PAM type: YTN; PAM sequence: TTT
tatttttttctgagacaggg

SEQ ID NO: 270447 - DNA, 20 bp, Artificial Sequence
  Description of Artificial Sequence: Synthetic oligonucleotide
  Target: LAMA2; (-) strand; PAM type: YTN; PAM sequence: TTT
ttatttttttctgagacagg

SEQ ID NO: 270448 - DNA, 20 bp, Artificial Sequence
  Description of Artificial Sequence: Synthetic oligonucleotide
  Target: LAMA2; (-) strand; PAM type: YTN; PAM sequence: CTA
tttttatttttttctgagac

SEQ ID NO: 270449 - DNA, 20 bp, Artificial Sequence
  Description of Artificial Sequence: Synthetic oligonucleotide
  Target: LAMA2; (-) strand; PAM type: YTN; PAM sequence: TTC
tatttttatttttttctgag

SEQ ID NO: 270450 - DNA, 20 bp, Artificial Sequence
  Description of Artificial Sequence: Synthetic oligonucleotide
  Target: LAMA2; (-) strand; PAM type: YTN; PAM sequence: TTT
ctatttttatttttttctga

SEQ ID NO: 270451 - DNA, 20 bp, Artificial Sequence
  Description of Artificial Sequence: Synthetic oligonucleotide
  Target: LAMA2; (-) strand; PAM type: YTN; PAM sequence: CTA
accatcagtatttctatttt

SEQ ID NO: 270452 - DNA, 20 bp, Artificial Sequence
  Description of Artificial Sequence: Synthetic oligonucleotide
  Target: LAMA2; (-) strand; PAM type: YTN; PAM sequence: CTG
tggtaaggtctaaccatcag

SEQ ID NO: 270453 - DNA, 20 bp, Artificial Sequence
  Description of Artificial Sequence: Synthetic oligonucleotide
  Target: LAMA2; (-) strand; PAM type: YTN; PAM sequence: TTG
atgggtctgtggtaaggtct

SEQ ID NO: 270454 - DNA, 20 bp, Artificial Sequence
  Description of Artificial Sequence: Synthetic oligonucleotide
  Target: LAMA2; (-) strand; PAM type: YTN; PAM sequence: TTT
gatgggtctgtggtaaggtc

SEQ ID NO: 270455 - DNA, 20 bp, Artificial Sequence
  Description of Artificial Sequence: Synthetic oligonucleotide
  Target: LAMA2; (-) strand; PAM type: YTN; PAM sequence: TTT
tgatgggtctgtggtaaggt

SEQ ID NO: 270456 - DNA, 20 bp, Artificial Sequence
  Description of Artificial Sequence: Synthetic oligonucleotide
  Target: LAMA2; (-) strand; PAM type: YTN; PAM sequence: TTT
ttgatgggtctgtggtaagg

SEQ ID NO: 270457 - DNA, 20 bp, Artificial Sequence
  Description of Artificial Sequence: Synthetic oligonucleotide
  Target: LAMA2; (-) strand; PAM type: YTN; PAM sequence: CTC
accaccacagaatatgattt

SEQ ID NO: 270458 - DNA, 20 bp, Artificial Sequence
  Description of Artificial Sequence: Synthetic oligonucleotide
  Target: LAMA2; (-) strand; PAM type: YTN; PAM sequence: CTC
ctcaccaccacagaatatga

SEQ ID NO: 270459 - DNA, 20 bp, Artificial Sequence
  Description of Artificial Sequence: Synthetic oligonucleotide
  Target: LAMA2; (-) strand; PAM type: YTN; PAM sequence: TTC
cctcctcaccaccacagaat

SEQ ID NO: 270460 - DNA, 20 bp, Artificial Sequence
  Description of Artificial Sequence: Synthetic oligonucleotide
  Target: LAMA2; (-) strand; PAM type: YTN; PAM sequence: TTT
ccctcctcaccaccacagaa

SEQ ID NO: 270461 - DNA, 20 bp, Artificial Sequence
  Description of Artificial Sequence: Synthetic oligonucleotide
  Target: LAMA2; (-) strand; PAM type: YTN; PAM sequence: CTT
tccctcctcaccaccacaga

SEQ ID NO: 270462 - DNA, 20 bp, Artificial Sequence
  Description of Artificial Sequence: Synthetic oligonucleotide
  Target: LAMA2; (-) strand; PAM type: YTN; PAM sequence: CTC
tttccctcctcaccaccaca

SEQ ID NO: 270463 - DNA, 20 bp, Artificial Sequence
  Description of Artificial Sequence: Synthetic oligonucleotide
  Target: LAMA2; (-) strand; PAM type: YTN; PAM sequence: CTG
ggctctttccctcctcacca

SEQ ID NO: 270464 - DNA, 20 bp, Artificial Sequence
  Description of Artificial Sequence: Synthetic oligonucleotide
  Target: LAMA2; (-) strand; PAM type: YTN; PAM sequence: TTA
taaaatacagatgcctgggc

SEQ ID NO: 270465 - DNA, 20 bp, Artificial Sequence
  Description of Artificial Sequence: Synthetic oligonucleotide
  Target: LAMA2; (-) strand; PAM type: YTN; PAM sequence: TTT
ataaaatacagatgcctggg

SEQ ID NO: 270466 - DNA, 20 bp, Artificial Sequence
  Description of Artificial Sequence: Synthetic oligonucleotide
  Target: LAMA2; (-) strand; PAM type: YTN; PAM sequence: TTG
gaatcacatgaacatttata

SEQ ID NO: 270467 - DNA, 20 bp, Artificial Sequence
  Description of Artificial Sequence: Synthetic oligonucleotide
  Target: LAMA2; (-) strand; PAM type: YTN; PAM sequence: CTG
cccattggaatcacatgaac

SEQ ID NO: 270468 - DNA, 20 bp, Artificial Sequence
  Description of Artificial Sequence: Synthetic oligonucleotide
  Target: LAMA2; (-) strand; PAM type: YTN; PAM sequence: TTG
gctgcccattggaatcacat

SEQ ID NO: 270469 - DNA, 20 bp, Artificial Sequence
  Description of Artificial Sequence: Synthetic oligonucleotide
  Target: LAMA2; (-) strand; PAM type: YTN; PAM sequence: TTT
ggctgcccattggaatcaca

SEQ ID NO: 270470 - DNA, 20 bp, Artificial Sequence
  Description of Artificial Sequence: Synthetic oligonucleotide
  Target: LAMA2; (-) strand; PAM type: YTN; PAM sequence: CTT
tggctgcccattggaatcac

SEQ ID NO: 270471 - DNA, 20 bp, Artificial Sequence
  Description of Artificial Sequence: Synthetic oligonucleotide
  Target: LAMA2; (-) strand; PAM type: YTN; PAM sequence: CTC
acctttggctgcccattgga

SEQ ID NO: 270472 - DNA, 20 bp, Artificial Sequence
  Description of Artificial Sequence: Synthetic oligonucleotide
  Target: LAMA2; (-) strand; PAM type: YTN; PAM sequence: TTC
tcacctttggctgcccattg

SEQ ID NO: 270473 - DNA, 20 bp, Artificial Sequence
  Description of Artificial Sequence: Synthetic oligonucleotide
  Target: LAMA2; (-) strand; PAM type: YTN; PAM sequence: TTG
gtgtggatcagtggttctca

SEQ ID NO: 270474 - DNA, 20 bp, Artificial Sequence
  Description of Artificial Sequence: Synthetic oligonucleotide
  Target: LAMA2; (-) strand; PAM type: YTN; PAM sequence: TTA
gaatgtgacaacattggtgt

SEQ ID NO: 270475 - DNA, 20 bp, Artificial Sequence
  Description of Artificial Sequence: Synthetic oligonucleotide
  Target: LAMA2; (-) strand; PAM type: YTN; PAM sequence: CTG
cacattagaatgtgacaaca

SEQ ID NO: 270476 - DNA, 20 bp, Artificial Sequence
  Description of Artificial Sequence: Synthetic oligonucleotide
  Target: LAMA2; (-) strand; PAM type: YTN; PAM sequence: CTC
tgcacattagaatgtgacaa

SEQ ID NO: 270477 - DNA, 20 bp, Artificial Sequence
  Description of Artificial Sequence: Synthetic oligonucleotide
  Target: LAMA2; (-) strand; PAM type: YTN; PAM sequence: TTA
tctctgcacattagaatgtg

SEQ ID NO: 270478 - DNA, 20 bp, Artificial Sequence
  Description of Artificial Sequence: Synthetic oligonucleotide
  Target: LAMA2; (-) strand; PAM type: YTN; PAM sequence: CTG
cgtcccacattatctctgca

SEQ ID NO: 270479 - DNA, 20 bp, Artificial Sequence
  Description of Artificial Sequence: Synthetic oligonucleotide
  Target: LAMA2; (-) strand; PAM type: YTN; PAM sequence: CTA
ggaaatcagaatctgcgtcc

SEQ ID NO: 270480 - DNA, 20 bp, Artificial Sequence
  Description of Artificial Sequence: Synthetic oligonucleotide
  Target: LAMA2; (-) strand; PAM type: YTN; PAM sequence: CTA
ccccagatctaggaaatcag

SEQ ID NO: 270481 - DNA, 20 bp, Artificial Sequence
  Description of Artificial Sequence: Synthetic oligonucleotide
  Target: LAMA2; (-) strand; PAM type: YTN; PAM sequence: CTC
taccccagatctaggaaatc

SEQ ID NO: 270482 - DNA, 20 bp, Artificial Sequence
  Description of Artificial Sequence: Synthetic oligonucleotide
  Target: LAMA2; (-) strand; PAM type: YTN; PAM sequence: TTA
gaaatgtataatcgggctct

SEQ ID NO: 270483 - DNA, 20 bp, Artificial Sequence
  Description of Artificial Sequence: Synthetic oligonucleotide
  Target: LAMA2; (-) strand; PAM type: YTN; PAM sequence: TTA
ttagaaatgtataatcgggc

SEQ ID NO: 270484 - DNA, 20 bp, Artificial Sequence
  Description of Artificial Sequence: Synthetic oligonucleotide
  Target: LAMA2; (-) strand; PAM type: YTN; PAM sequence: CTT
attagaaatgtataatcggg

SEQ ID NO: 270485 - DNA, 20 bp, Artificial Sequence
  Description of Artificial Sequence: Synthetic oligonucleotide
  Target: LAMA2; (-) strand; PAM type: YTN; PAM sequence: CTG
gaagcttattagaaatgtat

SEQ ID NO: 270486 - DNA, 20 bp, Artificial Sequence
  Description of Artificial Sequence: Synthetic oligonucleotide
  Target: LAMA2; (-) strand; PAM type: YTN; PAM sequence: TTG
gcaccacctggaagcttatt

SEQ ID NO: 270487 - DNA, 20 bp, Artificial Sequence
  Description of Artificial Sequence: Synthetic oligonucleotide
  Target: LAMA2; (-) strand; PAM type: YTN; PAM sequence: TTT
ggcaccacctggaagcttat

SEQ ID NO: 270488 - DNA, 20 bp, Artificial Sequence
  Description of Artificial Sequence: Synthetic oligonucleotide
  Target: LAMA2; (-) strand; PAM type: YTN; PAM sequence: TTT
tggcaccacctggaagctta

SEQ ID NO: 270489 - DNA, 20 bp, Artificial Sequence
  Description of Artificial Sequence: Synthetic oligonucleotide
  Target: LAMA2; (-) strand; PAM type: YTN; PAM sequence: TTG
agtagcaatcagaccaacag

SEQ ID NO: 270490 - DNA, 20 bp, Artificial Sequence
  Description of Artificial Sequence: Synthetic oligonucleotide
  Target: LAMA2; (-) strand; PAM type: YTN; PAM sequence: TTT
gagtagcaatcagaccaaca

SEQ ID NO: 270491 - DNA, 20 bp, Artificial Sequence
  Description of Artificial Sequence: Synthetic oligonucleotide
  Target: LAMA2; (-) strand; PAM type: YTN; PAM sequence: CTT
tgagtagcaatcagaccaac

SEQ ID NO: 270492 - DNA, 20 bp, Artificial Sequence
  Description of Artificial Sequence: Synthetic oligonucleotide
  Target: LAMA2; (-) strand; PAM type: YTN; PAM sequence: CTG
tgcaccacactttgagtagc

SEQ ID NO: 270493 - DNA, 20 bp, Artificial Sequence
  Description of Artificial Sequence: Synthetic oligonucleotide
  Target: LAMA2; (-) strand; PAM type: YTN; PAM sequence: TTG
gtctgtgcaccacactttga

SEQ ID NO: 270494 - DNA, 20 bp, Artificial Sequence
  Description of Artificial Sequence: Synthetic oligonucleotide
  Target: LAMA2; (-) strand; PAM type: YTN; PAM sequence: CTG
ttggtctgtgcaccacactt

SEQ ID NO: 270495 - DNA, 20 bp, Artificial Sequence
  Description of Artificial Sequence: Synthetic oligonucleotide
  Target: LAMA2; (-) strand; PAM type: YTN; PAM sequence: CTA
ctgttggtctgtgcaccaca

SEQ ID NO: 270496 - DNA, 20 bp, Artificial Sequence
  Description of Artificial Sequence: Synthetic oligonucleotide
  Target: LAMA2; (-) strand; PAM type: YTN; PAM sequence: TTG
ctactgttggtctgtgcacc

SEQ ID NO: 270497 - DNA, 20 bp, Artificial Sequence
  Description of Artificial Sequence: Synthetic oligonucleotide
  Target: LAMA2; (-) strand; PAM type: YTN; PAM sequence: CTC
ccaggtgatattgctactgt

SEQ ID NO: 270498 - DNA, 20 bp, Artificial Sequence
  Description of Artificial Sequence: Synthetic oligonucleotide
  Target: LAMA2; (-) strand; PAM type: YTN; PAM sequence: CTA
acaagctcccaggtgatatt

SEQ ID NO: 270499 - DNA, 20 bp, Artificial Sequence
  Description of Artificial Sequence: Synthetic oligonucleotide
  Target: LAMA2; (-) strand; PAM type: YTN; PAM sequence: TTC
taacaagctcccaggtgata

SEQ ID NO: 270500 - DNA, 20 bp, Artificial Sequence
  Description of Artificial Sequence: Synthetic oligonucleotide
  Target: LAMA2; (-) strand; PAM type: YTN; PAM sequence: TTT
ctaacaagctcccaggtgat

SEQ ID NO: 270501 - DNA, 20 bp, Artificial Sequence
  Description of Artificial Sequence: Synthetic oligonucleotide
  Target: LAMA2; (-) strand; PAM type: YTN; PAM sequence: TTT
tctaacaagctcccaggtga

SEQ ID NO: 270502 - DNA, 20 bp, Artificial Sequence
  Description of Artificial Sequence: Synthetic oligonucleotide
  Target: LAMA2; (-) strand; PAM type: YTN; PAM sequence: CTT
ttctaacaagctcccaggtg

SEQ ID NO: 270503 - DNA, 20 bp, Artificial Sequence
  Description of Artificial Sequence: Synthetic oligonucleotide
  Target: LAMA2; (-) strand; PAM type: YTN; PAM sequence: CTG
agaatgtgcttttctaacaa

SEQ ID NO: 270504 - DNA, 20 bp, Artificial Sequence
  Description of Artificial Sequence: Synthetic oligonucleotide
  Target: LAMA2; (-) strand; PAM type: YTN; PAM sequence: CTG
actgagaatgtgcttttcta

SEQ ID NO: 270505 - DNA, 20 bp, Artificial Sequence
  Description of Artificial Sequence: Synthetic oligonucleotide
  Target: LAMA2; (-) strand; PAM type: YTN; PAM sequence: CTC
tgactgagaatgtgcttttc

SEQ ID NO: 270506 - DNA, 20 bp, Artificial Sequence
  Description of Artificial Sequence: Synthetic oligonucleotide
  Target: LAMA2; (-) strand; PAM type: YTN; PAM sequence: TTA
gtctctgactgagaatgtgc

SEQ ID NO: 270507 - DNA, 20 bp, Artificial Sequence
  Description of Artificial Sequence: Synthetic oligonucleotide
  Target: LAMA2; (-) strand; PAM type: YTN; PAM sequence: CTT
agtctctgactgagaatgtg

SEQ ID NO: 270508 - DNA, 20 bp, Artificial Sequence
  Description of Artificial Sequence: Synthetic oligonucleotide
  Target: LAMA2; (-) strand; PAM type: YTN; PAM sequence: CTC
ttagtctctgactgagaatg

SEQ ID NO: 270509 - DNA, 20 bp, Artificial Sequence
  Description of Artificial Sequence: Synthetic oligonucleotide
  Target: LAMA2; (-) strand; PAM type: YTN; PAM sequence: TTC
tcttagtctctgactgagaa

SEQ ID NO: 270510 - DNA, 20 bp, Artificial Sequence
  Description of Artificial Sequence: Synthetic oligonucleotide
  Target: LAMA2; (-) strand; PAM type: YTN; PAM sequence: TTT
ctcttagtctctgactgaga

SEQ ID NO: 270511 - DNA, 20 bp, Artificial Sequence
  Description of Artificial Sequence: Synthetic oligonucleotide
  Target: LAMA2; (-) strand; PAM type: YTN; PAM sequence: CTG
gtttctcttagtctctgact

SEQ ID NO: 270512 - DNA, 20 bp, Artificial Sequence
  Description of Artificial Sequence: Synthetic oligonucleotide
  Target: LAMA2; (-) strand; PAM type: YTN; PAM sequence: TTG
atcacctggtttctcttagt

SEQ ID NO: 270513 - DNA, 20 bp, Artificial Sequence
  Description of Artificial Sequence: Synthetic oligonucleotide
  Target: LAMA2; (-) strand; PAM type: YTN; PAM sequence: TTT
gatcacctggtttctcttag

SEQ ID NO: 270514 - DNA, 20 bp, Artificial Sequence
  Description of Artificial Sequence: Synthetic oligonucleotide
  Target: LAMA2; (-) strand; PAM type: YTN; PAM sequence: CTG
aatcaggaggtgatttgatc

SEQ ID NO: 270515 - DNA, 20 bp, Artificial Sequence
  Description of Artificial Sequence: Synthetic oligonucleotide
  Target: LAMA2; (-) strand; PAM type: YTN; PAM sequence: TTC
tgaatcaggaggtgatttga

SEQ ID NO: 270516 - DNA, 20 bp, Artificial Sequence
  Description of Artificial Sequence: Synthetic oligonucleotide
  Target: LAMA2; (-) strand; PAM type: YTN; PAM sequence: TTT
ctgaatcaggaggtgatttg

SEQ ID NO: 270517 - DNA, 20 bp, Artificial Sequence
  Description of Artificial Sequence: Synthetic oligonucleotide
  Target: LAMA2; (-) strand; PAM type: YTN; PAM sequence: CTA
gtatttctgaatcaggaggt

SEQ ID NO: 270518 - DNA, 20 bp, Artificial Sequence
  Description of Artificial Sequence: Synthetic oligonucleotide
  Target: LAMA2; (-) strand; PAM type: YTN; PAM sequence: CTG
gtccacaccccctagtattt

SEQ ID NO: 270519 - DNA, 20 bp, Artificial Sequence
  Description of Artificial Sequence: Synthetic oligonucleotide
  Target: LAMA2; (-) strand; PAM type: YTN; PAM sequence: CTA
gagggctggtccacaccccc

SEQ ID NO: 270520 - DNA, 20 bp, Artificial Sequence
  Description of Artificial Sequence: Synthetic oligonucleotide
  Target: LAMA2; (-) strand; PAM type: YTN; PAM sequence: TTC
ggaaatcctagagggctggt

SEQ ID NO: 270521 - DNA, 20 bp, Artificial Sequence
  Description of Artificial Sequence: Synthetic oligonucleotide
  Target: LAMA2; (-) strand; PAM type: YTN; PAM sequence: TTT
cggaaatcctagagggctgg

SEQ ID NO: 270522 - DNA, 20 bp, Artificial Sequence
  Description of Artificial Sequence: Synthetic oligonucleotide
  Target: LAMA2; (-) strand; PAM type: YTN; PAM sequence: CTT
tcggaaatcctagagggctg

SEQ ID NO: 270523 - DNA, 20 bp, Artificial Sequence
  Description of Artificial Sequence: Synthetic oligonucleotide
  Target: LAMA2; (-) strand; PAM type: YTN; PAM sequence: CTC
agaaccaccagtaggacttt

SEQ ID NO: 270524 - DNA, 20 bp, Artificial Sequence
  Description of Artificial Sequence: Synthetic oligonucleotide
  Target: LAMA2; (-) strand; PAM type: YTN; PAM sequence: TTA
gtgggcctcagaaccaccag

SEQ ID NO: 270525 - DNA, 20 bp, Artificial Sequence
  Description of Artificial Sequence: Synthetic oligonucleotide
  Target: LAMA2; (-) strand; PAM type: YTN; PAM sequence: TTT
agtgggcctcagaaccacca

SEQ ID NO: 270526 - DNA, 20 bp, Artificial Sequence
  Description of Artificial Sequence: Synthetic oligonucleotide
  Target: LAMA2; (-) strand; PAM type: YTN; PAM sequence: CTT
tagtgggcctcagaaccacc

SEQ ID NO: 270527 - DNA, 20 bp, Artificial Sequence
  Description of Artificial Sequence: Synthetic oligonucleotide
  Target: LAMA2; (-) strand; PAM type: YTN; PAM sequence: CTC
aagctttagtgggcctcaga

SEQ ID NO: 270528 - DNA, 20 bp, Artificial Sequence
  Description of Artificial Sequence: Synthetic oligonucleotide
  Target: LAMA2; (-) strand; PAM type: YTN; PAM sequence: TTC
tcaagctttagtgggcctca

SEQ ID NO: 270529 - DNA, 20 bp, Artificial Sequence
  Description of Artificial Sequence: Synthetic oligonucleotide
  Target: LAMA2; (-) strand; PAM type: YTN; PAM sequence: CTG
gttctcaagctttagtgggc

SEQ ID NO: 270530 - DNA, 20 bp, Artificial Sequence
  Description of Artificial Sequence: Synthetic oligonucleotide
  Target: LAMA2; (-) strand; PAM type: YTN; PAM sequence: CTA
aacaccaagatccacagtct

SEQ ID NO: 270531 - DNA, 20 bp, Artificial Sequence
  Description of Artificial Sequence: Synthetic oligonucleotide
  Target: LAMA2; (-) strand; PAM type: YTN; PAM sequence: CTG
tgtctaaacaccaagatcca

SEQ ID NO: 270532 - DNA, 20 bp, Artificial Sequence
  Description of Artificial Sequence: Synthetic oligonucleotide
  Target: LAMA2; (-) strand; PAM type: YTN; PAM sequence: TTG
actgtgtctaaacaccaaga

SEQ ID NO: 270533 - DNA, 20 bp, Artificial Sequence
  Description of Artificial Sequence: Synthetic oligonucleotide
  Target: LAMA2; (-) strand; PAM type: YTN; PAM sequence: TTA
agtgccaaattgactgtgtc

SEQ ID NO: 270534 - DNA, 20 bp, Artificial Sequence
  Description of Artificial Sequence: Synthetic oligonucleotide
  Target: LAMA2; (-) strand; PAM type: YTN; PAM sequence: CTC
agttaagtgccaaattgact

SEQ ID NO: 270535 - DNA, 20 bp, Artificial Sequence
  Description of Artificial Sequence: Synthetic oligonucleotide
  Target: LAMA2; (-) strand; PAM type: YTN; PAM sequence: TTA
gagaaaacacaacatagaac

SEQ ID NO: 270536 - DNA, 20 bp, Artificial Sequence
  Description of Artificial Sequence: Synthetic oligonucleotide
  Target: LAMA2; (-) strand; PAM type: YTN; PAM sequence: TTA
aacaattagagaaaacacaa

SEQ ID NO: 270537 - DNA, 20 bp, Artificial Sequence
  Description of Artificial Sequence: Synthetic oligonucleotide
  Target: LAMA2; (-) strand; PAM type: YTN; PAM sequence: TTG
tccacattaaacaattagag

SEQ ID NO: 270538 - DNA, 20 bp, Artificial Sequence
  Description of Artificial Sequence: Synthetic oligonucleotide
  Target: LAMA2; (-) strand; PAM type: YTN; PAM sequence: CTT
gtccacattaaacaattaga

SEQ ID NO: 270539 - DNA, 20 bp, Artificial Sequence
  Description of Artificial Sequence: Synthetic oligonucleotide
  Target: LAMA2; (-) strand; PAM type: YTN; PAM sequence: TTC
aacagacttgtccacattaa

SEQ ID NO: 270540 - DNA, 20 bp, Artificial Sequence
  Description of Artificial Sequence: Synthetic oligonucleotide
  Target: LAMA2; (-) strand; PAM type: YTN; PAM sequence: CTT
caacagacttgtccacatta

SEQ ID NO: 270541 - DNA, 20 bp, Artificial Sequence
  Description of Artificial Sequence: Synthetic oligonucleotide
  Target: LAMA2; (-) strand; PAM type: YTN; PAM sequence: TTC
aatgcaaacttcaacagact

SEQ ID NO: 270542 - DNA, 20 bp, Artificial Sequence
  Description of Artificial Sequence: Synthetic oligonucleotide
  Target: LAMA2; (-) strand; PAM type: YTN; PAM sequence: TTC
atagccccgttcaatgcaaa

SEQ ID NO: 270543 - DNA, 20 bp, Artificial Sequence
  Description of Artificial Sequence: Synthetic oligonucleotide
  Target: LAMA2; (-) strand; PAM type: YTN; PAM sequence: CTT
catagccccgttcaatgcaa

SEQ ID NO: 270544 - DNA, 20 bp, Artificial Sequence
  Description of Artificial Sequence: Synthetic oligonucleotide
  Target: LAMA2; (-) strand; PAM type: YTN; PAM sequence: TTG
gcttcatagccccgttcaat

SEQ ID NO: 270545 - DNA, 20 bp, Artificial Sequence
  Description of Artificial Sequence: Synthetic oligonucleotide
  Target: LAMA2; (-) strand; PAM type: YTN; PAM sequence: TTT
ggcttcatagccccgttcaa

SEQ ID NO: 270546 - DNA, 20 bp, Artificial Sequence
  Description of Artificial Sequence: Synthetic oligonucleotide
  Target: LAMA2; (-) strand; PAM type: YTN; PAM sequence: TTT
tggcttcatagccccgttca

SEQ ID NO: 270547 - DNA, 20 bp, Artificial Sequence
  Description of Artificial Sequence: Synthetic oligonucleotide
  Target: LAMA2; (-) strand; PAM type: YTN; PAM sequence: TTA
ttttggcttcatagccccgt

SEQ ID NO: 270548 - DNA, 20 bp, Artificial Sequence
  Description of Artificial Sequence: Synthetic oligonucleotide
  Target: LAMA2; (-) strand; PAM type: YTN; PAM sequence: CTG
catggaaaccaagtaaaaga

SEQ ID NO: 270549 - DNA, 20 bp, Artificial Sequence
  Description of Artificial Sequence: Synthetic oligonucleotide
  Target: LAMA2; (-) strand; PAM type: YTN; PAM sequence: TTG
cactgcatggaaaccaagta

SEQ ID NO: 270550 - DNA, 20 bp, Artificial Sequence
  Description of Artificial Sequence: Synthetic oligonucleotide
  Target: LAMA2; (-) strand; PAM type: YTN; PAM sequence: TTT
gcactgcatggaaaccaagt

SEQ ID NO: 270551 - DNA, 20 bp, Artificial Sequence
  Description of Artificial Sequence: Synthetic oligonucleotide
  Target: LAMA2; (-) strand; PAM type: YTN; PAM sequence: CTA
gccagaatgaaaccaaattt

SEQ ID NO: 270552 - DNA, 20 bp, Artificial Sequence
  Description of Artificial Sequence: Synthetic oligonucleotide
  Target: LAMA2; (-) strand; PAM type: YTN; PAM sequence: CTC
ctagccagaatgaaaccaaa

SEQ ID NO: 270553 - DNA, 20 bp, Artificial Sequence
  Description of Artificial Sequence: Synthetic oligonucleotide
  Target: LAMA2; (-) strand; PAM type: YTN; PAM sequence: TTC
tcctagccagaatgaaacca

SEQ ID NO: 270554 - DNA, 20 bp, Artificial Sequence
  Description of Artificial Sequence: Synthetic oligonucleotide
  Target: LAMA2; (-) strand; PAM type: YTN; PAM sequence: CTT
ctcctagccagaatgaaacc

SEQ ID NO: 270555 - DNA, 20 bp, Artificial Sequence
  Description of Artificial Sequence: Synthetic oligonucleotide
  Target: LAMA2; (-) strand; PAM type: YTN; PAM sequence: CTC
ttctcctagccagaatgaaa

SEQ ID NO: 270556 - DNA, 20 bp, Artificial Sequence
  Description of Artificial Sequence: Synthetic oligonucleotide
  Target: LAMA2; (-) strand; PAM type: YTN; PAM sequence: TTA
ctcttctcctagccagaatg

SEQ ID NO: 270557 - DNA, 20 bp, Artificial Sequence
  Description of Artificial Sequence: Synthetic oligonucleotide
  Target: LAMA2; (-) strand; PAM type: YTN; PAM sequence: CTT
actcttctcctagccagaat

SEQ ID NO: 270558 - DNA, 20 bp, Artificial Sequence
  Description of Artificial Sequence: Synthetic oligonucleotide
  Target: LAMA2; (-) strand; PAM type: YTN; PAM sequence: CTC
ttactcttctcctagccaga

SEQ ID NO: 270559 - DNA, 20 bp, Artificial Sequence
  Description of Artificial Sequence: Synthetic oligonucleotide
  Target: LAMA2; (-) strand; PAM type: YTN; PAM sequence: CTA
tatctcttactcttctccta

SEQ ID NO: 270560 - DNA, 20 bp, Artificial Sequence
  Description of Artificial Sequence: Synthetic oligonucleotide
  Target: LAMA2; (-) strand; PAM type: YTN; PAM sequence: CTA
gggctatatctcttactctt

SEQ ID NO: 270561 - DNA, 20 bp, Artificial Sequence
  Description of Artificial Sequence: Synthetic oligonucleotide
  Target: LAMA2; (-) strand; PAM type: YTN; PAM sequence: CTG
gaactagggctatatctctt

SEQ ID NO: 270562 - DNA, 20 bp, Artificial Sequence
  Description of Artificial Sequence: Synthetic oligonucleotide
  Target: LAMA2; (-) strand; PAM type: YTN; PAM sequence: TTG
gaggccagagcagaagtctg

SEQ ID NO: 270563 - DNA, 20 bp, Artificial Sequence
  Description of Artificial Sequence: Synthetic oligonucleotide
  Target: LAMA2; (-) strand; PAM type: YTN; PAM sequence: TTT
ggaggccagagcagaagtct

SEQ ID NO: 270564 - DNA, 20 bp, Artificial Sequence
  Description of Artificial Sequence: Synthetic oligonucleotide
  Target: LAMA2; (-) strand; PAM type: YTN; PAM sequence: CTT
tggaggccagagcagaagtc

SEQ ID NO: 270565 - DNA, 20 bp, Artificial Sequence
  Description of Artificial Sequence: Synthetic oligonucleotide
  Target: LAMA2; (-) strand; PAM type: YTN; PAM sequence: CTG
aatgaacaaagaggctttgg

SEQ ID NO: 270566 - DNA, 20 bp, Artificial Sequence
  Description of Artificial Sequence: Synthetic oligonucleotide
  Target: LAMA2; (-) strand; PAM type: YTN; PAM sequence: TTC
acaagctgaatgaacaaaga

SEQ ID NO: 270567 - DNA, 20 bp, Artificial Sequence
  Description of Artificial Sequence: Synthetic oligonucleotide
  Target: LAMA2; (-) strand; PAM type: YTN; PAM sequence: CTT
cacaagctgaatgaacaaag

SEQ ID NO: 270568 - DNA, 20 bp, Artificial Sequence
  Description of Artificial Sequence: Synthetic oligonucleotide
  Target: LAMA2; (-) strand; PAM type: YTN; PAM sequence: CTG
atgcttcacaagctgaatga

SEQ ID NO: 270569 - DNA, 20 bp, Artificial Sequence
  Description of Artificial Sequence: Synthetic oligonucleotide
  Target: LAMA2; (-) strand; PAM type: YTN; PAM sequence: CTC
ctgatgcttcacaagctgaa

SEQ ID NO: 270570 - DNA, 20 bp, Artificial Sequence
  Description of Artificial Sequence: Synthetic oligonucleotide
  Target: LAMA2; (-) strand; PAM type: YTN; PAM sequence: TTG
caagctcctgatgcttcaca

SEQ ID NO: 270571 - DNA, 20 bp, Artificial Sequence
  Description of Artificial Sequence: Synthetic oligonucleotide
  Target: LAMA2; (-) strand; PAM type: YTN; PAM sequence: TTT
gcaagctcctgatgcttcac

SEQ ID NO: 270572 - DNA, 20 bp, Artificial Sequence
  Description of Artificial Sequence: Synthetic oligonucleotide
  Target: LAMA2; (-) strand; PAM type: YTN; PAM sequence: CTT
tgcaagctcctgatgcttca

SEQ ID NO: 270573 - DNA, 20 bp, Artificial Sequence
  Description of Artificial Sequence: Synthetic oligonucleotide
  Target: LAMA2; (-) strand; PAM type: YTN; PAM sequence: CTG
caggggctttgcaagctcct

SEQ ID NO: 270574 - DNA, 20 bp, Artificial Sequence
  Description of Artificial Sequence: Synthetic oligonucleotide
  Target: LAMA2; (-) strand; PAM type: YTN; PAM sequence: CTG
tagagcgtcacctgcagggg

SEQ ID NO: 270575 - DNA, 20 bp, Artificial Sequence
  Description of Artificial Sequence: Synthetic oligonucleotide
  Target: LAMA2; (-) strand; PAM type: YTN; PAM sequence: TTG
caggtgacaactgtagagcg

SEQ ID NO: 270576 - DNA, 20 bp, Artificial Sequence
  Description of Artificial Sequence: Synthetic oligonucleotide
  Target: LAMA2; (-) strand; PAM type: YTN; PAM sequence: CTT
gcaggtgacaactgtagagc

SEQ ID NO: 270577 - DNA, 20 bp, Artificial Sequence
  Description of Artificial Sequence: Synthetic oligonucleotide
  Target: LAMA2; (-) strand; PAM type: YTN; PAM sequence: TTC
ttgcaggtgacaactgtaga

SEQ ID NO: 270578 - DNA, 20 bp, Artificial Sequence
  Description of Artificial Sequence: Synthetic oligonucleotide
  Target: LAMA2; (-) strand; PAM type: YTN; PAM sequence: CTT
cttgcaggtgacaactgtag

SEQ ID NO: 270579 - DNA, 20 bp, Artificial Sequence
  Description of Artificial Sequence: Synthetic oligonucleotide
  Target: LAMA2; (-) strand; PAM type: YTN; PAM sequence: CTG
cagcttcttgcaggtgacaa

SEQ ID NO: 270580 - DNA, 20 bp, Artificial Sequence
  Description of Artificial Sequence: Synthetic oligonucleotide
  Target: LAMA2; (-) strand; PAM type: YTN; PAM sequence: TTG
caggtgacacctgcagcttc

SEQ ID NO: 270581 - DNA, 20 bp, Artificial Sequence
  Description of Artificial Sequence: Synthetic oligonucleotide
  Target: LAMA2; (-) strand; PAM type: YTN; PAM sequence: CTT
gcaggtgacacctgcagctt

SEQ ID NO: 270582 - DNA, 20 bp, Artificial Sequence
  Description of Artificial Sequence: Synthetic oligonucleotide
  Target: LAMA2; (-) strand; PAM type: YTN; PAM sequence: TTC
ttgcaggtgacacctgcagc

SEQ ID NO: 270583 - DNA, 20 bp, Artificial Sequence
  Description of Artificial Sequence: Synthetic oligonucleotide
  Target: LAMA2; (-) strand; PAM type: YTN; PAM sequence: CTT
cttgcaggtgacacctgcag

SEQ ID NO: 270584 - DNA, 20 bp, Artificial Sequence
  Description of Artificial Sequence: Synthetic oligonucleotide
  Target: LAMA2; (-) strand; PAM type: YTN; PAM sequence: TTA
ataaatcagcttcttgcagg

SEQ ID NO: 270585 - DNA, 20 bp, Artificial Sequence
  Description of Artificial Sequence: Synthetic oligonucleotide
  Target: LAMA2; (-) strand; PAM type: YTN; PAM sequence: TTT
aataaatcagcttcttgcag

SEQ ID NO: 270586 - DNA, 20 bp, Artificial Sequence
  Description of Artificial Sequence: Synthetic oligonucleotide
  Target: LAMA2; (-) strand; PAM type: YTN; PAM sequence: TTT
taataaatcagcttcttgca

SEQ ID NO: 270587 - DNA, 20 bp, Artificial Sequence
  Description of Artificial Sequence: Synthetic oligonucleotide
  Target: LAMA2; (-) strand; PAM type: YTN; PAM sequence: CTT
ttaataaatcagcttcttgc

SEQ ID NO: 270588 - DNA, 20 bp, Artificial Sequence
  Description of Artificial Sequence: Synthetic oligonucleotide
  Target: LAMA2; (-) strand; PAM type: YTN; PAM sequence: CTG
gcagggcttttaataaatca

SEQ ID NO: 270589 - DNA, 20 bp, Artificial Sequence
  Description of Artificial Sequence: Synthetic oligonucleotide
  Target: LAMA2; (-) strand; PAM type: YTN; PAM sequence: CTG
ccctggcagggcttttaata

SEQ ID NO: 270590 - DNA, 20 bp, Artificial Sequence
  Description of Artificial Sequence: Synthetic oligonucleotide
  Target: LAMA2; (-) strand; PAM type: YTN; PAM sequence: TTA
aactgccctggcagggcttt

SEQ ID NO: 270591 - DNA, 20 bp, Artificial Sequence
  Description of Artificial Sequence: Synthetic oligonucleotide
  Target: LAMA2; (-) strand; PAM type: YTN; PAM sequence: TTC
acagggattaaactgccctg

SEQ ID NO: 270592 - DNA, 20 bp, Artificial Sequence
  Description of Artificial Sequence: Synthetic oligonucleotide
  Target: LAMA2; (-) strand; PAM type: YTN; PAM sequence: CTT
cacagggattaaactgccct

SEQ ID NO: 270593 - DNA, 20 bp, Artificial Sequence
  Description of Artificial Sequence: Synthetic oligonucleotide
  Target: LAMA2; (-) strand; PAM type: YTN; PAM sequence: TTA
caatatcacttcacagggat

SEQ ID NO: 270594 - DNA, 20 bp, Artificial Sequence
  Description of Artificial Sequence: Synthetic oligonucleotide
  Target: LAMA2; (-) strand; PAM type: YTN; PAM sequence: CTA
gaggtgagttacaatatcac

SEQ ID NO: 270595 - DNA, 20 bp, Artificial Sequence
  Description of Artificial Sequence: Synthetic oligonucleotide
  Target: LAMA2; (-) strand; PAM type: YTN; PAM sequence: TTG
ataggacagcagctagaggt

SEQ ID NO: 270596 - DNA, 20 bp, Artificial Sequence
  Description of Artificial Sequence: Synthetic oligonucleotide
  Target: LAMA2; (-) strand; PAM type: YTN; PAM sequence: TTT
gataggacagcagctagagg

SEQ ID NO: 270597 - DNA, 20 bp, Artificial Sequence
  Description of Artificial Sequence: Synthetic oligonucleotide
  Target: LAMA2; (-) strand; PAM type: YTN; PAM sequence: TTT
tgataggacagcagctagag

SEQ ID NO: 270598 - DNA, 20 bp, Artificial Sequence
  Description of Artificial Sequence: Synthetic oligonucleotide
  Target: LAMA2; (-) strand; PAM type: YTN; PAM sequence: TTT
ttgataggacagcagctaga

SEQ ID NO: 270599 - DNA, 20 bp, Artificial Sequence
  Description of Artificial Sequence: Synthetic oligonucleotide
  Target: LAMA2; (-) strand; PAM type: YTN; PAM sequence: TTT
tttgataggacagcagctag

SEQ ID NO: 270600 - DNA, 20 bp, Artificial Sequence
  Description of Artificial Sequence: Synthetic oligonucleotide
  Target: LAMA2; (-) strand; PAM type: YTN; PAM sequence: TTG
taaacaaagagaaggaggac

SEQ ID NO: 270601 - DNA, 20 bp, Artificial Sequence
  Description of Artificial Sequence: Synthetic oligonucleotide
  Target: LAMA2; (-) strand; PAM type: YTN; PAM sequence: CTT
gtaaacaaagagaaggagga

SEQ ID NO: 270602 - DNA, 20 bp, Artificial Sequence
  Description of Artificial Sequence: Synthetic oligonucleotide
  Target: LAMA2; (-) strand; PAM type: YTN; PAM sequence: CTG
gtgcttgtaaacaaagagaa

SEQ ID NO: 270603 - DNA, 20 bp, Artificial Sequence
  Description of Artificial Sequence: Synthetic oligonucleotide
  Target: LAMA2; (-) strand; PAM type: YTN; PAM sequence: TTA
actggtgcttgtaaacaaag

SEQ ID NO: 270604 - DNA, 20 bp, Artificial Sequence
  Description of Artificial Sequence: Synthetic oligonucleotide
  Target: LAMA2; (-) strand; PAM type: YTN; PAM sequence: TTA
atggagagaaaaccattaac

SEQ ID NO: 270605 - DNA, 20 bp, Artificial Sequence
  Description of Artificial Sequence: Synthetic oligonucleotide
  Target: LAMA2; (-) strand; PAM type: YTN; PAM sequence: CTT
aatggagagaaaaccattaa

SEQ ID NO: 270606 - DNA, 20 bp, Artificial Sequence
  Description of Artificial Sequence: Synthetic oligonucleotide
  Target: LAMA2; (-) strand; PAM type: YTN; PAM sequence: CTG
cttaatggagagaaaaccat

SEQ ID NO: 270607 - DNA, 20 bp, Artificial Sequence
  Description of Artificial Sequence: Synthetic oligonucleotide
  Target: LAMA2; (-) strand; PAM type: YTN; PAM sequence: CTG
agctgcttaatggagagaaa

SEQ ID NO: 270608 - DNA, 20 bp, Artificial Sequence
  Description of Artificial Sequence: Synthetic oligonucleotide
  Target: LAMA2; (-) strand; PAM type: YTN; PAM sequence: CTA
aacagcagtcccctgagctg

SEQ ID NO: 270609 - DNA, 20 bp, Artificial Sequence
  Description of Artificial Sequence: Synthetic oligonucleotide
  Target: LAMA2; (-) strand; PAM type: YTN; PAM sequence: CTC
taaacagcagtcccctgagc

SEQ ID NO: 270610 - DNA, 20 bp, Artificial Sequence
  Description of Artificial Sequence: Synthetic oligonucleotide
  Target: LAMA2; (-) strand; PAM type: YTN; PAM sequence: TTA
ggtctctaaacagcagtccc

SEQ ID NO: 270611 - DNA, 20 bp, Artificial Sequence
  Description of Artificial Sequence: Synthetic oligonucleotide
  Target: LAMA2; (-) strand; PAM type: YTN; PAM sequence: TTC
aattaggtctctaaacagca

SEQ ID NO: 270612 - DNA, 20 bp, Artificial Sequence
  Description of Artificial Sequence: Synthetic oligonucleotide
  Target: LAMA2; (-) strand; PAM type: YTN; PAM sequence: TTG
gcaagaattcaattaggtct

SEQ ID NO: 270613 - DNA, 20 bp, Artificial Sequence
  Description of Artificial Sequence: Synthetic oligonucleotide
  Target: LAMA2; (-) strand; PAM type: YTN; PAM sequence: CTT
ggcaagaattcaattaggtc

SEQ ID NO: 270614 - DNA, 20 bp, Artificial Sequence
  Description of Artificial Sequence: Synthetic oligonucleotide
  Target: LAMA2; (-) strand; PAM type: YTN; PAM sequence: CTG
gatcatgcccaaacttggca

SEQ ID NO: 270615 - DNA, 20 bp, Artificial Sequence
  Description of Artificial Sequence: Synthetic oligonucleotide
  Target: LAMA2; (-) strand; PAM type: YTN; PAM sequence: CTC
tggatcatgcccaaacttgg

SEQ ID NO: 270616 - DNA, 20 bp, Artificial Sequence
  Description of Artificial Sequence: Synthetic oligonucleotide
  Target: LAMA2; (-) strand; PAM type: YTN; PAM sequence: TTG
gagcagctctggatcatgcc

SEQ ID NO: 270617 - DNA, 20 bp, Artificial Sequence
  Description of Artificial Sequence: Synthetic oligonucleotide
  Target: LAMA2; (-) strand; PAM type: YTN; PAM sequence: TTA
gaataggggaaaatacatag

SEQ ID NO: 270618 - DNA, 20 bp, Artificial Sequence
  Description of Artificial Sequence: Synthetic oligonucleotide
  Target: LAMA2; (-) strand; PAM type: YTN; PAM sequence: CTA
tatacatgttagaatagggg

SEQ ID NO: 270619 - DNA, 20 bp, Artificial Sequence
  Description of Artificial Sequence: Synthetic oligonucleotide
  Target: LAMA2; (-) strand; PAM type: YTN; PAM sequence: CTG
cagatagaggtatcaatgct

SEQ ID NO: 270620 - DNA, 20 bp, Artificial Sequence
  Description of Artificial Sequence: Synthetic oligonucleotide
  Target: LAMA2; (-) strand; PAM type: YTN; PAM sequence: TTC
tgcagatagaggtatcaatg

SEQ ID NO: 270621 - DNA, 20 bp, Artificial Sequence
  Description of Artificial Sequence: Synthetic oligonucleotide
  Target: LAMA2; (-) strand; PAM type: YTN; PAM sequence: TTA
cattctgcagatagaggtat

SEQ ID NO: 270622 - DNA, 20 bp, Artificial Sequence
  Description of Artificial Sequence: Synthetic oligonucleotide
  Target: LAMA2; (-) strand; PAM type: YTN; PAM sequence: CTT
acattctgcagatagaggta

SEQ ID NO: 270623 - DNA, 20 bp, Artificial Sequence
  Description of Artificial Sequence: Synthetic oligonucleotide
  Target: LAMA2; (-) strand; PAM type: YTN; PAM sequence: TTC
ttacattctgcagatagagg

SEQ ID NO: 270624 - DNA, 20 bp, Artificial Sequence
  Description of Artificial Sequence: Synthetic oligonucleotide
  Target: LAMA2; (-) strand; PAM type: YTN; PAM sequence: TTT
cttacattctgcagatagag

SEQ ID NO: 270625 - DNA, 20 bp, Artificial Sequence
  Description of Artificial Sequence: Synthetic oligonucleotide
  Target: LAMA2; (-) strand; PAM type: YTN; PAM sequence: TTA
caatttcttacattctgcag

SEQ ID NO: 270626 - DNA, 20 bp, Artificial Sequence
  Description of Artificial Sequence: Synthetic oligonucleotide
  Target: LAMA2; (-) strand; PAM type: YTN; PAM sequence: CTC
atgtatacagttacaatttc

SEQ ID NO: 270627 - DNA, 20 bp, Artificial Sequence
  Description of Artificial Sequence: Synthetic oligonucleotide
  Target: LAMA2; (-) strand; PAM type: YTN; PAM sequence: CTC
tcatgtatacagttacaatt

SEQ ID NO: 270628 - DNA, 20 bp, Artificial Sequence
  Description of Artificial Sequence: Synthetic oligonucleotide
  Target: LAMA2; (-) strand; PAM type: YTN; PAM sequence: TTA
taatatactctcatgtatac

SEQ ID NO: 270629 - DNA, 20 bp, Artificial Sequence
  Description of Artificial Sequence: Synthetic oligonucleotide
  Target: LAMA2; (-) strand; PAM type: YTN; PAM sequence: TTT
ataatatactctcatgtata

SEQ ID NO: 270630 - DNA, 20 bp, Artificial Sequence
  Description of Artificial Sequence: Synthetic oligonucleotide
  Target: LAMA2; (-) strand; PAM type: YTN; PAM sequence: CTG
catttataatatactctcat

SEQ ID NO: 270631 - DNA, 20 bp, Artificial Sequence
  Description of Artificial Sequence: Synthetic oligonucleotide
  Target: LAMA2; (-) strand; PAM type: YTN; PAM sequence: CTA
ctgcatttataatatactct

SEQ ID NO: 270632 - DNA, 20 bp, Artificial Sequence
  Description of Artificial Sequence: Synthetic oligonucleotide
  Target: LAMA2; (-) strand; PAM type: YTN; PAM sequence: CTG
cacgccaaggagcaggaact

SEQ ID NO: 270633 - DNA, 20 bp, Artificial Sequence
  Description of Artificial Sequence: Synthetic oligonucleotide
  Target: LAMA2; (-) strand; PAM type: YTN; PAM sequence: TTG
cagagtaatgaggtgtatct

SEQ ID NO: 270634 - DNA, 20 bp, Artificial Sequence
  Description of Artificial Sequence: Synthetic oligonucleotide
  Target: LAMA2; (-) strand; PAM type: YTN; PAM sequence: TTG
cattgcagagtaatgaggtg

SEQ ID NO: 270635 - DNA, 20 bp, Artificial Sequence
  Description of Artificial Sequence: Synthetic oligonucleotide
  Target: LAMA2; (-) strand; PAM type: YTN; PAM sequence: TTT
gcattgcagagtaatgaggt

SEQ ID NO: 270636 - DNA, 20 bp, Artificial Sequence
  Description of Artificial Sequence: Synthetic oligonucleotide
  Target: LAMA2; (-) strand; PAM type: YTN; PAM sequence: TTT
tgcattgcagagtaatgagg

SEQ ID NO: 270637 - DNA, 20 bp, Artificial Sequence
  Description of Artificial Sequence: Synthetic oligonucleotide
  Target: LAMA2; (-) strand; PAM type: YTN; PAM sequence: TTA
gttttgcattgcagagtaat

SEQ ID NO: 270638 - DNA, 20 bp, Artificial Sequence
  Description of Artificial Sequence: Synthetic oligonucleotide
  Target: LAMA2; (-) strand; PAM type: YTN; PAM sequence: TTT
agttttgcattgcagagtaa

SEQ ID NO: 270639 - DNA, 20 bp, Artificial Sequence
  Description of Artificial Sequence: Synthetic oligonucleotide
  Target: LAMA2; (-) strand; PAM type: YTN; PAM sequence: TTT
tagttttgcattgcagagta

SEQ ID NO: 270640 - DNA, 20 bp, Artificial Sequence
  Description of Artificial Sequence: Synthetic oligonucleotide
  Target: LAMA2; (-) strand; PAM type: YTN; PAM sequence: TTT
ttagttttgcattgcagagt

SEQ ID NO: 270641 - DNA, 20 bp, Artificial Sequence
  Description of Artificial Sequence: Synthetic oligonucleotide
  Target: LAMA2; (-) strand; PAM type: YTN; PAM sequence: TTA
aaaaacatgtatatttttag

SEQ ID NO: 270642 - DNA, 20 bp, Artificial Sequence
  Description of Artificial Sequence: Synthetic oligonucleotide
  Target: LAMA2; (-) strand; PAM type: YTN; PAM sequence: TTT
aaaaaacatgtatattttta

SEQ ID NO: 270643 - DNA, 20 bp, Artificial Sequence
  Description of Artificial Sequence: Synthetic oligonucleotide
  Target: LAMA2; (-) strand; PAM type: YTN; PAM sequence: TTA
gcagatttaaaaaacatgta

SEQ ID NO: 270644 - DNA, 20 bp, Artificial Sequence
  Description of Artificial Sequence: Synthetic oligonucleotide
  Target: LAMA2; (-) strand; PAM type: YTN; PAM sequence: TTT
agcagatttaaaaaacatgt

SEQ ID NO: 270645 - DNA, 20 bp, Artificial Sequence
  Description of Artificial Sequence: Synthetic oligonucleotide
  Target: LAMA2; (-) strand; PAM type: YTN; PAM sequence: TTT
tagcagatttaaaaaacatg

SEQ ID NO: 270646 - DNA, 20 bp, Artificial Sequence
  Description of Artificial Sequence: Synthetic oligonucleotide
  Target: LAMA2; (-) strand; PAM type: YTN; PAM sequence: CTT
ttagcagatttaaaaaacat

SEQ ID NO: 270647 - DNA, 20 bp, Artificial Sequence
  Description of Artificial Sequence: Synthetic oligonucleotide
  Target: LAMA2; (-) strand; PAM type: YTN; PAM sequence: TTG
aatcttttagcagatttaaa

SEQ ID NO: 270648 - DNA, 20 bp, Artificial Sequence
  Description of Artificial Sequence: Synthetic oligonucleotide
  Target: LAMA2; (-) strand; PAM type: YTN; PAM sequence: TTA
acatatattgaatcttttag

SEQ ID NO: 270649 - DNA, 20 bp, Artificial Sequence
  Description of Artificial Sequence: Synthetic oligonucleotide
  Target: LAMA2; (-) strand; PAM type: YTN; PAM sequence: TTC
caaaattaacatatattgaa

SEQ ID NO: 270650 - DNA, 20 bp, Artificial Sequence
  Description of Artificial Sequence: Synthetic oligonucleotide
  Target: LAMA2; (-) strand; PAM type: YTN; PAM sequence: TTT
ccaaaattaacatatattga

SEQ ID NO: 270651 - DNA, 20 bp, Artificial Sequence
  Description of Artificial Sequence: Synthetic oligonucleotide
  Target: LAMA2; (-) strand; PAM type: YTN; PAM sequence: CTC
ataaatagtcgtataatttc

SEQ ID NO: 270652 - DNA, 20 bp, Artificial Sequence
  Description of Artificial Sequence: Synthetic oligonucleotide
  Target: LAMA2; (-) strand; PAM type: YTN; PAM sequence: TTA
tggaatagatctcataaata

SEQ ID NO: 270653 - DNA, 20 bp, Artificial Sequence
  Description of Artificial Sequence: Synthetic oligonucleotide
  Target: LAMA2; (-) strand; PAM type: YTN; PAM sequence: TTC
attatggaatagatctcata

SEQ ID NO: 270654 - DNA, 20 bp, Artificial Sequence
  Description of Artificial Sequence: Synthetic oligonucleotide
  Target: LAMA2; (-) strand; PAM type: YTN; PAM sequence: CTT
cattatggaatagatctcat

SEQ ID NO: 270655 - DNA, 20 bp, Artificial Sequence
  Description of Artificial Sequence: Synthetic oligonucleotide
  Target: LAMA2; (-) strand; PAM type: YTN; PAM sequence: CTC
ttcattatggaatagatctc

SEQ ID NO: 270656 - DNA, 20 bp, Artificial Sequence
  Description of Artificial Sequence: Synthetic oligonucleotide
  Target: LAMA2; (-) strand; PAM type: YTN; PAM sequence: TTG
actcttcattatggaataga

SEQ ID NO: 270657 - DNA, 20 bp, Artificial Sequence
  Description of Artificial Sequence: Synthetic oligonucleotide
  Target: LAMA2; (-) strand; PAM type: YTN; PAM sequence: TTG
ttgactcttcattatggaat

SEQ ID NO: 270658 - DNA, 20 bp, Artificial Sequence
  Description of Artificial Sequence: Synthetic oligonucleotide
  Target: LAMA2; (-) strand; PAM type: YTN; PAM sequence: TTG
gtagagagacaaatggattg

SEQ ID NO: 270659 - DNA, 20 bp, Artificial Sequence
  Description of Artificial Sequence: Synthetic oligonucleotide
  Target: LAMA2; (-) strand; PAM type: YTN; PAM sequence: TTG
gtggtaggggccaggatagg

SEQ ID NO: 270660 - DNA, 20 bp, Artificial Sequence
  Description of Artificial Sequence: Synthetic oligonucleotide
  Target: LAMA2; (-) strand; PAM type: YTN; PAM sequence: TTT
ggtggtaggggccaggatag

SEQ ID NO: 270661 - DNA, 20 bp, Artificial Sequence
  Description of Artificial Sequence: Synthetic oligonucleotide
  Target: LAMA2; (-) strand; PAM type: YTN; PAM sequence: TTC
aaatttggtggtaggggcca

SEQ ID NO: 270662 - DNA, 20 bp, Artificial Sequence
  Description of Artificial Sequence: Synthetic oligonucleotide
  Target: LAMA2; (-) strand; PAM type: YTN; PAM sequence: CTA
ttcaaatttggtggtagggg

SEQ ID NO: 270663 - DNA, 20 bp, Artificial Sequence
  Description of Artificial Sequence: Synthetic oligonucleotide
  Target: LAMA2; (-) strand; PAM type: YTN; PAM sequence: TTG
gccatcaaagaggtgctatt

SEQ ID NO: 270664 - DNA, 20 bp, Artificial Sequence
  Description of Artificial Sequence: Synthetic oligonucleotide
  Target: LAMA2; (-) strand; PAM type: YTN; PAM sequence: TTT
ggccatcaaagaggtgctat

SEQ ID NO: 270665 - DNA, 20 bp, Artificial Sequence
  Description of Artificial Sequence: Synthetic oligonucleotide
  Target: LAMA2; (-) strand; PAM type: YTN; PAM sequence: TTT
tggccatcaaagaggtgcta

SEQ ID NO: 270666 - DNA, 20 bp, Artificial Sequence
  Description of Artificial Sequence: Synthetic oligonucleotide
  Target: LAMA2; (-) strand; PAM type: YTN; PAM sequence: TTT
ttggccatcaaagaggtgct

SEQ ID NO: 270667 - DNA, 20 bp, Artificial Sequence
  Description of Artificial Sequence: Synthetic oligonucleotide
  Target: LAMA2; (-) strand; PAM type: YTN; PAM sequence: CTC
accataatatttttggccat

SEQ ID NO: 270668 - DNA, 20 bp, Artificial Sequence
  Description of Artificial Sequence: Synthetic oligonucleotide
  Target: LAMA2; (-) strand; PAM type: YTN; PAM sequence: CTA
atacactcaccataatattt

SEQ ID NO: 270669 - DNA, 20 bp, Artificial Sequence
  Description of Artificial Sequence: Synthetic oligonucleotide
  Target: LAMA2; (-) strand; PAM type: YTN; PAM sequence: TTA
tagcaatacgaaaatggact

SEQ ID NO: 270670 - DNA, 20 bp, Artificial Sequence
  Description of Artificial Sequence: Synthetic oligonucleotide
  Target: LAMA2; (-) strand; PAM type: YTN; PAM sequence: TTT
atagcaatacgaaaatggac

SEQ ID NO: 270671 - DNA, 20 bp, Artificial Sequence
  Description of Artificial Sequence: Synthetic oligonucleotide
  Target: LAMA2; (-) strand; PAM type: YTN; PAM sequence: CTT
tatagcaatacgaaaatgga

SEQ ID NO: 270672 - DNA, 20 bp, Artificial Sequence
  Description of Artificial Sequence: Synthetic oligonucleotide
  Target: LAMA2; (-) strand; PAM type: YTN; PAM sequence: TTC
tttatagcaatacgaaaatg

SEQ ID NO: 270673 - DNA, 20 bp, Artificial Sequence
  Description of Artificial Sequence: Synthetic oligonucleotide
  Target: LAMA2; (-) strand; PAM type: YTN; PAM sequence: TTT
ctttatagcaatacgaaaat

SEQ ID NO: 270674 - DNA, 20 bp, Artificial Sequence
  Description of Artificial Sequence: Synthetic oligonucleotide
  Target: LAMA2; (-) strand; PAM type: YTN; PAM sequence: TTC
aggcatttctttatagcaat

SEQ ID NO: 270675 - DNA, 20 bp, Artificial Sequence
  Description of Artificial Sequence: Synthetic oligonucleotide
  Target: LAMA2; (-) strand; PAM type: YTN; PAM sequence: CTT
caggcatttctttatagcaa

SEQ ID NO: 270676 - DNA, 20 bp, Artificial Sequence
  Description of Artificial Sequence: Synthetic oligonucleotide
  Target: LAMA2; (-) strand; PAM type: YTN; PAM sequence: TTG
ccgagcttcaggcatttctt

SEQ ID NO: 270677 - DNA, 20 bp, Artificial Sequence
  Description of Artificial Sequence: Synthetic oligonucleotide
  Target: LAMA2; (-) strand; PAM type: YTN; PAM sequence: TTA
caaattgccgagcttcaggc

SEQ ID NO: 270678 - DNA, 20 bp, Artificial Sequence
  Description of Artificial Sequence: Synthetic oligonucleotide
  Target: LAMA2; (-) strand; PAM type: YTN; PAM sequence: TTT
acaaattgccgagcttcagg

SEQ ID NO: 270679 - DNA, 20 bp, Artificial Sequence
  Description of Artificial Sequence: Synthetic oligonucleotide
  Target: LAMA2; (-) strand; PAM type: YTN; PAM sequence: CTT
tacaaattgccgagcttcag

SEQ ID NO: 270680 - DNA, 20 bp, Artificial Sequence
  Description of Artificial Sequence: Synthetic oligonucleotide
  Target: LAMA2; (-) strand; PAM type: YTN; PAM sequence: TTC
tttacaaattgccgagcttc

SEQ ID NO: 270681 - DNA, 20 bp, Artificial Sequence
  Description of Artificial Sequence: Synthetic oligonucleotide
  Target: LAMA2; (-) strand; PAM type: YTN; PAM sequence: TTT
ctttacaaattgccgagctt

SEQ ID NO: 270682 - DNA, 20 bp, Artificial Sequence
  Description of Artificial Sequence: Synthetic oligonucleotide
  Target: LAMA2; (-) strand; PAM type: YTN; PAM sequence: TTT
tctttacaaattgccgagct

SEQ ID NO: 270683 - DNA, 20 bp, Artificial Sequence
  Description of Artificial Sequence: Synthetic oligonucleotide
  Target: LAMA2; (-) strand; PAM type: YTN; PAM sequence: CTT
ttctttacaaattgccgagc

SEQ ID NO: 270684 - DNA, 20 bp, Artificial Sequence
  Description of Artificial Sequence: Synthetic oligonucleotide
  Target: LAMA2; (-) strand; PAM type: YTN; PAM sequence: CTC
ttttctttacaaattgccga

SEQ ID NO: 270685 - DNA, 20 bp, Artificial Sequence
  Description of Artificial Sequence: Synthetic oligonucleotide
  Target: LAMA2; (-) strand; PAM type: YTN; PAM sequence: TTA
tacctcttttctttacaaat

SEQ ID NO: 270686 - DNA, 20 bp, Artificial Sequence
  Description of Artificial Sequence: Synthetic oligonucleotide
  Target: LAMA2; (-) strand; PAM type: YTN; PAM sequence: CTG
atggaaccatgagccaatta

SEQ ID NO: 270687 - DNA, 20 bp, Artificial Sequence
  Description of Artificial Sequence: Synthetic oligonucleotide
  Target: LAMA2; (-) strand; PAM type: YTN; PAM sequence: CTG
tacagcctgatggaaccatg

SEQ ID NO: 270688 - DNA, 20 bp, Artificial Sequence
  Description of Artificial Sequence: Synthetic oligonucleotide
  Target: LAMA2; (-) strand; PAM type: YTN; PAM sequence: TTC
ctgtacagcctgatggaacc

SEQ ID NO: 270689 - DNA, 20 bp, Artificial Sequence
  Description of Artificial Sequence: Synthetic oligonucleotide
  Target: LAMA2; (-) strand; PAM type: YTN; PAM sequence: CTT
cctgtacagcctgatggaac

SEQ ID NO: 270690 - DNA, 20 bp, Artificial Sequence
  Description of Artificial Sequence: Synthetic oligonucleotide
  Target: LAMA2; (-) strand; PAM type: YTN; PAM sequence: CTG
aggccaccccagccatgctt

SEQ ID NO: 270691 - DNA, 20 bp, Artificial Sequence
  Description of Artificial Sequence: Synthetic oligonucleotide
  Target: LAMA2; (-) strand; PAM type: YTN; PAM sequence: TTC
cctgaggccaccccagccat

SEQ ID NO: 270692 - DNA, 20 bp, Artificial Sequence
  Description of Artificial Sequence: Synthetic oligonucleotide
  Target: LAMA2; (-) strand; PAM type: YTN; PAM sequence: CTG
ccatgagtgaaagttccctg

SEQ ID NO: 270693 - DNA, 20 bp, Artificial Sequence
  Description of Artificial Sequence: Synthetic oligonucleotide
  Target: LAMA2; (-) strand; PAM type: YTN; PAM sequence: TTC
tgccatgagtgaaagttccc

SEQ ID NO: 270694 - DNA, 20 bp, Artificial Sequence
  Description of Artificial Sequence: Synthetic oligonucleotide
  Target: LAMA2; (-) strand; PAM type: YTN; PAM sequence: CTT
ctgccatgagtgaaagttcc

SEQ ID NO: 270695 - DNA, 20 bp, Artificial Sequence
  Description of Artificial Sequence: Synthetic oligonucleotide
  Target: LAMA2; (-) strand; PAM type: YTN; PAM sequence: TTG
ccttctgccatgagtgaaag

SEQ ID NO: 270696 - DNA, 20 bp, Artificial Sequence
  Description of Artificial Sequence: Synthetic oligonucleotide
  Target: LAMA2; (-) strand; PAM type: YTN; PAM sequence: TTT
gccttctgccatgagtgaaa

SEQ ID NO: 270697 - DNA, 20 bp, Artificial Sequence
  Description of Artificial Sequence: Synthetic oligonucleotide
  Target: LAMA2; (-) strand; PAM type: YTN; PAM sequence: CTT
tgccttctgccatgagtgaa

SEQ ID NO: 270698 - DNA, 20 bp, Artificial Sequence
  Description of Artificial Sequence: Synthetic oligonucleotide
  Target: LAMA2; (-) strand; PAM type: YTN; PAM sequence: CTC
cagctttgccttctgccatg

SEQ ID NO: 270699 - DNA, 20 bp, Artificial Sequence
  Description of Artificial Sequence: Synthetic oligonucleotide
  Target: LAMA2; (-) strand; PAM type: YTN; PAM sequence: CTG
ctccagctttgccttctgcc

SEQ ID NO: 270700 - DNA, 20 bp, Artificial Sequence
  Description of Artificial Sequence: Synthetic oligonucleotide
  Target: LAMA2; (-) strand; PAM type: YTN; PAM sequence: CTG
tgtgaagatgcctgctccag

SEQ ID NO: 270701 - DNA, 20 bp, Artificial Sequence
  Description of Artificial Sequence: Synthetic oligonucleotide
  Target: LAMA2; (-) strand; PAM type: YTN; PAM sequence: CTG
cctgtgtgaagatgcctgct

SEQ ID NO: 270702 - DNA, 20 bp, Artificial Sequence
  Description of Artificial Sequence: Synthetic oligonucleotide
  Target: LAMA2; (-) strand; PAM type: YTN; PAM sequence: CTC
tgcctgtgtgaagatgcctg

SEQ ID NO: 270703 - DNA, 20 bp, Artificial Sequence
  Description of Artificial Sequence: Synthetic oligonucleotide
  Target: LAMA2; (-) strand; PAM type: YTN; PAM sequence: CTG
ctctgcctgtgtgaagatgc

SEQ ID NO: 270704 - DNA, 20 bp, Artificial Sequence
  Description of Artificial Sequence: Synthetic oligonucleotide
  Target: LAMA2; (-) strand; PAM type: YTN; PAM sequence: CTC
ctgctctgcctgtgtgaaga

SEQ ID NO: 270705 - DNA, 20 bp, Artificial Sequence
  Description of Artificial Sequence: Synthetic oligonucleotide
  Target: LAMA2; (-) strand; PAM type: YTN; PAM sequence: TTC
ctcctgctctgcctgtgtga

SEQ ID NO: 270706 - DNA, 20 bp, Artificial Sequence
  Description of Artificial Sequence: Synthetic oligonucleotide
  Target: LAMA2; (-) strand; PAM type: YTN; PAM sequence: CTT
cctcctgctctgcctgtgtg

SEQ ID NO: 270707 - DNA, 20 bp, Artificial Sequence
  Description of Artificial Sequence: Synthetic oligonucleotide
  Target: LAMA2; (-) strand; PAM type: YTN; PAM sequence: CTC
cagcccccacttcctcctgc

SEQ ID NO: 270708 - DNA, 20 bp, Artificial Sequence
  Description of Artificial Sequence: Synthetic oligonucleotide
  Target: LAMA2; (-) strand; PAM type: YTN; PAM sequence: TTA
aaagtgtgtgccacctccag

SEQ ID NO: 270709 - DNA, 20 bp, Artificial Sequence
  Description of Artificial Sequence: Synthetic oligonucleotide
  Target: LAMA2; (-) strand; PAM type: YTN; PAM sequence: TTT
aaaagtgtgtgccacctcca

SEQ ID NO: 270710 - DNA, 20 bp, Artificial Sequence
  Description of Artificial Sequence: Synthetic oligonucleotide
  Target: LAMA2; (-) strand; PAM type: YTN; PAM sequence: TTA
tttaaaagtgtgtgccacct

SEQ ID NO: 270711 - DNA, 20 bp, Artificial Sequence
  Description of Artificial Sequence: Synthetic oligonucleotide
  Target: LAMA2; (-) strand; PAM type: YTN; PAM sequence: CTG
gttatttaaaagtgtgtgcc

SEQ ID NO: 270712 - DNA, 20 bp, Artificial Sequence
  Description of Artificial Sequence: Synthetic oligonucleotide
  Target: LAMA2; (-) strand; PAM type: YTN; PAM sequence: CTC
ataagacctggttatttaaa

SEQ ID NO: 270713 - DNA, 20 bp, Artificial Sequence
  Description of Artificial Sequence: Synthetic oligonucleotide
  Target: LAMA2; (-) strand; PAM type: YTN; PAM sequence: TTC
tcataagacctggttattta

SEQ ID NO: 270714 - DNA, 20 bp, Artificial Sequence
  Description of Artificial Sequence: Synthetic oligonucleotide
  Target: LAMA2; (-) strand; PAM type: YTN; PAM sequence: CTC
atgacagagttctcataaga

SEQ ID NO: 270715 - DNA, 20 bp, Artificial Sequence
  Description of Artificial Sequence: Synthetic oligonucleotide
  Target: LAMA2; (-) strand; PAM type: YTN; PAM sequence: TTC
tcatgacagagttctcataa

SEQ ID NO: 270716 - DNA, 20 bp, Artificial Sequence
  Description of Artificial Sequence: Synthetic oligonucleotide
  Target: LAMA2; (-) strand; PAM type: YTN; PAM sequence: CTA
gtgatgttctcatgacagag

SEQ ID NO: 270717 - DNA, 20 bp, Artificial Sequence
  Description of Artificial Sequence: Synthetic oligonucleotide
  Target: LAMA2; (-) strand; PAM type: YTN; PAM sequence: TTA
gcaccaccgccctagtgatg

SEQ ID NO: 270718 - DNA, 20 bp, Artificial Sequence
  Description of Artificial Sequence: Synthetic oligonucleotide
  Target: LAMA2; (-) strand; PAM type: YTN; PAM sequence: CTT
agcaccaccgccctagtgat

SEQ ID NO: 270719 - DNA, 20 bp, Artificial Sequence
  Description of Artificial Sequence: Synthetic oligonucleotide
  Target: LAMA2; (-) strand; PAM type: YTN; PAM sequence: TTA
atggcttagcaccaccgccc

SEQ ID NO: 270720 - DNA, 20 bp, Artificial Sequence
  Description of Artificial Sequence: Synthetic oligonucleotide
  Target: LAMA2; (-) strand; PAM type: YTN; PAM sequence: TTT
aatggcttagcaccaccgcc

SEQ ID NO: 270721 - DNA, 20 bp, Artificial Sequence
  Description of Artificial Sequence: Synthetic oligonucleotide
  Target: LAMA2; (-) strand; PAM type: YTN; PAM sequence: TTT
taatggcttagcaccaccgc

SEQ ID NO: 270722 - DNA, 20 bp, Artificial Sequence
  Description of Artificial Sequence: Synthetic oligonucleotide
  Target: LAMA2; (-) strand; PAM type: YTN; PAM sequence: CTG
gagtggttttaatggcttag

SEQ ID NO: 270723 - DNA, 20 bp, Artificial Sequence
  Description of Artificial Sequence: Synthetic oligonucleotide
  Target: LAMA2; (-) strand; PAM type: YTN; PAM sequence: TTG
aatcactggagtggttttaa

SEQ ID NO: 270724 - DNA, 20 bp, Artificial Sequence
  Description of Artificial Sequence: Synthetic oligonucleotide
  Target: LAMA2; (-) strand; PAM type: YTN; PAM sequence: CTC
gtgggaggtattgaatcact

SEQ ID NO: 270725 - DNA, 20 bp, Artificial Sequence
  Description of Artificial Sequence: Synthetic oligonucleotide
  Target: LAMA2; (-) strand; PAM type: YTN; PAM sequence: CTG
gatatggggcctcgtgggag

SEQ ID NO: 270726 - DNA, 20 bp, Artificial Sequence
  Description of Artificial Sequence: Synthetic oligonucleotide
  Target: LAMA2; (-) strand; PAM type: YTN; PAM sequence: TTG
aaatgtcatccccaatactg

SEQ ID NO: 270727 - DNA, 20 bp, Artificial Sequence
  Description of Artificial Sequence: Synthetic oligonucleotide
  Target: LAMA2; (-) strand; PAM type: YTN; PAM sequence: CTC
atattgaaatgtcatcccca

SEQ ID NO: 270728 - DNA, 20 bp, Artificial Sequence
  Description of Artificial Sequence: Synthetic oligonucleotide
  Target: LAMA2; (-) strand; PAM type: YTN; PAM sequence: CTG
tgtccccatccaaatctcat

SEQ ID NO: 270729 - DNA, 20 bp, Artificial Sequence
  Description of Artificial Sequence: Synthetic oligonucleotide
  Target: LAMA2; (-) strand; PAM type: YTN; PAM sequence: TTG
gatctgtgtccccatccaaa

SEQ ID NO: 270730 - DNA, 20 bp, Artificial Sequence
  Description of Artificial Sequence: Synthetic oligonucleotide
  Target: LAMA2; (-) strand; PAM type: YTN; PAM sequence: TTT
ggatctgtgtccccatccaa

SEQ ID NO: 270731 - DNA, 20 bp, Artificial Sequence
  Description of Artificial Sequence: Synthetic oligonucleotide
  Target: LAMA2; (-) strand; PAM type: YTN; PAM sequence: CTA
ccagatatggtttggatctg

SEQ ID NO: 270732 - DNA, 20 bp, Artificial Sequence
  Description of Artificial Sequence: Synthetic oligonucleotide
  Target: LAMA2; (-) strand; PAM type: YTN; PAM sequence: TTC
taccagatatggtttggatc

SEQ ID NO: 270733 - DNA, 20 bp, Artificial Sequence
  Description of Artificial Sequence: Synthetic oligonucleotide
  Target: LAMA2; (-) strand; PAM type: YTN; PAM sequence: CTA
atattctaccagatatggtt

SEQ ID NO: 270734 - DNA, 20 bp, Artificial Sequence
  Description of Artificial Sequence: Synthetic oligonucleotide
  Target: LAMA2; (-) strand; PAM type: YTN; PAM sequence: TTA
agtagccaagaatgctaata

SEQ ID NO: 270735 - DNA, 20 bp, Artificial Sequence
  Description of Artificial Sequence: Synthetic oligonucleotide
  Target: LAMA2; (-) strand; PAM type: YTN; PAM sequence: TTT
aagtagccaagaatgctaat

SEQ ID NO: 270736 - DNA, 20 bp, Artificial Sequence
  Description of Artificial Sequence: Synthetic oligonucleotide
  Target: LAMA2; (-) strand; PAM type: YTN; PAM sequence: CTT
taagtagccaagaatgctaa

SEQ ID NO: 270737 - DNA, 20 bp, Artificial Sequence
  Description of Artificial Sequence: Synthetic oligonucleotide
  Target: LAMA2; (-) strand; PAM type: YTN; PAM sequence: TTC
tttaagtagccaagaatgct

SEQ ID NO: 270738 - DNA, 20 bp, Artificial Sequence
  Description of Artificial Sequence: Synthetic oligonucleotide
  Target: LAMA2; (-) strand; PAM type: YTN; PAM sequence: CTA
tattctttaagtagccaaga

SEQ ID NO: 270739 - DNA, 20 bp, Artificial Sequence
  Description of Artificial Sequence: Synthetic oligonucleotide
  Target: LAMA2; (-) strand; PAM type: YTN; PAM sequence: CTA
gaaaaactatattctttaag

SEQ ID NO: 270740 - DNA, 20 bp, Artificial Sequence
  Description of Artificial Sequence: Synthetic oligonucleotide
  Target: LAMA2; (-) strand; PAM type: YTN; PAM sequence: CTA
aaggctagaaaaactatatt

SEQ ID NO: 270741 - DNA, 20 bp, Artificial Sequence
  Description of Artificial Sequence: Synthetic oligonucleotide
  Target: LAMA2; (-) strand; PAM type: YTN; PAM sequence: TTG
ctaaaggctagaaaaactat

SEQ ID NO: 270742 - DNA, 20 bp, Artificial Sequence
  Description of Artificial Sequence: Synthetic oligonucleotide
  Target: LAMA2; (-) strand; PAM type: YTN; PAM sequence: TTA
tagataaataattgctaaag

SEQ ID NO: 270743 - DNA, 20 bp, Artificial Sequence
  Description of Artificial Sequence: Synthetic oligonucleotide
  Target: LAMA2; (-) strand; PAM type: YTN; PAM sequence: CTT
atagataaataattgctaaa

SEQ ID NO: 270744 - DNA, 20 bp, Artificial Sequence
  Description of Artificial Sequence: Synthetic oligonucleotide
  Target: LAMA2; (-) strand; PAM type: YTN; PAM sequence: TTC
agtcttatagataaataatt

SEQ ID NO: 270745 - DNA, 20 bp, Artificial Sequence
  Description of Artificial Sequence: Synthetic oligonucleotide
  Target: LAMA2; (-) strand; PAM type: YTN; PAM sequence: TTT
cagtcttatagataaataat

SEQ ID NO: 270746 - DNA, 20 bp, Artificial Sequence
  Description of Artificial Sequence: Synthetic oligonucleotide
  Target: LAMA2; (-) strand; PAM type: YTN; PAM sequence: CTT
tcagtcttatagataaataa

SEQ ID NO: 270747 - DNA, 20 bp, Artificial Sequence
  Description of Artificial Sequence: Synthetic oligonucleotide
  Target: LAMA2; (-) strand; PAM type: YTN; PAM sequence: CTC
tttcagtcttatagataaat

SEQ ID NO: 270748 - DNA, 20 bp, Artificial Sequence
  Description of Artificial Sequence: Synthetic oligonucleotide
  Target: LAMA2; (-) strand; PAM type: YTN; PAM sequence: TTA
acctctttcagtcttataga

SEQ ID NO: 270749 - DNA, 20 bp, Artificial Sequence
  Description of Artificial Sequence: Synthetic oligonucleotide
  Target: LAMA2; (-) strand; PAM type: YTN; PAM sequence: TTG
atgattaacctctttcagtc

SEQ ID NO: 270750 - DNA, 20 bp, Artificial Sequence
  Description of Artificial Sequence: Synthetic oligonucleotide
  Target: LAMA2; (-) strand; PAM type: YTN; PAM sequence: TTT
gatgattaacctctttcagt

SEQ ID NO: 270751 - DNA, 20 bp, Artificial Sequence
  Description of Artificial Sequence: Synthetic oligonucleotide
  Target: LAMA2; (-) strand; PAM type: YTN; PAM sequence: CTT
tgatgattaacctctttcag

SEQ ID NO: 270752 - DNA, 20 bp, Artificial Sequence
  Description of Artificial Sequence: Synthetic oligonucleotide
  Target: LAMA2; (-) strand; PAM type: YTN; PAM sequence: CTA
ctttgatgattaacctcttt

SEQ ID NO: 270753 - DNA, 20 bp, Artificial Sequence
  Description of Artificial Sequence: Synthetic oligonucleotide
  Target: LAMA2; (-) strand; PAM type: YTN; PAM sequence: CTC
acaaatccctactttgatga

SEQ ID NO: 270754 - DNA, 20 bp, Artificial Sequence
  Description of Artificial Sequence: Synthetic oligonucleotide
  Target: LAMA2; (-) strand; PAM type: YTN; PAM sequence: TTA
gatgcagtctcacaaatccc

SEQ ID NO: 270755 - DNA, 20 bp, Artificial Sequence
  Description of Artificial Sequence: Synthetic oligonucleotide
  Target: LAMA2; (-) strand; PAM type: YTN; PAM sequence: TTA
ccacccatgattagatgcag

SEQ ID NO: 270756 - DNA, 20 bp, Artificial Sequence
  Description of Artificial Sequence: Synthetic oligonucleotide
  Target: LAMA2; (-) strand; PAM type: YTN; PAM sequence: CTA
ttaccacccatgattagatg

SEQ ID NO: 270757 - DNA, 20 bp, Artificial Sequence
  Description of Artificial Sequence: Synthetic oligonucleotide
  Target: LAMA2; (-) strand; PAM type: YTN; PAM sequence: TTC
agtctattaccacccatgat

SEQ ID NO: 270758 - DNA, 20 bp, Artificial Sequence
  Description of Artificial Sequence: Synthetic oligonucleotide
  Target: LAMA2; (-) strand; PAM type: YTN; PAM sequence: CTT
cagtctattaccacccatga

SEQ ID NO: 270759 - DNA, 20 bp, Artificial Sequence
  Description of Artificial Sequence: Synthetic oligonucleotide
  Target: LAMA2; (-) strand; PAM type: YTN; PAM sequence: TTA
tcccttcagtctattaccac

SEQ ID NO: 270760 - DNA, 20 bp, Artificial Sequence
  Description of Artificial Sequence: Synthetic oligonucleotide
  Target: LAMA2; (-) strand; PAM type: YTN; PAM sequence: TTT
atcccttcagtctattacca

SEQ ID NO: 270761 - DNA, 20 bp, Artificial Sequence
  Description of Artificial Sequence: Synthetic oligonucleotide
  Target: LAMA2; (-) strand; PAM type: YTN; PAM sequence: CTT
tatcccttcagtctattacc

SEQ ID NO: 270762 - DNA, 20 bp, Artificial Sequence
  Description of Artificial Sequence: Synthetic oligonucleotide
  Target: LAMA2; (-) strand; PAM type: YTN; PAM sequence: CTC
tttatcccttcagtctatta

SEQ ID NO: 270763 - DNA, 20 bp, Artificial Sequence
  Description of Artificial Sequence: Synthetic oligonucleotide
  Target: LAMA2; (-) strand; PAM type: YTN; PAM sequence: TTC
ctctttatcccttcagtcta

SEQ ID NO: 270764 - DNA, 20 bp, Artificial Sequence
  Description of Artificial Sequence: Synthetic oligonucleotide
  Target: LAMA2; (-) strand; PAM type: YTN; PAM sequence: CTG
ttcctctttatcccttcagt

SEQ ID NO: 270765 - DNA, 20 bp, Artificial Sequence
  Description of Artificial Sequence: Synthetic oligonucleotide
  Target: LAMA2; (-) strand; PAM type: YTN; PAM sequence: TTG
ccaactgttcctctttatcc

SEQ ID NO: 270766 - DNA, 20 bp, Artificial Sequence
  Description of Artificial Sequence: Synthetic oligonucleotide
  Target: LAMA2; (-) strand; PAM type: YTN; PAM sequence: TTT
gccaactgttcctctttatc

SEQ ID NO: 270767 - DNA, 20 bp, Artificial Sequence
  Description of Artificial Sequence: Synthetic oligonucleotide
  Target: LAMA2; (-) strand; PAM type: YTN; PAM sequence: TTA
tttgccaactgttcctcttt

SEQ ID NO: 270768 - DNA, 20 bp, Artificial Sequence
  Description of Artificial Sequence: Synthetic oligonucleotide
  Target: LAMA2; (-) strand; PAM type: YTN; PAM sequence: TTT
atttgccaactgttcctctt

SEQ ID NO: 270769 - DNA, 20 bp, Artificial Sequence
  Description of Artificial Sequence: Synthetic oligonucleotide
  Target: LAMA2; (-) strand; PAM type: YTN; PAM sequence: TTA
tttatttgccaactgttcct

SEQ ID NO: 270770 - DNA, 20 bp, Artificial Sequence
  Description of Artificial Sequence: Synthetic oligonucleotide
  Target: LAMA2; (-) strand; PAM type: YTN; PAM sequence: CTT
atttatttgccaactgttcc

SEQ ID NO: 270771 - DNA, 20 bp, Artificial Sequence
  Description of Artificial Sequence: Synthetic oligonucleotide
  Target: LAMA2; (-) strand; PAM type: YTN; PAM sequence: TTG
acttatttatttgccaactg

SEQ ID NO: 270772 - DNA, 20 bp, Artificial Sequence
  Description of Artificial Sequence: Synthetic oligonucleotide
  Target: LAMA2; (-) strand; PAM type: YTN; PAM sequence: TTA
ttgacttatttatttgccaa

SEQ ID NO: 270773 - DNA, 20 bp, Artificial Sequence
  Description of Artificial Sequence: Synthetic oligonucleotide
  Target: LAMA2; (-) strand; PAM type: YTN; PAM sequence: TTT
attgacttatttatttgcca

SEQ ID NO: 270774 - DNA, 20 bp, Artificial Sequence
  Description of Artificial Sequence: Synthetic oligonucleotide
  Target: LAMA2; (-) strand; PAM type: YTN; PAM sequence: TTA
tgataatatttattgactta

SEQ ID NO: 270775 - DNA, 20 bp, Artificial Sequence
  Description of Artificial Sequence: Synthetic oligonucleotide
  Target: LAMA2; (-) strand; PAM type: YTN; PAM sequence: CTT
atgataatatttattgactt

SEQ ID NO: 270776 - DNA, 20 bp, Artificial Sequence
  Description of Artificial Sequence: Synthetic oligonucleotide
  Target: LAMA2; (-) strand; PAM type: YTN; PAM sequence: TTC
ttatgataatatttattgac

SEQ ID NO: 270777 - DNA, 20 bp, Artificial Sequence
  Description of Artificial Sequence: Synthetic oligonucleotide
  Target: LAMA2; (-) strand; PAM type: YTN; PAM sequence: TTT
cttatgataatatttattga

SEQ ID NO: 270778 - DNA, 20 bp, Artificial Sequence
  Description of Artificial Sequence: Synthetic oligonucleotide
  Target: LAMA2; (-) strand; PAM type: YTN; PAM sequence: TTT
tcttatgataatatttattg

SEQ ID NO: 270779 - DNA, 20 bp, Artificial Sequence
  Description of Artificial Sequence: Synthetic oligonucleotide
  Target: LAMA2; (-) strand; PAM type: YTN; PAM sequence: CTA
tagtgttttcttatgataat

SEQ ID NO: 270780 - DNA, 20 bp, Artificial Sequence
  Description of Artificial Sequence: Synthetic oligonucleotide
  Target: LAMA2; (-) strand; PAM type: YTN; PAM sequence: TTC
tatagtgttttcttatgata

SEQ ID NO: 270781 - DNA, 20 bp, Artificial Sequence
  Description of Artificial Sequence: Synthetic oligonucleotide
  Target: LAMA2; (-) strand; PAM type: YTN; PAM sequence: TTT
ctatagtgttttcttatgat

SEQ ID NO: 270782 - DNA, 20 bp, Artificial Sequence
  Description of Artificial Sequence: Synthetic oligonucleotide
  Target: LAMA2; (-) strand; PAM type: YTN; PAM sequence: CTT
tctatagtgttttcttatga

SEQ ID NO: 270783 - DNA, 20 bp, Artificial Sequence
  Description of Artificial Sequence: Synthetic oligonucleotide
  Target: LAMA2; (-) strand; PAM type: YTN; PAM sequence: TTC
tttctatagtgttttcttat

SEQ ID NO: 270784 - DNA, 20 bp, Artificial Sequence
  Description of Artificial Sequence: Synthetic oligonucleotide
  Target: LAMA2; (-) strand; PAM type: YTN; PAM sequence: TTT
ctttctatagtgttttctta

SEQ ID NO: 270785 - DNA, 20 bp, Artificial Sequence
  Description of Artificial Sequence: Synthetic oligonucleotide
  Target: LAMA2; (-) strand; PAM type: YTN; PAM sequence: TTT
tctttctatagtgttttctt

SEQ ID NO: 270786 - DNA, 20 bp, Artificial Sequence
  Description of Artificial Sequence: Synthetic oligonucleotide
  Target: LAMA2; (-) strand; PAM type: YTN; PAM sequence: CTT
ttctttctatagtgttttct

SEQ ID NO: 270787 - DNA, 20 bp, Artificial Sequence
  Description of Artificial Sequence: Synthetic oligonucleotide
  Target: LAMA2; (-) strand; PAM type: YTN; PAM sequence: CTC
caccccccaaaaaataaaat

SEQ ID NO: 270788 - DNA, 20 bp, Artificial Sequence
  Description of Artificial Sequence: Synthetic oligonucleotide
  Target: LAMA2; (-) strand; PAM type: YTN; PAM sequence: CTG
agactccaccccccaaaaaa

SEQ ID NO: 270789 - DNA, 20 bp, Artificial Sequence
  Description of Artificial Sequence: Synthetic oligonucleotide
  Target: LAMA2; (-) strand; PAM type: YTN; PAM sequence: CTG
ggcgacagactgagactcca

SEQ ID NO: 270790 - DNA, 20 bp, Artificial Sequence
  Description of Artificial Sequence: Synthetic oligonucleotide
  Target: LAMA2; (-) strand; PAM type: YTN; PAM sequence: CTC
cagcctgggcgacagactga

SEQ ID NO: 270791 - DNA, 20 bp, Artificial Sequence
  Description of Artificial Sequence: Synthetic oligonucleotide
  Target: LAMA2; (-) strand; PAM type: YTN; PAM sequence: CTG
cactccagcctgggcgacag

SEQ ID NO: 270792 - DNA, 20 bp, Artificial Sequence
  Description of Artificial Sequence: Synthetic oligonucleotide
  Target: LAMA2; (-) strand; PAM type: YTN; PAM sequence: TTG
caccactgcactccagcctg

SEQ ID NO: 270793 - DNA, 20 bp, Artificial Sequence
  Description of Artificial Sequence: Synthetic oligonucleotide
  Target: LAMA2; (-) strand; PAM type: YTN; PAM sequence: TTG
cagtgagccaagattgcacc

SEQ ID NO: 270794 - DNA, 20 bp, Artificial Sequence
  Description of Artificial Sequence: Synthetic oligonucleotide
  Target: LAMA2; (-) strand; PAM type: YTN; PAM sequence: CTG
ggaggcggaggttgcagtga

SEQ ID NO: 270795 - DNA, 20 bp, Artificial Sequence
  Description of Artificial Sequence: Synthetic oligonucleotide
  Target: LAMA2; (-) strand; PAM type: YTN; PAM sequence: TTG
aaactgggaggcggaggttg

SEQ ID NO: 270796 - DNA, 20 bp, Artificial Sequence
  Description of Artificial Sequence: Synthetic oligonucleotide
  Target: LAMA2; (-) strand; PAM type: YTN; PAM sequence: CTT
gaaactgggaggcggaggtt

SEQ ID NO: 270797 - DNA, 20 bp, Artificial Sequence
  Description of Artificial Sequence: Synthetic oligonucleotide
  Target: LAMA2; (-) strand; PAM type: YTN; PAM sequence: CTG
aggcaggagaatcacttgaa

SEQ ID NO: 270798 - DNA, 20 bp, Artificial Sequence
  Description of Artificial Sequence: Synthetic oligonucleotide
  Target: LAMA2; (-) strand; PAM type: YTN; PAM sequence: CTA
cccagaaggctgaggcagga

SEQ ID NO: 270799 - DNA, 20 bp, Artificial Sequence
  Description of Artificial Sequence: Synthetic oligonucleotide
  Target: LAMA2; (-) strand; PAM type: YTN; PAM sequence: CTC
agctacccagaaggctgagg

SEQ ID NO: 270800 - DNA, 20 bp, Artificial Sequence
  Description of Artificial Sequence: Synthetic oligonucleotide
  Target: LAMA2; (-) strand; PAM type: YTN; PAM sequence: CTG
tagtctcagctacccagaag

SEQ ID NO: 270801 - DNA, 20 bp, Artificial Sequence
  Description of Artificial Sequence: Synthetic oligonucleotide
  Target: LAMA2; (-) strand; PAM type: YTN; PAM sequence: TTA
gccaggcgtggtggcgggcc

SEQ ID NO: 270802 - DNA, 20 bp, Artificial Sequence
  Description of Artificial Sequence: Synthetic oligonucleotide
  Target: LAMA2; (-) strand; PAM type: YTN; PAM sequence: CTA
aaaatacaaaaattagccag

SEQ ID NO: 270803 - DNA, 20 bp, Artificial Sequence
  Description of Artificial Sequence: Synthetic oligonucleotide
  Target: LAMA2; (-) strand; PAM type: YTN; PAM sequence: CTA
ctaaaaatacaaaaattagc

SEQ ID NO: 270804 - DNA, 20 bp, Artificial Sequence
  Description of Artificial Sequence: Synthetic oligonucleotide
  Target: LAMA2; (-) strand; PAM type: YTN; PAM sequence: CTC
tactaaaaatacaaaaatta

SEQ ID NO: 270805 - DNA, 20 bp, Artificial Sequence
  Description of Artificial Sequence: Synthetic oligonucleotide
  Target: LAMA2; (-) strand; PAM type: YTN; PAM sequence: CTG
tctctactaaaaatacaaaa

SEQ ID NO: 270806 - DNA, 20 bp, Artificial Sequence
  Description of Artificial Sequence: Synthetic oligonucleotide
  Target: LAMA2; (-) strand; PAM type: YTN; PAM sequence: CTG
accaacatggtgaaaccctg

SEQ ID NO: 270807 - DNA, 20 bp, Artificial Sequence
  Description of Artificial Sequence: Synthetic oligonucleotide
  Target: LAMA2; (-) strand; PAM type: YTN; PAM sequence: TTC
aagaccagcctgaccaacat

SEQ ID NO: 270808 - DNA, 20 bp, Artificial Sequence
  Description of Artificial Sequence: Synthetic oligonucleotide
  Target: LAMA2; (-) strand; PAM type: YTN; PAM sequence: CTG
aggtcaggagttcaagacca

SEQ ID NO: 270809 - DNA, 20 bp, Artificial Sequence
  Description of Artificial Sequence: Synthetic oligonucleotide
  Target: LAMA2; (-) strand; PAM type: YTN; PAM sequence: TTG
agaggccgaggtgggtggat

SEQ ID NO: 270810 - DNA, 20 bp, Artificial Sequence
  Description of Artificial Sequence: Synthetic oligonucleotide
  Target: LAMA2; (-) strand; PAM type: YTN; PAM sequence: TTT
gagaggccgaggtgggtgga

SEQ ID NO: 270811 - DNA, 20 bp, Artificial Sequence
  Description of Artificial Sequence: Synthetic oligonucleotide
  Target: LAMA2; (-) strand; PAM type: YTN; PAM sequence: CTT
tgagaggccgaggtgggtgg

SEQ ID NO: 270812 - DNA, 20 bp, Artificial Sequence
  Description of Artificial Sequence: Synthetic oligonucleotide
  Target: LAMA2; (-) strand; PAM type: YTN; PAM sequence: CTG
taatcccaacactttgagag

SEQ ID NO: 270813 - DNA, 20 bp, Artificial Sequence
  Description of Artificial Sequence: Synthetic oligonucleotide
  Target: LAMA2; (-) strand; PAM type: YTN; PAM sequence: CTC
atgcctgtaatcccaacact

SEQ ID NO: 270814 - DNA, 20 bp, Artificial Sequence
  Description of Artificial Sequence: Synthetic oligonucleotide
  Target: LAMA2; (-) strand; PAM type: YTN; PAM sequence: CTA
aagaaggccgggtgtggtgg

SEQ ID NO: 270815 - DNA, 20 bp, Artificial Sequence
  Description of Artificial Sequence: Synthetic oligonucleotide
  Target: LAMA2; (-) strand; PAM type: YTN; PAM sequence: TTA
aaaaaaaaaaaagtctaaag

SEQ ID NO: 270816 - DNA, 20 bp, Artificial Sequence
  Description of Artificial Sequence: Synthetic oligonucleotide
  Target: LAMA2; (-) strand; PAM type: YTN; PAM sequence: TTG
agtagaataattaaaaaaaa

SEQ ID NO: 270817 - DNA, 20 bp, Artificial Sequence
  Description of Artificial Sequence: Synthetic oligonucleotide
  Target: LAMA2; (-) strand; PAM type: YTN; PAM sequence: CTA
ttgagtagaataattaaaaa

SEQ ID NO: 270818 - DNA, 20 bp, Artificial Sequence
  Description of Artificial Sequence: Synthetic oligonucleotide
  Target: LAMA2; (-) strand; PAM type: YTN; PAM sequence: TTG
gtatctattgagtagaataa

SEQ ID NO: 270819 - DNA, 20 bp, Artificial Sequence
  Description of Artificial Sequence: Synthetic oligonucleotide
  Target: LAMA2; (-) strand; PAM type: YTN; PAM sequence: CTT
ggtatctattgagtagaata

SEQ ID NO: 270820 - DNA, 20 bp, Artificial Sequence
  Description of Artificial Sequence: Synthetic oligonucleotide
  Target: LAMA2; (-) strand; PAM type: YTN; PAM sequence: TTA
gcttggtatctattgagtag

SEQ ID NO: 270821 - DNA, 20 bp, Artificial Sequence
  Description of Artificial Sequence: Synthetic oligonucleotide
  Target: LAMA2; (-) strand; PAM type: YTN; PAM sequence: TTT
agcttggtatctattgagta

SEQ ID NO: 270822 - DNA, 20 bp, Artificial Sequence
  Description of Artificial Sequence: Synthetic oligonucleotide
  Target: LAMA2; (-) strand; PAM type: YTN; PAM sequence: TTT
tagcttggtatctattgagt

SEQ ID NO: 270823 - DNA, 20 bp, Artificial Sequence
  Description of Artificial Sequence: Synthetic oligonucleotide
  Target: LAMA2; (-) strand; PAM type: YTN; PAM sequence: TTT
ttagcttggtatctattgag

SEQ ID NO: 270824 - DNA, 20 bp, Artificial Sequence
  Description of Artificial Sequence: Synthetic oligonucleotide
  Target: LAMA2; (-) strand; PAM type: YTN; PAM sequence: TTC
aaaaagtatataaattttta

SEQ ID NO: 270825 - DNA, 20 bp, Artificial Sequence
  Description of Artificial Sequence: Synthetic oligonucleotide
  Target: LAMA2; (-) strand; PAM type: YTN; PAM sequence: TTA
cacattcaaaaagtatataa

SEQ ID NO: 270826 - DNA, 20 bp, Artificial Sequence
  Description of Artificial Sequence: Synthetic oligonucleotide
  Target: LAMA2; (-) strand; PAM type: YTN; PAM sequence: TTA
tgtattacacattcaaaaag

SEQ ID NO: 270827 - DNA, 20 bp, Artificial Sequence
  Description of Artificial Sequence: Synthetic oligonucleotide
  Target: LAMA2; (-) strand; PAM type: YTN; PAM sequence: TTT
atgtattacacattcaaaaa

SEQ ID NO: 270828 - DNA, 20 bp, Artificial Sequence
  Description of Artificial Sequence: Synthetic oligonucleotide
  Target: LAMA2; (-) strand; PAM type: YTN; PAM sequence: CTT
tatgtattacacattcaaaa

SEQ ID NO: 270829 - DNA, 20 bp, Artificial Sequence
  Description of Artificial Sequence: Synthetic oligonucleotide
  Target: LAMA2; (-) strand; PAM type: YTN; PAM sequence: CTC
cacatgctttatgtattaca

SEQ ID NO: 270830 - DNA, 20 bp, Artificial Sequence
  Description of Artificial Sequence: Synthetic oligonucleotide
  Target: LAMA2; (-) strand; PAM type: YTN; PAM sequence: TTG
acctccacatgctttatgta

SEQ ID NO: 270831 - DNA, 20 bp, Artificial Sequence
  Description of Artificial Sequence: Synthetic oligonucleotide
  Target: LAMA2; (-) strand; PAM type: YTN; PAM sequence: TTT
gacctccacatgctttatgt

SEQ ID NO: 270832 - DNA, 20 bp, Artificial Sequence
  Description of Artificial Sequence: Synthetic oligonucleotide
  Target: LAMA2; (-) strand; PAM type: YTN; PAM sequence: CTG
gagaaagtcatagtaatttg

SEQ ID NO: 270833 - DNA, 20 bp, Artificial Sequence
  Description of Artificial Sequence: Synthetic oligonucleotide
  Target: LAMA2; (-) strand; PAM type: YTN; PAM sequence: TTG
cactggagaaagtcatagta

SEQ ID NO: 270834 - DNA, 20 bp, Artificial Sequence
  Description of Artificial Sequence: Synthetic oligonucleotide
  Target: LAMA2; (-) strand; PAM type: YTN; PAM sequence: TTA
gattgcactggagaaagtca

SEQ ID NO: 270835 - DNA, 20 bp, Artificial Sequence
  Description of Artificial Sequence: Synthetic oligonucleotide
  Target: LAMA2; (-) strand; PAM type: YTN; PAM sequence: CTC
cattagattgcactggagaa

SEQ ID NO: 270836 - DNA, 20 bp, Artificial Sequence
  Description of Artificial Sequence: Synthetic oligonucleotide
  Target: LAMA2; (-) strand; PAM type: YTN; PAM sequence: CTA
aatgtgtggtgctccattag

SEQ ID NO: 270837 - DNA, 20 bp, Artificial Sequence
  Description of Artificial Sequence: Synthetic oligonucleotide
  Target: LAMA2; (-) strand; PAM type: YTN; PAM sequence: CTC
cagagtctaaatgtgtggtg

SEQ ID NO: 270838 - DNA, 20 bp, Artificial Sequence
  Description of Artificial Sequence: Synthetic oligonucleotide
  Target: LAMA2; (-) strand; PAM type: YTN; PAM sequence: CTG
tccacagggaataaaacatg

SEQ ID NO: 270839 - DNA, 20 bp, Artificial Sequence
  Description of Artificial Sequence: Synthetic oligonucleotide
  Target: LAMA2; (-) strand; PAM type: YTN; PAM sequence: CTA
catgagcaatcgaaaggaac

SEQ ID NO: 270840 - DNA, 20 bp, Artificial Sequence
  Description of Artificial Sequence: Synthetic oligonucleotide
  Target: LAMA2; (-) strand; PAM type: YTN; PAM sequence: CTA
aatccctacatgagcaatcg

SEQ ID NO: 270841 - DNA, 20 bp, Artificial Sequence
  Description of Artificial Sequence: Synthetic oligonucleotide
  Target: LAMA2; (-) strand; PAM type: YTN; PAM sequence: TTA
aaagtaccccctaaatccct

SEQ ID NO: 270842 - DNA, 20 bp, Artificial Sequence
  Description of Artificial Sequence: Synthetic oligonucleotide
  Target: LAMA2; (-) strand; PAM type: YTN; PAM sequence: TTA
aggcatagaatataacatta

SEQ ID NO: 270843 - DNA, 20 bp, Artificial Sequence
  Description of Artificial Sequence: Synthetic oligonucleotide
  Target: LAMA2; (-) strand; PAM type: YTN; PAM sequence: TTT
aaggcatagaatataacatt

SEQ ID NO: 270844 - DNA, 20 bp, Artificial Sequence
  Description of Artificial Sequence: Synthetic oligonucleotide
  Target: LAMA2; (-) strand; PAM type: YTN; PAM sequence: CTT
taaggcatagaatataacat

SEQ ID NO: 270845 - DNA, 20 bp, Artificial Sequence
  Description of Artificial Sequence: Synthetic oligonucleotide
  Target: LAMA2; (-) strand; PAM type: YTN; PAM sequence: TTC
ctttaaggcatagaatataa

SEQ ID NO: 270846 - DNA, 20 bp, Artificial Sequence
  Description of Artificial Sequence: Synthetic oligonucleotide
  Target: LAMA2; (-) strand; PAM type: YTN; PAM sequence: TTT
cctttaaggcatagaatata

SEQ ID NO: 270847 - DNA, 20 bp, Artificial Sequence
  Description of Artificial Sequence: Synthetic oligonucleotide
  Target: LAMA2; (-) strand; PAM type: YTN; PAM sequence: TTG
aagatttcctttaaggcata

SEQ ID NO: 270848 - DNA, 20 bp, Artificial Sequence
  Description of Artificial Sequence: Synthetic oligonucleotide
  Target: LAMA2; (-) strand; PAM type: YTN; PAM sequence: TTG
cacaagtattgaagatttcc

SEQ ID NO: 270849 - DNA, 20 bp, Artificial Sequence
  Description of Artificial Sequence: Synthetic oligonucleotide
  Target: LAMA2; (-) strand; PAM type: YTN; PAM sequence: TTG
gggagaaaaagtgtattgca

SEQ ID NO: 270850 - DNA, 20 bp, Artificial Sequence
  Description of Artificial Sequence: Synthetic oligonucleotide
  Target: LAMA2; (-) strand; PAM type: YTN; PAM sequence: TTT
ggggagaaaaagtgtattgc

SEQ ID NO: 270851 - DNA, 20 bp, Artificial Sequence
  Description of Artificial Sequence: Synthetic oligonucleotide
  Target: LAMA2; (-) strand; PAM type: YTN; PAM sequence: CTG
agggaccaaagaggaggagc

SEQ ID NO: 270852 - DNA, 20 bp, Artificial Sequence
  Description of Artificial Sequence: Synthetic oligonucleotide
  Target: LAMA2; (-) strand; PAM type: YTN; PAM sequence: CTG
aaatagaggcgataatataa

SEQ ID NO: 270853 - DNA, 20 bp, Artificial Sequence
  Description of Artificial Sequence: Synthetic oligonucleotide
  Target: LAMA2; (-) strand; PAM type: YTN; PAM sequence: TTG
aggaaagataagaacaacaa

SEQ ID NO: 270854 - DNA, 20 bp, Artificial Sequence
  Description of Artificial Sequence: Synthetic oligonucleotide
  Target: LAMA2; (-) strand; PAM type: YTN; PAM sequence: CTA
tcaaatggatgatggttgag

SEQ ID NO: 270855 - DNA, 20 bp, Artificial Sequence
  Description of Artificial Sequence: Synthetic oligonucleotide
  Target: LAMA2; (-) strand; PAM type: YTN; PAM sequence: TTA
atgctatcaaatggatgatg

SEQ ID NO: 270856 - DNA, 20 bp, Artificial Sequence
  Description of Artificial Sequence: Synthetic oligonucleotide
  Target: LAMA2; (-) strand; PAM type: YTN; PAM sequence: CTC
agaatattaatgctatcaaa

SEQ ID NO: 270857 - DNA, 20 bp, Artificial Sequence
  Description of Artificial Sequence: Synthetic oligonucleotide
  Target: LAMA2; (-) strand; PAM type: YTN; PAM sequence: CTC
atctcagaatattaatgcta

SEQ ID NO: 270858 - DNA, 20 bp, Artificial Sequence
  Description of Artificial Sequence: Synthetic oligonucleotide
  Target: LAMA2; (-) strand; PAM type: YTN; PAM sequence: CTA
ctcatctcagaatattaatg

SEQ ID NO: 270859 - DNA, 20 bp, Artificial Sequence
  Description of Artificial Sequence: Synthetic oligonucleotide
  Target: LAMA2; (-) strand; PAM type: YTN; PAM sequence: TTC
catggaagatgaaactactc

SEQ ID NO: 270860 - DNA, 20 bp, Artificial Sequence
  Description of Artificial Sequence: Synthetic oligonucleotide
  Target: LAMA2; (-) strand; PAM type: YTN; PAM sequence: TTA
tggtccaagaataattccat

SEQ ID NO: 270861 - DNA, 20 bp, Artificial Sequence
  Description of Artificial Sequence: Synthetic oligonucleotide
  Target: LAMA2; (-) strand; PAM type: YTN; PAM sequence: TTT
atggtccaagaataattcca

SEQ ID NO: 270862 - DNA, 20 bp, Artificial Sequence
  Description of Artificial Sequence: Synthetic oligonucleotide
  Target: LAMA2; (-) strand; PAM type: YTN; PAM sequence: TTT
tatggtccaagaataattcc

SEQ ID NO: 270863 - DNA, 20 bp, Artificial Sequence
  Description of Artificial Sequence: Synthetic oligonucleotide
  Target: LAMA2; (-) strand; PAM type: YTN; PAM sequence: CTA
tgaaatattttatggtccaa

SEQ ID NO: 270864 - DNA, 20 bp, Artificial Sequence
  Description of Artificial Sequence: Synthetic oligonucleotide
  Target: LAMA2; (-) strand; PAM type: YTN; PAM sequence: TTC
agctatgaaatattttatgg

SEQ ID NO: 270865 - DNA, 20 bp, Artificial Sequence
  Description of Artificial Sequence: Synthetic oligonucleotide
  Target: LAMA2; (-) strand; PAM type: YTN; PAM sequence: TTC
aaagaattcagctatgaaat

SEQ ID NO: 270866 - DNA, 20 bp, Artificial Sequence
  Description of Artificial Sequence: Synthetic oligonucleotide
  Target: LAMA2; (-) strand; PAM type: YTN; PAM sequence: CTA
aacatcccaggcagatgttc

SEQ ID NO: 270867 - DNA, 20 bp, Artificial Sequence
  Description of Artificial Sequence: Synthetic oligonucleotide
  Target: LAMA2; (-) strand; PAM type: YTN; PAM sequence: CTG
ctaaacatcccaggcagatg

SEQ ID NO: 270868 - DNA, 20 bp, Artificial Sequence
  Description of Artificial Sequence: Synthetic oligonucleotide
  Target: LAMA2; (-) strand; PAM type: YTN; PAM sequence: TTC
tgctaaacatcccaggcaga

SEQ ID NO: 270869 - DNA, 20 bp, Artificial Sequence
  Description of Artificial Sequence: Synthetic oligonucleotide
  Target: LAMA2; (-) strand; PAM type: YTN; PAM sequence: CTT
ctgctaaacatcccaggcag

SEQ ID NO: 270870 - DNA, 20 bp, Artificial Sequence
  Description of Artificial Sequence: Synthetic oligonucleotide
  Target: LAMA2; (-) strand; PAM type: YTN; PAM sequence: TTA
cttctgctaaacatcccagg

SEQ ID NO: 270871 - DNA, 20 bp, Artificial Sequence
  Description of Artificial Sequence: Synthetic oligonucleotide
  Target: LAMA2; (-) strand; PAM type: YTN; PAM sequence: CTG
tgaaagagaagtgacaaaga

SEQ ID NO: 270872 - DNA, 20 bp, Artificial Sequence
  Description of Artificial Sequence: Synthetic oligonucleotide
  Target: LAMA2; (-) strand; PAM type: YTN; PAM sequence: CTC
cacaaactgtgaaagagaag

SEQ ID NO: 270873 - DNA, 20 bp, Artificial Sequence
  Description of Artificial Sequence: Synthetic oligonucleotide
  Target: LAMA2; (-) strand; PAM type: YTN; PAM sequence: CTC
atctccacaaactgtgaaag

SEQ ID NO: 270874 - DNA, 20 bp, Artificial Sequence
  Description of Artificial Sequence: Synthetic oligonucleotide
  Target: LAMA2; (-) strand; PAM type: YTN; PAM sequence: CTC
caggcgagccaagtcaccga

SEQ ID NO: 270875 - DNA, 20 bp, Artificial Sequence
  Description of Artificial Sequence: Synthetic oligonucleotide
  Target: LAMA2; (-) strand; PAM type: YTN; PAM sequence: CTG
ctccaggcgagccaagtcac

SEQ ID NO: 270876 - DNA, 20 bp, Artificial Sequence
  Description of Artificial Sequence: Synthetic oligonucleotide
  Target: LAMA2; (-) strand; PAM type: YTN; PAM sequence: CTC
atgaccatctgctccaggcg

SEQ ID NO: 270877 - DNA, 20 bp, Artificial Sequence
  Description of Artificial Sequence: Synthetic oligonucleotide
  Target: LAMA2; (-) strand; PAM type: YTN; PAM sequence: TTG
atgctcatgaccatctgctc

SEQ ID NO: 270878 - DNA, 20 bp, Artificial Sequence
  Description of Artificial Sequence: Synthetic oligonucleotide
  Target: LAMA2; (-) strand; PAM type: YTN; PAM sequence: TTA
tatggcgcaggcagcggacc

SEQ ID NO: 270879 - DNA, 20 bp, Artificial Sequence
  Description of Artificial Sequence: Synthetic oligonucleotide
  Target: LAMA2; (-) strand; PAM type: YTN; PAM sequence: TTT
atatggcgcaggcagcggac

SEQ ID NO: 270880 - DNA, 20 bp, Artificial Sequence
  Description of Artificial Sequence: Synthetic oligonucleotide
  Target: LAMA2; (-) strand; PAM type: YTN; PAM sequence: TTT
tatatggcgcaggcagcgga

SEQ ID NO: 270881 - DNA, 20 bp, Artificial Sequence
  Description of Artificial Sequence: Synthetic oligonucleotide
  Target: LAMA2; (-) strand; PAM type: YTN; PAM sequence: TTC
aagaccatacagcattttat

SEQ ID NO: 270882 - DNA, 20 bp, Artificial Sequence
  Description of Artificial Sequence: Synthetic oligonucleotide
  Target: LAMA2; (-) strand; PAM type: YTN; PAM sequence: TTT
caagaccatacagcatttta

SEQ ID NO: 270883 - DNA, 20 bp, Artificial Sequence
  Description of Artificial Sequence: Synthetic oligonucleotide
  Target: LAMA2; (-) strand; PAM type: YTN; PAM sequence: TTT
tcaagaccatacagcatttt

SEQ ID NO: 270884 - DNA, 20 bp, Artificial Sequence
  Description of Artificial Sequence: Synthetic oligonucleotide
  Target: LAMA2; (-) strand; PAM type: YTN; PAM sequence: CTG
agtcatattttcaagaccat

SEQ ID NO: 270885 - DNA, 20 bp, Artificial Sequence
  Description of Artificial Sequence: Synthetic oligonucleotide
  Target: LAMA2; (-) strand; PAM type: YTN; PAM sequence: CTC
ctgagtcatattttcaagac

SEQ ID NO: 270886 - DNA, 20 bp, Artificial Sequence
  Description of Artificial Sequence: Synthetic oligonucleotide
  Target: LAMA2; (-) strand; PAM type: YTN; PAM sequence: TTA
gctcctgagtcatattttca

SEQ ID NO: 270887 - DNA, 20 bp, Artificial Sequence
  Description of Artificial Sequence: Synthetic oligonucleotide
  Target: LAMA2; (-) strand; PAM type: YTN; PAM sequence: TTT
agctcctgagtcatattttc

SEQ ID NO: 270888 - DNA, 20 bp, Artificial Sequence
  Description of Artificial Sequence: Synthetic oligonucleotide
  Target: LAMA2; (-) strand; PAM type: YTN; PAM sequence: CTT
tagctcctgagtcatatttt

SEQ ID NO: 270889 - DNA, 20 bp, Artificial Sequence
  Description of Artificial Sequence: Synthetic oligonucleotide
  Target: LAMA2; (-) strand; PAM type: YTN; PAM sequence: CTA
cctttagctcctgagtcata

SEQ ID NO: 270890 - DNA, 20 bp, Artificial Sequence
  Description of Artificial Sequence: Synthetic oligonucleotide
  Target: LAMA2; (-) strand; PAM type: YTN; PAM sequence: CTG
caccaacctacctttagctc

SEQ ID NO: 270891 - DNA, 20 bp, Artificial Sequence
  Description of Artificial Sequence: Synthetic oligonucleotide
  Target: LAMA2; (-) strand; PAM type: YTN; PAM sequence: TTG
tgactgcaccaacctacctt

SEQ ID NO: 270892 - DNA, 20 bp, Artificial Sequence
  Description of Artificial Sequence: Synthetic oligonucleotide
  Target: LAMA2; (-) strand; PAM type: YTN; PAM sequence: CTT
gtgactgcaccaacctacct

SEQ ID NO: 270893 - DNA, 20 bp, Artificial Sequence
  Description of Artificial Sequence: Synthetic oligonucleotide
  Target: LAMA2; (-) strand; PAM type: YTN; PAM sequence: TTG
cttgtgactgcaccaaccta

SEQ ID NO: 270894 - DNA, 20 bp, Artificial Sequence
  Description of Artificial Sequence: Synthetic oligonucleotide
  Target: LAMA2; (-) strand; PAM type: YTN; PAM sequence: CTT
gcttgtgactgcaccaacct

SEQ ID NO: 270895 - DNA, 20 bp, Artificial Sequence
  Description of Artificial Sequence: Synthetic oligonucleotide
  Target: LAMA2; (-) strand; PAM type: YTN; PAM sequence: CTG
gcccttgcttgtgactgcac

SEQ ID NO: 270896 - DNA, 20 bp, Artificial Sequence
  Description of Artificial Sequence: Synthetic oligonucleotide
  Target: LAMA2; (-) strand; PAM type: YTN; PAM sequence: TTG
tccctggcccttgcttgtga

SEQ ID NO: 270897 - DNA, 20 bp, Artificial Sequence
  Description of Artificial Sequence: Synthetic oligonucleotide
  Target: LAMA2; (-) strand; PAM type: YTN; PAM sequence: CTT
gtccctggcccttgcttgtg

SEQ ID NO: 270898 - DNA, 20 bp, Artificial Sequence
  Description of Artificial Sequence: Synthetic oligonucleotide
  Target: LAMA2; (-) strand; PAM type: YTN; PAM sequence: CTG
tcaccttgtccctggccctt

SEQ ID NO: 270899 - DNA, 20 bp, Artificial Sequence
  Description of Artificial Sequence: Synthetic oligonucleotide
  Target: LAMA2; (-) strand; PAM type: YTN; PAM sequence: TTC
tgtcaccttgtccctggccc

SEQ ID NO: 270900 - DNA, 20 bp, Artificial Sequence
  Description of Artificial Sequence: Synthetic oligonucleotide
  Target: LAMA2; (-) strand; PAM type: YTN; PAM sequence: CTT
ctgtcaccttgtccctggcc

SEQ ID NO: 270901 - DNA, 20 bp, Artificial Sequence
  Description of Artificial Sequence: Synthetic oligonucleotide
  Target: LAMA2; (-) strand; PAM type: YTN; PAM sequence: TTG
tgaagcttctgtcaccttgt

SEQ ID NO: 270902 - DNA, 20 bp, Artificial Sequence
  Description of Artificial Sequence: Synthetic oligonucleotide
  Target: LAMA2; (-) strand; PAM type: YTN; PAM sequence: CTT
gtgaagcttctgtcaccttg

SEQ ID NO: 270903 - DNA, 20 bp, Artificial Sequence
  Description of Artificial Sequence: Synthetic oligonucleotide
  Target: LAMA2; (-) strand; PAM type: YTN; PAM sequence: TTA
cagccaataccgcttgtgaa

SEQ ID NO: 270904 - DNA, 20 bp, Artificial Sequence
  Description of Artificial Sequence: Synthetic oligonucleotide
  Target: LAMA2; (-) strand; PAM type: YTN; PAM sequence: TTA
ccaattacagccaataccgc

SEQ ID NO: 270905 - DNA, 20 bp, Artificial Sequence
  Description of Artificial Sequence: Synthetic oligonucleotide
  Target: LAMA2; (-) strand; PAM type: YTN; PAM sequence: TTT
accaattacagccaataccg

SEQ ID NO: 270906 - DNA, 20 bp, Artificial Sequence
  Description of Artificial Sequence: Synthetic oligonucleotide
  Target: LAMA2; (-) strand; PAM type: YTN; PAM sequence: CTG
tgggaagaacatttaccaat

SEQ ID NO: 270907 - DNA, 20 bp, Artificial Sequence
  Description of Artificial Sequence: Synthetic oligonucleotide
  Target: LAMA2; (-) strand; PAM type: YTN; PAM sequence: TTG
gggctgtgggaagaacattt

SEQ ID NO: 270908 - DNA, 20 bp, Artificial Sequence
  Description of Artificial Sequence: Synthetic oligonucleotide
  Target: LAMA2; (-) strand; PAM type: YTN; PAM sequence: TTT
ggggctgtgggaagaacatt

SEQ ID NO: 270909 - DNA, 20 bp, Artificial Sequence
  Description of Artificial Sequence: Synthetic oligonucleotide
  Target: LAMA2; (-) strand; PAM type: YTN; PAM sequence: TTG
atttggggctgtgggaagaa

SEQ ID NO: 270910 - DNA, 20 bp, Artificial Sequence
  Description of Artificial Sequence: Synthetic oligonucleotide
  Target: LAMA2; (-) strand; PAM type: YTN; PAM sequence: CTT
gatttggggctgtgggaaga

SEQ ID NO: 270911 - DNA, 20 bp, Artificial Sequence
  Description of Artificial Sequence: Synthetic oligonucleotide
  Target: LAMA2; (-) strand; PAM type: YTN; PAM sequence: TTG
tgtcccttgatttggggctg

SEQ ID NO: 270912 - DNA, 20 bp, Artificial Sequence
  Description of Artificial Sequence: Synthetic oligonucleotide
  Target: LAMA2; (-) strand; PAM type: YTN; PAM sequence: CTA
acagttgtgtcccttgattt

SEQ ID NO: 270913 - DNA, 20 bp, Artificial Sequence
  Description of Artificial Sequence: Synthetic oligonucleotide
  Target: LAMA2; (-) strand; PAM type: YTN; PAM sequence: TTC
cctaacagttgtgtcccttg

SEQ ID NO: 270914 - DNA, 20 bp, Artificial Sequence
  Description of Artificial Sequence: Synthetic oligonucleotide
  Target: LAMA2; (-) strand; PAM type: YTN; PAM sequence: TTT
ccctaacagttgtgtccctt

SEQ ID NO: 270915 - DNA, 20 bp, Artificial Sequence
  Description of Artificial Sequence: Synthetic oligonucleotide
  Target: LAMA2; (-) strand; PAM type: YTN; PAM sequence: CTG
aatttccctaacagttgtgt

SEQ ID NO: 270916 - DNA, 20 bp, Artificial Sequence
  Description of Artificial Sequence: Synthetic oligonucleotide
  Target: LAMA2; (-) strand; PAM type: YTN; PAM sequence: CTC
tgaatttccctaacagttgt

SEQ ID NO: 270917 - DNA, 20 bp, Artificial Sequence
  Description of Artificial Sequence: Synthetic oligonucleotide
  Target: LAMA2; (-) strand; PAM type: YTN; PAM sequence: TTA
agaaagtctctgaatttccc

SEQ ID NO: 270918 - DNA, 20 bp, Artificial Sequence
  Description of Artificial Sequence: Synthetic oligonucleotide
  Target: LAMA2; (-) strand; PAM type: YTN; PAM sequence: CTG
gttaagaaagtctctgaatt

SEQ ID NO: 270919 - DNA, 20 bp, Artificial Sequence
  Description of Artificial Sequence: Synthetic oligonucleotide
  Target: LAMA2; (-) strand; PAM type: YTN; PAM sequence: TTG
aaaaacactggttaagaaag

SEQ ID NO: 270920 - DNA, 20 bp, Artificial Sequence
  Description of Artificial Sequence: Synthetic oligonucleotide
  Target: LAMA2; (-) strand; PAM type: YTN; PAM sequence: TTT
gaaaaacactggttaagaaa

SEQ ID NO: 270921 - DNA, 20 bp, Artificial Sequence
  Description of Artificial Sequence: Synthetic oligonucleotide
  Target: LAMA2; (-) strand; PAM type: YTN; PAM sequence: TTG
agtttgaaaaacactggtta

SEQ ID NO: 270922 - DNA, 20 bp, Artificial Sequence
  Description of Artificial Sequence: Synthetic oligonucleotide
  Target: LAMA2; (-) strand; PAM type: YTN; PAM sequence: CTT
gagtttgaaaaacactggtt

SEQ ID NO: 270923 - DNA, 20 bp, Artificial Sequence
  Description of Artificial Sequence: Synthetic oligonucleotide
  Target: LAMA2; (-) strand; PAM type: YTN; PAM sequence: TTC
ttgagtttgaaaaacactgg

SEQ ID NO: 270924 - DNA, 20 bp, Artificial Sequence
  Description of Artificial Sequence: Synthetic oligonucleotide
  Target: LAMA2; (-) strand; PAM type: YTN; PAM sequence: TTA
tagttcttgagtttgaaaaa

SEQ ID NO: 270925 - DNA, 20 bp, Artificial Sequence
  Description of Artificial Sequence: Synthetic oligonucleotide
  Target: LAMA2; (-) strand; PAM type: YTN; PAM sequence: CTG
tatattatagttcttgagtt

SEQ ID NO: 270926 - DNA, 20 bp, Artificial Sequence
  Description of Artificial Sequence: Synthetic oligonucleotide
  Target: LAMA2; (-) strand; PAM type: YTN; PAM sequence: TTA
atagaaatctgtatattata

SEQ ID NO: 270927 - DNA, 20 bp, Artificial Sequence
  Description of Artificial Sequence: Synthetic oligonucleotide
  Target: LAMA2; (-) strand; PAM type: YTN; PAM sequence: CTT
aatagaaatctgtatattat

SEQ ID NO: 270928 - DNA, 20 bp, Artificial Sequence
  Description of Artificial Sequence: Synthetic oligonucleotide
  Target: LAMA2; (-) strand; PAM type: YTN; PAM sequence: TTC
ccttaatagaaatctgtata

SEQ ID NO: 270929 - DNA, 20 bp, Artificial Sequence
  Description of Artificial Sequence: Synthetic oligonucleotide
  Target: LAMA2; (-) strand; PAM type: YTN; PAM sequence: TTT
cccttaatagaaatctgtat

SEQ ID NO: 270930 - DNA, 20 bp, Artificial Sequence
  Description of Artificial Sequence: Synthetic oligonucleotide
  Target: LAMA2; (-) strand; PAM type: YTN; PAM sequence: TTT
tcccttaatagaaatctgta

SEQ ID NO: 270931 - DNA, 20 bp, Artificial Sequence
  Description of Artificial Sequence: Synthetic oligonucleotide
  Target: LAMA2; (-) strand; PAM type: YTN; PAM sequence: CTT
ttcccttaatagaaatctgt

SEQ ID NO: 270932 - DNA, 20 bp, Artificial Sequence
  Description of Artificial Sequence: Synthetic oligonucleotide
  Target: LAMA2; (-) strand; PAM type: YTN; PAM sequence: CTC
ttttcccttaatagaaatct

SEQ ID NO: 270933 - DNA, 20 bp, Artificial Sequence
  Description of Artificial Sequence: Synthetic oligonucleotide
  Target: LAMA2; (-) strand; PAM type: YTN; PAM sequence: CTG
gggggtacatgagactcttt

SEQ ID NO: 270934 - DNA, 20 bp, Artificial Sequence
  Description of Artificial Sequence: Synthetic oligonucleotide
  Target: LAMA2; (-) strand; PAM type: YTN; PAM sequence: TTA
ggccagacactggggggtac

SEQ ID NO: 270935 - DNA, 20 bp, Artificial Sequence
  Description of Artificial Sequence: Synthetic oligonucleotide
  Target: LAMA2; (-) strand; PAM type: YTN; PAM sequence: TTT
aggccagacactggggggta

SEQ ID NO: 270936 - DNA, 20 bp, Artificial Sequence
  Description of Artificial Sequence: Synthetic oligonucleotide
  Target: LAMA2; (-) strand; PAM type: YTN; PAM sequence: CTG
atttaggccagacactgggg

SEQ ID NO: 270937 - DNA, 20 bp, Artificial Sequence
  Description of Artificial Sequence: Synthetic oligonucleotide
  Target: LAMA2; (-) strand; PAM type: YTN; PAM sequence: TTA
agtgacataataaaactgat

SEQ ID NO: 270938 - DNA, 20 bp, Artificial Sequence
  Description of Artificial Sequence: Synthetic oligonucleotide
  Target: LAMA2; (-) strand; PAM type: YTN; PAM sequence: TTT
aagtgacataataaaactga

SEQ ID NO: 270939 - DNA, 20 bp, Artificial Sequence
  Description of Artificial Sequence: Synthetic oligonucleotide
  Target: LAMA2; (-) strand; PAM type: YTN; PAM sequence: TTG
cacatatttaagtgacataa

SEQ ID NO: 270940 - DNA, 20 bp, Artificial Sequence
  Description of Artificial Sequence: Synthetic oligonucleotide
  Target: LAMA2; (-) strand; PAM type: YTN; PAM sequence: TTT
gcacatatttaagtgacata

SEQ ID NO: 270941 - DNA, 20 bp, Artificial Sequence
  Description of Artificial Sequence: Synthetic oligonucleotide
  Target: LAMA2; (-) strand; PAM type: YTN; PAM sequence: TTA
tgtttgcacatatttaagtg

SEQ ID NO: 270942 - DNA, 20 bp, Artificial Sequence
  Description of Artificial Sequence: Synthetic oligonucleotide
  Target: LAMA2; (-) strand; PAM type: YTN; PAM sequence: TTT
atgtttgcacatatttaagt

SEQ ID NO: 270943 - DNA, 20 bp, Artificial Sequence
  Description of Artificial Sequence: Synthetic oligonucleotide
  Target: LAMA2; (-) strand; PAM type: YTN; PAM sequence: TTT
tatgtttgcacatatttaag

SEQ ID NO: 270944 - DNA, 20 bp, Artificial Sequence
  Description of Artificial Sequence: Synthetic oligonucleotide
  Target: LAMA2; (-) strand; PAM type: YTN; PAM sequence: CTG
attttatgtttgcacatatt

SEQ ID NO: 270945 - DNA, 20 bp, Artificial Sequence
  Description of Artificial Sequence: Synthetic oligonucleotide
  Target: LAMA2; (-) strand; PAM type: YTN; PAM sequence: TTA
tacctgattttatgtttgca

SEQ ID NO: 270946 - DNA, 20 bp, Artificial Sequence
  Description of Artificial Sequence: Synthetic oligonucleotide
  Target: LAMA2; (-) strand; PAM type: YTN; PAM sequence: TTT
atacctgattttatgtttgc

SEQ ID NO: 270947 - DNA, 20 bp, Artificial Sequence
  Description of Artificial Sequence: Synthetic oligonucleotide
  Target: LAMA2; (-) strand; PAM type: YTN; PAM sequence: CTA
taagtataaagagtttatac

SEQ ID NO: 270948 - DNA, 20 bp, Artificial Sequence
  Description of Artificial Sequence: Synthetic oligonucleotide
  Target: LAMA2; (-) strand; PAM type: YTN; PAM sequence: TTA
tagagctataagtataaaga

SEQ ID NO: 270949 - DNA, 20 bp, Artificial Sequence
  Description of Artificial Sequence: Synthetic oligonucleotide
  Target: LAMA2; (-) strand; PAM type: YTN; PAM sequence: TTT
atagagctataagtataaag

SEQ ID NO: 270950 - DNA, 20 bp, Artificial Sequence
  Description of Artificial Sequence: Synthetic oligonucleotide
  Target: LAMA2; (-) strand; PAM type: YTN; PAM sequence: TTT
tatagagctataagtataaa

SEQ ID NO: 270951 - DNA, 20 bp, Artificial Sequence
  Description of Artificial Sequence: Synthetic oligonucleotide
  Target: LAMA2; (-) strand; PAM type: YTN; PAM sequence: TTA
attttatagagctataagta

SEQ ID NO: 270952 - DNA, 20 bp, Artificial Sequence
  Description of Artificial Sequence: Synthetic oligonucleotide
  Target: LAMA2; (-) strand; PAM type: YTN; PAM sequence: TTT
aattttatagagctataagt

SEQ ID NO: 270953 - DNA, 20 bp, Artificial Sequence
  Description of Artificial Sequence: Synthetic oligonucleotide
  Target: LAMA2; (-) strand; PAM type: YTN; PAM sequence: TTT
taattttatagagctataag

SEQ ID NO: 270954 - DNA, 20 bp, Artificial Sequence
  Description of Artificial Sequence: Synthetic oligonucleotide
  Target: LAMA2; (-) strand; PAM type: YTN; PAM sequence: TTG
ttttaattttatagagctat

SEQ ID NO: 270955 - DNA, 20 bp, Artificial Sequence
  Description of Artificial Sequence: Synthetic oligonucleotide
  Target: LAMA2; (-) strand; PAM type: YTN; PAM sequence: TTT
gttttaattttatagagcta

SEQ ID NO: 270956 - DNA, 20 bp, Artificial Sequence
  Description of Artificial Sequence: Synthetic oligonucleotide
  Target: LAMA2; (-) strand; PAM type: YTN; PAM sequence: TTA
atttgttttaattttataga

SEQ ID NO: 270957 - DNA, 20 bp, Artificial Sequence
  Description of Artificial Sequence: Synthetic oligonucleotide
  Target: LAMA2; (-) strand; PAM type: YTN; PAM sequence: TTG
taaggattaatttgttttaa

SEQ ID NO: 270958 - DNA, 20 bp, Artificial Sequence
  Description of Artificial Sequence: Synthetic oligonucleotide
  Target: LAMA2; (-) strand; PAM type: YTN; PAM sequence: TTT
gtaaggattaatttgtttta

SEQ ID NO: 270959 - DNA, 20 bp, Artificial Sequence
  Description of Artificial Sequence: Synthetic oligonucleotide
  Target: LAMA2; (-) strand; PAM type: YTN; PAM sequence: TTT
tgtaaggattaatttgtttt

SEQ ID NO: 270960 - DNA, 20 bp, Artificial Sequence
  Description of Artificial Sequence: Synthetic oligonucleotide
  Target: LAMA2; (-) strand; PAM type: YTN; PAM sequence: TTG
gttttgtaaggattaatttg

SEQ ID NO: 270961 - DNA, 20 bp, Artificial Sequence
  Description of Artificial Sequence: Synthetic oligonucleotide
  Target: LAMA2; (-) strand; PAM type: YTN; PAM sequence: TTA
ttggttttgtaaggattaat

SEQ ID NO: 270962 - DNA, 20 bp, Artificial Sequence
  Description of Artificial Sequence: Synthetic oligonucleotide
  Target: LAMA2; (-) strand; PAM type: YTN; PAM sequence: TTT
attggttttgtaaggattaa

SEQ ID NO: 270963 - DNA, 20 bp, Artificial Sequence
  Description of Artificial Sequence: Synthetic oligonucleotide
  Target: LAMA2; (-) strand; PAM type: YTN; PAM sequence: TTT
tattggttttgtaaggatta

SEQ ID NO: 270964 - DNA, 20 bp, Artificial Sequence
  Description of Artificial Sequence: Synthetic oligonucleotide
  Target: LAMA2; (-) strand; PAM type: YTN; PAM sequence: TTG
aattttattggttttgtaag

SEQ ID NO: 270965 - DNA, 20 bp, Artificial Sequence
  Description of Artificial Sequence: Synthetic oligonucleotide
  Target: LAMA2; (-) strand; PAM type: YTN; PAM sequence: TTT
gaattttattggttttgtaa

SEQ ID NO: 270966 - DNA, 20 bp, Artificial Sequence
  Description of Artificial Sequence: Synthetic oligonucleotide
  Target: LAMA2; (-) strand; PAM type: YTN; PAM sequence: TTA
atttgaattttattggtttt

SEQ ID NO: 270967 - DNA, 20 bp, Artificial Sequence
  Description of Artificial Sequence: Synthetic oligonucleotide
  Target: LAMA2; (-) strand; PAM type: YTN; PAM sequence: TTT
aatttgaattttattggttt

SEQ ID NO: 270968 - DNA, 20 bp, Artificial Sequence
  Description of Artificial Sequence: Synthetic oligonucleotide
  Target: LAMA2; (-) strand; PAM type: YTN; PAM sequence: TTT
taatttgaattttattggtt

SEQ ID NO: 270969 - DNA, 20 bp, Artificial Sequence
  Description of Artificial Sequence: Synthetic oligonucleotide
  Target: LAMA2; (-) strand; PAM type: YTN; PAM sequence: TTT
ttaatttgaattttattggt

SEQ ID NO: 270970 - DNA, 20 bp, Artificial Sequence
  Description of Artificial Sequence: Synthetic oligonucleotide
  Target: LAMA2; (-) strand; PAM type: YTN; PAM sequence: TTA
atgtttttaatttgaatttt

SEQ ID NO: 270971 - DNA, 20 bp, Artificial Sequence
  Description of Artificial Sequence: Synthetic oligonucleotide
  Target: LAMA2; (-) strand; PAM type: YTN; PAM sequence: TTA
tattaatgtttttaatttga

SEQ ID NO: 270972 - DNA, 20 bp, Artificial Sequence
  Description of Artificial Sequence: Synthetic oligonucleotide
  Target: LAMA2; (-) strand; PAM type: YTN; PAM sequence: TTT
atattaatgtttttaatttg

SEQ ID NO: 270973 - DNA, 20 bp, Artificial Sequence
  Description of Artificial Sequence: Synthetic oligonucleotide
  Target: LAMA2; (-) strand; PAM type: YTN; PAM sequence: CTT
tatattaatgtttttaattt

SEQ ID NO: 270974 - DNA, 20 bp, Artificial Sequence
  Description of Artificial Sequence: Synthetic oligonucleotide
  Target: LAMA2; (-) strand; PAM type: YTN; PAM sequence: TTA
ctttatattaatgtttttaa

SEQ ID NO: 270975 - DNA, 20 bp, Artificial Sequence
  Description of Artificial Sequence: Synthetic oligonucleotide
  Target: LAMA2; (-) strand; PAM type: YTN; PAM sequence: TTC
agccaaaatcatgttacttt

SEQ ID NO: 270976 - DNA, 20 bp, Artificial Sequence
  Description of Artificial Sequence: Synthetic oligonucleotide
  Target: LAMA2; (-) strand; PAM type: YTN; PAM sequence: TTC
cattcagccaaaatcatgtt

SEQ ID NO: 270977 - DNA, 20 bp, Artificial Sequence
  Description of Artificial Sequence: Synthetic oligonucleotide
  Target: LAMA2; (-) strand; PAM type: YTN; PAM sequence: TTT
ccattcagccaaaatcatgt

SEQ ID NO: 270978 - DNA, 20 bp, Artificial Sequence
  Description of Artificial Sequence: Synthetic oligonucleotide
  Target: LAMA2; (-) strand; PAM type: YTN; PAM sequence: TTG
caagcagcaatttccattca

SEQ ID NO: 270979 - DNA, 20 bp, Artificial Sequence
  Description of Artificial Sequence: Synthetic oligonucleotide
  Target: LAMA2; (-) strand; PAM type: YTN; PAM sequence: TTG
ttgcaagcagcaatttccat

SEQ ID NO: 270980 - DNA, 20 bp, Artificial Sequence
  Description of Artificial Sequence: Synthetic oligonucleotide
  Target: LAMA2; (-) strand; PAM type: YTN; PAM sequence: CTT
gttgcaagcagcaatttcca

SEQ ID NO: 270981 - DNA, 20 bp, Artificial Sequence
  Description of Artificial Sequence: Synthetic oligonucleotide
  Target: LAMA2; (-) strand; PAM type: YTN; PAM sequence: TTC
ttgttgcaagcagcaatttc

SEQ ID NO: 270982 - DNA, 20 bp, Artificial Sequence
  Description of Artificial Sequence: Synthetic oligonucleotide
  Target: LAMA2; (-) strand; PAM type: YTN; PAM sequence: CTA
ttcttgttgcaagcagcaat

SEQ ID NO: 270983 - DNA, 20 bp, Artificial Sequence
  Description of Artificial Sequence: Synthetic oligonucleotide
  Target: LAMA2; (-) strand; PAM type: YTN; PAM sequence: CTG
tgtgaaaatagtcaatatcc

SEQ ID NO: 270984 - DNA, 20 bp, Artificial Sequence
  Description of Artificial Sequence: Synthetic oligonucleotide
  Target: LAMA2; (-) strand; PAM type: YTN; PAM sequence: CTG
gtggaagaactgtgtgaaaa

SEQ ID NO: 270985 - DNA, 20 bp, Artificial Sequence
  Description of Artificial Sequence: Synthetic oligonucleotide
  Target: LAMA2; (-) strand; PAM type: YTN; PAM sequence: CTC
tggtggaagaactgtgtgaa

SEQ ID NO: 270986 - DNA, 20 bp, Artificial Sequence
  Description of Artificial Sequence: Synthetic oligonucleotide
  Target: LAMA2; (-) strand; PAM type: YTN; PAM sequence: TTA
ccacatcatctctggtggaa

SEQ ID NO: 270987 - DNA, 20 bp, Artificial Sequence
  Description of Artificial Sequence: Synthetic oligonucleotide
  Target: LAMA2; (-) strand; PAM type: YTN; PAM sequence: TTC
aaatgtggtaaggtaggaga

SEQ ID NO: 270988 - DNA, 20 bp, Artificial Sequence
  Description of Artificial Sequence: Synthetic oligonucleotide
  Target: LAMA2; (-) strand; PAM type: YTN; PAM sequence: CTG
gttcaaatgtggtaaggtag

SEQ ID NO: 270989 - DNA, 20 bp, Artificial Sequence
  Description of Artificial Sequence: Synthetic oligonucleotide
  Target: LAMA2; (-) strand; PAM type: YTN; PAM sequence: CTC
tggttcaaatgtggtaaggt

SEQ ID NO: 270990 - DNA, 20 bp, Artificial Sequence
  Description of Artificial Sequence: Synthetic oligonucleotide
  Target: LAMA2; (-) strand; PAM type: YTN; PAM sequence: CTC
tctggttcaaatgtggtaag

SEQ ID NO: 270991 - DNA, 20 bp, Artificial Sequence
  Description of Artificial Sequence: Synthetic oligonucleotide
  Target: LAMA2; (-) strand; PAM type: YTN; PAM sequence: TTG
tagggggctctctggttcaa

SEQ ID NO: 270992 - DNA, 20 bp, Artificial Sequence
  Description of Artificial Sequence: Synthetic oligonucleotide
  Target: LAMA2; (-) strand; PAM type: YTN; PAM sequence: TTT
gtagggggctctctggttca

SEQ ID NO: 270993 - DNA, 20 bp, Artificial Sequence
  Description of Artificial Sequence: Synthetic oligonucleotide
  Target: LAMA2; (-) strand; PAM type: YTN; PAM sequence: CTT
tgtagggggctctctggttc

SEQ ID NO: 270994 - DNA, 20 bp, Artificial Sequence
  Description of Artificial Sequence: Synthetic oligonucleotide
  Target: LAMA2; (-) strand; PAM type: YTN; PAM sequence: TTC
aggaccctttgtagggggct

SEQ ID NO: 270995 - DNA, 20 bp, Artificial Sequence
  Description of Artificial Sequence: Synthetic oligonucleotide
  Target: LAMA2; (-) strand; PAM type: YTN; PAM sequence: TTT
caggaccctttgtagggggc

SEQ ID NO: 270996 - DNA, 20 bp, Artificial Sequence
  Description of Artificial Sequence: Synthetic oligonucleotide
  Target: LAMA2; (-) strand; PAM type: YTN; PAM sequence: TTC
atttcaggaccctttgtagg

SEQ ID NO: 270997 - DNA, 20 bp, Artificial Sequence
  Description of Artificial Sequence: Synthetic oligonucleotide
  Target: LAMA2; (-) strand; PAM type: YTN; PAM sequence: CTC
acattcatttcaggaccctt

SEQ ID NO: 270998 - DNA, 20 bp, Artificial Sequence
  Description of Artificial Sequence: Synthetic oligonucleotide
  Target: LAMA2; (-) strand; PAM type: YTN; PAM sequence: TTG
tcaagtgatgctcacattca

SEQ ID NO: 270999 - DNA, 20 bp, Artificial Sequence
  Description of Artificial Sequence: Synthetic oligonucleotide
  Target: LAMA2; (-) strand; PAM type: YTN; PAM sequence: CTT
gtcaagtgatgctcacattc

SEQ ID NO: 271000 - DNA, 20 bp, Artificial Sequence
  Description of Artificial Sequence: Synthetic oligonucleotide
  Target: LAMA2; (-) strand; PAM type: YTN; PAM sequence: TTA
gtcacataaacttgtcaagt

SEQ ID NO: 271001 - DNA, 20 bp, Artificial Sequence
  Description of Artificial Sequence: Synthetic oligonucleotide
  Target: LAMA2; (-) strand; PAM type: YTN; PAM sequence: CTG
agcacgttagtcacataaac

SEQ ID NO: 271002 - DNA, 20 bp, Artificial Sequence
  Description of Artificial Sequence: Synthetic oligonucleotide
  Target: LAMA2; (-) strand; PAM type: YTN; PAM sequence: CTA
tggcagactgagcacgttag

SEQ ID NO: 271003 - DNA, 20 bp, Artificial Sequence
  Description of Artificial Sequence: Synthetic oligonucleotide
  Target: LAMA2; (-) strand; PAM type: YTN; PAM sequence: TTG
agcctatggcagactgagca

SEQ ID NO: 271004 - DNA, 20 bp, Artificial Sequence
  Description of Artificial Sequence: Synthetic oligonucleotide
  Target: LAMA2; (-) strand; PAM type: YTN; PAM sequence: TTT
gagcctatggcagactgagc

SEQ ID NO: 271005 - DNA, 20 bp, Artificial Sequence
  Description of Artificial Sequence: Synthetic oligonucleotide
  Target: LAMA2; (-) strand; PAM type: YTN; PAM sequence: CTG
tgtgtttgagcctatggcag

SEQ ID NO: 271006 - DNA, 20 bp, Artificial Sequence
  Description of Artificial Sequence: Synthetic oligonucleotide
  Target: LAMA2; (-) strand; PAM type: YTN; PAM sequence: TTG
cctgtgtgtttgagcctatg

SEQ ID NO: 271007 - DNA, 20 bp, Artificial Sequence
  Description of Artificial Sequence: Synthetic oligonucleotide
  Target: LAMA2; (-) strand; PAM type: YTN; PAM sequence: TTT
gcctgtgtgtttgagcctat

SEQ ID NO: 271008 - DNA, 20 bp, Artificial Sequence
  Description of Artificial Sequence: Synthetic oligonucleotide
  Target: LAMA2; (-) strand; PAM type: YTN; PAM sequence: CTA
catttgcctgtgtgtttgag

SEQ ID NO: 271009 - DNA, 20 bp, Artificial Sequence
  Description of Artificial Sequence: Synthetic oligonucleotide
  Target: LAMA2; (-) strand; PAM type: YTN; PAM sequence: CTC
agtgcctacatttgcctgtg

SEQ ID NO: 271010 - DNA, 20 bp, Artificial Sequence
  Description of Artificial Sequence: Synthetic oligonucleotide
  Target: LAMA2; (-) strand; PAM type: YTN; PAM sequence: CTG
atctcagtgcctacatttgc

SEQ ID NO: 271011 - DNA, 20 bp, Artificial Sequence
  Description of Artificial Sequence: Synthetic oligonucleotide
  Target: LAMA2; (-) strand; PAM type: YTN; PAM sequence: CTG
agagatgaatatggccacct

SEQ ID NO: 271012 - DNA, 20 bp, Artificial Sequence
  Description of Artificial Sequence: Synthetic oligonucleotide
  Target: LAMA2; (-) strand; PAM type: YTN; PAM sequence: CTA
ggcacctgagagatgaatat

SEQ ID NO: 271013 - DNA, 20 bp, Artificial Sequence
  Description of Artificial Sequence: Synthetic oligonucleotide
  Target: LAMA2; (-) strand; PAM type: YTN; PAM sequence: CTG
gatcccaggctaggcacctg

SEQ ID NO: 271014 - DNA, 20 bp, Artificial Sequence
  Description of Artificial Sequence: Synthetic oligonucleotide
  Target: LAMA2; (-) strand; PAM type: YTN; PAM sequence: TTC
tggatcccaggctaggcacc

SEQ ID NO: 271015 - DNA, 20 bp, Artificial Sequence
  Description of Artificial Sequence: Synthetic oligonucleotide
  Target: LAMA2; (-) strand; PAM type: YTN; PAM sequence: TTT
ctggatcccaggctaggcac

SEQ ID NO: 271016 - DNA, 20 bp, Artificial Sequence
  Description of Artificial Sequence: Synthetic oligonucleotide
  Target: LAMA2; (-) strand; PAM type: YTN; PAM sequence: TTA
atgtaagcatttctggatcc

SEQ ID NO: 271017 - DNA, 20 bp, Artificial Sequence
  Description of Artificial Sequence: Synthetic oligonucleotide
  Target: LAMA2; (-) strand; PAM type: YTN; PAM sequence: TTA
aatattaatgtaagcatttc

SEQ ID NO: 271018 - DNA, 20 bp, Artificial Sequence
  Description of Artificial Sequence: Synthetic oligonucleotide
  Target: LAMA2; (-) strand; PAM type: YTN; PAM sequence: CTT
aaatattaatgtaagcattt

SEQ ID NO: 271019 - DNA, 20 bp, Artificial Sequence
  Description of Artificial Sequence: Synthetic oligonucleotide
  Target: LAMA2; (-) strand; PAM type: YTN; PAM sequence: TTG
atgataaccttaaatattaa

SEQ ID NO: 271020 - DNA, 20 bp, Artificial Sequence
  Description of Artificial Sequence: Synthetic oligonucleotide
  Target: LAMA2; (-) strand; PAM type: YTN; PAM sequence: TTT
gatgataaccttaaatatta

SEQ ID NO: 271021 - DNA, 20 bp, Artificial Sequence
  Description of Artificial Sequence: Synthetic oligonucleotide
  Target: LAMA2; (-) strand; PAM type: YTN; PAM sequence: TTT
tgatgataaccttaaatatt

SEQ ID NO: 271022 - DNA, 20 bp, Artificial Sequence
  Description of Artificial Sequence: Synthetic oligonucleotide
  Target: LAMA2; (-) strand; PAM type: YTN; PAM sequence: TTC
attttgatgataaccttaaa

SEQ ID NO: 271023 - DNA, 20 bp, Artificial Sequence
  Description of Artificial Sequence: Synthetic oligonucleotide
  Target: LAMA2; (-) strand; PAM type: YTN; PAM sequence: TTT
cattttgatgataaccttaa

SEQ ID NO: 271024 - DNA, 20 bp, Artificial Sequence
  Description of Artificial Sequence: Synthetic oligonucleotide
  Target: LAMA2; (-) strand; PAM type: YTN; PAM sequence: TTT
tcattttgatgataacctta

SEQ ID NO: 271025 - DNA, 20 bp, Artificial Sequence
  Description of Artificial Sequence: Synthetic oligonucleotide
  Target: LAMA2; (-) strand; PAM type: YTN; PAM sequence: CTA
atcatgtgttttcattttga

SEQ ID NO: 271026 - DNA, 20 bp, Artificial Sequence
  Description of Artificial Sequence: Synthetic oligonucleotide
  Target: LAMA2; (-) strand; PAM type: YTN; PAM sequence: TTC
taatcatgtgttttcatttt

SEQ ID NO: 271027 - DNA, 20 bp, Artificial Sequence
  Description of Artificial Sequence: Synthetic oligonucleotide
  Target: LAMA2; (-) strand; PAM type: YTN; PAM sequence: TTA
gtacaagattctaatcatgt

SEQ ID NO: 271028 - DNA, 20 bp, Artificial Sequence
  Description of Artificial Sequence: Synthetic oligonucleotide
  Target: LAMA2; (-) strand; PAM type: YTN; PAM sequence: TTT
agtacaagattctaatcatg

SEQ ID NO: 271029 - DNA, 20 bp, Artificial Sequence
  Description of Artificial Sequence: Synthetic oligonucleotide
  Target: LAMA2; (-) strand; PAM type: YTN; PAM sequence: CTT
tagtacaagattctaatcat

SEQ ID NO: 271030 - DNA, 20 bp, Artificial Sequence
  Description of Artificial Sequence: Synthetic oligonucleotide
  Target: LAMA2; (-) strand; PAM type: YTN; PAM sequence: CTC
tttagtacaagattctaatc

SEQ ID NO: 271031 - DNA, 20 bp, Artificial Sequence
  Description of Artificial Sequence: Synthetic oligonucleotide
  Target: LAMA2; (-) strand; PAM type: YTN; PAM sequence: CTA
gctctttagtacaagattct

SEQ ID NO: 271032 - DNA, 20 bp, Artificial Sequence
  Description of Artificial Sequence: Synthetic oligonucleotide
  Target: LAMA2; (-) strand; PAM type: YTN; PAM sequence: TTC
tagctctttagtacaagatt

SEQ ID NO: 271033 - DNA, 20 bp, Artificial Sequence
  Description of Artificial Sequence: Synthetic oligonucleotide
  Target: LAMA2; (-) strand; PAM type: YTN; PAM sequence: CTA
gttctagctctttagtacaa

SEQ ID NO: 271034 - DNA, 20 bp, Artificial Sequence
  Description of Artificial Sequence: Synthetic oligonucleotide
  Target: LAMA2; (-) strand; PAM type: YTN; PAM sequence: CTA
ctagttctagctctttagta

SEQ ID NO: 271035 - DNA, 20 bp, Artificial Sequence
  Description of Artificial Sequence: Synthetic oligonucleotide
  Target: LAMA2; (-) strand; PAM type: YTN; PAM sequence: TTA
aaggtctactagttctagct

SEQ ID NO: 271036 - DNA, 20 bp, Artificial Sequence
  Description of Artificial Sequence: Synthetic oligonucleotide
  Target: LAMA2; (-) strand; PAM type: YTN; PAM sequence: TTT
aaaggtctactagttctagc

SEQ ID NO: 271037 - DNA, 20 bp, Artificial Sequence
  Description of Artificial Sequence: Synthetic oligonucleotide
  Target: LAMA2; (-) strand; PAM type: YTN; PAM sequence: TTT
taaaggtctactagttctag

SEQ ID NO: 271038 - DNA, 20 bp, Artificial Sequence
  Description of Artificial Sequence: Synthetic oligonucleotide
  Target: LAMA2; (-) strand; PAM type: YTN; PAM sequence: CTT
ttaaaggtctactagttcta

SEQ ID NO: 271039 - DNA, 20 bp, Artificial Sequence
  Description of Artificial Sequence: Synthetic oligonucleotide
  Target: LAMA2; (-) strand; PAM type: YTN; PAM sequence: TTG
aagaacttttaaaggtctac

SEQ ID NO: 271040 - DNA, 20 bp, Artificial Sequence
  Description of Artificial Sequence: Synthetic oligonucleotide
  Target: LAMA2; (-) strand; PAM type: YTN; PAM sequence: TTG
ttgaagaacttttaaaggtc

SEQ ID NO: 271041 - DNA, 20 bp, Artificial Sequence
  Description of Artificial Sequence: Synthetic oligonucleotide
  Target: LAMA2; (-) strand; PAM type: YTN; PAM sequence: CTT
gttgaagaacttttaaaggt

SEQ ID NO: 271042 - DNA, 20 bp, Artificial Sequence
  Description of Artificial Sequence: Synthetic oligonucleotide
  Target: LAMA2; (-) strand; PAM type: YTN; PAM sequence: CTG
gtgcttgttgaagaactttt

SEQ ID NO: 271043 - DNA, 20 bp, Artificial Sequence
  Description of Artificial Sequence: Synthetic oligonucleotide
  Target: LAMA2; (-) strand; PAM type: YTN; PAM sequence: TTA
tcaaactggtgcttgttgaa

SEQ ID NO: 271044 - DNA, 20 bp, Artificial Sequence
  Description of Artificial Sequence: Synthetic oligonucleotide
  Target: LAMA2; (-) strand; PAM type: YTN; PAM sequence: TTT
atcaaactggtgcttgttga

SEQ ID NO: 271045 - DNA, 20 bp, Artificial Sequence
  Description of Artificial Sequence: Synthetic oligonucleotide
  Target: LAMA2; (-) strand; PAM type: YTN; PAM sequence: TTA
gaacagtgtttatcaaactg

SEQ ID NO: 271046 - DNA, 20 bp, Artificial Sequence
  Description of Artificial Sequence: Synthetic oligonucleotide
  Target: LAMA2; (-) strand; PAM type: YTN; PAM sequence: TTT
agaacagtgtttatcaaact

SEQ ID NO: 271047 - DNA, 20 bp, Artificial Sequence
  Description of Artificial Sequence: Synthetic oligonucleotide
  Target: LAMA2; (-) strand; PAM type: YTN; PAM sequence: TTA
accacaatttagaacagtgt

SEQ ID NO: 271048 - DNA, 20 bp, Artificial Sequence
  Description of Artificial Sequence: Synthetic oligonucleotide
  Target: LAMA2; (-) strand; PAM type: YTN; PAM sequence: TTT
aaccacaatttagaacagtg

SEQ ID NO: 271049 - DNA, 20 bp, Artificial Sequence
  Description of Artificial Sequence: Synthetic oligonucleotide
  Target: LAMA2; (-) strand; PAM type: YTN; PAM sequence: CTT
taaccacaatttagaacagt

SEQ ID NO: 271050 - DNA, 20 bp, Artificial Sequence
  Description of Artificial Sequence: Synthetic oligonucleotide
  Target: LAMA2; (-) strand; PAM type: YTN; PAM sequence: CTA
ccaaaagctttaaccacaat

SEQ ID NO: 271051 - DNA, 20 bp, Artificial Sequence
  Description of Artificial Sequence: Synthetic oligonucleotide
  Target: LAMA2; (-) strand; PAM type: YTN; PAM sequence: TTA
actaccaaaagctttaacca

SEQ ID NO: 271052 - DNA, 20 bp, Artificial Sequence
  Description of Artificial Sequence: Synthetic oligonucleotide
  Target: LAMA2; (-) strand; PAM type: YTN; PAM sequence: CTC
gttaactaccaaaagcttta

SEQ ID NO: 271053 - DNA, 20 bp, Artificial Sequence
  Description of Artificial Sequence: Synthetic oligonucleotide
  Target: LAMA2; (-) strand; PAM type: YTN; PAM sequence: CTA
cctcgttaactaccaaaagc

SEQ ID NO: 271054 - DNA, 20 bp, Artificial Sequence
  Description of Artificial Sequence: Synthetic oligonucleotide
  Target: LAMA2; (-) strand; PAM type: YTN; PAM sequence: CTC
ctacctcgttaactaccaaa

SEQ ID NO: 271055 - DNA, 20 bp, Artificial Sequence
  Description of Artificial Sequence: Synthetic oligonucleotide
  Target: LAMA2; (-) strand; PAM type: YTN; PAM sequence: TTC
tcctacctcgttaactacca

SEQ ID NO: 271056 - DNA, 20 bp, Artificial Sequence
  Description of Artificial Sequence: Synthetic oligonucleotide
  Target: LAMA2; (-) strand; PAM type: YTN; PAM sequence: TTT
ctcctacctcgttaactacc

SEQ ID NO: 271057 - DNA, 20 bp, Artificial Sequence
  Description of Artificial Sequence: Synthetic oligonucleotide
  Target: LAMA2; (-) strand; PAM type: YTN; PAM sequence: TTT
tctcctacctcgttaactac

SEQ ID NO: 271058 - DNA, 20 bp, Artificial Sequence
  Description of Artificial Sequence: Synthetic oligonucleotide
  Target: LAMA2; (-) strand; PAM type: YTN; PAM sequence: TTA
atgttttctcctacctcgtt

SEQ ID NO: 271059 - DNA, 20 bp, Artificial Sequence
  Description of Artificial Sequence: Synthetic oligonucleotide
  Target: LAMA2; (-) strand; PAM type: YTN; PAM sequence: TTT
aatgttttctcctacctcgt

SEQ ID NO: 271060 - DNA, 20 bp, Artificial Sequence
  Description of Artificial Sequence: Synthetic oligonucleotide
  Target: LAMA2; (-) strand; PAM type: YTN; PAM sequence: CTT
taatgttttctcctacctcg

SEQ ID NO: 271061 - DNA, 20 bp, Artificial Sequence
  Description of Artificial Sequence: Synthetic oligonucleotide
  Target: LAMA2; (-) strand; PAM type: YTN; PAM sequence: TTC
tttaatgttttctcctacct

SEQ ID NO: 271062 - DNA, 20 bp, Artificial Sequence
  Description of Artificial Sequence: Synthetic oligonucleotide
  Target: LAMA2; (-) strand; PAM type: YTN; PAM sequence: TTT
ctttaatgttttctcctacc

SEQ ID NO: 271063 - DNA, 20 bp, Artificial Sequence
  Description of Artificial Sequence: Synthetic oligonucleotide
  Target: LAMA2; (-) strand; PAM type: YTN; PAM sequence: TTC
catcaggtgaaacaacccca

SEQ ID NO: 271064 - DNA, 20 bp, Artificial Sequence
  Description of Artificial Sequence: Synthetic oligonucleotide
  Target: LAMA2; (-) strand; PAM type: YTN; PAM sequence: TTT
ccatcaggtgaaacaacccc

SEQ ID NO: 271065 - DNA, 20 bp, Artificial Sequence
  Description of Artificial Sequence: Synthetic oligonucleotide
  Target: LAMA2; (-) strand; PAM type: YTN; PAM sequence: TTT
tccatcaggtgaaacaaccc

SEQ ID NO: 271066 - DNA, 20 bp, Artificial Sequence
  Description of Artificial Sequence: Synthetic oligonucleotide
  Target: LAMA2; (-) strand; PAM type: YTN; PAM sequence: TTT
ttccatcaggtgaaacaacc

SEQ ID NO: 271067 - DNA, 20 bp, Artificial Sequence
  Description of Artificial Sequence: Synthetic oligonucleotide
  Target: LAMA2; (-) strand; PAM type: YTN; PAM sequence: CTT
tttccatcaggtgaaacaac

SEQ ID NO: 271068 - DNA, 20 bp, Artificial Sequence
  Description of Artificial Sequence: Synthetic oligonucleotide
  Target: LAMA2; (-) strand; PAM type: YTN; PAM sequence: TTC
atctttttccatcaggtgaa

SEQ ID NO: 271069 - DNA, 20 bp, Artificial Sequence
  Description of Artificial Sequence: Synthetic oligonucleotide
  Target: LAMA2; (-) strand; PAM type: YTN; PAM sequence: TTT
catctttttccatcaggtga

SEQ ID NO: 271070 - DNA, 20 bp, Artificial Sequence
  Description of Artificial Sequence: Synthetic oligonucleotide
  Target: LAMA2; (-) strand; PAM type: YTN; PAM sequence: CTT
tcatctttttccatcaggtg

SEQ ID NO: 271071 - DNA, 20 bp, Artificial Sequence
  Description of Artificial Sequence: Synthetic oligonucleotide
  Target: LAMA2; (-) strand; PAM type: YTN; PAM sequence: TTG
acacctttcatctttttcca

SEQ ID NO: 271072 - DNA, 20 bp, Artificial Sequence
  Description of Artificial Sequence: Synthetic oligonucleotide
  Target: LAMA2; (-) strand; PAM type: YTN; PAM sequence: CTG
atagtaagttgacacctttc

SEQ ID NO: 271073 - DNA, 20 bp, Artificial Sequence
  Description of Artificial Sequence: Synthetic oligonucleotide
  Target: LAMA2; (-) strand; PAM type: YTN; PAM sequence: TTG
actgatagtaagttgacacc

SEQ ID NO: 271074 - DNA, 20 bp, Artificial Sequence
  Description of Artificial Sequence: Synthetic oligonucleotide
  Target: LAMA2; (-) strand; PAM type: YTN; PAM sequence: CTG
ataattgactgatagtaagt

SEQ ID NO: 271075 - DNA, 20 bp, Artificial Sequence
  Description of Artificial Sequence: Synthetic oligonucleotide
  Target: LAMA2; (-) strand; PAM type: YTN; PAM sequence: TTA
ataaatatctgataattgac

SEQ ID NO: 271076 - DNA, 20 bp, Artificial Sequence
  Description of Artificial Sequence: Synthetic oligonucleotide
  Target: LAMA2; (-) strand; PAM type: YTN; PAM sequence: CTT
aataaatatctgataattga

SEQ ID NO: 271077 - DNA, 20 bp, Artificial Sequence
  Description of Artificial Sequence: Synthetic oligonucleotide
  Target: LAMA2; (-) strand; PAM type: YTN; PAM sequence: TTC
ttaataaatatctgataatt

SEQ ID NO: 271078 - DNA, 20 bp, Artificial Sequence
  Description of Artificial Sequence: Synthetic oligonucleotide
  Target: LAMA2; (-) strand; PAM type: YTN; PAM sequence: TTT
cttaataaatatctgataat

SEQ ID NO: 271079 - DNA, 20 bp, Artificial Sequence
  Description of Artificial Sequence: Synthetic oligonucleotide
  Target: LAMA2; (-) strand; PAM type: YTN; PAM sequence: CTA
taatttcttaataaatatct

SEQ ID NO: 271080 - DNA, 20 bp, Artificial Sequence
  Description of Artificial Sequence: Synthetic oligonucleotide
  Target: LAMA2; (-) strand; PAM type: YTN; PAM sequence: TTC
tataatttcttaataaatat

SEQ ID NO: 271081 - DNA, 20 bp, Artificial Sequence
  Description of Artificial Sequence: Synthetic oligonucleotide
  Target: LAMA2; (-) strand; PAM type: YTN; PAM sequence: CTG
aggtattctataatttctta

SEQ ID NO: 271082 - DNA, 20 bp, Artificial Sequence
  Description of Artificial Sequence: Synthetic oligonucleotide
  Target: LAMA2; (-) strand; PAM type: YTN; PAM sequence: TTA
aaagagtcatgaaatcccca

SEQ ID NO: 271083 - DNA, 20 bp, Artificial Sequence
  Description of Artificial Sequence: Synthetic oligonucleotide
  Target: LAMA2; (-) strand; PAM type: YTN; PAM sequence: CTA
agggtagtgaagatattaaa

SEQ ID NO: 271084 - DNA, 20 bp, Artificial Sequence
  Description of Artificial Sequence: Synthetic oligonucleotide
  Target: LAMA2; (-) strand; PAM type: YTN; PAM sequence: TTC
ctaagggtagtgaagatatt

SEQ ID NO: 271085 - DNA, 20 bp, Artificial Sequence
  Description of Artificial Sequence: Synthetic oligonucleotide
  Target: LAMA2; (-) strand; PAM type: YTN; PAM sequence: TTT
cctaagggtagtgaagatat

SEQ ID NO: 271086 - DNA, 20 bp, Artificial Sequence
  Description of Artificial Sequence: Synthetic oligonucleotide
  Target: LAMA2; (-) strand; PAM type: YTN; PAM sequence: CTA
catttcctaagggtagtgaa

SEQ ID NO: 271087 - DNA, 20 bp, Artificial Sequence
  Description of Artificial Sequence: Synthetic oligonucleotide
  Target: LAMA2; (-) strand; PAM type: YTN; PAM sequence: TTA
aagcacatagaatctacatt

SEQ ID NO: 271088 - DNA, 20 bp, Artificial Sequence
  Description of Artificial Sequence: Synthetic oligonucleotide
  Target: LAMA2; (-) strand; PAM type: YTN; PAM sequence: TTT
aaagcacatagaatctacat

SEQ ID NO: 271089 - DNA, 20 bp, Artificial Sequence
  Description of Artificial Sequence: Synthetic oligonucleotide
  Target: LAMA2; (-) strand; PAM type: YTN; PAM sequence: TTT
taaagcacatagaatctaca

SEQ ID NO: 271090 - DNA, 20 bp, Artificial Sequence
  Description of Artificial Sequence: Synthetic oligonucleotide
  Target: LAMA2; (-) strand; PAM type: YTN; PAM sequence: TTT
ttaaagcacatagaatctac

SEQ ID NO: 271091 - DNA, 20 bp, Artificial Sequence
  Description of Artificial Sequence: Synthetic oligonucleotide
  Target: LAMA2; (-) strand; PAM type: YTN; PAM sequence: TTA
tttttaaagcacatagaatc

SEQ ID NO: 271092 - DNA, 20 bp, Artificial Sequence
  Description of Artificial Sequence: Synthetic oligonucleotide
  Target: LAMA2; (-) strand; PAM type: YTN; PAM sequence: TTA
atgattatttttaaagcaca

SEQ ID NO: 271093 - DNA, 20 bp, Artificial Sequence
  Description of Artificial Sequence: Synthetic oligonucleotide
  Target: LAMA2; (-) strand; PAM type: YTN; PAM sequence: TTT
aatgattatttttaaagcac

SEQ ID NO: 271094 - DNA, 20 bp, Artificial Sequence
  Description of Artificial Sequence: Synthetic oligonucleotide
  Target: LAMA2; (-) strand; PAM type: YTN; PAM sequence: TTG
tttaatgattatttttaaag

SEQ ID NO: 271095 - DNA, 20 bp, Artificial Sequence
  Description of Artificial Sequence: Synthetic oligonucleotide
  Target: LAMA2; (-) strand; PAM type: YTN; PAM sequence: TTA
ttgtttaatgattattttta

SEQ ID NO: 271096 - DNA, 20 bp, Artificial Sequence
  Description of Artificial Sequence: Synthetic oligonucleotide
  Target: LAMA2; (-) strand; PAM type: YTN; PAM sequence: TTG
attattgtttaatgattatt

SEQ ID NO: 271097 - DNA, 20 bp, Artificial Sequence
  Description of Artificial Sequence: Synthetic oligonucleotide
  Target: LAMA2; (-) strand; PAM type: YTN; PAM sequence: CTT
gattattgtttaatgattat

SEQ ID NO: 271098 - DNA, 20 bp, Artificial Sequence
  Description of Artificial Sequence: Synthetic oligonucleotide
  Target: LAMA2; (-) strand; PAM type: YTN; PAM sequence: TTG
cttgattattgtttaatgat

SEQ ID NO: 271099 - DNA, 20 bp, Artificial Sequence
  Description of Artificial Sequence: Synthetic oligonucleotide
  Target: LAMA2; (-) strand; PAM type: YTN; PAM sequence: CTA
attgcttgattattgtttaa

SEQ ID NO: 271100 - DNA, 20 bp, Artificial Sequence
  Description of Artificial Sequence: Synthetic oligonucleotide
  Target: LAMA2; (-) strand; PAM type: YTN; PAM sequence: TTG
ctaattgcttgattattgtt

SEQ ID NO: 271101 - DNA, 20 bp, Artificial Sequence
  Description of Artificial Sequence: Synthetic oligonucleotide
  Target: LAMA2; (-) strand; PAM type: YTN; PAM sequence: CTT
gctaattgcttgattattgt

SEQ ID NO: 271102 - DNA, 20 bp, Artificial Sequence
  Description of Artificial Sequence: Synthetic oligonucleotide
  Target: LAMA2; (-) strand; PAM type: YTN; PAM sequence: TTC
ttgctaattgcttgattatt

SEQ ID NO: 271103 - DNA, 20 bp, Artificial Sequence
  Description of Artificial Sequence: Synthetic oligonucleotide
  Target: LAMA2; (-) strand; PAM type: YTN; PAM sequence: TTA
tgtattcttgctaattgctt

SEQ ID NO: 271104 - DNA, 20 bp, Artificial Sequence
  Description of Artificial Sequence: Synthetic oligonucleotide
  Target: LAMA2; (-) strand; PAM type: YTN; PAM sequence: TTG
taaaacacatggtcattatg

SEQ ID NO: 271105 - DNA, 20 bp, Artificial Sequence
  Description of Artificial Sequence: Synthetic oligonucleotide
  Target: LAMA2; (-) strand; PAM type: YTN; PAM sequence: TTT
gtaaaacacatggtcattat

SEQ ID NO: 271106 - DNA, 20 bp, Artificial Sequence
  Description of Artificial Sequence: Synthetic oligonucleotide
  Target: LAMA2; (-) strand; PAM type: YTN; PAM sequence: TTG
aatgtttgtaaaacacatgg

SEQ ID NO: 271107 - DNA, 20 bp, Artificial Sequence
  Description of Artificial Sequence: Synthetic oligonucleotide
  Target: LAMA2; (-) strand; PAM type: YTN; PAM sequence: TTT
gaatgtttgtaaaacacatg

SEQ ID NO: 271108 - DNA, 20 bp, Artificial Sequence
  Description of Artificial Sequence: Synthetic oligonucleotide
  Target: LAMA2; (-) strand; PAM type: YTN; PAM sequence: CTT
tgaatgtttgtaaaacacat

SEQ ID NO: 271109 - DNA, 20 bp, Artificial Sequence
  Description of Artificial Sequence: Synthetic oligonucleotide
  Target: LAMA2; (-) strand; PAM type: YTN; PAM sequence: CTA
atgtactttgaatgtttgta

SEQ ID NO: 271110 - DNA, 20 bp, Artificial Sequence
  Description of Artificial Sequence: Synthetic oligonucleotide
  Target: LAMA2; (-) strand; PAM type: YTN; PAM sequence: CTG
tgcgctaatgtactttgaat

SEQ ID NO: 271111 - DNA, 20 bp, Artificial Sequence
  Description of Artificial Sequence: Synthetic oligonucleotide
  Target: LAMA2; (-) strand; PAM type: YTN; PAM sequence: CTC
tgtgcgctaatgtactttga

SEQ ID NO: 271112 - DNA, 20 bp, Artificial Sequence
  Description of Artificial Sequence: Synthetic oligonucleotide
  Target: LAMA2; (-) strand; PAM type: YTN; PAM sequence: CTC
cagtctctgtgcgctaatgt

SEQ ID NO: 271113 - DNA, 20 bp, Artificial Sequence
  Description of Artificial Sequence: Synthetic oligonucleotide
  Target: LAMA2; (-) strand; PAM type: YTN; PAM sequence: TTC
tccagtctctgtgcgctaat

SEQ ID NO: 271114 - DNA, 20 bp, Artificial Sequence
  Description of Artificial Sequence: Synthetic oligonucleotide
  Target: LAMA2; (-) strand; PAM type: YTN; PAM sequence: TTT
ctccagtctctgtgcgctaa

SEQ ID NO: 271115 - DNA, 20 bp, Artificial Sequence
  Description of Artificial Sequence: Synthetic oligonucleotide
  Target: LAMA2; (-) strand; PAM type: YTN; PAM sequence: CTG
atttctccagtctctgtgcg

SEQ ID NO: 271116 - DNA, 20 bp, Artificial Sequence
  Description of Artificial Sequence: Synthetic oligonucleotide
  Target: LAMA2; (-) strand; PAM type: YTN; PAM sequence: TTA
ctgatttctccagtctctgt

SEQ ID NO: 271117 - DNA, 20 bp, Artificial Sequence
  Description of Artificial Sequence: Synthetic oligonucleotide
  Target: LAMA2; (-) strand; PAM type: YTN; PAM sequence: CTT
actgatttctccagtctctg

SEQ ID NO: 271118 - DNA, 20 bp, Artificial Sequence
  Description of Artificial Sequence: Synthetic oligonucleotide
  Target: LAMA2; (-) strand; PAM type: YTN; PAM sequence: CTG
aatcttactgatttctccag

SEQ ID NO: 271119 - DNA, 20 bp, Artificial Sequence
  Description of Artificial Sequence: Synthetic oligonucleotide
  Target: LAMA2; (-) strand; PAM type: YTN; PAM sequence: TTA
ccctgaatcttactgatttc

SEQ ID NO: 271120 - DNA, 20 bp, Artificial Sequence
  Description of Artificial Sequence: Synthetic oligonucleotide
  Target: LAMA2; (-) strand; PAM type: YTN; PAM sequence: CTG
gttaccctgaatcttactga

SEQ ID NO: 271121 - DNA, 20 bp, Artificial Sequence
  Description of Artificial Sequence: Synthetic oligonucleotide
  Target: LAMA2; (-) strand; PAM type: YTN; PAM sequence: CTC
tggttaccctgaatcttact

SEQ ID NO: 271122 - DNA, 20 bp, Artificial Sequence
  Description of Artificial Sequence: Synthetic oligonucleotide
  Target: LAMA2; (-) strand; PAM type: YTN; PAM sequence: TTC
tctggttaccctgaatctta

SEQ ID NO: 271123 - DNA, 20 bp, Artificial Sequence
  Description of Artificial Sequence: Synthetic oligonucleotide
  Target: LAMA2; (-) strand; PAM type: YTN; PAM sequence: CTC
agtaatggtacattctctgg

SEQ ID NO: 271124 - DNA, 20 bp, Artificial Sequence
  Description of Artificial Sequence: Synthetic oligonucleotide
  Target: LAMA2; (-) strand; PAM type: YTN; PAM sequence: CTC
tcagtaatggtacattctct

SEQ ID NO: 271125 - DNA, 20 bp, Artificial Sequence
  Description of Artificial Sequence: Synthetic oligonucleotide
  Target: LAMA2; (-) strand; PAM type: YTN; PAM sequence: TTA
tactctcagtaatggtacat

SEQ ID NO: 271126 - DNA, 20 bp, Artificial Sequence
  Description of Artificial Sequence: Synthetic oligonucleotide
  Target: LAMA2; (-) strand; PAM type: YTN; PAM sequence: TTC
caacagaaattatactctca

SEQ ID NO: 271127 - DNA, 20 bp, Artificial Sequence
  Description of Artificial Sequence: Synthetic oligonucleotide
  Target: LAMA2; (-) strand; PAM type: YTN; PAM sequence: TTC
aaattccaacagaaattata

SEQ ID NO: 271128 - DNA, 20 bp, Artificial Sequence
  Description of Artificial Sequence: Synthetic oligonucleotide
  Target: LAMA2; (-) strand; PAM type: YTN; PAM sequence: CTT
caaattccaacagaaattat

SEQ ID NO: 271129 - DNA, 20 bp, Artificial Sequence
  Description of Artificial Sequence: Synthetic oligonucleotide
  Target: LAMA2; (-) strand; PAM type: YTN; PAM sequence: CTA
cacttcaaattccaacagaa

SEQ ID NO: 271130 - DNA, 20 bp, Artificial Sequence
  Description of Artificial Sequence: Synthetic oligonucleotide
  Target: LAMA2; (-) strand; PAM type: YTN; PAM sequence: TTG
tgtctacacttcaaattcca

SEQ ID NO: 271131 - DNA, 20 bp, Artificial Sequence
  Description of Artificial Sequence: Synthetic oligonucleotide
  Target: LAMA2; (-) strand; PAM type: YTN; PAM sequence: CTA
aaattgtgtctacacttcaa

SEQ ID NO: 271132 - DNA, 20 bp, Artificial Sequence
  Description of Artificial Sequence: Synthetic oligonucleotide
  Target: LAMA2; (-) strand; PAM type: YTN; PAM sequence: CTA
ctaaaattgtgtctacactt

SEQ ID NO: 271133 - DNA, 20 bp, Artificial Sequence
  Description of Artificial Sequence: Synthetic oligonucleotide
  Target: LAMA2; (-) strand; PAM type: YTN; PAM sequence: CTC
tactaaaattgtgtctacac

SEQ ID NO: 271134 - DNA, 20 bp, Artificial Sequence
  Description of Artificial Sequence: Synthetic oligonucleotide
  Target: LAMA2; (-) strand; PAM type: YTN; PAM sequence: TTC
tctactaaaattgtgtctac

SEQ ID NO: 271135 - DNA, 20 bp, Artificial Sequence
  Description of Artificial Sequence: Synthetic oligonucleotide
  Target: LAMA2; (-) strand; PAM type: YTN; PAM sequence: CTT
ctctactaaaattgtgtcta

SEQ ID NO: 271136 - DNA, 20 bp, Artificial Sequence
  Description of Artificial Sequence: Synthetic oligonucleotide
  Target: LAMA2; (-) strand; PAM type: YTN; PAM sequence: CTA
aagcaacaaatacttctcta

SEQ ID NO: 271137 - DNA, 20 bp, Artificial Sequence
  Description of Artificial Sequence: Synthetic oligonucleotide
  Target: LAMA2; (-) strand; PAM type: YTN; PAM sequence: CTC
taaagcaacaaatacttctc

SEQ ID NO: 271138 - DNA, 20 bp, Artificial Sequence
  Description of Artificial Sequence: Synthetic oligonucleotide
  Target: LAMA2; (-) strand; PAM type: YTN; PAM sequence: TTC
ctctaaagcaacaaatactt

SEQ ID NO: 271139 - DNA, 20 bp, Artificial Sequence
  Description of Artificial Sequence: Synthetic oligonucleotide
  Target: LAMA2; (-) strand; PAM type: YTN; PAM sequence: CTT
cctctaaagcaacaaatact

SEQ ID NO: 271140 - DNA, 20 bp, Artificial Sequence
  Description of Artificial Sequence: Synthetic oligonucleotide
  Target: LAMA2; (-) strand; PAM type: YTN; PAM sequence: TTA
gatgccttcctctaaagcaa

SEQ ID NO: 271141 - DNA, 20 bp, Artificial Sequence
  Description of Artificial Sequence: Synthetic oligonucleotide
  Target: LAMA2; (-) strand; PAM type: YTN; PAM sequence: CTT
agatgccttcctctaaagca

SEQ ID NO: 271142 - DNA, 20 bp, Artificial Sequence
  Description of Artificial Sequence: Synthetic oligonucleotide
  Target: LAMA2; (-) strand; PAM type: YTN; PAM sequence: CTA
ccaatgtgtagtgaataaat

SEQ ID NO: 271143 - DNA, 20 bp, Artificial Sequence
  Description of Artificial Sequence: Synthetic oligonucleotide
  Target: LAMA2; (-) strand; PAM type: YTN; PAM sequence: CTA
aaagaatatctaccaatgtg

SEQ ID NO: 271144 - DNA, 20 bp, Artificial Sequence
  Description of Artificial Sequence: Synthetic oligonucleotide
  Target: LAMA2; (-) strand; PAM type: YTN; PAM sequence: TTC
ctaaaagaatatctaccaat

SEQ ID NO: 271145 - DNA, 20 bp, Artificial Sequence
  Description of Artificial Sequence: Synthetic oligonucleotide
  Target: LAMA2; (-) strand; PAM type: YTN; PAM sequence: TTT
cctaaaagaatatctaccaa

SEQ ID NO: 271146 - DNA, 20 bp, Artificial Sequence
  Description of Artificial Sequence: Synthetic oligonucleotide
  Target: LAMA2; (-) strand; PAM type: YTN; PAM sequence: TTA
aagaatatatttcctaaaag

SEQ ID NO: 271147 - DNA, 20 bp, Artificial Sequence
  Description of Artificial Sequence: Synthetic oligonucleotide
  Target: LAMA2; (-) strand; PAM type: YTN; PAM sequence: TTA
tggtcagaattaaagaatat

SEQ ID NO: 271148 - DNA, 20 bp, Artificial Sequence
  Description of Artificial Sequence: Synthetic oligonucleotide
  Target: LAMA2; (-) strand; PAM type: YTN; PAM sequence: TTA
aaggttatggtcagaattaa

SEQ ID NO: 271149 - DNA, 20 bp, Artificial Sequence
  Description of Artificial Sequence: Synthetic oligonucleotide
  Target: LAMA2; (-) strand; PAM type: YTN; PAM sequence: CTT
aaaggttatggtcagaatta

SEQ ID NO: 271150 - DNA, 20 bp, Artificial Sequence
  Description of Artificial Sequence: Synthetic oligonucleotide
  Target: LAMA2; (-) strand; PAM type: YTN; PAM sequence: TTA
ccttaaaggttatggtcaga

SEQ ID NO: 271151 - DNA, 20 bp, Artificial Sequence
  Description of Artificial Sequence: Synthetic oligonucleotide
  Target: LAMA2; (-) strand; PAM type: YTN; PAM sequence: CTT
accttaaaggttatggtcag

SEQ ID NO: 271152 - DNA, 20 bp, Artificial Sequence
  Description of Artificial Sequence: Synthetic oligonucleotide
  Target: LAMA2; (-) strand; PAM type: YTN; PAM sequence: CTG
gaaaatagggataataatac

SEQ ID NO: 271153 - DNA, 20 bp, Artificial Sequence
  Description of Artificial Sequence: Synthetic oligonucleotide
  Target: LAMA2; (-) strand; PAM type: YTN; PAM sequence: TTC
tggaaaatagggataataat

SEQ ID NO: 271154 - DNA, 20 bp, Artificial Sequence
  Description of Artificial Sequence: Synthetic oligonucleotide
  Target: LAMA2; (-) strand; PAM type: YTN; PAM sequence: CTT
ctggaaaatagggataataa

SEQ ID NO: 271155 - DNA, 20 bp, Artificial Sequence
  Description of Artificial Sequence: Synthetic oligonucleotide
  Target: LAMA2; (-) strand; PAM type: YTN; PAM sequence: TTC
ttctggaaaatagggataat

SEQ ID NO: 271156 - DNA, 20 bp, Artificial Sequence
  Description of Artificial Sequence: Synthetic oligonucleotide
  Target: LAMA2; (-) strand; PAM type: YTN; PAM sequence: CTT
cttctggaaaatagggataa

SEQ ID NO: 271157 - DNA, 20 bp, Artificial Sequence
  Description of Artificial Sequence: Synthetic oligonucleotide
  Target: LAMA2; (-) strand; PAM type: YTN; PAM sequence: TTC
ttcttctggaaaatagggat

SEQ ID NO: 271158 - DNA, 20 bp, Artificial Sequence
  Description of Artificial Sequence: Synthetic oligonucleotide
  Target: LAMA2; (-) strand; PAM type: YTN; PAM sequence: TTT
cttcttctggaaaataggga

SEQ ID NO: 271159 - DNA, 20 bp, Artificial Sequence
  Description of Artificial Sequence: Synthetic oligonucleotide
  Target: LAMA2; (-) strand; PAM type: YTN; PAM sequence: TTG
gtttcttcttctggaaaata

SEQ ID NO: 271160 - DNA, 20 bp, Artificial Sequence
  Description of Artificial Sequence: Synthetic oligonucleotide
  Target: LAMA2; (-) strand; PAM type: YTN; PAM sequence: TTA
ttggtttcttcttctggaaa

SEQ ID NO: 271161 - DNA, 20 bp, Artificial Sequence
  Description of Artificial Sequence: Synthetic oligonucleotide
  Target: LAMA2; (-) strand; PAM type: YTN; PAM sequence: TTA
tcatcattattggtttcttc

SEQ ID NO: 271162 - DNA, 20 bp, Artificial Sequence
  Description of Artificial Sequence: Synthetic oligonucleotide
  Target: LAMA2; (-) strand; PAM type: YTN; PAM sequence: TTG
ttatcatcattattggtttc

SEQ ID NO: 271163 - DNA, 20 bp, Artificial Sequence
  Description of Artificial Sequence: Synthetic oligonucleotide
  Target: LAMA2; (-) strand; PAM type: YTN; PAM sequence: CTT
gttatcatcattattggttt

SEQ ID NO: 271164 - DNA, 20 bp, Artificial Sequence
  Description of Artificial Sequence: Synthetic oligonucleotide
  Target: LAMA2; (-) strand; PAM type: YTN; PAM sequence: TTC
ttgttatcatcattattggt

SEQ ID NO: 271165 - DNA, 20 bp, Artificial Sequence
  Description of Artificial Sequence: Synthetic oligonucleotide
  Target: LAMA2; (-) strand; PAM type: YTN; PAM sequence: TTA
ttcttgttatcatcattatt

SEQ ID NO: 271166 - DNA, 20 bp, Artificial Sequence
  Description of Artificial Sequence: Synthetic oligonucleotide
  Target: LAMA2; (-) strand; PAM type: YTN; PAM sequence: TTA
gttattcttgttatcatcat

SEQ ID NO: 271167 - DNA, 20 bp, Artificial Sequence
  Description of Artificial Sequence: Synthetic oligonucleotide
  Target: LAMA2; (-) strand; PAM type: YTN; PAM sequence: TTC
aataaatgttagttattctt

SEQ ID NO: 271168 - DNA, 20 bp, Artificial Sequence
  Description of Artificial Sequence: Synthetic oligonucleotide
  Target: LAMA2; (-) strand; PAM type: YTN; PAM sequence: TTT
caataaatgttagttattct

SEQ ID NO: 271169 - DNA, 20 bp, Artificial Sequence
  Description of Artificial Sequence: Synthetic oligonucleotide
  Target: LAMA2; (-) strand; PAM type: YTN; PAM sequence: TTT
tcaataaatgttagttattc

SEQ ID NO: 271170 - DNA, 20 bp, Artificial Sequence
  Description of Artificial Sequence: Synthetic oligonucleotide
  Target: LAMA2; (-) strand; PAM type: YTN; PAM sequence: CTT
ttcaataaatgttagttatt

SEQ ID NO: 271171 - DNA, 20 bp, Artificial Sequence
  Description of Artificial Sequence: Synthetic oligonucleotide
  Target: LAMA2; (-) strand; PAM type: YTN; PAM sequence: CTA
gcttttcaataaatgttagt

SEQ ID NO: 271172 - DNA, 20 bp, Artificial Sequence
  Description of Artificial Sequence: Synthetic oligonucleotide
  Target: LAMA2; (-) strand; PAM type: YTN; PAM sequence: TTG
cctagcttttcaataaatgt

SEQ ID NO: 271173 - DNA, 20 bp, Artificial Sequence
  Description of Artificial Sequence: Synthetic oligonucleotide
  Target: LAMA2; (-) strand; PAM type: YTN; PAM sequence: TTC
agtcaattgcctagcttttc

SEQ ID NO: 271174 - DNA, 20 bp, Artificial Sequence
  Description of Artificial Sequence: Synthetic oligonucleotide
  Target: LAMA2; (-) strand; PAM type: YTN; PAM sequence: CTT
cagtcaattgcctagctttt

SEQ ID NO: 271175 - DNA, 20 bp, Artificial Sequence
  Description of Artificial Sequence: Synthetic oligonucleotide
  Target: LAMA2; (-) strand; PAM type: YTN; PAM sequence: TTA
agacttcagtcaattgccta

SEQ ID NO: 271176 - DNA, 20 bp, Artificial Sequence
  Description of Artificial Sequence: Synthetic oligonucleotide
  Target: LAMA2; (-) strand; PAM type: YTN; PAM sequence: TTT
aagacttcagtcaattgcct

SEQ ID NO: 271177 - DNA, 20 bp, Artificial Sequence
  Description of Artificial Sequence: Synthetic oligonucleotide
  Target: LAMA2; (-) strand; PAM type: YTN; PAM sequence: CTA
tgtatggtaatccatttaag

SEQ ID NO: 271178 - DNA, 20 bp, Artificial Sequence
  Description of Artificial Sequence: Synthetic oligonucleotide
  Target: LAMA2; (-) strand; PAM type: YTN; PAM sequence: CTG
taaaagctatgtatggtaat

SEQ ID NO: 271179 - DNA, 20 bp, Artificial Sequence
  Description of Artificial Sequence: Synthetic oligonucleotide
  Target: LAMA2; (-) strand; PAM type: YTN; PAM sequence: TTC
tgtaaaagctatgtatggta

SEQ ID NO: 271180 - DNA, 20 bp, Artificial Sequence
  Description of Artificial Sequence: Synthetic oligonucleotide
  Target: LAMA2; (-) strand; PAM type: YTN; PAM sequence: TTT
ctgtaaaagctatgtatggt

SEQ ID NO: 271181 - DNA, 20 bp, Artificial Sequence
  Description of Artificial Sequence: Synthetic oligonucleotide
  Target: LAMA2; (-) strand; PAM type: YTN; PAM sequence: TTG
gagtttctgtaaaagctatg

SEQ ID NO: 271182 - DNA, 20 bp, Artificial Sequence
  Description of Artificial Sequence: Synthetic oligonucleotide
  Target: LAMA2; (-) strand; PAM type: YTN; PAM sequence: CTT
ggagtttctgtaaaagctat

SEQ ID NO: 271183 - DNA, 20 bp, Artificial Sequence
  Description of Artificial Sequence: Synthetic oligonucleotide
  Target: LAMA2; (-) strand; PAM type: YTN; PAM sequence: TTC
ttggagtttctgtaaaagct

SEQ ID NO: 271184 - DNA, 20 bp, Artificial Sequence
  Description of Artificial Sequence: Synthetic oligonucleotide
  Target: LAMA2; (-) strand; PAM type: YTN; PAM sequence: TTT
cttggagtttctgtaaaagc

SEQ ID NO: 271185 - DNA, 20 bp, Artificial Sequence
  Description of Artificial Sequence: Synthetic oligonucleotide
  Target: LAMA2; (-) strand; PAM type: YTN; PAM sequence: CTA
tttcttggagtttctgtaaa

SEQ ID NO: 271186 - DNA, 20 bp, Artificial Sequence
  Description of Artificial Sequence: Synthetic oligonucleotide
  Target: LAMA2; (-) strand; PAM type: YTN; PAM sequence: TTC
ctatttcttggagtttctgt

SEQ ID NO: 271187 - DNA, 20 bp, Artificial Sequence
  Description of Artificial Sequence: Synthetic oligonucleotide
  Target: LAMA2; (-) strand; PAM type: YTN; PAM sequence: TTT
cctatttcttggagtttctg

SEQ ID NO: 271188 - DNA, 20 bp, Artificial Sequence
  Description of Artificial Sequence: Synthetic oligonucleotide
  Target: LAMA2; (-) strand; PAM type: YTN; PAM sequence: CTT
tcctatttcttggagtttct

SEQ ID NO: 271189 - DNA, 20 bp, Artificial Sequence
  Description of Artificial Sequence: Synthetic oligonucleotide
  Target: LAMA2; (-) strand; PAM type: YTN; PAM sequence: TTC
tttcctatttcttggagttt

SEQ ID NO: 271190 - DNA, 20 bp, Artificial Sequence
  Description of Artificial Sequence: Synthetic oligonucleotide
  Target: LAMA2; (-) strand; PAM type: YTN; PAM sequence: CTT
ctttcctatttcttggagtt

SEQ ID NO: 271191 - DNA, 20 bp, Artificial Sequence
  Description of Artificial Sequence: Synthetic oligonucleotide
  Target: LAMA2; (-) strand; PAM type: YTN; PAM sequence: TTC
agaccatgacaacttctttc

SEQ ID NO: 271192 - DNA, 20 bp, Artificial Sequence
  Description of Artificial Sequence: Synthetic oligonucleotide
  Target: LAMA2; (-) strand; PAM type: YTN; PAM sequence: TTG
gggagatgtaaatattcaga

SEQ ID NO: 271193 - DNA, 20 bp, Artificial Sequence
  Description of Artificial Sequence: Synthetic oligonucleotide
  Target: LAMA2; (-) strand; PAM type: YTN; PAM sequence: TTT
ggggagatgtaaatattcag

SEQ ID NO: 271194 - DNA, 20 bp, Artificial Sequence
  Description of Artificial Sequence: Synthetic oligonucleotide
  Target: LAMA2; (-) strand; PAM type: YTN; PAM sequence: TTC
aacatataaatttggggaga

SEQ ID NO: 271195 - DNA, 20 bp, Artificial Sequence
  Description of Artificial Sequence: Synthetic oligonucleotide
  Target: LAMA2; (-) strand; PAM type: YTN; PAM sequence: TTT
caacatataaatttggggag

SEQ ID NO: 271196 - DNA, 20 bp, Artificial Sequence
  Description of Artificial Sequence: Synthetic oligonucleotide
  Target: LAMA2; (-) strand; PAM type: YTN; PAM sequence: CTT
tcaacatataaatttgggga

SEQ ID NO: 271197 - DNA, 20 bp, Artificial Sequence
  Description of Artificial Sequence: Synthetic oligonucleotide
  Target: LAMA2; (-) strand; PAM type: YTN; PAM sequence: CTG
tgacagactttcaacatata

SEQ ID NO: 271198 - DNA, 20 bp, Artificial Sequence
  Description of Artificial Sequence: Synthetic oligonucleotide
  Target: LAMA2; (-) strand; PAM type: YTN; PAM sequence: CTC
caatggactgtgacagactt

SEQ ID NO: 271199 - DNA, 20 bp, Artificial Sequence
  Description of Artificial Sequence: Synthetic oligonucleotide
  Target: LAMA2; (-) strand; PAM type: YTN; PAM sequence: TTG
tcacagcagctccaatggac

SEQ ID NO: 271200 - DNA, 20 bp, Artificial Sequence
  Description of Artificial Sequence: Synthetic oligonucleotide
  Target: LAMA2; (-) strand; PAM type: YTN; PAM sequence: TTT
gtcacagcagctccaatgga

SEQ ID NO: 271201 - DNA, 20 bp, Artificial Sequence
  Description of Artificial Sequence: Synthetic oligonucleotide
  Target: LAMA2; (-) strand; PAM type: YTN; PAM sequence: TTA
tggtatttgtcacagcagct

SEQ ID NO: 271202 - DNA, 20 bp, Artificial Sequence
  Description of Artificial Sequence: Synthetic oligonucleotide
  Target: LAMA2; (-) strand; PAM type: YTN; PAM sequence: TTT
atggtatttgtcacagcagc

SEQ ID NO: 271203 - DNA, 20 bp, Artificial Sequence
  Description of Artificial Sequence: Synthetic oligonucleotide
  Target: LAMA2; (-) strand; PAM type: YTN; PAM sequence: CTA
atcagtttatggtatttgtc

SEQ ID NO: 271204 - DNA, 20 bp, Artificial Sequence
  Description of Artificial Sequence: Synthetic oligonucleotide
  Target: LAMA2; (-) strand; PAM type: YTN; PAM sequence: TTA
taagctaatcagtttatggt

SEQ ID NO: 271205 - DNA, 20 bp, Artificial Sequence
  Description of Artificial Sequence: Synthetic oligonucleotide
  Target: LAMA2; (-) strand; PAM type: YTN; PAM sequence: TTT
ataagctaatcagtttatgg

SEQ ID NO: 271206 - DNA, 20 bp, Artificial Sequence
  Description of Artificial Sequence: Synthetic oligonucleotide
  Target: LAMA2; (-) strand; PAM type: YTN; PAM sequence: TTG
tttataagctaatcagttta

SEQ ID NO: 271207 - DNA, 20 bp, Artificial Sequence
  Description of Artificial Sequence: Synthetic oligonucleotide
  Target: LAMA2; (-) strand; PAM type: YTN; PAM sequence: CTA
ttgtttataagctaatcagt

SEQ ID NO: 271208 - DNA, 20 bp, Artificial Sequence
  Description of Artificial Sequence: Synthetic oligonucleotide
  Target: LAMA2; (-) strand; PAM type: YTN; PAM sequence: TTC
tattgtttataagctaatca

SEQ ID NO: 271209 - DNA, 20 bp, Artificial Sequence
  Description of Artificial Sequence: Synthetic oligonucleotide
  Target: LAMA2; (-) strand; PAM type: YTN; PAM sequence: TTT
ctattgtttataagctaatc

SEQ ID NO: 271210 - DNA, 20 bp, Artificial Sequence
  Description of Artificial Sequence: Synthetic oligonucleotide
  Target: LAMA2; (-) strand; PAM type: YTN; PAM sequence: CTG
tgagagatatatttctattg

SEQ ID NO: 271211 - DNA, 20 bp, Artificial Sequence
  Description of Artificial Sequence: Synthetic oligonucleotide
  Target: LAMA2; (-) strand; PAM type: YTN; PAM sequence: CTC
agaactgtgagagatatatt

SEQ ID NO: 271212 - DNA, 20 bp, Artificial Sequence
  Description of Artificial Sequence: Synthetic oligonucleotide
  Target: LAMA2; (-) strand; PAM type: YTN; PAM sequence: TTC
ccagcctcagaactgtgaga

SEQ ID NO: 271213 - DNA, 20 bp, Artificial Sequence
  Description of Artificial Sequence: Synthetic oligonucleotide
  Target: LAMA2; (-) strand; PAM type: YTN; PAM sequence: CTT
cccagcctcagaactgtgag

SEQ ID NO: 271214 - DNA, 20 bp, Artificial Sequence
  Description of Artificial Sequence: Synthetic oligonucleotide
  Target: LAMA2; (-) strand; PAM type: YTN; PAM sequence: TTG
ggcttcccagcctcagaact

SEQ ID NO: 271215 - DNA, 20 bp, Artificial Sequence
  Description of Artificial Sequence: Synthetic oligonucleotide
  Target: LAMA2; (-) strand; PAM type: YTN; PAM sequence: CTT
gggcttcccagcctcagaac

SEQ ID NO: 271216 - DNA, 20 bp, Artificial Sequence
  Description of Artificial Sequence: Synthetic oligonucleotide
  Target: LAMA2; (-) strand; PAM type: YTN; PAM sequence: TTG
atcttgggcttcccagcctc

SEQ ID NO: 271217 - DNA, 20 bp, Artificial Sequence
  Description of Artificial Sequence: Synthetic oligonucleotide
  Target: LAMA2; (-) strand; PAM type: YTN; PAM sequence: CTT
gatcttgggcttcccagcct

SEQ ID NO: 271218 - DNA, 20 bp, Artificial Sequence
  Description of Artificial Sequence: Synthetic oligonucleotide
  Target: LAMA2; (-) strand; PAM type: YTN; PAM sequence: CTG
gtaccttgatcttgggcttc

SEQ ID NO: 271219 - DNA, 20 bp, Artificial Sequence
  Description of Artificial Sequence: Synthetic oligonucleotide
  Target: LAMA2; (-) strand; PAM type: YTN; PAM sequence: TTG
ctggtaccttgatcttgggc

SEQ ID NO: 271220 - DNA, 20 bp, Artificial Sequence
  Description of Artificial Sequence: Synthetic oligonucleotide
  Target: LAMA2; (-) strand; PAM type: YTN; PAM sequence: TTG
aacattgctggtaccttgat

SEQ ID NO: 271221 - DNA, 20 bp, Artificial Sequence
  Description of Artificial Sequence: Synthetic oligonucleotide
  Target: LAMA2; (-) strand; PAM type: YTN; PAM sequence: CTA
gacattgaacattgctggta

SEQ ID NO: 271222 - DNA, 20 bp, Artificial Sequence
  Description of Artificial Sequence: Synthetic oligonucleotide
  Target: LAMA2; (-) strand; PAM type: YTN; PAM sequence: TTC
actagacattgaacattgct

SEQ ID NO: 271223 - DNA, 20 bp, Artificial Sequence
  Description of Artificial Sequence: Synthetic oligonucleotide
  Target: LAMA2; (-) strand; PAM type: YTN; PAM sequence: CTT
cactagacattgaacattgc

SEQ ID NO: 271224 - DNA, 20 bp, Artificial Sequence
  Description of Artificial Sequence: Synthetic oligonucleotide
  Target: LAMA2; (-) strand; PAM type: YTN; PAM sequence: CTG
tgaggaacaggccttcacta

SEQ ID NO: 271225 - DNA, 20 bp, Artificial Sequence
  Description of Artificial Sequence: Synthetic oligonucleotide
  Target: LAMA2; (-) strand; PAM type: YTN; PAM sequence: CTC
tgtgaggaacaggccttcac

SEQ ID NO: 271226 - DNA, 20 bp, Artificial Sequence
  Description of Artificial Sequence: Synthetic oligonucleotide
  Target: LAMA2; (-) strand; PAM type: YTN; PAM sequence: TTA
aatgtggggtcatagcaaga

SEQ ID NO: 271227 - DNA, 20 bp, Artificial Sequence
  Description of Artificial Sequence: Synthetic oligonucleotide
  Target: LAMA2; (-) strand; PAM type: YTN; PAM sequence: TTA
aatgaattaaatgtggggtc

SEQ ID NO: 271228 - DNA, 20 bp, Artificial Sequence
  Description of Artificial Sequence: Synthetic oligonucleotide
  Target: LAMA2; (-) strand; PAM type: YTN; PAM sequence: CTC
agtatccagatattaaatga

SEQ ID NO: 271229 - DNA, 20 bp, Artificial Sequence
  Description of Artificial Sequence: Synthetic oligonucleotide
  Target: LAMA2; (-) strand; PAM type: YTN; PAM sequence: TTC
ctcagtatccagatattaaa

SEQ ID NO: 271230 - DNA, 20 bp, Artificial Sequence
  Description of Artificial Sequence: Synthetic oligonucleotide
  Target: LAMA2; (-) strand; PAM type: YTN; PAM sequence: TTT
cctcagtatccagatattaa

SEQ ID NO: 271231 - DNA, 20 bp, Artificial Sequence
  Description of Artificial Sequence: Synthetic oligonucleotide
  Target: LAMA2; (-) strand; PAM type: YTN; PAM sequence: TTT
tcctcagtatccagatatta

SEQ ID NO: 271232 - DNA, 20 bp, Artificial Sequence
  Description of Artificial Sequence: Synthetic oligonucleotide
  Target: LAMA2; (-) strand; PAM type: YTN; PAM sequence: CTT
ttcctcagtatccagatatt

SEQ ID NO: 271233 - DNA, 20 bp, Artificial Sequence
  Description of Artificial Sequence: Synthetic oligonucleotide
  Target: LAMA2; (-) strand; PAM type: YTN; PAM sequence: CTA
tccttttcctcagtatccag

SEQ ID NO: 271234 - DNA, 20 bp, Artificial Sequence
  Description of Artificial Sequence: Synthetic oligonucleotide
  Target: LAMA2; (-) strand; PAM type: YTN; PAM sequence: CTA
gctatccttttcctcagtat

SEQ ID NO: 271235 - DNA, 20 bp, Artificial Sequence
  Description of Artificial Sequence: Synthetic oligonucleotide
  Target: LAMA2; (-) strand; PAM type: YTN; PAM sequence: TTA
aagagaccccagagagctag

SEQ ID NO: 271236 - DNA, 20 bp, Artificial Sequence
  Description of Artificial Sequence: Synthetic oligonucleotide
  Target: LAMA2; (-) strand; PAM type: YTN; PAM sequence: TTA
ttaaagagaccccagagagc

SEQ ID NO: 271237 - DNA, 20 bp, Artificial Sequence
  Description of Artificial Sequence: Synthetic oligonucleotide
  Target: LAMA2; (-) strand; PAM type: YTN; PAM sequence: CTT
attaaagagaccccagagag

SEQ ID NO: 271238 - DNA, 20 bp, Artificial Sequence
  Description of Artificial Sequence: Synthetic oligonucleotide
  Target: LAMA2; (-) strand; PAM type: YTN; PAM sequence: TTA
gtgcccttattaaagagacc

SEQ ID NO: 271239 - DNA, 20 bp, Artificial Sequence
  Description of Artificial Sequence: Synthetic oligonucleotide
  Target: LAMA2; (-) strand; PAM type: YTN; PAM sequence: TTG
ggattagtgcccttattaaa

SEQ ID NO: 271240 - DNA, 20 bp, Artificial Sequence
  Description of Artificial Sequence: Synthetic oligonucleotide
  Target: LAMA2; (-) strand; PAM type: YTN; PAM sequence: TTC
atgattgggattagtgccct

SEQ ID NO: 271241 - DNA, 20 bp, Artificial Sequence
  Description of Artificial Sequence: Synthetic oligonucleotide
  Target: LAMA2; (-) strand; PAM type: YTN; PAM sequence: CTT
catgattgggattagtgccc

SEQ ID NO: 271242 - DNA, 20 bp, Artificial Sequence
  Description of Artificial Sequence: Synthetic oligonucleotide
  Target: LAMA2; (-) strand; PAM type: YTN; PAM sequence: TTG
agtcatgagaatgtagcctt

SEQ ID NO: 271243 - DNA, 20 bp, Artificial Sequence
  Description of Artificial Sequence: Synthetic oligonucleotide
  Target: LAMA2; (-) strand; PAM type: YTN; PAM sequence: TTG
ggaagtgattgagtcatgag

SEQ ID NO: 271244 - DNA, 20 bp, Artificial Sequence
  Description of Artificial Sequence: Synthetic oligonucleotide
  Target: LAMA2; (-) strand; PAM type: YTN; PAM sequence: TTT
gggaagtgattgagtcatga

SEQ ID NO: 271245 - DNA, 20 bp, Artificial Sequence
  Description of Artificial Sequence: Synthetic oligonucleotide
  Target: LAMA2; (-) strand; PAM type: YTN; PAM sequence: CTT
tgggaagtgattgagtcatg

SEQ ID NO: 271246 - DNA, 20 bp, Artificial Sequence
  Description of Artificial Sequence: Synthetic oligonucleotide
  Target: LAMA2; (-) strand; PAM type: YTN; PAM sequence: TTA
ggaggtggagcctttgggaa

SEQ ID NO: 271247 - DNA, 20 bp, Artificial Sequence
  Description of Artificial Sequence: Synthetic oligonucleotide
  Target: LAMA2; (-) strand; PAM type: YTN; PAM sequence: TTC
ccaatgtgatgatattagga

SEQ ID NO: 271248 - DNA, 20 bp, Artificial Sequence
  Description of Artificial Sequence: Synthetic oligonucleotide
  Target: LAMA2; (-) strand; PAM type: YTN; PAM sequence: CTA
gttcccaatgtgatgatatt

SEQ ID NO: 271249 - DNA, 20 bp, Artificial Sequence
  Description of Artificial Sequence: Synthetic oligonucleotide
  Target: LAMA2; (-) strand; PAM type: YTN; PAM sequence: TTG
acatcctagttcccaatgtg

SEQ ID NO: 271250 - DNA, 20 bp, Artificial Sequence
  Description of Artificial Sequence: Synthetic oligonucleotide
  Target: LAMA2; (-) strand; PAM type: YTN; PAM sequence: CTA
atatccatgtgttgacatcc

SEQ ID NO: 271251 - DNA, 20 bp, Artificial Sequence
  Description of Artificial Sequence: Synthetic oligonucleotide
  Target: LAMA2; (-) strand; PAM type: YTN; PAM sequence: TTC
taatatccatgtgttgacat

SEQ ID NO: 271252 - DNA, 20 bp, Artificial Sequence
  Description of Artificial Sequence: Synthetic oligonucleotide
  Target: LAMA2; (-) strand; PAM type: YTN; PAM sequence: CTT
ctaatatccatgtgttgaca

SEQ ID NO: 271253 - DNA, 20 bp, Artificial Sequence
  Description of Artificial Sequence: Synthetic oligonucleotide
  Target: LAMA2; (-) strand; PAM type: YTN; PAM sequence: TTG
tgtccttctaatatccatgt

SEQ ID NO: 271254 - DNA, 20 bp, Artificial Sequence
  Description of Artificial Sequence: Synthetic oligonucleotide
  Target: LAMA2; (-) strand; PAM type: YTN; PAM sequence: TTT
gtgtccttctaatatccatg

SEQ ID NO: 271255 - DNA, 20 bp, Artificial Sequence
  Description of Artificial Sequence: Synthetic oligonucleotide
  Target: LAMA2; (-) strand; PAM type: YTN; PAM sequence: CTC
acacggcagaaggcagaatg

SEQ ID NO: 271256 - DNA, 20 bp, Artificial Sequence
  Description of Artificial Sequence: Synthetic oligonucleotide
  Target: LAMA2; (-) strand; PAM type: YTN; PAM sequence: CTG
tgtcctcacacggcagaagg

SEQ ID NO: 271257 - DNA, 20 bp, Artificial Sequence
  Description of Artificial Sequence: Synthetic oligonucleotide
  Target: LAMA2; (-) strand; PAM type: YTN; PAM sequence: CTC
cctgtgtcctcacacggcag

SEQ ID NO: 271258 - DNA, 20 bp, Artificial Sequence
  Description of Artificial Sequence: Synthetic oligonucleotide
  Target: LAMA2; (-) strand; PAM type: YTN; PAM sequence: TTC
tccctgtgtcctcacacggc

SEQ ID NO: 271259 - DNA, 20 bp, Artificial Sequence
  Description of Artificial Sequence: Synthetic oligonucleotide
  Target: LAMA2; (-) strand; PAM type: YTN; PAM sequence: CTT
ctccctgtgtcctcacacgg

SEQ ID NO: 271260 - DNA, 20 bp, Artificial Sequence
  Description of Artificial Sequence: Synthetic oligonucleotide
  Target: LAMA2; (-) strand; PAM type: YTN; PAM sequence: CTG
ccttctccctgtgtcctcac

SEQ ID NO: 271261 - DNA, 20 bp, Artificial Sequence
  Description of Artificial Sequence: Synthetic oligonucleotide
  Target: LAMA2; (-) strand; PAM type: YTN; PAM sequence: TTA
agcacagctgccttctccct

SEQ ID NO: 271262 - DNA, 20 bp, Artificial Sequence
  Description of Artificial Sequence: Synthetic oligonucleotide
  Target: LAMA2; (-) strand; PAM type: YTN; PAM sequence: CTG
ttaagcacagctgccttctc

SEQ ID NO: 271263 - DNA, 20 bp, Artificial Sequence
  Description of Artificial Sequence: Synthetic oligonucleotide
  Target: LAMA2; (-) strand; PAM type: YTN; PAM sequence: CTC
tgttaagcacagctgccttc

SEQ ID NO: 271264 - DNA, 20 bp, Artificial Sequence
  Description of Artificial Sequence: Synthetic oligonucleotide
  Target: LAMA2; (-) strand; PAM type: YTN; PAM sequence: CTC
acatggctctgttaagcaca

SEQ ID NO: 271265 - DNA, 20 bp, Artificial Sequence
  Description of Artificial Sequence: Synthetic oligonucleotide
  Target: LAMA2; (-) strand; PAM type: YTN; PAM sequence: CTG
ctcacatggctctgttaagc

SEQ ID NO: 271266 - DNA, 20 bp, Artificial Sequence
  Description of Artificial Sequence: Synthetic oligonucleotide
  Target: LAMA2; (-) strand; PAM type: YTN; PAM sequence: CTC
tgctcacatggctctgttaa

SEQ ID NO: 271267 - DNA, 20 bp, Artificial Sequence
  Description of Artificial Sequence: Synthetic oligonucleotide
  Target: LAMA2; (-) strand; PAM type: YTN; PAM sequence: CTG
cctctgctcacatggctctg

SEQ ID NO: 271268 - DNA, 20 bp, Artificial Sequence
  Description of Artificial Sequence: Synthetic oligonucleotide
  Target: LAMA2; (-) strand; PAM type: YTN; PAM sequence: TTC
acaccactgcctctgctcac

SEQ ID NO: 271269 - DNA, 20 bp, Artificial Sequence
  Description of Artificial Sequence: Synthetic oligonucleotide
  Target: LAMA2; (-) strand; PAM type: YTN; PAM sequence: CTA
attcacaccactgcctctgc

SEQ ID NO: 271270 - DNA, 20 bp, Artificial Sequence
  Description of Artificial Sequence: Synthetic oligonucleotide
  Target: LAMA2; (-) strand; PAM type: YTN; PAM sequence: CTG
ccagacagatctaattcaca

SEQ ID NO: 271271 - DNA, 20 bp, Artificial Sequence
  Description of Artificial Sequence: Synthetic oligonucleotide
  Target: LAMA2; (-) strand; PAM type: YTN; PAM sequence: TTA
atatctgccagacagatcta

SEQ ID NO: 271272 - DNA, 20 bp, Artificial Sequence
  Description of Artificial Sequence: Synthetic oligonucleotide
  Target: LAMA2; (-) strand; PAM type: YTN; PAM sequence: TTT
aatatctgccagacagatct

SEQ ID NO: 271273 - DNA, 20 bp, Artificial Sequence
  Description of Artificial Sequence: Synthetic oligonucleotide
  Target: LAMA2; (-) strand; PAM type: YTN; PAM sequence: TTT
taatatctgccagacagatc

SEQ ID NO: 271274 - DNA, 20 bp, Artificial Sequence
  Description of Artificial Sequence: Synthetic oligonucleotide
  Target: LAMA2; (-) strand; PAM type: YTN; PAM sequence: CTT
ttaatatctgccagacagat

SEQ ID NO: 271275 - DNA, 20 bp, Artificial Sequence
  Description of Artificial Sequence: Synthetic oligonucleotide
  Target: LAMA2; (-) strand; PAM type: YTN; PAM sequence: CTG
acttttaatatctgccagac

SEQ ID NO: 271276 - DNA, 20 bp, Artificial Sequence
  Description of Artificial Sequence: Synthetic oligonucleotide
  Target: LAMA2; (-) strand; PAM type: YTN; PAM sequence: CTA
gcaggtctgacttttaatat

SEQ ID NO: 271277 - DNA, 20 bp, Artificial Sequence
  Description of Artificial Sequence: Synthetic oligonucleotide
  Target: LAMA2; (-) strand; PAM type: YTN; PAM sequence: TTC
actagcaggtctgactttta

SEQ ID NO: 271278 - DNA, 20 bp, Artificial Sequence
  Description of Artificial Sequence: Synthetic oligonucleotide
  Target: LAMA2; (-) strand; PAM type: YTN; PAM sequence: TTT
cactagcaggtctgactttt

SEQ ID NO: 271279 - DNA, 20 bp, Artificial Sequence
  Description of Artificial Sequence: Synthetic oligonucleotide
  Target: LAMA2; (-) strand; PAM type: YTN; PAM sequence: CTT
tcactagcaggtctgacttt

SEQ ID NO: 271280 - DNA, 20 bp, Artificial Sequence
  Description of Artificial Sequence: Synthetic oligonucleotide
  Target: LAMA2; (-) strand; PAM type: YTN; PAM sequence: TTA
tctttcactagcaggtctga

SEQ ID NO: 271281 - DNA, 20 bp, Artificial Sequence
  Description of Artificial Sequence: Synthetic oligonucleotide
  Target: LAMA2; (-) strand; PAM type: YTN; PAM sequence: CTT
atctttcactagcaggtctg

SEQ ID NO: 271282 - DNA, 20 bp, Artificial Sequence
  Description of Artificial Sequence: Synthetic oligonucleotide
  Target: LAMA2; (-) strand; PAM type: YTN; PAM sequence: CTC
cagccttatctttcactagc

SEQ ID NO: 271283 - DNA, 20 bp, Artificial Sequence
  Description of Artificial Sequence: Synthetic oligonucleotide
  Target: LAMA2; (-) strand; PAM type: YTN; PAM sequence: CTG
aagtctccagccttatcttt

SEQ ID NO: 271284 - DNA, 20 bp, Artificial Sequence
  Description of Artificial Sequence: Synthetic oligonucleotide
  Target: LAMA2; (-) strand; PAM type: YTN; PAM sequence: CTC
actgaagtctccagccttat

SEQ ID NO: 271285 - DNA, 20 bp, Artificial Sequence
  Description of Artificial Sequence: Synthetic oligonucleotide
  Target: LAMA2; (-) strand; PAM type: YTN; PAM sequence: CTG
cctcactgaagtctccagcc

SEQ ID NO: 271286 - DNA, 20 bp, Artificial Sequence
  Description of Artificial Sequence: Synthetic oligonucleotide
  Target: LAMA2; (-) strand; PAM type: YTN; PAM sequence: TTG
tccatcatatcaccctgcct

SEQ ID NO: 271287 - DNA, 20 bp, Artificial Sequence
  Description of Artificial Sequence: Synthetic oligonucleotide
  Target: LAMA2; (-) strand; PAM type: YTN; PAM sequence: TTC
aaggttgtccatcatatcac

SEQ ID NO: 271288 - DNA, 20 bp, Artificial Sequence
  Description of Artificial Sequence: Synthetic oligonucleotide
  Target: LAMA2; (-) strand; PAM type: YTN; PAM sequence: TTT
caaggttgtccatcatatca

SEQ ID NO: 271289 - DNA, 20 bp, Artificial Sequence
  Description of Artificial Sequence: Synthetic oligonucleotide
  Target: LAMA2; (-) strand; PAM type: YTN; PAM sequence: CTT
tcaaggttgtccatcatatc

SEQ ID NO: 271290 - DNA, 20 bp, Artificial Sequence
  Description of Artificial Sequence: Synthetic oligonucleotide
  Target: LAMA2; (-) strand; PAM type: YTN; PAM sequence: CTG
gctttcaaggttgtccatca

SEQ ID NO: 271291 - DNA, 20 bp, Artificial Sequence
  Description of Artificial Sequence: Synthetic oligonucleotide
  Target: LAMA2; (-) strand; PAM type: YTN; PAM sequence: CTG
cctggctttcaaggttgtcc

SEQ ID NO: 271292 - DNA, 20 bp, Artificial Sequence
  Description of Artificial Sequence: Synthetic oligonucleotide
  Target: LAMA2; (-) strand; PAM type: YTN; PAM sequence: CTC
tgcctggctttcaaggttgt

SEQ ID NO: 271293 - DNA, 20 bp, Artificial Sequence
  Description of Artificial Sequence: Synthetic oligonucleotide
  Target: LAMA2; (-) strand; PAM type: YTN; PAM sequence: TTC
ctctgcctggctttcaaggt

SEQ ID NO: 271294 - DNA, 20 bp, Artificial Sequence
  Description of Artificial Sequence: Synthetic oligonucleotide
  Target: LAMA2; (-) strand; PAM type: YTN; PAM sequence: CTC
aggttcctctgcctggcttt

SEQ ID NO: 271295 - DNA, 20 bp, Artificial Sequence
  Description of Artificial Sequence: Synthetic oligonucleotide
  Target: LAMA2; (-) strand; PAM type: YTN; PAM sequence: CTG
aataccaggaccacaaggta

SEQ ID NO: 271296 - DNA, 20 bp, Artificial Sequence
  Description of Artificial Sequence: Synthetic oligonucleotide
  Target: LAMA2; (-) strand; PAM type: YTN; PAM sequence: TTC
cctgaataccaggaccacaa

SEQ ID NO: 271297 - DNA, 20 bp, Artificial Sequence
  Description of Artificial Sequence: Synthetic oligonucleotide
  Target: LAMA2; (-) strand; PAM type: YTN; PAM sequence: CTT
ccctgaataccaggaccaca

SEQ ID NO: 271298 - DNA, 20 bp, Artificial Sequence
  Description of Artificial Sequence: Synthetic oligonucleotide
  Target: LAMA2; (-) strand; PAM type: YTN; PAM sequence: TTC
acttccctgaataccaggac

SEQ ID NO: 271299 - DNA, 20 bp, Artificial Sequence
  Description of Artificial Sequence: Synthetic oligonucleotide
  Target: LAMA2; (-) strand; PAM type: YTN; PAM sequence: CTT
cacttccctgaataccagga

SEQ ID NO: 271300 - DNA, 20 bp, Artificial Sequence
  Description of Artificial Sequence: Synthetic oligonucleotide
  Target: LAMA2; (-) strand; PAM type: YTN; PAM sequence: CTC
ttcacttccctgaataccag

SEQ ID NO: 271301 - DNA, 20 bp, Artificial Sequence
  Description of Artificial Sequence: Synthetic oligonucleotide
  Target: LAMA2; (-) strand; PAM type: YTN; PAM sequence: TTA
aaactcttcacttccctgaa

SEQ ID NO: 271302 - DNA, 20 bp, Artificial Sequence
  Description of Artificial Sequence: Synthetic oligonucleotide
  Target: LAMA2; (-) strand; PAM type: YTN; PAM sequence: TTC
attaaaactcttcacttccc

SEQ ID NO: 271303 - DNA, 20 bp, Artificial Sequence
  Description of Artificial Sequence: Synthetic oligonucleotide
  Target: LAMA2; (-) strand; PAM type: YTN; PAM sequence: TTT
cattaaaactcttcacttcc

SEQ ID NO: 271304 - DNA, 20 bp, Artificial Sequence
  Description of Artificial Sequence: Synthetic oligonucleotide
  Target: LAMA2; (-) strand; PAM type: YTN; PAM sequence: TTT
tcattaaaactcttcacttc

SEQ ID NO: 271305 - DNA, 20 bp, Artificial Sequence
  Description of Artificial Sequence: Synthetic oligonucleotide
  Target: LAMA2; (-) strand; PAM type: YTN; PAM sequence: CTT
ttcattaaaactcttcactt

SEQ ID NO: 271306 - DNA, 20 bp, Artificial Sequence
  Description of Artificial Sequence: Synthetic oligonucleotide
  Target: LAMA2; (-) strand; PAM type: YTN; PAM sequence: TTC
ttttcattaaaactcttcac

SEQ ID NO: 271307 - DNA, 20 bp, Artificial Sequence
  Description of Artificial Sequence: Synthetic oligonucleotide
  Target: LAMA2; (-) strand; PAM type: YTN; PAM sequence: CTG
atcggcattcttttcattaa

SEQ ID NO: 271308 - DNA, 20 bp, Artificial Sequence
  Description of Artificial Sequence: Synthetic oligonucleotide
  Target: LAMA2; (-) strand; PAM type: YTN; PAM sequence: CTC
catatacaaggaaaataact

SEQ ID NO: 271309 - DNA, 20 bp, Artificial Sequence
  Description of Artificial Sequence: Synthetic oligonucleotide
  Target: LAMA2; (-) strand; PAM type: YTN; PAM sequence: CTC
tccatatacaaggaaaataa

SEQ ID NO: 271310 - DNA, 20 bp, Artificial Sequence
  Description of Artificial Sequence: Synthetic oligonucleotide
  Target: LAMA2; (-) strand; PAM type: YTN; PAM sequence: TTC
tctccatatacaaggaaaat

SEQ ID NO: 271311 - DNA, 20 bp, Artificial Sequence
  Description of Artificial Sequence: Synthetic oligonucleotide
  Target: LAMA2; (-) strand; PAM type: YTN; PAM sequence: CTG
tattctctccatatacaagg

SEQ ID NO: 271312 - DNA, 20 bp, Artificial Sequence
  Description of Artificial Sequence: Synthetic oligonucleotide
  Target: LAMA2; (-) strand; PAM type: YTN; PAM sequence: TTC
tgtattctctccatatacaa

SEQ ID NO: 271313 - DNA, 20 bp, Artificial Sequence
  Description of Artificial Sequence: Synthetic oligonucleotide
  Target: LAMA2; (-) strand; PAM type: YTN; PAM sequence: TTT
ctgtattctctccatataca

SEQ ID NO: 271314 - DNA, 20 bp, Artificial Sequence
  Description of Artificial Sequence: Synthetic oligonucleotide
  Target: LAMA2; (-) strand; PAM type: YTN; PAM sequence: TTT
tctgtattctctccatatac

SEQ ID NO: 271315 - DNA, 20 bp, Artificial Sequence
  Description of Artificial Sequence: Synthetic oligonucleotide
  Target: LAMA2; (-) strand; PAM type: YTN; PAM sequence: TTT
ttctgtattctctccatata

SEQ ID NO: 271316 - DNA, 20 bp, Artificial Sequence
  Description of Artificial Sequence: Synthetic oligonucleotide
  Target: LAMA2; (-) strand; PAM type: YTN; PAM sequence: TTA
tttttctgtattctctccat

SEQ ID NO: 271317 - DNA, 20 bp, Artificial Sequence
  Description of Artificial Sequence: Synthetic oligonucleotide
  Target: LAMA2; (-) strand; PAM type: YTN; PAM sequence: TTT
atttttctgtattctctcca

SEQ ID NO: 271318 - DNA, 20 bp, Artificial Sequence
  Description of Artificial Sequence: Synthetic oligonucleotide
  Target: LAMA2; (-) strand; PAM type: YTN; PAM sequence: TTA
atttatttttctgtattctc

SEQ ID NO: 271319 - DNA, 20 bp, Artificial Sequence
  Description of Artificial Sequence: Synthetic oligonucleotide
  Target: LAMA2; (-) strand; PAM type: YTN; PAM sequence: TTT
aatttatttttctgtattct

SEQ ID NO: 271320 - DNA, 20 bp, Artificial Sequence
  Description of Artificial Sequence: Synthetic oligonucleotide
  Target: LAMA2; (-) strand; PAM type: YTN; PAM sequence: CTA
gtttaatttatttttctgta

SEQ ID NO: 271321 - DNA, 20 bp, Artificial Sequence
  Description of Artificial Sequence: Synthetic oligonucleotide
  Target: LAMA2; (-) strand; PAM type: YTN; PAM sequence: TTC
tagtttaatttatttttctg

SEQ ID NO: 271322 - DNA, 20 bp, Artificial Sequence
  Description of Artificial Sequence: Synthetic oligonucleotide
  Target: LAMA2; (-) strand; PAM type: YTN; PAM sequence: TTT
ctagtttaatttatttttct

SEQ ID NO: 271323 - DNA, 20 bp, Artificial Sequence
  Description of Artificial Sequence: Synthetic oligonucleotide
  Target: LAMA2; (-) strand; PAM type: YTN; PAM sequence: TTT
tctagtttaatttatttttc

SEQ ID NO: 271324 - DNA, 20 bp, Artificial Sequence
  Description of Artificial Sequence: Synthetic oligonucleotide
  Target: LAMA2; (-) strand; PAM type: YTN; PAM sequence: CTT
ttctagtttaatttattttt

SEQ ID NO: 271325 - DNA, 20 bp, Artificial Sequence
  Description of Artificial Sequence: Synthetic oligonucleotide
  Target: LAMA2; (-) strand; PAM type: YTN; PAM sequence: TTG
cttttctagtttaatttatt

SEQ ID NO: 271326 - DNA, 20 bp, Artificial Sequence
  Description of Artificial Sequence: Synthetic oligonucleotide
  Target: LAMA2; (-) strand; PAM type: YTN; PAM sequence: TTT
gcttttctagtttaatttat

SEQ ID NO: 271327 - DNA, 20 bp, Artificial Sequence
  Description of Artificial Sequence: Synthetic oligonucleotide
  Target: LAMA2; (-) strand; PAM type: YTN; PAM sequence: CTA
aaatgtttgcttttctagtt

SEQ ID NO: 271328 - DNA, 20 bp, Artificial Sequence
  Description of Artificial Sequence: Synthetic oligonucleotide
  Target: LAMA2; (-) strand; PAM type: YTN; PAM sequence: TTC
aactaaaatgtttgcttttc

SEQ ID NO: 271329 - DNA, 20 bp, Artificial Sequence
  Description of Artificial Sequence: Synthetic oligonucleotide
  Target: LAMA2; (-) strand; PAM type: YTN; PAM sequence: TTC
atgttcaactaaaatgtttg

SEQ ID NO: 271330 - DNA, 20 bp, Artificial Sequence
  Description of Artificial Sequence: Synthetic oligonucleotide
  Target: LAMA2; (-) strand; PAM type: YTN; PAM sequence: TTT
catgttcaactaaaatgttt

SEQ ID NO: 271331 - DNA, 20 bp, Artificial Sequence
  Description of Artificial Sequence: Synthetic oligonucleotide
  Target: LAMA2; (-) strand; PAM type: YTN; PAM sequence: TTA
aaatgtttcatgttcaacta

SEQ ID NO: 271332 - DNA, 20 bp, Artificial Sequence
  Description of Artificial Sequence: Synthetic oligonucleotide
  Target: LAMA2; (-) strand; PAM type: YTN; PAM sequence: TTT
aaaatgtttcatgttcaact

SEQ ID NO: 271333 - DNA, 20 bp, Artificial Sequence
  Description of Artificial Sequence: Synthetic oligonucleotide
  Target: LAMA2; (-) strand; PAM type: YTN; PAM sequence: TTT
taaaatgtttcatgttcaac

SEQ ID NO: 271334 - DNA, 20 bp, Artificial Sequence
  Description of Artificial Sequence: Synthetic oligonucleotide
  Target: LAMA2; (-) strand; PAM type: YTN; PAM sequence: TTA
gttttaaaatgtttcatgtt

SEQ ID NO: 271335 - DNA, 20 bp, Artificial Sequence
  Description of Artificial Sequence: Synthetic oligonucleotide
  Target: LAMA2; (-) strand; PAM type: YTN; PAM sequence: TTA
agtattagttttaaaatgtt

SEQ ID NO: 271336 - DNA, 20 bp, Artificial Sequence
  Description of Artificial Sequence: Synthetic oligonucleotide
  Target: LAMA2; (-) strand; PAM type: YTN; PAM sequence: CTT
aagtattagttttaaaatgt

SEQ ID NO: 271337 - DNA, 20 bp, Artificial Sequence
  Description of Artificial Sequence: Synthetic oligonucleotide
  Target: LAMA2; (-) strand; PAM type: YTN; PAM sequence: TTG
cttaagtattagttttaaaa

SEQ ID NO: 271338 - DNA, 20 bp, Artificial Sequence
  Description of Artificial Sequence: Synthetic oligonucleotide
  Target: LAMA2; (-) strand; PAM type: YTN; PAM sequence: TTC
atcatccattgcttaagtat

SEQ ID NO: 271339 - DNA, 20 bp, Artificial Sequence
  Description of Artificial Sequence: Synthetic oligonucleotide
  Target: LAMA2; (-) strand; PAM type: YTN; PAM sequence: CTT
catcatccattgcttaagta

SEQ ID NO: 271340 - DNA, 20 bp, Artificial Sequence
  Description of Artificial Sequence: Synthetic oligonucleotide
  Target: LAMA2; (-) strand; PAM type: YTN; PAM sequence: TTA
cttcatcatccattgcttaa

SEQ ID NO: 271341 - DNA, 20 bp, Artificial Sequence
  Description of Artificial Sequence: Synthetic oligonucleotide
  Target: LAMA2; (-) strand; PAM type: YTN; PAM sequence: TTT
acttcatcatccattgctta

SEQ ID NO: 271342 - DNA, 20 bp, Artificial Sequence
  Description of Artificial Sequence: Synthetic oligonucleotide
  Target: LAMA2; (-) strand; PAM type: YTN; PAM sequence: CTT
tacttcatcatccattgctt

SEQ ID NO: 271343 - DNA, 20 bp, Artificial Sequence
  Description of Artificial Sequence: Synthetic oligonucleotide
  Target: LAMA2; (-) strand; PAM type: YTN; PAM sequence: CTC
tttacttcatcatccattgc

SEQ ID NO: 271344 - DNA, 20 bp, Artificial Sequence
  Description of Artificial Sequence: Synthetic oligonucleotide
  Target: LAMA2; (-) strand; PAM type: YTN; PAM sequence: CTA
taggatcctctttacttcat

SEQ ID NO: 271345 - DNA, 20 bp, Artificial Sequence
  Description of Artificial Sequence: Synthetic oligonucleotide
  Target: LAMA2; (-) strand; PAM type: YTN; PAM sequence: TTC
tataggatcctctttacttc

SEQ ID NO: 271346 - DNA, 20 bp, Artificial Sequence
  Description of Artificial Sequence: Synthetic oligonucleotide
  Target: LAMA2; (-) strand; PAM type: YTN; PAM sequence: CTT
ctataggatcctctttactt

SEQ ID NO: 271347 - DNA, 20 bp, Artificial Sequence
  Description of Artificial Sequence: Synthetic oligonucleotide
  Target: LAMA2; (-) strand; PAM type: YTN; PAM sequence: CTC
ttctataggatcctctttac

SEQ ID NO: 271348 - DNA, 20 bp, Artificial Sequence
  Description of Artificial Sequence: Synthetic oligonucleotide
  Target: LAMA2; (-) strand; PAM type: YTN; PAM sequence: TTG
gagcctcttctataggatcc

SEQ ID NO: 271349 - DNA, 20 bp, Artificial Sequence
  Description of Artificial Sequence: Synthetic oligonucleotide
  Target: LAMA2; (-) strand; PAM type: YTN; PAM sequence: TTC
acaaattggagcctcttcta

SEQ ID NO: 271350 - DNA, 20 bp, Artificial Sequence
  Description of Artificial Sequence: Synthetic oligonucleotide
  Target: LAMA2; (-) strand; PAM type: YTN; PAM sequence: TTA
gaagatgttcacaaattgga

SEQ ID NO: 271351 - DNA, 20 bp, Artificial Sequence
  Description of Artificial Sequence: Synthetic oligonucleotide
  Target: LAMA2; (-) strand; PAM type: YTN; PAM sequence: CTT
agaagatgttcacaaattgg

SEQ ID NO: 271352 - DNA, 20 bp, Artificial Sequence
  Description of Artificial Sequence: Synthetic oligonucleotide
  Target: LAMA2; (-) strand; PAM type: YTN; PAM sequence: TTG
gcttagaagatgttcacaaa

SEQ ID NO: 271353 - DNA, 20 bp, Artificial Sequence
  Description of Artificial Sequence: Synthetic oligonucleotide
  Target: LAMA2; (-) strand; PAM type: YTN; PAM sequence: CTT
ggcttagaagatgttcacaa

SEQ ID NO: 271354 - DNA, 20 bp, Artificial Sequence
  Description of Artificial Sequence: Synthetic oligonucleotide
  Target: LAMA2; (-) strand; PAM type: YTN; PAM sequence: CTG
aatcccttggcttagaagat

SEQ ID NO: 271355 - DNA, 20 bp, Artificial Sequence
  Description of Artificial Sequence: Synthetic oligonucleotide
  Target: LAMA2; (-) strand; PAM type: YTN; PAM sequence: CTG
gatcaatatccagccagaag

SEQ ID NO: 271356 - DNA, 20 bp, Artificial Sequence
  Description of Artificial Sequence: Synthetic oligonucleotide
  Target: LAMA2; (-) strand; PAM type: YTN; PAM sequence: TTA
aggataatccaggtcatctg

SEQ ID NO: 271357 - DNA, 20 bp, Artificial Sequence
  Description of Artificial Sequence: Synthetic oligonucleotide
  Target: LAMA2; (-) strand; PAM type: YTN; PAM sequence: TTT
aaggataatccaggtcatct

SEQ ID NO: 271358 - DNA, 20 bp, Artificial Sequence
  Description of Artificial Sequence: Synthetic oligonucleotide
  Target: LAMA2; (-) strand; PAM type: YTN; PAM sequence: CTA
gaatttaaggataatccagg

SEQ ID NO: 271359 - DNA, 20 bp, Artificial Sequence
  Description of Artificial Sequence: Synthetic oligonucleotide
  Target: LAMA2; (-) strand; PAM type: YTN; PAM sequence: CTC
agtatacaaatgtcaagtga

SEQ ID NO: 271360 - DNA, 20 bp, Artificial Sequence
  Description of Artificial Sequence: Synthetic oligonucleotide
  Target: LAMA2; (-) strand; PAM type: YTN; PAM sequence: TTA
taataccagaaggtgatcct

SEQ ID NO: 271361 - DNA, 20 bp, Artificial Sequence
  Description of Artificial Sequence: Synthetic oligonucleotide
  Target: LAMA2; (-) strand; PAM type: YTN; PAM sequence: TTT
ataataccagaaggtgatcc

SEQ ID NO: 271362 - DNA, 20 bp, Artificial Sequence
  Description of Artificial Sequence: Synthetic oligonucleotide
  Target: LAMA2; (-) strand; PAM type: YTN; PAM sequence: TTT
tataataccagaaggtgatc

SEQ ID NO: 271363 - DNA, 20 bp, Artificial Sequence
  Description of Artificial Sequence: Synthetic oligonucleotide
  Target: LAMA2; (-) strand; PAM type: YTN; PAM sequence: TTT
ttataataccagaaggtgat

SEQ ID NO: 271364 - DNA, 20 bp, Artificial Sequence
  Description of Artificial Sequence: Synthetic oligonucleotide
  Target: LAMA2; (-) strand; PAM type: YTN; PAM sequence: TTA
agtttttataataccagaag

SEQ ID NO: 271365 - DNA, 20 bp, Artificial Sequence
  Description of Artificial Sequence: Synthetic oligonucleotide
  Target: LAMA2; (-) strand; PAM type: YTN; PAM sequence: CTT
aagtttttataataccagaa

SEQ ID NO: 271366 - DNA, 20 bp, Artificial Sequence
  Description of Artificial Sequence: Synthetic oligonucleotide
  Target: LAMA2; (-) strand; PAM type: YTN; PAM sequence: TTG
agcaaagaggtgaaataact

SEQ ID NO: 271367 - DNA, 20 bp, Artificial Sequence
  Description of Artificial Sequence: Synthetic oligonucleotide
  Target: LAMA2; (-) strand; PAM type: YTN; PAM sequence: TTA
aagaaattgagcaaagaggt

SEQ ID NO: 271368 - DNA, 20 bp, Artificial Sequence
  Description of Artificial Sequence: Synthetic oligonucleotide
  Target: LAMA2; (-) strand; PAM type: YTN; PAM sequence: CTG
acatagttaaagaaattgag

SEQ ID NO: 271369 - DNA, 20 bp, Artificial Sequence
  Description of Artificial Sequence: Synthetic oligonucleotide
  Target: LAMA2; (-) strand; PAM type: YTN; PAM sequence: TTG
gggagcactgacatagttaa

SEQ ID NO: 271370 - DNA, 20 bp, Artificial Sequence
  Description of Artificial Sequence: Synthetic oligonucleotide
  Target: LAMA2; (-) strand; PAM type: YTN; PAM sequence: CTT
ggggagcactgacatagtta

SEQ ID NO: 271371 - DNA, 20 bp, Artificial Sequence
  Description of Artificial Sequence: Synthetic oligonucleotide
  Target: LAMA2; (-) strand; PAM type: YTN; PAM sequence: CTG
aagcttggggagcactgaca

SEQ ID NO: 271372 - DNA, 20 bp, Artificial Sequence
  Description of Artificial Sequence: Synthetic oligonucleotide
  Target: LAMA2; (-) strand; PAM type: YTN; PAM sequence: TTG
gctgaagcttggggagcact

SEQ ID NO: 271373 - DNA, 20 bp, Artificial Sequence
  Description of Artificial Sequence: Synthetic oligonucleotide
  Target: LAMA2; (-) strand; PAM type: YTN; PAM sequence: TTT
ggctgaagcttggggagcac

SEQ ID NO: 271374 - DNA, 20 bp, Artificial Sequence
  Description of Artificial Sequence: Synthetic oligonucleotide
  Target: LAMA2; (-) strand; PAM type: YTN; PAM sequence: CTT
tggctgaagcttggggagca

SEQ ID NO: 271375 - DNA, 20 bp, Artificial Sequence
  Description of Artificial Sequence: Synthetic oligonucleotide
  Target: LAMA2; (-) strand; PAM type: YTN; PAM sequence: TTG
atggtctttggctgaagctt

SEQ ID NO: 271376 - DNA, 20 bp, Artificial Sequence
  Description of Artificial Sequence: Synthetic oligonucleotide
  Target: LAMA2; (-) strand; PAM type: YTN; PAM sequence: CTT
gatggtctttggctgaagct

SEQ ID NO: 271377 - DNA, 20 bp, Artificial Sequence
  Description of Artificial Sequence: Synthetic oligonucleotide
  Target: LAMA2; (-) strand; PAM type: YTN; PAM sequence: TTC
catcacatgtgtgtccttga

SEQ ID NO: 271378 - DNA, 20 bp, Artificial Sequence
  Description of Artificial Sequence: Synthetic oligonucleotide
  Target: LAMA2; (-) strand; PAM type: YTN; PAM sequence: TTG
ttccatcacatgtgtgtcct

SEQ ID NO: 271379 - DNA, 20 bp, Artificial Sequence
  Description of Artificial Sequence: Synthetic oligonucleotide
  Target: LAMA2; (-) strand; PAM type: YTN; PAM sequence: TTT
gttccatcacatgtgtgtcc

SEQ ID NO: 271380 - DNA, 20 bp, Artificial Sequence
  Description of Artificial Sequence: Synthetic oligonucleotide
  Target: LAMA2; (-) strand; PAM type: YTN; PAM sequence: CTT
tgttccatcacatgtgtgtc

SEQ ID NO: 271381 - DNA, 20 bp, Artificial Sequence
  Description of Artificial Sequence: Synthetic oligonucleotide
  Target: LAMA2; (-) strand; PAM type: YTN; PAM sequence: TTA
ataaatcccactttgttcca

SEQ ID NO: 271382 - DNA, 20 bp, Artificial Sequence
  Description of Artificial Sequence: Synthetic oligonucleotide
  Target: LAMA2; (-) strand; PAM type: YTN; PAM sequence: TTG
caacaagttaataaatccca

SEQ ID NO: 271383 - DNA, 20 bp, Artificial Sequence
  Description of Artificial Sequence: Synthetic oligonucleotide
  Target: LAMA2; (-) strand; PAM type: YTN; PAM sequence: TTG
ttgcaacaagttaataaatc

SEQ ID NO: 271384 - DNA, 20 bp, Artificial Sequence
  Description of Artificial Sequence: Synthetic oligonucleotide
  Target: LAMA2; (-) strand; PAM type: YTN; PAM sequence: CTT
gttgcaacaagttaataaat

SEQ ID NO: 271385 - DNA, 20 bp, Artificial Sequence
  Description of Artificial Sequence: Synthetic oligonucleotide
  Target: LAMA2; (-) strand; PAM type: YTN; PAM sequence: TTC
agtgccccttgttgcaacaa

SEQ ID NO: 271386 - DNA, 20 bp, Artificial Sequence
  Description of Artificial Sequence: Synthetic oligonucleotide
  Target: LAMA2; (-) strand; PAM type: YTN; PAM sequence: TTC
ccccatggtgttcagtgccc

SEQ ID NO: 271387 - DNA, 20 bp, Artificial Sequence
  Description of Artificial Sequence: Synthetic oligonucleotide
  Target: LAMA2; (-) strand; PAM type: YTN; PAM sequence: TTG
agacagcccacaattccccc

SEQ ID NO: 271388 - DNA, 20 bp, Artificial Sequence
  Description of Artificial Sequence: Synthetic oligonucleotide
  Target: LAMA2; (-) strand; PAM type: YTN; PAM sequence: TTA
ttgagacagcccacaattcc

SEQ ID NO: 271389 - DNA, 20 bp, Artificial Sequence
  Description of Artificial Sequence: Synthetic oligonucleotide
  Target: LAMA2; (-) strand; PAM type: YTN; PAM sequence: CTT
attgagacagcccacaattc

SEQ ID NO: 271390 - DNA, 20 bp, Artificial Sequence
  Description of Artificial Sequence: Synthetic oligonucleotide
  Target: LAMA2; (-) strand; PAM type: YTN; PAM sequence: TTC
ttattgagacagcccacaat

SEQ ID NO: 271391 - DNA, 20 bp, Artificial Sequence
  Description of Artificial Sequence: Synthetic oligonucleotide
  Target: LAMA2; (-) strand; PAM type: YTN; PAM sequence: CTT
cttattgagacagcccacaa

SEQ ID NO: 271392 - DNA, 20 bp, Artificial Sequence
  Description of Artificial Sequence: Synthetic oligonucleotide
  Target: LAMA2; (-) strand; PAM type: YTN; PAM sequence: CTA
acaccttcttattgagacag

SEQ ID NO: 271393 - DNA, 20 bp, Artificial Sequence
  Description of Artificial Sequence: Synthetic oligonucleotide
  Target: LAMA2; (-) strand; PAM type: YTN; PAM sequence: TTC
ctaacaccttcttattgaga

SEQ ID NO: 271394 - DNA, 20 bp, Artificial Sequence
  Description of Artificial Sequence: Synthetic oligonucleotide
  Target: LAMA2; (-) strand; PAM type: YTN; PAM sequence: TTA
ttcctaacaccttcttattg

SEQ ID NO: 271395 - DNA, 20 bp, Artificial Sequence
  Description of Artificial Sequence: Synthetic oligonucleotide
  Target: LAMA2; (-) strand; PAM type: YTN; PAM sequence: CTA
gaagttattcctaacacctt

SEQ ID NO: 271396 - DNA, 20 bp, Artificial Sequence
  Description of Artificial Sequence: Synthetic oligonucleotide
  Target: LAMA2; (-) strand; PAM type: YTN; PAM sequence: CTC
aaatactagaagttattcct

SEQ ID NO: 271397 - DNA, 20 bp, Artificial Sequence
  Description of Artificial Sequence: Synthetic oligonucleotide
  Target: LAMA2; (-) strand; PAM type: YTN; PAM sequence: CTA
gcacagcctcaaatactaga

SEQ ID NO: 271398 - DNA, 20 bp, Artificial Sequence
  Description of Artificial Sequence: Synthetic oligonucleotide
  Target: LAMA2; (-) strand; PAM type: YTN; PAM sequence: TTA
tctagcacagcctcaaatac

SEQ ID NO: 271399 - DNA, 20 bp, Artificial Sequence
  Description of Artificial Sequence: Synthetic oligonucleotide
  Target: LAMA2; (-) strand; PAM type: YTN; PAM sequence: TTA
agttatctagcacagcctca

SEQ ID NO: 271400 - DNA, 20 bp, Artificial Sequence
  Description of Artificial Sequence: Synthetic oligonucleotide
  Target: LAMA2; (-) strand; PAM type: YTN; PAM sequence: CTT
aagttatctagcacagcctc

SEQ ID NO: 271401 - DNA, 20 bp, Artificial Sequence
  Description of Artificial Sequence: Synthetic oligonucleotide
  Target: LAMA2; (-) strand; PAM type: YTN; PAM sequence: CTA
accttaagttatctagcaca

SEQ ID NO: 271402 - DNA, 20 bp, Artificial Sequence
  Description of Artificial Sequence: Synthetic oligonucleotide
  Target: LAMA2; (-) strand; PAM type: YTN; PAM sequence: TTG
agtgctaaccttaagttatc

SEQ ID NO: 271403 - DNA, 20 bp, Artificial Sequence
  Description of Artificial Sequence: Synthetic oligonucleotide
  Target: LAMA2; (-) strand; PAM type: YTN; PAM sequence: CTG
aatagcacccagttgagtgc

SEQ ID NO: 271404 - DNA, 20 bp, Artificial Sequence
  Description of Artificial Sequence: Synthetic oligonucleotide
  Target: LAMA2; (-) strand; PAM type: YTN; PAM sequence: TTC
tgaatagcacccagttgagt

SEQ ID NO: 271405 - DNA, 20 bp, Artificial Sequence
  Description of Artificial Sequence: Synthetic oligonucleotide
  Target: LAMA2; (-) strand; PAM type: YTN; PAM sequence: CTT
ctgaatagcacccagttgag

SEQ ID NO: 271406 - DNA, 20 bp, Artificial Sequence
  Description of Artificial Sequence: Synthetic oligonucleotide
  Target: LAMA2; (-) strand; PAM type: YTN; PAM sequence: CTC
ccacttctgaatagcaccca

SEQ ID NO: 271407 - DNA, 20 bp, Artificial Sequence
  Description of Artificial Sequence: Synthetic oligonucleotide
  Target: LAMA2; (-) strand; PAM type: YTN; PAM sequence: TTA
ctcccacttctgaatagcac

SEQ ID NO: 271408 - DNA, 20 bp, Artificial Sequence
  Description of Artificial Sequence: Synthetic oligonucleotide
  Target: LAMA2; (-) strand; PAM type: YTN; PAM sequence: CTC
acagaattactcccacttct

SEQ ID NO: 271409 - DNA, 20 bp, Artificial Sequence
  Description of Artificial Sequence: Synthetic oligonucleotide
  Target: LAMA2; (-) strand; PAM type: YTN; PAM sequence: TTC
acaaaatactcacagaatta

SEQ ID NO: 271410 - DNA, 20 bp, Artificial Sequence
  Description of Artificial Sequence: Synthetic oligonucleotide
  Target: LAMA2; (-) strand; PAM type: YTN; PAM sequence: CTA
gataggattcacaaaatact

SEQ ID NO: 271411 - DNA, 20 bp, Artificial Sequence
  Description of Artificial Sequence: Synthetic oligonucleotide
  Target: LAMA2; (-) strand; PAM type: YTN; PAM sequence: CTC
tagataggattcacaaaata

SEQ ID NO: 271412 - DNA, 20 bp, Artificial Sequence
  Description of Artificial Sequence: Synthetic oligonucleotide
  Target: LAMA2; (-) strand; PAM type: YTN; PAM sequence: TTC
cctctagataggattcacaa

SEQ ID NO: 271413 - DNA, 20 bp, Artificial Sequence
  Description of Artificial Sequence: Synthetic oligonucleotide
  Target: LAMA2; (-) strand; PAM type: YTN; PAM sequence: CTT
ccctctagataggattcaca

SEQ ID NO: 271414 - DNA, 20 bp, Artificial Sequence
  Description of Artificial Sequence: Synthetic oligonucleotide
  Target: LAMA2; (-) strand; PAM type: YTN; PAM sequence: TTC
cttccctctagataggattc

SEQ ID NO: 271415 - DNA, 20 bp, Artificial Sequence
  Description of Artificial Sequence: Synthetic oligonucleotide
  Target: LAMA2; (-) strand; PAM type: YTN; PAM sequence: CTT
ccttccctctagataggatt

SEQ ID NO: 271416 - DNA, 20 bp, Artificial Sequence
  Description of Artificial Sequence: Synthetic oligonucleotide
  Target: LAMA2; (-) strand; PAM type: YTN; PAM sequence: TTC
ttccttccctctagatagga

SEQ ID NO: 271417 - DNA, 20 bp, Artificial Sequence
  Description of Artificial Sequence: Synthetic oligonucleotide
  Target: LAMA2; (-) strand; PAM type: YTN; PAM sequence: CTG
ttcttccttccctctagata

SEQ ID NO: 271418 - DNA, 20 bp, Artificial Sequence
  Description of Artificial Sequence: Synthetic oligonucleotide
  Target: LAMA2; (-) strand; PAM type: YTN; PAM sequence: CTC
tgttcttccttccctctaga

SEQ ID NO: 271419 - DNA, 20 bp, Artificial Sequence
  Description of Artificial Sequence: Synthetic oligonucleotide
  Target: LAMA2; (-) strand; PAM type: YTN; PAM sequence: CTC
cctctgttcttccttccctc

SEQ ID NO: 271420 - DNA, 20 bp, Artificial Sequence
  Description of Artificial Sequence: Synthetic oligonucleotide
  Target: LAMA2; (-) strand; PAM type: YTN; PAM sequence: TTA
tcctccctctgttcttcctt

SEQ ID NO: 271421 - DNA, 20 bp, Artificial Sequence
  Description of Artificial Sequence: Synthetic oligonucleotide
  Target: LAMA2; (-) strand; PAM type: YTN; PAM sequence: TTT
atcctccctctgttcttcct

SEQ ID NO: 271422 - DNA, 20 bp, Artificial Sequence
  Description of Artificial Sequence: Synthetic oligonucleotide
  Target: LAMA2; (-) strand; PAM type: YTN; PAM sequence: CTT
tatcctccctctgttcttcc

SEQ ID NO: 271423 - DNA, 20 bp, Artificial Sequence
  Description of Artificial Sequence: Synthetic oligonucleotide
  Target: LAMA2; (-) strand; PAM type: YTN; PAM sequence: TTA
atcatagctttatcctccct

SEQ ID NO: 271424 - DNA, 20 bp, Artificial Sequence
  Description of Artificial Sequence: Synthetic oligonucleotide
  Target: LAMA2; (-) strand; PAM type: YTN; PAM sequence: TTA
ttaatcatagctttatcctc

SEQ ID NO: 271425 - DNA, 20 bp, Artificial Sequence
  Description of Artificial Sequence: Synthetic oligonucleotide
  Target: LAMA2; (-) strand; PAM type: YTN; PAM sequence: CTT
attaatcatagctttatcct

SEQ ID NO: 271426 - DNA, 20 bp, Artificial Sequence
  Description of Artificial Sequence: Synthetic oligonucleotide
  Target: LAMA2; (-) strand; PAM type: YTN; PAM sequence: CTC
cttattaatcatagctttat

SEQ ID NO: 271427 - DNA, 20 bp, Artificial Sequence
  Description of Artificial Sequence: Synthetic oligonucleotide
  Target: LAMA2; (-) strand; PAM type: YTN; PAM sequence: CTG
cctccttattaatcatagct

SEQ ID NO: 271428 - DNA, 20 bp, Artificial Sequence
  Description of Artificial Sequence: Synthetic oligonucleotide
  Target: LAMA2; (-) strand; PAM type: YTN; PAM sequence: CTA
atatgaatgaacactgcctc

SEQ ID NO: 271429 - DNA, 20 bp, Artificial Sequence
  Description of Artificial Sequence: Synthetic oligonucleotide
  Target: LAMA2; (-) strand; PAM type: YTN; PAM sequence: CTG
gctaatatgaatgaacactg

SEQ ID NO: 271430 - DNA, 20 bp, Artificial Sequence
  Description of Artificial Sequence: Synthetic oligonucleotide
  Target: LAMA2; (-) strand; PAM type: YTN; PAM sequence: TTC
ctggctaatatgaatgaaca

SEQ ID NO: 271431 - DNA, 20 bp, Artificial Sequence
  Description of Artificial Sequence: Synthetic oligonucleotide
  Target: LAMA2; (-) strand; PAM type: YTN; PAM sequence: TTT
cctggctaatatgaatgaac

SEQ ID NO: 271432 - DNA, 20 bp, Artificial Sequence
  Description of Artificial Sequence: Synthetic oligonucleotide
  Target: LAMA2; (-) strand; PAM type: YTN; PAM sequence: CTC
ccatttcctggctaatatga

SEQ ID NO: 271433 - DNA, 20 bp, Artificial Sequence
  Description of Artificial Sequence: Synthetic oligonucleotide
  Target: LAMA2; (-) strand; PAM type: YTN; PAM sequence: CTA
ccccaacctcccatttcctg

SEQ ID NO: 271434 - DNA, 20 bp, Artificial Sequence
  Description of Artificial Sequence: Synthetic oligonucleotide
  Target: LAMA2; (-) strand; PAM type: YTN; PAM sequence: TTG
tgtagaccacaaaactaccc

SEQ ID NO: 271435 - DNA, 20 bp, Artificial Sequence
  Description of Artificial Sequence: Synthetic oligonucleotide
  Target: LAMA2; (-) strand; PAM type: YTN; PAM sequence: TTT
gtgtagaccacaaaactacc

SEQ ID NO: 271436 - DNA, 20 bp, Artificial Sequence
  Description of Artificial Sequence: Synthetic oligonucleotide
  Target: LAMA2; (-) strand; PAM type: YTN; PAM sequence: TTT
tgtgtagaccacaaaactac

SEQ ID NO: 271437 - DNA, 20 bp, Artificial Sequence
  Description of Artificial Sequence: Synthetic oligonucleotide
  Target: LAMA2; (-) strand; PAM type: YTN; PAM sequence: CTA
agcgcagacaaaaccatagc

SEQ ID NO: 271438 - DNA, 20 bp, Artificial Sequence
  Description of Artificial Sequence: Synthetic oligonucleotide
  Target: LAMA2; (-) strand; PAM type: YTN; PAM sequence: CTG
taatgtctaagcgcagacaa

SEQ ID NO: 271439 - DNA, 20 bp, Artificial Sequence
  Description of Artificial Sequence: Synthetic oligonucleotide
  Target: LAMA2; (-) strand; PAM type: YTN; PAM sequence: CTA
ccctgtaatgtctaagcgca

SEQ ID NO: 271440 - DNA, 20 bp, Artificial Sequence
  Description of Artificial Sequence: Synthetic oligonucleotide
  Target: LAMA2; (-) strand; PAM type: YTN; PAM sequence: CTG
aaccagtgatgaatgaaaca

SEQ ID NO: 271441 - DNA, 20 bp, Artificial Sequence
  Description of Artificial Sequence: Synthetic oligonucleotide
  Target: LAMA2; (-) strand; PAM type: YTN; PAM sequence: CTC
tgaaccagtgatgaatgaaa

SEQ ID NO: 271442 - DNA, 20 bp, Artificial Sequence
  Description of Artificial Sequence: Synthetic oligonucleotide
  Target: LAMA2; (-) strand; PAM type: YTN; PAM sequence: TTA
gacaaggtcactctgaacca

SEQ ID NO: 271443 - DNA, 20 bp, Artificial Sequence
  Description of Artificial Sequence: Synthetic oligonucleotide
  Target: LAMA2; (-) strand; PAM type: YTN; PAM sequence: CTA
aattagacaaggtcactctg

SEQ ID NO: 271444 - DNA, 20 bp, Artificial Sequence
  Description of Artificial Sequence: Synthetic oligonucleotide
  Target: LAMA2; (-) strand; PAM type: YTN; PAM sequence: CTC
ataggacactaaattagaca

SEQ ID NO: 271445 - DNA, 20 bp, Artificial Sequence
  Description of Artificial Sequence: Synthetic oligonucleotide
  Target: LAMA2; (-) strand; PAM type: YTN; PAM sequence: CTA
tggaacataaataatctcat

SEQ ID NO: 271446 - DNA, 20 bp, Artificial Sequence
  Description of Artificial Sequence: Synthetic oligonucleotide
  Target: LAMA2; (-) strand; PAM type: YTN; PAM sequence: TTC
ctatggaacataaataatct

SEQ ID NO: 271447 - DNA, 20 bp, Artificial Sequence
  Description of Artificial Sequence: Synthetic oligonucleotide
  Target: LAMA2; (-) strand; PAM type: YTN; PAM sequence: TTT
cctatggaacataaataatc

SEQ ID NO: 271448 - DNA, 20 bp, Artificial Sequence
  Description of Artificial Sequence: Synthetic oligonucleotide
  Target: LAMA2; (-) strand; PAM type: YTN; PAM sequence: TTT
tcctatggaacataaataat

SEQ ID NO: 271449 - DNA, 20 bp, Artificial Sequence
  Description of Artificial Sequence: Synthetic oligonucleotide
  Target: LAMA2; (-) strand; PAM type: YTN; PAM sequence: TTT
ttcctatggaacataaataa

SEQ ID NO: 271450 - DNA, 20 bp, Artificial Sequence
  Description of Artificial Sequence: Synthetic oligonucleotide
  Target: LAMA2; (-) strand; PAM type: YTN; PAM sequence: TTT
tttcctatggaacataaata

SEQ ID NO: 271451 - DNA, 20 bp, Artificial Sequence
  Description of Artificial Sequence: Synthetic oligonucleotide
  Target: LAMA2; (-) strand; PAM type: YTN; PAM sequence: TTT
ttttcctatggaacataaat

SEQ ID NO: 271452 - DNA, 20 bp, Artificial Sequence
  Description of Artificial Sequence: Synthetic oligonucleotide
  Target: LAMA2; (-) strand; PAM type: YTN; PAM sequence: CTA
acagcagggccatatttttt

SEQ ID NO: 271453 - DNA, 20 bp, Artificial Sequence
  Description of Artificial Sequence: Synthetic oligonucleotide
  Target: LAMA2; (-) strand; PAM type: YTN; PAM sequence: CTG
gcctaacagcagggccatat

SEQ ID NO: 271454 - DNA, 20 bp, Artificial Sequence
  Description of Artificial Sequence: Synthetic oligonucleotide
  Target: LAMA2; (-) strand; PAM type: YTN; PAM sequence: CTA
ggaactggcctaacagcagg

SEQ ID NO: 271455 - DNA, 20 bp, Artificial Sequence
  Description of Artificial Sequence: Synthetic oligonucleotide
  Target: LAMA2; (-) strand; PAM type: YTN; PAM sequence: TTG
ctaggaactggcctaacagc

SEQ ID NO: 271456 - DNA, 20 bp, Artificial Sequence
  Description of Artificial Sequence: Synthetic oligonucleotide
  Target: LAMA2; (-) strand; PAM type: YTN; PAM sequence: CTC
ggtgttgctaggaactggcc

SEQ ID NO: 271457 - DNA, 20 bp, Artificial Sequence
  Description of Artificial Sequence: Synthetic oligonucleotide
  Target: LAMA2; (-) strand; PAM type: YTN; PAM sequence: CTG
tcctcggtgttgctaggaac

SEQ ID NO: 271458 - DNA, 20 bp, Artificial Sequence
  Description of Artificial Sequence: Synthetic oligonucleotide
  Target: LAMA2; (-) strand; PAM type: YTN; PAM sequence: CTG
gcctgtcctcggtgttgcta

SEQ ID NO: 271459 - DNA, 20 bp, Artificial Sequence
  Description of Artificial Sequence: Synthetic oligonucleotide
  Target: LAMA2; (-) strand; PAM type: YTN; PAM sequence: CTA
actggcctgtcctcggtgtt

SEQ ID NO: 271460 - DNA, 20 bp, Artificial Sequence
  Description of Artificial Sequence: Synthetic oligonucleotide
  Target: LAMA2; (-) strand; PAM type: YTN; PAM sequence: CTA
actaactggcctgtcctcgg

SEQ ID NO: 271461 - DNA, 20 bp, Artificial Sequence
  Description of Artificial Sequence: Synthetic oligonucleotide
  Target: LAMA2; (-) strand; PAM type: YTN; PAM sequence: CTA
ggcgctaactaactggcctg

SEQ ID NO: 271462 - DNA, 20 bp, Artificial Sequence
  Description of Artificial Sequence: Synthetic oligonucleotide
  Target: LAMA2; (-) strand; PAM type: YTN; PAM sequence: CTG
gctaggcgctaactaactgg

SEQ ID NO: 271463 - DNA, 20 bp, Artificial Sequence
  Description of Artificial Sequence: Synthetic oligonucleotide
  Target: LAMA2; (-) strand; PAM type: YTN; PAM sequence: TTA
acatagagacctggctaggc

SEQ ID NO: 271464 - DNA, 20 bp, Artificial Sequence
  Description of Artificial Sequence: Synthetic oligonucleotide
  Target: LAMA2; (-) strand; PAM type: YTN; PAM sequence: CTT
aacatagagacctggctagg

SEQ ID NO: 271465 - DNA, 20 bp, Artificial Sequence
  Description of Artificial Sequence: Synthetic oligonucleotide
  Target: LAMA2; (-) strand; PAM type: YTN; PAM sequence: TTA
acagagacacagatcacagg

SEQ ID NO: 271466 - DNA, 20 bp, Artificial Sequence
  Description of Artificial Sequence: Synthetic oligonucleotide
  Target: LAMA2; (-) strand; PAM type: YTN; PAM sequence: TTC
caattaacagagacacagat

SEQ ID NO: 271467 - DNA, 20 bp, Artificial Sequence
  Description of Artificial Sequence: Synthetic oligonucleotide
  Target: LAMA2; (-) strand; PAM type: YTN; PAM sequence: CTC
ccattccaattaacagagac

SEQ ID NO: 271468 - DNA, 20 bp, Artificial Sequence
  Description of Artificial Sequence: Synthetic oligonucleotide
  Target: LAMA2; (-) strand; PAM type: YTN; PAM sequence: TTA
aggctcccattccaattaac

SEQ ID NO: 271469 - DNA, 20 bp, Artificial Sequence
  Description of Artificial Sequence: Synthetic oligonucleotide
  Target: LAMA2; (-) strand; PAM type: YTN; PAM sequence: TTT
aaggctcccattccaattaa

SEQ ID NO: 271470 - DNA, 20 bp, Artificial Sequence
  Description of Artificial Sequence: Synthetic oligonucleotide
  Target: LAMA2; (-) strand; PAM type: YTN; PAM sequence: CTG
gcccatttaaggctcccatt

SEQ ID NO: 271471 - DNA, 20 bp, Artificial Sequence
  Description of Artificial Sequence: Synthetic oligonucleotide
  Target: LAMA2; (-) strand; PAM type: YTN; PAM sequence: TTG
cctggcccatttaaggctcc

SEQ ID NO: 271472 - DNA, 20 bp, Artificial Sequence
  Description of Artificial Sequence: Synthetic oligonucleotide
  Target: LAMA2; (-) strand; PAM type: YTN; PAM sequence: CTT
gcctggcccatttaaggctc

SEQ ID NO: 271473 - DNA, 20 bp, Artificial Sequence
  Description of Artificial Sequence: Synthetic oligonucleotide
  Target: LAMA2; (-) strand; PAM type: YTN; PAM sequence: CTC
cttgcctggcccatttaagg

SEQ ID NO: 271474 - DNA, 20 bp, Artificial Sequence
  Description of Artificial Sequence: Synthetic oligonucleotide
  Target: LAMA2; (-) strand; PAM type: YTN; PAM sequence: TTA
agataaactccttgcctggc

SEQ ID NO: 271475 - DNA, 20 bp, Artificial Sequence
  Description of Artificial Sequence: Synthetic oligonucleotide
  Target: LAMA2; (-) strand; PAM type: YTN; PAM sequence: TTA
aaaatgtgcacgagatcaca

SEQ ID NO: 271476 - DNA, 20 bp, Artificial Sequence
  Description of Artificial Sequence: Synthetic oligonucleotide
  Target: LAMA2; (-) strand; PAM type: YTN; PAM sequence: TTG
aagacagttaaaaatgtgca

SEQ ID NO: 271477 - DNA, 20 bp, Artificial Sequence
  Description of Artificial Sequence: Synthetic oligonucleotide
  Target: LAMA2; (-) strand; PAM type: YTN; PAM sequence: CTT
gaagacagttaaaaatgtgc

SEQ ID NO: 271478 - DNA, 20 bp, Artificial Sequence
  Description of Artificial Sequence: Synthetic oligonucleotide
  Target: LAMA2; (-) strand; PAM type: YTN; PAM sequence: CTG
tcttgaagacagttaaaaat

SEQ ID NO: 271479 - DNA, 20 bp, Artificial Sequence
  Description of Artificial Sequence: Synthetic oligonucleotide
  Target: LAMA2; (-) strand; PAM type: YTN; PAM sequence: TTC
atgaaagagcaaactgtctt

SEQ ID NO: 271480 - DNA, 20 bp, Artificial Sequence
  Description of Artificial Sequence: Synthetic oligonucleotide
  Target: LAMA2; (-) strand; PAM type: YTN; PAM sequence: TTT
catgaaagagcaaactgtct

SEQ ID NO: 271481 - DNA, 20 bp, Artificial Sequence
  Description of Artificial Sequence: Synthetic oligonucleotide
  Target: LAMA2; (-) strand; PAM type: YTN; PAM sequence: TTC
catttcatgaaagagcaaac

SEQ ID NO: 271482 - DNA, 20 bp, Artificial Sequence
  Description of Artificial Sequence: Synthetic oligonucleotide
  Target: LAMA2; (-) strand; PAM type: YTN; PAM sequence: TTA
ttccatttcatgaaagagca

SEQ ID NO: 271483 - DNA, 20 bp, Artificial Sequence
  Description of Artificial Sequence: Synthetic oligonucleotide
  Target: LAMA2; (-) strand; PAM type: YTN; PAM sequence: CTA
tggggggtaagcattattcc

SEQ ID NO: 271484 - DNA, 20 bp, Artificial Sequence
  Description of Artificial Sequence: Synthetic oligonucleotide
  Target: LAMA2; (-) strand; PAM type: YTN; PAM sequence: CTC
tatggggggtaagcattatt

SEQ ID NO: 271485 - DNA, 20 bp, Artificial Sequence
  Description of Artificial Sequence: Synthetic oligonucleotide
  Target: LAMA2; (-) strand; PAM type: YTN; PAM sequence: TTC
acaacagctctatggggggt

SEQ ID NO: 271486 - DNA, 20 bp, Artificial Sequence
  Description of Artificial Sequence: Synthetic oligonucleotide
  Target: LAMA2; (-) strand; PAM type: YTN; PAM sequence: TTT
cacaacagctctatgggggg

SEQ ID NO: 271487 - DNA, 20 bp, Artificial Sequence
  Description of Artificial Sequence: Synthetic oligonucleotide
  Target: LAMA2; (-) strand; PAM type: YTN; PAM sequence: TTT
tcacaacagctctatggggg

SEQ ID NO: 271488 - DNA, 20 bp, Artificial Sequence
  Description of Artificial Sequence: Synthetic oligonucleotide
  Target: LAMA2; (-) strand; PAM type: YTN; PAM sequence: TTA
attttcacaacagctctatg

SEQ ID NO: 271489 - DNA, 20 bp, Artificial Sequence
  Description of Artificial Sequence: Synthetic oligonucleotide
  Target: LAMA2; (-) strand; PAM type: YTN; PAM sequence: TTT
aattttcacaacagctctat

SEQ ID NO: 271490 - DNA, 20 bp, Artificial Sequence
  Description of Artificial Sequence: Synthetic oligonucleotide
  Target: LAMA2; (-) strand; PAM type: YTN; PAM sequence: TTC
atttaattttcacaacagct

SEQ ID NO: 271491 - DNA, 20 bp, Artificial Sequence
  Description of Artificial Sequence: Synthetic oligonucleotide
  Target: LAMA2; (-) strand; PAM type: YTN; PAM sequence: TTT
catttaattttcacaacagc

SEQ ID NO: 271492 - DNA, 20 bp, Artificial Sequence
  Description of Artificial Sequence: Synthetic oligonucleotide
  Target: LAMA2; (-) strand; PAM type: YTN; PAM sequence: TTT
tcatttaattttcacaacag

SEQ ID NO: 271493 - DNA, 20 bp, Artificial Sequence
  Description of Artificial Sequence: Synthetic oligonucleotide
  Target: LAMA2; (-) strand; PAM type: YTN; PAM sequence: TTT
ttcatttaattttcacaaca

SEQ ID NO: 271494 - DNA, 20 bp, Artificial Sequence
  Description of Artificial Sequence: Synthetic oligonucleotide
  Target: LAMA2; (-) strand; PAM type: YTN; PAM sequence: TTT
tttcatttaattttcacaac

SEQ ID NO: 271495 - DNA, 20 bp, Artificial Sequence
  Description of Artificial Sequence: Synthetic oligonucleotide
  Target: LAMA2; (-) strand; PAM type: YTN; PAM sequence: TTG
ttttttcatttaattttcac

SEQ ID NO: 271496 - DNA, 20 bp, Artificial Sequence
  Description of Artificial Sequence: Synthetic oligonucleotide
  Target: LAMA2; (-) strand; PAM type: YTN; PAM sequence: TTT
gttttttcatttaattttca

SEQ ID NO: 271497 - DNA, 20 bp, Artificial Sequence
  Description of Artificial Sequence: Synthetic oligonucleotide
  Target: LAMA2; (-) strand; PAM type: YTN; PAM sequence: TTT
tgttttttcatttaattttc

SEQ ID NO: 271498 - DNA, 20 bp, Artificial Sequence
  Description of Artificial Sequence: Synthetic oligonucleotide
  Target: LAMA2; (-) strand; PAM type: YTN; PAM sequence: TTA
tgttttgttttttcatttaa

SEQ ID NO: 271499 - DNA, 20 bp, Artificial Sequence
  Description of Artificial Sequence: Synthetic oligonucleotide
  Target: LAMA2; (-) strand; PAM type: YTN; PAM sequence: TTT
atgttttgttttttcattta

SEQ ID NO: 271500 - DNA, 20 bp, Artificial Sequence
  Description of Artificial Sequence: Synthetic oligonucleotide
  Target: LAMA2; (-) strand; PAM type: YTN; PAM sequence: TTT
tatgttttgttttttcattt

SEQ ID NO: 271501 - DNA, 20 bp, Artificial Sequence
  Description of Artificial Sequence: Synthetic oligonucleotide
  Target: LAMA2; (-) strand; PAM type: YTN; PAM sequence: TTT
ttatgttttgttttttcatt

SEQ ID NO: 271502 - DNA, 20 bp, Artificial Sequence
  Description of Artificial Sequence: Synthetic oligonucleotide
  Target: LAMA2; (-) strand; PAM type: YTN; PAM sequence: CTT
tttatgttttgttttttcat

SEQ ID NO: 271503 - DNA, 20 bp, Artificial Sequence
  Description of Artificial Sequence: Synthetic oligonucleotide
  Target: LAMA2; (-) strand; PAM type: YTN; PAM sequence: CTA
tgtgccaggctttttatgtt

SEQ ID NO: 271504 - DNA, 20 bp, Artificial Sequence
  Description of Artificial Sequence: Synthetic oligonucleotide
  Target: LAMA2; (-) strand; PAM type: YTN; PAM sequence: TTA
ctatgtgccaggctttttat

SEQ ID NO: 271505 - DNA, 20 bp, Artificial Sequence
  Description of Artificial Sequence: Synthetic oligonucleotide
  Target: LAMA2; (-) strand; PAM type: YTN; PAM sequence: TTG
agaaattactatgtgccagg

SEQ ID NO: 271506 - DNA, 20 bp, Artificial Sequence
  Description of Artificial Sequence: Synthetic oligonucleotide
  Target: LAMA2; (-) strand; PAM type: YTN; PAM sequence: TTA
ttgagaaattactatgtgcc

SEQ ID NO: 271507 - DNA, 20 bp, Artificial Sequence
  Description of Artificial Sequence: Synthetic oligonucleotide
  Target: LAMA2; (-) strand; PAM type: YTN; PAM sequence: CTT
attgagaaattactatgtgc

SEQ ID NO: 271508 - DNA, 20 bp, Artificial Sequence
  Description of Artificial Sequence: Synthetic oligonucleotide
  Target: LAMA2; (-) strand; PAM type: YTN; PAM sequence: TTG
cagtgacttattgagaaatt

SEQ ID NO: 271509 - DNA, 20 bp, Artificial Sequence
  Description of Artificial Sequence: Synthetic oligonucleotide
  Target: LAMA2; (-) strand; PAM type: YTN; PAM sequence: TTC
aggcaaataataaaaattgc

SEQ ID NO: 271510 - DNA, 20 bp, Artificial Sequence
  Description of Artificial Sequence: Synthetic oligonucleotide
  Target: LAMA2; (-) strand; PAM type: YTN; PAM sequence: TTG
agtgtcatgccaaatattca

SEQ ID NO: 271511 - DNA, 20 bp, Artificial Sequence
  Description of Artificial Sequence: Synthetic oligonucleotide
  Target: LAMA2; (-) strand; PAM type: YTN; PAM sequence: TTA
cacattgagtgtcatgccaa

SEQ ID NO: 271512 - DNA, 20 bp, Artificial Sequence
  Description of Artificial Sequence: Synthetic oligonucleotide
  Target: LAMA2; (-) strand; PAM type: YTN; PAM sequence: CTT
acacattgagtgtcatgcca

SEQ ID NO: 271513 - DNA, 20 bp, Artificial Sequence
  Description of Artificial Sequence: Synthetic oligonucleotide
  Target: LAMA2; (-) strand; PAM type: YTN; PAM sequence: CTG
ggcacttacacattgagtgt

SEQ ID NO: 271514 - DNA, 20 bp, Artificial Sequence
  Description of Artificial Sequence: Synthetic oligonucleotide
  Target: LAMA2; (-) strand; PAM type: YTN; PAM sequence: TTC
aactgggcacttacacattg

SEQ ID NO: 271515 - DNA, 20 bp, Artificial Sequence
  Description of Artificial Sequence: Synthetic oligonucleotide
  Target: LAMA2; (-) strand; PAM type: YTN; PAM sequence: TTT
caactgggcacttacacatt

SEQ ID NO: 271516 - DNA, 20 bp, Artificial Sequence
  Description of Artificial Sequence: Synthetic oligonucleotide
  Target: LAMA2; (-) strand; PAM type: YTN; PAM sequence: CTA
tttcaactgggcacttacac

SEQ ID NO: 271517 - DNA, 20 bp, Artificial Sequence
  Description of Artificial Sequence: Synthetic oligonucleotide
  Target: LAMA2; (-) strand; PAM type: YTN; PAM sequence: TTC
aaagaaaagataaggaaact

SEQ ID NO: 271518 - DNA, 20 bp, Artificial Sequence
  Description of Artificial Sequence: Synthetic oligonucleotide
  Target: LAMA2; (-) strand; PAM type: YTN; PAM sequence: CTT
caaagaaaagataaggaaac

SEQ ID NO: 271519 - DNA, 20 bp, Artificial Sequence
  Description of Artificial Sequence: Synthetic oligonucleotide
  Target: LAMA2; (-) strand; PAM type: YTN; PAM sequence: CTC
accttcaaagaaaagataag

SEQ ID NO: 271520 - DNA, 20 bp, Artificial Sequence
  Description of Artificial Sequence: Synthetic oligonucleotide
  Target: LAMA2; (-) strand; PAM type: YTN; PAM sequence: TTC
tcaccttcaaagaaaagata

SEQ ID NO: 271521 - DNA, 20 bp, Artificial Sequence
  Description of Artificial Sequence: Synthetic oligonucleotide
  Target: LAMA2; (-) strand; PAM type: YTN; PAM sequence: CTT
ctcaccttcaaagaaaagat

SEQ ID NO: 271522 - DNA, 20 bp, Artificial Sequence
  Description of Artificial Sequence: Synthetic oligonucleotide
  Target: LAMA2; (-) strand; PAM type: YTN; PAM sequence: TTA
gccttctcaccttcaaagaa

SEQ ID NO: 271523 - DNA, 20 bp, Artificial Sequence
  Description of Artificial Sequence: Synthetic oligonucleotide
  Target: LAMA2; (-) strand; PAM type: YTN; PAM sequence: CTT
agccttctcaccttcaaaga

SEQ ID NO: 271524 - DNA, 20 bp, Artificial Sequence
  Description of Artificial Sequence: Synthetic oligonucleotide
  Target: LAMA2; (-) strand; PAM type: YTN; PAM sequence: TTG
tatataaaaggaacttagcc

SEQ ID NO: 271525 - DNA, 20 bp, Artificial Sequence
  Description of Artificial Sequence: Synthetic oligonucleotide
  Target: LAMA2; (-) strand; PAM type: YTN; PAM sequence: TTT
gtatataaaaggaacttagc

SEQ ID NO: 271526 - DNA, 20 bp, Artificial Sequence
  Description of Artificial Sequence: Synthetic oligonucleotide
  Target: LAMA2; (-) strand; PAM type: YTN; PAM sequence: TTT
tgtatataaaaggaacttag

SEQ ID NO: 271527 - DNA, 20 bp, Artificial Sequence
  Description of Artificial Sequence: Synthetic oligonucleotide
  Target: LAMA2; (-) strand; PAM type: YTN; PAM sequence: TTT
ttgtatataaaaggaactta

SEQ ID NO: 271528 - DNA, 20 bp, Artificial Sequence
  Description of Artificial Sequence: Synthetic oligonucleotide
  Target: LAMA2; (-) strand; PAM type: YTN; PAM sequence: TTC
gacagaacacatttttgtat

SEQ ID NO: 271529 - DNA, 20 bp, Artificial Sequence
  Description of Artificial Sequence: Synthetic oligonucleotide
  Target: LAMA2; (-) strand; PAM type: YTN; PAM sequence: TTG
cagtgatagtgttcgacaga

SEQ ID NO: 271530 - DNA, 20 bp, Artificial Sequence
  Description of Artificial Sequence: Synthetic oligonucleotide
  Target: LAMA2; (-) strand; PAM type: YTN; PAM sequence: CTT
gcagtgatagtgttcgacag

SEQ ID NO: 271531 - DNA, 20 bp, Artificial Sequence
  Description of Artificial Sequence: Synthetic oligonucleotide
  Target: LAMA2; (-) strand; PAM type: YTN; PAM sequence: TTA
gtaaatggccttgcagtgat

SEQ ID NO: 271532 - DNA, 20 bp, Artificial Sequence
  Description of Artificial Sequence: Synthetic oligonucleotide
  Target: LAMA2; (-) strand; PAM type: YTN; PAM sequence: TTT
agtaaatggccttgcagtga

SEQ ID NO: 271533 - DNA, 20 bp, Artificial Sequence
  Description of Artificial Sequence: Synthetic oligonucleotide
  Target: LAMA2; (-) strand; PAM type: YTN; PAM sequence: TTT
tagtaaatggccttgcagtg

SEQ ID NO: 271534 - DNA, 20 bp, Artificial Sequence
  Description of Artificial Sequence: Synthetic oligonucleotide
  Target: LAMA2; (-) strand; PAM type: YTN; PAM sequence: TTT
ttagtaaatggccttgcagt

SEQ ID NO: 271535 - DNA, 20 bp, Artificial Sequence
  Description of Artificial Sequence: Synthetic oligonucleotide
  Target: LAMA2; (-) strand; PAM type: YTN; PAM sequence: TTC
catcccataaacatttttag

SEQ ID NO: 271536 - DNA, 20 bp, Artificial Sequence
  Description of Artificial Sequence: Synthetic oligonucleotide
  Target: LAMA2; (-) strand; PAM type: YTN; PAM sequence: CTG
aaaaagattccatcccataa

SEQ ID NO: 271537 - DNA, 20 bp, Artificial Sequence
  Description of Artificial Sequence: Synthetic oligonucleotide
  Target: LAMA2; (-) strand; PAM type: YTN; PAM sequence: CTG
aggtgacagcaagtgctgaa

SEQ ID NO: 271538 - DNA, 20 bp, Artificial Sequence
  Description of Artificial Sequence: Synthetic oligonucleotide
  Target: LAMA2; (-) strand; PAM type: YTN; PAM sequence: CTG
gggcccgctgaggtgacagc

SEQ ID NO: 271539 - DNA, 20 bp, Artificial Sequence
  Description of Artificial Sequence: Synthetic oligonucleotide
  Target: LAMA2; (-) strand; PAM type: YTN; PAM sequence: CTC
tggggcccgctgaggtgaca

SEQ ID NO: 271540 - DNA, 20 bp, Artificial Sequence
  Description of Artificial Sequence: Synthetic oligonucleotide
  Target: LAMA2; (-) strand; PAM type: YTN; PAM sequence: CTC
tctggggcccgctgaggtga

SEQ ID NO: 271541 - DNA, 20 bp, Artificial Sequence
  Description of Artificial Sequence: Synthetic oligonucleotide
  Target: LAMA2; (-) strand; PAM type: YTN; PAM sequence: CTG
aataagcctctctggggccc

SEQ ID NO: 271542 - DNA, 20 bp, Artificial Sequence
  Description of Artificial Sequence: Synthetic oligonucleotide
  Target: LAMA2; (-) strand; PAM type: YTN; PAM sequence: CTG
ccagctgaataagcctctct

SEQ ID NO: 271543 - DNA, 20 bp, Artificial Sequence
  Description of Artificial Sequence: Synthetic oligonucleotide
  Target: LAMA2; (-) strand; PAM type: YTN; PAM sequence: CTC
tgccagctgaataagcctct

SEQ ID NO: 271544 - DNA, 20 bp, Artificial Sequence
  Description of Artificial Sequence: Synthetic oligonucleotide
  Target: LAMA2; (-) strand; PAM type: YTN; PAM sequence: TTG
ccctctgccagctgaataag

SEQ ID NO: 271545 - DNA, 20 bp, Artificial Sequence
  Description of Artificial Sequence: Synthetic oligonucleotide
  Target: LAMA2; (-) strand; PAM type: YTN; PAM sequence: TTC
agattgccctctgccagctg

SEQ ID NO: 271546 - DNA, 20 bp, Artificial Sequence
  Description of Artificial Sequence: Synthetic oligonucleotide
  Target: LAMA2; (-) strand; PAM type: YTN; PAM sequence: TTC
ggtcacgagtgtattcagat

SEQ ID NO: 271547 - DNA, 20 bp, Artificial Sequence
  Description of Artificial Sequence: Synthetic oligonucleotide
  Target: LAMA2; (-) strand; PAM type: YTN; PAM sequence: TTT
cggtcacgagtgtattcaga

SEQ ID NO: 271548 - DNA, 20 bp, Artificial Sequence
  Description of Artificial Sequence: Synthetic oligonucleotide
  Target: LAMA2; (-) strand; PAM type: YTN; PAM sequence: TTC
atttcggtcacgagtgtatt

SEQ ID NO: 271549 - DNA, 20 bp, Artificial Sequence
  Description of Artificial Sequence: Synthetic oligonucleotide
  Target: LAMA2; (-) strand; PAM type: YTN; PAM sequence: CTC
gttcatttcggtcacgagtg

SEQ ID NO: 271550 - DNA, 20 bp, Artificial Sequence
  Description of Artificial Sequence: Synthetic oligonucleotide
  Target: LAMA2; (-) strand; PAM type: YTN; PAM sequence: CTG
gtcagcagctcgttcatttc

SEQ ID NO: 271551 - DNA, 20 bp, Artificial Sequence
  Description of Artificial Sequence: Synthetic oligonucleotide
  Target: LAMA2; (-) strand; PAM type: YTN; PAM sequence: TTA
ccctggtcagcagctcgttc

SEQ ID NO: 271552 - DNA, 20 bp, Artificial Sequence
  Description of Artificial Sequence: Synthetic oligonucleotide
  Target: LAMA2; (-) strand; PAM type: YTN; PAM sequence: CTT
accctggtcagcagctcgtt

SEQ ID NO: 271553 - DNA, 20 bp, Artificial Sequence
  Description of Artificial Sequence: Synthetic oligonucleotide
  Target: LAMA2; (-) strand; PAM type: YTN; PAM sequence: TTG
ccaccttaccctggtcagca

SEQ ID NO: 271554 - DNA, 20 bp, Artificial Sequence
  Description of Artificial Sequence: Synthetic oligonucleotide
  Target: LAMA2; (-) strand; PAM type: YTN; PAM sequence: TTT
gccaccttaccctggtcagc

SEQ ID NO: 271555 - DNA, 20 bp, Artificial Sequence
  Description of Artificial Sequence: Synthetic oligonucleotide
  Target: LAMA2; (-) strand; PAM type: YTN; PAM sequence: TTT
tgccaccttaccctggtcag

SEQ ID NO: 271556 - DNA, 20 bp, Artificial Sequence
  Description of Artificial Sequence: Synthetic oligonucleotide
  Target: LAMA2; (-) strand; PAM type: YTN; PAM sequence: TTC
ataattttgccaccttaccc

SEQ ID NO: 271557 - DNA, 20 bp, Artificial Sequence
  Description of Artificial Sequence: Synthetic oligonucleotide
  Target: LAMA2; (-) strand; PAM type: YTN; PAM sequence: TTC
agaagattcataattttgcc

SEQ ID NO: 271558 - DNA, 20 bp, Artificial Sequence
  Description of Artificial Sequence: Synthetic oligonucleotide
  Target: LAMA2; (-) strand; PAM type: YTN; PAM sequence: TTT
cagaagattcataattttgc

SEQ ID NO: 271559 - DNA, 20 bp, Artificial Sequence
  Description of Artificial Sequence: Synthetic oligonucleotide
  Target: LAMA2; (-) strand; PAM type: YTN; PAM sequence: CTT
tcagaagattcataattttg

SEQ ID NO: 271560 - DNA, 20 bp, Artificial Sequence
  Description of Artificial Sequence: Synthetic oligonucleotide
  Target: LAMA2; (-) strand; PAM type: YTN; PAM sequence: CTG
ctttcagaagattcataatt

SEQ ID NO: 271561 - DNA, 20 bp, Artificial Sequence
  Description of Artificial Sequence: Synthetic oligonucleotide
  Target: LAMA2; (-) strand; PAM type: YTN; PAM sequence: CTA
tctgctttcagaagattcat

SEQ ID NO: 271562 - DNA, 20 bp, Artificial Sequence
  Description of Artificial Sequence: Synthetic oligonucleotide
  Target: LAMA2; (-) strand; PAM type: YTN; PAM sequence: TTG
acataatctatctgctttca

SEQ ID NO: 271563 - DNA, 20 bp, Artificial Sequence
  Description of Artificial Sequence: Synthetic oligonucleotide
  Target: LAMA2; (-) strand; PAM type: YTN; PAM sequence: TTC
attgacataatctatctgct

SEQ ID NO: 271564 - DNA, 20 bp, Artificial Sequence
  Description of Artificial Sequence: Synthetic oligonucleotide
  Target: LAMA2; (-) strand; PAM type: YTN; PAM sequence: CTT
cattgacataatctatctgc

SEQ ID NO: 271565 - DNA, 20 bp, Artificial Sequence
  Description of Artificial Sequence: Synthetic oligonucleotide
  Target: LAMA2; (-) strand; PAM type: YTN; PAM sequence: TTC
cttcattgacataatctatc

SEQ ID NO: 271566 - DNA, 20 bp, Artificial Sequence
  Description of Artificial Sequence: Synthetic oligonucleotide
  Target: LAMA2; (-) strand; PAM type: YTN; PAM sequence: TTT
ccttcattgacataatctat

SEQ ID NO: 271567 - DNA, 20 bp, Artificial Sequence
  Description of Artificial Sequence: Synthetic oligonucleotide
  Target: LAMA2; (-) strand; PAM type: YTN; PAM sequence: TTT
tccttcattgacataatcta

SEQ ID NO: 271568 - DNA, 20 bp, Artificial Sequence
  Description of Artificial Sequence: Synthetic oligonucleotide
  Target: LAMA2; (-) strand; PAM type: YTN; PAM sequence: TTG
aagtaattttccttcattga

SEQ ID NO: 271569 - DNA, 20 bp, Artificial Sequence
  Description of Artificial Sequence: Synthetic oligonucleotide
  Target: LAMA2; (-) strand; PAM type: YTN; PAM sequence: TTT
gaagtaattttccttcattg

SEQ ID NO: 271570 - DNA, 20 bp, Artificial Sequence
  Description of Artificial Sequence: Synthetic oligonucleotide
  Target: LAMA2; (-) strand; PAM type: YTN; PAM sequence: CTT
tgaagtaattttccttcatt

SEQ ID NO: 271571 - DNA, 20 bp, Artificial Sequence
  Description of Artificial Sequence: Synthetic oligonucleotide
  Target: LAMA2; (-) strand; PAM type: YTN; PAM sequence: TTC
agaactttgaagtaattttc

SEQ ID NO: 271572 - DNA, 20 bp, Artificial Sequence
  Description of Artificial Sequence: Synthetic oligonucleotide
  Target: LAMA2; (-) strand; PAM type: YTN; PAM sequence: TTT
cagaactttgaagtaatttt

SEQ ID NO: 271573 - DNA, 20 bp, Artificial Sequence
  Description of Artificial Sequence: Synthetic oligonucleotide
  Target: LAMA2; (-) strand; PAM type: YTN; PAM sequence: TTG
catttcagaactttgaagta

SEQ ID NO: 271574 - DNA, 20 bp, Artificial Sequence
  Description of Artificial Sequence: Synthetic oligonucleotide
  Target: LAMA2; (-) strand; PAM type: YTN; PAM sequence: TTT
gcatttcagaactttgaagt

SEQ ID NO: 271575 - DNA, 20 bp, Artificial Sequence
  Description of Artificial Sequence: Synthetic oligonucleotide
  Target: LAMA2; (-) strand; PAM type: YTN; PAM sequence: TTA
ggaagaaggtgatttgcatt

SEQ ID NO: 271576 - DNA, 20 bp, Artificial Sequence
  Description of Artificial Sequence: Synthetic oligonucleotide
  Target: LAMA2; (-) strand; PAM type: YTN; PAM sequence: TTG
ggaattaggaagaaggtgat

SEQ ID NO: 271577 - DNA, 20 bp, Artificial Sequence
  Description of Artificial Sequence: Synthetic oligonucleotide
  Target: LAMA2; (-) strand; PAM type: YTN; PAM sequence: TTA
tataccaaattgggaattag

SEQ ID NO: 271578 - DNA, 20 bp, Artificial Sequence
  Description of Artificial Sequence: Synthetic oligonucleotide
  Target: LAMA2; (-) strand; PAM type: YTN; PAM sequence: TTT
atataccaaattgggaatta

SEQ ID NO: 271579 - DNA, 20 bp, Artificial Sequence
  Description of Artificial Sequence: Synthetic oligonucleotide
  Target: LAMA2; (-) strand; PAM type: YTN; PAM sequence: TTT
tatataccaaattgggaatt

SEQ ID NO: 271580 - DNA, 20 bp, Artificial Sequence
  Description of Artificial Sequence: Synthetic oligonucleotide
  Target: LAMA2; (-) strand; PAM type: YTN; PAM sequence: CTA
ttttatataccaaattggga

SEQ ID NO: 271581 - DNA, 20 bp, Artificial Sequence
  Description of Artificial Sequence: Synthetic oligonucleotide
  Target: LAMA2; (-) strand; PAM type: YTN; PAM sequence: TTA
gcaagtcagaatacatctat

SEQ ID NO: 271582 - DNA, 20 bp, Artificial Sequence
  Description of Artificial Sequence: Synthetic oligonucleotide
  Target: LAMA2; (-) strand; PAM type: YTN; PAM sequence: TTG
aagcagaattagcaagtcag

SEQ ID NO: 271583 - DNA, 20 bp, Artificial Sequence
  Description of Artificial Sequence: Synthetic oligonucleotide
  Target: LAMA2; (-) strand; PAM type: YTN; PAM sequence: TTT
gaagcagaattagcaagtca

SEQ ID NO: 271584 - DNA, 20 bp, Artificial Sequence
  Description of Artificial Sequence: Synthetic oligonucleotide
  Target: LAMA2; (-) strand; PAM type: YTN; PAM sequence: TTG
atttgaagcagaattagcaa

SEQ ID NO: 271585 - DNA, 20 bp, Artificial Sequence
  Description of Artificial Sequence: Synthetic oligonucleotide
  Target: LAMA2; (-) strand; PAM type: YTN; PAM sequence: TTT
gatttgaagcagaattagca

SEQ ID NO: 271586 - DNA, 20 bp, Artificial Sequence
  Description of Artificial Sequence: Synthetic oligonucleotide
  Target: LAMA2; (-) strand; PAM type: YTN; PAM sequence: CTA
tgatttgatttgaagcagaa

SEQ ID NO: 271587 - DNA, 20 bp, Artificial Sequence
  Description of Artificial Sequence: Synthetic oligonucleotide
  Target: LAMA2; (-) strand; PAM type: YTN; PAM sequence: TTC
tatgatttgatttgaagcag

SEQ ID NO: 271588 - DNA, 20 bp, Artificial Sequence
  Description of Artificial Sequence: Synthetic oligonucleotide
  Target: LAMA2; (-) strand; PAM type: YTN; PAM sequence: TTT
ctatgatttgatttgaagca

SEQ ID NO: 271589 - DNA, 20 bp, Artificial Sequence
  Description of Artificial Sequence: Synthetic oligonucleotide
  Target: LAMA2; (-) strand; PAM type: YTN; PAM sequence: CTG
atttctatgatttgatttga

SEQ ID NO: 271590 - DNA, 20 bp, Artificial Sequence
  Description of Artificial Sequence: Synthetic oligonucleotide
  Target: LAMA2; (-) strand; PAM type: YTN; PAM sequence: CTA
ctgatttctatgatttgatt

SEQ ID NO: 271591 - DNA, 20 bp, Artificial Sequence
  Description of Artificial Sequence: Synthetic oligonucleotide
  Target: LAMA2; (-) strand; PAM type: YTN; PAM sequence: CTG
cgtgctactgatttctatga

SEQ ID NO: 271592 - DNA, 20 bp, Artificial Sequence
  Description of Artificial Sequence: Synthetic oligonucleotide
  Target: LAMA2; (-) strand; PAM type: YTN; PAM sequence: TTC
tgcgtgctactgatttctat

SEQ ID NO: 271593 - DNA, 20 bp, Artificial Sequence
  Description of Artificial Sequence: Synthetic oligonucleotide
  Target: LAMA2; (-) strand; PAM type: YTN; PAM sequence: TTT
ctgcgtgctactgatttcta

SEQ ID NO: 271594 - DNA, 20 bp, Artificial Sequence
  Description of Artificial Sequence: Synthetic oligonucleotide
  Target: LAMA2; (-) strand; PAM type: YTN; PAM sequence: TTT
tctgcgtgctactgatttct

SEQ ID NO: 271595 - DNA, 20 bp, Artificial Sequence
  Description of Artificial Sequence: Synthetic oligonucleotide
  Target: LAMA2; (-) strand; PAM type: YTN; PAM sequence: TTT
ttctgcgtgctactgatttc

SEQ ID NO: 271596 - DNA, 20 bp, Artificial Sequence
  Description of Artificial Sequence: Synthetic oligonucleotide
  Target: LAMA2; (-) strand; PAM type: YTN; PAM sequence: TTC
caggtatccccaatttttct

SEQ ID NO: 271597 - DNA, 20 bp, Artificial Sequence
  Description of Artificial Sequence: Synthetic oligonucleotide
  Target: LAMA2; (-) strand; PAM type: YTN; PAM sequence: TTT
ccaggtatccccaatttttc

SEQ ID NO: 271598 - DNA, 20 bp, Artificial Sequence
  Description of Artificial Sequence: Synthetic oligonucleotide
  Target: LAMA2; (-) strand; PAM type: YTN; PAM sequence: TTG
acaatttccaggtatcccca

SEQ ID NO: 271599 - DNA, 20 bp, Artificial Sequence
  Description of Artificial Sequence: Synthetic oligonucleotide
  Target: LAMA2; (-) strand; PAM type: YTN; PAM sequence: TTA
gccattgacaatttccaggt

SEQ ID NO: 271600 - DNA, 20 bp, Artificial Sequence
  Description of Artificial Sequence: Synthetic oligonucleotide
  Target: LAMA2; (-) strand; PAM type: YTN; PAM sequence: TTT
agccattgacaatttccagg

SEQ ID NO: 271601 - DNA, 20 bp, Artificial Sequence
  Description of Artificial Sequence: Synthetic oligonucleotide
  Target: LAMA2; (-) strand; PAM type: YTN; PAM sequence: TTT
tagccattgacaatttccag

SEQ ID NO: 271602 - DNA, 20 bp, Artificial Sequence
  Description of Artificial Sequence: Synthetic oligonucleotide
  Target: LAMA2; (-) strand; PAM type: YTN; PAM sequence: TTT
ttagccattgacaatttcca

SEQ ID NO: 271603 - DNA, 20 bp, Artificial Sequence
  Description of Artificial Sequence: Synthetic oligonucleotide
  Target: LAMA2; (-) strand; PAM type: YTN; PAM sequence: CTT
tttagccattgacaatttcc

SEQ ID NO: 271604 - DNA, 20 bp, Artificial Sequence
  Description of Artificial Sequence: Synthetic oligonucleotide
  Target: LAMA2; (-) strand; PAM type: YTN; PAM sequence: CTG
gactttttagccattgacaa

SEQ ID NO: 271605 - DNA, 20 bp, Artificial Sequence
  Description of Artificial Sequence: Synthetic oligonucleotide
  Target: LAMA2; (-) strand; PAM type: YTN; PAM sequence: TTC
tggactttttagccattgac

SEQ ID NO: 271606 - DNA, 20 bp, Artificial Sequence
  Description of Artificial Sequence: Synthetic oligonucleotide
  Target: LAMA2; (-) strand; PAM type: YTN; PAM sequence: CTG
tcattctggactttttagcc

SEQ ID NO: 271607 - DNA, 20 bp, Artificial Sequence
  Description of Artificial Sequence: Synthetic oligonucleotide
  Target: LAMA2; (-) strand; PAM type: YTN; PAM sequence: CTC
aaaatacactgtcattctgg

SEQ ID NO: 271608 - DNA, 20 bp, Artificial Sequence
  Description of Artificial Sequence: Synthetic oligonucleotide
  Target: LAMA2; (-) strand; PAM type: YTN; PAM sequence: TTC
tcaaaatacactgtcattct

SEQ ID NO: 271609 - DNA, 20 bp, Artificial Sequence
  Description of Artificial Sequence: Synthetic oligonucleotide
  Target: LAMA2; (-) strand; PAM type: YTN; PAM sequence: CTG
aataaagttctcaaaataca

SEQ ID NO: 271610 - DNA, 20 bp, Artificial Sequence
  Description of Artificial Sequence: Synthetic oligonucleotide
  Target: LAMA2; (-) strand; PAM type: YTN; PAM sequence: CTA
ctgaataaagttctcaaaat

SEQ ID NO: 271611 - DNA, 20 bp, Artificial Sequence
  Description of Artificial Sequence: Synthetic oligonucleotide
  Target: LAMA2; (-) strand; PAM type: YTN; PAM sequence: TTA
ccacggaggctactgaataa

SEQ ID NO: 271612 - DNA, 20 bp, Artificial Sequence
  Description of Artificial Sequence: Synthetic oligonucleotide
  Target: LAMA2; (-) strand; PAM type: YTN; PAM sequence: TTT
accacggaggctactgaata

SEQ ID NO: 271613 - DNA, 20 bp, Artificial Sequence
  Description of Artificial Sequence: Synthetic oligonucleotide
  Target: LAMA2; (-) strand; PAM type: YTN; PAM sequence: CTT
taccacggaggctactgaat

SEQ ID NO: 271614 - DNA, 20 bp, Artificial Sequence
  Description of Artificial Sequence: Synthetic oligonucleotide
  Target: LAMA2; (-) strand; PAM type: YTN; PAM sequence: TTG
gaaatcagaacagatacaaa

SEQ ID NO: 271615 - DNA, 20 bp, Artificial Sequence
  Description of Artificial Sequence: Synthetic oligonucleotide
  Target: LAMA2; (-) strand; PAM type: YTN; PAM sequence: TTT
ggaaatcagaacagatacaa

SEQ ID NO: 271616 - DNA, 20 bp, Artificial Sequence
  Description of Artificial Sequence: Synthetic oligonucleotide
  Target: LAMA2; (-) strand; PAM type: YTN; PAM sequence: TTT
tggaaatcagaacagataca

SEQ ID NO: 271617 - DNA, 20 bp, Artificial Sequence
  Description of Artificial Sequence: Synthetic oligonucleotide
  Target: LAMA2; (-) strand; PAM type: YTN; PAM sequence: CTT
ttggaaatcagaacagatac

SEQ ID NO: 271618 - DNA, 20 bp, Artificial Sequence
  Description of Artificial Sequence: Synthetic oligonucleotide
  Target: LAMA2; (-) strand; PAM type: YTN; PAM sequence: TTA
cacaatcaaagatagtgctt

SEQ ID NO: 271619 - DNA, 20 bp, Artificial Sequence
  Description of Artificial Sequence: Synthetic oligonucleotide
  Target: LAMA2; (-) strand; PAM type: YTN; PAM sequence: TTT
acacaatcaaagatagtgct

SEQ ID NO: 271620 - DNA, 20 bp, Artificial Sequence
  Description of Artificial Sequence: Synthetic oligonucleotide
  Target: LAMA2; (-) strand; PAM type: YTN; PAM sequence: CTT
tacacaatcaaagatagtgc

SEQ ID NO: 271621 - DNA, 20 bp, Artificial Sequence
  Description of Artificial Sequence: Synthetic oligonucleotide
  Target: LAMA2; (-) strand; PAM type: YTN; PAM sequence: CTC
tttacacaatcaaagatagt

SEQ ID NO: 271622 - DNA, 20 bp, Artificial Sequence
  Description of Artificial Sequence: Synthetic oligonucleotide
  Target: LAMA2; (-) strand; PAM type: YTN; PAM sequence: TTC
tctttacacaatcaaagata

SEQ ID NO: 271623 - DNA, 20 bp, Artificial Sequence
  Description of Artificial Sequence: Synthetic oligonucleotide
  Target: LAMA2; (-) strand; PAM type: YTN; PAM sequence: TTT
ctctttacacaatcaaagat

SEQ ID NO: 271624 - DNA, 20 bp, Artificial Sequence
  Description of Artificial Sequence: Synthetic oligonucleotide
  Target: LAMA2; (-) strand; PAM type: YTN; PAM sequence: CTT
tctctttacacaatcaaaga

SEQ ID NO: 271625 - DNA, 20 bp, Artificial Sequence
  Description of Artificial Sequence: Synthetic oligonucleotide
  Target: LAMA2; (-) strand; PAM type: YTN; PAM sequence: TTC
tttctctttacacaatcaaa

SEQ ID NO: 271626 - DNA, 20 bp, Artificial Sequence
  Description of Artificial Sequence: Synthetic oligonucleotide
  Target: LAMA2; (-) strand; PAM type: YTN; PAM sequence: TTT
ctttctctttacacaatcaa

SEQ ID NO: 271627 - DNA, 20 bp, Artificial Sequence
  Description of Artificial Sequence: Synthetic oligonucleotide
  Target: LAMA2; (-) strand; PAM type: YTN; PAM sequence: TTT
tctttctctttacacaatca

SEQ ID NO: 271628 - DNA, 20 bp, Artificial Sequence
  Description of Artificial Sequence: Synthetic oligonucleotide
  Target: LAMA2; (-) strand; PAM type: YTN; PAM sequence: TTT
ttctttctctttacacaatc

SEQ ID NO: 271629 - DNA, 20 bp, Artificial Sequence
  Description of Artificial Sequence: Synthetic oligonucleotide
  Target: LAMA2; (-) strand; PAM type: YTN; PAM sequence: TTG
tttttctttctctttacaca

SEQ ID NO: 271630 - DNA, 20 bp, Artificial Sequence
  Description of Artificial Sequence: Synthetic oligonucleotide
  Target: LAMA2; (-) strand; PAM type: YTN; PAM sequence: TTT
gtttttctttctctttacac

SEQ ID NO: 271631 - DNA, 20 bp, Artificial Sequence
  Description of Artificial Sequence: Synthetic oligonucleotide
  Target: LAMA2; (-) strand; PAM type: YTN; PAM sequence: TTC
atttgtttttctttctcttt

SEQ ID NO: 271632 - DNA, 20 bp, Artificial Sequence
  Description of Artificial Sequence: Synthetic oligonucleotide
  Target: LAMA2; (-) strand; PAM type: YTN; PAM sequence: TTT
catttgtttttctttctctt

SEQ ID NO: 271633 - DNA, 20 bp, Artificial Sequence
  Description of Artificial Sequence: Synthetic oligonucleotide
  Target: LAMA2; (-) strand; PAM type: YTN; PAM sequence: TTT
tcatttgtttttctttctct

SEQ ID NO: 271634 - DNA, 20 bp, Artificial Sequence
  Description of Artificial Sequence: Synthetic oligonucleotide
  Target: LAMA2; (-) strand; PAM type: YTN; PAM sequence: CTA
atgcaaaaatcccacgatga

SEQ ID NO: 271635 - DNA, 20 bp, Artificial Sequence
  Description of Artificial Sequence: Synthetic oligonucleotide
  Target: LAMA2; (-) strand; PAM type: YTN; PAM sequence: CTA
tactaatgcaaaaatcccac

SEQ ID NO: 271636 - DNA, 20 bp, Artificial Sequence
  Description of Artificial Sequence: Synthetic oligonucleotide
  Target: LAMA2; (-) strand; PAM type: YTN; PAM sequence: TTC
tatactaatgcaaaaatccc

SEQ ID NO: 271637 - DNA, 20 bp, Artificial Sequence
  Description of Artificial Sequence: Synthetic oligonucleotide
  Target: LAMA2; (-) strand; PAM type: YTN; PAM sequence: TTT
ctatactaatgcaaaaatcc

SEQ ID NO: 271638 - DNA, 20 bp, Artificial Sequence
  Description of Artificial Sequence: Synthetic oligonucleotide
  Target: LAMA2; (-) strand; PAM type: YTN; PAM sequence: CTG
tatttctatactaatgcaaa

SEQ ID NO: 271639 - DNA, 20 bp, Artificial Sequence
  Description of Artificial Sequence: Synthetic oligonucleotide
  Target: LAMA2; (-) strand; PAM type: YTN; PAM sequence: TTA
cactgtatttctatactaat

SEQ ID NO: 271640 - DNA, 20 bp, Artificial Sequence
  Description of Artificial Sequence: Synthetic oligonucleotide
  Target: LAMA2; (-) strand; PAM type: YTN; PAM sequence: TTT
acactgtatttctatactaa

SEQ ID NO: 271641 - DNA, 20 bp, Artificial Sequence
  Description of Artificial Sequence: Synthetic oligonucleotide
  Target: LAMA2; (-) strand; PAM type: YTN; PAM sequence: CTG
atttacactgtatttctata

SEQ ID NO: 271642 - DNA, 20 bp, Artificial Sequence
  Description of Artificial Sequence: Synthetic oligonucleotide
  Target: LAMA2; (-) strand; PAM type: YTN; PAM sequence: TTG
tgtggaaagactgatttaca

SEQ ID NO: 271643 - DNA, 20 bp, Artificial Sequence
  Description of Artificial Sequence: Synthetic oligonucleotide
  Target: LAMA2; (-) strand; PAM type: YTN; PAM sequence: TTT
gtgtggaaagactgatttac

SEQ ID NO: 271644 - DNA, 20 bp, Artificial Sequence
  Description of Artificial Sequence: Synthetic oligonucleotide
  Target: LAMA2; (-) strand; PAM type: YTN; PAM sequence: TTT
tgtgtggaaagactgattta

SEQ ID NO: 271645 - DNA, 20 bp, Artificial Sequence
  Description of Artificial Sequence: Synthetic oligonucleotide
  Target: LAMA2; (-) strand; PAM type: YTN; PAM sequence: CTT
ttgtgtggaaagactgattt

SEQ ID NO: 271646 - DNA, 20 bp, Artificial Sequence
  Description of Artificial Sequence: Synthetic oligonucleotide
  Target: LAMA2; (-) strand; PAM type: YTN; PAM sequence: CTC
ttttgtgtggaaagactgat

SEQ ID NO: 271647 - DNA, 20 bp, Artificial Sequence
  Description of Artificial Sequence: Synthetic oligonucleotide
  Target: LAMA2; (-) strand; PAM type: YTN; PAM sequence: TTC
ctcttttgtgtggaaagact

SEQ ID NO: 271648 - DNA, 20 bp, Artificial Sequence
  Description of Artificial Sequence: Synthetic oligonucleotide
  Target: LAMA2; (-) strand; PAM type: YTN; PAM sequence: TTT
cctcttttgtgtggaaagac

SEQ ID NO: 271649 - DNA, 20 bp, Artificial Sequence
  Description of Artificial Sequence: Synthetic oligonucleotide
  Target: LAMA2; (-) strand; PAM type: YTN; PAM sequence: CTC
acaatagagaagatttcctc

SEQ ID NO: 271650 - DNA, 20 bp, Artificial Sequence
  Description of Artificial Sequence: Synthetic oligonucleotide
  Target: LAMA2; (-) strand; PAM type: YTN; PAM sequence: TTG
gagtctcacaatagagaaga

SEQ ID NO: 271651 - DNA, 20 bp, Artificial Sequence
  Description of Artificial Sequence: Synthetic oligonucleotide
  Target: LAMA2; (-) strand; PAM type: YTN; PAM sequence: TTT
ggagtctcacaatagagaag

SEQ ID NO: 271652 - DNA, 20 bp, Artificial Sequence
  Description of Artificial Sequence: Synthetic oligonucleotide
  Target: LAMA2; (-) strand; PAM type: YTN; PAM sequence: CTT
tggagtctcacaatagagaa

SEQ ID NO: 271653 - DNA, 20 bp, Artificial Sequence
  Description of Artificial Sequence: Synthetic oligonucleotide
  Target: LAMA2; (-) strand; PAM type: YTN; PAM sequence: TTA
agcactttggagtctcacaa

SEQ ID NO: 271654 - DNA, 20 bp, Artificial Sequence
  Description of Artificial Sequence: Synthetic oligonucleotide
  Target: LAMA2; (-) strand; PAM type: YTN; PAM sequence: CTT
aagcactttggagtctcaca

SEQ ID NO: 271655 - DNA, 20 bp, Artificial Sequence
  Description of Artificial Sequence: Synthetic oligonucleotide
  Target: LAMA2; (-) strand; PAM type: YTN; PAM sequence: TTA
aaaagtgtcttaagcacttt

SEQ ID NO: 271656 - DNA, 20 bp, Artificial Sequence
  Description of Artificial Sequence: Synthetic oligonucleotide
  Target: LAMA2; (-) strand; PAM type: YTN; PAM sequence: TTT
aaaaagtgtcttaagcactt

SEQ ID NO: 271657 - DNA, 20 bp, Artificial Sequence
  Description of Artificial Sequence: Synthetic oligonucleotide
  Target: LAMA2; (-) strand; PAM type: YTN; PAM sequence: CTT
taaaaagtgtcttaagcact

SEQ ID NO: 271658 - DNA, 20 bp, Artificial Sequence
  Description of Artificial Sequence: Synthetic oligonucleotide
  Target: LAMA2; (-) strand; PAM type: YTN; PAM sequence: CTG
actttaaaaagtgtcttaag

SEQ ID NO: 271659 - DNA, 20 bp, Artificial Sequence
  Description of Artificial Sequence: Synthetic oligonucleotide
  Target: LAMA2; (-) strand; PAM type: YTN; PAM sequence: TTC
tgactttaaaaagtgtctta

SEQ ID NO: 271660 - DNA, 20 bp, Artificial Sequence
  Description of Artificial Sequence: Synthetic oligonucleotide
  Target: LAMA2; (-) strand; PAM type: YTN; PAM sequence: TTA
cattctgactttaaaaagtg

SEQ ID NO: 271661 - DNA, 20 bp, Artificial Sequence
  Description of Artificial Sequence: Synthetic oligonucleotide
  Target: LAMA2; (-) strand; PAM type: YTN; PAM sequence: TTT
acattctgactttaaaaagt

SEQ ID NO: 271662 - DNA, 20 bp, Artificial Sequence
  Description of Artificial Sequence: Synthetic oligonucleotide
  Target: LAMA2; (-) strand; PAM type: YTN; PAM sequence: CTT
tacattctgactttaaaaag

SEQ ID NO: 271663 - DNA, 20 bp, Artificial Sequence
  Description of Artificial Sequence: Synthetic oligonucleotide
  Target: LAMA2; (-) strand; PAM type: YTN; PAM sequence: CTG
ataaatgcaacatggacttt

SEQ ID NO: 271664 - DNA, 20 bp, Artificial Sequence
  Description of Artificial Sequence: Synthetic oligonucleotide
  Target: LAMA2; (-) strand; PAM type: YTN; PAM sequence: TTA
aaaagcctgataaatgcaac

SEQ ID NO: 271665 - DNA, 20 bp, Artificial Sequence
  Description of Artificial Sequence: Synthetic oligonucleotide
  Target: LAMA2; (-) strand; PAM type: YTN; PAM sequence: TTT
aaaaagcctgataaatgcaa

SEQ ID NO: 271666 - DNA, 20 bp, Artificial Sequence
  Description of Artificial Sequence: Synthetic oligonucleotide
  Target: LAMA2; (-) strand; PAM type: YTN; PAM sequence: CTT
taaaaagcctgataaatgca

SEQ ID NO: 271667 - DNA, 20 bp, Artificial Sequence
  Description of Artificial Sequence: Synthetic oligonucleotide
  Target: LAMA2; (-) strand; PAM type: YTN; PAM sequence: TTC
tttaaaaagcctgataaatg

SEQ ID NO: 271668 - DNA, 20 bp, Artificial Sequence
  Description of Artificial Sequence: Synthetic oligonucleotide
  Target: LAMA2; (-) strand; PAM type: YTN; PAM sequence: TTC
caattctttaaaaagcctga

SEQ ID NO: 271669 - DNA, 20 bp, Artificial Sequence
  Description of Artificial Sequence: Synthetic oligonucleotide
  Target: LAMA2; (-) strand; PAM type: YTN; PAM sequence: TTT
ccaattctttaaaaagcctg

SEQ ID NO: 271670 - DNA, 20 bp, Artificial Sequence
  Description of Artificial Sequence: Synthetic oligonucleotide
  Target: LAMA2; (-) strand; PAM type: YTN; PAM sequence: TTA
aaatttccaattctttaaaa

SEQ ID NO: 271671 - DNA, 20 bp, Artificial Sequence
  Description of Artificial Sequence: Synthetic oligonucleotide
  Target: LAMA2; (-) strand; PAM type: YTN; PAM sequence: TTT
aaaatttccaattctttaaa

SEQ ID NO: 271672 - DNA, 20 bp, Artificial Sequence
  Description of Artificial Sequence: Synthetic oligonucleotide
  Target: LAMA2; (-) strand; PAM type: YTN; PAM sequence: TTG
aaaatttaaaatttccaatt

SEQ ID NO: 271673 - DNA, 20 bp, Artificial Sequence
  Description of Artificial Sequence: Synthetic oligonucleotide
  Target: LAMA2; (-) strand; PAM type: YTN; PAM sequence: TTT
gaaaatttaaaatttccaat

SEQ ID NO: 271674 - DNA, 20 bp, Artificial Sequence
  Description of Artificial Sequence: Synthetic oligonucleotide
  Target: LAMA2; (-) strand; PAM type: YTN; PAM sequence: TTT
tgaaaatttaaaatttccaa

SEQ ID NO: 271675 - DNA, 20 bp, Artificial Sequence
  Description of Artificial Sequence: Synthetic oligonucleotide
  Target: LAMA2; (-) strand; PAM type: YTN; PAM sequence: TTA
ataccatcgcagttttgaaa

SEQ ID NO: 271676 - DNA, 20 bp, Artificial Sequence
  Description of Artificial Sequence: Synthetic oligonucleotide
  Target: LAMA2; (-) strand; PAM type: YTN; PAM sequence: TTT
aataccatcgcagttttgaa

SEQ ID NO: 271677 - DNA, 20 bp, Artificial Sequence
  Description of Artificial Sequence: Synthetic oligonucleotide
  Target: LAMA2; (-) strand; PAM type: YTN; PAM sequence: TTT
taataccatcgcagttttga

SEQ ID NO: 271678 - DNA, 20 bp, Artificial Sequence
  Description of Artificial Sequence: Synthetic oligonucleotide
  Target: LAMA2; (-) strand; PAM type: YTN; PAM sequence: TTT
ttaataccatcgcagttttg

SEQ ID NO: 271679 - DNA, 20 bp, Artificial Sequence
  Description of Artificial Sequence: Synthetic oligonucleotide
  Target: LAMA2; (-) strand; PAM type: YTN; PAM sequence: CTG
caaaaagtttttaataccat

SEQ ID NO: 271680 - DNA, 20 bp, Artificial Sequence
  Description of Artificial Sequence: Synthetic oligonucleotide
  Target: LAMA2; (-) strand; PAM type: YTN; PAM sequence: CTA
actgcaaaaagtttttaata

SEQ ID NO: 271681 - DNA, 20 bp, Artificial Sequence
  Description of Artificial Sequence: Synthetic oligonucleotide
  Target: LAMA2; (-) strand; PAM type: YTN; PAM sequence: CTC
taactgcaaaaagtttttaa

SEQ ID NO: 271682 - DNA, 20 bp, Artificial Sequence
  Description of Artificial Sequence: Synthetic oligonucleotide
  Target: LAMA2; (-) strand; PAM type: YTN; PAM sequence: TTC
tctaactgcaaaaagttttt

SEQ ID NO: 271683 - DNA, 20 bp, Artificial Sequence
  Description of Artificial Sequence: Synthetic oligonucleotide
  Target: LAMA2; (-) strand; PAM type: YTN; PAM sequence: TTC
attctctaactgcaaaaagt

SEQ ID NO: 271684 - DNA, 20 bp, Artificial Sequence
  Description of Artificial Sequence: Synthetic oligonucleotide
  Target: LAMA2; (-) strand; PAM type: YTN; PAM sequence: CTT
cattctctaactgcaaaaag

SEQ ID NO: 271685 - DNA, 20 bp, Artificial Sequence
  Description of Artificial Sequence: Synthetic oligonucleotide
  Target: LAMA2; (-) strand; PAM type: YTN; PAM sequence: TTC
ttcattctctaactgcaaaa

SEQ ID NO: 271686 - DNA, 20 bp, Artificial Sequence
  Description of Artificial Sequence: Synthetic oligonucleotide
  Target: LAMA2; (-) strand; PAM type: YTN; PAM sequence: TTT
cttcattctctaactgcaaa

SEQ ID NO: 271687 - DNA, 20 bp, Artificial Sequence
  Description of Artificial Sequence: Synthetic oligonucleotide
  Target: LAMA2; (-) strand; PAM type: YTN; PAM sequence: TTT
tcttcattctctaactgcaa

SEQ ID NO: 271688 - DNA, 20 bp, Artificial Sequence
  Description of Artificial Sequence: Synthetic oligonucleotide
  Target: LAMA2; (-) strand; PAM type: YTN; PAM sequence: TTG
ttttcttcattctctaactg

SEQ ID NO: 271689 - DNA, 20 bp, Artificial Sequence
  Description of Artificial Sequence: Synthetic oligonucleotide
  Target: LAMA2; (-) strand; PAM type: YTN; PAM sequence: TTA
tgttgttttcttcattctct

SEQ ID NO: 271690 - DNA, 20 bp, Artificial Sequence
  Description of Artificial Sequence: Synthetic oligonucleotide
  Target: LAMA2; (-) strand; PAM type: YTN; PAM sequence: TTT
atgttgttttcttcattctc

SEQ ID NO: 271691 - DNA, 20 bp, Artificial Sequence
  Description of Artificial Sequence: Synthetic oligonucleotide
  Target: LAMA2; (-) strand; PAM type: YTN; PAM sequence: CTT
tatgttgttttcttcattct

SEQ ID NO: 271692 - DNA, 20 bp, Artificial Sequence
  Description of Artificial Sequence: Synthetic oligonucleotide
  Target: LAMA2; (-) strand; PAM type: YTN; PAM sequence: CTG
gccacaagatggcgggcttt

SEQ ID NO: 271693 - DNA, 20 bp, Artificial Sequence
  Description of Artificial Sequence: Synthetic oligonucleotide
  Target: LAMA2; (-) strand; PAM type: YTN; PAM sequence: TTC
tggccacaagatggcgggct

SEQ ID NO: 271694 - DNA, 20 bp, Artificial Sequence
  Description of Artificial Sequence: Synthetic oligonucleotide
  Target: LAMA2; (-) strand; PAM type: YTN; PAM sequence: TTT
ctggccacaagatggcgggc

SEQ ID NO: 271695 - DNA, 20 bp, Artificial Sequence
  Description of Artificial Sequence: Synthetic oligonucleotide
  Target: LAMA2; (-) strand; PAM type: YTN; PAM sequence: TTC
atgcatatttctggccacaa

SEQ ID NO: 271696 - DNA, 20 bp, Artificial Sequence
  Description of Artificial Sequence: Synthetic oligonucleotide
  Target: LAMA2; (-) strand; PAM type: YTN; PAM sequence: CTT
catgcatatttctggccaca

SEQ ID NO: 271697 - DNA, 20 bp, Artificial Sequence
  Description of Artificial Sequence: Synthetic oligonucleotide
  Target: LAMA2; (-) strand; PAM type: YTN; PAM sequence: CTA
gcttcatgcatatttctggc

SEQ ID NO: 271698 - DNA, 20 bp, Artificial Sequence
  Description of Artificial Sequence: Synthetic oligonucleotide
  Target: LAMA2; (-) strand; PAM type: YTN; PAM sequence: TTC
tagcttcatgcatatttctg

SEQ ID NO: 271699 - DNA, 20 bp, Artificial Sequence
  Description of Artificial Sequence: Synthetic oligonucleotide
  Target: LAMA2; (-) strand; PAM type: YTN; PAM sequence: TTT
ctagcttcatgcatatttct

SEQ ID NO: 271700 - DNA, 20 bp, Artificial Sequence
  Description of Artificial Sequence: Synthetic oligonucleotide
  Target: LAMA2; (-) strand; PAM type: YTN; PAM sequence: TTG
cagccccgtttctagcttca

SEQ ID NO: 271701 - DNA, 20 bp, Artificial Sequence
  Description of Artificial Sequence: Synthetic oligonucleotide
  Target: LAMA2; (-) strand; PAM type: YTN; PAM sequence: TTT
gcagccccgtttctagcttc

SEQ ID NO: 271702 - DNA, 20 bp, Artificial Sequence
  Description of Artificial Sequence: Synthetic oligonucleotide
  Target: LAMA2; (-) strand; PAM type: YTN; PAM sequence: CTT
tgcagccccgtttctagctt

SEQ ID NO: 271703 - DNA, 20 bp, Artificial Sequence
  Description of Artificial Sequence: Synthetic oligonucleotide
  Target: LAMA2; (-) strand; PAM type: YTN; PAM sequence: TTA
aatccgtactttgcagcccc

SEQ ID NO: 271704 - DNA, 20 bp, Artificial Sequence
  Description of Artificial Sequence: Synthetic oligonucleotide
  Target: LAMA2; (-) strand; PAM type: YTN; PAM sequence: TTA
gataatcaaattaaatccgt

SEQ ID NO: 271705 - DNA, 20 bp, Artificial Sequence
  Description of Artificial Sequence: Synthetic oligonucleotide
  Target: LAMA2; (-) strand; PAM type: YTN; PAM sequence: CTT
agataatcaaattaaatccg

SEQ ID NO: 271706 - DNA, 20 bp, Artificial Sequence
  Description of Artificial Sequence: Synthetic oligonucleotide
  Target: LAMA2; (-) strand; PAM type: YTN; PAM sequence: CTC
ttagataatcaaattaaatc

SEQ ID NO: 271707 - DNA, 20 bp, Artificial Sequence
  Description of Artificial Sequence: Synthetic oligonucleotide
  Target: LAMA2; (-) strand; PAM type: YTN; PAM sequence: TTA
aagctcttagataatcaaat

SEQ ID NO: 271708 - DNA, 20 bp, Artificial Sequence
  Description of Artificial Sequence: Synthetic oligonucleotide
  Target: LAMA2; (-) strand; PAM type: YTN; PAM sequence: TTT
aaagctcttagataatcaaa

SEQ ID NO: 271709 - DNA, 20 bp, Artificial Sequence
  Description of Artificial Sequence: Synthetic oligonucleotide
  Target: LAMA2; (-) strand; PAM type: YTN; PAM sequence: TTA
tcatttaaagctcttagata

SEQ ID NO: 271710 - DNA, 20 bp, Artificial Sequence
  Description of Artificial Sequence: Synthetic oligonucleotide
  Target: LAMA2; (-) strand; PAM type: YTN; PAM sequence: TTT
atcatttaaagctcttagat

SEQ ID NO: 271711 - DNA, 20 bp, Artificial Sequence
  Description of Artificial Sequence: Synthetic oligonucleotide
  Target: LAMA2; (-) strand; PAM type: YTN; PAM sequence: CTT
tatcatttaaagctcttaga

SEQ ID NO: 271712 - DNA, 20 bp, Artificial Sequence
  Description of Artificial Sequence: Synthetic oligonucleotide
  Target: LAMA2; (-) strand; PAM type: YTN; PAM sequence: CTC
tttatcatttaaagctctta

SEQ ID NO: 271713 - DNA, 20 bp, Artificial Sequence
  Description of Artificial Sequence: Synthetic oligonucleotide
  Target: LAMA2; (-) strand; PAM type: YTN; PAM sequence: CTC
caatactctttatcatttaa

SEQ ID NO: 271714 - DNA, 20 bp, Artificial Sequence
  Description of Artificial Sequence: Synthetic oligonucleotide
  Target: LAMA2; (-) strand; PAM type: YTN; PAM sequence: CTA
gctccaatactctttatcat

SEQ ID NO: 271715 - DNA, 20 bp, Artificial Sequence
  Description of Artificial Sequence: Synthetic oligonucleotide
  Target: LAMA2; (-) strand; PAM type: YTN; PAM sequence: TTC
tagctccaatactctttatc

SEQ ID NO: 271716 - DNA, 20 bp, Artificial Sequence
  Description of Artificial Sequence: Synthetic oligonucleotide
  Target: LAMA2; (-) strand; PAM type: YTN; PAM sequence: CTT
ctagctccaatactctttat

SEQ ID NO: 271717 - DNA, 20 bp, Artificial Sequence
  Description of Artificial Sequence: Synthetic oligonucleotide
  Target: LAMA2; (-) strand; PAM type: YTN; PAM sequence: CTC
gataatccccaggaaccttc

SEQ ID NO: 271718 - DNA, 20 bp, Artificial Sequence
  Description of Artificial Sequence: Synthetic oligonucleotide
  Target: LAMA2; (-) strand; PAM type: YTN; PAM sequence: TTA
aaatacaaagtggactcgat

SEQ ID NO: 271719 - DNA, 20 bp, Artificial Sequence
  Description of Artificial Sequence: Synthetic oligonucleotide
  Target: LAMA2; (-) strand; PAM type: YTN; PAM sequence: TTT
aaaatacaaagtggactcga

SEQ ID NO: 271720 - DNA, 20 bp, Artificial Sequence
  Description of Artificial Sequence: Synthetic oligonucleotide
  Target: LAMA2; (-) strand; PAM type: YTN; PAM sequence: CTT
taaaatacaaagtggactcg

SEQ ID NO: 271721 - DNA, 20 bp, Artificial Sequence
  Description of Artificial Sequence: Synthetic oligonucleotide
  Target: LAMA2; (-) strand; PAM type: YTN; PAM sequence: TTC
tttaaaatacaaagtggact

SEQ ID NO: 271722 - DNA, 20 bp, Artificial Sequence
  Description of Artificial Sequence: Synthetic oligonucleotide
  Target: LAMA2; (-) strand; PAM type: YTN; PAM sequence: CTT
ctttaaaatacaaagtggac

SEQ ID NO: 271723 - DNA, 20 bp, Artificial Sequence
  Description of Artificial Sequence: Synthetic oligonucleotide
  Target: LAMA2; (-) strand; PAM type: YTN; PAM sequence: CTC
ttctttaaaatacaaagtgg

SEQ ID NO: 271724 - DNA, 20 bp, Artificial Sequence
  Description of Artificial Sequence: Synthetic oligonucleotide
  Target: LAMA2; (-) strand; PAM type: YTN; PAM sequence: CTG
tcatggcccgaggcagctct

SEQ ID NO: 271725 - DNA, 20 bp, Artificial Sequence
  Description of Artificial Sequence: Synthetic oligonucleotide
  Target: LAMA2; (-) strand; PAM type: YTN; PAM sequence: TTC
actgtcatggcccgaggcag

SEQ ID NO: 271726 - DNA, 20 bp, Artificial Sequence
  Description of Artificial Sequence: Synthetic oligonucleotide
  Target: LAMA2; (-) strand; PAM type: YTN; PAM sequence: TTT
cactgtcatggcccgaggca

SEQ ID NO: 271727 - DNA, 20 bp, Artificial Sequence
  Description of Artificial Sequence: Synthetic oligonucleotide
  Target: LAMA2; (-) strand; PAM type: YTN; PAM sequence: TTC
gtttcactgtcatggcccga

SEQ ID NO: 271728 - DNA, 20 bp, Artificial Sequence
  Description of Artificial Sequence: Synthetic oligonucleotide
  Target: LAMA2; (-) strand; PAM type: YTN; PAM sequence: TTA
attcgtttcactgtcatggc

SEQ ID NO: 271729 - DNA, 20 bp, Artificial Sequence
  Description of Artificial Sequence: Synthetic oligonucleotide
  Target: LAMA2; (-) strand; PAM type: YTN; PAM sequence: TTG
ttaattcgtttcactgtcat

SEQ ID NO: 271730 - DNA, 20 bp, Artificial Sequence
  Description of Artificial Sequence: Synthetic oligonucleotide
  Target: LAMA2; (-) strand; PAM type: YTN; PAM sequence: TTG
tatggccattgttaattcgt

SEQ ID NO: 271731 - DNA, 20 bp, Artificial Sequence
  Description of Artificial Sequence: Synthetic oligonucleotide
  Target: LAMA2; (-) strand; PAM type: YTN; PAM sequence: TTA
gcaaattgtatggccattgt

SEQ ID NO: 271732 - DNA, 20 bp, Artificial Sequence
  Description of Artificial Sequence: Synthetic oligonucleotide
  Target: LAMA2; (-) strand; PAM type: YTN; PAM sequence: TTT
agcaaattgtatggccattg

SEQ ID NO: 271733 - DNA, 20 bp, Artificial Sequence
  Description of Artificial Sequence: Synthetic oligonucleotide
  Target: LAMA2; (-) strand; PAM type: YTN; PAM sequence: CTG
agtttagcaaattgtatggc

SEQ ID NO: 271734 - DNA, 20 bp, Artificial Sequence
  Description of Artificial Sequence: Synthetic oligonucleotide
  Target: LAMA2; (-) strand; PAM type: YTN; PAM sequence: TTA
agtccctgagtttagcaaat

SEQ ID NO: 271735 - DNA, 20 bp, Artificial Sequence
  Description of Artificial Sequence: Synthetic oligonucleotide
  Target: LAMA2; (-) strand; PAM type: YTN; PAM sequence: CTT
aagtccctgagtttagcaaa

SEQ ID NO: 271736 - DNA, 20 bp, Artificial Sequence
  Description of Artificial Sequence: Synthetic oligonucleotide
  Target: LAMA2; (-) strand; PAM type: YTN; PAM sequence: CTG
ggtccagcttaagtccctga

SEQ ID NO: 271737 - DNA, 20 bp, Artificial Sequence
  Description of Artificial Sequence: Synthetic oligonucleotide
  Target: LAMA2; (-) strand; PAM type: YTN; PAM sequence: TTG
agactgggtccagcttaagt

SEQ ID NO: 271738 - DNA, 20 bp, Artificial Sequence
  Description of Artificial Sequence: Synthetic oligonucleotide
  Target: LAMA2; (-) strand; PAM type: YTN; PAM sequence: CTT
gagactgggtccagcttaag

SEQ ID NO: 271739 - DNA, 20 bp, Artificial Sequence
  Description of Artificial Sequence: Synthetic oligonucleotide
  Target: LAMA2; (-) strand; PAM type: YTN; PAM sequence: CTG
ggccagtgggaatcttgaga

SEQ ID NO: 271740 - DNA, 20 bp, Artificial Sequence
  Description of Artificial Sequence: Synthetic oligonucleotide
  Target: LAMA2; (-) strand; PAM type: YTN; PAM sequence: CTA
tgtagaaaaagtactgggcc

SEQ ID NO: 271741 - DNA, 20 bp, Artificial Sequence
  Description of Artificial Sequence: Synthetic oligonucleotide
  Target: LAMA2; (-) strand; PAM type: YTN; PAM sequence: CTA
aaccgacagcaggctatgta

SEQ ID NO: 271742 - DNA, 20 bp, Artificial Sequence
  Description of Artificial Sequence: Synthetic oligonucleotide
  Target: LAMA2; (-) strand; PAM type: YTN; PAM sequence: TTC
ctaaaccgacagcaggctat

SEQ ID NO: 271743 - DNA, 20 bp, Artificial Sequence
  Description of Artificial Sequence: Synthetic oligonucleotide
  Target: LAMA2; (-) strand; PAM type: YTN; PAM sequence: TTT
cctaaaccgacagcaggcta

SEQ ID NO: 271744 - DNA, 20 bp, Artificial Sequence
  Description of Artificial Sequence: Synthetic oligonucleotide
  Target: LAMA2; (-) strand; PAM type: YTN; PAM sequence: TTT
tcctaaaccgacagcaggct

SEQ ID NO: 271745 - DNA, 20 bp, Artificial Sequence
  Description of Artificial Sequence: Synthetic oligonucleotide
  Target: LAMA2; (-) strand; PAM type: YTN; PAM sequence: CTG
tggatattttcctaaaccga

SEQ ID NO: 271746 - DNA, 20 bp, Artificial Sequence
  Description of Artificial Sequence: Synthetic oligonucleotide
  Target: LAMA2; (-) strand; PAM type: YTN; PAM sequence: TTC
ctgtggatattttcctaaac

SEQ ID NO: 271747 - DNA, 20 bp, Artificial Sequence
  Description of Artificial Sequence: Synthetic oligonucleotide
  Target: LAMA2; (-) strand; PAM type: YTN; PAM sequence: TTT
cctgtggatattttcctaaa

SEQ ID NO: 271748 - DNA, 20 bp, Artificial Sequence
  Description of Artificial Sequence: Synthetic oligonucleotide
  Target: LAMA2; (-) strand; PAM type: YTN; PAM sequence: TTT
tcctgtggatattttcctaa

SEQ ID NO: 271749 - DNA, 20 bp, Artificial Sequence
  Description of Artificial Sequence: Synthetic oligonucleotide
  Target: LAMA2; (-) strand; PAM type: YTN; PAM sequence: TTG
attttcctgtggatattttc

SEQ ID NO: 271750 - DNA, 20 bp, Artificial Sequence
  Description of Artificial Sequence: Synthetic oligonucleotide
  Target: LAMA2; (-) strand; PAM type: YTN; PAM sequence: TTT
gattttcctgtggatatttt

SEQ ID NO: 271751 - DNA, 20 bp, Artificial Sequence
  Description of Artificial Sequence: Synthetic oligonucleotide
  Target: LAMA2; (-) strand; PAM type: YTN; PAM sequence: CTA
tttgattttcctgtggatat

SEQ ID NO: 271752 - DNA, 20 bp, Artificial Sequence
  Description of Artificial Sequence: Synthetic oligonucleotide
  Target: LAMA2; (-) strand; PAM type: YTN; PAM sequence: CTC
agaagcctatttgattttcc

SEQ ID NO: 271753 - DNA, 20 bp, Artificial Sequence
  Description of Artificial Sequence: Synthetic oligonucleotide
  Target: LAMA2; (-) strand; PAM type: YTN; PAM sequence: TTA
tgtgctcagaagcctatttg

SEQ ID NO: 271754 - DNA, 20 bp, Artificial Sequence
  Description of Artificial Sequence: Synthetic oligonucleotide
  Target: LAMA2; (-) strand; PAM type: YTN; PAM sequence: TTA
gcattatgtgctcagaagcc

SEQ ID NO: 271755 - DNA, 20 bp, Artificial Sequence
  Description of Artificial Sequence: Synthetic oligonucleotide
  Target: LAMA2; (-) strand; PAM type: YTN; PAM sequence: TTT
agcattatgtgctcagaagc

SEQ ID NO: 271756 - DNA, 20 bp, Artificial Sequence
  Description of Artificial Sequence: Synthetic oligonucleotide
  Target: LAMA2; (-) strand; PAM type: YTN; PAM sequence: TTG
tttagcattatgtgctcaga

SEQ ID NO: 271757 - DNA, 20 bp, Artificial Sequence
  Description of Artificial Sequence: Synthetic oligonucleotide
  Target: LAMA2; (-) strand; PAM type: YTN; PAM sequence: TTG
taacatcagggccgttgttt

SEQ ID NO: 271758 - DNA, 20 bp, Artificial Sequence
  Description of Artificial Sequence: Synthetic oligonucleotide
  Target: LAMA2; (-) strand; PAM type: YTN; PAM sequence: CTA
ttgtaacatcagggccgttg

SEQ ID NO: 271759 - DNA, 20 bp, Artificial Sequence
  Description of Artificial Sequence: Synthetic oligonucleotide
  Target: LAMA2; (-) strand; PAM type: YTN; PAM sequence: TTA
gtatgctattgtaacatcag

SEQ ID NO: 271760 - DNA, 20 bp, Artificial Sequence
  Description of Artificial Sequence: Synthetic oligonucleotide
  Target: LAMA2; (-) strand; PAM type: YTN; PAM sequence: TTT
agtatgctattgtaacatca

SEQ ID NO: 271761 - DNA, 20 bp, Artificial Sequence
  Description of Artificial Sequence: Synthetic oligonucleotide
  Target: LAMA2; (-) strand; PAM type: YTN; PAM sequence: CTG
aaaaagtgtttagtatgcta

SEQ ID NO: 271762 - DNA, 20 bp, Artificial Sequence
  Description of Artificial Sequence: Synthetic oligonucleotide
  Target: LAMA2; (-) strand; PAM type: YTN; PAM sequence: TTC
tgaaaaagtgtttagtatgc

SEQ ID NO: 271763 - DNA, 20 bp, Artificial Sequence
  Description of Artificial Sequence: Synthetic oligonucleotide
  Target: LAMA2; (-) strand; PAM type: YTN; PAM sequence: CTA
tgagattctgaaaaagtgtt

SEQ ID NO: 271764 - DNA, 20 bp, Artificial Sequence
  Description of Artificial Sequence: Synthetic oligonucleotide
  Target: LAMA2; (-) strand; PAM type: YTN; PAM sequence: TTG
ctatgagattctgaaaaagt

SEQ ID NO: 271765 - DNA, 20 bp, Artificial Sequence
  Description of Artificial Sequence: Synthetic oligonucleotide
  Target: LAMA2; (-) strand; PAM type: YTN; PAM sequence: TTG
ttgctatgagattctgaaaa

SEQ ID NO: 271766 - DNA, 20 bp, Artificial Sequence
  Description of Artificial Sequence: Synthetic oligonucleotide
  Target: LAMA2; (-) strand; PAM type: YTN; PAM sequence: CTA
tattgttgctatgagattct

SEQ ID NO: 271767 - DNA, 20 bp, Artificial Sequence
  Description of Artificial Sequence: Synthetic oligonucleotide
  Target: LAMA2; (-) strand; PAM type: YTN; PAM sequence: TTC
tatattgttgctatgagatt

SEQ ID NO: 271768 - DNA, 20 bp, Artificial Sequence
  Description of Artificial Sequence: Synthetic oligonucleotide
  Target: LAMA2; (-) strand; PAM type: YTN; PAM sequence: CTG
tacattctatattgttgcta

SEQ ID NO: 271769 - DNA, 20 bp, Artificial Sequence
  Description of Artificial Sequence: Synthetic oligonucleotide
  Target: LAMA2; (-) strand; PAM type: YTN; PAM sequence: TTG
tatctgtacattctatattg

SEQ ID NO: 271770 - DNA, 20 bp, Artificial Sequence
  Description of Artificial Sequence: Synthetic oligonucleotide
  Target: LAMA2; (-) strand; PAM type: YTN; PAM sequence: CTC
cgtgttgtatctgtacattc

SEQ ID NO: 271771 - DNA, 20 bp, Artificial Sequence
  Description of Artificial Sequence: Synthetic oligonucleotide
  Target: LAMA2; (-) strand; PAM type: YTN; PAM sequence: TTG
gcaagaaactccgtgttgta

SEQ ID NO: 271772 - DNA, 20 bp, Artificial Sequence
  Description of Artificial Sequence: Synthetic oligonucleotide
  Target: LAMA2; (-) strand; PAM type: YTN; PAM sequence: TTT
ggcaagaaactccgtgttgt

SEQ ID NO: 271773 - DNA, 20 bp, Artificial Sequence
  Description of Artificial Sequence: Synthetic oligonucleotide
  Target: LAMA2; (-) strand; PAM type: YTN; PAM sequence: CTA
catacatttggcaagaaact

SEQ ID NO: 271774 - DNA, 20 bp, Artificial Sequence
  Description of Artificial Sequence: Synthetic oligonucleotide
  Target: LAMA2; (-) strand; PAM type: YTN; PAM sequence: CTA
atgtctacatacatttggca

SEQ ID NO: 271775 - DNA, 20 bp, Artificial Sequence
  Description of Artificial Sequence: Synthetic oligonucleotide
  Target: LAMA2; (-) strand; PAM type: YTN; PAM sequence: TTA
atctaatgtctacatacatt

SEQ ID NO: 271776 - DNA, 20 bp, Artificial Sequence
  Description of Artificial Sequence: Synthetic oligonucleotide
  Target: LAMA2; (-) strand; PAM type: YTN; PAM sequence: TTT
aatctaatgtctacatacat

SEQ ID NO: 271777 - DNA, 20 bp, Artificial Sequence
  Description of Artificial Sequence: Synthetic oligonucleotide
  Target: LAMA2; (-) strand; PAM type: YTN; PAM sequence: CTC
aatttaatctaatgtctaca

SEQ ID NO: 271778 - DNA, 20 bp, Artificial Sequence
  Description of Artificial Sequence: Synthetic oligonucleotide
  Target: LAMA2; (-) strand; PAM type: YTN; PAM sequence: TTA
atatgagataaatgcactca

SEQ ID NO: 271779 - DNA, 20 bp, Artificial Sequence
  Description of Artificial Sequence: Synthetic oligonucleotide
  Target: LAMA2; (-) strand; PAM type: YTN; PAM sequence: TTA
aattaatatgagataaatgc

SEQ ID NO: 271780 - DNA, 20 bp, Artificial Sequence
  Description of Artificial Sequence: Synthetic oligonucleotide
  Target: LAMA2; (-) strand; PAM type: YTN; PAM sequence: TTC
atattaaattaatatgagat

SEQ ID NO: 271781 - DNA, 20 bp, Artificial Sequence
  Description of Artificial Sequence: Synthetic oligonucleotide
  Target: LAMA2; (-) strand; PAM type: YTN; PAM sequence: TTT
catattaaattaatatgaga

SEQ ID NO: 271782 - DNA, 20 bp, Artificial Sequence
  Description of Artificial Sequence: Synthetic oligonucleotide
  Target: LAMA2; (-) strand; PAM type: YTN; PAM sequence: TTA
tttcatattaaattaatatg

SEQ ID NO: 271783 - DNA, 20 bp, Artificial Sequence
  Description of Artificial Sequence: Synthetic oligonucleotide
  Target: LAMA2; (-) strand; PAM type: YTN; PAM sequence: TTA
taacaaatatgaattatttc

SEQ ID NO: 271784 - DNA, 20 bp, Artificial Sequence
  Description of Artificial Sequence: Synthetic oligonucleotide
  Target: LAMA2; (-) strand; PAM type: YTN; PAM sequence: TTT
ataacaaatatgaattattt

SEQ ID NO: 271785 - DNA, 20 bp, Artificial Sequence
  Description of Artificial Sequence: Synthetic oligonucleotide
  Target: LAMA2; (-) strand; PAM type: YTN; PAM sequence: TTA
tttataacaaatatgaatta

SEQ ID NO: 271786 - DNA, 20 bp, Artificial Sequence
  Description of Artificial Sequence: Synthetic oligonucleotide
  Target: LAMA2; (-) strand; PAM type: YTN; PAM sequence: CTT
atttataacaaatatgaatt

SEQ ID NO: 271787 - DNA, 20 bp, Artificial Sequence
  Description of Artificial Sequence: Synthetic oligonucleotide
  Target: LAMA2; (-) strand; PAM type: YTN; PAM sequence: TTC
ttatttataacaaatatgaa

SEQ ID NO: 271788 - DNA, 20 bp, Artificial Sequence
  Description of Artificial Sequence: Synthetic oligonucleotide
  Target: LAMA2; (-) strand; PAM type: YTN; PAM sequence: TTA
gaaaattcttatttataaca

SEQ ID NO: 271789 - DNA, 20 bp, Artificial Sequence
  Description of Artificial Sequence: Synthetic oligonucleotide
  Target: LAMA2; (-) strand; PAM type: YTN; PAM sequence: CTG
ttagaaaattcttatttata

SEQ ID NO: 271790 - DNA, 20 bp, Artificial Sequence
  Description of Artificial Sequence: Synthetic oligonucleotide
  Target: LAMA2; (-) strand; PAM type: YTN; PAM sequence: CTA
ccatgacctgttagaaaatt

SEQ ID NO: 271791 - DNA, 20 bp, Artificial Sequence
  Description of Artificial Sequence: Synthetic oligonucleotide
  Target: LAMA2; (-) strand; PAM type: YTN; PAM sequence: TTC
taccatgacctgttagaaaa

SEQ ID NO: 271792 - DNA, 20 bp, Artificial Sequence
  Description of Artificial Sequence: Synthetic oligonucleotide
  Target: LAMA2; (-) strand; PAM type: YTN; PAM sequence: TTA
ttctaccatgacctgttaga

SEQ ID NO: 271793 - DNA, 20 bp, Artificial Sequence
  Description of Artificial Sequence: Synthetic oligonucleotide
  Target: LAMA2; (-) strand; PAM type: YTN; PAM sequence: TTT
attctaccatgacctgttag

SEQ ID NO: 271794 - DNA, 20 bp, Artificial Sequence
  Description of Artificial Sequence: Synthetic oligonucleotide
  Target: LAMA2; (-) strand; PAM type: YTN; PAM sequence: TTG
atttattctaccatgacctg

SEQ ID NO: 271795 - DNA, 20 bp, Artificial Sequence
  Description of Artificial Sequence: Synthetic oligonucleotide
  Target: LAMA2; (-) strand; PAM type: YTN; PAM sequence: TTA
aattgatttattctaccatg

SEQ ID NO: 271796 - DNA, 20 bp, Artificial Sequence
  Description of Artificial Sequence: Synthetic oligonucleotide
  Target: LAMA2; (-) strand; PAM type: YTN; PAM sequence: TTG
ttaaattgatttattctacc

SEQ ID NO: 271797 - DNA, 20 bp, Artificial Sequence
  Description of Artificial Sequence: Synthetic oligonucleotide
  Target: LAMA2; (-) strand; PAM type: YTN; PAM sequence: CTT
gttaaattgatttattctac

SEQ ID NO: 271798 - DNA, 20 bp, Artificial Sequence
  Description of Artificial Sequence: Synthetic oligonucleotide
  Target: LAMA2; (-) strand; PAM type: YTN; PAM sequence: TTA
tgtgtgcttgttaaattgat

SEQ ID NO: 271799 - DNA, 20 bp, Artificial Sequence
  Description of Artificial Sequence: Synthetic oligonucleotide
  Target: LAMA2; (-) strand; PAM type: YTN; PAM sequence: TTT
atgtgtgcttgttaaattga

SEQ ID NO: 271800 - DNA, 20 bp, Artificial Sequence
  Description of Artificial Sequence: Synthetic oligonucleotide
  Target: LAMA2; (-) strand; PAM type: YTN; PAM sequence: TTA
tgaacatttatgtgtgcttg

SEQ ID NO: 271801 - DNA, 20 bp, Artificial Sequence
  Description of Artificial Sequence: Synthetic oligonucleotide
  Target: LAMA2; (-) strand; PAM type: YTN; PAM sequence: TTG
tatgttatgaacatttatgt

SEQ ID NO: 271802 - DNA, 20 bp, Artificial Sequence
  Description of Artificial Sequence: Synthetic oligonucleotide
  Target: LAMA2; (-) strand; PAM type: YTN; PAM sequence: TTT
gtatgttatgaacatttatg

SEQ ID NO: 271803 - DNA, 20 bp, Artificial Sequence
  Description of Artificial Sequence: Synthetic oligonucleotide
  Target: LAMA2; (-) strand; PAM type: YTN; PAM sequence: CTT
tgtatgttatgaacatttat

SEQ ID NO: 271804 - DNA, 20 bp, Artificial Sequence
  Description of Artificial Sequence: Synthetic oligonucleotide
  Target: LAMA2; (-) strand; PAM type: YTN; PAM sequence: TTA
ggctttgtatgttatgaaca

SEQ ID NO: 271805 - DNA, 20 bp, Artificial Sequence
  Description of Artificial Sequence: Synthetic oligonucleotide
  Target: LAMA2; (-) strand; PAM type: YTN; PAM sequence: CTT
aggctttgtatgttatgaac

SEQ ID NO: 271806 - DNA, 20 bp, Artificial Sequence
  Description of Artificial Sequence: Synthetic oligonucleotide
  Target: LAMA2; (-) strand; PAM type: YTN; PAM sequence: CTG
ccaacacgtaacttaggctt

SEQ ID NO: 271807 - DNA, 20 bp, Artificial Sequence
  Description of Artificial Sequence: Synthetic oligonucleotide
  Target: LAMA2; (-) strand; PAM type: YTN; PAM sequence: TTC
atctgccaacacgtaactta

SEQ ID NO: 271808 - DNA, 20 bp, Artificial Sequence
  Description of Artificial Sequence: Synthetic oligonucleotide
  Target: LAMA2; (-) strand; PAM type: YTN; PAM sequence: TTT
catctgccaacacgtaactt

SEQ ID NO: 271809 - DNA, 20 bp, Artificial Sequence
  Description of Artificial Sequence: Synthetic oligonucleotide
  Target: LAMA2; (-) strand; PAM type: YTN; PAM sequence: TTT
tcatctgccaacacgtaact

SEQ ID NO: 271810 - DNA, 20 bp, Artificial Sequence
  Description of Artificial Sequence: Synthetic oligonucleotide
  Target: LAMA2; (-) strand; PAM type: YTN; PAM sequence: TTT
ttcatctgccaacacgtaac

SEQ ID NO: 271811 - DNA, 20 bp, Artificial Sequence
  Description of Artificial Sequence: Synthetic oligonucleotide
  Target: LAMA2; (-) strand; PAM type: YTN; PAM sequence: TTC
atatttttcatctgccaaca

SEQ ID NO: 271812 - DNA, 20 bp, Artificial Sequence
  Description of Artificial Sequence: Synthetic oligonucleotide
  Target: LAMA2; (-) strand; PAM type: YTN; PAM sequence: CTC
attcatatttttcatctgcc

SEQ ID NO: 271813 - DNA, 20 bp, Artificial Sequence
  Description of Artificial Sequence: Synthetic oligonucleotide
  Target: LAMA2; (-) strand; PAM type: YTN; PAM sequence: TTG
agcctcattcatatttttca

SEQ ID NO: 271814 - DNA, 20 bp, Artificial Sequence
  Description of Artificial Sequence: Synthetic oligonucleotide
  Target: LAMA2; (-) strand; PAM type: YTN; PAM sequence: TTG
aagacagattgagcctcatt

SEQ ID NO: 271815 - DNA, 20 bp, Artificial Sequence
  Description of Artificial Sequence: Synthetic oligonucleotide
  Target: LAMA2; (-) strand; PAM type: YTN; PAM sequence: TTT
gaagacagattgagcctcat

SEQ ID NO: 271816 - DNA, 20 bp, Artificial Sequence
  Description of Artificial Sequence: Synthetic oligonucleotide
  Target: LAMA2; (-) strand; PAM type: YTN; PAM sequence: CTT
tgaagacagattgagcctca

SEQ ID NO: 271817 - DNA, 20 bp, Artificial Sequence
  Description of Artificial Sequence: Synthetic oligonucleotide
  Target: LAMA2; (-) strand; PAM type: YTN; PAM sequence: TTC
tttgaagacagattgagcct

SEQ ID NO: 271818 - DNA, 20 bp, Artificial Sequence
  Description of Artificial Sequence: Synthetic oligonucleotide
  Target: LAMA2; (-) strand; PAM type: YTN; PAM sequence: CTC
aaagttctttgaagacagat

SEQ ID NO: 271819 - DNA, 20 bp, Artificial Sequence
  Description of Artificial Sequence: Synthetic oligonucleotide
  Target: LAMA2; (-) strand; PAM type: YTN; PAM sequence: CTG
atgtacacacacacacacac

SEQ ID NO: 271820 - DNA, 20 bp, Artificial Sequence
  Description of Artificial Sequence: Synthetic oligonucleotide
  Target: LAMA2; (-) strand; PAM type: YTN; PAM sequence: TTA
aatgctgatgtacacacaca

SEQ ID NO: 271821 - DNA, 20 bp, Artificial Sequence
  Description of Artificial Sequence: Synthetic oligonucleotide
  Target: LAMA2; (-) strand; PAM type: YTN; PAM sequence: CTT
aaatgctgatgtacacacac

SEQ ID NO: 271822 - DNA, 20 bp, Artificial Sequence
  Description of Artificial Sequence: Synthetic oligonucleotide
  Target: LAMA2; (-) strand; PAM type: YTN; PAM sequence: CTC
catacacttaaatgctgatg

SEQ ID NO: 271823 - DNA, 20 bp, Artificial Sequence
  Description of Artificial Sequence: Synthetic oligonucleotide
  Target: LAMA2; (-) strand; PAM type: YTN; PAM sequence: CTA
atatggtcctccatacactt

SEQ ID NO: 271824 - DNA, 20 bp, Artificial Sequence
  Description of Artificial Sequence: Synthetic oligonucleotide
  Target: LAMA2; (-) strand; PAM type: YTN; PAM sequence: TTG
tctaatatggtcctccatac

SEQ ID NO: 271825 - DNA, 20 bp, Artificial Sequence
  Description of Artificial Sequence: Synthetic oligonucleotide
  Target: LAMA2; (-) strand; PAM type: YTN; PAM sequence: CTG
catgcagttgtctaatatgg

SEQ ID NO: 271826 - DNA, 20 bp, Artificial Sequence
  Description of Artificial Sequence: Synthetic oligonucleotide
  Target: LAMA2; (-) strand; PAM type: YTN; PAM sequence: TTA
tatacctgcatgcagttgtc

SEQ ID NO: 271827 - DNA, 20 bp, Artificial Sequence
  Description of Artificial Sequence: Synthetic oligonucleotide
  Target: LAMA2; (-) strand; PAM type: YTN; PAM sequence: TTA
ttatatacctgcatgcagtt

SEQ ID NO: 271828 - DNA, 20 bp, Artificial Sequence
  Description of Artificial Sequence: Synthetic oligonucleotide
  Target: LAMA2; (-) strand; PAM type: YTN; PAM sequence: TTT
attatatacctgcatgcagt

SEQ ID NO: 271829 - DNA, 20 bp, Artificial Sequence
  Description of Artificial Sequence: Synthetic oligonucleotide
  Target: LAMA2; (-) strand; PAM type: YTN; PAM sequence: TTT
tattatatacctgcatgcag

SEQ ID NO: 271830 - DNA, 20 bp, Artificial Sequence
  Description of Artificial Sequence: Synthetic oligonucleotide
  Target: LAMA2; (-) strand; PAM type: YTN; PAM sequence: TTC
atgttttattatatacctgc

SEQ ID NO: 271831 - DNA, 20 bp, Artificial Sequence
  Description of Artificial Sequence: Synthetic oligonucleotide
  Target: LAMA2; (-) strand; PAM type: YTN; PAM sequence: TTT
catgttttattatatacctg

SEQ ID NO: 271832 - DNA, 20 bp, Artificial Sequence
  Description of Artificial Sequence: Synthetic oligonucleotide
  Target: LAMA2; (-) strand; PAM type: YTN; PAM sequence: TTA
tttcatgttttattatatac

SEQ ID NO: 271833 - DNA, 20 bp, Artificial Sequence
  Description of Artificial Sequence: Synthetic oligonucleotide
  Target: LAMA2; (-) strand; PAM type: YTN; PAM sequence: TTT
atttcatgttttattatata

SEQ ID NO: 271834 - DNA, 20 bp, Artificial Sequence
  Description of Artificial Sequence: Synthetic oligonucleotide
  Target: LAMA2; (-) strand; PAM type: YTN; PAM sequence: TTT
tatttcatgttttattatat

SEQ ID NO: 271835 - DNA, 20 bp, Artificial Sequence
  Description of Artificial Sequence: Synthetic oligonucleotide
  Target: LAMA2; (-) strand; PAM type: YTN; PAM sequence: TTA
ttttatttcatgttttatta

SEQ ID NO: 271836 - DNA, 20 bp, Artificial Sequence
  Description of Artificial Sequence: Synthetic oligonucleotide
  Target: LAMA2; (-) strand; PAM type: YTN; PAM sequence: TTT
attttatttcatgttttatt

SEQ ID NO: 271837 - DNA, 20 bp, Artificial Sequence
  Description of Artificial Sequence: Synthetic oligonucleotide
  Target: LAMA2; (-) strand; PAM type: YTN; PAM sequence: CTT
tattttatttcatgttttat

SEQ ID NO: 271838 - DNA, 20 bp, Artificial Sequence
  Description of Artificial Sequence: Synthetic oligonucleotide
  Target: LAMA2; (-) strand; PAM type: YTN; PAM sequence: TTC
cgactttattttatttcatg

SEQ ID NO: 271839 - DNA, 20 bp, Artificial Sequence
  Description of Artificial Sequence: Synthetic oligonucleotide
  Target: LAMA2; (-) strand; PAM type: YTN; PAM sequence: CTT
ccgactttattttatttcat

SEQ ID NO: 271840 - DNA, 20 bp, Artificial Sequence
  Description of Artificial Sequence: Synthetic oligonucleotide
  Target: LAMA2; (-) strand; PAM type: YTN; PAM sequence: TTC
ttccgactttattttatttc

SEQ ID NO: 271841 - DNA, 20 bp, Artificial Sequence
  Description of Artificial Sequence: Synthetic oligonucleotide
  Target: LAMA2; (-) strand; PAM type: YTN; PAM sequence: TTT
cttccgactttattttattt

SEQ ID NO: 271842 - DNA, 20 bp, Artificial Sequence
  Description of Artificial Sequence: Synthetic oligonucleotide
  Target: LAMA2; (-) strand; PAM type: YTN; PAM sequence: CTC
cagaatttcttccgacttta

SEQ ID NO: 271843 - DNA, 20 bp, Artificial Sequence
  Description of Artificial Sequence: Synthetic oligonucleotide
  Target: LAMA2; (-) strand; PAM type: YTN; PAM sequence: TTC
tccagaatttcttccgactt

SEQ ID NO: 271844 - DNA, 20 bp, Artificial Sequence
  Description of Artificial Sequence: Synthetic oligonucleotide
  Target: LAMA2; (-) strand; PAM type: YTN; PAM sequence: TTT
ctccagaatttcttccgact

SEQ ID NO: 271845 - DNA, 20 bp, Artificial Sequence
  Description of Artificial Sequence: Synthetic oligonucleotide
  Target: LAMA2; (-) strand; PAM type: YTN; PAM sequence: TTA
aatatttctccagaatttct

SEQ ID NO: 271846 - DNA, 20 bp, Artificial Sequence
  Description of Artificial Sequence: Synthetic oligonucleotide
  Target: LAMA2; (-) strand; PAM type: YTN; PAM sequence: TTA
ttaaatatttctccagaatt

SEQ ID NO: 271847 - DNA, 20 bp, Artificial Sequence
  Description of Artificial Sequence: Synthetic oligonucleotide
  Target: LAMA2; (-) strand; PAM type: YTN; PAM sequence: CTA
ttattaaatatttctccaga

SEQ ID NO: 271848 - DNA, 20 bp, Artificial Sequence
  Description of Artificial Sequence: Synthetic oligonucleotide
  Target: LAMA2; (-) strand; PAM type: YTN; PAM sequence: TTC
tattattaaatatttctcca

SEQ ID NO: 271849 - DNA, 20 bp, Artificial Sequence
  Description of Artificial Sequence: Synthetic oligonucleotide
  Target: LAMA2; (-) strand; PAM type: YTN; PAM sequence: TTA
ttctattattaaatatttct

SEQ ID NO: 271850 - DNA, 20 bp, Artificial Sequence
  Description of Artificial Sequence: Synthetic oligonucleotide
  Target: LAMA2; (-) strand; PAM type: YTN; PAM sequence: CTA
agcagatgaaattattctat

SEQ ID NO: 271851 - DNA, 20 bp, Artificial Sequence
  Description of Artificial Sequence: Synthetic oligonucleotide
  Target: LAMA2; (-) strand; PAM type: YTN; PAM sequence: TTA
cccctaagcagatgaaatta

SEQ ID NO: 271852 - DNA, 20 bp, Artificial Sequence
  Description of Artificial Sequence: Synthetic oligonucleotide
  Target: LAMA2; (-) strand; PAM type: YTN; PAM sequence: CTA
attacccctaagcagatgaa

SEQ ID NO: 271853 - DNA, 20 bp, Artificial Sequence
  Description of Artificial Sequence: Synthetic oligonucleotide
  Target: LAMA2; (-) strand; PAM type: YTN; PAM sequence: TTC
taattacccctaagcagatg

SEQ ID NO: 271854 - DNA, 20 bp, Artificial Sequence
  Description of Artificial Sequence: Synthetic oligonucleotide
  Target: LAMA2; (-) strand; PAM type: YTN; PAM sequence: TTT
ctaattacccctaagcagat

SEQ ID NO: 271855 - DNA, 20 bp, Artificial Sequence
  Description of Artificial Sequence: Synthetic oligonucleotide
  Target: LAMA2; (-) strand; PAM type: YTN; PAM sequence: TTT
tctaattacccctaagcaga

SEQ ID NO: 271856 - DNA, 20 bp, Artificial Sequence
  Description of Artificial Sequence: Synthetic oligonucleotide
  Target: LAMA2; (-) strand; PAM type: YTN; PAM sequence: TTT
ttctaattacccctaagcag

SEQ ID NO: 271857 - DNA, 20 bp, Artificial Sequence
  Description of Artificial Sequence: Synthetic oligonucleotide
  Target: LAMA2; (-) strand; PAM type: YTN; PAM sequence: TTT
tttctaattacccctaagca

SEQ ID NO: 271858 - DNA, 20 bp, Artificial Sequence
  Description of Artificial Sequence: Synthetic oligonucleotide
  Target: LAMA2; (-) strand; PAM type: YTN; PAM sequence: TTA
catgaaattttttctaatta

SEQ ID NO: 271859 - DNA, 20 bp, Artificial Sequence
  Description of Artificial Sequence: Synthetic oligonucleotide
  Target: LAMA2; (-) strand; PAM type: YTN; PAM sequence: TTA
ttacatgaaattttttctaa

SEQ ID NO: 271860 - DNA, 20 bp, Artificial Sequence
  Description of Artificial Sequence: Synthetic oligonucleotide
  Target: LAMA2; (-) strand; PAM type: YTN; PAM sequence: TTT
attacatgaaattttttcta

SEQ ID NO: 271861 - DNA, 20 bp, Artificial Sequence
  Description of Artificial Sequence: Synthetic oligonucleotide
  Target: LAMA2; (-) strand; PAM type: YTN; PAM sequence: TTA
agtgaatgaatgaatgaaat

SEQ ID NO: 271862 - DNA, 20 bp, Artificial Sequence
  Description of Artificial Sequence: Synthetic oligonucleotide
  Target: LAMA2; (-) strand; PAM type: YTN; PAM sequence: TTA
gttaagtgaatgaatgaatg

SEQ ID NO: 271863 - DNA, 20 bp, Artificial Sequence
  Description of Artificial Sequence: Synthetic oligonucleotide
  Target: LAMA2; (-) strand; PAM type: YTN; PAM sequence: CTC
ccaaaaagtattagttaagt

SEQ ID NO: 271864 - DNA, 20 bp, Artificial Sequence
  Description of Artificial Sequence: Synthetic oligonucleotide
  Target: LAMA2; (-) strand; PAM type: YTN; PAM sequence: CTA
gaacatgagagactcccaaa

SEQ ID NO: 271865 - DNA, 20 bp, Artificial Sequence
  Description of Artificial Sequence: Synthetic oligonucleotide
  Target: LAMA2; (-) strand; PAM type: YTN; PAM sequence: TTC
ctagaacatgagagactccc

SEQ ID NO: 271866 - DNA, 20 bp, Artificial Sequence
  Description of Artificial Sequence: Synthetic oligonucleotide
  Target: LAMA2; (-) strand; PAM type: YTN; PAM sequence: CTA
tccccagtgtcataattcct

SEQ ID NO: 271867 - DNA, 20 bp, Artificial Sequence
  Description of Artificial Sequence: Synthetic oligonucleotide
  Target: LAMA2; (-) strand; PAM type: YTN; PAM sequence: TTC
tatccccagtgtcataattc

SEQ ID NO: 271868 - DNA, 20 bp, Artificial Sequence
  Description of Artificial Sequence: Synthetic oligonucleotide
  Target: LAMA2; (-) strand; PAM type: YTN; PAM sequence: CTT
ctatccccagtgtcataatt

SEQ ID NO: 271869 - DNA, 20 bp, Artificial Sequence
  Description of Artificial Sequence: Synthetic oligonucleotide
  Target: LAMA2; (-) strand; PAM type: YTN; PAM sequence: CTC
acacttctatccccagtgtc

SEQ ID NO: 271870 - DNA, 20 bp, Artificial Sequence
  Description of Artificial Sequence: Synthetic oligonucleotide
  Target: LAMA2; (-) strand; PAM type: YTN; PAM sequence: TTG
ctcacacttctatccccagt

SEQ ID NO: 271871 - DNA, 20 bp, Artificial Sequence
  Description of Artificial Sequence: Synthetic oligonucleotide
  Target: LAMA2; (-) strand; PAM type: YTN; PAM sequence: TTT
gctcacacttctatccccag

SEQ ID NO: 271872 - DNA, 20 bp, Artificial Sequence
  Description of Artificial Sequence: Synthetic oligonucleotide
  Target: LAMA2; (-) strand; PAM type: YTN; PAM sequence: TTT
tgctcacacttctatcccca

SEQ ID NO: 271873 - DNA, 20 bp, Artificial Sequence
  Description of Artificial Sequence: Synthetic oligonucleotide
  Target: LAMA2; (-) strand; PAM type: YTN; PAM sequence: CTG
cgcagttttgctcacacttc

SEQ ID NO: 271874 - DNA, 20 bp, Artificial Sequence
  Description of Artificial Sequence: Synthetic oligonucleotide
  Target: LAMA2; (-) strand; PAM type: YTN; PAM sequence: CTA
agccaatgagggcaaggact

SEQ ID NO: 271875 - DNA, 20 bp, Artificial Sequence
  Description of Artificial Sequence: Synthetic oligonucleotide
  Target: LAMA2; (-) strand; PAM type: YTN; PAM sequence: CTA
tactaagccaatgagggcaa

SEQ ID NO: 271876 - DNA, 20 bp, Artificial Sequence
  Description of Artificial Sequence: Synthetic oligonucleotide
  Target: LAMA2; (-) strand; PAM type: YTN; PAM sequence: TTA
gactatactaagccaatgag

SEQ ID NO: 271877 - DNA, 20 bp, Artificial Sequence
  Description of Artificial Sequence: Synthetic oligonucleotide
  Target: LAMA2; (-) strand; PAM type: YTN; PAM sequence: CTA
acgtcagatcattagactat

SEQ ID NO: 271878 - DNA, 20 bp, Artificial Sequence
  Description of Artificial Sequence: Synthetic oligonucleotide
  Target: LAMA2; (-) strand; PAM type: YTN; PAM sequence: CTC
taacgtcagatcattagact

SEQ ID NO: 271879 - DNA, 20 bp, Artificial Sequence
  Description of Artificial Sequence: Synthetic oligonucleotide
  Target: LAMA2; (-) strand; PAM type: YTN; PAM sequence: TTG
tgtctctaacgtcagatcat

SEQ ID NO: 271880 - DNA, 20 bp, Artificial Sequence
  Description of Artificial Sequence: Synthetic oligonucleotide
  Target: LAMA2; (-) strand; PAM type: YTN; PAM sequence: TTT
gtgtctctaacgtcagatca

SEQ ID NO: 271881 - DNA, 20 bp, Artificial Sequence
  Description of Artificial Sequence: Synthetic oligonucleotide
  Target: LAMA2; (-) strand; PAM type: YTN; PAM sequence: TTT
tgtgtctctaacgtcagatc

SEQ ID NO: 271882 - DNA, 20 bp, Artificial Sequence
  Description of Artificial Sequence: Synthetic oligonucleotide
  Target: LAMA2; (-) strand; PAM type: YTN; PAM sequence: TTT
ttgtgtctctaacgtcagat

SEQ ID NO: 271883 - DNA, 20 bp, Artificial Sequence
  Description of Artificial Sequence: Synthetic oligonucleotide
  Target: LAMA2; (-) strand; PAM type: YTN; PAM sequence: CTT
tttgtgtctctaacgtcaga

SEQ ID NO: 271884 - DNA, 20 bp, Artificial Sequence
  Description of Artificial Sequence: Synthetic oligonucleotide
  Target: LAMA2; (-) strand; PAM type: YTN; PAM sequence: CTC
aaaaaaaaaaaaaaaaagaa

SEQ ID NO: 271885 - DNA, 20 bp, Artificial Sequence
  Description of Artificial Sequence: Synthetic oligonucleotide
  Target: LAMA2; (-) strand; PAM type: YTN; PAM sequence: CTG
tctcaaaaaaaaaaaaaaaa

SEQ ID NO: 271886 - DNA, 20 bp, Artificial Sequence
  Description of Artificial Sequence: Synthetic oligonucleotide
  Target: LAMA2; (-) strand; PAM type: YTN; PAM sequence: CTC
tgtctcaaaaaaaaaaaaaa

SEQ ID NO: 271887 - DNA, 20 bp, Artificial Sequence
  Description of Artificial Sequence: Synthetic oligonucleotide
  Target: LAMA2; (-) strand; PAM type: YTN; PAM sequence: CTC
ggcgacagagcaagactctg

SEQ ID NO: 271888 - DNA, 20 bp, Artificial Sequence
  Description of Artificial Sequence: Synthetic oligonucleotide
  Target: LAMA2; (-) strand; PAM type: YTN; PAM sequence: CTC
cagcctcggcgacagagcaa

SEQ ID NO: 271889 - DNA, 20 bp, Artificial Sequence
  Description of Artificial Sequence: Synthetic oligonucleotide
  Target: LAMA2; (-) strand; PAM type: YTN; PAM sequence: CTG
cactccagcctcggcgacag

SEQ ID NO: 271890 - DNA, 20 bp, Artificial Sequence
  Description of Artificial Sequence: Synthetic oligonucleotide
  Target: LAMA2; (-) strand; PAM type: YTN; PAM sequence: TTG
cagtgagccaagatcgcacc

SEQ ID NO: 271891 - DNA, 20 bp, Artificial Sequence
  Description of Artificial Sequence: Synthetic oligonucleotide
  Target: LAMA2; (-) strand; PAM type: YTN; PAM sequence: TTG
aacccgggaggcggaggttg

SEQ ID NO: 271892 - DNA, 20 bp, Artificial Sequence
  Description of Artificial Sequence: Synthetic oligonucleotide
  Target: LAMA2; (-) strand; PAM type: YTN; PAM sequence: CTT
gaacccgggaggcggaggtt

SEQ ID NO: 271893 - DNA, 20 bp, Artificial Sequence
  Description of Artificial Sequence: Synthetic oligonucleotide
  Target: LAMA2; (-) strand; PAM type: YTN; PAM sequence: CTG
aggcaggaaaatcacttgaa

SEQ ID NO: 271894 - DNA, 20 bp, Artificial Sequence
  Description of Artificial Sequence: Synthetic oligonucleotide
  Target: LAMA2; (-) strand; PAM type: YTN; PAM sequence: TTG
ggaggctgaggcaggaaaat

SEQ ID NO: 271895 - DNA, 20 bp, Artificial Sequence
  Description of Artificial Sequence: Synthetic oligonucleotide
  Target: LAMA2; (-) strand; PAM type: YTN; PAM sequence: CTT
gggaggctgaggcaggaaaa

SEQ ID NO: 271896 - DNA, 20 bp, Artificial Sequence
  Description of Artificial Sequence: Synthetic oligonucleotide
  Target: LAMA2; (-) strand; PAM type: YTN; PAM sequence: CTA
cttgggaggctgaggcagga

SEQ ID NO: 271897 - DNA, 20 bp, Artificial Sequence
  Description of Artificial Sequence: Synthetic oligonucleotide
  Target: LAMA2; (-) strand; PAM type: YTN; PAM sequence: CTG
taatcccagctacttgggag

SEQ ID NO: 271898 - DNA, 20 bp, Artificial Sequence
  Description of Artificial Sequence: Synthetic oligonucleotide
  Target: LAMA2; (-) strand; PAM type: YTN; PAM sequence: TTA
gccaggtgtggtggcacaca

SEQ ID NO: 271899 - DNA, 20 bp, Artificial Sequence
  Description of Artificial Sequence: Synthetic oligonucleotide
  Target: LAMA2; (-) strand; PAM type: YTN; PAM sequence: CTA
aaaatacaaaaaaaattagc

SEQ ID NO: 271900 - DNA, 20 bp, Artificial Sequence
  Description of Artificial Sequence: Synthetic oligonucleotide
  Target: LAMA2; (-) strand; PAM type: YTN; PAM sequence: CTA
ctaaaaatacaaaaaaaatt

SEQ ID NO: 271901 - DNA, 20 bp, Artificial Sequence
  Description of Artificial Sequence: Synthetic oligonucleotide
  Target: LAMA2; (-) strand; PAM type: YTN; PAM sequence: CTC
tactaaaaatacaaaaaaaa

SEQ ID NO: 271902 - DNA, 20 bp, Artificial Sequence
  Description of Artificial Sequence: Synthetic oligonucleotide
  Target: LAMA2; (-) strand; PAM type: YTN; PAM sequence: CTG
acgaacatggtgaaacccgt

SEQ ID NO: 271903 - DNA, 20 bp, Artificial Sequence
  Description of Artificial Sequence: Synthetic oligonucleotide
  Target: LAMA2; (-) strand; PAM type: YTN; PAM sequence: TTC
aagaccagcctgacgaacat

SEQ ID NO: 271904 - DNA, 20 bp, Artificial Sequence
  Description of Artificial Sequence: Synthetic oligonucleotide
  Target: LAMA2; (-) strand; PAM type: YTN; PAM sequence: TTG
ggaggccaaggcaggcgaat

SEQ ID NO: 271905 - DNA, 20 bp, Artificial Sequence
  Description of Artificial Sequence: Synthetic oligonucleotide
  Target: LAMA2; (-) strand; PAM type: YTN; PAM sequence: TTT
gggaggccaaggcaggcgaa

SEQ ID NO: 271906 - DNA, 20 bp, Artificial Sequence
  Description of Artificial Sequence: Synthetic oligonucleotide
  Target: LAMA2; (-) strand; PAM type: YTN; PAM sequence: TTT
tgggaggccaaggcaggcga

SEQ ID NO: 271907 - DNA, 20 bp, Artificial Sequence
  Description of Artificial Sequence: Synthetic oligonucleotide
  Target: LAMA2; (-) strand; PAM type: YTN; PAM sequence: CTG
taatcccagcattttgggag

SEQ ID NO: 271908 - DNA, 20 bp, Artificial Sequence
  Description of Artificial Sequence: Synthetic oligonucleotide
  Target: LAMA2; (-) strand; PAM type: YTN; PAM sequence: CTC
atgcctgtaatcccagcatt

SEQ ID NO: 271909 - DNA, 20 bp, Artificial Sequence
  Description of Artificial Sequence: Synthetic oligonucleotide
  Target: LAMA2; (-) strand; PAM type: YTN; PAM sequence: TTG
tggccaggtgcggtggctca

SEQ ID NO: 271910 - DNA, 20 bp, Artificial Sequence
  Description of Artificial Sequence: Synthetic oligonucleotide
  Target: LAMA2; (-) strand; PAM type: YTN; PAM sequence: CTT
gtggccaggtgcggtggctc

SEQ ID NO: 271911 - DNA, 20 bp, Artificial Sequence
  Description of Artificial Sequence: Synthetic oligonucleotide
  Target: LAMA2; (-) strand; PAM type: YTN; PAM sequence: TTC
ttgtggccaggtgcggtggc

SEQ ID NO: 271912 - DNA, 20 bp, Artificial Sequence
  Description of Artificial Sequence: Synthetic oligonucleotide
  Target: LAMA2; (-) strand; PAM type: YTN; PAM sequence: CTT
cttgtggccaggtgcggtgg

SEQ ID NO: 271913 - DNA, 20 bp, Artificial Sequence
  Description of Artificial Sequence: Synthetic oligonucleotide
  Target: LAMA2; (-) strand; PAM type: YTN; PAM sequence: TTA
atgaaatacttcttgtggcc

SEQ ID NO: 271914 - DNA, 20 bp, Artificial Sequence
  Description of Artificial Sequence: Synthetic oligonucleotide
  Target: LAMA2; (-) strand; PAM type: YTN; PAM sequence: CTT
aatgaaatacttcttgtggc

SEQ ID NO: 271915 - DNA, 20 bp, Artificial Sequence
  Description of Artificial Sequence: Synthetic oligonucleotide
  Target: LAMA2; (-) strand; PAM type: YTN; PAM sequence: CTC
ttaatgaaatacttcttgtg

SEQ ID NO: 271916 - DNA, 20 bp, Artificial Sequence
  Description of Artificial Sequence: Synthetic oligonucleotide
  Target: LAMA2; (-) strand; PAM type: YTN; PAM sequence: CTG
acactcttaatgaaatactt

SEQ ID NO: 271917 - DNA, 20 bp, Artificial Sequence
  Description of Artificial Sequence: Synthetic oligonucleotide
  Target: LAMA2; (-) strand; PAM type: YTN; PAM sequence: TTG
agacataataaagatctgac

SEQ ID NO: 271918 - DNA, 20 bp, Artificial Sequence
  Description of Artificial Sequence: Synthetic oligonucleotide
  Target: LAMA2; (-) strand; PAM type: YTN; PAM sequence: CTG
gaaagggtaaagagtatagg

SEQ ID NO: 271919 - DNA, 20 bp, Artificial Sequence
  Description of Artificial Sequence: Synthetic oligonucleotide
  Target: LAMA2; (-) strand; PAM type: YTN; PAM sequence: CTG
ctggaaagggtaaagagtat

SEQ ID NO: 271920 - DNA, 20 bp, Artificial Sequence
  Description of Artificial Sequence: Synthetic oligonucleotide
  Target: LAMA2; (-) strand; PAM type: YTN; PAM sequence: TTA
aaaaacatagcatgagacaa

SEQ ID NO: 271921 - DNA, 20 bp, Artificial Sequence
  Description of Artificial Sequence: Synthetic oligonucleotide
  Target: LAMA2; (-) strand; PAM type: YTN; PAM sequence: TTT
aaaaaacatagcatgagaca

SEQ ID NO: 271922 - DNA, 20 bp, Artificial Sequence
  Description of Artificial Sequence: Synthetic oligonucleotide
  Target: LAMA2; (-) strand; PAM type: YTN; PAM sequence: CTG
tttaaaaaacatagcatgag

SEQ ID NO: 271923 - DNA, 20 bp, Artificial Sequence
  Description of Artificial Sequence: Synthetic oligonucleotide
  Target: LAMA2; (-) strand; PAM type: YTN; PAM sequence: CTA
aaaaataaagtctgtttaaa

SEQ ID NO: 271924 - DNA, 20 bp, Artificial Sequence
  Description of Artificial Sequence: Synthetic oligonucleotide
  Target: LAMA2; (-) strand; PAM type: YTN; PAM sequence: TTC
taaaaaataaagtctgttta

SEQ ID NO: 271925 - DNA, 20 bp, Artificial Sequence
  Description of Artificial Sequence: Synthetic oligonucleotide
  Target: LAMA2; (-) strand; PAM type: YTN; PAM sequence: CTG
ttctaaaaaataaagtctgt

SEQ ID NO: 271926 - DNA, 20 bp, Artificial Sequence
  Description of Artificial Sequence: Synthetic oligonucleotide
  Target: LAMA2; (-) strand; PAM type: YTN; PAM sequence: TTA
agctgttctaaaaaataaag

SEQ ID NO: 271927 - DNA, 20 bp, Artificial Sequence
  Description of Artificial Sequence: Synthetic oligonucleotide
  Target: LAMA2; (-) strand; PAM type: YTN; PAM sequence: TTT
aagctgttctaaaaaataaa

SEQ ID NO: 271928 - DNA, 20 bp, Artificial Sequence
  Description of Artificial Sequence: Synthetic oligonucleotide
  Target: LAMA2; (-) strand; PAM type: YTN; PAM sequence: CTT
taagctgttctaaaaaataa

SEQ ID NO: 271929 - DNA, 20 bp, Artificial Sequence
  Description of Artificial Sequence: Synthetic oligonucleotide
  Target: LAMA2; (-) strand; PAM type: YTN; PAM sequence: TTG
aactttaagctgttctaaaa

SEQ ID NO: 271930 - DNA, 20 bp, Artificial Sequence
  Description of Artificial Sequence: Synthetic oligonucleotide
  Target: LAMA2; (-) strand; PAM type: YTN; PAM sequence: TTT
gaactttaagctgttctaaa

SEQ ID NO: 271931 - DNA, 20 bp, Artificial Sequence
  Description of Artificial Sequence: Synthetic oligonucleotide
  Target: LAMA2; (-) strand; PAM type: YTN; PAM sequence: CTT
tgaactttaagctgttctaa

SEQ ID NO: 271932 - DNA, 20 bp, Artificial Sequence
  Description of Artificial Sequence: Synthetic oligonucleotide
  Target: LAMA2; (-) strand; PAM type: YTN; PAM sequence: TTC
tttgaactttaagctgttct

SEQ ID NO: 271933 - DNA, 20 bp, Artificial Sequence
  Description of Artificial Sequence: Synthetic oligonucleotide
  Target: LAMA2; (-) strand; PAM type: YTN; PAM sequence: TTT
ctttgaactttaagctgttc

SEQ ID NO: 271934 - DNA, 20 bp, Artificial Sequence
  Description of Artificial Sequence: Synthetic oligonucleotide
  Target: LAMA2; (-) strand; PAM type: YTN; PAM sequence: TTT
tctttgaactttaagctgtt

SEQ ID NO: 271935 - DNA, 20 bp, Artificial Sequence
  Description of Artificial Sequence: Synthetic oligonucleotide
  Target: LAMA2; (-) strand; PAM type: YTN; PAM sequence: TTT
ttctttgaactttaagctgt

SEQ ID NO: 271936 - DNA, 20 bp, Artificial Sequence
  Description of Artificial Sequence: Synthetic oligonucleotide
  Target: LAMA2; (-) strand; PAM type: YTN; PAM sequence: CTC
aatttttctttgaactttaa

SEQ ID NO: 271937 - DNA, 20 bp, Artificial Sequence
  Description of Artificial Sequence: Synthetic oligonucleotide
  Target: LAMA2; (-) strand; PAM type: YTN; PAM sequence: TTA
cactcaatttttctttgaac

SEQ ID NO: 271938 - DNA, 20 bp, Artificial Sequence
  Description of Artificial Sequence: Synthetic oligonucleotide
  Target: LAMA2; (-) strand; PAM type: YTN; PAM sequence: TTT
acactcaatttttctttgaa

SEQ ID NO: 271939 - DNA, 20 bp, Artificial Sequence
  Description of Artificial Sequence: Synthetic oligonucleotide
  Target: LAMA2; (-) strand; PAM type: YTN; PAM sequence: CTT
tacactcaatttttctttga

SEQ ID NO: 271940 - DNA, 20 bp, Artificial Sequence
  Description of Artificial Sequence: Synthetic oligonucleotide
  Target: LAMA2; (-) strand; PAM type: YTN; PAM sequence: CTG
aactttacactcaatttttc

SEQ ID NO: 271941 - DNA, 20 bp, Artificial Sequence
  Description of Artificial Sequence: Synthetic oligonucleotide
  Target: LAMA2; (-) strand; PAM type: YTN; PAM sequence: CTC
tgaactttacactcaatttt

SEQ ID NO: 271942 - DNA, 20 bp, Artificial Sequence
  Description of Artificial Sequence: Synthetic oligonucleotide
  Target: LAMA2; (-) strand; PAM type: YTN; PAM sequence: TTG
tgggggcagggagtagatat

SEQ ID NO: 271943 - DNA, 20 bp, Artificial Sequence
  Description of Artificial Sequence: Synthetic oligonucleotide
  Target: LAMA2; (-) strand; PAM type: YTN; PAM sequence: CTG
gtggggaaggttgtgggggc

SEQ ID NO: 271944 - DNA, 20 bp, Artificial Sequence
  Description of Artificial Sequence: Synthetic oligonucleotide
  Target: LAMA2; (-) strand; PAM type: YTN; PAM sequence: TTC
tggtggggaaggttgtgggg

SEQ ID NO: 271945 - DNA, 20 bp, Artificial Sequence
  Description of Artificial Sequence: Synthetic oligonucleotide
  Target: LAMA2; (-) strand; PAM type: YTN; PAM sequence: CTA
taataaatgtaccattctgg

SEQ ID NO: 271946 - DNA, 20 bp, Artificial Sequence
  Description of Artificial Sequence: Synthetic oligonucleotide
  Target: LAMA2; (-) strand; PAM type: YTN; PAM sequence: TTA
tcgactataataaatgtacc

SEQ ID NO: 271947 - DNA, 20 bp, Artificial Sequence
  Description of Artificial Sequence: Synthetic oligonucleotide
  Target: LAMA2; (-) strand; PAM type: YTN; PAM sequence: TTT
atcgactataataaatgtac

SEQ ID NO: 271948 - DNA, 20 bp, Artificial Sequence
  Description of Artificial Sequence: Synthetic oligonucleotide
  Target: LAMA2; (-) strand; PAM type: YTN; PAM sequence: TTA
ggtttatcgactataataaa

SEQ ID NO: 271949 - DNA, 20 bp, Artificial Sequence
  Description of Artificial Sequence: Synthetic oligonucleotide
  Target: LAMA2; (-) strand; PAM type: YTN; PAM sequence: CTT
aggtttatcgactataataa

SEQ ID NO: 271950 - DNA, 20 bp, Artificial Sequence
  Description of Artificial Sequence: Synthetic oligonucleotide
  Target: LAMA2; (-) strand; PAM type: YTN; PAM sequence: TTG
ggtgatgaggaggtgtcaac

SEQ ID NO: 271951 - DNA, 20 bp, Artificial Sequence
  Description of Artificial Sequence: Synthetic oligonucleotide
  Target: LAMA2; (-) strand; PAM type: YTN; PAM sequence: TTT
gggtgatgaggaggtgtcaa

SEQ ID NO: 271952 - DNA, 20 bp, Artificial Sequence
  Description of Artificial Sequence: Synthetic oligonucleotide
  Target: LAMA2; (-) strand; PAM type: YTN; PAM sequence: CTT
tgggtgatgaggaggtgtca

SEQ ID NO: 271953 - DNA, 20 bp, Artificial Sequence
  Description of Artificial Sequence: Synthetic oligonucleotide
  Target: LAMA2; (-) strand; PAM type: YTN; PAM sequence: CTA
tggactttgggtgatgagga

SEQ ID NO: 271954 - DNA, 20 bp, Artificial Sequence
  Description of Artificial Sequence: Synthetic oligonucleotide
  Target: LAMA2; (-) strand; PAM type: YTN; PAM sequence: CTA
atgtaaactatggactttgg

SEQ ID NO: 271955 - DNA, 20 bp, Artificial Sequence
  Description of Artificial Sequence: Synthetic oligonucleotide
  Target: LAMA2; (-) strand; PAM type: YTN; PAM sequence: TTC
caaacccatagaatgtacaa

SEQ ID NO: 271956 - DNA, 20 bp, Artificial Sequence
  Description of Artificial Sequence: Synthetic oligonucleotide
  Target: LAMA2; (-) strand; PAM type: YTN; PAM sequence: TTT
ccaaacccatagaatgtaca

SEQ ID NO: 271957 - DNA, 20 bp, Artificial Sequence
  Description of Artificial Sequence: Synthetic oligonucleotide
  Target: LAMA2; (-) strand; PAM type: YTN; PAM sequence: TTT
tccaaacccatagaatgtac

SEQ ID NO: 271958 - DNA, 20 bp, Artificial Sequence
  Description of Artificial Sequence: Synthetic oligonucleotide
  Target: LAMA2; (-) strand; PAM type: YTN; PAM sequence: TTT
ttccaaacccatagaatgta

SEQ ID NO: 271959 - DNA, 20 bp, Artificial Sequence
  Description of Artificial Sequence: Synthetic oligonucleotide
  Target: LAMA2; (-) strand; PAM type: YTN; PAM sequence: TTA
caacaacggtggacacatgt

SEQ ID NO: 271960 - DNA, 20 bp, Artificial Sequence
  Description of Artificial Sequence: Synthetic oligonucleotide
  Target: LAMA2; (-) strand; PAM type: YTN; PAM sequence: TTT
acaacaacggtggacacatg

SEQ ID NO: 271961 - DNA, 20 bp, Artificial Sequence
  Description of Artificial Sequence: Synthetic oligonucleotide
  Target: LAMA2; (-) strand; PAM type: YTN; PAM sequence: TTT
tacaacaacggtggacacat

SEQ ID NO: 271962 - DNA, 20 bp, Artificial Sequence
  Description of Artificial Sequence: Synthetic oligonucleotide
  Target: LAMA2; (-) strand; PAM type: YTN; PAM sequence: CTA
tattttacaacaacggtgga

SEQ ID NO: 271963 - DNA, 20 bp, Artificial Sequence
  Description of Artificial Sequence: Synthetic oligonucleotide
  Target: LAMA2; (-) strand; PAM type: YTN; PAM sequence: TTC
tatattttacaacaacggtg

SEQ ID NO: 271964 - DNA, 20 bp, Artificial Sequence
  Description of Artificial Sequence: Synthetic oligonucleotide
  Target: LAMA2; (-) strand; PAM type: YTN; PAM sequence: TTT
ctatattttacaacaacggt

SEQ ID NO: 271965 - DNA, 20 bp, Artificial Sequence
  Description of Artificial Sequence: Synthetic oligonucleotide
  Target: LAMA2; (-) strand; PAM type: YTN; PAM sequence: TTT
tctatattttacaacaacgg

SEQ ID NO: 271966 - DNA, 20 bp, Artificial Sequence
  Description of Artificial Sequence: Synthetic oligonucleotide
  Target: LAMA2; (-) strand; PAM type: YTN; PAM sequence: CTT
ttctatattttacaacaacg

SEQ ID NO: 271967 - DNA, 20 bp, Artificial Sequence
  Description of Artificial Sequence: Synthetic oligonucleotide
  Target: LAMA2; (-) strand; PAM type: YTN; PAM sequence: TTC
gggcagtaaaacttttctat

SEQ ID NO: 271968 - DNA, 20 bp, Artificial Sequence
  Description of Artificial Sequence: Synthetic oligonucleotide
  Target: LAMA2; (-) strand; PAM type: YTN; PAM sequence: TTT
cgggcagtaaaacttttcta

SEQ ID NO: 271969 - DNA, 20 bp, Artificial Sequence
  Description of Artificial Sequence: Synthetic oligonucleotide
  Target: LAMA2; (-) strand; PAM type: YTN; PAM sequence: TTT
tcgggcagtaaaacttttct

SEQ ID NO: 271970 - DNA, 20 bp, Artificial Sequence
  Description of Artificial Sequence: Synthetic oligonucleotide
  Target: LAMA2; (-) strand; PAM type: YTN; PAM sequence: TTG
ccaggggtcaaggaagaggg

SEQ ID NO: 271971 - DNA, 20 bp, Artificial Sequence
  Description of Artificial Sequence: Synthetic oligonucleotide
  Target: LAMA2; (-) strand; PAM type: YTN; PAM sequence: CTA
tggatgtagtaaaaatatga

SEQ ID NO: 271972 - DNA, 20 bp, Artificial Sequence
  Description of Artificial Sequence: Synthetic oligonucleotide
  Target: LAMA2; (-) strand; PAM type: YTN; PAM sequence: TTC
caaaaaaggcaaaactatgg

SEQ ID NO: 271973 - DNA, 20 bp, Artificial Sequence
  Description of Artificial Sequence: Synthetic oligonucleotide
  Target: LAMA2; (-) strand; PAM type: YTN; PAM sequence: CTA
tatattccaaaaaaggcaaa

SEQ ID NO: 271974 - DNA, 20 bp, Artificial Sequence
  Description of Artificial Sequence: Synthetic oligonucleotide
  Target: LAMA2; (-) strand; PAM type: YTN; PAM sequence: TTC
cagctatatattccaaaaaa

SEQ ID NO: 271975 - DNA, 20 bp, Artificial Sequence
  Description of Artificial Sequence: Synthetic oligonucleotide
  Target: LAMA2; (-) strand; PAM type: YTN; PAM sequence: CTG
tatgattccagctatatatt

SEQ ID NO: 271976 - DNA, 20 bp, Artificial Sequence
  Description of Artificial Sequence: Synthetic oligonucleotide
  Target: LAMA2; (-) strand; PAM type: YTN; PAM sequence: CTA
atatgaaaaagtaccacact

SEQ ID NO: 271977 - DNA, 20 bp, Artificial Sequence
  Description of Artificial Sequence: Synthetic oligonucleotide
  Target: LAMA2; (-) strand; PAM type: YTN; PAM sequence: TTA
ccaagggaaagaagctaata

SEQ ID NO: 271978 - DNA, 20 bp, Artificial Sequence
  Description of Artificial Sequence: Synthetic oligonucleotide
  Target: LAMA2; (-) strand; PAM type: YTN; PAM sequence: TTA
agtgtatattaccaagggaa

SEQ ID NO: 271979 - DNA, 20 bp, Artificial Sequence
  Description of Artificial Sequence: Synthetic oligonucleotide
  Target: LAMA2; (-) strand; PAM type: YTN; PAM sequence: CTT
aagtgtatattaccaaggga

SEQ ID NO: 271980 - DNA, 20 bp, Artificial Sequence
  Description of Artificial Sequence: Synthetic oligonucleotide
  Target: LAMA2; (-) strand; PAM type: YTN; PAM sequence: CTA
taaagtcatgaaaaaatatg

SEQ ID NO: 271981 - DNA, 20 bp, Artificial Sequence
  Description of Artificial Sequence: Synthetic oligonucleotide
  Target: LAMA2; (-) strand; PAM type: YTN; PAM sequence: CTA
caaagaaatgagctataaag

SEQ ID NO: 271982 - DNA, 20 bp, Artificial Sequence
  Description of Artificial Sequence: Synthetic oligonucleotide
  Target: LAMA2; (-) strand; PAM type: YTN; PAM sequence: TTC
aacactacaaagaaatgagc

SEQ ID NO: 271983 - DNA, 20 bp, Artificial Sequence
  Description of Artificial Sequence: Synthetic oligonucleotide
  Target: LAMA2; (-) strand; PAM type: YTN; PAM sequence: TTA
ttcaacactacaaagaaatg

SEQ ID NO: 271984 - DNA, 20 bp, Artificial Sequence
  Description of Artificial Sequence: Synthetic oligonucleotide
  Target: LAMA2; (-) strand; PAM type: YTN; PAM sequence: CTA
aacaatgaaatattattcaa

SEQ ID NO: 271985 - DNA, 20 bp, Artificial Sequence
  Description of Artificial Sequence: Synthetic oligonucleotide
  Target: LAMA2; (-) strand; PAM type: YTN; PAM sequence: TTC
agtaggggaatgaataagta

SEQ ID NO: 271986 - DNA, 20 bp, Artificial Sequence
  Description of Artificial Sequence: Synthetic oligonucleotide
  Target: LAMA2; (-) strand; PAM type: YTN; PAM sequence: CTT
cagtaggggaatgaataagt

SEQ ID NO: 271987 - DNA, 20 bp, Artificial Sequence
  Description of Artificial Sequence: Synthetic oligonucleotide
  Target: LAMA2; (-) strand; PAM type: YTN; PAM sequence: TTG
gaagcaaccaagatgtcctt

SEQ ID NO: 271988 - DNA, 20 bp, Artificial Sequence
  Description of Artificial Sequence: Synthetic oligonucleotide
  Target: LAMA2; (-) strand; PAM type: YTN; PAM sequence: TTT
ggaagcaaccaagatgtcct

SEQ ID NO: 271989 - DNA, 20 bp, Artificial Sequence
  Description of Artificial Sequence: Synthetic oligonucleotide
  Target: LAMA2; (-) strand; PAM type: YTN; PAM sequence: CTG
ccaaaatttggaagcaacca

SEQ ID NO: 271990 - DNA, 20 bp, Artificial Sequence
  Description of Artificial Sequence: Synthetic oligonucleotide
  Target: LAMA2; (-) strand; PAM type: YTN; PAM sequence: TTC
atgctgccaaaatttggaag

SEQ ID NO: 271991 - DNA, 20 bp, Artificial Sequence
  Description of Artificial Sequence: Synthetic oligonucleotide
  Target: LAMA2; (-) strand; PAM type: YTN; PAM sequence: TTG
attcatgctgccaaaatttg

SEQ ID NO: 271992 - DNA, 20 bp, Artificial Sequence
  Description of Artificial Sequence: Synthetic oligonucleotide
  Target: LAMA2; (-) strand; PAM type: YTN; PAM sequence: CTT
gattcatgctgccaaaattt

SEQ ID NO: 271993 - DNA, 20 bp, Artificial Sequence
  Description of Artificial Sequence: Synthetic oligonucleotide
  Target: LAMA2; (-) strand; PAM type: YTN; PAM sequence: TTA
cagcaacttgattcatgctg

SEQ ID NO: 271994 - DNA, 20 bp, Artificial Sequence
  Description of Artificial Sequence: Synthetic oligonucleotide
  Target: LAMA2; (-) strand; PAM type: YTN; PAM sequence: TTT
acagcaacttgattcatgct

SEQ ID NO: 271995 - DNA, 20 bp, Artificial Sequence
  Description of Artificial Sequence: Synthetic oligonucleotide
  Target: LAMA2; (-) strand; PAM type: YTN; PAM sequence: CTG
cacaaagatgtttacagcaa

SEQ ID NO: 271996 - DNA, 20 bp, Artificial Sequence
  Description of Artificial Sequence: Synthetic oligonucleotide
  Target: LAMA2; (-) strand; PAM type: YTN; PAM sequence: TTA
agtccacacaaaagtctgca

SEQ ID NO: 271997 - DNA, 20 bp, Artificial Sequence
  Description of Artificial Sequence: Synthetic oligonucleotide
  Target: LAMA2; (-) strand; PAM type: YTN; PAM sequence: CTT
aagtccacacaaaagtctgc

SEQ ID NO: 271998 - DNA, 20 bp, Artificial Sequence
  Description of Artificial Sequence: Synthetic oligonucleotide
  Target: LAMA2; (-) strand; PAM type: YTN; PAM sequence: TTG
aaaacttaagtccacacaaa

SEQ ID NO: 271999 - DNA, 20 bp, Artificial Sequence
  Description of Artificial Sequence: Synthetic oligonucleotide
  Target: LAMA2; (-) strand; PAM type: YTN; PAM sequence: TTC
acccaaataggttgaaaact

SEQ ID NO: 272000 - DNA, 20 bp, Artificial Sequence
  Description of Artificial Sequence: Synthetic oligonucleotide
  Target: LAMA2; (-) strand; PAM type: YTN; PAM sequence: TTA
tattcacccaaataggttga

SEQ ID NO: 272001 - DNA, 20 bp, Artificial Sequence
  Description of Artificial Sequence: Synthetic oligonucleotide
  Target: LAMA2; (-) strand; PAM type: YTN; PAM sequence: TTT
atattcacccaaataggttg

SEQ ID NO: 272002 - DNA, 20 bp, Artificial Sequence
  Description of Artificial Sequence: Synthetic oligonucleotide
  Target: LAMA2; (-) strand; PAM type: YTN; PAM sequence: CTT
tatattcacccaaataggtt

SEQ ID NO: 272003 - DNA, 20 bp, Artificial Sequence
  Description of Artificial Sequence: Synthetic oligonucleotide
  Target: LAMA2; (-) strand; PAM type: YTN; PAM sequence: CTC
ctttatattcacccaaatag

SEQ ID NO: 272004 - DNA, 20 bp, Artificial Sequence
  Description of Artificial Sequence: Synthetic oligonucleotide
  Target: LAMA2; (-) strand; PAM type: YTN; PAM sequence: TTA
ccataccatccagcaatcat

SEQ ID NO: 272005 - DNA, 20 bp, Artificial Sequence
  Description of Artificial Sequence: Synthetic oligonucleotide
  Target: LAMA2; (-) strand; PAM type: YTN; PAM sequence: CTT
accataccatccagcaatca

SEQ ID NO: 272006 - DNA, 20 bp, Artificial Sequence
  Description of Artificial Sequence: Synthetic oligonucleotide
  Target: LAMA2; (-) strand; PAM type: YTN; PAM sequence: CTC
ttaccataccatccagcaat

SEQ ID NO: 272007 - DNA, 20 bp, Artificial Sequence
  Description of Artificial Sequence: Synthetic oligonucleotide
  Target: LAMA2; (-) strand; PAM type: YTN; PAM sequence: CTA
aatatactcttaccatacca

SEQ ID NO: 272008 - DNA, 20 bp, Artificial Sequence
  Description of Artificial Sequence: Synthetic oligonucleotide
  Target: LAMA2; (-) strand; PAM type: YTN; PAM sequence: TTC
aaaactaaatatactcttac

SEQ ID NO: 272009 - DNA, 20 bp, Artificial Sequence
  Description of Artificial Sequence: Synthetic oligonucleotide
  Target: LAMA2; (-) strand; PAM type: YTN; PAM sequence: TTT
caaaactaaatatactctta

SEQ ID NO: 272010 - DNA, 20 bp, Artificial Sequence
  Description of Artificial Sequence: Synthetic oligonucleotide
  Target: LAMA2; (-) strand; PAM type: YTN; PAM sequence: CTT
tcaaaactaaatatactctt

SEQ ID NO: 272011 - DNA, 20 bp, Artificial Sequence
  Description of Artificial Sequence: Synthetic oligonucleotide
  Target: LAMA2; (-) strand; PAM type: YTN; PAM sequence: TTC
tttcaaaactaaatatactc

SEQ ID NO: 272012 - DNA, 20 bp, Artificial Sequence
  Description of Artificial Sequence: Synthetic oligonucleotide
  Target: LAMA2; (-) strand; PAM type: YTN; PAM sequence: TTT
ctttcaaaactaaatatact

SEQ ID NO: 272013 - DNA, 20 bp, Artificial Sequence
  Description of Artificial Sequence: Synthetic oligonucleotide
  Target: LAMA2; (-) strand; PAM type: YTN; PAM sequence: TTG
gtaatttctttcaaaactaa

SEQ ID NO: 272014 - DNA, 20 bp, Artificial Sequence
  Description of Artificial Sequence: Synthetic oligonucleotide
  Target: LAMA2; (-) strand; PAM type: YTN; PAM sequence: TTT
ggtaatttctttcaaaacta

SEQ ID NO: 272015 - DNA, 20 bp, Artificial Sequence
  Description of Artificial Sequence: Synthetic oligonucleotide
  Target: LAMA2; (-) strand; PAM type: YTN; PAM sequence: TTT
tggtaatttctttcaaaact

SEQ ID NO: 272016 - DNA, 20 bp, Artificial Sequence
  Description of Artificial Sequence: Synthetic oligonucleotide
  Target: LAMA2; (-) strand; PAM type: YTN; PAM sequence: TTG
gaatacattttggtaatttc

SEQ ID NO: 272017 - DNA, 20 bp, Artificial Sequence
  Description of Artificial Sequence: Synthetic oligonucleotide
  Target: LAMA2; (-) strand; PAM type: YTN; PAM sequence: TTT
ggaatacattttggtaattt

SEQ ID NO: 272018 - DNA, 20 bp, Artificial Sequence
  Description of Artificial Sequence: Synthetic oligonucleotide
  Target: LAMA2; (-) strand; PAM type: YTN; PAM sequence: TTG
ccggtgggaatgcaaaatag

SEQ ID NO: 272019 - DNA, 20 bp, Artificial Sequence
  Description of Artificial Sequence: Synthetic oligonucleotide
  Target: LAMA2; (-) strand; PAM type: YTN; PAM sequence: TTA
ttgccggtgggaatgcaaaa

SEQ ID NO: 272020 - DNA, 20 bp, Artificial Sequence
  Description of Artificial Sequence: Synthetic oligonucleotide
  Target: LAMA2; (-) strand; PAM type: YTN; PAM sequence: TTT
attgccggtgggaatgcaaa

SEQ ID NO: 272021 - DNA, 20 bp, Artificial Sequence
  Description of Artificial Sequence: Synthetic oligonucleotide
  Target: LAMA2; (-) strand; PAM type: YTN; PAM sequence: CTC
atttattgccggtgggaatg

SEQ ID NO: 272022 - DNA, 20 bp, Artificial Sequence
  Description of Artificial Sequence: Synthetic oligonucleotide
  Target: LAMA2; (-) strand; PAM type: YTN; PAM sequence: CTC
tcatttattgccggtgggaa

SEQ ID NO: 272023 - DNA, 20 bp, Artificial Sequence
  Description of Artificial Sequence: Synthetic oligonucleotide
  Target: LAMA2; (-) strand; PAM type: YTN; PAM sequence: TTG
aggatgtggagcaacagaaa

SEQ ID NO: 272024 - DNA, 20 bp, Artificial Sequence
  Description of Artificial Sequence: Synthetic oligonucleotide
  Target: LAMA2; (-) strand; PAM type: YTN; PAM sequence: CTA
ttgaggatgtggagcaacag

SEQ ID NO: 272025 - DNA, 20 bp, Artificial Sequence
  Description of Artificial Sequence: Synthetic oligonucleotide
  Target: LAMA2; (-) strand; PAM type: YTN; PAM sequence: CTA
aaaacaccaaatgctattga

SEQ ID NO: 272026 - DNA, 20 bp, Artificial Sequence
  Description of Artificial Sequence: Synthetic oligonucleotide
  Target: LAMA2; (-) strand; PAM type: YTN; PAM sequence: TTA
gaatgacaaaatccaaacac

SEQ ID NO: 272027 - DNA, 20 bp, Artificial Sequence
  Description of Artificial Sequence: Synthetic oligonucleotide
  Target: LAMA2; (-) strand; PAM type: YTN; PAM sequence: TTA
ttagaatgacaaaatccaaa

SEQ ID NO: 272028 - DNA, 20 bp, Artificial Sequence
  Description of Artificial Sequence: Synthetic oligonucleotide
  Target: LAMA2; (-) strand; PAM type: YTN; PAM sequence: CTT
attagaatgacaaaatccaa

SEQ ID NO: 272029 - DNA, 20 bp, Artificial Sequence
  Description of Artificial Sequence: Synthetic oligonucleotide
  Target: LAMA2; (-) strand; PAM type: YTN; PAM sequence: CTA
aaacaagaatgagataccat

SEQ ID NO: 272030 - DNA, 20 bp, Artificial Sequence
  Description of Artificial Sequence: Synthetic oligonucleotide
  Target: LAMA2; (-) strand; PAM type: YTN; PAM sequence: TTG
caaactaaaacaagaatgag

SEQ ID NO: 272031 - DNA, 20 bp, Artificial Sequence
  Description of Artificial Sequence: Synthetic oligonucleotide
  Target: LAMA2; (-) strand; PAM type: YTN; PAM sequence: TTA
aggaattgcaaactaaaaca

SEQ ID NO: 272032 - DNA, 20 bp, Artificial Sequence
  Description of Artificial Sequence: Synthetic oligonucleotide
  Target: LAMA2; (-) strand; PAM type: YTN; PAM sequence: CTC
gacatcatatgtcattaagg

SEQ ID NO: 272033 - DNA, 20 bp, Artificial Sequence
  Description of Artificial Sequence: Synthetic oligonucleotide
  Target: LAMA2; (-) strand; PAM type: YTN; PAM sequence: TTA
ccaaagaagatatacagatg

SEQ ID NO: 272034 - DNA, 20 bp, Artificial Sequence
  Description of Artificial Sequence: Synthetic oligonucleotide
  Target: LAMA2; (-) strand; PAM type: YTN; PAM sequence: CTT
accaaagaagatatacagat

SEQ ID NO: 272035 - DNA, 20 bp, Artificial Sequence
  Description of Artificial Sequence: Synthetic oligonucleotide
  Target: LAMA2; (-) strand; PAM type: YTN; PAM sequence: CTA
aatagacaccttaccaaaga

SEQ ID NO: 272036 - DNA, 20 bp, Artificial Sequence
  Description of Artificial Sequence: Synthetic oligonucleotide
  Target: LAMA2; (-) strand; PAM type: YTN; PAM sequence: TTC
gacaagaaaacaacccaatg

SEQ ID NO: 272037 - DNA, 20 bp, Artificial Sequence
  Description of Artificial Sequence: Synthetic oligonucleotide
  Target: LAMA2; (-) strand; PAM type: YTN; PAM sequence: CTG
aattcgacaagaaaacaacc

SEQ ID NO: 272038 - DNA, 20 bp, Artificial Sequence
  Description of Artificial Sequence: Synthetic oligonucleotide
  Target: LAMA2; (-) strand; PAM type: YTN; PAM sequence: CTC
tgaattcgacaagaaaacaa

SEQ ID NO: 272039 - DNA, 20 bp, Artificial Sequence
  Description of Artificial Sequence: Synthetic oligonucleotide
  Target: LAMA2; (-) strand; PAM type: YTN; PAM sequence: TTA
cccaaaatatacaaaaaact

SEQ ID NO: 272040 - DNA, 20 bp, Artificial Sequence
  Description of Artificial Sequence: Synthetic oligonucleotide
  Target: LAMA2; (-) strand; PAM type: YTN; PAM sequence: CTA
ttacccaaaatatacaaaaa

SEQ ID NO: 272041 - DNA, 20 bp, Artificial Sequence
  Description of Artificial Sequence: Synthetic oligonucleotide
  Target: LAMA2; (-) strand; PAM type: YTN; PAM sequence: CTG
ataaaggactattacccaaa

SEQ ID NO: 272042 - DNA, 20 bp, Artificial Sequence
  Description of Artificial Sequence: Synthetic oligonucleotide
  Target: LAMA2; (-) strand; PAM type: YTN; PAM sequence: CTC
aagagaacaagacaagccac

SEQ ID NO: 272043 - DNA, 20 bp, Artificial Sequence
  Description of Artificial Sequence: Synthetic oligonucleotide
  Target: LAMA2; (-) strand; PAM type: YTN; PAM sequence: TTC
tcaagagaacaagacaagcc

SEQ ID NO: 272044 - DNA, 20 bp, Artificial Sequence
  Description of Artificial Sequence: Synthetic oligonucleotide
  Target: LAMA2; (-) strand; PAM type: YTN; PAM sequence: CTT
ctcaagagaacaagacaagc

SEQ ID NO: 272045 - DNA, 20 bp, Artificial Sequence
  Description of Artificial Sequence: Synthetic oligonucleotide
  Target: LAMA2; (-) strand; PAM type: YTN; PAM sequence: CTG
tgaaagacacttctcaagag

SEQ ID NO: 272046 - DNA, 20 bp, Artificial Sequence
  Description of Artificial Sequence: Synthetic oligonucleotide
  Target: LAMA2; (-) strand; PAM type: YTN; PAM sequence: CTC
tgtgaaagacacttctcaag

SEQ ID NO: 272047 - DNA, 20 bp, Artificial Sequence
  Description of Artificial Sequence: Synthetic oligonucleotide
  Target: LAMA2; (-) strand; PAM type: YTN; PAM sequence: CTG
ctctgtgaaagacacttctc

SEQ ID NO: 272048 - DNA, 20 bp, Artificial Sequence
  Description of Artificial Sequence: Synthetic oligonucleotide
  Target: LAMA2; (-) strand; PAM type: YTN; PAM sequence: TTC
tgctctgtgaaagacacttc

SEQ ID NO: 272049 - DNA, 20 bp, Artificial Sequence
  Description of Artificial Sequence: Synthetic oligonucleotide
  Target: LAMA2; (-) strand; PAM type: YTN; PAM sequence: CTT
ctgctctgtgaaagacactt

SEQ ID NO: 272050 - DNA, 20 bp, Artificial Sequence
  Description of Artificial Sequence: Synthetic oligonucleotide
  Target: LAMA2; (-) strand; PAM type: YTN; PAM sequence: TTA
aaaacttctgctctgtgaaa

SEQ ID NO: 272051 - DNA, 20 bp, Artificial Sequence
  Description of Artificial Sequence: Synthetic oligonucleotide
  Target: LAMA2; (-) strand; PAM type: YTN; PAM sequence: TTA
caattaaaaacttctgctct

SEQ ID NO: 272052 - DNA, 20 bp, Artificial Sequence
  Description of Artificial Sequence: Synthetic oligonucleotide
  Target: LAMA2; (-) strand; PAM type: YTN; PAM sequence: TTC
gttacaattaaaaacttctg

SEQ ID NO: 272053 - DNA, 20 bp, Artificial Sequence
  Description of Artificial Sequence: Synthetic oligonucleotide
  Target: LAMA2; (-) strand; PAM type: YTN; PAM sequence: CTT
cgttacaattaaaaacttct

SEQ ID NO: 272054 - DNA, 20 bp, Artificial Sequence
  Description of Artificial Sequence: Synthetic oligonucleotide
  Target: LAMA2; (-) strand; PAM type: YTN; PAM sequence: CTG
ggcttcgttacaattaaaaa

SEQ ID NO: 272055 - DNA, 20 bp, Artificial Sequence
  Description of Artificial Sequence: Synthetic oligonucleotide
  Target: LAMA2; (-) strand; PAM type: YTN; PAM sequence: TTG
ataagctgggcttcgttaca

SEQ ID NO: 272056 - DNA, 20 bp, Artificial Sequence
  Description of Artificial Sequence: Synthetic oligonucleotide
  Target: LAMA2; (-) strand; PAM type: YTN; PAM sequence: CTA
attgataagctgggcttcgt

SEQ ID NO: 272057 - DNA, 20 bp, Artificial Sequence
  Description of Artificial Sequence: Synthetic oligonucleotide
  Target: LAMA2; (-) strand; PAM type: YTN; PAM sequence: CTC
aacaaggagaaacctaattg

SEQ ID NO: 272058 - DNA, 20 bp, Artificial Sequence
  Description of Artificial Sequence: Synthetic oligonucleotide
  Target: LAMA2; (-) strand; PAM type: YTN; PAM sequence: TTA
gatacaacaccaaaggctca

SEQ ID NO: 272059 - DNA, 20 bp, Artificial Sequence
  Description of Artificial Sequence: Synthetic oligonucleotide
  Target: LAMA2; (-) strand; PAM type: YTN; PAM sequence: TTT
agatacaacaccaaaggctc

SEQ ID NO: 272060 - DNA, 20 bp, Artificial Sequence
  Description of Artificial Sequence: Synthetic oligonucleotide
  Target: LAMA2; (-) strand; PAM type: YTN; PAM sequence: CTT
tagatacaacaccaaaggct

SEQ ID NO: 272061 - DNA, 20 bp, Artificial Sequence
  Description of Artificial Sequence: Synthetic oligonucleotide
  Target: LAMA2; (-) strand; PAM type: YTN; PAM sequence: CTA
gatgaccgtggatatggcaa

SEQ ID NO: 272062 - DNA, 20 bp, Artificial Sequence
  Description of Artificial Sequence: Synthetic oligonucleotide
  Target: LAMA2; (-) strand; PAM type: YTN; PAM sequence: CTA
gaagatagcataggagaaaa

SEQ ID NO: 272063 - DNA, 20 bp, Artificial Sequence
  Description of Artificial Sequence: Synthetic oligonucleotide
  Target: LAMA2; (-) strand; PAM type: YTN; PAM sequence: CTC
ctagaagatagcataggaga

SEQ ID NO: 272064 - DNA, 20 bp, Artificial Sequence
  Description of Artificial Sequence: Synthetic oligonucleotide
  Target: LAMA2; (-) strand; PAM type: YTN; PAM sequence: CTG
taacgctcctagaagatagc

SEQ ID NO: 272065 - DNA, 20 bp, Artificial Sequence
  Description of Artificial Sequence: Synthetic oligonucleotide
  Target: LAMA2; (-) strand; PAM type: YTN; PAM sequence: CTA
agtgtaaaatgcaaaactgt

SEQ ID NO: 272066 - DNA, 20 bp, Artificial Sequence
  Description of Artificial Sequence: Synthetic oligonucleotide
  Target: LAMA2; (-) strand; PAM type: YTN; PAM sequence: TTA
tagacctaagtgtaaaatgc

SEQ ID NO: 272067 - DNA, 20 bp, Artificial Sequence
  Description of Artificial Sequence: Synthetic oligonucleotide
  Target: LAMA2; (-) strand; PAM type: YTN; PAM sequence: CTA
aaaatggattatagacctaa

SEQ ID NO: 272068 - DNA, 20 bp, Artificial Sequence
  Description of Artificial Sequence: Synthetic oligonucleotide
  Target: LAMA2; (-) strand; PAM type: YTN; PAM sequence: TTA
actaaaaatggattatagac

SEQ ID NO: 272069 - DNA, 20 bp, Artificial Sequence
  Description of Artificial Sequence: Synthetic oligonucleotide
  Target: LAMA2; (-) strand; PAM type: YTN; PAM sequence: TTG
gaattaactaaaaatggatt

SEQ ID NO: 272070 - DNA, 20 bp, Artificial Sequence
  Description of Artificial Sequence: Synthetic oligonucleotide
  Target: LAMA2; (-) strand; PAM type: YTN; PAM sequence: TTA
aaatagtattggaattaact

SEQ ID NO: 272071 - DNA, 20 bp, Artificial Sequence
  Description of Artificial Sequence: Synthetic oligonucleotide
  Target: LAMA2; (-) strand; PAM type: YTN; PAM sequence: TTT
aaaatagtattggaattaac

SEQ ID NO: 272072 - DNA, 20 bp, Artificial Sequence
  Description of Artificial Sequence: Synthetic oligonucleotide
  Target: LAMA2; (-) strand; PAM type: YTN; PAM sequence: TTT
taaaatagtattggaattaa

SEQ ID NO: 272073 - DNA, 20 bp, Artificial Sequence
  Description of Artificial Sequence: Synthetic oligonucleotide
  Target: LAMA2; (-) strand; PAM type: YTN; PAM sequence: TTA
ttttaaaatagtattggaat

SEQ ID NO: 272074 - DNA, 20 bp, Artificial Sequence
  Description of Artificial Sequence: Synthetic oligonucleotide
  Target: LAMA2; (-) strand; PAM type: YTN; PAM sequence: TTT
attttaaaatagtattggaa

SEQ ID NO: 272075 - DNA, 20 bp, Artificial Sequence
  Description of Artificial Sequence: Synthetic oligonucleotide
  Target: LAMA2; (-) strand; PAM type: YTN; PAM sequence: CTG
taaagtaaaaagtttatttt

SEQ ID NO: 272076 - DNA, 20 bp, Artificial Sequence
  Description of Artificial Sequence: Synthetic oligonucleotide
  Target: LAMA2; (-) strand; PAM type: YTN; PAM sequence: CTA
ctgtaaagtaaaaagtttat

SEQ ID NO: 272077 - DNA, 20 bp, Artificial Sequence
  Description of Artificial Sequence: Synthetic oligonucleotide
  Target: LAMA2; (-) strand; PAM type: YTN; PAM sequence: CTA
aaactactgtaaagtaaaaa

SEQ ID NO: 272078 - DNA, 20 bp, Artificial Sequence
  Description of Artificial Sequence: Synthetic oligonucleotide
  Target: LAMA2; (-) strand; PAM type: YTN; PAM sequence: TTG
aaatctaaaactactgtaaa

SEQ ID NO: 272079 - DNA, 20 bp, Artificial Sequence
  Description of Artificial Sequence: Synthetic oligonucleotide
  Target: LAMA2; (-) strand; PAM type: YTN; PAM sequence: TTT
gaaatctaaaactactgtaa

SEQ ID NO: 272080 - DNA, 20 bp, Artificial Sequence
  Description of Artificial Sequence: Synthetic oligonucleotide
  Target: LAMA2; (-) strand; PAM type: YTN; PAM sequence: TTT
tgaaatctaaaactactgta

SEQ ID NO: 272081 - DNA, 20 bp, Artificial Sequence
  Description of Artificial Sequence: Synthetic oligonucleotide
  Target: LAMA2; (-) strand; PAM type: YTN; PAM sequence: TTT
ttgaaatctaaaactactgt

SEQ ID NO: 272082 - DNA, 20 bp, Artificial Sequence
  Description of Artificial Sequence: Synthetic oligonucleotide
  Target: LAMA2; (-) strand; PAM type: YTN; PAM sequence: TTT
tttgaaatctaaaactactg

SEQ ID NO: 272083 - DNA, 20 bp, Artificial Sequence
  Description of Artificial Sequence: Synthetic oligonucleotide
  Target: LAMA2; (-) strand; PAM type: YTN; PAM sequence: TTG
caagttttttgaaatctaaa

SEQ ID NO: 272084 - DNA, 20 bp, Artificial Sequence
  Description of Artificial Sequence: Synthetic oligonucleotide
  Target: LAMA2; (-) strand; PAM type: YTN; PAM sequence: TTT
gcaagttttttgaaatctaa

SEQ ID NO: 272085 - DNA, 20 bp, Artificial Sequence
  Description of Artificial Sequence: Synthetic oligonucleotide
  Target: LAMA2; (-) strand; PAM type: YTN; PAM sequence: CTT
tgcaagttttttgaaatcta

SEQ ID NO: 272086 - DNA, 20 bp, Artificial Sequence
  Description of Artificial Sequence: Synthetic oligonucleotide
  Target: LAMA2; (-) strand; PAM type: YTN; PAM sequence: CTC
tttgcaagttttttgaaatc

SEQ ID NO: 272087 - DNA, 20 bp, Artificial Sequence
  Description of Artificial Sequence: Synthetic oligonucleotide
  Target: LAMA2; (-) strand; PAM type: YTN; PAM sequence: CTC
tctttgcaagttttttgaaa

SEQ ID NO: 272088 - DNA, 20 bp, Artificial Sequence
  Description of Artificial Sequence: Synthetic oligonucleotide
  Target: LAMA2; (-) strand; PAM type: YTN; PAM sequence: TTG
gtactctctttgcaagtttt

SEQ ID NO: 272089 - DNA, 20 bp, Artificial Sequence
  Description of Artificial Sequence: Synthetic oligonucleotide
  Target: LAMA2; (-) strand; PAM type: YTN; PAM sequence: CTT
ggtactctctttgcaagttt

SEQ ID NO: 272090 - DNA, 20 bp, Artificial Sequence
  Description of Artificial Sequence: Synthetic oligonucleotide
  Target: LAMA2; (-) strand; PAM type: YTN; PAM sequence: CTC
ttggtactctctttgcaagt

SEQ ID NO: 272091 - DNA, 20 bp, Artificial Sequence
  Description of Artificial Sequence: Synthetic oligonucleotide
  Target: LAMA2; (-) strand; PAM type: YTN; PAM sequence: CTG
ggaatggagtatgtgaaggc

SEQ ID NO: 272092 - DNA, 20 bp, Artificial Sequence
  Description of Artificial Sequence: Synthetic oligonucleotide
  Target: LAMA2; (-) strand; PAM type: YTN; PAM sequence: TTA
acaatggggagactgggaat

SEQ ID NO: 272093 - DNA, 20 bp, Artificial Sequence
  Description of Artificial Sequence: Synthetic oligonucleotide
  Target: LAMA2; (-) strand; PAM type: YTN; PAM sequence: CTA
atgtaagatgttaacaatgg

SEQ ID NO: 272094 - DNA, 20 bp, Artificial Sequence
  Description of Artificial Sequence: Synthetic oligonucleotide
  Target: LAMA2; (-) strand; PAM type: YTN; PAM sequence: CTA
atatgtatatgacacatgta

SEQ ID NO: 272095 - DNA, 20 bp, Artificial Sequence
  Description of Artificial Sequence: Synthetic oligonucleotide
  Target: LAMA2; (-) strand; PAM type: YTN; PAM sequence: CTC
atgtatatgagctaatatgt

SEQ ID NO: 272096 - DNA, 20 bp, Artificial Sequence
  Description of Artificial Sequence: Synthetic oligonucleotide
  Target: LAMA2; (-) strand; PAM type: YTN; PAM sequence: TTA
gctcatgtatatgagctaat

SEQ ID NO: 272097 - DNA, 20 bp, Artificial Sequence
  Description of Artificial Sequence: Synthetic oligonucleotide
  Target: LAMA2; (-) strand; PAM type: YTN; PAM sequence: TTA
ttagctcatgtatatgagct

SEQ ID NO: 272098 - DNA, 20 bp, Artificial Sequence
  Description of Artificial Sequence: Synthetic oligonucleotide
  Target: LAMA2; (-) strand; PAM type: YTN; PAM sequence: TTC
aatattattagctcatgtat

SEQ ID NO: 272099 - DNA, 20 bp, Artificial Sequence
  Description of Artificial Sequence: Synthetic oligonucleotide
  Target: LAMA2; (-) strand; PAM type: YTN; PAM sequence: TTT
caatattattagctcatgta

SEQ ID NO: 272100 - DNA, 20 bp, Artificial Sequence
  Description of Artificial Sequence: Synthetic oligonucleotide
  Target: LAMA2; (-) strand; PAM type: YTN; PAM sequence: TTA
atggtaatatttcaatatta

SEQ ID NO: 272101 - DNA, 20 bp, Artificial Sequence
  Description of Artificial Sequence: Synthetic oligonucleotide
  Target: LAMA2; (-) strand; PAM type: YTN; PAM sequence: TTG
ggttaatggtaatatttcaa

SEQ ID NO: 272102 - DNA, 20 bp, Artificial Sequence
  Description of Artificial Sequence: Synthetic oligonucleotide
  Target: LAMA2; (-) strand; PAM type: YTN; PAM sequence: CTT
gggttaatggtaatatttca

SEQ ID NO: 272103 - DNA, 20 bp, Artificial Sequence
  Description of Artificial Sequence: Synthetic oligonucleotide
  Target: LAMA2; (-) strand; PAM type: YTN; PAM sequence: CTG
aaaaaatatgaatacagtct

SEQ ID NO: 272104 - DNA, 20 bp, Artificial Sequence
  Description of Artificial Sequence: Synthetic oligonucleotide
  Target: LAMA2; (-) strand; PAM type: YTN; PAM sequence: TTC
agtaaacactgaaaaaatat

SEQ ID NO: 272105 - DNA, 20 bp, Artificial Sequence
  Description of Artificial Sequence: Synthetic oligonucleotide
  Target: LAMA2; (-) strand; PAM type: YTN; PAM sequence: CTG
aaacagtaaaaaaacattca

SEQ ID NO: 272106 - DNA, 20 bp, Artificial Sequence
  Description of Artificial Sequence: Synthetic oligonucleotide
  Target: LAMA2; (-) strand; PAM type: YTN; PAM sequence: CTG
catgggatcctgaaacagta

SEQ ID NO: 272107 - DNA, 20 bp, Artificial Sequence
  Description of Artificial Sequence: Synthetic oligonucleotide
  Target: LAMA2; (-) strand; PAM type: YTN; PAM sequence: CTA
aatgtaatgtagtatcctgc

SEQ ID NO: 272108 - DNA, 20 bp, Artificial Sequence
  Description of Artificial Sequence: Synthetic oligonucleotide
  Target: LAMA2; (-) strand; PAM type: YTN; PAM sequence: CTA
agaagacacaatggctaaat

SEQ ID NO: 272109 - DNA, 20 bp, Artificial Sequence
  Description of Artificial Sequence: Synthetic oligonucleotide
  Target: LAMA2; (-) strand; PAM type: YTN; PAM sequence: CTA
gaggaaccctaagaagacac

SEQ ID NO: 272110 - DNA, 20 bp, Artificial Sequence
  Description of Artificial Sequence: Synthetic oligonucleotide
  Target: LAMA2; (-) strand; PAM type: YTN; PAM sequence: TTG
acagtgtcgtcacagtctag

SEQ ID NO: 272111 - DNA, 20 bp, Artificial Sequence
  Description of Artificial Sequence: Synthetic oligonucleotide
  Target: LAMA2; (-) strand; PAM type: YTN; PAM sequence: TTT
gacagtgtcgtcacagtcta

SEQ ID NO: 272112 - DNA, 20 bp, Artificial Sequence
  Description of Artificial Sequence: Synthetic oligonucleotide
  Target: LAMA2; (-) strand; PAM type: YTN; PAM sequence: TTT
tgacagtgtcgtcacagtct

SEQ ID NO: 272113 - DNA, 20 bp, Artificial Sequence
  Description of Artificial Sequence: Synthetic oligonucleotide
  Target: LAMA2; (-) strand; PAM type: YTN; PAM sequence: TTT
ttgacagtgtcgtcacagtc

SEQ ID NO: 272114 - DNA, 20 bp, Artificial Sequence
  Description of Artificial Sequence: Synthetic oligonucleotide
  Target: LAMA2; (-) strand; PAM type: YTN; PAM sequence: TTA
cagtatttttgacagtgtcg

SEQ ID NO: 272115 - DNA, 20 bp, Artificial Sequence
  Description of Artificial Sequence: Synthetic oligonucleotide
  Target: LAMA2; (-) strand; PAM type: YTN; PAM sequence: CTG
ttacagtatttttgacagtg

SEQ ID NO: 272116 - DNA, 20 bp, Artificial Sequence
  Description of Artificial Sequence: Synthetic oligonucleotide
  Target: LAMA2; (-) strand; PAM type: YTN; PAM sequence: CTC
aaagtcatcagaaacactgt

SEQ ID NO: 272117 - DNA, 20 bp, Artificial Sequence
  Description of Artificial Sequence: Synthetic oligonucleotide
  Target: LAMA2; (-) strand; PAM type: YTN; PAM sequence: CTC
tcaaagtcatcagaaacact

SEQ ID NO: 272118 - DNA, 20 bp, Artificial Sequence
  Description of Artificial Sequence: Synthetic oligonucleotide
  Target: LAMA2; (-) strand; PAM type: YTN; PAM sequence: CTG
tccaaactctcaaagtcatc

SEQ ID NO: 272119 - DNA, 20 bp, Artificial Sequence
  Description of Artificial Sequence: Synthetic oligonucleotide
  Target: LAMA2; (-) strand; PAM type: YTN; PAM sequence: TTA
ccaaacacatgaacctgtcc

SEQ ID NO: 272120 - DNA, 20 bp, Artificial Sequence
  Description of Artificial Sequence: Synthetic oligonucleotide
  Target: LAMA2; (-) strand; PAM type: YTN; PAM sequence: CTT
accaaacacatgaacctgtc

SEQ ID NO: 272121 - DNA, 20 bp, Artificial Sequence
  Description of Artificial Sequence: Synthetic oligonucleotide
  Target: LAMA2; (-) strand; PAM type: YTN; PAM sequence: TTG
agggacagcttaccaaacac

SEQ ID NO: 272122 - DNA, 20 bp, Artificial Sequence
  Description of Artificial Sequence: Synthetic oligonucleotide
  Target: LAMA2; (-) strand; PAM type: YTN; PAM sequence: CTA
atcatgagaaagatatgagg

SEQ ID NO: 272123 - DNA, 20 bp, Artificial Sequence
  Description of Artificial Sequence: Synthetic oligonucleotide
  Target: LAMA2; (-) strand; PAM type: YTN; PAM sequence: TTC
taatcatgagaaagatatga

SEQ ID NO: 272124 - DNA, 20 bp, Artificial Sequence
  Description of Artificial Sequence: Synthetic oligonucleotide
  Target: LAMA2; (-) strand; PAM type: YTN; PAM sequence: TTC
cattctaatcatgagaaaga

SEQ ID NO: 272125 - DNA, 20 bp, Artificial Sequence
  Description of Artificial Sequence: Synthetic oligonucleotide
  Target: LAMA2; (-) strand; PAM type: YTN; PAM sequence: CTC
ataattccattctaatcatg

SEQ ID NO: 272126 - DNA, 20 bp, Artificial Sequence
  Description of Artificial Sequence: Synthetic oligonucleotide
  Target: LAMA2; (-) strand; PAM type: YTN; PAM sequence: TTC
ccacaaaaactcataattcc

SEQ ID NO: 272127 - DNA, 20 bp, Artificial Sequence
  Description of Artificial Sequence: Synthetic oligonucleotide
  Target: LAMA2; (-) strand; PAM type: YTN; PAM sequence: TTT
cccacaaaaactcataattc

SEQ ID NO: 272128 - DNA, 20 bp, Artificial Sequence
  Description of Artificial Sequence: Synthetic oligonucleotide
  Target: LAMA2; (-) strand; PAM type: YTN; PAM sequence: TTT
tcccacaaaaactcataatt

SEQ ID NO: 272129 - DNA, 20 bp, Artificial Sequence
  Description of Artificial Sequence: Synthetic oligonucleotide
  Target: LAMA2; (-) strand; PAM type: YTN; PAM sequence: TTT
ttcccacaaaaactcataat

SEQ ID NO: 272130 - DNA, 20 bp, Artificial Sequence
  Description of Artificial Sequence: Synthetic oligonucleotide
  Target: LAMA2; (-) strand; PAM type: YTN; PAM sequence: CTG
aagtttttcccacaaaaact

SEQ ID NO: 272131 - DNA, 20 bp, Artificial Sequence
  Description of Artificial Sequence: Synthetic oligonucleotide
  Target: LAMA2; (-) strand; PAM type: YTN; PAM sequence: CTC
tgaagtttttcccacaaaaa

SEQ ID NO: 272132 - DNA, 20 bp, Artificial Sequence
  Description of Artificial Sequence: Synthetic oligonucleotide
  Target: LAMA2; (-) strand; PAM type: YTN; PAM sequence: TTA
cctctgaagtttttcccaca

SEQ ID NO: 272133 - DNA, 20 bp, Artificial Sequence
  Description of Artificial Sequence: Synthetic oligonucleotide
  Target: LAMA2; (-) strand; PAM type: YTN; PAM sequence: TTT
acctctgaagtttttcccac

SEQ ID NO: 272134 - DNA, 20 bp, Artificial Sequence
  Description of Artificial Sequence: Synthetic oligonucleotide
  Target: LAMA2; (-) strand; PAM type: YTN; PAM sequence: CTT
tacctctgaagtttttccca

SEQ ID NO: 272135 - DNA, 20 bp, Artificial Sequence
  Description of Artificial Sequence: Synthetic oligonucleotide
  Target: LAMA2; (-) strand; PAM type: YTN; PAM sequence: TTG
atgtgatgaaaatggtactt

SEQ ID NO: 272136 - DNA, 20 bp, Artificial Sequence
  Description of Artificial Sequence: Synthetic oligonucleotide
  Target: LAMA2; (-) strand; PAM type: YTN; PAM sequence: CTT
gatgtgatgaaaatggtact

SEQ ID NO: 272137 - DNA, 20 bp, Artificial Sequence
  Description of Artificial Sequence: Synthetic oligonucleotide
  Target: LAMA2; (-) strand; PAM type: YTN; PAM sequence: TTC
ttgatgtgatgaaaatggta

SEQ ID NO: 272138 - DNA, 20 bp, Artificial Sequence
  Description of Artificial Sequence: Synthetic oligonucleotide
  Target: LAMA2; (-) strand; PAM type: YTN; PAM sequence: TTG
gtcacatgggttcttgatgt

SEQ ID NO: 272139 - DNA, 20 bp, Artificial Sequence
  Description of Artificial Sequence: Synthetic oligonucleotide
  Target: LAMA2; (-) strand; PAM type: YTN; PAM sequence: TTA
gtcaggtgatcagggtcaat

SEQ ID NO: 272140 - DNA, 20 bp, Artificial Sequence
  Description of Artificial Sequence: Synthetic oligonucleotide
  Target: LAMA2; (-) strand; PAM type: YTN; PAM sequence: CTA
tgttagtcaggtgatcaggg

SEQ ID NO: 272141 - DNA, 20 bp, Artificial Sequence
  Description of Artificial Sequence: Synthetic oligonucleotide
  Target: LAMA2; (-) strand; PAM type: YTN; PAM sequence: CTG
gcaaacactatgttagtcag

SEQ ID NO: 272142 - DNA, 20 bp, Artificial Sequence
  Description of Artificial Sequence: Synthetic oligonucleotide
  Target: LAMA2; (-) strand; PAM type: YTN; PAM sequence: TTA
cagtggaaaaatctggcaaa

SEQ ID NO: 272143 - DNA, 20 bp, Artificial Sequence
  Description of Artificial Sequence: Synthetic oligonucleotide
  Target: LAMA2; (-) strand; PAM type: YTN; PAM sequence: TTT
acagtggaaaaatctggcaa

SEQ ID NO: 272144 - DNA, 20 bp, Artificial Sequence
  Description of Artificial Sequence: Synthetic oligonucleotide
  Target: LAMA2; (-) strand; PAM type: YTN; PAM sequence: CTT
tacagtggaaaaatctggca

SEQ ID NO: 272145 - DNA, 20 bp, Artificial Sequence
  Description of Artificial Sequence: Synthetic oligonucleotide
  Target: LAMA2; (-) strand; PAM type: YTN; PAM sequence: TTA
gagtatgaaaagggcataaa

SEQ ID NO: 272146 - DNA, 20 bp, Artificial Sequence
  Description of Artificial Sequence: Synthetic oligonucleotide
  Target: LAMA2; (-) strand; PAM type: YTN; PAM sequence: CTG
aagaatgggcagataaaaat

SEQ ID NO: 272147 - DNA, 20 bp, Artificial Sequence
  Description of Artificial Sequence: Synthetic oligonucleotide
  Target: LAMA2; (-) strand; PAM type: YTN; PAM sequence: CTG
aatctgaagaatgggcagat

SEQ ID NO: 272148 - DNA, 20 bp, Artificial Sequence
  Description of Artificial Sequence: Synthetic oligonucleotide
  Target: LAMA2; (-) strand; PAM type: YTN; PAM sequence: TTA
ctgaatctgaagaatgggca

SEQ ID NO: 272149 - DNA, 20 bp, Artificial Sequence
  Description of Artificial Sequence: Synthetic oligonucleotide
  Target: LAMA2; (-) strand; PAM type: YTN; PAM sequence: TTA
tgttactgaatctgaagaat

SEQ ID NO: 272150 - DNA, 20 bp, Artificial Sequence
  Description of Artificial Sequence: Synthetic oligonucleotide
  Target: LAMA2; (-) strand; PAM type: YTN; PAM sequence: TTT
atgttactgaatctgaagaa

SEQ ID NO: 272151 - DNA, 20 bp, Artificial Sequence
  Description of Artificial Sequence: Synthetic oligonucleotide
  Target: LAMA2; (-) strand; PAM type: YTN; PAM sequence: TTT
tatgttactgaatctgaaga

SEQ ID NO: 272152 - DNA, 20 bp, Artificial Sequence
  Description of Artificial Sequence: Synthetic oligonucleotide
  Target: LAMA2; (-) strand; PAM type: YTN; PAM sequence: CTT
ttatgttactgaatctgaag

SEQ ID NO: 272153 - DNA, 20 bp, Artificial Sequence
  Description of Artificial Sequence: Synthetic oligonucleotide
  Target: LAMA2; (-) strand; PAM type: YTN; PAM sequence: CTG
cgccttttatgttactgaat

SEQ ID NO: 272154 - DNA, 20 bp, Artificial Sequence
  Description of Artificial Sequence: Synthetic oligonucleotide
  Target: LAMA2; (-) strand; PAM type: YTN; PAM sequence: TTC
tgcgccttttatgttactga

SEQ ID NO: 272155 - DNA, 20 bp, Artificial Sequence
  Description of Artificial Sequence: Synthetic oligonucleotide
  Target: LAMA2; (-) strand; PAM type: YTN; PAM sequence: TTT
ctgcgccttttatgttactg

SEQ ID NO: 272156 - DNA, 20 bp, Artificial Sequence
  Description of Artificial Sequence: Synthetic oligonucleotide
  Target: LAMA2; (-) strand; PAM type: YTN; PAM sequence: CTA
tttctgcgccttttatgtta

SEQ ID NO: 272157 - DNA, 20 bp, Artificial Sequence
  Description of Artificial Sequence: Synthetic oligonucleotide
  Target: LAMA2; (-) strand; PAM type: YTN; PAM sequence: TTC
agtagtcctatttctgcgcc

SEQ ID NO: 272158 - DNA, 20 bp, Artificial Sequence
  Description of Artificial Sequence: Synthetic oligonucleotide
  Target: LAMA2; (-) strand; PAM type: YTN; PAM sequence: TTT
cagtagtcctatttctgcgc

SEQ ID NO: 272159 - DNA, 20 bp, Artificial Sequence
  Description of Artificial Sequence: Synthetic oligonucleotide
  Target: LAMA2; (-) strand; PAM type: YTN; PAM sequence: CTT
tcagtagtcctatttctgcg

SEQ ID NO: 272160 - DNA, 20 bp, Artificial Sequence
  Description of Artificial Sequence: Synthetic oligonucleotide
  Target: LAMA2; (-) strand; PAM type: YTN; PAM sequence: TTG
ctttcagtagtcctatttct

SEQ ID NO: 272161 - DNA, 20 bp, Artificial Sequence
  Description of Artificial Sequence: Synthetic oligonucleotide
  Target: LAMA2; (-) strand; PAM type: YTN; PAM sequence: TTT
gctttcagtagtcctatttc

SEQ ID NO: 272162 - DNA, 20 bp, Artificial Sequence
  Description of Artificial Sequence: Synthetic oligonucleotide
  Target: LAMA2; (-) strand; PAM type: YTN; PAM sequence: CTT
tgctttcagtagtcctattt

SEQ ID NO: 272163 - DNA, 20 bp, Artificial Sequence
  Description of Artificial Sequence: Synthetic oligonucleotide
  Target: LAMA2; (-) strand; PAM type: YTN; PAM sequence: CTC
aacccatcaaagtgatcttt

SEQ ID NO: 272164 - DNA, 20 bp, Artificial Sequence
  Description of Artificial Sequence: Synthetic oligonucleotide
  Target: LAMA2; (-) strand; PAM type: YTN; PAM sequence: TTC
tcaacccatcaaagtgatct

SEQ ID NO: 272165 - DNA, 20 bp, Artificial Sequence
  Description of Artificial Sequence: Synthetic oligonucleotide
  Target: LAMA2; (-) strand; PAM type: YTN; PAM sequence: CTT
ctcaacccatcaaagtgatc

SEQ ID NO: 272166 - DNA, 20 bp, Artificial Sequence
  Description of Artificial Sequence: Synthetic oligonucleotide
  Target: LAMA2; (-) strand; PAM type: YTN; PAM sequence: CTC
ccccttctcaacccatcaaa

SEQ ID NO: 272167 - DNA, 20 bp, Artificial Sequence
  Description of Artificial Sequence: Synthetic oligonucleotide
  Target: LAMA2; (-) strand; PAM type: YTN; PAM sequence: TTC
ctcccccttctcaacccatc

SEQ ID NO: 272168 - DNA, 20 bp, Artificial Sequence
  Description of Artificial Sequence: Synthetic oligonucleotide
  Target: LAMA2; (-) strand; PAM type: YTN; PAM sequence: TTT
cctcccccttctcaacccat

SEQ ID NO: 272169 - DNA, 20 bp, Artificial Sequence
  Description of Artificial Sequence: Synthetic oligonucleotide
  Target: LAMA2; (-) strand; PAM type: YTN; PAM sequence: TTA
catttcctcccccttctcaa

SEQ ID NO: 272170 - DNA, 20 bp, Artificial Sequence
  Description of Artificial Sequence: Synthetic oligonucleotide
  Target: LAMA2; (-) strand; PAM type: YTN; PAM sequence: TTT
acatttcctcccccttctca

SEQ ID NO: 272171 - DNA, 20 bp, Artificial Sequence
  Description of Artificial Sequence: Synthetic oligonucleotide
  Target: LAMA2; (-) strand; PAM type: YTN; PAM sequence: TTA
atgagtatttacatttcctc

SEQ ID NO: 272172 - DNA, 20 bp, Artificial Sequence
  Description of Artificial Sequence: Synthetic oligonucleotide
  Target: LAMA2; (-) strand; PAM type: YTN; PAM sequence: TTA
taaatatggtaggaaaaaag

SEQ ID NO: 272173 - DNA, 20 bp, Artificial Sequence
  Description of Artificial Sequence: Synthetic oligonucleotide
  Target: LAMA2; (-) strand; PAM type: YTN; PAM sequence: TTG
taattataaatatggtagga

SEQ ID NO: 272174 - DNA, 20 bp, Artificial Sequence
  Description of Artificial Sequence: Synthetic oligonucleotide
  Target: LAMA2; (-) strand; PAM type: YTN; PAM sequence: TTT
gtaattataaatatggtagg

SEQ ID NO: 272175 - DNA, 20 bp, Artificial Sequence
  Description of Artificial Sequence: Synthetic oligonucleotide
  Target: LAMA2; (-) strand; PAM type: YTN; PAM sequence: CTG
catggaagatatatttgtaa

SEQ ID NO: 272176 - DNA, 20 bp, Artificial Sequence
  Description of Artificial Sequence: Synthetic oligonucleotide
  Target: LAMA2; (-) strand; PAM type: YTN; PAM sequence: TTA
tggtctgcatggaagatata

SEQ ID NO: 272177 - DNA, 20 bp, Artificial Sequence
  Description of Artificial Sequence: Synthetic oligonucleotide
  Target: LAMA2; (-) strand; PAM type: YTN; PAM sequence: TTT
atggtctgcatggaagatat

SEQ ID NO: 272178 - DNA, 20 bp, Artificial Sequence
  Description of Artificial Sequence: Synthetic oligonucleotide
  Target: LAMA2; (-) strand; PAM type: YTN; PAM sequence: TTG
agtatttatggtctgcatgg

SEQ ID NO: 272179 - DNA, 20 bp, Artificial Sequence
  Description of Artificial Sequence: Synthetic oligonucleotide
  Target: LAMA2; (-) strand; PAM type: YTN; PAM sequence: CTT
gagtatttatggtctgcatg

SEQ ID NO: 272180 - DNA, 20 bp, Artificial Sequence
  Description of Artificial Sequence: Synthetic oligonucleotide
  Target: LAMA2; (-) strand; PAM type: YTN; PAM sequence: TTG
acttgagtatttatggtctg

SEQ ID NO: 272181 - DNA, 20 bp, Artificial Sequence
  Description of Artificial Sequence: Synthetic oligonucleotide
  Target: LAMA2; (-) strand; PAM type: YTN; PAM sequence: TTG
gtcatgttgacttgagtatt

SEQ ID NO: 272182 - DNA, 20 bp, Artificial Sequence
  Description of Artificial Sequence: Synthetic oligonucleotide
  Target: LAMA2; (-) strand; PAM type: YTN; PAM sequence: TTG
accacagggaaagagagaat

SEQ ID NO: 272183 - DNA, 20 bp, Artificial Sequence
  Description of Artificial Sequence: Synthetic oligonucleotide
  Target: LAMA2; (-) strand; PAM type: YTN; PAM sequence: CTT
gaccacagggaaagagagaa

SEQ ID NO: 272184 - DNA, 20 bp, Artificial Sequence
  Description of Artificial Sequence: Synthetic oligonucleotide
  Target: LAMA2; (-) strand; PAM type: YTN; PAM sequence: TTG
tcatgcagcttgaccacagg

SEQ ID NO: 272185 - DNA, 20 bp, Artificial Sequence
  Description of Artificial Sequence: Synthetic oligonucleotide
  Target: LAMA2; (-) strand; PAM type: YTN; PAM sequence: TTG
attgtcatgcagcttgacca

SEQ ID NO: 272186 - DNA, 20 bp, Artificial Sequence
  Description of Artificial Sequence: Synthetic oligonucleotide
  Target: LAMA2; (-) strand; PAM type: YTN; PAM sequence: TTT
gattgtcatgcagcttgacc

SEQ ID NO: 272187 - DNA, 20 bp, Artificial Sequence
  Description of Artificial Sequence: Synthetic oligonucleotide
  Target: LAMA2; (-) strand; PAM type: YTN; PAM sequence: TTT
tgattgtcatgcagcttgac

SEQ ID NO: 272188 - DNA, 20 bp, Artificial Sequence
  Description of Artificial Sequence: Synthetic oligonucleotide
  Target: LAMA2; (-) strand; PAM type: YTN; PAM sequence: CTT
ttgattgtcatgcagcttga

SEQ ID NO: 272189 - DNA, 20 bp, Artificial Sequence
  Description of Artificial Sequence: Synthetic oligonucleotide
  Target: LAMA2; (-) strand; PAM type: YTN; PAM sequence: TTC
accttttgattgtcatgcag

SEQ ID NO: 272190 - DNA, 20 bp, Artificial Sequence
  Description of Artificial Sequence: Synthetic oligonucleotide
  Target: LAMA2; (-) strand; PAM type: YTN; PAM sequence: TTA
attcaccttttgattgtcat

SEQ ID NO: 272191 - DNA, 20 bp, Artificial Sequence
  Description of Artificial Sequence: Synthetic oligonucleotide
  Target: LAMA2; (-) strand; PAM type: YTN; PAM sequence: CTG
tattaattcaccttttgatt

SEQ ID NO: 272192 - DNA, 20 bp, Artificial Sequence
  Description of Artificial Sequence: Synthetic oligonucleotide
  Target: LAMA2; (-) strand; PAM type: YTN; PAM sequence: TTC
catctgtattaattcacctt

SEQ ID NO: 272193 - DNA, 20 bp, Artificial Sequence
  Description of Artificial Sequence: Synthetic oligonucleotide
  Target: LAMA2; (-) strand; PAM type: YTN; PAM sequence: TTA
taattccatctgtattaatt

SEQ ID NO: 272194 - DNA, 20 bp, Artificial Sequence
  Description of Artificial Sequence: Synthetic oligonucleotide
  Target: LAMA2; (-) strand; PAM type: YTN; PAM sequence: CTA
attataattccatctgtatt

SEQ ID NO: 272195 - DNA, 20 bp, Artificial Sequence
  Description of Artificial Sequence: Synthetic oligonucleotide
  Target: LAMA2; (-) strand; PAM type: YTN; PAM sequence: CTC
taattataattccatctgta

SEQ ID NO: 272196 - DNA, 20 bp, Artificial Sequence
  Description of Artificial Sequence: Synthetic oligonucleotide
  Target: LAMA2; (-) strand; PAM type: YTN; PAM sequence: CTC
tctaattataattccatctg

SEQ ID NO: 272197 - DNA, 20 bp, Artificial Sequence
  Description of Artificial Sequence: Synthetic oligonucleotide
  Target: LAMA2; (-) strand; PAM type: YTN; PAM sequence: CTA
actctctaattataattcca

SEQ ID NO: 272198 - DNA, 20 bp, Artificial Sequence
  Description of Artificial Sequence: Synthetic oligonucleotide
  Target: LAMA2; (-) strand; PAM type: YTN; PAM sequence: TTG
gataatgaaaccatctaact

SEQ ID NO: 272199 - DNA, 20 bp, Artificial Sequence
  Description of Artificial Sequence: Synthetic oligonucleotide
  Target: LAMA2; (-) strand; PAM type: YTN; PAM sequence: TTT
ggataatgaaaccatctaac

SEQ ID NO: 272200 - DNA, 20 bp, Artificial Sequence
  Description of Artificial Sequence: Synthetic oligonucleotide
  Target: LAMA2; (-) strand; PAM type: YTN; PAM sequence: TTT
tggataatgaaaccatctaa

SEQ ID NO: 272201 - DNA, 20 bp, Artificial Sequence
  Description of Artificial Sequence: Synthetic oligonucleotide
  Target: LAMA2; (-) strand; PAM type: YTN; PAM sequence: CTG
attttggataatgaaaccat

SEQ ID NO: 272202 - DNA, 20 bp, Artificial Sequence
  Description of Artificial Sequence: Synthetic oligonucleotide
  Target: LAMA2; (-) strand; PAM type: YTN; PAM sequence: TTA
gcctgattttggataatgaa

SEQ ID NO: 272203 - DNA, 20 bp, Artificial Sequence
  Description of Artificial Sequence: Synthetic oligonucleotide
  Target: LAMA2; (-) strand; PAM type: YTN; PAM sequence: CTT
agcctgattttggataatga

SEQ ID NO: 272204 - DNA, 20 bp, Artificial Sequence
  Description of Artificial Sequence: Synthetic oligonucleotide
  Target: LAMA2; (-) strand; PAM type: YTN; PAM sequence: TTA
gcgtgcttagcctgattttg

SEQ ID NO: 272205 - DNA, 20 bp, Artificial Sequence
  Description of Artificial Sequence: Synthetic oligonucleotide
  Target: LAMA2; (-) strand; PAM type: YTN; PAM sequence: CTG
agatagaggcattagcgtgc

SEQ ID NO: 272206 - DNA, 20 bp, Artificial Sequence
  Description of Artificial Sequence: Synthetic oligonucleotide
  Target: LAMA2; (-) strand; PAM type: YTN; PAM sequence: CTC
tgagatagaggcattagcgt

SEQ ID NO: 272207 - DNA, 20 bp, Artificial Sequence
  Description of Artificial Sequence: Synthetic oligonucleotide
  Target: LAMA2; (-) strand; PAM type: YTN; PAM sequence: TTC
atgactctgagatagaggca

SEQ ID NO: 272208 - DNA, 20 bp, Artificial Sequence
  Description of Artificial Sequence: Synthetic oligonucleotide
  Target: LAMA2; (-) strand; PAM type: YTN; PAM sequence: CTG
caggatcattcatgactctg

SEQ ID NO: 272209 - DNA, 20 bp, Artificial Sequence
  Description of Artificial Sequence: Synthetic oligonucleotide
  Target: LAMA2; (-) strand; PAM type: YTN; PAM sequence: CTG
gtcacaactgcaggatcatt

SEQ ID NO: 272210 - DNA, 20 bp, Artificial Sequence
  Description of Artificial Sequence: Synthetic oligonucleotide
  Target: LAMA2; (-) strand; PAM type: YTN; PAM sequence: CTC
ataccctggtcacaactgca

SEQ ID NO: 272211 - DNA, 20 bp, Artificial Sequence
  Description of Artificial Sequence: Synthetic oligonucleotide
  Target: LAMA2; (-) strand; PAM type: YTN; PAM sequence: TTC
tcataccctggtcacaactg

SEQ ID NO: 272212 - DNA, 20 bp, Artificial Sequence
  Description of Artificial Sequence: Synthetic oligonucleotide
  Target: LAMA2; (-) strand; PAM type: YTN; PAM sequence: TTT
ctcataccctggtcacaact

SEQ ID NO: 272213 - DNA, 20 bp, Artificial Sequence
  Description of Artificial Sequence: Synthetic oligonucleotide
  Target: LAMA2; (-) strand; PAM type: YTN; PAM sequence: CTG
catttctcataccctggtca

SEQ ID NO: 272214 - DNA, 20 bp, Artificial Sequence
  Description of Artificial Sequence: Synthetic oligonucleotide
  Target: LAMA2; (-) strand; PAM type: YTN; PAM sequence: TTG
tggccactgcatttctcata

SEQ ID NO: 272215 - DNA, 20 bp, Artificial Sequence
  Description of Artificial Sequence: Synthetic oligonucleotide
  Target: LAMA2; (-) strand; PAM type: YTN; PAM sequence: TTG
gaagttgtggccactgcatt

SEQ ID NO: 272216 - DNA, 20 bp, Artificial Sequence
  Description of Artificial Sequence: Synthetic oligonucleotide
  Target: LAMA2; (-) strand; PAM type: YTN; PAM sequence: CTA
atgtagtcatgggtaattgg

SEQ ID NO: 272217 - DNA, 20 bp, Artificial Sequence
  Description of Artificial Sequence: Synthetic oligonucleotide
  Target: LAMA2; (-) strand; PAM type: YTN; PAM sequence: CTC
taatgtagtcatgggtaatt

SEQ ID NO: 272218 - DNA, 20 bp, Artificial Sequence
  Description of Artificial Sequence: Synthetic oligonucleotide
  Target: LAMA2; (-) strand; PAM type: YTN; PAM sequence: CTC
ctctaatgtagtcatgggta

SEQ ID NO: 272219 - DNA, 20 bp, Artificial Sequence
  Description of Artificial Sequence: Synthetic oligonucleotide
  Target: LAMA2; (-) strand; PAM type: YTN; PAM sequence: CTG
tctcctctaatgtagtcatg

SEQ ID NO: 272220 - DNA, 20 bp, Artificial Sequence
  Description of Artificial Sequence: Synthetic oligonucleotide
  Target: LAMA2; (-) strand; PAM type: YTN; PAM sequence: CTA
gagcactgtctcctctaatg

SEQ ID NO: 272221 - DNA, 20 bp, Artificial Sequence
  Description of Artificial Sequence: Synthetic oligonucleotide
  Target: LAMA2; (-) strand; PAM type: YTN; PAM sequence: CTA
gtctagagcactgtctcctc

SEQ ID NO: 272222 - DNA, 20 bp, Artificial Sequence
  Description of Artificial Sequence: Synthetic oligonucleotide
  Target: LAMA2; (-) strand; PAM type: YTN; PAM sequence: TTC
caatgtgcagtcctagtcta

SEQ ID NO: 272223 - DNA, 20 bp, Artificial Sequence
  Description of Artificial Sequence: Synthetic oligonucleotide
  Target: LAMA2; (-) strand; PAM type: YTN; PAM sequence: CTG
gtaattccaatgtgcagtcc

SEQ ID NO: 272224 - DNA, 20 bp, Artificial Sequence
  Description of Artificial Sequence: Synthetic oligonucleotide
  Target: LAMA2; (-) strand; PAM type: YTN; PAM sequence: CTC
ctggtaattccaatgtgcag

SEQ ID NO: 272225 - DNA, 20 bp, Artificial Sequence
  Description of Artificial Sequence: Synthetic oligonucleotide
  Target: LAMA2; (-) strand; PAM type: YTN; PAM sequence: CTA
tgggtgtgagatagggctcc

SEQ ID NO: 272226 - DNA, 20 bp, Artificial Sequence
  Description of Artificial Sequence: Synthetic oligonucleotide
  Target: LAMA2; (-) strand; PAM type: YTN; PAM sequence: CTG
catcacaacctatgggtgtg

SEQ ID NO: 272227 - DNA, 20 bp, Artificial Sequence
  Description of Artificial Sequence: Synthetic oligonucleotide
  Target: LAMA2; (-) strand; PAM type: YTN; PAM sequence: CTA
ccccagaccaactgcatcac

SEQ ID NO: 272228 - DNA, 20 bp, Artificial Sequence
  Description of Artificial Sequence: Synthetic oligonucleotide
  Target: LAMA2; (-) strand; PAM type: YTN; PAM sequence: CTC
taccccagaccaactgcatc

SEQ ID NO: 272229 - DNA, 20 bp, Artificial Sequence
  Description of Artificial Sequence: Synthetic oligonucleotide
  Target: LAMA2; (-) strand; PAM type: YTN; PAM sequence: CTG
actctaccccagaccaactg

SEQ ID NO: 272230 - DNA, 20 bp, Artificial Sequence
  Description of Artificial Sequence: Synthetic oligonucleotide
  Target: LAMA2; (-) strand; PAM type: YTN; PAM sequence: TTG
aatatcccagtggtctgact

SEQ ID NO: 272231 - DNA, 20 bp, Artificial Sequence
  Description of Artificial Sequence: Synthetic oligonucleotide
  Target: LAMA2; (-) strand; PAM type: YTN; PAM sequence: CTT
gaatatcccagtggtctgac

SEQ ID NO: 272232 - DNA, 20 bp, Artificial Sequence
  Description of Artificial Sequence: Synthetic oligonucleotide
  Target: LAMA2; (-) strand; PAM type: YTN; PAM sequence: TTC
ttgaatatcccagtggtctg

SEQ ID NO: 272233 - DNA, 20 bp, Artificial Sequence
  Description of Artificial Sequence: Synthetic oligonucleotide
  Target: LAMA2; (-) strand; PAM type: YTN; PAM sequence: CTG
gggagttcttgaatatccca

SEQ ID NO: 272234 - DNA, 20 bp, Artificial Sequence
  Description of Artificial Sequence: Synthetic oligonucleotide
  Target: LAMA2; (-) strand; PAM type: YTN; PAM sequence: TTA
tcagtataatctggggagtt

SEQ ID NO: 272235 - DNA, 20 bp, Artificial Sequence
  Description of Artificial Sequence: Synthetic oligonucleotide
  Target: LAMA2; (-) strand; PAM type: YTN; PAM sequence: TTT
atcagtataatctggggagt

SEQ ID NO: 272236 - DNA, 20 bp, Artificial Sequence
  Description of Artificial Sequence: Synthetic oligonucleotide
  Target: LAMA2; (-) strand; PAM type: YTN; PAM sequence: CTT
tatcagtataatctggggag

SEQ ID NO: 272237 - DNA, 20 bp, Artificial Sequence
  Description of Artificial Sequence: Synthetic oligonucleotide
  Target: LAMA2; (-) strand; PAM type: YTN; PAM sequence: TTC
tttatcagtataatctgggg

SEQ ID NO: 272238 - DNA, 20 bp, Artificial Sequence
  Description of Artificial Sequence: Synthetic oligonucleotide
  Target: LAMA2; (-) strand; PAM type: YTN; PAM sequence: CTA
caggatcacagtaattcttt

SEQ ID NO: 272239 - DNA, 20 bp, Artificial Sequence
  Description of Artificial Sequence: Synthetic oligonucleotide
  Target: LAMA2; (-) strand; PAM type: YTN; PAM sequence: TTA
ggtaactacaggatcacagt

SEQ ID NO: 272240 - DNA, 20 bp, Artificial Sequence
  Description of Artificial Sequence: Synthetic oligonucleotide
  Target: LAMA2; (-) strand; PAM type: YTN; PAM sequence: CTA
ttaggtaactacaggatcac

SEQ ID NO: 272241 - DNA, 20 bp, Artificial Sequence
  Description of Artificial Sequence: Synthetic oligonucleotide
  Target: LAMA2; (-) strand; PAM type: YTN; PAM sequence: TTA
gctattaggtaactacagga

SEQ ID NO: 272242 - DNA, 20 bp, Artificial Sequence
  Description of Artificial Sequence: Synthetic oligonucleotide
  Target: LAMA2; (-) strand; PAM type: YTN; PAM sequence: CTT
agctattaggtaactacagg

SEQ ID NO: 272243 - DNA, 20 bp, Artificial Sequence
  Description of Artificial Sequence: Synthetic oligonucleotide
  Target: LAMA2; (-) strand; PAM type: YTN; PAM sequence: TTC
cagagggaagagagtcttag

SEQ ID NO: 272244 - DNA, 20 bp, Artificial Sequence
  Description of Artificial Sequence: Synthetic oligonucleotide
  Target: LAMA2; (-) strand; PAM type: YTN; PAM sequence: TTT
ccagagggaagagagtctta

SEQ ID NO: 272245 - DNA, 20 bp, Artificial Sequence
  Description of Artificial Sequence: Synthetic oligonucleotide
  Target: LAMA2; (-) strand; PAM type: YTN; PAM sequence: TTT
tccagagggaagagagtctt

SEQ ID NO: 272246 - DNA, 20 bp, Artificial Sequence
  Description of Artificial Sequence: Synthetic oligonucleotide
  Target: LAMA2; (-) strand; PAM type: YTN; PAM sequence: TTA
aggcattttccagagggaag

SEQ ID NO: 272247 - DNA, 20 bp, Artificial Sequence
  Description of Artificial Sequence: Synthetic oligonucleotide
  Target: LAMA2; (-) strand; PAM type: YTN; PAM sequence: TTG
gcagtaccaattaaggcatt

SEQ ID NO: 272248 - DNA, 20 bp, Artificial Sequence
  Description of Artificial Sequence: Synthetic oligonucleotide
  Target: LAMA2; (-) strand; PAM type: YTN; PAM sequence: TTA
aaaaaaaaaaaaaaagattg

SEQ ID NO: 272249 - DNA, 20 bp, Artificial Sequence
  Description of Artificial Sequence: Synthetic oligonucleotide
  Target: LAMA2; (-) strand; PAM type: YTN; PAM sequence: TTT
aaaaaaaaaaaaaaaagatt

SEQ ID NO: 272250 - DNA, 20 bp, Artificial Sequence
  Description of Artificial Sequence: Synthetic oligonucleotide
  Target: LAMA2; (-) strand; PAM type: YTN; PAM sequence: CTG
tttaaaaaaaaaaaaaaaag

SEQ ID NO: 272251 - DNA, 20 bp, Artificial Sequence
  Description of Artificial Sequence: Synthetic oligonucleotide
  Target: LAMA2; (-) strand; PAM type: YTN; PAM sequence: CTC
tgtttaaaaaaaaaaaaaaa

SEQ ID NO: 272252 - DNA, 20 bp, Artificial Sequence
  Description of Artificial Sequence: Synthetic oligonucleotide
  Target: LAMA2; (-) strand; PAM type: YTN; PAM sequence: CTG
gacaacaagggtgaaactct

SEQ ID NO: 272253 - DNA, 20 bp, Artificial Sequence
  Description of Artificial Sequence: Synthetic oligonucleotide
  Target: LAMA2; (-) strand; PAM type: YTN; PAM sequence: CTC
cagcctggacaacaagggtg

SEQ ID NO: 272254 - DNA, 20 bp, Artificial Sequence
  Description of Artificial Sequence: Synthetic oligonucleotide
  Target: LAMA2; (-) strand; PAM type: YTN; PAM sequence: TTG
tactccagcctggacaacaa

SEQ ID NO: 272255 - DNA, 20 bp, Artificial Sequence
  Description of Artificial Sequence: Synthetic oligonucleotide
  Target: LAMA2; (-) strand; PAM type: YTN; PAM sequence: TTC
acaccattgtactccagcct

SEQ ID NO: 272256 - DNA, 20 bp, Artificial Sequence
  Description of Artificial Sequence: Synthetic oligonucleotide
  Target: LAMA2; (-) strand; PAM type: YTN; PAM sequence: CTG
agttcacaccattgtactcc

SEQ ID NO: 272257 - DNA, 20 bp, Artificial Sequence
  Description of Artificial Sequence: Synthetic oligonucleotide
  Target: LAMA2; (-) strand; PAM type: YTN; PAM sequence: TTG
cagtgagctgagttcacacc

SEQ ID NO: 272258 - DNA, 20 bp, Artificial Sequence
  Description of Artificial Sequence: Synthetic oligonucleotide
  Target: LAMA2; (-) strand; PAM type: YTN; PAM sequence: CTA
ggaggtggaggttgcagtga

SEQ ID NO: 272259 - DNA, 20 bp, Artificial Sequence
  Description of Artificial Sequence: Synthetic oligonucleotide
  Target: LAMA2; (-) strand; PAM type: YTN; PAM sequence: TTG
aacctaggaggtggaggttg

SEQ ID NO: 272260 - DNA, 20 bp, Artificial Sequence
  Description of Artificial Sequence: Synthetic oligonucleotide
  Target: LAMA2; (-) strand; PAM type: YTN; PAM sequence: CTT
gaacctaggaggtggaggtt

SEQ ID NO: 272261 - DNA, 20 bp, Artificial Sequence
  Description of Artificial Sequence: Synthetic oligonucleotide
  Target: LAMA2; (-) strand; PAM type: YTN; PAM sequence: TTG
cttgaacctaggaggtggag

SEQ ID NO: 272262 - DNA, 20 bp, Artificial Sequence
  Description of Artificial Sequence: Synthetic oligonucleotide
  Target: LAMA2; (-) strand; PAM type: YTN; PAM sequence: CTG
aagcaggagaattgcttgaa

SEQ ID NO: 272263 - DNA, 20 bp, Artificial Sequence
  Description of Artificial Sequence: Synthetic oligonucleotide
  Target: LAMA2; (-) strand; PAM type: YTN; PAM sequence: TTG
ggaggctgaagcaggagaat

SEQ ID NO: 272264 - DNA, 20 bp, Artificial Sequence
  Description of Artificial Sequence: Synthetic oligonucleotide
  Target: LAMA2; (-) strand; PAM type: YTN; PAM sequence: CTT
gggaggctgaagcaggagaa

SEQ ID NO: 272265 - DNA, 20 bp, Artificial Sequence
  Description of Artificial Sequence: Synthetic oligonucleotide
  Target: LAMA2; (-) strand; PAM type: YTN; PAM sequence: CTA
cttgggaggctgaagcagga

SEQ ID NO: 272266 - DNA, 20 bp, Artificial Sequence
  Description of Artificial Sequence: Synthetic oligonucleotide
  Target: LAMA2; (-) strand; PAM type: YTN; PAM sequence: CTG
caatcccagctacttgggag

SEQ ID NO: 272267 - DNA, 20 bp, Artificial Sequence
  Description of Artificial Sequence: Synthetic oligonucleotide
  Target: LAMA2; (-) strand; PAM type: YTN; PAM sequence: CTG
ggcatggtagcaggtgcctg

SEQ ID NO: 272268 - DNA, 20 bp, Artificial Sequence
  Description of Artificial Sequence: Synthetic oligonucleotide
  Target: LAMA2; (-) strand; PAM type: YTN; PAM sequence: TTA
gctgggcatggtagcaggtg

SEQ ID NO: 272269 - DNA, 20 bp, Artificial Sequence
  Description of Artificial Sequence: Synthetic oligonucleotide
  Target: LAMA2; (-) strand; PAM type: YTN; PAM sequence: TTA
aaaaaaaaaaaaaaaaaatt

SEQ ID NO: 272270 - DNA, 20 bp, Artificial Sequence
  Description of Artificial Sequence: Synthetic oligonucleotide
  Target: LAMA2; (-) strand; PAM type: YTN; PAM sequence: CTT
aaaaaaaaaaaaaaaaaaat

SEQ ID NO: 272271 - DNA, 20 bp, Artificial Sequence
  Description of Artificial Sequence: Synthetic oligonucleotide
  Target: LAMA2; (-) strand; PAM type: YTN; PAM sequence: CTA
cttaaaaaaaaaaaaaaaaa

SEQ ID NO: 272272 - DNA, 20 bp, Artificial Sequence
  Description of Artificial Sequence: Synthetic oligonucleotide
  Target: LAMA2; (-) strand; PAM type: YTN; PAM sequence: CTC
tacttaaaaaaaaaaaaaaa

SEQ ID NO: 272273 - DNA, 20 bp, Artificial Sequence
  Description of Artificial Sequence: Synthetic oligonucleotide
  Target: LAMA2; (-) strand; PAM type: YTN; PAM sequence: CTG
tctctacttaaaaaaaaaaa

SEQ ID NO: 272274 - DNA, 20 bp, Artificial Sequence
  Description of Artificial Sequence: Synthetic oligonucleotide
  Target: LAMA2; (-) strand; PAM type: YTN; PAM sequence: CTG
gccaacatgatgaaaccctg

SEQ ID NO: 272275 - DNA, 20 bp, Artificial Sequence
  Description of Artificial Sequence: Synthetic oligonucleotide
  Target: LAMA2; (-) strand; PAM type: YTN; PAM sequence: TTC
gagaccagcctggccaacat

SEQ ID NO: 272276 - DNA, 20 bp, Artificial Sequence
  Description of Artificial Sequence: Synthetic oligonucleotide
  Target: LAMA2; (-) strand; PAM type: YTN; PAM sequence: CTG
aggcgggtggatcacccgag

SEQ ID NO: 272277 - DNA, 20 bp, Artificial Sequence
  Description of Artificial Sequence: Synthetic oligonucleotide
  Target: LAMA2; (-) strand; PAM type: YTN; PAM sequence: TTG
ggaggctgaggcgggtggat

SEQ ID NO: 272278 - DNA, 20 bp, Artificial Sequence
  Description of Artificial Sequence: Synthetic oligonucleotide
  Target: LAMA2; (-) strand; PAM type: YTN; PAM sequence: TTT
gggaggctgaggcgggtgga

SEQ ID NO: 272279 - DNA, 20 bp, Artificial Sequence
  Description of Artificial Sequence: Synthetic oligonucleotide
  Target: LAMA2; (-) strand; PAM type: YTN; PAM sequence: CTT
tgggaggctgaggcgggtgg

SEQ ID NO: 272280 - DNA, 20 bp, Artificial Sequence
  Description of Artificial Sequence: Synthetic oligonucleotide
  Target: LAMA2; (-) strand; PAM type: YTN; PAM sequence: CTG
taatcccagcactttgggag

SEQ ID NO: 272281 - DNA, 20 bp, Artificial Sequence
  Description of Artificial Sequence: Synthetic oligonucleotide
  Target: LAMA2; (-) strand; PAM type: YTN; PAM sequence: CTC
acgcctgtaatcccagcact

SEQ ID NO: 272282 - DNA, 20 bp, Artificial Sequence
  Description of Artificial Sequence: Synthetic oligonucleotide
  Target: LAMA2; (-) strand; PAM type: YTN; PAM sequence: CTG
ggcatggtggctcacgcctg

SEQ ID NO: 272283 - DNA, 20 bp, Artificial Sequence
  Description of Artificial Sequence: Synthetic oligonucleotide
  Target: LAMA2; (-) strand; PAM type: YTN; PAM sequence: TTG
gcagtagtgctgggcatggt

SEQ ID NO: 272284 - DNA, 20 bp, Artificial Sequence
  Description of Artificial Sequence: Synthetic oligonucleotide
  Target: LAMA2; (-) strand; PAM type: YTN; PAM sequence: CTG
gtgagccaaccaagcagaga

SEQ ID NO: 272285 - DNA, 20 bp, Artificial Sequence
  Description of Artificial Sequence: Synthetic oligonucleotide
  Target: LAMA2; (-) strand; PAM type: YTN; PAM sequence: CTG
tatcaagtgactggtgagcc

SEQ ID NO: 272286 - DNA, 20 bp, Artificial Sequence
  Description of Artificial Sequence: Synthetic oligonucleotide
  Target: LAMA2; (-) strand; PAM type: YTN; PAM sequence: CTA
aagactgtatcaagtgactg

SEQ ID NO: 272287 - DNA, 20 bp, Artificial Sequence
  Description of Artificial Sequence: Synthetic oligonucleotide
  Target: LAMA2; (-) strand; PAM type: YTN; PAM sequence: TTA
aatctaaagactgtatcaag

SEQ ID NO: 272288 - DNA, 20 bp, Artificial Sequence
  Description of Artificial Sequence: Synthetic oligonucleotide
  Target: LAMA2; (-) strand; PAM type: YTN; PAM sequence: CTT
aaatctaaagactgtatcaa

SEQ ID NO: 272289 - DNA, 20 bp, Artificial Sequence
  Description of Artificial Sequence: Synthetic oligonucleotide
  Target: LAMA2; (-) strand; PAM type: YTN; PAM sequence: CTC
ttaaatctaaagactgtatc

SEQ ID NO: 272290 - DNA, 20 bp, Artificial Sequence
  Description of Artificial Sequence: Synthetic oligonucleotide
  Target: LAMA2; (-) strand; PAM type: YTN; PAM sequence: TTG
acatgtgctcttaaatctaa

SEQ ID NO: 272291 - DNA, 20 bp, Artificial Sequence
  Description of Artificial Sequence: Synthetic oligonucleotide
  Target: LAMA2; (-) strand; PAM type: YTN; PAM sequence: CTT
gacatgtgctcttaaatcta

SEQ ID NO: 272292 - DNA, 20 bp, Artificial Sequence
  Description of Artificial Sequence: Synthetic oligonucleotide
  Target: LAMA2; (-) strand; PAM type: YTN; PAM sequence: CTA
cagcagtcatgcaggatcaa

SEQ ID NO: 272293 - DNA, 20 bp, Artificial Sequence
  Description of Artificial Sequence: Synthetic oligonucleotide
  Target: LAMA2; (-) strand; PAM type: YTN; PAM sequence: CTC
ctacagcagtcatgcaggat

SEQ ID NO: 272294 - DNA, 20 bp, Artificial Sequence
  Description of Artificial Sequence: Synthetic oligonucleotide
  Target: LAMA2; (-) strand; PAM type: YTN; PAM sequence: TTA
aagaagagagggtagctcct

SEQ ID NO: 272295 - DNA, 20 bp, Artificial Sequence
  Description of Artificial Sequence: Synthetic oligonucleotide
  Target: LAMA2; (-) strand; PAM type: YTN; PAM sequence: CTT
aaagaagagagggtagctcc

SEQ ID NO: 272296 - DNA, 20 bp, Artificial Sequence
  Description of Artificial Sequence: Synthetic oligonucleotide
  Target: LAMA2; (-) strand; PAM type: YTN; PAM sequence: TTA
aaaacaatgagtataaaata

SEQ ID NO: 272297 - DNA, 20 bp, Artificial Sequence
  Description of Artificial Sequence: Synthetic oligonucleotide
  Target: LAMA2; (-) strand; PAM type: YTN; PAM sequence: TTT
aaaaacaatgagtataaaat

SEQ ID NO: 272298 - DNA, 20 bp, Artificial Sequence
  Description of Artificial Sequence: Synthetic oligonucleotide
  Target: LAMA2; (-) strand; PAM type: YTN; PAM sequence: CTC
catttaaaaacaatgagtat

SEQ ID NO: 272299 - DNA, 20 bp, Artificial Sequence
  Description of Artificial Sequence: Synthetic oligonucleotide
  Target: LAMA2; (-) strand; PAM type: YTN; PAM sequence: TTC
tccatttaaaaacaatgagt

SEQ ID NO: 272300 - DNA, 20 bp, Artificial Sequence
  Description of Artificial Sequence: Synthetic oligonucleotide
  Target: LAMA2; (-) strand; PAM type: YTN; PAM sequence: TTT
ctccatttaaaaacaatgag

SEQ ID NO: 272301 - DNA, 20 bp, Artificial Sequence
  Description of Artificial Sequence: Synthetic oligonucleotide
  Target: LAMA2; (-) strand; PAM type: YTN; PAM sequence: TTA
gatttctccatttaaaaaca

SEQ ID NO: 272302 - DNA, 20 bp, Artificial Sequence
  Description of Artificial Sequence: Synthetic oligonucleotide
  Target: LAMA2; (-) strand; PAM type: YTN; PAM sequence: TTA
gggaattagatttctccatt

SEQ ID NO: 272303 - DNA, 20 bp, Artificial Sequence
  Description of Artificial Sequence: Synthetic oligonucleotide
  Target: LAMA2; (-) strand; PAM type: YTN; PAM sequence: TTA
cccagggatattagggaatt

SEQ ID NO: 272304 - DNA, 20 bp, Artificial Sequence
  Description of Artificial Sequence: Synthetic oligonucleotide
  Target: LAMA2; (-) strand; PAM type: YTN; PAM sequence: TTT
acccagggatattagggaat

SEQ ID NO: 272305 - DNA, 20 bp, Artificial Sequence
  Description of Artificial Sequence: Synthetic oligonucleotide
  Target: LAMA2; (-) strand; PAM type: YTN; PAM sequence: CTT
tacccagggatattagggaa

SEQ ID NO: 272306 - DNA, 20 bp, Artificial Sequence
  Description of Artificial Sequence: Synthetic oligonucleotide
  Target: LAMA2; (-) strand; PAM type: YTN; PAM sequence: TTC
tttacccagggatattaggg

SEQ ID NO: 272307 - DNA, 20 bp, Artificial Sequence
  Description of Artificial Sequence: Synthetic oligonucleotide
  Target: LAMA2; (-) strand; PAM type: YTN; PAM sequence: CTT
ctttacccagggatattagg

SEQ ID NO: 272308 - DNA, 20 bp, Artificial Sequence
  Description of Artificial Sequence: Synthetic oligonucleotide
  Target: LAMA2; (-) strand; PAM type: YTN; PAM sequence: TTG
ggtggaataatgtcttcttt

SEQ ID NO: 272309 - DNA, 20 bp, Artificial Sequence
  Description of Artificial Sequence: Synthetic oligonucleotide
  Target: LAMA2; (-) strand; PAM type: YTN; PAM sequence: CTT
gggtggaataatgtcttctt

SEQ ID NO: 272310 - DNA, 20 bp, Artificial Sequence
  Description of Artificial Sequence: Synthetic oligonucleotide
  Target: LAMA2; (-) strand; PAM type: YTN; PAM sequence: TTC
ttgggtggaataatgtcttc

SEQ ID NO: 272311 - DNA, 20 bp, Artificial Sequence
  Description of Artificial Sequence: Synthetic oligonucleotide
  Target: LAMA2; (-) strand; PAM type: YTN; PAM sequence: TTA
aatatgagttcttgggtgga

SEQ ID NO: 272312 - DNA, 20 bp, Artificial Sequence
  Description of Artificial Sequence: Synthetic oligonucleotide
  Target: LAMA2; (-) strand; PAM type: YTN; PAM sequence: TTT
aaatatgagttcttgggtgg

SEQ ID NO: 272313 - DNA, 20 bp, Artificial Sequence
  Description of Artificial Sequence: Synthetic oligonucleotide
  Target: LAMA2; (-) strand; PAM type: YTN; PAM sequence: TTT
taaatatgagttcttgggtg

SEQ ID NO: 272314 - DNA, 20 bp, Artificial Sequence
  Description of Artificial Sequence: Synthetic oligonucleotide
  Target: LAMA2; (-) strand; PAM type: YTN; PAM sequence: TTA
aaatatatcaaaatacattt

SEQ ID NO: 272315 - DNA, 20 bp, Artificial Sequence
  Description of Artificial Sequence: Synthetic oligonucleotide
  Target: LAMA2; (-) strand; PAM type: YTN; PAM sequence: TTA
tacatgaattaaaatatatc

SEQ ID NO: 272316 - DNA, 20 bp, Artificial Sequence
  Description of Artificial Sequence: Synthetic oligonucleotide
  Target: LAMA2; (-) strand; PAM type: YTN; PAM sequence: TTT
atacatgaattaaaatatat

SEQ ID NO: 272317 - DNA, 20 bp, Artificial Sequence
  Description of Artificial Sequence: Synthetic oligonucleotide
  Target: LAMA2; (-) strand; PAM type: YTN; PAM sequence: TTA
tatttatacatgaattaaaa

SEQ ID NO: 272318 - DNA, 20 bp, Artificial Sequence
  Description of Artificial Sequence: Synthetic oligonucleotide
  Target: LAMA2; (-) strand; PAM type: YTN; PAM sequence: TTT
atatttatacatgaattaaa

SEQ ID NO: 272319 - DNA, 20 bp, Artificial Sequence
  Description of Artificial Sequence: Synthetic oligonucleotide
  Target: LAMA2; (-) strand; PAM type: YTN; PAM sequence: CTT
tatatttatacatgaattaa

SEQ ID NO: 272320 - DNA, 20 bp, Artificial Sequence
  Description of Artificial Sequence: Synthetic oligonucleotide
  Target: LAMA2; (-) strand; PAM type: YTN; PAM sequence: TTA
ctttatatttatacatgaat

SEQ ID NO: 272321 - DNA, 20 bp, Artificial Sequence
  Description of Artificial Sequence: Synthetic oligonucleotide
  Target: LAMA2; (-) strand; PAM type: YTN; PAM sequence: TTT
actttatatttatacatgaa

SEQ ID NO: 272322 - DNA, 20 bp, Artificial Sequence
  Description of Artificial Sequence: Synthetic oligonucleotide
  Target: LAMA2; (-) strand; PAM type: YTN; PAM sequence: TTT
tactttatatttatacatga

SEQ ID NO: 272323 - DNA, 20 bp, Artificial Sequence
  Description of Artificial Sequence: Synthetic oligonucleotide
  Target: LAMA2; (-) strand; PAM type: YTN; PAM sequence: TTT
ttactttatatttatacatg

SEQ ID NO: 272324 - DNA, 20 bp, Artificial Sequence
  Description of Artificial Sequence: Synthetic oligonucleotide
  Target: LAMA2; (-) strand; PAM type: YTN; PAM sequence: TTT
tttactttatatttatacat

SEQ ID NO: 272325 - DNA, 20 bp, Artificial Sequence
  Description of Artificial Sequence: Synthetic oligonucleotide
  Target: LAMA2; (-) strand; PAM type: YTN; PAM sequence: TTT
ttttactttatatttataca

SEQ ID NO: 272326 - DNA, 20 bp, Artificial Sequence
  Description of Artificial Sequence: Synthetic oligonucleotide
  Target: LAMA2; (-) strand; PAM type: YTN; PAM sequence: TTA
tgtaatttttttactttata

SEQ ID NO: 272327 - DNA, 20 bp, Artificial Sequence
  Description of Artificial Sequence: Synthetic oligonucleotide
  Target: LAMA2; (-) strand; PAM type: YTN; PAM sequence: TTG
aaagagatatatgattatgt

SEQ ID NO: 272328 - DNA, 20 bp, Artificial Sequence
  Description of Artificial Sequence: Synthetic oligonucleotide
  Target: LAMA2; (-) strand; PAM type: YTN; PAM sequence: TTC
cagtgagtaaaataaaatgg

SEQ ID NO: 272329 - DNA, 20 bp, Artificial Sequence
  Description of Artificial Sequence: Synthetic oligonucleotide
  Target: LAMA2; (-) strand; PAM type: YTN; PAM sequence: CTT
ccagtgagtaaaataaaatg

SEQ ID NO: 272330 - DNA, 20 bp, Artificial Sequence
  Description of Artificial Sequence: Synthetic oligonucleotide
  Target: LAMA2; (-) strand; PAM type: YTN; PAM sequence: TTC
ttccagtgagtaaaataaaa

SEQ ID NO: 272331 - DNA, 20 bp, Artificial Sequence
  Description of Artificial Sequence: Synthetic oligonucleotide
  Target: LAMA2; (-) strand; PAM type: YTN; PAM sequence: TTG
ggttcttccagtgagtaaaa

SEQ ID NO: 272332 - DNA, 20 bp, Artificial Sequence
  Description of Artificial Sequence: Synthetic oligonucleotide
  Target: LAMA2; (-) strand; PAM type: YTN; PAM sequence: CTT
gggttcttccagtgagtaaa

SEQ ID NO: 272333 - DNA, 20 bp, Artificial Sequence
  Description of Artificial Sequence: Synthetic oligonucleotide
  Target: LAMA2; (-) strand; PAM type: YTN; PAM sequence: CTC
atatgtgaggaacttgggtt

SEQ ID NO: 272334 - DNA, 20 bp, Artificial Sequence
  Description of Artificial Sequence: Synthetic oligonucleotide
  Target: LAMA2; (-) strand; PAM type: YTN; PAM sequence: TTC
tcatatgtgaggaacttggg

SEQ ID NO: 272335 - DNA, 20 bp, Artificial Sequence
  Description of Artificial Sequence: Synthetic oligonucleotide
  Target: LAMA2; (-) strand; PAM type: YTN; PAM sequence: TTA
aacatgattctcatatgtga

SEQ ID NO: 272336 - DNA, 20 bp, Artificial Sequence
  Description of Artificial Sequence: Synthetic oligonucleotide
  Target: LAMA2; (-) strand; PAM type: YTN; PAM sequence: TTG
aatatgttaaacatgattct

SEQ ID NO: 272337 - DNA, 20 bp, Artificial Sequence
  Description of Artificial Sequence: Synthetic oligonucleotide
  Target: LAMA2; (-) strand; PAM type: YTN; PAM sequence: TTT
gaatatgttaaacatgattc

SEQ ID NO: 272338 - DNA, 20 bp, Artificial Sequence
  Description of Artificial Sequence: Synthetic oligonucleotide
  Target: LAMA2; (-) strand; PAM type: YTN; PAM sequence: CTG
tagggcagtttgaatatgtt

SEQ ID NO: 272339 - DNA, 20 bp, Artificial Sequence
  Description of Artificial Sequence: Synthetic oligonucleotide
  Target: LAMA2; (-) strand; PAM type: YTN; PAM sequence: TTC
acacatactgtagggcagtt

SEQ ID NO: 272340 - DNA, 20 bp, Artificial Sequence
  Description of Artificial Sequence: Synthetic oligonucleotide
  Target: LAMA2; (-) strand; PAM type: YTN; PAM sequence: TTT
cacacatactgtagggcagt

SEQ ID NO: 272341 - DNA, 20 bp, Artificial Sequence
  Description of Artificial Sequence: Synthetic oligonucleotide
  Target: LAMA2; (-) strand; PAM type: YTN; PAM sequence: TTA
atatttcacacatactgtag

SEQ ID NO: 272342 - DNA, 20 bp, Artificial Sequence
  Description of Artificial Sequence: Synthetic oligonucleotide
  Target: LAMA2; (-) strand; PAM type: YTN; PAM sequence: CTT
aatatttcacacatactgta

SEQ ID NO: 272343 - DNA, 20 bp, Artificial Sequence
  Description of Artificial Sequence: Synthetic oligonucleotide
  Target: LAMA2; (-) strand; PAM type: YTN; PAM sequence: CTA
tagaggtaagtagagtcatc

SEQ ID NO: 272344 - DNA, 20 bp, Artificial Sequence
  Description of Artificial Sequence: Synthetic oligonucleotide
  Target: LAMA2; (-) strand; PAM type: YTN; PAM sequence: CTA
aggacaatagctatagaggt

SEQ ID NO: 272345 - DNA, 20 bp, Artificial Sequence
  Description of Artificial Sequence: Synthetic oligonucleotide
  Target: LAMA2; (-) strand; PAM type: YTN; PAM sequence: CTG
aaaaaagaaaggagctaagg

SEQ ID NO: 272346 - DNA, 20 bp, Artificial Sequence
  Description of Artificial Sequence: Synthetic oligonucleotide
  Target: LAMA2; (-) strand; PAM type: YTN; PAM sequence: CTC
tgaaaaaagaaaggagctaa

SEQ ID NO: 272347 - DNA, 20 bp, Artificial Sequence
  Description of Artificial Sequence: Synthetic oligonucleotide
  Target: LAMA2; (-) strand; PAM type: YTN; PAM sequence: TTG
gctctgaaaaaagaaaggag

SEQ ID NO: 272348 - DNA, 20 bp, Artificial Sequence
  Description of Artificial Sequence: Synthetic oligonucleotide
  Target: LAMA2; (-) strand; PAM type: YTN; PAM sequence: TTT
ggctctgaaaaaagaaagga

SEQ ID NO: 272349 - DNA, 20 bp, Artificial Sequence
  Description of Artificial Sequence: Synthetic oligonucleotide
  Target: LAMA2; (-) strand; PAM type: YTN; PAM sequence: TTT
tggctctgaaaaaagaaagg

SEQ ID NO: 272350 - DNA, 20 bp, Artificial Sequence
  Description of Artificial Sequence: Synthetic oligonucleotide
  Target: LAMA2; (-) strand; PAM type: YTN; PAM sequence: TTA
aaaaattttggctctgaaaa

SEQ ID NO: 272351 - DNA, 20 bp, Artificial Sequence
  Description of Artificial Sequence: Synthetic oligonucleotide
  Target: LAMA2; (-) strand; PAM type: YTN; PAM sequence: TTT
aaaaaattttggctctgaaa

SEQ ID NO: 272352 - DNA, 20 bp, Artificial Sequence
  Description of Artificial Sequence: Synthetic oligonucleotide
  Target: LAMA2; (-) strand; PAM type: YTN; PAM sequence: CTT
taaaaaattttggctctgaa

SEQ ID NO: 272353 - DNA, 20 bp, Artificial Sequence
  Description of Artificial Sequence: Synthetic oligonucleotide
  Target: LAMA2; (-) strand; PAM type: YTN; PAM sequence: CTC
caagtctttaaaaaattttg

SEQ ID NO: 272354 - DNA, 20 bp, Artificial Sequence
  Description of Artificial Sequence: Synthetic oligonucleotide
  Target: LAMA2; (-) strand; PAM type: YTN; PAM sequence: TTG
tctccaagtctttaaaaaat

SEQ ID NO: 272355 - DNA, 20 bp, Artificial Sequence
  Description of Artificial Sequence: Synthetic oligonucleotide
  Target: LAMA2; (-) strand; PAM type: YTN; PAM sequence: CTT
gtctccaagtctttaaaaaa

SEQ ID NO: 272356 - DNA, 20 bp, Artificial Sequence
  Description of Artificial Sequence: Synthetic oligonucleotide
  Target: LAMA2; (-) strand; PAM type: YTN; PAM sequence: CTG
ggagtgaaaatccaggcagc

SEQ ID NO: 272357 - DNA, 20 bp, Artificial Sequence
  Description of Artificial Sequence: Synthetic oligonucleotide
  Target: LAMA2; (-) strand; PAM type: YTN; PAM sequence: TTC
agtagtgggctgggagtgaa

SEQ ID NO: 272358 - DNA, 20 bp, Artificial Sequence
  Description of Artificial Sequence: Synthetic oligonucleotide
  Target: LAMA2; (-) strand; PAM type: YTN; PAM sequence: TTT
cagtagtgggctgggagtga

SEQ ID NO: 272359 - DNA, 20 bp, Artificial Sequence
  Description of Artificial Sequence: Synthetic oligonucleotide
  Target: LAMA2; (-) strand; PAM type: YTN; PAM sequence: TTA
taaaaacagtttcagtagtg

SEQ ID NO: 272360 - DNA, 20 bp, Artificial Sequence
  Description of Artificial Sequence: Synthetic oligonucleotide
  Target: LAMA2; (-) strand; PAM type: YTN; PAM sequence: CTT
ataaaaacagtttcagtagt

SEQ ID NO: 272361 - DNA, 20 bp, Artificial Sequence
  Description of Artificial Sequence: Synthetic oligonucleotide
  Target: LAMA2; (-) strand; PAM type: YTN; PAM sequence: TTA
tcttataaaaacagtttcag

SEQ ID NO: 272362 - DNA, 20 bp, Artificial Sequence
  Description of Artificial Sequence: Synthetic oligonucleotide
  Target: LAMA2; (-) strand; PAM type: YTN; PAM sequence: TTG
gttatcttataaaaacagtt

SEQ ID NO: 272363 - DNA, 20 bp, Artificial Sequence
  Description of Artificial Sequence: Synthetic oligonucleotide
  Target: LAMA2; (-) strand; PAM type: YTN; PAM sequence: TTG
tcattggttatcttataaaa

SEQ ID NO: 272364 - DNA, 20 bp, Artificial Sequence
  Description of Artificial Sequence: Synthetic oligonucleotide
  Target: LAMA2; (-) strand; PAM type: YTN; PAM sequence: TTA
ccagattgtcattggttatc

SEQ ID NO: 272365 - DNA, 20 bp, Artificial Sequence
  Description of Artificial Sequence: Synthetic oligonucleotide
  Target: LAMA2; (-) strand; PAM type: YTN; PAM sequence: TTA
gttaccagattgtcattggt

SEQ ID NO: 272366 - DNA, 20 bp, Artificial Sequence
  Description of Artificial Sequence: Synthetic oligonucleotide
  Target: LAMA2; (-) strand; PAM type: YTN; PAM sequence: TTT
agttaccagattgtcattgg

SEQ ID NO: 272367 - DNA, 20 bp, Artificial Sequence
  Description of Artificial Sequence: Synthetic oligonucleotide
  Target: LAMA2; (-) strand; PAM type: YTN; PAM sequence: TTA
ataagtatccagtggattta

SEQ ID NO: 272368 - DNA, 20 bp, Artificial Sequence
  Description of Artificial Sequence: Synthetic oligonucleotide
  Target: LAMA2; (-) strand; PAM type: YTN; PAM sequence: TTC
aagtaaaattaataagtatc

SEQ ID NO: 272369 - DNA, 20 bp, Artificial Sequence
  Description of Artificial Sequence: Synthetic oligonucleotide
  Target: LAMA2; (-) strand; PAM type: YTN; PAM sequence: TTT
caagtaaaattaataagtat

SEQ ID NO: 272370 - DNA, 20 bp, Artificial Sequence
  Description of Artificial Sequence: Synthetic oligonucleotide
  Target: LAMA2; (-) strand; PAM type: YTN; PAM sequence: CTG
cagagatttcaagtaaaatt

SEQ ID NO: 272371 - DNA, 20 bp, Artificial Sequence
  Description of Artificial Sequence: Synthetic oligonucleotide
  Target: LAMA2; (-) strand; PAM type: YTN; PAM sequence: TTA
agaaggaaggaaagatcaaa

SEQ ID NO: 272372 - DNA, 20 bp, Artificial Sequence
  Description of Artificial Sequence: Synthetic oligonucleotide
  Target: LAMA2; (-) strand; PAM type: YTN; PAM sequence: TTA
agagaaaaacagagagagga

SEQ ID NO: 272373 - DNA, 20 bp, Artificial Sequence
  Description of Artificial Sequence: Synthetic oligonucleotide
  Target: LAMA2; (-) strand; PAM type: YTN; PAM sequence: TTG
gagaattaagagaaaaacag

SEQ ID NO: 272374 - DNA, 20 bp, Artificial Sequence
  Description of Artificial Sequence: Synthetic oligonucleotide
  Target: LAMA2; (-) strand; PAM type: YTN; PAM sequence: TTA
gaatgaaaggttggagaatt

SEQ ID NO: 272375 - DNA, 20 bp, Artificial Sequence
  Description of Artificial Sequence: Synthetic oligonucleotide
  Target: LAMA2; (-) strand; PAM type: YTN; PAM sequence: CTT
agaatgaaaggttggagaat

SEQ ID NO: 272376 - DNA, 20 bp, Artificial Sequence
  Description of Artificial Sequence: Synthetic oligonucleotide
  Target: LAMA2; (-) strand; PAM type: YTN; PAM sequence: TTG
aagggatgatgagaggaaga

SEQ ID NO: 272377 - DNA, 20 bp, Artificial Sequence
  Description of Artificial Sequence: Synthetic oligonucleotide
  Target: LAMA2; (-) strand; PAM type: YTN; PAM sequence: TTT
gaagggatgatgagaggaag

SEQ ID NO: 272378 - DNA, 20 bp, Artificial Sequence
  Description of Artificial Sequence: Synthetic oligonucleotide
  Target: LAMA2; (-) strand; PAM type: YTN; PAM sequence: CTT
tgaagggatgatgagaggaa

SEQ ID NO: 272379 - DNA, 20 bp, Artificial Sequence
  Description of Artificial Sequence: Synthetic oligonucleotide
  Target: LAMA2; (-) strand; PAM type: YTN; PAM sequence: CTA
gtccccaaggaacaccgact

SEQ ID NO: 272380 - DNA, 20 bp, Artificial Sequence
  Description of Artificial Sequence: Synthetic oligonucleotide
  Target: LAMA2; (-) strand; PAM type: YTN; PAM sequence: CTG
aggcctagtccccaaggaac

SEQ ID NO: 272381 - DNA, 20 bp, Artificial Sequence
  Description of Artificial Sequence: Synthetic oligonucleotide
  Target: LAMA2; (-) strand; PAM type: YTN; PAM sequence: TTA
tacagtgagggaaaacatgg

SEQ ID NO: 272382 - DNA, 20 bp, Artificial Sequence
  Description of Artificial Sequence: Synthetic oligonucleotide
  Target: LAMA2; (-) strand; PAM type: YTN; PAM sequence: TTG
aagaccaaagaaagtgttat

SEQ ID NO: 272383 - DNA, 20 bp, Artificial Sequence
  Description of Artificial Sequence: Synthetic oligonucleotide
  Target: LAMA2; (-) strand; PAM type: YTN; PAM sequence: TTG
tacatggcaattgaagacca

SEQ ID NO: 272384 - DNA, 20 bp, Artificial Sequence
  Description of Artificial Sequence: Synthetic oligonucleotide
  Target: LAMA2; (-) strand; PAM type: YTN; PAM sequence: CTT
gtacatggcaattgaagacc

SEQ ID NO: 272385 - DNA, 20 bp, Artificial Sequence
  Description of Artificial Sequence: Synthetic oligonucleotide
  Target: LAMA2; (-) strand; PAM type: YTN; PAM sequence: TTA
acagcttgtacatggcaatt

SEQ ID NO: 272386 - DNA, 20 bp, Artificial Sequence
  Description of Artificial Sequence: Synthetic oligonucleotide
  Target: LAMA2; (-) strand; PAM type: YTN; PAM sequence: TTA
tgaattaacagcttgtacat

SEQ ID NO: 272387 - DNA, 20 bp, Artificial Sequence
  Description of Artificial Sequence: Synthetic oligonucleotide
  Target: LAMA2; (-) strand; PAM type: YTN; PAM sequence: TTT
atgaattaacagcttgtaca

SEQ ID NO: 272388 - DNA, 20 bp, Artificial Sequence
  Description of Artificial Sequence: Synthetic oligonucleotide
  Target: LAMA2; (-) strand; PAM type: YTN; PAM sequence: TTG
aaaatatagatttatgaatt

SEQ ID NO: 272389 - DNA, 20 bp, Artificial Sequence
  Description of Artificial Sequence: Synthetic oligonucleotide
  Target: LAMA2; (-) strand; PAM type: YTN; PAM sequence: CTT
gaaaatatagatttatgaat

SEQ ID NO: 272390 - DNA, 20 bp, Artificial Sequence
  Description of Artificial Sequence: Synthetic oligonucleotide
  Target: LAMA2; (-) strand; PAM type: YTN; PAM sequence: TTG
agatgtccaatccatagtaa

SEQ ID NO: 272391 - DNA, 20 bp, Artificial Sequence
  Description of Artificial Sequence: Synthetic oligonucleotide
  Target: LAMA2; (-) strand; PAM type: YTN; PAM sequence: TTT
gagatgtccaatccatagta

SEQ ID NO: 272392 - DNA, 20 bp, Artificial Sequence
  Description of Artificial Sequence: Synthetic oligonucleotide
  Target: LAMA2; (-) strand; PAM type: YTN; PAM sequence: TTA
gtttgagatgtccaatccat

SEQ ID NO: 272393 - DNA, 20 bp, Artificial Sequence
  Description of Artificial Sequence: Synthetic oligonucleotide
  Target: LAMA2; (-) strand; PAM type: YTN; PAM sequence: TTT
agtttgagatgtccaatcca

SEQ ID NO: 272394 - DNA, 20 bp, Artificial Sequence
  Description of Artificial Sequence: Synthetic oligonucleotide
  Target: LAMA2; (-) strand; PAM type: YTN; PAM sequence: TTA
agaggaaatgatgagtttag

SEQ ID NO: 272395 - DNA, 20 bp, Artificial Sequence
  Description of Artificial Sequence: Synthetic oligonucleotide
  Target: LAMA2; (-) strand; PAM type: YTN; PAM sequence: TTT
aagaggaaatgatgagttta

SEQ ID NO: 272396 - DNA, 20 bp, Artificial Sequence
  Description of Artificial Sequence: Synthetic oligonucleotide
  Target: LAMA2; (-) strand; PAM type: YTN; PAM sequence: CTT
taagaggaaatgatgagttt

SEQ ID NO: 272397 - DNA, 20 bp, Artificial Sequence
  Description of Artificial Sequence: Synthetic oligonucleotide
  Target: LAMA2; (-) strand; PAM type: YTN; PAM sequence: CTA
cacaggagaaataatgggct

SEQ ID NO: 272398 - DNA, 20 bp, Artificial Sequence
  Description of Artificial Sequence: Synthetic oligonucleotide
  Target: LAMA2; (-) strand; PAM type: YTN; PAM sequence: TTC
tacacaggagaaataatggg

SEQ ID NO: 272399 - DNA, 20 bp, Artificial Sequence
  Description of Artificial Sequence: Synthetic oligonucleotide
  Target: LAMA2; (-) strand; PAM type: YTN; PAM sequence: CTG
agatgttctacacaggagaa

SEQ ID NO: 272400 - DNA, 20 bp, Artificial Sequence
  Description of Artificial Sequence: Synthetic oligonucleotide
  Target: LAMA2; (-) strand; PAM type: YTN; PAM sequence: CTG
gcggataaaacactgagatg

SEQ ID NO: 272401 - DNA, 20 bp, Artificial Sequence
  Description of Artificial Sequence: Synthetic oligonucleotide
  Target: LAMA2; (-) strand; PAM type: YTN; PAM sequence: CTG
ggcatatactggcggataaa

SEQ ID NO: 272402 - DNA, 20 bp, Artificial Sequence
  Description of Artificial Sequence: Synthetic oligonucleotide
  Target: LAMA2; (-) strand; PAM type: YTN; PAM sequence: TTG
ggagactgggcatatactgg

SEQ ID NO: 272403 - DNA, 20 bp, Artificial Sequence
  Description of Artificial Sequence: Synthetic oligonucleotide
  Target: LAMA2; (-) strand; PAM type: YTN; PAM sequence: TTT
gggagactgggcatatactg

SEQ ID NO: 272404 - DNA, 20 bp, Artificial Sequence
  Description of Artificial Sequence: Synthetic oligonucleotide
  Target: LAMA2; (-) strand; PAM type: YTN; PAM sequence: CTT
tgggagactgggcatatact

SEQ ID NO: 272405 - DNA, 20 bp, Artificial Sequence
  Description of Artificial Sequence: Synthetic oligonucleotide
  Target: LAMA2; (-) strand; PAM type: YTN; PAM sequence: CTC
tttgggagactgggcatata

SEQ ID NO: 272406 - DNA, 20 bp, Artificial Sequence
  Description of Artificial Sequence: Synthetic oligonucleotide
  Target: LAMA2; (-) strand; PAM type: YTN; PAM sequence: TTC
tctttgggagactgggcata

SEQ ID NO: 272407 - DNA, 20 bp, Artificial Sequence
  Description of Artificial Sequence: Synthetic oligonucleotide
  Target: LAMA2; (-) strand; PAM type: YTN; PAM sequence: TTT
ctctttgggagactgggcat

SEQ ID NO: 272408 - DNA, 20 bp, Artificial Sequence
  Description of Artificial Sequence: Synthetic oligonucleotide
  Target: LAMA2; (-) strand; PAM type: YTN; PAM sequence: CTA
atttctctttgggagactgg

SEQ ID NO: 272409 - DNA, 20 bp, Artificial Sequence
  Description of Artificial Sequence: Synthetic oligonucleotide
  Target: LAMA2; (-) strand; PAM type: YTN; PAM sequence: CTG
ctaatttctctttgggagac

SEQ ID NO: 272410 - DNA, 20 bp, Artificial Sequence
  Description of Artificial Sequence: Synthetic oligonucleotide
  Target: LAMA2; (-) strand; PAM type: YTN; PAM sequence: TTG
atgaaggatgaaagagggag

SEQ ID NO: 272411 - DNA, 20 bp, Artificial Sequence
  Description of Artificial Sequence: Synthetic oligonucleotide
  Target: LAMA2; (-) strand; PAM type: YTN; PAM sequence: TTT
gatgaaggatgaaagaggga

SEQ ID NO: 272412 - DNA, 20 bp, Artificial Sequence
  Description of Artificial Sequence: Synthetic oligonucleotide
  Target: LAMA2; (-) strand; PAM type: YTN; PAM sequence: CTG
aatttgatgaaggatgaaag

SEQ ID NO: 272413 - DNA, 20 bp, Artificial Sequence
  Description of Artificial Sequence: Synthetic oligonucleotide
  Target: LAMA2; (-) strand; PAM type: YTN; PAM sequence: TTA
caaagagtcaccatagaagg

SEQ ID NO: 272414 - DNA, 20 bp, Artificial Sequence
  Description of Artificial Sequence: Synthetic oligonucleotide
  Target: LAMA2; (-) strand; PAM type: YTN; PAM sequence: CTT
acaaagagtcaccatagaag

SEQ ID NO: 272415 - DNA, 20 bp, Artificial Sequence
  Description of Artificial Sequence: Synthetic oligonucleotide
  Target: LAMA2; (-) strand; PAM type: YTN; PAM sequence: TTG
gataaggcttacaaagagtc

SEQ ID NO: 272416 - DNA, 20 bp, Artificial Sequence
  Description of Artificial Sequence: Synthetic oligonucleotide
  Target: LAMA2; (-) strand; PAM type: YTN; PAM sequence: TTA
gagttggataaggcttacaa

SEQ ID NO: 272417 - DNA, 20 bp, Artificial Sequence
  Description of Artificial Sequence: Synthetic oligonucleotide
  Target: LAMA2; (-) strand; PAM type: YTN; PAM sequence: CTG
ccatataaataacaacaggt

SEQ ID NO: 272418 - DNA, 20 bp, Artificial Sequence
  Description of Artificial Sequence: Synthetic oligonucleotide
  Target: LAMA2; (-) strand; PAM type: YTN; PAM sequence: CTC
tgccatataaataacaacag

SEQ ID NO: 272419 - DNA, 20 bp, Artificial Sequence
  Description of Artificial Sequence: Synthetic oligonucleotide
  Target: LAMA2; (-) strand; PAM type: YTN; PAM sequence: TTC
actctgccatataaataaca

SEQ ID NO: 272420 - DNA, 20 bp, Artificial Sequence
  Description of Artificial Sequence: Synthetic oligonucleotide
  Target: LAMA2; (-) strand; PAM type: YTN; PAM sequence: TTA
gaatgttcactctgccatat

SEQ ID NO: 272421 - DNA, 20 bp, Artificial Sequence
  Description of Artificial Sequence: Synthetic oligonucleotide
  Target: LAMA2; (-) strand; PAM type: YTN; PAM sequence: TTT
agaatgttcactctgccata

SEQ ID NO: 272422 - DNA, 20 bp, Artificial Sequence
  Description of Artificial Sequence: Synthetic oligonucleotide
  Target: LAMA2; (-) strand; PAM type: YTN; PAM sequence: CTG
caatttagaatgttcactct

SEQ ID NO: 272423 - DNA, 20 bp, Artificial Sequence
  Description of Artificial Sequence: Synthetic oligonucleotide
  Target: LAMA2; (-) strand; PAM type: YTN; PAM sequence: TTA
aggaagagaatgacatgata

SEQ ID NO: 272424 - DNA, 20 bp, Artificial Sequence
  Description of Artificial Sequence: Synthetic oligonucleotide
  Target: LAMA2; (-) strand; PAM type: YTN; PAM sequence: TTT
aaggaagagaatgacatgat

SEQ ID NO: 272425 - DNA, 20 bp, Artificial Sequence
  Description of Artificial Sequence: Synthetic oligonucleotide
  Target: LAMA2; (-) strand; PAM type: YTN; PAM sequence: CTG
aaaaaagtggaaagccatag

SEQ ID NO: 272426 - DNA, 20 bp, Artificial Sequence
  Description of Artificial Sequence: Synthetic oligonucleotide
  Target: LAMA2; (-) strand; PAM type: YTN; PAM sequence: CTG
tatgtcatcctgaaaaaagt

SEQ ID NO: 272427 - DNA, 20 bp, Artificial Sequence
  Description of Artificial Sequence: Synthetic oligonucleotide
  Target: LAMA2; (-) strand; PAM type: YTN; PAM sequence: TTA
gatcatggtgggagagcact

SEQ ID NO: 272428 - DNA, 20 bp, Artificial Sequence
  Description of Artificial Sequence: Synthetic oligonucleotide
  Target: LAMA2; (-) strand; PAM type: YTN; PAM sequence: CTC
aatccgtaggggtccagatg

SEQ ID NO: 272429 - DNA, 20 bp, Artificial Sequence
  Description of Artificial Sequence: Synthetic oligonucleotide
  Target: LAMA2; (-) strand; PAM type: YTN; PAM sequence: TTA
taccctcaatccgtaggggt

SEQ ID NO: 272430 - DNA, 20 bp, Artificial Sequence
  Description of Artificial Sequence: Synthetic oligonucleotide
  Target: LAMA2; (-) strand; PAM type: YTN; PAM sequence: CTT
ataccctcaatccgtagggg

SEQ ID NO: 272431 - DNA, 20 bp, Artificial Sequence
  Description of Artificial Sequence: Synthetic oligonucleotide
  Target: LAMA2; (-) strand; PAM type: YTN; PAM sequence: CTG
gcttataccctcaatccgta

SEQ ID NO: 272432 - DNA, 20 bp, Artificial Sequence
  Description of Artificial Sequence: Synthetic oligonucleotide
  Target: LAMA2; (-) strand; PAM type: YTN; PAM sequence: TTC
tggcttataccctcaatccg

SEQ ID NO: 272433 - DNA, 20 bp, Artificial Sequence
  Description of Artificial Sequence: Synthetic oligonucleotide
  Target: LAMA2; (-) strand; PAM type: YTN; PAM sequence: TTT
ctggcttataccctcaatcc

SEQ ID NO: 272434 - DNA, 20 bp, Artificial Sequence
  Description of Artificial Sequence: Synthetic oligonucleotide
  Target: LAMA2; (-) strand; PAM type: YTN; PAM sequence: TTG
taggtttctggcttataccc

SEQ ID NO: 272435 - DNA, 20 bp, Artificial Sequence
  Description of Artificial Sequence: Synthetic oligonucleotide
  Target: LAMA2; (-) strand; PAM type: YTN; PAM sequence: TTT
gtaggtttctggcttatacc

SEQ ID NO: 272436 - DNA, 20 bp, Artificial Sequence
  Description of Artificial Sequence: Synthetic oligonucleotide
  Target: LAMA2; (-) strand; PAM type: YTN; PAM sequence: TTG
gataagcaggagcatcatga

SEQ ID NO: 272437 - DNA, 20 bp, Artificial Sequence
  Description of Artificial Sequence: Synthetic oligonucleotide
  Target: LAMA2; (-) strand; PAM type: YTN; PAM sequence: TTG
gatgagagtggggtagtaga

SEQ ID NO: 272438 - DNA, 20 bp, Artificial Sequence
  Description of Artificial Sequence: Synthetic oligonucleotide
  Target: LAMA2; (-) strand; PAM type: YTN; PAM sequence: CTA
cacaatatgagattggatga

SEQ ID NO: 272439 - DNA, 20 bp, Artificial Sequence
  Description of Artificial Sequence: Synthetic oligonucleotide
  Target: LAMA2; (-) strand; PAM type: YTN; PAM sequence: CTA
aaaaacaaatgtggtaatcc

SEQ ID NO: 272440 - DNA, 20 bp, Artificial Sequence
  Description of Artificial Sequence: Synthetic oligonucleotide
  Target: LAMA2; (-) strand; PAM type: YTN; PAM sequence: TTG
gaggagaacaagagtaaaag

SEQ ID NO: 272441 - DNA, 20 bp, Artificial Sequence
  Description of Artificial Sequence: Synthetic oligonucleotide
  Target: LAMA2; (-) strand; PAM type: YTN; PAM sequence: TTT
ggaggagaacaagagtaaaa

SEQ ID NO: 272442 - DNA, 20 bp, Artificial Sequence
  Description of Artificial Sequence: Synthetic oligonucleotide
  Target: LAMA2; (-) strand; PAM type: YTN; PAM sequence: TTA
cggagaacagatttggagga

SEQ ID NO: 272443 - DNA, 20 bp, Artificial Sequence
  Description of Artificial Sequence: Synthetic oligonucleotide
  Target: LAMA2; (-) strand; PAM type: YTN; PAM sequence: CTA
cgttacggagaacagatttg

SEQ ID NO: 272444 - DNA, 20 bp, Artificial Sequence
  Description of Artificial Sequence: Synthetic oligonucleotide
  Target: LAMA2; (-) strand; PAM type: YTN; PAM sequence: CTG
gctacgttacggagaacaga

SEQ ID NO: 272445 - DNA, 20 bp, Artificial Sequence
  Description of Artificial Sequence: Synthetic oligonucleotide
  Target: LAMA2; (-) strand; PAM type: YTN; PAM sequence: TTC
tggctacgttacggagaaca

SEQ ID NO: 272446 - DNA, 20 bp, Artificial Sequence
  Description of Artificial Sequence: Synthetic oligonucleotide
  Target: LAMA2; (-) strand; PAM type: YTN; PAM sequence: TTC
attctggctacgttacggag

SEQ ID NO: 272447 - DNA, 20 bp, Artificial Sequence
  Description of Artificial Sequence: Synthetic oligonucleotide
  Target: LAMA2; (-) strand; PAM type: YTN; PAM sequence: TTG
gaatagcaaacattcattct

SEQ ID NO: 272448 - DNA, 20 bp, Artificial Sequence
  Description of Artificial Sequence: Synthetic oligonucleotide
  Target: LAMA2; (-) strand; PAM type: YTN; PAM sequence: TTT
ggaatagcaaacattcattc

SEQ ID NO: 272449 - DNA, 20 bp, Artificial Sequence
  Description of Artificial Sequence: Synthetic oligonucleotide
  Target: LAMA2; (-) strand; PAM type: YTN; PAM sequence: TTC
acatttggaatagcaaacat

SEQ ID NO: 272450 - DNA, 20 bp, Artificial Sequence
  Description of Artificial Sequence: Synthetic oligonucleotide
  Target: LAMA2; (-) strand; PAM type: YTN; PAM sequence: CTG
cgatgacgtattcacatttg

SEQ ID NO: 272451 - DNA, 20 bp, Artificial Sequence
  Description of Artificial Sequence: Synthetic oligonucleotide
  Target: LAMA2; (-) strand; PAM type: YTN; PAM sequence: TTG
taagcactgcgatgacgtat

SEQ ID NO: 272452 - DNA, 20 bp, Artificial Sequence
  Description of Artificial Sequence: Synthetic oligonucleotide
  Target: LAMA2; (-) strand; PAM type: YTN; PAM sequence: TTT
gtaagcactgcgatgacgta

SEQ ID NO: 272453 - DNA, 20 bp, Artificial Sequence
  Description of Artificial Sequence: Synthetic oligonucleotide
  Target: LAMA2; (-) strand; PAM type: YTN; PAM sequence: CTA
agggaagtcaggggaagagt

SEQ ID NO: 272454 - DNA, 20 bp, Artificial Sequence
  Description of Artificial Sequence: Synthetic oligonucleotide
  Target: LAMA2; (-) strand; PAM type: YTN; PAM sequence: CTA
cgagcctaagggaagtcagg

SEQ ID NO: 272455 - DNA, 20 bp, Artificial Sequence
  Description of Artificial Sequence: Synthetic oligonucleotide
  Target: LAMA2; (-) strand; PAM type: YTN; PAM sequence: TTA
tcctacgagcctaagggaag

SEQ ID NO: 272456 - DNA, 20 bp, Artificial Sequence
  Description of Artificial Sequence: Synthetic oligonucleotide
  Target: LAMA2; (-) strand; PAM type: YTN; PAM sequence: TTT
atcctacgagcctaagggaa

SEQ ID NO: 272457 - DNA, 20 bp, Artificial Sequence
  Description of Artificial Sequence: Synthetic oligonucleotide
  Target: LAMA2; (-) strand; PAM type: YTN; PAM sequence: CTT
tatcctacgagcctaaggga

SEQ ID NO: 272458 - DNA, 20 bp, Artificial Sequence
  Description of Artificial Sequence: Synthetic oligonucleotide
  Target: LAMA2; (-) strand; PAM type: YTN; PAM sequence: TTG
gtctttatcctacgagccta

SEQ ID NO: 272459 - DNA, 20 bp, Artificial Sequence
  Description of Artificial Sequence: Synthetic oligonucleotide
  Target: LAMA2; (-) strand; PAM type: YTN; PAM sequence: TTT
ggtctttatcctacgagcct

SEQ ID NO: 272460 - DNA, 20 bp, Artificial Sequence
  Description of Artificial Sequence: Synthetic oligonucleotide
  Target: LAMA2; (-) strand; PAM type: YTN; PAM sequence: TTT
tggtctttatcctacgagcc

SEQ ID NO: 272461 - DNA, 20 bp, Artificial Sequence
  Description of Artificial Sequence: Synthetic oligonucleotide
  Target: LAMA2; (-) strand; PAM type: YTN; PAM sequence: CTG
gagtgcagatggccaggggc

SEQ ID NO: 272462 - DNA, 20 bp, Artificial Sequence
  Description of Artificial Sequence: Synthetic oligonucleotide
  Target: LAMA2; (-) strand; PAM type: YTN; PAM sequence: CTG
ggggacagtatggctggagt

SEQ ID NO: 272463 - DNA, 20 bp, Artificial Sequence
  Description of Artificial Sequence: Synthetic oligonucleotide
  Target: LAMA2; (-) strand; PAM type: YTN; PAM sequence: TTG
tggtgggacaaagtggctgg

SEQ ID NO: 272464 - DNA, 20 bp, Artificial Sequence
  Description of Artificial Sequence: Synthetic oligonucleotide
  Target: LAMA2; (-) strand; PAM type: YTN; PAM sequence: TTT
gtggtgggacaaagtggctg

SEQ ID NO: 272465 - DNA, 20 bp, Artificial Sequence
  Description of Artificial Sequence: Synthetic oligonucleotide
  Target: LAMA2; (-) strand; PAM type: YTN; PAM sequence: CTT
tgtggtgggacaaagtggct

SEQ ID NO: 272466 - DNA, 20 bp, Artificial Sequence
  Description of Artificial Sequence: Synthetic oligonucleotide
  Target: LAMA2; (-) strand; PAM type: YTN; PAM sequence: TTA
aggcaaaataaagaaatgtg

SEQ ID NO: 272467 - DNA, 20 bp, Artificial Sequence
  Description of Artificial Sequence: Synthetic oligonucleotide
  Target: LAMA2; (-) strand; PAM type: YTN; PAM sequence: TTT
aaggcaaaataaagaaatgt

SEQ ID NO: 272468 - DNA, 20 bp, Artificial Sequence
  Description of Artificial Sequence: Synthetic oligonucleotide
  Target: LAMA2; (-) strand; PAM type: YTN; PAM sequence: CTT
taaggcaaaataaagaaatg

SEQ ID NO: 272469 - DNA, 20 bp, Artificial Sequence
  Description of Artificial Sequence: Synthetic oligonucleotide
  Target: LAMA2; (-) strand; PAM type: YTN; PAM sequence: TTA
cctttaaggcaaaataaaga

SEQ ID NO: 272470 - DNA, 20 bp, Artificial Sequence
  Description of Artificial Sequence: Synthetic oligonucleotide
  Target: LAMA2; (-) strand; PAM type: YTN; PAM sequence: TTA
acaaaatgtagggagaggta

SEQ ID NO: 272471 - DNA, 20 bp, Artificial Sequence
  Description of Artificial Sequence: Synthetic oligonucleotide
  Target: LAMA2; (-) strand; PAM type: YTN; PAM sequence: TTA
acagaaattaacaaaatgta

SEQ ID NO: 272472 - DNA, 20 bp, Artificial Sequence
  Description of Artificial Sequence: Synthetic oligonucleotide
  Target: LAMA2; (-) strand; PAM type: YTN; PAM sequence: TTG
gagttaacagaaattaacaa

SEQ ID NO: 272473 - DNA, 20 bp, Artificial Sequence
  Description of Artificial Sequence: Synthetic oligonucleotide
  Target: LAMA2; (-) strand; PAM type: YTN; PAM sequence: TTG
aaaggtaaattggagttaac

SEQ ID NO: 272474 - DNA, 20 bp, Artificial Sequence
  Description of Artificial Sequence: Synthetic oligonucleotide
  Target: LAMA2; (-) strand; PAM type: YTN; PAM sequence: TTT
gaaaggtaaattggagttaa

SEQ ID NO: 272475 - DNA, 20 bp, Artificial Sequence
  Description of Artificial Sequence: Synthetic oligonucleotide
  Target: LAMA2; (-) strand; PAM type: YTN; PAM sequence: CTG
agatttgaaaggtaaattgg

SEQ ID NO: 272476 - DNA, 20 bp, Artificial Sequence
  Description of Artificial Sequence: Synthetic oligonucleotide
  Target: LAMA2; (-) strand; PAM type: YTN; PAM sequence: TTC
acgagctgagatttgaaagg

SEQ ID NO: 272477 - DNA, 20 bp, Artificial Sequence
  Description of Artificial Sequence: Synthetic oligonucleotide
  Target: LAMA2; (-) strand; PAM type: YTN; PAM sequence: TTT
cacgagctgagatttgaaag

SEQ ID NO: 272478 - DNA, 20 bp, Artificial Sequence
  Description of Artificial Sequence: Synthetic oligonucleotide
  Target: LAMA2; (-) strand; PAM type: YTN; PAM sequence: CTT
tcacgagctgagatttgaaa

SEQ ID NO: 272479 - DNA, 20 bp, Artificial Sequence
  Description of Artificial Sequence: Synthetic oligonucleotide
  Target: LAMA2; (-) strand; PAM type: YTN; PAM sequence: CTG
cgatggcacagagggctttc

SEQ ID NO: 272480 - DNA, 20 bp, Artificial Sequence
  Description of Artificial Sequence: Synthetic oligonucleotide
  Target: LAMA2; (-) strand; PAM type: YTN; PAM sequence: TTG
gaacccctgcgatggcacag

SEQ ID NO: 272481 - DNA, 20 bp, Artificial Sequence
  Description of Artificial Sequence: Synthetic oligonucleotide
  Target: LAMA2; (-) strand; PAM type: YTN; PAM sequence: CTT
ggaacccctgcgatggcaca

SEQ ID NO: 272482 - DNA, 20 bp, Artificial Sequence
  Description of Artificial Sequence: Synthetic oligonucleotide
  Target: LAMA2; (-) strand; PAM type: YTN; PAM sequence: CTA
gaggaaaaatagtggtataa

SEQ ID NO: 272483 - DNA, 20 bp, Artificial Sequence
  Description of Artificial Sequence: Synthetic oligonucleotide
  Target: LAMA2; (-) strand; PAM type: YTN; PAM sequence: CTA
caaactagaggaaaaatagt

SEQ ID NO: 272484 - DNA, 20 bp, Artificial Sequence
  Description of Artificial Sequence: Synthetic oligonucleotide
  Target: LAMA2; (-) strand; PAM type: YTN; PAM sequence: TTA
taactacaaactagaggaaa

SEQ ID NO: 272485 - DNA, 20 bp, Artificial Sequence
  Description of Artificial Sequence: Synthetic oligonucleotide
  Target: LAMA2; (-) strand; PAM type: YTN; PAM sequence: TTT
ataactacaaactagaggaa

SEQ ID NO: 272486 - DNA, 20 bp, Artificial Sequence
  Description of Artificial Sequence: Synthetic oligonucleotide
  Target: LAMA2; (-) strand; PAM type: YTN; PAM sequence: TTG
tcaaatgatcatgtagataa

SEQ ID NO: 272487 - DNA, 20 bp, Artificial Sequence
  Description of Artificial Sequence: Synthetic oligonucleotide
  Target: LAMA2; (-) strand; PAM type: YTN; PAM sequence: TTT
gtcaaatgatcatgtagata

SEQ ID NO: 272488 - DNA, 20 bp, Artificial Sequence
  Description of Artificial Sequence: Synthetic oligonucleotide
  Target: LAMA2; (-) strand; PAM type: YTN; PAM sequence: TTA
tttgtcaaatgatcatgtag

SEQ ID NO: 272489 - DNA, 20 bp, Artificial Sequence
  Description of Artificial Sequence: Synthetic oligonucleotide
  Target: LAMA2; (-) strand; PAM type: YTN; PAM sequence: CTA
tatagttatttgtcaaatga

SEQ ID NO: 272490 - DNA, 20 bp, Artificial Sequence
  Description of Artificial Sequence: Synthetic oligonucleotide
  Target: LAMA2; (-) strand; PAM type: YTN; PAM sequence: CTG
gtggactatatagttatttg

SEQ ID NO: 272491 - DNA, 20 bp, Artificial Sequence
  Description of Artificial Sequence: Synthetic oligonucleotide
  Target: LAMA2; (-) strand; PAM type: YTN; PAM sequence: CTA
tagtctggtggactatatag

SEQ ID NO: 272492 - DNA, 20 bp, Artificial Sequence
  Description of Artificial Sequence: Synthetic oligonucleotide
  Target: LAMA2; (-) strand; PAM type: YTN; PAM sequence: TTG
gagtctatagtctggtggac

SEQ ID NO: 272493 - DNA, 20 bp, Artificial Sequence
  Description of Artificial Sequence: Synthetic oligonucleotide
  Target: LAMA2; (-) strand; PAM type: YTN; PAM sequence: TTT
ggagtctatagtctggtgga

SEQ ID NO: 272494 - DNA, 20 bp, Artificial Sequence
  Description of Artificial Sequence: Synthetic oligonucleotide
  Target: LAMA2; (-) strand; PAM type: YTN; PAM sequence: TTG
cccatttggagtctatagtc

SEQ ID NO: 272495 - DNA, 20 bp, Artificial Sequence
  Description of Artificial Sequence: Synthetic oligonucleotide
  Target: LAMA2; (-) strand; PAM type: YTN; PAM sequence: CTT
gcccatttggagtctatagt

SEQ ID NO: 272496 - DNA, 20 bp, Artificial Sequence
  Description of Artificial Sequence: Synthetic oligonucleotide
  Target: LAMA2; (-) strand; PAM type: YTN; PAM sequence: TTC
ttgcccatttggagtctata

SEQ ID NO: 272497 - DNA, 20 bp, Artificial Sequence
  Description of Artificial Sequence: Synthetic oligonucleotide
  Target: LAMA2; (-) strand; PAM type: YTN; PAM sequence: TTT
cttgcccatttggagtctat

SEQ ID NO: 272498 - DNA, 20 bp, Artificial Sequence
  Description of Artificial Sequence: Synthetic oligonucleotide
  Target: LAMA2; (-) strand; PAM type: YTN; PAM sequence: CTG
tggtaagaaacaaaaaggtt

SEQ ID NO: 272499 - DNA, 20 bp, Artificial Sequence
  Description of Artificial Sequence: Synthetic oligonucleotide
  Target: LAMA2; (-) strand; PAM type: YTN; PAM sequence: TTG
gtgatactgtggtaagaaac

SEQ ID NO: 272500 - DNA, 20 bp, Artificial Sequence
  Description of Artificial Sequence: Synthetic oligonucleotide
  Target: LAMA2; (-) strand; PAM type: YTN; PAM sequence: TTA
tgtgtacaatattggtgata

SEQ ID NO: 272501 - DNA, 20 bp, Artificial Sequence
  Description of Artificial Sequence: Synthetic oligonucleotide
  Target: LAMA2; (-) strand; PAM type: YTN; PAM sequence: CTA
ttatgtgtacaatattggtg

SEQ ID NO: 272502 - DNA, 20 bp, Artificial Sequence
  Description of Artificial Sequence: Synthetic oligonucleotide
  Target: LAMA2; (-) strand; PAM type: YTN; PAM sequence: TTA
acacctattatgtgtacaat

SEQ ID NO: 272503 - DNA, 20 bp, Artificial Sequence
  Description of Artificial Sequence: Synthetic oligonucleotide
  Target: LAMA2; (-) strand; PAM type: YTN; PAM sequence: CTT
aacacctattatgtgtacaa

SEQ ID NO: 272504 - DNA, 20 bp, Artificial Sequence
  Description of Artificial Sequence: Synthetic oligonucleotide
  Target: LAMA2; (-) strand; PAM type: YTN; PAM sequence: TTG
acttaacacctattatgtgt

SEQ ID NO: 272505 - DNA, 20 bp, Artificial Sequence
  Description of Artificial Sequence: Synthetic oligonucleotide
  Target: LAMA2; (-) strand; PAM type: YTN; PAM sequence: TTA
aacaaatattgacttaacac

SEQ ID NO: 272506 - DNA, 20 bp, Artificial Sequence
  Description of Artificial Sequence: Synthetic oligonucleotide
  Target: LAMA2; (-) strand; PAM type: YTN; PAM sequence: TTA
attaaacaaatattgactta

SEQ ID NO: 272507 - DNA, 20 bp, Artificial Sequence
  Description of Artificial Sequence: Synthetic oligonucleotide
  Target: LAMA2; (-) strand; PAM type: YTN; PAM sequence: TTC
acaattaattaaacaaatat

SEQ ID NO: 272508 - DNA, 20 bp, Artificial Sequence
  Description of Artificial Sequence: Synthetic oligonucleotide
  Target: LAMA2; (-) strand; PAM type: YTN; PAM sequence: TTA
aaatcattcacaattaatta

SEQ ID NO: 272509 - DNA, 20 bp, Artificial Sequence
  Description of Artificial Sequence: Synthetic oligonucleotide
  Target: LAMA2; (-) strand; PAM type: YTN; PAM sequence: TTT
aaaatcattcacaattaatt

SEQ ID NO: 272510 - DNA, 20 bp, Artificial Sequence
  Description of Artificial Sequence: Synthetic oligonucleotide
  Target: LAMA2; (-) strand; PAM type: YTN; PAM sequence: TTT
taaaatcattcacaattaat

SEQ ID NO: 272511 - DNA, 20 bp, Artificial Sequence
  Description of Artificial Sequence: Synthetic oligonucleotide
  Target: LAMA2; (-) strand; PAM type: YTN; PAM sequence: CTT
ttaaaatcattcacaattaa

SEQ ID NO: 272512 - DNA, 20 bp, Artificial Sequence
  Description of Artificial Sequence: Synthetic oligonucleotide
  Target: LAMA2; (-) strand; PAM type: YTN; PAM sequence: TTC
aaatgcttttaaaatcattc

SEQ ID NO: 272513 - DNA, 20 bp, Artificial Sequence
  Description of Artificial Sequence: Synthetic oligonucleotide
  Target: LAMA2; (-) strand; PAM type: YTN; PAM sequence: TTG
ttcaaatgcttttaaaatca

SEQ ID NO: 272514 - DNA, 20 bp, Artificial Sequence
  Description of Artificial Sequence: Synthetic oligonucleotide
  Target: LAMA2; (-) strand; PAM type: YTN; PAM sequence: TTG
ttgttcaaatgcttttaaaa

SEQ ID NO: 272515 - DNA, 20 bp, Artificial Sequence
  Description of Artificial Sequence: Synthetic oligonucleotide
  Target: LAMA2; (-) strand; PAM type: YTN; PAM sequence: CTT
gttgttcaaatgcttttaaa

SEQ ID NO: 272516 - DNA, 20 bp, Artificial Sequence
  Description of Artificial Sequence: Synthetic oligonucleotide
  Target: LAMA2; (-) strand; PAM type: YTN; PAM sequence: TTC
catcttgttgttcaaatgct

SEQ ID NO: 272517 - DNA, 20 bp, Artificial Sequence
  Description of Artificial Sequence: Synthetic oligonucleotide
  Target: LAMA2; (-) strand; PAM type: YTN; PAM sequence: TTT
ccatcttgttgttcaaatgc

SEQ ID NO: 272518 - DNA, 20 bp, Artificial Sequence
  Description of Artificial Sequence: Synthetic oligonucleotide
  Target: LAMA2; (-) strand; PAM type: YTN; PAM sequence: CTA
catttccatcttgttgttca

SEQ ID NO: 272519 - DNA, 20 bp, Artificial Sequence
  Description of Artificial Sequence: Synthetic oligonucleotide
  Target: LAMA2; (-) strand; PAM type: YTN; PAM sequence: TTG
tctacatttccatcttgttg

SEQ ID NO: 272520 - DNA, 20 bp, Artificial Sequence
  Description of Artificial Sequence: Synthetic oligonucleotide
  Target: LAMA2; (-) strand; PAM type: YTN; PAM sequence: TTT
gtctacatttccatcttgtt

SEQ ID NO: 272521 - DNA, 20 bp, Artificial Sequence
  Description of Artificial Sequence: Synthetic oligonucleotide
  Target: LAMA2; (-) strand; PAM type: YTN; PAM sequence: TTG
ggtttgtctacatttccatc

SEQ ID NO: 272522 - DNA, 20 bp, Artificial Sequence
  Description of Artificial Sequence: Synthetic oligonucleotide
  Target: LAMA2; (-) strand; PAM type: YTN; PAM sequence: TTT
gggtttgtctacatttccat

SEQ ID NO: 272523 - DNA, 20 bp, Artificial Sequence
  Description of Artificial Sequence: Synthetic oligonucleotide
  Target: LAMA2; (-) strand; PAM type: YTN; PAM sequence: TTT
tgggtttgtctacatttcca

SEQ ID NO: 272524 - DNA, 20 bp, Artificial Sequence
  Description of Artificial Sequence: Synthetic oligonucleotide
  Target: LAMA2; (-) strand; PAM type: YTN; PAM sequence: TTA
ttttgggtttgtctacattt

SEQ ID NO: 272525 - DNA, 20 bp, Artificial Sequence
  Description of Artificial Sequence: Synthetic oligonucleotide
  Target: LAMA2; (-) strand; PAM type: YTN; PAM sequence: TTT
attttgggtttgtctacatt

SEQ ID NO: 272526 - DNA, 20 bp, Artificial Sequence
  Description of Artificial Sequence: Synthetic oligonucleotide
  Target: LAMA2; (-) strand; PAM type: YTN; PAM sequence: TTA
aagagtgcaaaataaatgtt

SEQ ID NO: 272527 - DNA, 20 bp, Artificial Sequence
  Description of Artificial Sequence: Synthetic oligonucleotide
  Target: LAMA2; (-) strand; PAM type: YTN; PAM sequence: TTT
aaagagtgcaaaataaatgt

SEQ ID NO: 272528 - DNA, 20 bp, Artificial Sequence
  Description of Artificial Sequence: Synthetic oligonucleotide
  Target: LAMA2; (-) strand; PAM type: YTN; PAM sequence: TTT
taaagagtgcaaaataaatg

SEQ ID NO: 272529 - DNA, 20 bp, Artificial Sequence
  Description of Artificial Sequence: Synthetic oligonucleotide
  Target: LAMA2; (-) strand; PAM type: YTN; PAM sequence: TTA
acacattttaaagagtgcaa

SEQ ID NO: 272530 - DNA, 20 bp, Artificial Sequence
  Description of Artificial Sequence: Synthetic oligonucleotide
  Target: LAMA2; (-) strand; PAM type: YTN; PAM sequence: TTT
aacacattttaaagagtgca

SEQ ID NO: 272531 - DNA, 20 bp, Artificial Sequence
  Description of Artificial Sequence: Synthetic oligonucleotide
  Target: LAMA2; (-) strand; PAM type: YTN; PAM sequence: TTT
taacacattttaaagagtgc

SEQ ID NO: 272532 - DNA, 20 bp, Artificial Sequence
  Description of Artificial Sequence: Synthetic oligonucleotide
  Target: LAMA2; (-) strand; PAM type: YTN; PAM sequence: CTG
attttaacacattttaaaga

SEQ ID NO: 272533 - DNA, 20 bp, Artificial Sequence
  Description of Artificial Sequence: Synthetic oligonucleotide
  Target: LAMA2; (-) strand; PAM type: YTN; PAM sequence: TTA
taaatatatgcctgatttta

SEQ ID NO: 272534 - DNA, 20 bp, Artificial Sequence
  Description of Artificial Sequence: Synthetic oligonucleotide
  Target: LAMA2; (-) strand; PAM type: YTN; PAM sequence: TTC
aacaatataattataaatat

SEQ ID NO: 272535 - DNA, 20 bp, Artificial Sequence
  Description of Artificial Sequence: Synthetic oligonucleotide
  Target: LAMA2; (-) strand; PAM type: YTN; PAM sequence: TTA
tcaatgaaaacaaaatattc

SEQ ID NO: 272536 - DNA, 20 bp, Artificial Sequence
  Description of Artificial Sequence: Synthetic oligonucleotide
  Target: LAMA2; (-) strand; PAM type: YTN; PAM sequence: TTT
atcaatgaaaacaaaatatt

SEQ ID NO: 272537 - DNA, 20 bp, Artificial Sequence
  Description of Artificial Sequence: Synthetic oligonucleotide
  Target: LAMA2; (-) strand; PAM type: YTN; PAM sequence: TTA
agaggtgtttatcaatgaaa

SEQ ID NO: 272538 - DNA, 20 bp, Artificial Sequence
  Description of Artificial Sequence: Synthetic oligonucleotide
  Target: LAMA2; (-) strand; PAM type: YTN; PAM sequence: TTA
cagaatataaatagttaaga

SEQ ID NO: 272539 - DNA, 20 bp, Artificial Sequence
  Description of Artificial Sequence: Synthetic oligonucleotide
  Target: LAMA2; (-) strand; PAM type: YTN; PAM sequence: CTT
acagaatataaatagttaag

SEQ ID NO: 272540 - DNA, 20 bp, Artificial Sequence
  Description of Artificial Sequence: Synthetic oligonucleotide
  Target: LAMA2; (-) strand; PAM type: YTN; PAM sequence: CTC
cccttacagaatataaatag

SEQ ID NO: 272541 - DNA, 20 bp, Artificial Sequence
  Description of Artificial Sequence: Synthetic oligonucleotide
  Target: LAMA2; (-) strand; PAM type: YTN; PAM sequence: TTC
tccccttacagaatataaat

SEQ ID NO: 272542 - DNA, 20 bp, Artificial Sequence
  Description of Artificial Sequence: Synthetic oligonucleotide
  Target: LAMA2; (-) strand; PAM type: YTN; PAM sequence: CTA
catagcattctccccttaca

SEQ ID NO: 272543 - DNA, 20 bp, Artificial Sequence
  Description of Artificial Sequence: Synthetic oligonucleotide
  Target: LAMA2; (-) strand; PAM type: YTN; PAM sequence: CTA
ctacatagcattctcccctt

SEQ ID NO: 272544 - DNA, 20 bp, Artificial Sequence
  Description of Artificial Sequence: Synthetic oligonucleotide
  Target: LAMA2; (-) strand; PAM type: YTN; PAM sequence: TTC
aatctactacatagcattct

SEQ ID NO: 272545 - DNA, 20 bp, Artificial Sequence
  Description of Artificial Sequence: Synthetic oligonucleotide
  Target: LAMA2; (-) strand; PAM type: YTN; PAM sequence: TTA
tacagttcaatctactacat

SEQ ID NO: 272546 - DNA, 20 bp, Artificial Sequence
  Description of Artificial Sequence: Synthetic oligonucleotide
  Target: LAMA2; (-) strand; PAM type: YTN; PAM sequence: TTT
atacagttcaatctactaca

SEQ ID NO: 272547 - DNA, 20 bp, Artificial Sequence
  Description of Artificial Sequence: Synthetic oligonucleotide
  Target: LAMA2; (-) strand; PAM type: YTN; PAM sequence: TTT
tatacagttcaatctactac

SEQ ID NO: 272548 - DNA, 20 bp, Artificial Sequence
  Description of Artificial Sequence: Synthetic oligonucleotide
  Target: LAMA2; (-) strand; PAM type: YTN; PAM sequence: TTA
atattttatacagttcaatc

SEQ ID NO: 272549 - DNA, 20 bp, Artificial Sequence
  Description of Artificial Sequence: Synthetic oligonucleotide
  Target: LAMA2; (-) strand; PAM type: YTN; PAM sequence: TTT
aatattttatacagttcaat

SEQ ID NO: 272550 - DNA, 20 bp, Artificial Sequence
  Description of Artificial Sequence: Synthetic oligonucleotide
  Target: LAMA2; (-) strand; PAM type: YTN; PAM sequence: TTT
taatattttatacagttcaa

SEQ ID NO: 272551 - DNA, 20 bp, Artificial Sequence
  Description of Artificial Sequence: Synthetic oligonucleotide
  Target: LAMA2; (-) strand; PAM type: YTN; PAM sequence: TTC
aataggcaataaaatacaat

SEQ ID NO: 272552 - DNA, 20 bp, Artificial Sequence
  Description of Artificial Sequence: Synthetic oligonucleotide
  Target: LAMA2; (-) strand; PAM type: YTN; PAM sequence: TTG
atattcaataggcaataaaa

SEQ ID NO: 272553 - DNA, 20 bp, Artificial Sequence
  Description of Artificial Sequence: Synthetic oligonucleotide
  Target: LAMA2; (-) strand; PAM type: YTN; PAM sequence: TTT
gatattcaataggcaataaa

SEQ ID NO: 272554 - DNA, 20 bp, Artificial Sequence
  Description of Artificial Sequence: Synthetic oligonucleotide
  Target: LAMA2; (-) strand; PAM type: YTN; PAM sequence: TTA
aatttgatattcaataggca

SEQ ID NO: 272555 - DNA, 20 bp, Artificial Sequence
  Description of Artificial Sequence: Synthetic oligonucleotide
  Target: LAMA2; (-) strand; PAM type: YTN; PAM sequence: TTC
attaaatttgatattcaata

SEQ ID NO: 272556 - DNA, 20 bp, Artificial Sequence
  Description of Artificial Sequence: Synthetic oligonucleotide
  Target: LAMA2; (-) strand; PAM type: YTN; PAM sequence: TTT
cattaaatttgatattcaat

SEQ ID NO: 272557 - DNA, 20 bp, Artificial Sequence
  Description of Artificial Sequence: Synthetic oligonucleotide
  Target: LAMA2; (-) strand; PAM type: YTN; PAM sequence: TTT
tcattaaatttgatattcaa

SEQ ID NO: 272558 - DNA, 20 bp, Artificial Sequence
  Description of Artificial Sequence: Synthetic oligonucleotide
  Target: LAMA2; (-) strand; PAM type: YTN; PAM sequence: TTC
attttcattaaatttgatat

SEQ ID NO: 272559 - DNA, 20 bp, Artificial Sequence
  Description of Artificial Sequence: Synthetic oligonucleotide
  Target: LAMA2; (-) strand; PAM type: YTN; PAM sequence: TTT
cattttcattaaatttgata

SEQ ID NO: 272560 - DNA, 20 bp, Artificial Sequence
  Description of Artificial Sequence: Synthetic oligonucleotide
  Target: LAMA2; (-) strand; PAM type: YTN; PAM sequence: TTG
gaaatgtttcattttcatta

SEQ ID NO: 272561 - DNA, 20 bp, Artificial Sequence
  Description of Artificial Sequence: Synthetic oligonucleotide
  Target: LAMA2; (-) strand; PAM type: YTN; PAM sequence: TTT
ggaaatgtttcattttcatt

SEQ ID NO: 272562 - DNA, 20 bp, Artificial Sequence
  Description of Artificial Sequence: Synthetic oligonucleotide
  Target: LAMA2; (-) strand; PAM type: YTN; PAM sequence: TTT
tggaaatgtttcattttcat

SEQ ID NO: 272563 - DNA, 20 bp, Artificial Sequence
  Description of Artificial Sequence: Synthetic oligonucleotide
  Target: LAMA2; (-) strand; PAM type: YTN; PAM sequence: CTT
ttggaaatgtttcattttca

SEQ ID NO: 272564 - DNA, 20 bp, Artificial Sequence
  Description of Artificial Sequence: Synthetic oligonucleotide
  Target: LAMA2; (-) strand; PAM type: YTN; PAM sequence: TTC
atccttttggaaatgtttca

SEQ ID NO: 272565 - DNA, 20 bp, Artificial Sequence
  Description of Artificial Sequence: Synthetic oligonucleotide
  Target: LAMA2; (-) strand; PAM type: YTN; PAM sequence: TTT
catccttttggaaatgtttc

SEQ ID NO: 272566 - DNA, 20 bp, Artificial Sequence
  Description of Artificial Sequence: Synthetic oligonucleotide
  Target: LAMA2; (-) strand; PAM type: YTN; PAM sequence: CTA
gtttcatccttttggaaatg

SEQ ID NO: 272567 - DNA, 20 bp, Artificial Sequence
  Description of Artificial Sequence: Synthetic oligonucleotide
  Target: LAMA2; (-) strand; PAM type: YTN; PAM sequence: TTA
aaaactagtttcatcctttt

SEQ ID NO: 272568 - DNA, 20 bp, Artificial Sequence
  Description of Artificial Sequence: Synthetic oligonucleotide
  Target: LAMA2; (-) strand; PAM type: YTN; PAM sequence: TTT
aaaaactagtttcatccttt

SEQ ID NO: 272569 - DNA, 20 bp, Artificial Sequence
  Description of Artificial Sequence: Synthetic oligonucleotide
  Target: LAMA2; (-) strand; PAM type: YTN; PAM sequence: TTA
aatcgtttaaaaactagttt

SEQ ID NO: 272570 - DNA, 20 bp, Artificial Sequence
  Description of Artificial Sequence: Synthetic oligonucleotide
  Target: LAMA2; (-) strand; PAM type: YTN; PAM sequence: CTT
aaatcgtttaaaaactagtt

SEQ ID NO: 272571 - DNA, 20 bp, Artificial Sequence
  Description of Artificial Sequence: Synthetic oligonucleotide
  Target: LAMA2; (-) strand; PAM type: YTN; PAM sequence: TTG
gcacttaaatcgtttaaaaa

SEQ ID NO: 272572 - DNA, 20 bp, Artificial Sequence
  Description of Artificial Sequence: Synthetic oligonucleotide
  Target: LAMA2; (-) strand; PAM type: YTN; PAM sequence: TTA
taatattggcacttaaatcg

SEQ ID NO: 272573 - DNA, 20 bp, Artificial Sequence
  Description of Artificial Sequence: Synthetic oligonucleotide
  Target: LAMA2; (-) strand; PAM type: YTN; PAM sequence: CTT
ataatattggcacttaaatc

SEQ ID NO: 272574 - DNA, 20 bp, Artificial Sequence
  Description of Artificial Sequence: Synthetic oligonucleotide
  Target: LAMA2; (-) strand; PAM type: YTN; PAM sequence: TTG
taaacttataatattggcac

SEQ ID NO: 272575 - DNA, 20 bp, Artificial Sequence
  Description of Artificial Sequence: Synthetic oligonucleotide
  Target: LAMA2; (-) strand; PAM type: YTN; PAM sequence: CTT
gtaaacttataatattggca

SEQ ID NO: 272576 - DNA, 20 bp, Artificial Sequence
  Description of Artificial Sequence: Synthetic oligonucleotide
  Target: LAMA2; (-) strand; PAM type: YTN; PAM sequence: CTA
taaataaaatcttgtaaact

SEQ ID NO: 272577 - DNA, 20 bp, Artificial Sequence
  Description of Artificial Sequence: Synthetic oligonucleotide
  Target: LAMA2; (-) strand; PAM type: YTN; PAM sequence: TTA
aaaactataaataaaatctt

SEQ ID NO: 272578 - DNA, 20 bp, Artificial Sequence
  Description of Artificial Sequence: Synthetic oligonucleotide
  Target: LAMA2; (-) strand; PAM type: YTN; PAM sequence: TTT
aaaaactataaataaaatct

SEQ ID NO: 272579 - DNA, 20 bp, Artificial Sequence
  Description of Artificial Sequence: Synthetic oligonucleotide
  Target: LAMA2; (-) strand; PAM type: YTN; PAM sequence: TTT
taaaaactataaataaaatc

SEQ ID NO: 272580 - DNA, 20 bp, Artificial Sequence
  Description of Artificial Sequence: Synthetic oligonucleotide
  Target: LAMA2; (-) strand; PAM type: YTN; PAM sequence: CTT
ttaaaaactataaataaaat

SEQ ID NO: 272581 - DNA, 20 bp, Artificial Sequence
  Description of Artificial Sequence: Synthetic oligonucleotide
  Target: LAMA2; (-) strand; PAM type: YTN; PAM sequence: TTG
aaatcttttaaaaactataa

SEQ ID NO: 272582 - DNA, 20 bp, Artificial Sequence
  Description of Artificial Sequence: Synthetic oligonucleotide
  Target: LAMA2; (-) strand; PAM type: YTN; PAM sequence: TTA
gcagttgaaatcttttaaaa

SEQ ID NO: 272583 - DNA, 20 bp, Artificial Sequence
  Description of Artificial Sequence: Synthetic oligonucleotide
  Target: LAMA2; (-) strand; PAM type: YTN; PAM sequence: CTG
ttagcagttgaaatctttta

SEQ ID NO: 272584 - DNA, 20 bp, Artificial Sequence
  Description of Artificial Sequence: Synthetic oligonucleotide
  Target: LAMA2; (-) strand; PAM type: YTN; PAM sequence: TTA
aaaatataaaaggagaaata

SEQ ID NO: 272585 - DNA, 20 bp, Artificial Sequence
  Description of Artificial Sequence: Synthetic oligonucleotide
  Target: LAMA2; (-) strand; PAM type: YTN; PAM sequence: TTT
aaaaatataaaaggagaaat

SEQ ID NO: 272586 - DNA, 20 bp, Artificial Sequence
  Description of Artificial Sequence: Synthetic oligonucleotide
  Target: LAMA2; (-) strand; PAM type: YTN; PAM sequence: TTT
taaaaatataaaaggagaaa

SEQ ID NO: 272587 - DNA, 20 bp, Artificial Sequence
  Description of Artificial Sequence: Synthetic oligonucleotide
  Target: LAMA2; (-) strand; PAM type: YTN; PAM sequence: CTT
ttaaaaatataaaaggagaa

SEQ ID NO: 272588 - DNA, 20 bp, Artificial Sequence
  Description of Artificial Sequence: Synthetic oligonucleotide
  Target: LAMA2; (-) strand; PAM type: YTN; PAM sequence: TTA
tatatatatcttttaaaaat

SEQ ID NO: 272589 - DNA, 20 bp, Artificial Sequence
  Description of Artificial Sequence: Synthetic oligonucleotide
  Target: LAMA2; (-) strand; PAM type: YTN; PAM sequence: TTA
tattatatatatatctttta

SEQ ID NO: 272590 - DNA, 20 bp, Artificial Sequence
  Description of Artificial Sequence: Synthetic oligonucleotide
  Target: LAMA2; (-) strand; PAM type: YTN; PAM sequence: TTT
atattatatatatatctttt

SEQ ID NO: 272591 - DNA, 20 bp, Artificial Sequence
  Description of Artificial Sequence: Synthetic oligonucleotide
  Target: LAMA2; (-) strand; PAM type: YTN; PAM sequence: TTT
tatattatatatatatcttt

SEQ ID NO: 272592 - DNA, 20 bp, Artificial Sequence
  Description of Artificial Sequence: Synthetic oligonucleotide
  Target: LAMA2; (-) strand; PAM type: YTN; PAM sequence: TTG
ttttatattatatatatatc

SEQ ID NO: 272593 - DNA, 20 bp, Artificial Sequence
  Description of Artificial Sequence: Synthetic oligonucleotide
  Target: LAMA2; (-) strand; PAM type: YTN; PAM sequence: CTT
gttttatattatatatatat

SEQ ID NO: 272594 - DNA, 20 bp, Artificial Sequence
  Description of Artificial Sequence: Synthetic oligonucleotide
  Target: LAMA2; (-) strand; PAM type: YTN; PAM sequence: TTC
caaaccaaaaagatatgact

SEQ ID NO: 272595 - DNA, 20 bp, Artificial Sequence
  Description of Artificial Sequence: Synthetic oligonucleotide
  Target: LAMA2; (-) strand; PAM type: YTN; PAM sequence: TTA
aaagttccaaaccaaaaaga

SEQ ID NO: 272596 - DNA, 20 bp, Artificial Sequence
  Description of Artificial Sequence: Synthetic oligonucleotide
  Target: LAMA2; (-) strand; PAM type: YTN; PAM sequence: TTT
aaaagttccaaaccaaaaag

SEQ ID NO: 272597 - DNA, 20 bp, Artificial Sequence
  Description of Artificial Sequence: Synthetic oligonucleotide
  Target: LAMA2; (-) strand; PAM type: YTN; PAM sequence: TTT
taaaagttccaaaccaaaaa

SEQ ID NO: 272598 - DNA, 20 bp, Artificial Sequence
  Description of Artificial Sequence: Synthetic oligonucleotide
  Target: LAMA2; (-) strand; PAM type: YTN; PAM sequence: TTC
acgtgccaattttaaaagtt

SEQ ID NO: 272599 - DNA, 20 bp, Artificial Sequence
  Description of Artificial Sequence: Synthetic oligonucleotide
  Target: LAMA2; (-) strand; PAM type: YTN; PAM sequence: TTT
cacgtgccaattttaaaagt

SEQ ID NO: 272600 - DNA, 20 bp, Artificial Sequence
  Description of Artificial Sequence: Synthetic oligonucleotide
  Target: LAMA2; (-) strand; PAM type: YTN; PAM sequence: CTA
aatatttcacgtgccaattt

SEQ ID NO: 272601 - DNA, 20 bp, Artificial Sequence
  Description of Artificial Sequence: Synthetic oligonucleotide
  Target: LAMA2; (-) strand; PAM type: YTN; PAM sequence: TTC
ctaaatatttcacgtgccaa

SEQ ID NO: 272602 - DNA, 20 bp, Artificial Sequence
  Description of Artificial Sequence: Synthetic oligonucleotide
  Target: LAMA2; (-) strand; PAM type: YTN; PAM sequence: CTT
cctaaatatttcacgtgcca

SEQ ID NO: 272603 - DNA, 20 bp, Artificial Sequence
  Description of Artificial Sequence: Synthetic oligonucleotide
  Target: LAMA2; (-) strand; PAM type: YTN; PAM sequence: TTC
ttcctaaatatttcacgtgc

SEQ ID NO: 272604 - DNA, 20 bp, Artificial Sequence
  Description of Artificial Sequence: Synthetic oligonucleotide
  Target: LAMA2; (-) strand; PAM type: YTN; PAM sequence: TTT
cttcctaaatatttcacgtg

SEQ ID NO: 272605 - DNA, 20 bp, Artificial Sequence
  Description of Artificial Sequence: Synthetic oligonucleotide
  Target: LAMA2; (-) strand; PAM type: YTN; PAM sequence: TTC
catgtggaatttcttcctaa

SEQ ID NO: 272606 - DNA, 20 bp, Artificial Sequence
  Description of Artificial Sequence: Synthetic oligonucleotide
  Target: LAMA2; (-) strand; PAM type: YTN; PAM sequence: CTG
accccgtggaatgacaatga

SEQ ID NO: 272607 - DNA, 20 bp, Artificial Sequence
  Description of Artificial Sequence: Synthetic oligonucleotide
  Target: LAMA2; (-) strand; PAM type: YTN; PAM sequence: CTC
atcaggcaagccataaggac

SEQ ID NO: 272608 - DNA, 20 bp, Artificial Sequence
  Description of Artificial Sequence: Synthetic oligonucleotide
  Target: LAMA2; (-) strand; PAM type: YTN; PAM sequence: CTA
agtggtagtgaagcactcat

SEQ ID NO: 272609 - DNA, 20 bp, Artificial Sequence
  Description of Artificial Sequence: Synthetic oligonucleotide
  Target: LAMA2; (-) strand; PAM type: YTN; PAM sequence: CTC
catatgtctaagtggtagtg

SEQ ID NO: 272610 - DNA, 20 bp, Artificial Sequence
  Description of Artificial Sequence: Synthetic oligonucleotide
  Target: LAMA2; (-) strand; PAM type: YTN; PAM sequence: TTA
ccagctccatatgtctaagt

SEQ ID NO: 272611 - DNA, 20 bp, Artificial Sequence
  Description of Artificial Sequence: Synthetic oligonucleotide
  Target: LAMA2; (-) strand; PAM type: YTN; PAM sequence: TTC
caatattaccagctccatat

SEQ ID NO: 272612 - DNA, 20 bp, Artificial Sequence
  Description of Artificial Sequence: Synthetic oligonucleotide
  Target: LAMA2; (-) strand; PAM type: YTN; PAM sequence: CTT
ccaatattaccagctccata

SEQ ID NO: 272613 - DNA, 20 bp, Artificial Sequence
  Description of Artificial Sequence: Synthetic oligonucleotide
  Target: LAMA2; (-) strand; PAM type: YTN; PAM sequence: CTC
aagggtcatcttccaatatt

SEQ ID NO: 272614 - DNA, 20 bp, Artificial Sequence
  Description of Artificial Sequence: Synthetic oligonucleotide
  Target: LAMA2; (-) strand; PAM type: YTN; PAM sequence: CTC
tcaagggtcatcttccaata

SEQ ID NO: 272615 - DNA, 20 bp, Artificial Sequence
  Description of Artificial Sequence: Synthetic oligonucleotide
  Target: LAMA2; (-) strand; PAM type: YTN; PAM sequence: TTA
tatgatactctcaagggtca

SEQ ID NO: 272616 - DNA, 20 bp, Artificial Sequence
  Description of Artificial Sequence: Synthetic oligonucleotide
  Target: LAMA2; (-) strand; PAM type: YTN; PAM sequence: TTT
atatgatactctcaagggtc

SEQ ID NO: 272617 - DNA, 20 bp, Artificial Sequence
  Description of Artificial Sequence: Synthetic oligonucleotide
  Target: LAMA2; (-) strand; PAM type: YTN; PAM sequence: TTC
agatcaaatcatttatatga

SEQ ID NO: 272618 - DNA, 20 bp, Artificial Sequence
  Description of Artificial Sequence: Synthetic oligonucleotide
  Target: LAMA2; (-) strand; PAM type: YTN; PAM sequence: TTT
cagatcaaatcatttatatg

SEQ ID NO: 272619 - DNA, 20 bp, Artificial Sequence
  Description of Artificial Sequence: Synthetic oligonucleotide
  Target: LAMA2; (-) strand; PAM type: YTN; PAM sequence: TTA
gatttcagatcaaatcattt

SEQ ID NO: 272620 - DNA, 20 bp, Artificial Sequence
  Description of Artificial Sequence: Synthetic oligonucleotide
  Target: LAMA2; (-) strand; PAM type: YTN; PAM sequence: CTA
aaattagatttcagatcaaa

SEQ ID NO: 272621 - DNA, 20 bp, Artificial Sequence
  Description of Artificial Sequence: Synthetic oligonucleotide
  Target: LAMA2; (-) strand; PAM type: YTN; PAM sequence: CTG
ctaaaattagatttcagatc

SEQ ID NO: 272622 - DNA, 20 bp, Artificial Sequence
  Description of Artificial Sequence: Synthetic oligonucleotide
  Target: LAMA2; (-) strand; PAM type: YTN; PAM sequence: TTC
ctgctaaaattagatttcag

SEQ ID NO: 272623 - DNA, 20 bp, Artificial Sequence
  Description of Artificial Sequence: Synthetic oligonucleotide
  Target: LAMA2; (-) strand; PAM type: YTN; PAM sequence: TTT
cctgctaaaattagatttca

SEQ ID NO: 272624 - DNA, 20 bp, Artificial Sequence
  Description of Artificial Sequence: Synthetic oligonucleotide
  Target: LAMA2; (-) strand; PAM type: YTN; PAM sequence: CTC
atatggtttcctgctaaaat

SEQ ID NO: 272625 - DNA, 20 bp, Artificial Sequence
  Description of Artificial Sequence: Synthetic oligonucleotide
  Target: LAMA2; (-) strand; PAM type: YTN; PAM sequence: TTG
tggactcatatggtttcctg

SEQ ID NO: 272626 - DNA, 20 bp, Artificial Sequence
  Description of Artificial Sequence: Synthetic oligonucleotide
  Target: LAMA2; (-) strand; PAM type: YTN; PAM sequence: TTT
gtggactcatatggtttcct

SEQ ID NO: 272627 - DNA, 20 bp, Artificial Sequence
  Description of Artificial Sequence: Synthetic oligonucleotide
  Target: LAMA2; (-) strand; PAM type: YTN; PAM sequence: TTG
catttgtggactcatatggt

SEQ ID NO: 272628 - DNA, 20 bp, Artificial Sequence
  Description of Artificial Sequence: Synthetic oligonucleotide
  Target: LAMA2; (-) strand; PAM type: YTN; PAM sequence: TTT
gcatttgtggactcatatgg

SEQ ID NO: 272629 - DNA, 20 bp, Artificial Sequence
  Description of Artificial Sequence: Synthetic oligonucleotide
  Target: LAMA2; (-) strand; PAM type: YTN; PAM sequence: CTT
tgcatttgtggactcatatg

SEQ ID NO: 272630 - DNA, 20 bp, Artificial Sequence
  Description of Artificial Sequence: Synthetic oligonucleotide
  Target: LAMA2; (-) strand; PAM type: YTN; PAM sequence: CTA
cctttgcatttgtggactca

SEQ ID NO: 272631 - DNA, 20 bp, Artificial Sequence
  Description of Artificial Sequence: Synthetic oligonucleotide
  Target: LAMA2; (-) strand; PAM type: YTN; PAM sequence: CTG
tctacctttgcatttgtgga

SEQ ID NO: 272632 - DNA, 20 bp, Artificial Sequence
  Description of Artificial Sequence: Synthetic oligonucleotide
  Target: LAMA2; (-) strand; PAM type: YTN; PAM sequence: TTA
gatactgtctacctttgcat

SEQ ID NO: 272633 - DNA, 20 bp, Artificial Sequence
  Description of Artificial Sequence: Synthetic oligonucleotide
  Target: LAMA2; (-) strand; PAM type: YTN; PAM sequence: CTT
agatactgtctacctttgca

SEQ ID NO: 272634 - DNA, 20 bp, Artificial Sequence
  Description of Artificial Sequence: Synthetic oligonucleotide
  Target: LAMA2; (-) strand; PAM type: YTN; PAM sequence: TTG
cttagatactgtctaccttt

SEQ ID NO: 272635 - DNA, 20 bp, Artificial Sequence
  Description of Artificial Sequence: Synthetic oligonucleotide
  Target: LAMA2; (-) strand; PAM type: YTN; PAM sequence: CTG
aatagataacattgcttaga

SEQ ID NO: 272636 - DNA, 20 bp, Artificial Sequence
  Description of Artificial Sequence: Synthetic oligonucleotide
  Target: LAMA2; (-) strand; PAM type: YTN; PAM sequence: CTA
ctgaatagataacattgctt

SEQ ID NO: 272637 - DNA, 20 bp, Artificial Sequence
  Description of Artificial Sequence: Synthetic oligonucleotide
  Target: LAMA2; (-) strand; PAM type: YTN; PAM sequence: CTA
actactgaatagataacatt

SEQ ID NO: 272638 - DNA, 20 bp, Artificial Sequence
  Description of Artificial Sequence: Synthetic oligonucleotide
  Target: LAMA2; (-) strand; PAM type: YTN; PAM sequence: CTA
atggagcaaacctaactact

SEQ ID NO: 272639 - DNA, 20 bp, Artificial Sequence
  Description of Artificial Sequence: Synthetic oligonucleotide
  Target: LAMA2; (-) strand; PAM type: YTN; PAM sequence: CTA
gaatctaatggagcaaacct

SEQ ID NO: 272640 - DNA, 20 bp, Artificial Sequence
  Description of Artificial Sequence: Synthetic oligonucleotide
  Target: LAMA2; (-) strand; PAM type: YTN; PAM sequence: TTA
aaactagaatctaatggagc

SEQ ID NO: 272641 - DNA, 20 bp, Artificial Sequence
  Description of Artificial Sequence: Synthetic oligonucleotide
  Target: LAMA2; (-) strand; PAM type: YTN; PAM sequence: TTA
tgttaaaactagaatctaat

SEQ ID NO: 272642 - DNA, 20 bp, Artificial Sequence
  Description of Artificial Sequence: Synthetic oligonucleotide
  Target: LAMA2; (-) strand; PAM type: YTN; PAM sequence: TTT
atgttaaaactagaatctaa

SEQ ID NO: 272643 - DNA, 20 bp, Artificial Sequence
  Description of Artificial Sequence: Synthetic oligonucleotide
  Target: LAMA2; (-) strand; PAM type: YTN; PAM sequence: CTT
tatgttaaaactagaatcta

SEQ ID NO: 272644 - DNA, 20 bp, Artificial Sequence
  Description of Artificial Sequence: Synthetic oligonucleotide
  Target: LAMA2; (-) strand; PAM type: YTN; PAM sequence: TTC
tttatgttaaaactagaatc

SEQ ID NO: 272645 - DNA, 20 bp, Artificial Sequence
  Description of Artificial Sequence: Synthetic oligonucleotide
  Target: LAMA2; (-) strand; PAM type: YTN; PAM sequence: CTT
ctttatgttaaaactagaat

SEQ ID NO: 272646 - DNA, 20 bp, Artificial Sequence
  Description of Artificial Sequence: Synthetic oligonucleotide
  Target: LAMA2; (-) strand; PAM type: YTN; PAM sequence: CTG
ccttctttatgttaaaacta

SEQ ID NO: 272647 - DNA, 20 bp, Artificial Sequence
  Description of Artificial Sequence: Synthetic oligonucleotide
  Target: LAMA2; (-) strand; PAM type: YTN; PAM sequence: TTC
tgccttctttatgttaaaac

SEQ ID NO: 272648 - DNA, 20 bp, Artificial Sequence
  Description of Artificial Sequence: Synthetic oligonucleotide
  Target: LAMA2; (-) strand; PAM type: YTN; PAM sequence: TTT
ctgccttctttatgttaaaa

SEQ ID NO: 272649 - DNA, 20 bp, Artificial Sequence
  Description of Artificial Sequence: Synthetic oligonucleotide
  Target: LAMA2; (-) strand; PAM type: YTN; PAM sequence: TTT
tctgccttctttatgttaaa

SEQ ID NO: 272650 - DNA, 20 bp, Artificial Sequence
  Description of Artificial Sequence: Synthetic oligonucleotide
  Target: LAMA2; (-) strand; PAM type: YTN; PAM sequence: TTC
attttctgccttctttatgt

SEQ ID NO: 272651 - DNA, 20 bp, Artificial Sequence
  Description of Artificial Sequence: Synthetic oligonucleotide
  Target: LAMA2; (-) strand; PAM type: YTN; PAM sequence: TTT
cattttctgccttctttatg

SEQ ID NO: 272652 - DNA, 20 bp, Artificial Sequence
  Description of Artificial Sequence: Synthetic oligonucleotide
  Target: LAMA2; (-) strand; PAM type: YTN; PAM sequence: TTG
gatatgaccagtgtgtttca

SEQ ID NO: 272653 - DNA, 20 bp, Artificial Sequence
  Description of Artificial Sequence: Synthetic oligonucleotide
  Target: LAMA2; (-) strand; PAM type: YTN; PAM sequence: TTG
gttggatatgaccagtgtgt

SEQ ID NO: 272654 - DNA, 20 bp, Artificial Sequence
  Description of Artificial Sequence: Synthetic oligonucleotide
  Target: LAMA2; (-) strand; PAM type: YTN; PAM sequence: CTT
ggttggatatgaccagtgtg

SEQ ID NO: 272655 - DNA, 20 bp, Artificial Sequence
  Description of Artificial Sequence: Synthetic oligonucleotide
  Target: LAMA2; (-) strand; PAM type: YTN; PAM sequence: TTC
ttggttggatatgaccagtg

SEQ ID NO: 272656 - DNA, 20 bp, Artificial Sequence
  Description of Artificial Sequence: Synthetic oligonucleotide
  Target: LAMA2; (-) strand; PAM type: YTN; PAM sequence: TTT
cttggttggatatgaccagt

SEQ ID NO: 272657 - DNA, 20 bp, Artificial Sequence
  Description of Artificial Sequence: Synthetic oligonucleotide
  Target: LAMA2; (-) strand; PAM type: YTN; PAM sequence: TTT
tcttggttggatatgaccag

SEQ ID NO: 272658 - DNA, 20 bp, Artificial Sequence
  Description of Artificial Sequence: Synthetic oligonucleotide
  Target: LAMA2; (-) strand; PAM type: YTN; PAM sequence: CTG
cacataattttcttggttgg

SEQ ID NO: 272659 - DNA, 20 bp, Artificial Sequence
  Description of Artificial Sequence: Synthetic oligonucleotide
  Target: LAMA2; (-) strand; PAM type: YTN; PAM sequence: TTA
aaatctgcacataattttct

SEQ ID NO: 272660 - DNA, 20 bp, Artificial Sequence
  Description of Artificial Sequence: Synthetic oligonucleotide
  Target: LAMA2; (-) strand; PAM type: YTN; PAM sequence: CTT
aaaatctgcacataattttc

SEQ ID NO: 272661 - DNA, 20 bp, Artificial Sequence
  Description of Artificial Sequence: Synthetic oligonucleotide
  Target: LAMA2; (-) strand; PAM type: YTN; PAM sequence: CTC
ttaaaatctgcacataattt

SEQ ID NO: 272662 - DNA, 20 bp, Artificial Sequence
  Description of Artificial Sequence: Synthetic oligonucleotide
  Target: LAMA2; (-) strand; PAM type: YTN; PAM sequence: CTG
tgcctcttaaaatctgcaca

SEQ ID NO: 272663 - DNA, 20 bp, Artificial Sequence
  Description of Artificial Sequence: Synthetic oligonucleotide
  Target: LAMA2; (-) strand; PAM type: YTN; PAM sequence: CTA
ctgtgcctcttaaaatctgc

SEQ ID NO: 272664 - DNA, 20 bp, Artificial Sequence
  Description of Artificial Sequence: Synthetic oligonucleotide
  Target: LAMA2; (-) strand; PAM type: YTN; PAM sequence: TTC
tactgtgcctcttaaaatct

SEQ ID NO: 272665 - DNA, 20 bp, Artificial Sequence
  Description of Artificial Sequence: Synthetic oligonucleotide
  Target: LAMA2; (-) strand; PAM type: YTN; PAM sequence: CTC
aagcagttctactgtgcctc

SEQ ID NO: 272666 - DNA, 20 bp, Artificial Sequence
  Description of Artificial Sequence: Synthetic oligonucleotide
  Target: LAMA2; (-) strand; PAM type: YTN; PAM sequence: TTA
gctcaagcagttctactgtg

SEQ ID NO: 272667 - DNA, 20 bp, Artificial Sequence
  Description of Artificial Sequence: Synthetic oligonucleotide
  Target: LAMA2; (-) strand; PAM type: YTN; PAM sequence: TTT
agctcaagcagttctactgt

SEQ ID NO: 272668 - DNA, 20 bp, Artificial Sequence
  Description of Artificial Sequence: Synthetic oligonucleotide
  Target: LAMA2; (-) strand; PAM type: YTN; PAM sequence: CTT
tagctcaagcagttctactg

SEQ ID NO: 272669 - DNA, 20 bp, Artificial Sequence
  Description of Artificial Sequence: Synthetic oligonucleotide
  Target: LAMA2; (-) strand; PAM type: YTN; PAM sequence: CTG
ctttagctcaagcagttcta

SEQ ID NO: 272670 - DNA, 20 bp, Artificial Sequence
  Description of Artificial Sequence: Synthetic oligonucleotide
  Target: LAMA2; (-) strand; PAM type: YTN; PAM sequence: TTC
ctgctttagctcaagcagtt

SEQ ID NO: 272671 - DNA, 20 bp, Artificial Sequence
  Description of Artificial Sequence: Synthetic oligonucleotide
  Target: LAMA2; (-) strand; PAM type: YTN; PAM sequence: TTT
cctgctttagctcaagcagt

SEQ ID NO: 272672 - DNA, 20 bp, Artificial Sequence
  Description of Artificial Sequence: Synthetic oligonucleotide
  Target: LAMA2; (-) strand; PAM type: YTN; PAM sequence: CTT
tcctgctttagctcaagcag

SEQ ID NO: 272673 - DNA, 20 bp, Artificial Sequence
  Description of Artificial Sequence: Synthetic oligonucleotide
  Target: LAMA2; (-) strand; PAM type: YTN; PAM sequence: TTA
ctttcctgctttagctcaag

SEQ ID NO: 272674 - DNA, 20 bp, Artificial Sequence
  Description of Artificial Sequence: Synthetic oligonucleotide
  Target: LAMA2; (-) strand; PAM type: YTN; PAM sequence: CTG
ttactttcctgctttagctc

SEQ ID NO: 272675 - DNA, 20 bp, Artificial Sequence
  Description of Artificial Sequence: Synthetic oligonucleotide
  Target: LAMA2; (-) strand; PAM type: YTN; PAM sequence: CTG
aacaatgtagctgttacttt

SEQ ID NO: 272676 - DNA, 20 bp, Artificial Sequence
  Description of Artificial Sequence: Synthetic oligonucleotide
  Target: LAMA2; (-) strand; PAM type: YTN; PAM sequence: TTC
tgaacaatgtagctgttact

SEQ ID NO: 272677 - DNA, 20 bp, Artificial Sequence
  Description of Artificial Sequence: Synthetic oligonucleotide
  Target: LAMA2; (-) strand; PAM type: YTN; PAM sequence: CTT
ctgaacaatgtagctgttac

SEQ ID NO: 272678 - DNA, 20 bp, Artificial Sequence
  Description of Artificial Sequence: Synthetic oligonucleotide
  Target: LAMA2; (-) strand; PAM type: YTN; PAM sequence: TTA
cttctgaacaatgtagctgt

SEQ ID NO: 272679 - DNA, 20 bp, Artificial Sequence
  Description of Artificial Sequence: Synthetic oligonucleotide
  Target: LAMA2; (-) strand; PAM type: YTN; PAM sequence: TTT
acttctgaacaatgtagctg

SEQ ID NO: 272680 - DNA, 20 bp, Artificial Sequence
  Description of Artificial Sequence: Synthetic oligonucleotide
  Target: LAMA2; (-) strand; PAM type: YTN; PAM sequence: TTA
atttacttctgaacaatgta

SEQ ID NO: 272681 - DNA, 20 bp, Artificial Sequence
  Description of Artificial Sequence: Synthetic oligonucleotide
  Target: LAMA2; (-) strand; PAM type: YTN; PAM sequence: TTA
ggcacacgttaatttacttc

SEQ ID NO: 272682 - DNA, 20 bp, Artificial Sequence
  Description of Artificial Sequence: Synthetic oligonucleotide
  Target: LAMA2; (-) strand; PAM type: YTN; PAM sequence: TTA
ccattaggcacacgttaatt

SEQ ID NO: 272683 - DNA, 20 bp, Artificial Sequence
  Description of Artificial Sequence: Synthetic oligonucleotide
  Target: LAMA2; (-) strand; PAM type: YTN; PAM sequence: CTA
ggcagcatgcattaccatta

SEQ ID NO: 272684 - DNA, 20 bp, Artificial Sequence
  Description of Artificial Sequence: Synthetic oligonucleotide
  Target: LAMA2; (-) strand; PAM type: YTN; PAM sequence: TTA
tgtctaggcagcatgcatta

SEQ ID NO: 272685 - DNA, 20 bp, Artificial Sequence
  Description of Artificial Sequence: Synthetic oligonucleotide
  Target: LAMA2; (-) strand; PAM type: YTN; PAM sequence: TTT
atgtctaggcagcatgcatt

SEQ ID NO: 272686 - DNA, 20 bp, Artificial Sequence
  Description of Artificial Sequence: Synthetic oligonucleotide
  Target: LAMA2; (-) strand; PAM type: YTN; PAM sequence: TTA
gagtatttatgtctaggcag

SEQ ID NO: 272687 - DNA, 20 bp, Artificial Sequence
  Description of Artificial Sequence: Synthetic oligonucleotide
  Target: LAMA2; (-) strand; PAM type: YTN; PAM sequence: TTT
agagtatttatgtctaggca

SEQ ID NO: 272688 - DNA, 20 bp, Artificial Sequence
  Description of Artificial Sequence: Synthetic oligonucleotide
  Target: LAMA2; (-) strand; PAM type: YTN; PAM sequence: TTT
tagagtatttatgtctaggc

SEQ ID NO: 272689 - DNA, 20 bp, Artificial Sequence
  Description of Artificial Sequence: Synthetic oligonucleotide
  Target: LAMA2; (-) strand; PAM type: YTN; PAM sequence: TTT
ttagagtatttatgtctagg

SEQ ID NO: 272690 - DNA, 20 bp, Artificial Sequence
  Description of Artificial Sequence: Synthetic oligonucleotide
  Target: LAMA2; (-) strand; PAM type: YTN; PAM sequence: TTT
tttagagtatttatgtctag

SEQ ID NO: 272691 - DNA, 20 bp, Artificial Sequence
  Description of Artificial Sequence: Synthetic oligonucleotide
  Target: LAMA2; (-) strand; PAM type: YTN; PAM sequence: TTG
ttttttagagtatttatgtc

SEQ ID NO: 272692 - DNA, 20 bp, Artificial Sequence
  Description of Artificial Sequence: Synthetic oligonucleotide
  Target: LAMA2; (-) strand; PAM type: YTN; PAM sequence: TTT
gttttttagagtatttatgt

SEQ ID NO: 272693 - DNA, 20 bp, Artificial Sequence
  Description of Artificial Sequence: Synthetic oligonucleotide
  Target: LAMA2; (-) strand; PAM type: YTN; PAM sequence: TTT
tgttttttagagtatttatg

SEQ ID NO: 272694 - DNA, 20 bp, Artificial Sequence
  Description of Artificial Sequence: Synthetic oligonucleotide
  Target: LAMA2; (-) strand; PAM type: YTN; PAM sequence: TTG
ttttgttttttagagtattt

SEQ ID NO: 272695 - DNA, 20 bp, Artificial Sequence
  Description of Artificial Sequence: Synthetic oligonucleotide
  Target: LAMA2; (-) strand; PAM type: YTN; PAM sequence: CTT
gttttgttttttagagtatt

SEQ ID NO: 272696 - DNA, 20 bp, Artificial Sequence
  Description of Artificial Sequence: Synthetic oligonucleotide
  Target: LAMA2; (-) strand; PAM type: YTN; PAM sequence: TTC
ttgttttgttttttagagta

SEQ ID NO: 272697 - DNA, 20 bp, Artificial Sequence
  Description of Artificial Sequence: Synthetic oligonucleotide
  Target: LAMA2; (-) strand; PAM type: YTN; PAM sequence: TTT
cttgttttgttttttagagt

SEQ ID NO: 272698 - DNA, 20 bp, Artificial Sequence
  Description of Artificial Sequence: Synthetic oligonucleotide
  Target: LAMA2; (-) strand; PAM type: YTN; PAM sequence: TTT
tcttgttttgttttttagag

SEQ ID NO: 272699 - DNA, 20 bp, Artificial Sequence
  Description of Artificial Sequence: Synthetic oligonucleotide
  Target: LAMA2; (-) strand; PAM type: YTN; PAM sequence: TTT
ttcttgttttgttttttaga

SEQ ID NO: 272700 - DNA, 20 bp, Artificial Sequence
  Description of Artificial Sequence: Synthetic oligonucleotide
  Target: LAMA2; (-) strand; PAM type: YTN; PAM sequence: TTT
tttcttgttttgttttttag

SEQ ID NO: 272701 - DNA, 20 bp, Artificial Sequence
  Description of Artificial Sequence: Synthetic oligonucleotide
  Target: LAMA2; (-) strand; PAM type: YTN; PAM sequence: CTA
ttttttcttgttttgttttt

SEQ ID NO: 272702 - DNA, 20 bp, Artificial Sequence
  Description of Artificial Sequence: Synthetic oligonucleotide
  Target: LAMA2; (-) strand; PAM type: YTN; PAM sequence: TTC
tattttttcttgttttgttt

SEQ ID NO: 272703 - DNA, 20 bp, Artificial Sequence
  Description of Artificial Sequence: Synthetic oligonucleotide
  Target: LAMA2; (-) strand; PAM type: YTN; PAM sequence: TTT
ctattttttcttgttttgtt

SEQ ID NO: 272704 - DNA, 20 bp, Artificial Sequence
  Description of Artificial Sequence: Synthetic oligonucleotide
  Target: LAMA2; (-) strand; PAM type: YTN; PAM sequence: TTT
tctattttttcttgttttgt

SEQ ID NO: 272705 - DNA, 20 bp, Artificial Sequence
  Description of Artificial Sequence: Synthetic oligonucleotide
  Target: LAMA2; (-) strand; PAM type: YTN; PAM sequence: TTT
ttctattttttcttgttttg

SEQ ID NO: 272706 - DNA, 20 bp, Artificial Sequence
  Description of Artificial Sequence: Synthetic oligonucleotide
  Target: LAMA2; (-) strand; PAM type: YTN; PAM sequence: CTT
tttctattttttcttgtttt

SEQ ID NO: 272707 - DNA, 20 bp, Artificial Sequence
  Description of Artificial Sequence: Synthetic oligonucleotide
  Target: LAMA2; (-) strand; PAM type: YTN; PAM sequence: TTC
tttttctattttttcttgtt

SEQ ID NO: 272708 - DNA, 20 bp, Artificial Sequence
  Description of Artificial Sequence: Synthetic oligonucleotide
  Target: LAMA2; (-) strand; PAM type: YTN; PAM sequence: TTT
ctttttctattttttcttgt

SEQ ID NO: 272709 - DNA, 20 bp, Artificial Sequence
  Description of Artificial Sequence: Synthetic oligonucleotide
  Target: LAMA2; (-) strand; PAM type: YTN; PAM sequence: TTC
ccatttctttttctattttt

SEQ ID NO: 272710 - DNA, 20 bp, Artificial Sequence
  Description of Artificial Sequence: Synthetic oligonucleotide
  Target: LAMA2; (-) strand; PAM type: YTN; PAM sequence: TTT
cccatttctttttctatttt

SEQ ID NO: 272711 - DNA, 20 bp, Artificial Sequence
  Description of Artificial Sequence: Synthetic oligonucleotide
  Target: LAMA2; (-) strand; PAM type: YTN; PAM sequence: TTT
tcccatttctttttctattt

SEQ ID NO: 272712 - DNA, 20 bp, Artificial Sequence
  Description of Artificial Sequence: Synthetic oligonucleotide
  Target: LAMA2; (-) strand; PAM type: YTN; PAM sequence: TTT
ttcccatttctttttctatt

SEQ ID NO: 272713 - DNA, 20 bp, Artificial Sequence
  Description of Artificial Sequence: Synthetic oligonucleotide
  Target: LAMA2; (-) strand; PAM type: YTN; PAM sequence: TTT
tttcccatttctttttctat

SEQ ID NO: 272714 - DNA, 20 bp, Artificial Sequence
  Description of Artificial Sequence: Synthetic oligonucleotide
  Target: LAMA2; (-) strand; PAM type: YTN; PAM sequence: TTT
ttttcccatttctttttcta

SEQ ID NO: 272715 - DNA, 20 bp, Artificial Sequence
  Description of Artificial Sequence: Synthetic oligonucleotide
  Target: LAMA2; (-) strand; PAM type: YTN; PAM sequence: TTT
tttttcccatttctttttct

SEQ ID NO: 272716 - DNA, 20 bp, Artificial Sequence
  Description of Artificial Sequence: Synthetic oligonucleotide
  Target: LAMA2; (-) strand; PAM type: YTN; PAM sequence: TTT
ttttttcccatttctttttc

SEQ ID NO: 272717 - DNA, 20 bp, Artificial Sequence
  Description of Artificial Sequence: Synthetic oligonucleotide
  Target: LAMA2; (-) strand; PAM type: YTN; PAM sequence: TTT
tttttttcccatttcttttt

SEQ ID NO: 272718 - DNA, 20 bp, Artificial Sequence
  Description of Artificial Sequence: Synthetic oligonucleotide
  Target: LAMA2; (-) strand; PAM type: YTN; PAM sequence: CTA
ggttttttttttcccatttc

SEQ ID NO: 272719 - DNA, 20 bp, Artificial Sequence
  Description of Artificial Sequence: Synthetic oligonucleotide
  Target: LAMA2; (-) strand; PAM type: YTN; PAM sequence: CTC
aactaggttttttttttccc

SEQ ID NO: 272720 - DNA, 20 bp, Artificial Sequence
  Description of Artificial Sequence: Synthetic oligonucleotide
  Target: LAMA2; (-) strand; PAM type: YTN; PAM sequence: TTC
actcaactaggttttttttt

SEQ ID NO: 272721 - DNA, 20 bp, Artificial Sequence
  Description of Artificial Sequence: Synthetic oligonucleotide
  Target: LAMA2; (-) strand; PAM type: YTN; PAM sequence: TTG
acattcactcaactaggttt

SEQ ID NO: 272722 - DNA, 20 bp, Artificial Sequence
  Description of Artificial Sequence: Synthetic oligonucleotide
  Target: LAMA2; (-) strand; PAM type: YTN; PAM sequence: TTA
tgttgacattcactcaacta

SEQ ID NO: 272723 - DNA, 20 bp, Artificial Sequence
  Description of Artificial Sequence: Synthetic oligonucleotide
  Target: LAMA2; (-) strand; PAM type: YTN; PAM sequence: TTT
atgttgacattcactcaact

SEQ ID NO: 272724 - DNA, 20 bp, Artificial Sequence
  Description of Artificial Sequence: Synthetic oligonucleotide
  Target: LAMA2; (-) strand; PAM type: YTN; PAM sequence: TTT
tatgttgacattcactcaac

SEQ ID NO: 272725 - DNA, 20 bp, Artificial Sequence
  Description of Artificial Sequence: Synthetic oligonucleotide
  Target: LAMA2; (-) strand; PAM type: YTN; PAM sequence: CTT
ttatgttgacattcactcaa

SEQ ID NO: 272726 - DNA, 20 bp, Artificial Sequence
  Description of Artificial Sequence: Synthetic oligonucleotide
  Target: LAMA2; (-) strand; PAM type: YTN; PAM sequence: TTC
ttttatgttgacattcactc

SEQ ID NO: 272727 - DNA, 20 bp, Artificial Sequence
  Description of Artificial Sequence: Synthetic oligonucleotide
  Target: LAMA2; (-) strand; PAM type: YTN; PAM sequence: TTT
cttttatgttgacattcact

SEQ ID NO: 272728 - DNA, 20 bp, Artificial Sequence
  Description of Artificial Sequence: Synthetic oligonucleotide
  Target: LAMA2; (-) strand; PAM type: YTN; PAM sequence: TTT
tcttttatgttgacattcac

SEQ ID NO: 272729 - DNA, 20 bp, Artificial Sequence
  Description of Artificial Sequence: Synthetic oligonucleotide
  Target: LAMA2; (-) strand; PAM type: YTN; PAM sequence: CTT
ttcttttatgttgacattca

SEQ ID NO: 272730 - DNA, 20 bp, Artificial Sequence
  Description of Artificial Sequence: Synthetic oligonucleotide
  Target: LAMA2; (-) strand; PAM type: YTN; PAM sequence: TTA
ccttttcttttatgttgaca

SEQ ID NO: 272731 - DNA, 20 bp, Artificial Sequence
  Description of Artificial Sequence: Synthetic oligonucleotide
  Target: LAMA2; (-) strand; PAM type: YTN; PAM sequence: TTG
attaccttttcttttatgtt

SEQ ID NO: 272732 - DNA, 20 bp, Artificial Sequence
  Description of Artificial Sequence: Synthetic oligonucleotide
  Target: LAMA2; (-) strand; PAM type: YTN; PAM sequence: TTT
gattaccttttcttttatgt

SEQ ID NO: 272733 - DNA, 20 bp, Artificial Sequence
  Description of Artificial Sequence: Synthetic oligonucleotide
  Target: LAMA2; (-) strand; PAM type: YTN; PAM sequence: CTT
tgattaccttttcttttatg

SEQ ID NO: 272734 - DNA, 20 bp, Artificial Sequence
  Description of Artificial Sequence: Synthetic oligonucleotide
  Target: LAMA2; (-) strand; PAM type: YTN; PAM sequence: TTG
cctttgattaccttttcttt

SEQ ID NO: 272735 - DNA, 20 bp, Artificial Sequence
  Description of Artificial Sequence: Synthetic oligonucleotide
  Target: LAMA2; (-) strand; PAM type: YTN; PAM sequence: CTT
gcctttgattaccttttctt

SEQ ID NO: 272736 - DNA, 20 bp, Artificial Sequence
  Description of Artificial Sequence: Synthetic oligonucleotide
  Target: LAMA2; (-) strand; PAM type: YTN; PAM sequence: CTC
ttgcctttgattaccttttc

SEQ ID NO: 272737 - DNA, 20 bp, Artificial Sequence
  Description of Artificial Sequence: Synthetic oligonucleotide
  Target: LAMA2; (-) strand; PAM type: YTN; PAM sequence: CTC
tcttgcctttgattaccttt

SEQ ID NO: 272738 - DNA, 20 bp, Artificial Sequence
  Description of Artificial Sequence: Synthetic oligonucleotide
  Target: LAMA2; (-) strand; PAM type: YTN; PAM sequence: TTG
tatctctcttgcctttgatt

SEQ ID NO: 272739 - DNA, 20 bp, Artificial Sequence
  Description of Artificial Sequence: Synthetic oligonucleotide
  Target: LAMA2; (-) strand; PAM type: YTN; PAM sequence: CTT
gtatctctcttgcctttgat

SEQ ID NO: 272740 - DNA, 20 bp, Artificial Sequence
  Description of Artificial Sequence: Synthetic oligonucleotide
  Target: LAMA2; (-) strand; PAM type: YTN; PAM sequence: TTA
cacagtatcttgtatctctc

SEQ ID NO: 272741 - DNA, 20 bp, Artificial Sequence
  Description of Artificial Sequence: Synthetic oligonucleotide
  Target: LAMA2; (-) strand; PAM type: YTN; PAM sequence: CTT
acacagtatcttgtatctct

SEQ ID NO: 272742 - DNA, 20 bp, Artificial Sequence
  Description of Artificial Sequence: Synthetic oligonucleotide
  Target: LAMA2; (-) strand; PAM type: YTN; PAM sequence: TTG
taaatgatgccttacacagt

SEQ ID NO: 272743 - DNA, 20 bp, Artificial Sequence
  Description of Artificial Sequence: Synthetic oligonucleotide
  Target: LAMA2; (-) strand; PAM type: YTN; PAM sequence: TTT
gtaaatgatgccttacacag

SEQ ID NO: 272744 - DNA, 20 bp, Artificial Sequence
  Description of Artificial Sequence: Synthetic oligonucleotide
  Target: LAMA2; (-) strand; PAM type: YTN; PAM sequence: CTT
tgtaaatgatgccttacaca

SEQ ID NO: 272745 - DNA, 20 bp, Artificial Sequence
  Description of Artificial Sequence: Synthetic oligonucleotide
  Target: LAMA2; (-) strand; PAM type: YTN; PAM sequence: TTC
ctttgtaaatgatgccttac

SEQ ID NO: 272746 - DNA, 20 bp, Artificial Sequence
  Description of Artificial Sequence: Synthetic oligonucleotide
  Target: LAMA2; (-) strand; PAM type: YTN; PAM sequence: TTA
cagtgttcctttgtaaatga

SEQ ID NO: 272747 - DNA, 20 bp, Artificial Sequence
  Description of Artificial Sequence: Synthetic oligonucleotide
  Target: LAMA2; (-) strand; PAM type: YTN; PAM sequence: TTT
acagtgttcctttgtaaatg

SEQ ID NO: 272748 - DNA, 20 bp, Artificial Sequence
  Description of Artificial Sequence: Synthetic oligonucleotide
  Target: LAMA2; (-) strand; PAM type: YTN; PAM sequence: CTT
tacagtgttcctttgtaaat

SEQ ID NO: 272749 - DNA, 20 bp, Artificial Sequence
  Description of Artificial Sequence: Synthetic oligonucleotide
  Target: LAMA2; (-) strand; PAM type: YTN; PAM sequence: CTG
caatctttacagtgttcctt

SEQ ID NO: 272750 - DNA, 20 bp, Artificial Sequence
  Description of Artificial Sequence: Synthetic oligonucleotide
  Target: LAMA2; (-) strand; PAM type: YTN; PAM sequence: TTC
tgcaatctttacagtgttcc

SEQ ID NO: 272751 - DNA, 20 bp, Artificial Sequence
  Description of Artificial Sequence: Synthetic oligonucleotide
  Target: LAMA2; (-) strand; PAM type: YTN; PAM sequence: CTA
ttctgcaatctttacagtgt

SEQ ID NO: 272752 - DNA, 20 bp, Artificial Sequence
  Description of Artificial Sequence: Synthetic oligonucleotide
  Target: LAMA2; (-) strand; PAM type: YTN; PAM sequence: CTC
tattctgcaatctttacagt

SEQ ID NO: 272753 - DNA, 20 bp, Artificial Sequence
  Description of Artificial Sequence: Synthetic oligonucleotide
  Target: LAMA2; (-) strand; PAM type: YTN; PAM sequence: TTA
cctctattctgcaatcttta

SEQ ID NO: 272754 - DNA, 20 bp, Artificial Sequence
  Description of Artificial Sequence: Synthetic oligonucleotide
  Target: LAMA2; (-) strand; PAM type: YTN; PAM sequence: CTT
acctctattctgcaatcttt

SEQ ID NO: 272755 - DNA, 20 bp, Artificial Sequence
  Description of Artificial Sequence: Synthetic oligonucleotide
  Target: LAMA2; (-) strand; PAM type: YTN; PAM sequence: CTC
ttacctctattctgcaatct

SEQ ID NO: 272756 - DNA, 20 bp, Artificial Sequence
  Description of Artificial Sequence: Synthetic oligonucleotide
  Target: LAMA2; (-) strand; PAM type: YTN; PAM sequence: TTC
tcttacctctattctgcaat

SEQ ID NO: 272757 - DNA, 20 bp, Artificial Sequence
  Description of Artificial Sequence: Synthetic oligonucleotide
  Target: LAMA2; (-) strand; PAM type: YTN; PAM sequence: TTA
acattctcttacctctattc

SEQ ID NO: 272758 - DNA, 20 bp, Artificial Sequence
  Description of Artificial Sequence: Synthetic oligonucleotide
  Target: LAMA2; (-) strand; PAM type: YTN; PAM sequence: TTT
aacattctcttacctctatt

SEQ ID NO: 272759 - DNA, 20 bp, Artificial Sequence
  Description of Artificial Sequence: Synthetic oligonucleotide
  Target: LAMA2; (-) strand; PAM type: YTN; PAM sequence: TTT
taacattctcttacctctat

SEQ ID NO: 272760 - DNA, 20 bp, Artificial Sequence
  Description of Artificial Sequence: Synthetic oligonucleotide
  Target: LAMA2; (-) strand; PAM type: YTN; PAM sequence: TTA
ttttaacattctcttacctc

SEQ ID NO: 272761 - DNA, 20 bp, Artificial Sequence
  Description of Artificial Sequence: Synthetic oligonucleotide
  Target: LAMA2; (-) strand; PAM type: YTN; PAM sequence: CTT
attttaacattctcttacct

SEQ ID NO: 272762 - DNA, 20 bp, Artificial Sequence
  Description of Artificial Sequence: Synthetic oligonucleotide
  Target: LAMA2; (-) strand; PAM type: YTN; PAM sequence: TTC
ttattttaacattctcttac

SEQ ID NO: 272763 - DNA, 20 bp, Artificial Sequence
  Description of Artificial Sequence: Synthetic oligonucleotide
  Target: LAMA2; (-) strand; PAM type: YTN; PAM sequence: TTT
cttattttaacattctctta

SEQ ID NO: 272764 - DNA, 20 bp, Artificial Sequence
  Description of Artificial Sequence: Synthetic oligonucleotide
  Target: LAMA2; (-) strand; PAM type: YTN; PAM sequence: TTT
tcttattttaacattctctt

SEQ ID NO: 272765 - DNA, 20 bp, Artificial Sequence
  Description of Artificial Sequence: Synthetic oligonucleotide
  Target: LAMA2; (-) strand; PAM type: YTN; PAM sequence: TTG
gattttcttattttaacatt

SEQ ID NO: 272766 - DNA, 20 bp, Artificial Sequence
  Description of Artificial Sequence: Synthetic oligonucleotide
  Target: LAMA2; (-) strand; PAM type: YTN; PAM sequence: CTT
ggattttcttattttaacat

SEQ ID NO: 272767 - DNA, 20 bp, Artificial Sequence
  Description of Artificial Sequence: Synthetic oligonucleotide
  Target: LAMA2; (-) strand; PAM type: YTN; PAM sequence: CTA
tcttggattttcttatttta

SEQ ID NO: 272768 - DNA, 20 bp, Artificial Sequence
  Description of Artificial Sequence: Synthetic oligonucleotide
  Target: LAMA2; (-) strand; PAM type: YTN; PAM sequence: CTC
tatcttggattttcttattt

SEQ ID NO: 272769 - DNA, 20 bp, Artificial Sequence
  Description of Artificial Sequence: Synthetic oligonucleotide
  Target: LAMA2; (-) strand; PAM type: YTN; PAM sequence: TTC
tctatcttggattttcttat

SEQ ID NO: 272770 - DNA, 20 bp, Artificial Sequence
  Description of Artificial Sequence: Synthetic oligonucleotide
  Target: LAMA2; (-) strand; PAM type: YTN; PAM sequence: TTC
attctctatcttggattttc

SEQ ID NO: 272771 - DNA, 20 bp, Artificial Sequence
  Description of Artificial Sequence: Synthetic oligonucleotide
  Target: LAMA2; (-) strand; PAM type: YTN; PAM sequence: TTT
cattctctatcttggatttt

SEQ ID NO: 272772 - DNA, 20 bp, Artificial Sequence
  Description of Artificial Sequence: Synthetic oligonucleotide
  Target: LAMA2; (-) strand; PAM type: YTN; PAM sequence: CTT
tcattctctatcttggattt

SEQ ID NO: 272773 - DNA, 20 bp, Artificial Sequence
  Description of Artificial Sequence: Synthetic oligonucleotide
  Target: LAMA2; (-) strand; PAM type: YTN; PAM sequence: TTC
ctttcattctctatcttgga

SEQ ID NO: 272774 - DNA, 20 bp, Artificial Sequence
  Description of Artificial Sequence: Synthetic oligonucleotide
  Target: LAMA2; (-) strand; PAM type: YTN; PAM sequence: CTT
cctttcattctctatcttgg

SEQ ID NO: 272775 - DNA, 20 bp, Artificial Sequence
  Description of Artificial Sequence: Synthetic oligonucleotide
  Target: LAMA2; (-) strand; PAM type: YTN; PAM sequence: TTG
tacaatcttcctttcattct

SEQ ID NO: 272776 - DNA, 20 bp, Artificial Sequence
  Description of Artificial Sequence: Synthetic oligonucleotide
  Target: LAMA2; (-) strand; PAM type: YTN; PAM sequence: CTA
atatgttgtacaatcttcct

SEQ ID NO: 272777 - DNA, 20 bp, Artificial Sequence
  Description of Artificial Sequence: Synthetic oligonucleotide
  Target: LAMA2; (-) strand; PAM type: YTN; PAM sequence: TTA
tcctaatatgttgtacaatc

SEQ ID NO: 272778 - DNA, 20 bp, Artificial Sequence
  Description of Artificial Sequence: Synthetic oligonucleotide
  Target: LAMA2; (-) strand; PAM type: YTN; PAM sequence: TTT
atcctaatatgttgtacaat

SEQ ID NO: 272779 - DNA, 20 bp, Artificial Sequence
  Description of Artificial Sequence: Synthetic oligonucleotide
  Target: LAMA2; (-) strand; PAM type: YTN; PAM sequence: CTC
atttatcctaatatgttgta

SEQ ID NO: 272780 - DNA, 20 bp, Artificial Sequence
  Description of Artificial Sequence: Synthetic oligonucleotide
  Target: LAMA2; (-) strand; PAM type: YTN; PAM sequence: TTC
tcatttatcctaatatgttg

SEQ ID NO: 272781 - DNA, 20 bp, Artificial Sequence
  Description of Artificial Sequence: Synthetic oligonucleotide
  Target: LAMA2; (-) strand; PAM type: YTN; PAM sequence: CTT
ctcatttatcctaatatgtt

SEQ ID NO: 272782 - DNA, 20 bp, Artificial Sequence
  Description of Artificial Sequence: Synthetic oligonucleotide
  Target: LAMA2; (-) strand; PAM type: YTN; PAM sequence: TTG
acaaataacttctcatttat

SEQ ID NO: 272783 - DNA, 20 bp, Artificial Sequence
  Description of Artificial Sequence: Synthetic oligonucleotide
  Target: LAMA2; (-) strand; PAM type: YTN; PAM sequence: TTT
gacaaataacttctcattta

SEQ ID NO: 272784 - DNA, 20 bp, Artificial Sequence
  Description of Artificial Sequence: Synthetic oligonucleotide
  Target: LAMA2; (-) strand; PAM type: YTN; PAM sequence: TTG
agtatttgacaaataacttc

SEQ ID NO: 272785 - DNA, 20 bp, Artificial Sequence
  Description of Artificial Sequence: Synthetic oligonucleotide
  Target: LAMA2; (-) strand; PAM type: YTN; PAM sequence: TTT
gagtatttgacaaataactt

SEQ ID NO: 272786 - DNA, 20 bp, Artificial Sequence
  Description of Artificial Sequence: Synthetic oligonucleotide
  Target: LAMA2; (-) strand; PAM type: YTN; PAM sequence: CTT
tgagtatttgacaaataact

SEQ ID NO: 272787 - DNA, 20 bp, Artificial Sequence
  Description of Artificial Sequence: Synthetic oligonucleotide
  Target: LAMA2; (-) strand; PAM type: YTN; PAM sequence: TTG
tcctttgagtatttgacaaa

SEQ ID NO: 272788 - DNA, 20 bp, Artificial Sequence
  Description of Artificial Sequence: Synthetic oligonucleotide
  Target: LAMA2; (-) strand; PAM type: YTN; PAM sequence: CTT
gtcctttgagtatttgacaa

SEQ ID NO: 272789 - DNA, 20 bp, Artificial Sequence
  Description of Artificial Sequence: Synthetic oligonucleotide
  Target: LAMA2; (-) strand; PAM type: YTN; PAM sequence: TTA
tcttgtcctttgagtatttg

SEQ ID NO: 272790 - DNA, 20 bp, Artificial Sequence
  Description of Artificial Sequence: Synthetic oligonucleotide
  Target: LAMA2; (-) strand; PAM type: YTN; PAM sequence: CTA
ttatcttgtcctttgagtat

SEQ ID NO: 272791 - DNA, 20 bp, Artificial Sequence
  Description of Artificial Sequence: Synthetic oligonucleotide
  Target: LAMA2; (-) strand; PAM type: YTN; PAM sequence: TTC
actattatcttgtcctttga

SEQ ID NO: 272792 - DNA, 20 bp, Artificial Sequence
  Description of Artificial Sequence: Synthetic oligonucleotide
  Target: LAMA2; (-) strand; PAM type: YTN; PAM sequence: TTA
ttcactattatcttgtcctt

SEQ ID NO: 272793 - DNA, 20 bp, Artificial Sequence
  Description of Artificial Sequence: Synthetic oligonucleotide
  Target: LAMA2; (-) strand; PAM type: YTN; PAM sequence: CTT
attcactattatcttgtcct

SEQ ID NO: 272794 - DNA, 20 bp, Artificial Sequence
  Description of Artificial Sequence: Synthetic oligonucleotide
  Target: LAMA2; (-) strand; PAM type: YTN; PAM sequence: TTC
ttattcactattatcttgtc

SEQ ID NO: 272795 - DNA, 20 bp, Artificial Sequence
  Description of Artificial Sequence: Synthetic oligonucleotide
  Target: LAMA2; (-) strand; PAM type: YTN; PAM sequence: CTT
cttattcactattatcttgt

SEQ ID NO: 272796 - DNA, 20 bp, Artificial Sequence
  Description of Artificial Sequence: Synthetic oligonucleotide
  Target: LAMA2; (-) strand; PAM type: YTN; PAM sequence: TTC
ttcttattcactattatctt

SEQ ID NO: 272797 - DNA, 20 bp, Artificial Sequence
  Description of Artificial Sequence: Synthetic oligonucleotide
  Target: LAMA2; (-) strand; PAM type: YTN; PAM sequence: CTT
cttcttattcactattatct

SEQ ID NO: 272798 - DNA, 20 bp, Artificial Sequence
  Description of Artificial Sequence: Synthetic oligonucleotide
  Target: LAMA2; (-) strand; PAM type: YTN; PAM sequence: TTA
gtcatccttcttcttattca

SEQ ID NO: 272799 - DNA, 20 bp, Artificial Sequence
  Description of Artificial Sequence: Synthetic oligonucleotide
  Target: LAMA2; (-) strand; PAM type: YTN; PAM sequence: CTT
agtcatccttcttcttattc

SEQ ID NO: 272800 - DNA, 20 bp, Artificial Sequence
  Description of Artificial Sequence: Synthetic oligonucleotide
  Target: LAMA2; (-) strand; PAM type: YTN; PAM sequence: CTC
ttagtcatccttcttcttat

SEQ ID NO: 272801 - DNA, 20 bp, Artificial Sequence
  Description of Artificial Sequence: Synthetic oligonucleotide
  Target: LAMA2; (-) strand; PAM type: YTN; PAM sequence: CTC
catctcttagtcatccttct

SEQ ID NO: 272802 - DNA, 20 bp, Artificial Sequence
  Description of Artificial Sequence: Synthetic oligonucleotide
  Target: LAMA2; (-) strand; PAM type: YTN; PAM sequence: TTA
ccatctccatctcttagtca

SEQ ID NO: 272803 - DNA, 20 bp, Artificial Sequence
  Description of Artificial Sequence: Synthetic oligonucleotide
  Target: LAMA2; (-) strand; PAM type: YTN; PAM sequence: TTA
aattaccatctccatctctt

SEQ ID NO: 272804 - DNA, 20 bp, Artificial Sequence
  Description of Artificial Sequence: Synthetic oligonucleotide
  Target: LAMA2; (-) strand; PAM type: YTN; PAM sequence: TTA
ttaaattaccatctccatct

SEQ ID NO: 272805 - DNA, 20 bp, Artificial Sequence
  Description of Artificial Sequence: Synthetic oligonucleotide
  Target: LAMA2; (-) strand; PAM type: YTN; PAM sequence: TTT
attaaattaccatctccatc

SEQ ID NO: 272806 - DNA, 20 bp, Artificial Sequence
  Description of Artificial Sequence: Synthetic oligonucleotide
  Target: LAMA2; (-) strand; PAM type: YTN; PAM sequence: TTT
tattaaattaccatctccat

SEQ ID NO: 272807 - DNA, 20 bp, Artificial Sequence
  Description of Artificial Sequence: Synthetic oligonucleotide
  Target: LAMA2; (-) strand; PAM type: YTN; PAM sequence: CTG
tgttttattaaattaccatc

SEQ ID NO: 272808 - DNA, 20 bp, Artificial Sequence
  Description of Artificial Sequence: Synthetic oligonucleotide
  Target: LAMA2; (-) strand; PAM type: YTN; PAM sequence: TTC
tgtgttttattaaattacca

SEQ ID NO: 272809 - DNA, 20 bp, Artificial Sequence
  Description of Artificial Sequence: Synthetic oligonucleotide
  Target: LAMA2; (-) strand; PAM type: YTN; PAM sequence: TTT
ctgtgttttattaaattacc

SEQ ID NO: 272810 - DNA, 20 bp, Artificial Sequence
  Description of Artificial Sequence: Synthetic oligonucleotide
  Target: LAMA2; (-) strand; PAM type: YTN; PAM sequence: CTT
tctgtgttttattaaattac

SEQ ID NO: 272811 - DNA, 20 bp, Artificial Sequence
  Description of Artificial Sequence: Synthetic oligonucleotide
  Target: LAMA2; (-) strand; PAM type: YTN; PAM sequence: CTC
tttctgtgttttattaaatt

SEQ ID NO: 272812 - DNA, 20 bp, Artificial Sequence
  Description of Artificial Sequence: Synthetic oligonucleotide
  Target: LAMA2; (-) strand; PAM type: YTN; PAM sequence: TTG
gctctttctgtgttttatta

SEQ ID NO: 272813 - DNA, 20 bp, Artificial Sequence
  Description of Artificial Sequence: Synthetic oligonucleotide
  Target: LAMA2; (-) strand; PAM type: YTN; PAM sequence: TTT
ggctctttctgtgttttatt

SEQ ID NO: 272814 - DNA, 20 bp, Artificial Sequence
  Description of Artificial Sequence: Synthetic oligonucleotide
  Target: LAMA2; (-) strand; PAM type: YTN; PAM sequence: TTC
agtttggctctttctgtgtt

SEQ ID NO: 272815 - DNA, 20 bp, Artificial Sequence
  Description of Artificial Sequence: Synthetic oligonucleotide
  Target: LAMA2; (-) strand; PAM type: YTN; PAM sequence: CTG
attcagtttggctctttctg

SEQ ID NO: 272816 - DNA, 20 bp, Artificial Sequence
  Description of Artificial Sequence: Synthetic oligonucleotide
  Target: LAMA2; (-) strand; PAM type: YTN; PAM sequence: CTG
tctgattcagtttggctctt

SEQ ID NO: 272817 - DNA, 20 bp, Artificial Sequence
  Description of Artificial Sequence: Synthetic oligonucleotide
  Target: LAMA2; (-) strand; PAM type: YTN; PAM sequence: CTA
tctgtctgattcagtttggc

SEQ ID NO: 272818 - DNA, 20 bp, Artificial Sequence
  Description of Artificial Sequence: Synthetic oligonucleotide
  Target: LAMA2; (-) strand; PAM type: YTN; PAM sequence: CTA
catgataggaactatctgtc

SEQ ID NO: 272819 - DNA, 20 bp, Artificial Sequence
  Description of Artificial Sequence: Synthetic oligonucleotide
  Target: LAMA2; (-) strand; PAM type: YTN; PAM sequence: CTA
aatactacatgataggaact

SEQ ID NO: 272820 - DNA, 20 bp, Artificial Sequence
  Description of Artificial Sequence: Synthetic oligonucleotide
  Target: LAMA2; (-) strand; PAM type: YTN; PAM sequence: TTA
tgaatgaatgctaaatacta

SEQ ID NO: 272821 - DNA, 20 bp, Artificial Sequence
  Description of Artificial Sequence: Synthetic oligonucleotide
  Target: LAMA2; (-) strand; PAM type: YTN; PAM sequence: TTG
ataatgttatgaatgaatgc

SEQ ID NO: 272822 - DNA, 20 bp, Artificial Sequence
  Description of Artificial Sequence: Synthetic oligonucleotide
  Target: LAMA2; (-) strand; PAM type: YTN; PAM sequence: CTA
ttgataatgttatgaatgaa

SEQ ID NO: 272823 - DNA, 20 bp, Artificial Sequence
  Description of Artificial Sequence: Synthetic oligonucleotide
  Target: LAMA2; (-) strand; PAM type: YTN; PAM sequence: CTC
acccaggacaggctattgat

SEQ ID NO: 272824 - DNA, 20 bp, Artificial Sequence
  Description of Artificial Sequence: Synthetic oligonucleotide
  Target: LAMA2; (-) strand; PAM type: YTN; PAM sequence: TTC
acaaaaatcaatctcaccca

SEQ ID NO: 272825 - DNA, 20 bp, Artificial Sequence
  Description of Artificial Sequence: Synthetic oligonucleotide
  Target: LAMA2; (-) strand; PAM type: YTN; PAM sequence: CTG
ccaaagcaaaattcacaaaa

SEQ ID NO: 272826 - DNA, 20 bp, Artificial Sequence
  Description of Artificial Sequence: Synthetic oligonucleotide
  Target: LAMA2; (-) strand; PAM type: YTN; PAM sequence: CTA
tgggtagtggtgatagatag

SEQ ID NO: 272827 - DNA, 20 bp, Artificial Sequence
  Description of Artificial Sequence: Synthetic oligonucleotide
  Target: LAMA2; (-) strand; PAM type: YTN; PAM sequence: CTA
tcacctatgggtagtggtga

SEQ ID NO: 272828 - DNA, 20 bp, Artificial Sequence
  Description of Artificial Sequence: Synthetic oligonucleotide
  Target: LAMA2; (-) strand; PAM type: YTN; PAM sequence: CTA
tgacaaatgcactatcacct

SEQ ID NO: 272829 - DNA, 20 bp, Artificial Sequence
  Description of Artificial Sequence: Synthetic oligonucleotide
  Target: LAMA2; (-) strand; PAM type: YTN; PAM sequence: TTC
ataaagaagcctatgacaaa

SEQ ID NO: 272830 - DNA, 20 bp, Artificial Sequence
  Description of Artificial Sequence: Synthetic oligonucleotide
  Target: LAMA2; (-) strand; PAM type: YTN; PAM sequence: CTT
cataaagaagcctatgacaa

SEQ ID NO: 272831 - DNA, 20 bp, Artificial Sequence
  Description of Artificial Sequence: Synthetic oligonucleotide
  Target: LAMA2; (-) strand; PAM type: YTN; PAM sequence: CTG
gtcaaaaatacccacgagag

SEQ ID NO: 272832 - DNA, 20 bp, Artificial Sequence
  Description of Artificial Sequence: Synthetic oligonucleotide
  Target: LAMA2; (-) strand; PAM type: YTN; PAM sequence: TTC
accctggtcaaaaataccca

SEQ ID NO: 272833 - DNA, 20 bp, Artificial Sequence
  Description of Artificial Sequence: Synthetic oligonucleotide
  Target: LAMA2; (-) strand; PAM type: YTN; PAM sequence: TTG
aagattcaccctggtcaaaa

SEQ ID NO: 272834 - DNA, 20 bp, Artificial Sequence
  Description of Artificial Sequence: Synthetic oligonucleotide
  Target: LAMA2; (-) strand; PAM type: YTN; PAM sequence: TTA
agttgaagattcaccctggt

SEQ ID NO: 272835 - DNA, 20 bp, Artificial Sequence
  Description of Artificial Sequence: Synthetic oligonucleotide
  Target: LAMA2; (-) strand; PAM type: YTN; PAM sequence: TTA
cacagtaattaagttgaaga

SEQ ID NO: 272836 - DNA, 20 bp, Artificial Sequence
  Description of Artificial Sequence: Synthetic oligonucleotide
  Target: LAMA2; (-) strand; PAM type: YTN; PAM sequence: CTC
attacacagtaattaagttg

SEQ ID NO: 272837 - DNA, 20 bp, Artificial Sequence
  Description of Artificial Sequence: Synthetic oligonucleotide
  Target: LAMA2; (-) strand; PAM type: YTN; PAM sequence: TTA
aaaatcatgtctcattacac

SEQ ID NO: 272838 - DNA, 20 bp, Artificial Sequence
  Description of Artificial Sequence: Synthetic oligonucleotide
  Target: LAMA2; (-) strand; PAM type: YTN; PAM sequence: TTT
aaaaatcatgtctcattaca

SEQ ID NO: 272839 - DNA, 20 bp, Artificial Sequence
  Description of Artificial Sequence: Synthetic oligonucleotide
  Target: LAMA2; (-) strand; PAM type: YTN; PAM sequence: TTT
taaaaatcatgtctcattac

SEQ ID NO: 272840 - DNA, 20 bp, Artificial Sequence
  Description of Artificial Sequence: Synthetic oligonucleotide
  Target: LAMA2; (-) strand; PAM type: YTN; PAM sequence: TTT
ttaaaaatcatgtctcatta

SEQ ID NO: 272841 - DNA, 20 bp, Artificial Sequence
  Description of Artificial Sequence: Synthetic oligonucleotide
  Target: LAMA2; (-) strand; PAM type: YTN; PAM sequence: CTA
gatatatttttaaaaatcat

SEQ ID NO: 272842 - DNA, 20 bp, Artificial Sequence
  Description of Artificial Sequence: Synthetic oligonucleotide
  Target: LAMA2; (-) strand; PAM type: YTN; PAM sequence: TTC
aaaatcatatcagaacatca

SEQ ID NO: 272843 - DNA, 20 bp, Artificial Sequence
  Description of Artificial Sequence: Synthetic oligonucleotide
  Target: LAMA2; (-) strand; PAM type: YTN; PAM sequence: TTT
caaaatcatatcagaacatc

SEQ ID NO: 272844 - DNA, 20 bp, Artificial Sequence
  Description of Artificial Sequence: Synthetic oligonucleotide
  Target: LAMA2; (-) strand; PAM type: YTN; PAM sequence: TTA
acacatttcaaaatcatatc

SEQ ID NO: 272845 - DNA, 20 bp, Artificial Sequence
  Description of Artificial Sequence: Synthetic oligonucleotide
  Target: LAMA2; (-) strand; PAM type: YTN; PAM sequence: TTC
agtcaattaacacatttcaa

SEQ ID NO: 272846 - DNA, 20 bp, Artificial Sequence
  Description of Artificial Sequence: Synthetic oligonucleotide
  Target: LAMA2; (-) strand; PAM type: YTN; PAM sequence: TTT
cagtcaattaacacatttca

SEQ ID NO: 272847 - DNA, 20 bp, Artificial Sequence
  Description of Artificial Sequence: Synthetic oligonucleotide
  Target: LAMA2; (-) strand; PAM type: YTN; PAM sequence: CTT
tcagtcaattaacacatttc

SEQ ID NO: 272848 - DNA, 20 bp, Artificial Sequence
  Description of Artificial Sequence: Synthetic oligonucleotide
  Target: LAMA2; (-) strand; PAM type: YTN; PAM sequence: TTG
actttcagtcaattaacaca

SEQ ID NO: 272849 - DNA, 20 bp, Artificial Sequence
  Description of Artificial Sequence: Synthetic oligonucleotide
  Target: LAMA2; (-) strand; PAM type: YTN; PAM sequence: TTT
gactttcagtcaattaacac

SEQ ID NO: 272850 - DNA, 20 bp, Artificial Sequence
  Description of Artificial Sequence: Synthetic oligonucleotide
  Target: LAMA2; (-) strand; PAM type: YTN; PAM sequence: TTT
tgactttcagtcaattaaca

SEQ ID NO: 272851 - DNA, 20 bp, Artificial Sequence
  Description of Artificial Sequence: Synthetic oligonucleotide
  Target: LAMA2; (-) strand; PAM type: YTN; PAM sequence: TTA
agtatataagttttgacttt

SEQ ID NO: 272852 - DNA, 20 bp, Artificial Sequence
  Description of Artificial Sequence: Synthetic oligonucleotide
  Target: LAMA2; (-) strand; PAM type: YTN; PAM sequence: TTT
aagtatataagttttgactt

SEQ ID NO: 272853 - DNA, 20 bp, Artificial Sequence
  Description of Artificial Sequence: Synthetic oligonucleotide
  Target: LAMA2; (-) strand; PAM type: YTN; PAM sequence: CTT
taagtatataagttttgact

SEQ ID NO: 272854 - DNA, 20 bp, Artificial Sequence
  Description of Artificial Sequence: Synthetic oligonucleotide
  Target: LAMA2; (-) strand; PAM type: YTN; PAM sequence: TTA
atgtatactttaagtatata

SEQ ID NO: 272855 - DNA, 20 bp, Artificial Sequence
  Description of Artificial Sequence: Synthetic oligonucleotide
  Target: LAMA2; (-) strand; PAM type: YTN; PAM sequence: CTC
cagttaatgtatactttaag

SEQ ID NO: 272856 - DNA, 20 bp, Artificial Sequence
  Description of Artificial Sequence: Synthetic oligonucleotide
  Target: LAMA2; (-) strand; PAM type: YTN; PAM sequence: CTG
ctccagttaatgtatacttt

SEQ ID NO: 272857 - DNA, 20 bp, Artificial Sequence
  Description of Artificial Sequence: Synthetic oligonucleotide
  Target: LAMA2; (-) strand; PAM type: YTN; PAM sequence: CTA
ggtgagtggaggacactgct

SEQ ID NO: 272858 - DNA, 20 bp, Artificial Sequence
  Description of Artificial Sequence: Synthetic oligonucleotide
  Target: LAMA2; (-) strand; PAM type: YTN; PAM sequence: TTC
taggtgagtggaggacactg

SEQ ID NO: 272859 - DNA, 20 bp, Artificial Sequence
  Description of Artificial Sequence: Synthetic oligonucleotide
  Target: LAMA2; (-) strand; PAM type: YTN; PAM sequence: CTG
gagtattctaggtgagtgga

SEQ ID NO: 272860 - DNA, 20 bp, Artificial Sequence
  Description of Artificial Sequence: Synthetic oligonucleotide
  Target: LAMA2; (-) strand; PAM type: YTN; PAM sequence: CTA
acatccagaaagagtagtaa

SEQ ID NO: 272861 - DNA, 20 bp, Artificial Sequence
  Description of Artificial Sequence: Synthetic oligonucleotide
  Target: LAMA2; (-) strand; PAM type: YTN; PAM sequence: TTG
gctaacatccagaaagagta

SEQ ID NO: 272862 - DNA, 20 bp, Artificial Sequence
  Description of Artificial Sequence: Synthetic oligonucleotide
  Target: LAMA2; (-) strand; PAM type: YTN; PAM sequence: TTT
ggctaacatccagaaagagt

SEQ ID NO: 272863 - DNA, 20 bp, Artificial Sequence
  Description of Artificial Sequence: Synthetic oligonucleotide
  Target: LAMA2; (-) strand; PAM type: YTN; PAM sequence: TTG
tgtttggctaacatccagaa

SEQ ID NO: 272864 - DNA, 20 bp, Artificial Sequence
  Description of Artificial Sequence: Synthetic oligonucleotide
  Target: LAMA2; (-) strand; PAM type: YTN; PAM sequence: TTT
gtgtttggctaacatccaga

SEQ ID NO: 272865 - DNA, 20 bp, Artificial Sequence
  Description of Artificial Sequence: Synthetic oligonucleotide
  Target: LAMA2; (-) strand; PAM type: YTN; PAM sequence: TTT
tgtgtttggctaacatccag

SEQ ID NO: 272866 - DNA, 20 bp, Artificial Sequence
  Description of Artificial Sequence: Synthetic oligonucleotide
  Target: LAMA2; (-) strand; PAM type: YTN; PAM sequence: CTA
ttttgtgtttggctaacatc

SEQ ID NO: 272867 - DNA, 20 bp, Artificial Sequence
  Description of Artificial Sequence: Synthetic oligonucleotide
  Target: LAMA2; (-) strand; PAM type: YTN; PAM sequence: TTG
tacccaacactattttgtgt

SEQ ID NO: 272868 - DNA, 20 bp, Artificial Sequence
  Description of Artificial Sequence: Synthetic oligonucleotide
  Target: LAMA2; (-) strand; PAM type: YTN; PAM sequence: TTT
gtacccaacactattttgtg

SEQ ID NO: 272869 - DNA, 20 bp, Artificial Sequence
  Description of Artificial Sequence: Synthetic oligonucleotide
  Target: LAMA2; (-) strand; PAM type: YTN; PAM sequence: TTG
tttgtacccaacactatttt

SEQ ID NO: 272870 - DNA, 20 bp, Artificial Sequence
  Description of Artificial Sequence: Synthetic oligonucleotide
  Target: LAMA2; (-) strand; PAM type: YTN; PAM sequence: TTT
gtttgtacccaacactattt

SEQ ID NO: 272871 - DNA, 20 bp, Artificial Sequence
  Description of Artificial Sequence: Synthetic oligonucleotide
  Target: LAMA2; (-) strand; PAM type: YTN; PAM sequence: TTT
tgtttgtacccaacactatt

SEQ ID NO: 272872 - DNA, 20 bp, Artificial Sequence
  Description of Artificial Sequence: Synthetic oligonucleotide
  Target: LAMA2; (-) strand; PAM type: YTN; PAM sequence: TTA
tattttgtttgtacccaaca

SEQ ID NO: 272873 - DNA, 20 bp, Artificial Sequence
  Description of Artificial Sequence: Synthetic oligonucleotide
  Target: LAMA2; (-) strand; PAM type: YTN; PAM sequence: CTT
atattttgtttgtacccaac

SEQ ID NO: 272874 - DNA, 20 bp, Artificial Sequence
  Description of Artificial Sequence: Synthetic oligonucleotide
  Target: LAMA2; (-) strand; PAM type: YTN; PAM sequence: CTC
acagacttatattttgtttg

SEQ ID NO: 272875 - DNA, 20 bp, Artificial Sequence
  Description of Artificial Sequence: Synthetic oligonucleotide
  Target: LAMA2; (-) strand; PAM type: YTN; PAM sequence: TTG
tctcacagacttatattttg

SEQ ID NO: 272876 - DNA, 20 bp, Artificial Sequence
  Description of Artificial Sequence: Synthetic oligonucleotide
  Target: LAMA2; (-) strand; PAM type: YTN; PAM sequence: TTT
gtctcacagacttatatttt

SEQ ID NO: 272877 - DNA, 20 bp, Artificial Sequence
  Description of Artificial Sequence: Synthetic oligonucleotide
  Target: LAMA2; (-) strand; PAM type: YTN; PAM sequence: TTT
tgtctcacagacttatattt

SEQ ID NO: 272878 - DNA, 20 bp, Artificial Sequence
  Description of Artificial Sequence: Synthetic oligonucleotide
  Target: LAMA2; (-) strand; PAM type: YTN; PAM sequence: TTT
ttgtctcacagacttatatt

SEQ ID NO: 272879 - DNA, 20 bp, Artificial Sequence
  Description of Artificial Sequence: Synthetic oligonucleotide
  Target: LAMA2; (-) strand; PAM type: YTN; PAM sequence: TTT
tttgtctcacagacttatat

SEQ ID NO: 272880 - DNA, 20 bp, Artificial Sequence
  Description of Artificial Sequence: Synthetic oligonucleotide
  Target: LAMA2; (-) strand; PAM type: YTN; PAM sequence: TTT
ttttgtctcacagacttata

SEQ ID NO: 272881 - DNA, 20 bp, Artificial Sequence
  Description of Artificial Sequence: Synthetic oligonucleotide
  Target: LAMA2; (-) strand; PAM type: YTN; PAM sequence: TTT
tttttgtctcacagacttat

SEQ ID NO: 272882 - DNA, 20 bp, Artificial Sequence
  Description of Artificial Sequence: Synthetic oligonucleotide
  Target: LAMA2; (-) strand; PAM type: YTN; PAM sequence: TTT
ttttttgtctcacagactta

SEQ ID NO: 272883 - DNA, 20 bp, Artificial Sequence
  Description of Artificial Sequence: Synthetic oligonucleotide
  Target: LAMA2; (-) strand; PAM type: YTN; PAM sequence: CTT
tttttttgtctcacagactt

SEQ ID NO: 272884 - DNA, 20 bp, Artificial Sequence
  Description of Artificial Sequence: Synthetic oligonucleotide
  Target: LAMA2; (-) strand; PAM type: YTN; PAM sequence: TTG
gagatgaaatacactttttt

SEQ ID NO: 272885 - DNA, 20 bp, Artificial Sequence
  Description of Artificial Sequence: Synthetic oligonucleotide
  Target: LAMA2; (-) strand; PAM type: YTN; PAM sequence: TTA
catgtacagggaattggaga

SEQ ID NO: 272886 - DNA, 20 bp, Artificial Sequence
  Description of Artificial Sequence: Synthetic oligonucleotide
  Target: LAMA2; (-) strand; PAM type: YTN; PAM sequence: CTT
acatgtacagggaattggag

SEQ ID NO: 272887 - DNA, 20 bp, Artificial Sequence
  Description of Artificial Sequence: Synthetic oligonucleotide
  Target: LAMA2; (-) strand; PAM type: YTN; PAM sequence: CTG
aacttacatgtacagggaat

SEQ ID NO: 272888 - DNA, 20 bp, Artificial Sequence
  Description of Artificial Sequence: Synthetic oligonucleotide
  Target: LAMA2; (-) strand; PAM type: YTN; PAM sequence: TTA
tctgaacttacatgtacagg

SEQ ID NO: 272889 - DNA, 20 bp, Artificial Sequence
  Description of Artificial Sequence: Synthetic oligonucleotide
  Target: LAMA2; (-) strand; PAM type: YTN; PAM sequence: CTT
atctgaacttacatgtacag

SEQ ID NO: 272890 - DNA, 20 bp, Artificial Sequence
  Description of Artificial Sequence: Synthetic oligonucleotide
  Target: LAMA2; (-) strand; PAM type: YTN; PAM sequence: TTA
agtaacttatctgaacttac

SEQ ID NO: 272891 - DNA, 20 bp, Artificial Sequence
  Description of Artificial Sequence: Synthetic oligonucleotide
  Target: LAMA2; (-) strand; PAM type: YTN; PAM sequence: TTA
cacaggtgaaaaggaaggta

SEQ ID NO: 272892 - DNA, 20 bp, Artificial Sequence
  Description of Artificial Sequence: Synthetic oligonucleotide
  Target: LAMA2; (-) strand; PAM type: YTN; PAM sequence: TTT
acacaggtgaaaaggaaggt

SEQ ID NO: 272893 - DNA, 20 bp, Artificial Sequence
  Description of Artificial Sequence: Synthetic oligonucleotide
  Target: LAMA2; (-) strand; PAM type: YTN; PAM sequence: TTT
tacacaggtgaaaaggaagg

SEQ ID NO: 272894 - DNA, 20 bp, Artificial Sequence
  Description of Artificial Sequence: Synthetic oligonucleotide
  Target: LAMA2; (-) strand; PAM type: YTN; PAM sequence: TTT
ttacacaggtgaaaaggaag

SEQ ID NO: 272895 - DNA, 20 bp, Artificial Sequence
  Description of Artificial Sequence: Synthetic oligonucleotide
  Target: LAMA2; (-) strand; PAM type: YTN; PAM sequence: CTT
tttacacaggtgaaaaggaa

SEQ ID NO: 272896 - DNA, 20 bp, Artificial Sequence
  Description of Artificial Sequence: Synthetic oligonucleotide
  Target: LAMA2; (-) strand; PAM type: YTN; PAM sequence: CTC
tttttacacaggtgaaaagg

SEQ ID NO: 272897 - DNA, 20 bp, Artificial Sequence
  Description of Artificial Sequence: Synthetic oligonucleotide
  Target: LAMA2; (-) strand; PAM type: YTN; PAM sequence: TTA
gagatatatagaaggcatca

SEQ ID NO: 272898 - DNA, 20 bp, Artificial Sequence
  Description of Artificial Sequence: Synthetic oligonucleotide
  Target: LAMA2; (-) strand; PAM type: YTN; PAM sequence: TTT
agagatatatagaaggcatc

SEQ ID NO: 272899 - DNA, 20 bp, Artificial Sequence
  Description of Artificial Sequence: Synthetic oligonucleotide
  Target: LAMA2; (-) strand; PAM type: YTN; PAM sequence: CTG
aatttagagatatatagaag

SEQ ID NO: 272900 - DNA, 20 bp, Artificial Sequence
  Description of Artificial Sequence: Synthetic oligonucleotide
  Target: LAMA2; (-) strand; PAM type: YTN; PAM sequence: TTC
ctgaatttagagatatatag

SEQ ID NO: 272901 - DNA, 20 bp, Artificial Sequence
  Description of Artificial Sequence: Synthetic oligonucleotide
  Target: LAMA2; (-) strand; PAM type: YTN; PAM sequence: CTT
cctgaatttagagatatata

SEQ ID NO: 272902 - DNA, 20 bp, Artificial Sequence
  Description of Artificial Sequence: Synthetic oligonucleotide
  Target: LAMA2; (-) strand; PAM type: YTN; PAM sequence: CTC
ttcctgaatttagagatata

SEQ ID NO: 272903 - DNA, 20 bp, Artificial Sequence
  Description of Artificial Sequence: Synthetic oligonucleotide
  Target: LAMA2; (-) strand; PAM type: YTN; PAM sequence: TTA
ctcttcctgaatttagagat

SEQ ID NO: 272904 - DNA, 20 bp, Artificial Sequence
  Description of Artificial Sequence: Synthetic oligonucleotide
  Target: LAMA2; (-) strand; PAM type: YTN; PAM sequence: CTT
actcttcctgaatttagaga

SEQ ID NO: 272905 - DNA, 20 bp, Artificial Sequence
  Description of Artificial Sequence: Synthetic oligonucleotide
  Target: LAMA2; (-) strand; PAM type: YTN; PAM sequence: CTC
acttactcttcctgaattta

SEQ ID NO: 272906 - DNA, 20 bp, Artificial Sequence
  Description of Artificial Sequence: Synthetic oligonucleotide
  Target: LAMA2; (-) strand; PAM type: YTN; PAM sequence: CTC
gtgtgtctcacttactcttc

SEQ ID NO: 272907 - DNA, 20 bp, Artificial Sequence
  Description of Artificial Sequence: Synthetic oligonucleotide
  Target: LAMA2; (-) strand; PAM type: YTN; PAM sequence: CTC
tcgtgtgtctcacttactct

SEQ ID NO: 272908 - DNA, 20 bp, Artificial Sequence
  Description of Artificial Sequence: Synthetic oligonucleotide
  Target: LAMA2; (-) strand; PAM type: YTN; PAM sequence: TTA
cagcactctcgtgtgtctca

SEQ ID NO: 272909 - DNA, 20 bp, Artificial Sequence
  Description of Artificial Sequence: Synthetic oligonucleotide
  Target: LAMA2; (-) strand; PAM type: YTN; PAM sequence: CTT
acagcactctcgtgtgtctc

SEQ ID NO: 272910 - DNA, 20 bp, Artificial Sequence
  Description of Artificial Sequence: Synthetic oligonucleotide
  Target: LAMA2; (-) strand; PAM type: YTN; PAM sequence: TTG
caaaggcttacagcactctc

SEQ ID NO: 272911 - DNA, 20 bp, Artificial Sequence
  Description of Artificial Sequence: Synthetic oligonucleotide
  Target: LAMA2; (-) strand; PAM type: YTN; PAM sequence: TTT
gcaaaggcttacagcactct

SEQ ID NO: 272912 - DNA, 20 bp, Artificial Sequence
  Description of Artificial Sequence: Synthetic oligonucleotide
  Target: LAMA2; (-) strand; PAM type: YTN; PAM sequence: TTA
tatacatgtttgcaaaggct

SEQ ID NO: 272913 - DNA, 20 bp, Artificial Sequence
  Description of Artificial Sequence: Synthetic oligonucleotide
  Target: LAMA2; (-) strand; PAM type: YTN; PAM sequence: TTT
atatacatgtttgcaaaggc

SEQ ID NO: 272914 - DNA, 20 bp, Artificial Sequence
  Description of Artificial Sequence: Synthetic oligonucleotide
  Target: LAMA2; (-) strand; PAM type: YTN; PAM sequence: TTA
tgccaaatttatatacatgt

SEQ ID NO: 272915 - DNA, 20 bp, Artificial Sequence
  Description of Artificial Sequence: Synthetic oligonucleotide
  Target: LAMA2; (-) strand; PAM type: YTN; PAM sequence: TTG
tgaatagttatgccaaattt

SEQ ID NO: 272916 - DNA, 20 bp, Artificial Sequence
  Description of Artificial Sequence: Synthetic oligonucleotide
  Target: LAMA2; (-) strand; PAM type: YTN; PAM sequence: CTA
ttgtgaatagttatgccaaa

SEQ ID NO: 272917 - DNA, 20 bp, Artificial Sequence
  Description of Artificial Sequence: Synthetic oligonucleotide
  Target: LAMA2; (-) strand; PAM type: YTN; PAM sequence: TTG
ctattgtgaatagttatgcc

SEQ ID NO: 272918 - DNA, 20 bp, Artificial Sequence
  Description of Artificial Sequence: Synthetic oligonucleotide
  Target: LAMA2; (-) strand; PAM type: YTN; PAM sequence: TTT
gctattgtgaatagttatgc

SEQ ID NO: 272919 - DNA, 20 bp, Artificial Sequence
  Description of Artificial Sequence: Synthetic oligonucleotide
  Target: LAMA2; (-) strand; PAM type: YTN; PAM sequence: CTT
tgctattgtgaatagttatg

SEQ ID NO: 272920 - DNA, 20 bp, Artificial Sequence
  Description of Artificial Sequence: Synthetic oligonucleotide
  Target: LAMA2; (-) strand; PAM type: YTN; PAM sequence: TTC
catgtctttgctattgtgaa

SEQ ID NO: 272921 - DNA, 20 bp, Artificial Sequence
  Description of Artificial Sequence: Synthetic oligonucleotide
  Target: LAMA2; (-) strand; PAM type: YTN; PAM sequence: TTG
attccatgtctttgctattg

SEQ ID NO: 272922 - DNA, 20 bp, Artificial Sequence
  Description of Artificial Sequence: Synthetic oligonucleotide
  Target: LAMA2; (-) strand; PAM type: YTN; PAM sequence: TTA
ggttgattccatgtctttgc

SEQ ID NO: 272923 - DNA, 20 bp, Artificial Sequence
  Description of Artificial Sequence: Synthetic oligonucleotide
  Target: LAMA2; (-) strand; PAM type: YTN; PAM sequence: CTT
aggttgattccatgtctttg

SEQ ID NO: 272924 - DNA, 20 bp, Artificial Sequence
  Description of Artificial Sequence: Synthetic oligonucleotide
  Target: LAMA2; (-) strand; PAM type: YTN; PAM sequence: TTG
atgggcacttaggttgattc

SEQ ID NO: 272925 - DNA, 20 bp, Artificial Sequence
  Description of Artificial Sequence: Synthetic oligonucleotide
  Target: LAMA2; (-) strand; PAM type: YTN; PAM sequence: TTA
ttgatgggcacttaggttga

SEQ ID NO: 272926 - DNA, 20 bp, Artificial Sequence
  Description of Artificial Sequence: Synthetic oligonucleotide
  Target: LAMA2; (-) strand; PAM type: YTN; PAM sequence: CTA
ttattgatgggcacttaggt

SEQ ID NO: 272927 - DNA, 20 bp, Artificial Sequence
  Description of Artificial Sequence: Synthetic oligonucleotide
  Target: LAMA2; (-) strand; PAM type: YTN; PAM sequence: TTA
gccagtctattattgatggg

SEQ ID NO: 272928 - DNA, 20 bp, Artificial Sequence
  Description of Artificial Sequence: Synthetic oligonucleotide
  Target: LAMA2; (-) strand; PAM type: YTN; PAM sequence: TTT
agccagtctattattgatgg

SEQ ID NO: 272929 - DNA, 20 bp, Artificial Sequence
  Description of Artificial Sequence: Synthetic oligonucleotide
  Target: LAMA2; (-) strand; PAM type: YTN; PAM sequence: CTT
tagccagtctattattgatg

SEQ ID NO: 272930 - DNA, 20 bp, Artificial Sequence
  Description of Artificial Sequence: Synthetic oligonucleotide
  Target: LAMA2; (-) strand; PAM type: YTN; PAM sequence: TTC
tttagccagtctattattga

SEQ ID NO: 272931 - DNA, 20 bp, Artificial Sequence
  Description of Artificial Sequence: Synthetic oligonucleotide
  Target: LAMA2; (-) strand; PAM type: YTN; PAM sequence: TTT
ctttagccagtctattattg

SEQ ID NO: 272932 - DNA, 20 bp, Artificial Sequence
  Description of Artificial Sequence: Synthetic oligonucleotide
  Target: LAMA2; (-) strand; PAM type: YTN; PAM sequence: TTT
tctttagccagtctattatt

SEQ ID NO: 272933 - DNA, 20 bp, Artificial Sequence
  Description of Artificial Sequence: Synthetic oligonucleotide
  Target: LAMA2; (-) strand; PAM type: YTN; PAM sequence: TTC
catggtgtgtatgtaccaca

SEQ ID NO: 272934 - DNA, 20 bp, Artificial Sequence
  Description of Artificial Sequence: Synthetic oligonucleotide
  Target: LAMA2; (-) strand; PAM type: YTN; PAM sequence: CTG
catagtattccatggtgtgt

SEQ ID NO: 272935 - DNA, 20 bp, Artificial Sequence
  Description of Artificial Sequence: Synthetic oligonucleotide
  Target: LAMA2; (-) strand; PAM type: YTN; PAM sequence: TTA
tggctgcatagtattccatg

SEQ ID NO: 272936 - DNA, 20 bp, Artificial Sequence
  Description of Artificial Sequence: Synthetic oligonucleotide
  Target: LAMA2; (-) strand; PAM type: YTN; PAM sequence: TTT
atggctgcatagtattccat

SEQ ID NO: 272937 - DNA, 20 bp, Artificial Sequence
  Description of Artificial Sequence: Synthetic oligonucleotide
  Target: LAMA2; (-) strand; PAM type: YTN; PAM sequence: TTT
tatggctgcatagtattcca

SEQ ID NO: 272938 - DNA, 20 bp, Artificial Sequence
  Description of Artificial Sequence: Synthetic oligonucleotide
  Target: LAMA2; (-) strand; PAM type: YTN; PAM sequence: TTT
ttatggctgcatagtattcc

SEQ ID NO: 272939 - DNA, 20 bp, Artificial Sequence
  Description of Artificial Sequence: Synthetic oligonucleotide
  Target: LAMA2; (-) strand; PAM type: YTN; PAM sequence: TTT
tttatggctgcatagtattc

SEQ ID NO: 272940 - DNA, 20 bp, Artificial Sequence
  Description of Artificial Sequence: Synthetic oligonucleotide
  Target: LAMA2; (-) strand; PAM type: YTN; PAM sequence: CTT
ttttatggctgcatagtatt

SEQ ID NO: 272941 - DNA, 20 bp, Artificial Sequence
  Description of Artificial Sequence: Synthetic oligonucleotide
  Target: LAMA2; (-) strand; PAM type: YTN; PAM sequence: TTC
ttttttatggctgcatagta

SEQ ID NO: 272942 - DNA, 20 bp, Artificial Sequence
  Description of Artificial Sequence: Synthetic oligonucleotide
  Target: LAMA2; (-) strand; PAM type: YTN; PAM sequence: CTC
attcttttttatggctgcat

SEQ ID NO: 272943 - DNA, 20 bp, Artificial Sequence
  Description of Artificial Sequence: Synthetic oligonucleotide
  Target: LAMA2; (-) strand; PAM type: YTN; PAM sequence: CTG
caaaggacatgaactcattc

SEQ ID NO: 272944 - DNA, 20 bp, Artificial Sequence
  Description of Artificial Sequence: Synthetic oligonucleotide
  Target: LAMA2; (-) strand; PAM type: YTN; PAM sequence: CTC
catccatgtccctgcaaagg

SEQ ID NO: 272945 - DNA, 20 bp, Artificial Sequence
  Description of Artificial Sequence: Synthetic oligonucleotide
  Target: LAMA2; (-) strand; PAM type: YTN; PAM sequence: CTC
cagctccatccatgtccctg

SEQ ID NO: 272946 - DNA, 20 bp, Artificial Sequence
  Description of Artificial Sequence: Synthetic oligonucleotide
  Target: LAMA2; (-) strand; PAM type: YTN; PAM sequence: CTA
agggtaatgtcctccagctc

SEQ ID NO: 272947 - DNA, 20 bp, Artificial Sequence
  Description of Artificial Sequence: Synthetic oligonucleotide
  Target: LAMA2; (-) strand; PAM type: YTN; PAM sequence: TTG
ctaagggtaatgtcctccag

SEQ ID NO: 272948 - DNA, 20 bp, Artificial Sequence
  Description of Artificial Sequence: Synthetic oligonucleotide
  Target: LAMA2; (-) strand; PAM type: YTN; PAM sequence: TTT
gctaagggtaatgtcctcca

SEQ ID NO: 272949 - DNA, 20 bp, Artificial Sequence
  Description of Artificial Sequence: Synthetic oligonucleotide
  Target: LAMA2; (-) strand; PAM type: YTN; PAM sequence: TTA
gtttgctaagggtaatgtcc

SEQ ID NO: 272950 - DNA, 20 bp, Artificial Sequence
  Description of Artificial Sequence: Synthetic oligonucleotide
  Target: LAMA2; (-) strand; PAM type: YTN; PAM sequence: CTG
tgttagtttgctaagggtaa

SEQ ID NO: 272951 - DNA, 20 bp, Artificial Sequence
  Description of Artificial Sequence: Synthetic oligonucleotide
  Target: LAMA2; (-) strand; PAM type: YTN; PAM sequence: TTC
ctgtgttagtttgctaaggg

SEQ ID NO: 272952 - DNA, 20 bp, Artificial Sequence
  Description of Artificial Sequence: Synthetic oligonucleotide
  Target: LAMA2; (-) strand; PAM type: YTN; PAM sequence: CTG
ttcctgtgttagtttgctaa

SEQ ID NO: 272953 - DNA, 20 bp, Artificial Sequence
  Description of Artificial Sequence: Synthetic oligonucleotide
  Target: LAMA2; (-) strand; PAM type: YTN; PAM sequence: TTC
tgttcctgtgttagtttgct

SEQ ID NO: 272954 - DNA, 20 bp, Artificial Sequence
  Description of Artificial Sequence: Synthetic oligonucleotide
  Target: LAMA2; (-) strand; PAM type: YTN; PAM sequence: TTT
ctgttcctgtgttagtttgc

SEQ ID NO: 272955 - DNA, 20 bp, Artificial Sequence
  Description of Artificial Sequence: Synthetic oligonucleotide
  Target: LAMA2; (-) strand; PAM type: YTN; PAM sequence: TTT
tctgttcctgtgttagtttg

SEQ ID NO: 272956 - DNA, 20 bp, Artificial Sequence
  Description of Artificial Sequence: Synthetic oligonucleotide
  Target: LAMA2; (-) strand; PAM type: YTN; PAM sequence: TTG
attttctgttcctgtgttag

SEQ ID NO: 272957 - DNA, 20 bp, Artificial Sequence
  Description of Artificial Sequence: Synthetic oligonucleotide
  Target: LAMA2; (-) strand; PAM type: YTN; PAM sequence: TTT
gattttctgttcctgtgtta

SEQ ID NO: 272958 - DNA, 20 bp, Artificial Sequence
  Description of Artificial Sequence: Synthetic oligonucleotide
  Target: LAMA2; (-) strand; PAM type: YTN; PAM sequence: TTA
taagtgggacatacagtatt

SEQ ID NO: 272959 - DNA, 20 bp, Artificial Sequence
  Description of Artificial Sequence: Synthetic oligonucleotide
  Target: LAMA2; (-) strand; PAM type: YTN; PAM sequence: TTT
ataagtgggacatacagtat

SEQ ID NO: 272960 - DNA, 20 bp, Artificial Sequence
  Description of Artificial Sequence: Synthetic oligonucleotide
  Target: LAMA2; (-) strand; PAM type: YTN; PAM sequence: CTC
ccatttataagtgggacata

SEQ ID NO: 272961 - DNA, 20 bp, Artificial Sequence
  Description of Artificial Sequence: Synthetic oligonucleotide
  Target: LAMA2; (-) strand; PAM type: YTN; PAM sequence: TTA
actcccatttataagtggga

SEQ ID NO: 272962 - DNA, 20 bp, Artificial Sequence
  Description of Artificial Sequence: Synthetic oligonucleotide
  Target: LAMA2; (-) strand; PAM type: YTN; PAM sequence: TTT
aactcccatttataagtggg

SEQ ID NO: 272963 - DNA, 20 bp, Artificial Sequence
  Description of Artificial Sequence: Synthetic oligonucleotide
  Target: LAMA2; (-) strand; PAM type: YTN; PAM sequence: CTC
atcatttaactcccatttat

SEQ ID NO: 272964 - DNA, 20 bp, Artificial Sequence
  Description of Artificial Sequence: Synthetic oligonucleotide
  Target: LAMA2; (-) strand; PAM type: YTN; PAM sequence: TTC
tcatcatttaactcccattt

SEQ ID NO: 272965 - DNA, 20 bp, Artificial Sequence
  Description of Artificial Sequence: Synthetic oligonucleotide
  Target: LAMA2; (-) strand; PAM type: YTN; PAM sequence: CTA
tgtgttctcatcatttaact

SEQ ID NO: 272966 - DNA, 20 bp, Artificial Sequence
  Description of Artificial Sequence: Synthetic oligonucleotide
  Target: LAMA2; (-) strand; PAM type: YTN; PAM sequence: CTA
catgtctatgtgttctcatc

SEQ ID NO: 272967 - DNA, 20 bp, Artificial Sequence
  Description of Artificial Sequence: Synthetic oligonucleotide
  Target: LAMA2; (-) strand; PAM type: YTN; PAM sequence: TTC
tacatgtctatgtgttctca

SEQ ID NO: 272968 - DNA, 20 bp, Artificial Sequence
  Description of Artificial Sequence: Synthetic oligonucleotide
  Target: LAMA2; (-) strand; PAM type: YTN; PAM sequence: CTT
ctacatgtctatgtgttctc

SEQ ID NO: 272969 - DNA, 20 bp, Artificial Sequence
  Description of Artificial Sequence: Synthetic oligonucleotide
  Target: LAMA2; (-) strand; PAM type: YTN; PAM sequence: TTC
ccttctacatgtctatgtgt

SEQ ID NO: 272970 - DNA, 20 bp, Artificial Sequence
  Description of Artificial Sequence: Synthetic oligonucleotide
  Target: LAMA2; (-) strand; PAM type: YTN; PAM sequence: TTG
ttcccttctacatgtctatg

SEQ ID NO: 272971 - DNA, 20 bp, Artificial Sequence
  Description of Artificial Sequence: Synthetic oligonucleotide
  Target: LAMA2; (-) strand; PAM type: YTN; PAM sequence: CTG
gtaggccccagtgaacattg

SEQ ID NO: 272972 - DNA, 20 bp, Artificial Sequence
  Description of Artificial Sequence: Synthetic oligonucleotide
  Target: LAMA2; (-) strand; PAM type: YTN; PAM sequence: CTC
tggtaggccccagtgaacat

SEQ ID NO: 272973 - DNA, 20 bp, Artificial Sequence
  Description of Artificial Sequence: Synthetic oligonucleotide
  Target: LAMA2; (-) strand; PAM type: YTN; PAM sequence: CTC
cgccctctggtaggccccag

SEQ ID NO: 272974 - DNA, 20 bp, Artificial Sequence
  Description of Artificial Sequence: Synthetic oligonucleotide
  Target: LAMA2; (-) strand; PAM type: YTN; PAM sequence: TTC
ccatcctccgccctctggta

SEQ ID NO: 272975 - DNA, 20 bp, Artificial Sequence
  Description of Artificial Sequence: Synthetic oligonucleotide
  Target: LAMA2; (-) strand; PAM type: YTN; PAM sequence: CTT
cccatcctccgccctctggt

SEQ ID NO: 272976 - DNA, 20 bp, Artificial Sequence
  Description of Artificial Sequence: Synthetic oligonucleotide
  Target: LAMA2; (-) strand; PAM type: YTN; PAM sequence: CTC
atccttcccatcctccgccc

SEQ ID NO: 272977 - DNA, 20 bp, Artificial Sequence
  Description of Artificial Sequence: Synthetic oligonucleotide
  Target: LAMA2; (-) strand; PAM type: YTN; PAM sequence: CTC
tcatccttcccatcctccgc

SEQ ID NO: 272978 - DNA, 20 bp, Artificial Sequence
  Description of Artificial Sequence: Synthetic oligonucleotide
  Target: LAMA2; (-) strand; PAM type: YTN; PAM sequence: CTC
catcctctcatccttcccat

SEQ ID NO: 272979 - DNA, 20 bp, Artificial Sequence
  Description of Artificial Sequence: Synthetic oligonucleotide
  Target: LAMA2; (-) strand; PAM type: YTN; PAM sequence: CTC
tccatcctctcatccttccc

SEQ ID NO: 272980 - DNA, 20 bp, Artificial Sequence
  Description of Artificial Sequence: Synthetic oligonucleotide
  Target: LAMA2; (-) strand; PAM type: YTN; PAM sequence: CTA
atcctctccatcctctcatc

SEQ ID NO: 272981 - DNA, 20 bp, Artificial Sequence
  Description of Artificial Sequence: Synthetic oligonucleotide
  Target: LAMA2; (-) strand; PAM type: YTN; PAM sequence: TTC
ctaatcctctccatcctctc

SEQ ID NO: 272982 - DNA, 20 bp, Artificial Sequence
  Description of Artificial Sequence: Synthetic oligonucleotide
  Target: LAMA2; (-) strand; PAM type: YTN; PAM sequence: CTT
cctaatcctctccatcctct

SEQ ID NO: 272983 - DNA, 20 bp, Artificial Sequence
  Description of Artificial Sequence: Synthetic oligonucleotide
  Target: LAMA2; (-) strand; PAM type: YTN; PAM sequence: TTC
ttcctaatcctctccatcct

SEQ ID NO: 272984 - DNA, 20 bp, Artificial Sequence
  Description of Artificial Sequence: Synthetic oligonucleotide
  Target: LAMA2; (-) strand; PAM type: YTN; PAM sequence: TTA
ttcttcctaatcctctccat

SEQ ID NO: 272985 - DNA, 20 bp, Artificial Sequence
  Description of Artificial Sequence: Synthetic oligonucleotide
  Target: LAMA2; (-) strand; PAM type: YTN; PAM sequence: TTA
agcccagtgcccataagtta

SEQ ID NO: 272986 - DNA, 20 bp, Artificial Sequence
  Description of Artificial Sequence: Synthetic oligonucleotide
  Target: LAMA2; (-) strand; PAM type: YTN; PAM sequence: TTC
atcacccaggtattaagccc

SEQ ID NO: 272987 - DNA, 20 bp, Artificial Sequence
  Description of Artificial Sequence: Synthetic oligonucleotide
  Target: LAMA2; (-) strand; PAM type: YTN; PAM sequence: TTT
catcacccaggtattaagcc

SEQ ID NO: 272988 - DNA, 20 bp, Artificial Sequence
  Description of Artificial Sequence: Synthetic oligonucleotide
  Target: LAMA2; (-) strand; PAM type: YTN; PAM sequence: TTA
tttcatcacccaggtattaa

SEQ ID NO: 272989 - DNA, 20 bp, Artificial Sequence
  Description of Artificial Sequence: Synthetic oligonucleotide
  Target: LAMA2; (-) strand; PAM type: YTN; PAM sequence: TTG
cacagattatttcatcaccc

SEQ ID NO: 272990 - DNA, 20 bp, Artificial Sequence
  Description of Artificial Sequence: Synthetic oligonucleotide
  Target: LAMA2; (-) strand; PAM type: YTN; PAM sequence: TTG
ttgcacagattatttcatca

SEQ ID NO: 272991 - DNA, 20 bp, Artificial Sequence
  Description of Artificial Sequence: Synthetic oligonucleotide
  Target: LAMA2; (-) strand; PAM type: YTN; PAM sequence: TTT
gttgcacagattatttcatc

SEQ ID NO: 272992 - DNA, 20 bp, Artificial Sequence
  Description of Artificial Sequence: Synthetic oligonucleotide
  Target: LAMA2; (-) strand; PAM type: YTN; PAM sequence: TTA
aaaaaaaaaaacccatgcat

SEQ ID NO: 272993 - DNA, 20 bp, Artificial Sequence
  Description of Artificial Sequence: Synthetic oligonucleotide
  Target: LAMA2; (-) strand; PAM type: YTN; PAM sequence: TTA
cacaggttaaaaaaaaaaaa

SEQ ID NO: 272994 - DNA, 20 bp, Artificial Sequence
  Description of Artificial Sequence: Synthetic oligonucleotide
  Target: LAMA2; (-) strand; PAM type: YTN; PAM sequence: TTG
ttacacaggttaaaaaaaaa

SEQ ID NO: 272995 - DNA, 20 bp, Artificial Sequence
  Description of Artificial Sequence: Synthetic oligonucleotide
  Target: LAMA2; (-) strand; PAM type: YTN; PAM sequence: TTT
gttacacaggttaaaaaaaa

SEQ ID NO: 272996 - DNA, 20 bp, Artificial Sequence
  Description of Artificial Sequence: Synthetic oligonucleotide
  Target: LAMA2; (-) strand; PAM type: YTN; PAM sequence: TTC
agggatacatgtgcaggatg

SEQ ID NO: 272997 - DNA, 20 bp, Artificial Sequence
  Description of Artificial Sequence: Synthetic oligonucleotide
  Target: LAMA2; (-) strand; PAM type: YTN; PAM sequence: TTA
agttcagggatacatgtgca

SEQ ID NO: 272998 - DNA, 20 bp, Artificial Sequence
  Description of Artificial Sequence: Synthetic oligonucleotide
  Target: LAMA2; (-) strand; PAM type: YTN; PAM sequence: TTT
aagttcagggatacatgtgc

SEQ ID NO: 272999 - DNA, 20 bp, Artificial Sequence
  Description of Artificial Sequence: Synthetic oligonucleotide
  Target: LAMA2; (-) strand; PAM type: YTN; PAM sequence: TTT
taagttcagggatacatgtg

SEQ ID NO: 273000 - DNA, 20 bp, Artificial Sequence
  Description of Artificial Sequence: Synthetic oligonucleotide
  Target: LAMA2; (-) strand; PAM type: YTN; PAM sequence: CTT
ttaagttcagggatacatgt

SEQ ID NO: 273001 - DNA, 20 bp, Artificial Sequence
  Description of Artificial Sequence: Synthetic oligonucleotide
  Target: LAMA2; (-) strand; PAM type: YTN; PAM sequence: TTA
acttttaagttcagggatac

SEQ ID NO: 273002 - DNA, 20 bp, Artificial Sequence
  Description of Artificial Sequence: Synthetic oligonucleotide
  Target: LAMA2; (-) strand; PAM type: YTN; PAM sequence: TTT
aacttttaagttcagggata

SEQ ID NO: 273003 - DNA, 20 bp, Artificial Sequence
  Description of Artificial Sequence: Synthetic oligonucleotide
  Target: LAMA2; (-) strand; PAM type: YTN; PAM sequence: TTT
taacttttaagttcagggat

SEQ ID NO: 273004 - DNA, 20 bp, Artificial Sequence
  Description of Artificial Sequence: Synthetic oligonucleotide
  Target: LAMA2; (-) strand; PAM type: YTN; PAM sequence: TTT
ttaacttttaagttcaggga

SEQ ID NO: 273005 - DNA, 20 bp, Artificial Sequence
  Description of Artificial Sequence: Synthetic oligonucleotide
  Target: LAMA2; (-) strand; PAM type: YTN; PAM sequence: TTT
tttaacttttaagttcaggg

SEQ ID NO: 273006 - DNA, 20 bp, Artificial Sequence
  Description of Artificial Sequence: Synthetic oligonucleotide
  Target: LAMA2; (-) strand; PAM type: YTN; PAM sequence: TTT
ttttaacttttaagttcagg

SEQ ID NO: 273007 - DNA, 20 bp, Artificial Sequence
  Description of Artificial Sequence: Synthetic oligonucleotide
  Target: LAMA2; (-) strand; PAM type: YTN; PAM sequence: TTA
tatttttttaacttttaagt

SEQ ID NO: 273008 - DNA, 20 bp, Artificial Sequence
  Description of Artificial Sequence: Synthetic oligonucleotide
  Target: LAMA2; (-) strand; PAM type: YTN; PAM sequence: TTT
atatttttttaacttttaag

SEQ ID NO: 273009 - DNA, 20 bp, Artificial Sequence
  Description of Artificial Sequence: Synthetic oligonucleotide
  Target: LAMA2; (-) strand; PAM type: YTN; PAM sequence: TTT
tatatttttttaacttttaa

SEQ ID NO: 273010 - DNA, 20 bp, Artificial Sequence
  Description of Artificial Sequence: Synthetic oligonucleotide
  Target: LAMA2; (-) strand; PAM type: YTN; PAM sequence: TTT
ttatatttttttaactttta

SEQ ID NO: 273011 - DNA, 20 bp, Artificial Sequence
  Description of Artificial Sequence: Synthetic oligonucleotide
  Target: LAMA2; (-) strand; PAM type: YTN; PAM sequence: TTT
tttatatttttttaactttt

SEQ ID NO: 273012 - DNA, 20 bp, Artificial Sequence
  Description of Artificial Sequence: Synthetic oligonucleotide
  Target: LAMA2; (-) strand; PAM type: YTN; PAM sequence: TTG
tattttttatatttttttaa

SEQ ID NO: 273013 - DNA, 20 bp, Artificial Sequence
  Description of Artificial Sequence: Synthetic oligonucleotide
  Target: LAMA2; (-) strand; PAM type: YTN; PAM sequence: CTT
gtattttttatattttttta

SEQ ID NO: 273014 - DNA, 20 bp, Artificial Sequence
  Description of Artificial Sequence: Synthetic oligonucleotide
  Target: LAMA2; (-) strand; PAM type: YTN; PAM sequence: TTA
cttgtattttttatattttt

SEQ ID NO: 273015 - DNA, 20 bp, Artificial Sequence
  Description of Artificial Sequence: Synthetic oligonucleotide
  Target: LAMA2; (-) strand; PAM type: YTN; PAM sequence: CTC
agaattacttgtatttttta

SEQ ID NO: 273016 - DNA, 20 bp, Artificial Sequence
  Description of Artificial Sequence: Synthetic oligonucleotide
  Target: LAMA2; (-) strand; PAM type: YTN; PAM sequence: CTG
tacctcagaattacttgtat

SEQ ID NO: 273017 - DNA, 20 bp, Artificial Sequence
  Description of Artificial Sequence: Synthetic oligonucleotide
  Target: LAMA2; (-) strand; PAM type: YTN; PAM sequence: CTC
atctgtacctcagaattact

SEQ ID NO: 273018 - DNA, 20 bp, Artificial Sequence
  Description of Artificial Sequence: Synthetic oligonucleotide
  Target: LAMA2; (-) strand; PAM type: YTN; PAM sequence: TTA
cacagtcaggctcatctgta

SEQ ID NO: 273019 - DNA, 20 bp, Artificial Sequence
  Description of Artificial Sequence: Synthetic oligonucleotide
  Target: LAMA2; (-) strand; PAM type: YTN; PAM sequence: CTA
aaggatgagttacacagtca

SEQ ID NO: 273020 - DNA, 20 bp, Artificial Sequence
  Description of Artificial Sequence: Synthetic oligonucleotide
  Target: LAMA2; (-) strand; PAM type: YTN; PAM sequence: TTA
gcatgctaaaggatgagtta

SEQ ID NO: 273021 - DNA, 20 bp, Artificial Sequence
  Description of Artificial Sequence: Synthetic oligonucleotide
  Target: LAMA2; (-) strand; PAM type: YTN; PAM sequence: TTA
atgcgggttagcatgctaaa

SEQ ID NO: 273022 - DNA, 20 bp, Artificial Sequence
  Description of Artificial Sequence: Synthetic oligonucleotide
  Target: LAMA2; (-) strand; PAM type: YTN; PAM sequence: CTT
aatgcgggttagcatgctaa

SEQ ID NO: 273023 - DNA, 20 bp, Artificial Sequence
  Description of Artificial Sequence: Synthetic oligonucleotide
  Target: LAMA2; (-) strand; PAM type: YTN; PAM sequence: TTC
ccggcaccaaaagcatcaac

SEQ ID NO: 273024 - DNA, 20 bp, Artificial Sequence
  Description of Artificial Sequence: Synthetic oligonucleotide
  Target: LAMA2; (-) strand; PAM type: YTN; PAM sequence: TTC
cagaagaggaggagacgtga

SEQ ID NO: 273025 - DNA, 20 bp, Artificial Sequence
  Description of Artificial Sequence: Synthetic oligonucleotide
  Target: LAMA2; (-) strand; PAM type: YTN; PAM sequence: CTA
ttccagaagaggaggagacg

SEQ ID NO: 273026 - DNA, 20 bp, Artificial Sequence
  Description of Artificial Sequence: Synthetic oligonucleotide
  Target: LAMA2; (-) strand; PAM type: YTN; PAM sequence: CTA
ggctattccagaagaggagg

SEQ ID NO: 273027 - DNA, 20 bp, Artificial Sequence
  Description of Artificial Sequence: Synthetic oligonucleotide
  Target: LAMA2; (-) strand; PAM type: YTN; PAM sequence: CTC
taggctattccagaagagga

SEQ ID NO: 273028 - DNA, 20 bp, Artificial Sequence
  Description of Artificial Sequence: Synthetic oligonucleotide
  Target: LAMA2; (-) strand; PAM type: YTN; PAM sequence: CTC
tctaggctattccagaagag

SEQ ID NO: 273029 - DNA, 20 bp, Artificial Sequence
  Description of Artificial Sequence: Synthetic oligonucleotide
  Target: LAMA2; (-) strand; PAM type: YTN; PAM sequence: TTC
ctctctaggctattccagaa

SEQ ID NO: 273030 - DNA, 20 bp, Artificial Sequence
  Description of Artificial Sequence: Synthetic oligonucleotide
  Target: LAMA2; (-) strand; PAM type: YTN; PAM sequence: CTT
cctctctaggctattccaga

SEQ ID NO: 273031 - DNA, 20 bp, Artificial Sequence
  Description of Artificial Sequence: Synthetic oligonucleotide
  Target: LAMA2; (-) strand; PAM type: YTN; PAM sequence: CTA
aacacagaagaagagcttcc

SEQ ID NO: 273032 - DNA, 20 bp, Artificial Sequence
  Description of Artificial Sequence: Synthetic oligonucleotide
  Target: LAMA2; (-) strand; PAM type: YTN; PAM sequence: CTC
taaacacagaagaagagctt

SEQ ID NO: 273033 - DNA, 20 bp, Artificial Sequence
  Description of Artificial Sequence: Synthetic oligonucleotide
  Target: LAMA2; (-) strand; PAM type: YTN; PAM sequence: TTC
cctctaaacacagaagaaga

SEQ ID NO: 273034 - DNA, 20 bp, Artificial Sequence
  Description of Artificial Sequence: Synthetic oligonucleotide
  Target: LAMA2; (-) strand; PAM type: YTN; PAM sequence: CTT
ccctctaaacacagaagaag

SEQ ID NO: 273035 - DNA, 20 bp, Artificial Sequence
  Description of Artificial Sequence: Synthetic oligonucleotide
  Target: LAMA2; (-) strand; PAM type: YTN; PAM sequence: CTG
aaggagataccttccctcta

SEQ ID NO: 273036 - DNA, 20 bp, Artificial Sequence
  Description of Artificial Sequence: Synthetic oligonucleotide
  Target: LAMA2; (-) strand; PAM type: YTN; PAM sequence: TTA
ctgaaggagataccttccct

SEQ ID NO: 273037 - DNA, 20 bp, Artificial Sequence
  Description of Artificial Sequence: Synthetic oligonucleotide
  Target: LAMA2; (-) strand; PAM type: YTN; PAM sequence: CTT
actgaaggagataccttccc

SEQ ID NO: 273038 - DNA, 20 bp, Artificial Sequence
  Description of Artificial Sequence: Synthetic oligonucleotide
  Target: LAMA2; (-) strand; PAM type: YTN; PAM sequence: TTC
agggccagcacagtgcttac

SEQ ID NO: 273039 - DNA, 20 bp, Artificial Sequence
  Description of Artificial Sequence: Synthetic oligonucleotide
  Target: LAMA2; (-) strand; PAM type: YTN; PAM sequence: CTT
cagggccagcacagtgctta

SEQ ID NO: 273040 - DNA, 20 bp, Artificial Sequence
  Description of Artificial Sequence: Synthetic oligonucleotide
  Target: LAMA2; (-) strand; PAM type: YTN; PAM sequence: CTC
ttcagggccagcacagtgct

SEQ ID NO: 273041 - DNA, 20 bp, Artificial Sequence
  Description of Artificial Sequence: Synthetic oligonucleotide
  Target: LAMA2; (-) strand; PAM type: YTN; PAM sequence: CTG
gtggggtgggagtggcagta

SEQ ID NO: 273042 - DNA, 20 bp, Artificial Sequence
  Description of Artificial Sequence: Synthetic oligonucleotide
  Target: LAMA2; (-) strand; PAM type: YTN; PAM sequence: TTC
cacgctggtggggtgggagt

SEQ ID NO: 273043 - DNA, 20 bp, Artificial Sequence
  Description of Artificial Sequence: Synthetic oligonucleotide
  Target: LAMA2; (-) strand; PAM type: YTN; PAM sequence: TTG
aatacacacgaagttccacg

SEQ ID NO: 273044 - DNA, 20 bp, Artificial Sequence
  Description of Artificial Sequence: Synthetic oligonucleotide
  Target: LAMA2; (-) strand; PAM type: YTN; PAM sequence: TTT
gaatacacacgaagttccac

SEQ ID NO: 273045 - DNA, 20 bp, Artificial Sequence
  Description of Artificial Sequence: Synthetic oligonucleotide
  Target: LAMA2; (-) strand; PAM type: YTN; PAM sequence: CTT
tgaatacacacgaagttcca

SEQ ID NO: 273046 - DNA, 20 bp, Artificial Sequence
  Description of Artificial Sequence: Synthetic oligonucleotide
  Target: LAMA2; (-) strand; PAM type: YTN; PAM sequence: CTG
gacctttgaatacacacgaa

SEQ ID NO: 273047 - DNA, 20 bp, Artificial Sequence
  Description of Artificial Sequence: Synthetic oligonucleotide
  Target: LAMA2; (-) strand; PAM type: YTN; PAM sequence: TTC
aaactggacctttgaataca

SEQ ID NO: 273048 - DNA, 20 bp, Artificial Sequence
  Description of Artificial Sequence: Synthetic oligonucleotide
  Target: LAMA2; (-) strand; PAM type: YTN; PAM sequence: CTC
acagtaattcaaactggacc

SEQ ID NO: 273049 - DNA, 20 bp, Artificial Sequence
  Description of Artificial Sequence: Synthetic oligonucleotide
  Target: LAMA2; (-) strand; PAM type: YTN; PAM sequence: CTG
gcctcacagtaattcaaact

SEQ ID NO: 273050 - DNA, 20 bp, Artificial Sequence
  Description of Artificial Sequence: Synthetic oligonucleotide
  Target: LAMA2; (-) strand; PAM type: YTN; PAM sequence: CTA
gccactggcctcacagtaat

SEQ ID NO: 273051 - DNA, 20 bp, Artificial Sequence
  Description of Artificial Sequence: Synthetic oligonucleotide
  Target: LAMA2; (-) strand; PAM type: YTN; PAM sequence: TTC
tagccactggcctcacagta

SEQ ID NO: 273052 - DNA, 20 bp, Artificial Sequence
  Description of Artificial Sequence: Synthetic oligonucleotide
  Target: LAMA2; (-) strand; PAM type: YTN; PAM sequence: TTT
ctagccactggcctcacagt

SEQ ID NO: 273053 - DNA, 20 bp, Artificial Sequence
  Description of Artificial Sequence: Synthetic oligonucleotide
  Target: LAMA2; (-) strand; PAM type: YTN; PAM sequence: CTT
tctagccactggcctcacag

SEQ ID NO: 273054 - DNA, 20 bp, Artificial Sequence
  Description of Artificial Sequence: Synthetic oligonucleotide
  Target: LAMA2; (-) strand; PAM type: YTN; PAM sequence: CTG
ctttctagccactggcctca

SEQ ID NO: 273055 - DNA, 20 bp, Artificial Sequence
  Description of Artificial Sequence: Synthetic oligonucleotide
  Target: LAMA2; (-) strand; PAM type: YTN; PAM sequence: CTA
cactgctttctagccactgg

SEQ ID NO: 273056 - DNA, 20 bp, Artificial Sequence
  Description of Artificial Sequence: Synthetic oligonucleotide
  Target: LAMA2; (-) strand; PAM type: YTN; PAM sequence: CTC
cagtcccaactacactgctt

SEQ ID NO: 273057 - DNA, 20 bp, Artificial Sequence
  Description of Artificial Sequence: Synthetic oligonucleotide
  Target: LAMA2; (-) strand; PAM type: YTN; PAM sequence: TTG
ggagaagagccaggcatgtg

SEQ ID NO: 273058 - DNA, 20 bp, Artificial Sequence
  Description of Artificial Sequence: Synthetic oligonucleotide
  Target: LAMA2; (-) strand; PAM type: YTN; PAM sequence: CTT
gggagaagagccaggcatgt

SEQ ID NO: 273059 - DNA, 20 bp, Artificial Sequence
  Description of Artificial Sequence: Synthetic oligonucleotide
  Target: LAMA2; (-) strand; PAM type: YTN; PAM sequence: TTG
aagcttgggagaagagccag

SEQ ID NO: 273060 - DNA, 20 bp, Artificial Sequence
  Description of Artificial Sequence: Synthetic oligonucleotide
  Target: LAMA2; (-) strand; PAM type: YTN; PAM sequence: CTA
cagttgaagcttgggagaag

SEQ ID NO: 273061 - DNA, 20 bp, Artificial Sequence
  Description of Artificial Sequence: Synthetic oligonucleotide
  Target: LAMA2; (-) strand; PAM type: YTN; PAM sequence: CTC
aagagctacagttgaagctt

SEQ ID NO: 273062 - DNA, 20 bp, Artificial Sequence
  Description of Artificial Sequence: Synthetic oligonucleotide
  Target: LAMA2; (-) strand; PAM type: YTN; PAM sequence: CTG
ctcaagagctacagttgaag

SEQ ID NO: 273063 - DNA, 20 bp, Artificial Sequence
  Description of Artificial Sequence: Synthetic oligonucleotide
  Target: LAMA2; (-) strand; PAM type: YTN; PAM sequence: CTG
ctgctcaagagctacagttg

SEQ ID NO: 273064 - DNA, 20 bp, Artificial Sequence
  Description of Artificial Sequence: Synthetic oligonucleotide
  Target: LAMA2; (-) strand; PAM type: YTN; PAM sequence: CTC
agaggaagctgctgctcaag

SEQ ID NO: 273065 - DNA, 20 bp, Artificial Sequence
  Description of Artificial Sequence: Synthetic oligonucleotide
  Target: LAMA2; (-) strand; PAM type: YTN; PAM sequence: TTA
gaagctcagaggaagctgct

SEQ ID NO: 273066 - DNA, 20 bp, Artificial Sequence
  Description of Artificial Sequence: Synthetic oligonucleotide
  Target: LAMA2; (-) strand; PAM type: YTN; PAM sequence: TTT
agaagctcagaggaagctgc

SEQ ID NO: 273067 - DNA, 20 bp, Artificial Sequence
  Description of Artificial Sequence: Synthetic oligonucleotide
  Target: LAMA2; (-) strand; PAM type: YTN; PAM sequence: TTT
tagaagctcagaggaagctg

SEQ ID NO: 273068 - DNA, 20 bp, Artificial Sequence
  Description of Artificial Sequence: Synthetic oligonucleotide
  Target: LAMA2; (-) strand; PAM type: YTN; PAM sequence: TTT
ttagaagctcagaggaagct

SEQ ID NO: 273069 - DNA, 20 bp, Artificial Sequence
  Description of Artificial Sequence: Synthetic oligonucleotide
  Target: LAMA2; (-) strand; PAM type: YTN; PAM sequence: TTT
tttagaagctcagaggaagc

SEQ ID NO: 273070 - DNA, 20 bp, Artificial Sequence
  Description of Artificial Sequence: Synthetic oligonucleotide
  Target: LAMA2; (-) strand; PAM type: YTN; PAM sequence: CTG
ggcattttttagaagctcag

SEQ ID NO: 273071 - DNA, 20 bp, Artificial Sequence
  Description of Artificial Sequence: Synthetic oligonucleotide
  Target: LAMA2; (-) strand; PAM type: YTN; PAM sequence: TTC
tgggcattttttagaagctc

SEQ ID NO: 273072 - DNA, 20 bp, Artificial Sequence
  Description of Artificial Sequence: Synthetic oligonucleotide
  Target: LAMA2; (-) strand; PAM type: YTN; PAM sequence: TTT
ctgggcattttttagaagct

SEQ ID NO: 273073 - DNA, 20 bp, Artificial Sequence
  Description of Artificial Sequence: Synthetic oligonucleotide
  Target: LAMA2; (-) strand; PAM type: YTN; PAM sequence: TTT
tctgggcattttttagaagc

SEQ ID NO: 273074 - DNA, 20 bp, Artificial Sequence
  Description of Artificial Sequence: Synthetic oligonucleotide
  Target: LAMA2; (-) strand; PAM type: YTN; PAM sequence: CTG
ggcaattttctgggcatttt

SEQ ID NO: 273075 - DNA, 20 bp, Artificial Sequence
  Description of Artificial Sequence: Synthetic oligonucleotide
  Target: LAMA2; (-) strand; PAM type: YTN; PAM sequence: TTG
gctgggcaattttctgggca

SEQ ID NO: 273076 - DNA, 20 bp, Artificial Sequence
  Description of Artificial Sequence: Synthetic oligonucleotide
  Target: LAMA2; (-) strand; PAM type: YTN; PAM sequence: TTG
ccaggaaatgtggttggctg

SEQ ID NO: 273077 - DNA, 20 bp, Artificial Sequence
  Description of Artificial Sequence: Synthetic oligonucleotide
  Target: LAMA2; (-) strand; PAM type: YTN; PAM sequence: CTT
gccaggaaatgtggttggct

SEQ ID NO: 273078 - DNA, 20 bp, Artificial Sequence
  Description of Artificial Sequence: Synthetic oligonucleotide
  Target: LAMA2; (-) strand; PAM type: YTN; PAM sequence: CTA
tgcttgccaggaaatgtggt

SEQ ID NO: 273079 - DNA, 20 bp, Artificial Sequence
  Description of Artificial Sequence: Synthetic oligonucleotide
  Target: LAMA2; (-) strand; PAM type: YTN; PAM sequence: CTG
gtgctatgcttgccaggaaa

SEQ ID NO: 273080 - DNA, 20 bp, Artificial Sequence
  Description of Artificial Sequence: Synthetic oligonucleotide
  Target: LAMA2; (-) strand; PAM type: YTN; PAM sequence: CTG
accatatgcctggtgctatg

SEQ ID NO: 273081 - DNA, 20 bp, Artificial Sequence
  Description of Artificial Sequence: Synthetic oligonucleotide
  Target: LAMA2; (-) strand; PAM type: YTN; PAM sequence: CTC
aaactgaccatatgcctggt

SEQ ID NO: 273082 - DNA, 20 bp, Artificial Sequence
  Description of Artificial Sequence: Synthetic oligonucleotide
  Target: LAMA2; (-) strand; PAM type: YTN; PAM sequence: CTA
atagcactcaaactgaccat

SEQ ID NO: 273083 - DNA, 20 bp, Artificial Sequence
  Description of Artificial Sequence: Synthetic oligonucleotide
  Target: LAMA2; (-) strand; PAM type: YTN; PAM sequence: CTA
tctaatagcactcaaactga

SEQ ID NO: 273084 - DNA, 20 bp, Artificial Sequence
  Description of Artificial Sequence: Synthetic oligonucleotide
  Target: LAMA2; (-) strand; PAM type: YTN; PAM sequence: CTA
aagcctatctaatagcactc

SEQ ID NO: 273085 - DNA, 20 bp, Artificial Sequence
  Description of Artificial Sequence: Synthetic oligonucleotide
  Target: LAMA2; (-) strand; PAM type: YTN; PAM sequence: TTC
taaagcctatctaatagcac

SEQ ID NO: 273086 - DNA, 20 bp, Artificial Sequence
  Description of Artificial Sequence: Synthetic oligonucleotide
  Target: LAMA2; (-) strand; PAM type: YTN; PAM sequence: TTG
gaagttctaaagcctatcta

SEQ ID NO: 273087 - DNA, 20 bp, Artificial Sequence
  Description of Artificial Sequence: Synthetic oligonucleotide
  Target: LAMA2; (-) strand; PAM type: YTN; PAM sequence: CTT
ggaagttctaaagcctatct

SEQ ID NO: 273088 - DNA, 20 bp, Artificial Sequence
  Description of Artificial Sequence: Synthetic oligonucleotide
  Target: LAMA2; (-) strand; PAM type: YTN; PAM sequence: TTG
gtggatacaatgacaatcaa

SEQ ID NO: 273089 - DNA, 20 bp, Artificial Sequence
  Description of Artificial Sequence: Synthetic oligonucleotide
  Target: LAMA2; (-) strand; PAM type: YTN; PAM sequence: TTG
ggtgattggtggatacaatg

SEQ ID NO: 273090 - DNA, 20 bp, Artificial Sequence
  Description of Artificial Sequence: Synthetic oligonucleotide
  Target: LAMA2; (-) strand; PAM type: YTN; PAM sequence: TTG
tcgtgggtcatagatgttgg

SEQ ID NO: 273091 - DNA, 20 bp, Artificial Sequence
  Description of Artificial Sequence: Synthetic oligonucleotide
  Target: LAMA2; (-) strand; PAM type: YTN; PAM sequence: CTG
gcaaattgtcgtgggtcata

SEQ ID NO: 273092 - DNA, 20 bp, Artificial Sequence
  Description of Artificial Sequence: Synthetic oligonucleotide
  Target: LAMA2; (-) strand; PAM type: YTN; PAM sequence: CTC
agagtgccaagcatagtgtc

SEQ ID NO: 273093 - DNA, 20 bp, Artificial Sequence
  Description of Artificial Sequence: Synthetic oligonucleotide
  Target: LAMA2; (-) strand; PAM type: YTN; PAM sequence: TTC
ctcagagtgccaagcatagt

SEQ ID NO: 273094 - DNA, 20 bp, Artificial Sequence
  Description of Artificial Sequence: Synthetic oligonucleotide
  Target: LAMA2; (-) strand; PAM type: YTN; PAM sequence: TTA
ttcctcagagtgccaagcat

SEQ ID NO: 273095 - DNA, 20 bp, Artificial Sequence
  Description of Artificial Sequence: Synthetic oligonucleotide
  Target: LAMA2; (-) strand; PAM type: YTN; PAM sequence: TTT
attcctcagagtgccaagca

SEQ ID NO: 273096 - DNA, 20 bp, Artificial Sequence
  Description of Artificial Sequence: Synthetic oligonucleotide
  Target: LAMA2; (-) strand; PAM type: YTN; PAM sequence: TTT
tattcctcagagtgccaagc

SEQ ID NO: 273097 - DNA, 20 bp, Artificial Sequence
  Description of Artificial Sequence: Synthetic oligonucleotide
  Target: LAMA2; (-) strand; PAM type: YTN; PAM sequence: TTT
ttattcctcagagtgccaag

SEQ ID NO: 273098 - DNA, 20 bp, Artificial Sequence
  Description of Artificial Sequence: Synthetic oligonucleotide
  Target: LAMA2; (-) strand; PAM type: YTN; PAM sequence: CTT
tttattcctcagagtgccaa

SEQ ID NO: 273099 - DNA, 20 bp, Artificial Sequence
  Description of Artificial Sequence: Synthetic oligonucleotide
  Target: LAMA2; (-) strand; PAM type: YTN; PAM sequence: CTC
tttttattcctcagagtgcc

SEQ ID NO: 273100 - DNA, 20 bp, Artificial Sequence
  Description of Artificial Sequence: Synthetic oligonucleotide
  Target: LAMA2; (-) strand; PAM type: YTN; PAM sequence: TTA
ctctttttattcctcagagt

SEQ ID NO: 273101 - DNA, 20 bp, Artificial Sequence
  Description of Artificial Sequence: Synthetic oligonucleotide
  Target: LAMA2; (-) strand; PAM type: YTN; PAM sequence: CTT
actctttttattcctcagag

SEQ ID NO: 273102 - DNA, 20 bp, Artificial Sequence
  Description of Artificial Sequence: Synthetic oligonucleotide
  Target: LAMA2; (-) strand; PAM type: YTN; PAM sequence: CTG
tcttactctttttattcctc

SEQ ID NO: 273103 - DNA, 20 bp, Artificial Sequence
  Description of Artificial Sequence: Synthetic oligonucleotide
  Target: LAMA2; (-) strand; PAM type: YTN; PAM sequence: CTA
gggatctgtcttactctttt

SEQ ID NO: 273104 - DNA, 20 bp, Artificial Sequence
  Description of Artificial Sequence: Synthetic oligonucleotide
  Target: LAMA2; (-) strand; PAM type: YTN; PAM sequence: TTA
gaaaaggctagggatctgtc

SEQ ID NO: 273105 - DNA, 20 bp, Artificial Sequence
  Description of Artificial Sequence: Synthetic oligonucleotide
  Target: LAMA2; (-) strand; PAM type: YTN; PAM sequence: TTA
gatagatagattagaaaagg

SEQ ID NO: 273106 - DNA, 20 bp, Artificial Sequence
  Description of Artificial Sequence: Synthetic oligonucleotide
  Target: LAMA2; (-) strand; PAM type: YTN; PAM sequence: CTC
cattagatagatagattaga

SEQ ID NO: 273107 - DNA, 20 bp, Artificial Sequence
  Description of Artificial Sequence: Synthetic oligonucleotide
  Target: LAMA2; (-) strand; PAM type: YTN; PAM sequence: TTG
ccatatctccattagataga

SEQ ID NO: 273108 - DNA, 20 bp, Artificial Sequence
  Description of Artificial Sequence: Synthetic oligonucleotide
  Target: LAMA2; (-) strand; PAM type: YTN; PAM sequence: TTT
gccatatctccattagatag

SEQ ID NO: 273109 - DNA, 20 bp, Artificial Sequence
  Description of Artificial Sequence: Synthetic oligonucleotide
  Target: LAMA2; (-) strand; PAM type: YTN; PAM sequence: CTT
tgccatatctccattagata

SEQ ID NO: 273110 - DNA, 20 bp, Artificial Sequence
  Description of Artificial Sequence: Synthetic oligonucleotide
  Target: LAMA2; (-) strand; PAM type: YTN; PAM sequence: TTA
ggtgctttgccatatctcca

SEQ ID NO: 273111 - DNA, 20 bp, Artificial Sequence
  Description of Artificial Sequence: Synthetic oligonucleotide
  Target: LAMA2; (-) strand; PAM type: YTN; PAM sequence: TTG
ttaggtgctttgccatatct

SEQ ID NO: 273112 - DNA, 20 bp, Artificial Sequence
  Description of Artificial Sequence: Synthetic oligonucleotide
  Target: LAMA2; (-) strand; PAM type: YTN; PAM sequence: TTT
gttaggtgctttgccatatc

SEQ ID NO: 273113 - DNA, 20 bp, Artificial Sequence
  Description of Artificial Sequence: Synthetic oligonucleotide
  Target: LAMA2; (-) strand; PAM type: YTN; PAM sequence: CTT
tgttaggtgctttgccatat

SEQ ID NO: 273114 - DNA, 20 bp, Artificial Sequence
  Description of Artificial Sequence: Synthetic oligonucleotide
  Target: LAMA2; (-) strand; PAM type: YTN; PAM sequence: CTA
atgggtagtgactttgttag

SEQ ID NO: 273115 - DNA, 20 bp, Artificial Sequence
  Description of Artificial Sequence: Synthetic oligonucleotide
  Target: LAMA2; (-) strand; PAM type: YTN; PAM sequence: CTC
taatgggtagtgactttgtt

SEQ ID NO: 273116 - DNA, 20 bp, Artificial Sequence
  Description of Artificial Sequence: Synthetic oligonucleotide
  Target: LAMA2; (-) strand; PAM type: YTN; PAM sequence: TTC
acaactctaatgggtagtga

SEQ ID NO: 273117 - DNA, 20 bp, Artificial Sequence
  Description of Artificial Sequence: Synthetic oligonucleotide
  Target: LAMA2; (-) strand; PAM type: YTN; PAM sequence: CTA
ttcacaactctaatgggtag

SEQ ID NO: 273118 - DNA, 20 bp, Artificial Sequence
  Description of Artificial Sequence: Synthetic oligonucleotide
  Target: LAMA2; (-) strand; PAM type: YTN; PAM sequence: TTA
ccactattcacaactctaat

SEQ ID NO: 273119 - DNA, 20 bp, Artificial Sequence
  Description of Artificial Sequence: Synthetic oligonucleotide
  Target: LAMA2; (-) strand; PAM type: YTN; PAM sequence: TTA
ttaccactattcacaactct

SEQ ID NO: 273120 - DNA, 20 bp, Artificial Sequence
  Description of Artificial Sequence: Synthetic oligonucleotide
  Target: LAMA2; (-) strand; PAM type: YTN; PAM sequence: TTA
ttattaccactattcacaac

SEQ ID NO: 273121 - DNA, 20 bp, Artificial Sequence
  Description of Artificial Sequence: Synthetic oligonucleotide
  Target: LAMA2; (-) strand; PAM type: YTN; PAM sequence: TTC
aaaaataattattattacca

SEQ ID NO: 273122 - DNA, 20 bp, Artificial Sequence
  Description of Artificial Sequence: Synthetic oligonucleotide
  Target: LAMA2; (-) strand; PAM type: YTN; PAM sequence: TTT
caaaaataattattattacc

SEQ ID NO: 273123 - DNA, 20 bp, Artificial Sequence
  Description of Artificial Sequence: Synthetic oligonucleotide
  Target: LAMA2; (-) strand; PAM type: YTN; PAM sequence: TTT
tcaaaaataattattattac

SEQ ID NO: 273124 - DNA, 20 bp, Artificial Sequence
  Description of Artificial Sequence: Synthetic oligonucleotide
  Target: LAMA2; (-) strand; PAM type: YTN; PAM sequence: TTA
gattttcaaaaataattatt

SEQ ID NO: 273125 - DNA, 20 bp, Artificial Sequence
  Description of Artificial Sequence: Synthetic oligonucleotide
  Target: LAMA2; (-) strand; PAM type: YTN; PAM sequence: CTT
agattttcaaaaataattat

SEQ ID NO: 273126 - DNA, 20 bp, Artificial Sequence
  Description of Artificial Sequence: Synthetic oligonucleotide
  Target: LAMA2; (-) strand; PAM type: YTN; PAM sequence: TTC
ttagattttcaaaaataatt

SEQ ID NO: 273127 - DNA, 20 bp, Artificial Sequence
  Description of Artificial Sequence: Synthetic oligonucleotide
  Target: LAMA2; (-) strand; PAM type: YTN; PAM sequence: TTT
cttagattttcaaaaataat

SEQ ID NO: 273128 - DNA, 20 bp, Artificial Sequence
  Description of Artificial Sequence: Synthetic oligonucleotide
  Target: LAMA2; (-) strand; PAM type: YTN; PAM sequence: TTT
tcttagattttcaaaaataa

SEQ ID NO: 273129 - DNA, 20 bp, Artificial Sequence
  Description of Artificial Sequence: Synthetic oligonucleotide
  Target: LAMA2; (-) strand; PAM type: YTN; PAM sequence: CTT
ttcttagattttcaaaaata

SEQ ID NO: 273130 - DNA, 20 bp, Artificial Sequence
  Description of Artificial Sequence: Synthetic oligonucleotide
  Target: LAMA2; (-) strand; PAM type: YTN; PAM sequence: CTC
ttttcttagattttcaaaaa

SEQ ID NO: 273131 - DNA, 20 bp, Artificial Sequence
  Description of Artificial Sequence: Synthetic oligonucleotide
  Target: LAMA2; (-) strand; PAM type: YTN; PAM sequence: CTC
tcttttcttagattttcaaa

SEQ ID NO: 273132 - DNA, 20 bp, Artificial Sequence
  Description of Artificial Sequence: Synthetic oligonucleotide
  Target: LAMA2; (-) strand; PAM type: YTN; PAM sequence: CTA
gcacatgctctcttttctta

SEQ ID NO: 273133 - DNA, 20 bp, Artificial Sequence
  Description of Artificial Sequence: Synthetic oligonucleotide
  Target: LAMA2; (-) strand; PAM type: YTN; PAM sequence: TTC
tagcacatgctctcttttct

SEQ ID NO: 273134 - DNA, 20 bp, Artificial Sequence
  Description of Artificial Sequence: Synthetic oligonucleotide
  Target: LAMA2; (-) strand; PAM type: YTN; PAM sequence: CTA
ttctagcacatgctctcttt

SEQ ID NO: 273135 - DNA, 20 bp, Artificial Sequence
  Description of Artificial Sequence: Synthetic oligonucleotide
  Target: LAMA2; (-) strand; PAM type: YTN; PAM sequence: TTA
cctattctagcacatgctct

SEQ ID NO: 273136 - DNA, 20 bp, Artificial Sequence
  Description of Artificial Sequence: Synthetic oligonucleotide
  Target: LAMA2; (-) strand; PAM type: YTN; PAM sequence: CTT
acctattctagcacatgctc

SEQ ID NO: 273137 - DNA, 20 bp, Artificial Sequence
  Description of Artificial Sequence: Synthetic oligonucleotide
  Target: LAMA2; (-) strand; PAM type: YTN; PAM sequence: CTC
cttacctattctagcacatg

SEQ ID NO: 273138 - DNA, 20 bp, Artificial Sequence
  Description of Artificial Sequence: Synthetic oligonucleotide
  Target: LAMA2; (-) strand; PAM type: YTN; PAM sequence: CTC
agtgaagccctccttaccta

SEQ ID NO: 273139 - DNA, 20 bp, Artificial Sequence
  Description of Artificial Sequence: Synthetic oligonucleotide
  Target: LAMA2; (-) strand; PAM type: YTN; PAM sequence: TTC
tcagtgaagccctccttacc

SEQ ID NO: 273140 - DNA, 20 bp, Artificial Sequence
  Description of Artificial Sequence: Synthetic oligonucleotide
  Target: LAMA2; (-) strand; PAM type: YTN; PAM sequence: CTT
ctcagtgaagccctccttac

SEQ ID NO: 273141 - DNA, 20 bp, Artificial Sequence
  Description of Artificial Sequence: Synthetic oligonucleotide
  Target: LAMA2; (-) strand; PAM type: YTN; PAM sequence: CTC
catcttctcagtgaagccct

SEQ ID NO: 273142 - DNA, 20 bp, Artificial Sequence
  Description of Artificial Sequence: Synthetic oligonucleotide
  Target: LAMA2; (-) strand; PAM type: YTN; PAM sequence: TTC
caactccatcttctcagtga

SEQ ID NO: 273143 - DNA, 20 bp, Artificial Sequence
  Description of Artificial Sequence: Synthetic oligonucleotide
  Target: LAMA2; (-) strand; PAM type: YTN; PAM sequence: TTC
aattccaactccatcttctc

SEQ ID NO: 273144 - DNA, 20 bp, Artificial Sequence
  Description of Artificial Sequence: Synthetic oligonucleotide
  Target: LAMA2; (-) strand; PAM type: YTN; PAM sequence: TTC
gagattcaattccaactcca

SEQ ID NO: 273145 - DNA, 20 bp, Artificial Sequence
  Description of Artificial Sequence: Synthetic oligonucleotide
  Target: LAMA2; (-) strand; PAM type: YTN; PAM sequence: TTT
cgagattcaattccaactcc

SEQ ID NO: 273146 - DNA, 20 bp, Artificial Sequence
  Description of Artificial Sequence: Synthetic oligonucleotide
  Target: LAMA2; (-) strand; PAM type: YTN; PAM sequence: CTT
tcgagattcaattccaactc

SEQ ID NO: 273147 - DNA, 20 bp, Artificial Sequence
  Description of Artificial Sequence: Synthetic oligonucleotide
  Target: LAMA2; (-) strand; PAM type: YTN; PAM sequence: TTA
tccaaaacaaatccagcttt

SEQ ID NO: 273148 - DNA, 20 bp, Artificial Sequence
  Description of Artificial Sequence: Synthetic oligonucleotide
  Target: LAMA2; (-) strand; PAM type: YTN; PAM sequence: CTT
atccaaaacaaatccagctt

SEQ ID NO: 273149 - DNA, 20 bp, Artificial Sequence
  Description of Artificial Sequence: Synthetic oligonucleotide
  Target: LAMA2; (-) strand; PAM type: YTN; PAM sequence: CTA
cttatccaaaacaaatccag

SEQ ID NO: 273150 - DNA, 20 bp, Artificial Sequence
  Description of Artificial Sequence: Synthetic oligonucleotide
  Target: LAMA2; (-) strand; PAM type: YTN; PAM sequence: CTC
tacttatccaaaacaaatcc

SEQ ID NO: 273151 - DNA, 20 bp, Artificial Sequence
  Description of Artificial Sequence: Synthetic oligonucleotide
  Target: LAMA2; (-) strand; PAM type: YTN; PAM sequence: TTC
tctacttatccaaaacaaat

SEQ ID NO: 273152 - DNA, 20 bp, Artificial Sequence
  Description of Artificial Sequence: Synthetic oligonucleotide
  Target: LAMA2; (-) strand; PAM type: YTN; PAM sequence: CTT
ctctacttatccaaaacaaa

SEQ ID NO: 273153 - DNA, 20 bp, Artificial Sequence
  Description of Artificial Sequence: Synthetic oligonucleotide
  Target: LAMA2; (-) strand; PAM type: YTN; PAM sequence: CTC
ttctctacttatccaaaaca

SEQ ID NO: 273154 - DNA, 20 bp, Artificial Sequence
  Description of Artificial Sequence: Synthetic oligonucleotide
  Target: LAMA2; (-) strand; PAM type: YTN; PAM sequence: TTA
actcttctctacttatccaa

SEQ ID NO: 273155 - DNA, 20 bp, Artificial Sequence
  Description of Artificial Sequence: Synthetic oligonucleotide
  Target: LAMA2; (-) strand; PAM type: YTN; PAM sequence: CTT
aactcttctctacttatcca

SEQ ID NO: 273156 - DNA, 20 bp, Artificial Sequence
  Description of Artificial Sequence: Synthetic oligonucleotide
  Target: LAMA2; (-) strand; PAM type: YTN; PAM sequence: TTC
ttaactcttctctacttatc

SEQ ID NO: 273157 - DNA, 20 bp, Artificial Sequence
  Description of Artificial Sequence: Synthetic oligonucleotide
  Target: LAMA2; (-) strand; PAM type: YTN; PAM sequence: CTT
cttaactcttctctacttat

SEQ ID NO: 273158 - DNA, 20 bp, Artificial Sequence
  Description of Artificial Sequence: Synthetic oligonucleotide
  Target: LAMA2; (-) strand; PAM type: YTN; PAM sequence: TTG
cttcttaactcttctctact

SEQ ID NO: 273159 - DNA, 20 bp, Artificial Sequence
  Description of Artificial Sequence: Synthetic oligonucleotide
  Target: LAMA2; (-) strand; PAM type: YTN; PAM sequence: TTT
gcttcttaactcttctctac

SEQ ID NO: 273160 - DNA, 20 bp, Artificial Sequence
  Description of Artificial Sequence: Synthetic oligonucleotide
  Target: LAMA2; (-) strand; PAM type: YTN; PAM sequence: TTT
tgcttcttaactcttctcta

SEQ ID NO: 273161 - DNA, 20 bp, Artificial Sequence
  Description of Artificial Sequence: Synthetic oligonucleotide
  Target: LAMA2; (-) strand; PAM type: YTN; PAM sequence: CTT
ttgcttcttaactcttctct

SEQ ID NO: 273162 - DNA, 20 bp, Artificial Sequence
  Description of Artificial Sequence: Synthetic oligonucleotide
  Target: LAMA2; (-) strand; PAM type: YTN; PAM sequence: TTC
atacttttgcttcttaactc

SEQ ID NO: 273163 - DNA, 20 bp, Artificial Sequence
  Description of Artificial Sequence: Synthetic oligonucleotide
  Target: LAMA2; (-) strand; PAM type: YTN; PAM sequence: TTG
ttcatacttttgcttcttaa

SEQ ID NO: 273164 - DNA, 20 bp, Artificial Sequence
  Description of Artificial Sequence: Synthetic oligonucleotide
  Target: LAMA2; (-) strand; PAM type: YTN; PAM sequence: TTT
gttcatacttttgcttctta

SEQ ID NO: 273165 - DNA, 20 bp, Artificial Sequence
  Description of Artificial Sequence: Synthetic oligonucleotide
  Target: LAMA2; (-) strand; PAM type: YTN; PAM sequence: TTT
tgttcatacttttgcttctt

SEQ ID NO: 273166 - DNA, 20 bp, Artificial Sequence
  Description of Artificial Sequence: Synthetic oligonucleotide
  Target: LAMA2; (-) strand; PAM type: YTN; PAM sequence: CTC
aaaaaaagattttgttcata

SEQ ID NO: 273167 - DNA, 20 bp, Artificial Sequence
  Description of Artificial Sequence: Synthetic oligonucleotide
  Target: LAMA2; (-) strand; PAM type: YTN; PAM sequence: TTC
tcaaaaaaagattttgttca

SEQ ID NO: 273168 - DNA, 20 bp, Artificial Sequence
  Description of Artificial Sequence: Synthetic oligonucleotide
  Target: LAMA2; (-) strand; PAM type: YTN; PAM sequence: TTG
gaacattctcaaaaaaagat

SEQ ID NO: 273169 - DNA, 20 bp, Artificial Sequence
  Description of Artificial Sequence: Synthetic oligonucleotide
  Target: LAMA2; (-) strand; PAM type: YTN; PAM sequence: TTT
ggaacattctcaaaaaaaga

SEQ ID NO: 273170 - DNA, 20 bp, Artificial Sequence
  Description of Artificial Sequence: Synthetic oligonucleotide
  Target: LAMA2; (-) strand; PAM type: YTN; PAM sequence: TTT
tggaacattctcaaaaaaag

SEQ ID NO: 273171 - DNA, 20 bp, Artificial Sequence
  Description of Artificial Sequence: Synthetic oligonucleotide
  Target: LAMA2; (-) strand; PAM type: YTN; PAM sequence: CTT
ttggaacattctcaaaaaaa

SEQ ID NO: 273172 - DNA, 20 bp, Artificial Sequence
  Description of Artificial Sequence: Synthetic oligonucleotide
  Target: LAMA2; (-) strand; PAM type: YTN; PAM sequence: TTC
cttttggaacattctcaaaa

SEQ ID NO: 273173 - DNA, 20 bp, Artificial Sequence
  Description of Artificial Sequence: Synthetic oligonucleotide
  Target: LAMA2; (-) strand; PAM type: YTN; PAM sequence: CTT
ccttttggaacattctcaaa

SEQ ID NO: 273174 - DNA, 20 bp, Artificial Sequence
  Description of Artificial Sequence: Synthetic oligonucleotide
  Target: LAMA2; (-) strand; PAM type: YTN; PAM sequence: CTA
cttccttttggaacattctc

SEQ ID NO: 273175 - DNA, 20 bp, Artificial Sequence
  Description of Artificial Sequence: Synthetic oligonucleotide
  Target: LAMA2; (-) strand; PAM type: YTN; PAM sequence: TTG
cctacttccttttggaacat

SEQ ID NO: 273176 - DNA, 20 bp, Artificial Sequence
  Description of Artificial Sequence: Synthetic oligonucleotide
  Target: LAMA2; (-) strand; PAM type: YTN; PAM sequence: CTT
gcctacttccttttggaaca

SEQ ID NO: 273177 - DNA, 20 bp, Artificial Sequence
  Description of Artificial Sequence: Synthetic oligonucleotide
  Target: LAMA2; (-) strand; PAM type: YTN; PAM sequence: TTC
ttgcctacttccttttggaa

SEQ ID NO: 273178 - DNA, 20 bp, Artificial Sequence
  Description of Artificial Sequence: Synthetic oligonucleotide
  Target: LAMA2; (-) strand; PAM type: YTN; PAM sequence: CTT
cttgcctacttccttttgga

SEQ ID NO: 273179 - DNA, 20 bp, Artificial Sequence
  Description of Artificial Sequence: Synthetic oligonucleotide
  Target: LAMA2; (-) strand; PAM type: YTN; PAM sequence: TTC
ttcttgcctacttccttttg

SEQ ID NO: 273180 - DNA, 20 bp, Artificial Sequence
  Description of Artificial Sequence: Synthetic oligonucleotide
  Target: LAMA2; (-) strand; PAM type: YTN; PAM sequence: TTA
ccattcttcttgcctacttc

SEQ ID NO: 273181 - DNA, 20 bp, Artificial Sequence
  Description of Artificial Sequence: Synthetic oligonucleotide
  Target: LAMA2; (-) strand; PAM type: YTN; PAM sequence: TTA
ttaccattcttcttgcctac

SEQ ID NO: 273182 - DNA, 20 bp, Artificial Sequence
  Description of Artificial Sequence: Synthetic oligonucleotide
  Target: LAMA2; (-) strand; PAM type: YTN; PAM sequence: CTT
attaccattcttcttgccta

SEQ ID NO: 273183 - DNA, 20 bp, Artificial Sequence
  Description of Artificial Sequence: Synthetic oligonucleotide
  Target: LAMA2; (-) strand; PAM type: YTN; PAM sequence: TTG
ccaaccttattaccattctt

SEQ ID NO: 273184 - DNA, 20 bp, Artificial Sequence
  Description of Artificial Sequence: Synthetic oligonucleotide
  Target: LAMA2; (-) strand; PAM type: YTN; PAM sequence: CTT
gccaaccttattaccattct

SEQ ID NO: 273185 - DNA, 20 bp, Artificial Sequence
  Description of Artificial Sequence: Synthetic oligonucleotide
  Target: LAMA2; (-) strand; PAM type: YTN; PAM sequence: CTA
accaatcttgccaaccttat

SEQ ID NO: 273186 - DNA, 20 bp, Artificial Sequence
  Description of Artificial Sequence: Synthetic oligonucleotide
  Target: LAMA2; (-) strand; PAM type: YTN; PAM sequence: TTC
ctaaccaatcttgccaacct

SEQ ID NO: 273187 - DNA, 20 bp, Artificial Sequence
  Description of Artificial Sequence: Synthetic oligonucleotide
  Target: LAMA2; (-) strand; PAM type: YTN; PAM sequence: TTT
cctaaccaatcttgccaacc

SEQ ID NO: 273188 - DNA, 20 bp, Artificial Sequence
  Description of Artificial Sequence: Synthetic oligonucleotide
  Target: LAMA2; (-) strand; PAM type: YTN; PAM sequence: TTT
tcctaaccaatcttgccaac

SEQ ID NO: 273189 - DNA, 20 bp, Artificial Sequence
  Description of Artificial Sequence: Synthetic oligonucleotide
  Target: LAMA2; (-) strand; PAM type: YTN; PAM sequence: CTA
aaaaacaattttcctaacca

SEQ ID NO: 273190 - DNA, 20 bp, Artificial Sequence
  Description of Artificial Sequence: Synthetic oligonucleotide
  Target: LAMA2; (-) strand; PAM type: YTN; PAM sequence: TTA
tatacaggactaaaaaacaa

SEQ ID NO: 273191 - DNA, 20 bp, Artificial Sequence
  Description of Artificial Sequence: Synthetic oligonucleotide
  Target: LAMA2; (-) strand; PAM type: YTN; PAM sequence: TTG
ttatatacaggactaaaaaa

SEQ ID NO: 273192 - DNA, 20 bp, Artificial Sequence
  Description of Artificial Sequence: Synthetic oligonucleotide
  Target: LAMA2; (-) strand; PAM type: YTN; PAM sequence: CTA
aagttgttatatacaggact

SEQ ID NO: 273193 - DNA, 20 bp, Artificial Sequence
  Description of Artificial Sequence: Synthetic oligonucleotide
  Target: LAMA2; (-) strand; PAM type: YTN; PAM sequence: CTC
taaagttgttatatacagga

SEQ ID NO: 273194 - DNA, 20 bp, Artificial Sequence
  Description of Artificial Sequence: Synthetic oligonucleotide
  Target: LAMA2; (-) strand; PAM type: YTN; PAM sequence: TTC
tctaaagttgttatatacag

SEQ ID NO: 273195 - DNA, 20 bp, Artificial Sequence
  Description of Artificial Sequence: Synthetic oligonucleotide
  Target: LAMA2; (-) strand; PAM type: YTN; PAM sequence: TTA
tagtaaatattctctaaagt

SEQ ID NO: 273196 - DNA, 20 bp, Artificial Sequence
  Description of Artificial Sequence: Synthetic oligonucleotide
  Target: LAMA2; (-) strand; PAM type: YTN; PAM sequence: CTT
atagtaaatattctctaaag

SEQ ID NO: 273197 - DNA, 20 bp, Artificial Sequence
  Description of Artificial Sequence: Synthetic oligonucleotide
  Target: LAMA2; (-) strand; PAM type: YTN; PAM sequence: CTA
acttatagtaaatattctct

SEQ ID NO: 273198 - DNA, 20 bp, Artificial Sequence
  Description of Artificial Sequence: Synthetic oligonucleotide
  Target: LAMA2; (-) strand; PAM type: YTN; PAM sequence: CTA
gtatgatgcctaacttatag

SEQ ID NO: 273199 - DNA, 20 bp, Artificial Sequence
  Description of Artificial Sequence: Synthetic oligonucleotide
  Target: LAMA2; (-) strand; PAM type: YTN; PAM sequence: CTC
ctagtatgatgcctaactta

SEQ ID NO: 273200 - DNA, 20 bp, Artificial Sequence
  Description of Artificial Sequence: Synthetic oligonucleotide
  Target: LAMA2; (-) strand; PAM type: YTN; PAM sequence: TTA
tcatatatccagctcctagt

SEQ ID NO: 273201 - DNA, 20 bp, Artificial Sequence
  Description of Artificial Sequence: Synthetic oligonucleotide
  Target: LAMA2; (-) strand; PAM type: YTN; PAM sequence: TTT
atcatatatccagctcctag

SEQ ID NO: 273202 - DNA, 20 bp, Artificial Sequence
  Description of Artificial Sequence: Synthetic oligonucleotide
  Target: LAMA2; (-) strand; PAM type: YTN; PAM sequence: TTG
tttatcatatatccagctcc

SEQ ID NO: 273203 - DNA, 20 bp, Artificial Sequence
  Description of Artificial Sequence: Synthetic oligonucleotide
  Target: LAMA2; (-) strand; PAM type: YTN; PAM sequence: TTT
gtttatcatatatccagctc

SEQ ID NO: 273204 - DNA, 20 bp, Artificial Sequence
  Description of Artificial Sequence: Synthetic oligonucleotide
  Target: LAMA2; (-) strand; PAM type: YTN; PAM sequence: TTT
tgtttatcatatatccagct

SEQ ID NO: 273205 - DNA, 20 bp, Artificial Sequence
  Description of Artificial Sequence: Synthetic oligonucleotide
  Target: LAMA2; (-) strand; PAM type: YTN; PAM sequence: CTG
ttttgtttatcatatatcca

SEQ ID NO: 273206 - DNA, 20 bp, Artificial Sequence
  Description of Artificial Sequence: Synthetic oligonucleotide
  Target: LAMA2; (-) strand; PAM type: YTN; PAM sequence: TTG
gtctgttttgtttatcatat

SEQ ID NO: 273207 - DNA, 20 bp, Artificial Sequence
  Description of Artificial Sequence: Synthetic oligonucleotide
  Target: LAMA2; (-) strand; PAM type: YTN; PAM sequence: CTT
ggtctgttttgtttatcata

SEQ ID NO: 273208 - DNA, 20 bp, Artificial Sequence
  Description of Artificial Sequence: Synthetic oligonucleotide
  Target: LAMA2; (-) strand; PAM type: YTN; PAM sequence: CTA
agggggtgagaacttggtct

SEQ ID NO: 273209 - DNA, 20 bp, Artificial Sequence
  Description of Artificial Sequence: Synthetic oligonucleotide
  Target: LAMA2; (-) strand; PAM type: YTN; PAM sequence: CTC
taagggggtgagaacttggt

SEQ ID NO: 273210 - DNA, 20 bp, Artificial Sequence
  Description of Artificial Sequence: Synthetic oligonucleotide
  Target: LAMA2; (-) strand; PAM type: YTN; PAM sequence: CTG
taaggtaagctctaaggggg

SEQ ID NO: 273211 - DNA, 20 bp, Artificial Sequence
  Description of Artificial Sequence: Synthetic oligonucleotide
  Target: LAMA2; (-) strand; PAM type: YTN; PAM sequence: CTC
caactgtaaggtaagctcta

SEQ ID NO: 273212 - DNA, 20 bp, Artificial Sequence
  Description of Artificial Sequence: Synthetic oligonucleotide
  Target: LAMA2; (-) strand; PAM type: YTN; PAM sequence: CTC
tccaactgtaaggtaagctc

SEQ ID NO: 273213 - DNA, 20 bp, Artificial Sequence
  Description of Artificial Sequence: Synthetic oligonucleotide
  Target: LAMA2; (-) strand; PAM type: YTN; PAM sequence: TTG
acaacctctccaactgtaag

SEQ ID NO: 273214 - DNA, 20 bp, Artificial Sequence
  Description of Artificial Sequence: Synthetic oligonucleotide
  Target: LAMA2; (-) strand; PAM type: YTN; PAM sequence: TTA
ttgacaacctctccaactgt

SEQ ID NO: 273215 - DNA, 20 bp, Artificial Sequence
  Description of Artificial Sequence: Synthetic oligonucleotide
  Target: LAMA2; (-) strand; PAM type: YTN; PAM sequence: TTT
attgacaacctctccaactg

SEQ ID NO: 273216 - DNA, 20 bp, Artificial Sequence
  Description of Artificial Sequence: Synthetic oligonucleotide
  Target: LAMA2; (-) strand; PAM type: YTN; PAM sequence: CTA
tttattgacaacctctccaa

SEQ ID NO: 273217 - DNA, 20 bp, Artificial Sequence
  Description of Artificial Sequence: Synthetic oligonucleotide
  Target: LAMA2; (-) strand; PAM type: YTN; PAM sequence: CTC
acctatttattgacaacctc

SEQ ID NO: 273218 - DNA, 20 bp, Artificial Sequence
  Description of Artificial Sequence: Synthetic oligonucleotide
  Target: LAMA2; (-) strand; PAM type: YTN; PAM sequence: TTG
gctcacctatttattgacaa

SEQ ID NO: 273219 - DNA, 20 bp, Artificial Sequence
  Description of Artificial Sequence: Synthetic oligonucleotide
  Target: LAMA2; (-) strand; PAM type: YTN; PAM sequence: TTA
gtaattggctcacctattta

SEQ ID NO: 273220 - DNA, 20 bp, Artificial Sequence
  Description of Artificial Sequence: Synthetic oligonucleotide
  Target: LAMA2; (-) strand; PAM type: YTN; PAM sequence: CTT
agtaattggctcacctattt

SEQ ID NO: 273221 - DNA, 20 bp, Artificial Sequence
  Description of Artificial Sequence: Synthetic oligonucleotide
  Target: LAMA2; (-) strand; PAM type: YTN; PAM sequence: TTA
cttagtaattggctcaccta

SEQ ID NO: 273222 - DNA, 20 bp, Artificial Sequence
  Description of Artificial Sequence: Synthetic oligonucleotide
  Target: LAMA2; (-) strand; PAM type: YTN; PAM sequence: TTG
agaattacttagtaattggc

SEQ ID NO: 273223 - DNA, 20 bp, Artificial Sequence
  Description of Artificial Sequence: Synthetic oligonucleotide
  Target: LAMA2; (-) strand; PAM type: YTN; PAM sequence: TTT
gagaattacttagtaattgg

SEQ ID NO: 273224 - DNA, 20 bp, Artificial Sequence
  Description of Artificial Sequence: Synthetic oligonucleotide
  Target: LAMA2; (-) strand; PAM type: YTN; PAM sequence: TTC
atagcaccatggatttgaga

SEQ ID NO: 273225 - DNA, 20 bp, Artificial Sequence
  Description of Artificial Sequence: Synthetic oligonucleotide
  Target: LAMA2; (-) strand; PAM type: YTN; PAM sequence: CTT
catagcaccatggatttgag

SEQ ID NO: 273226 - DNA, 20 bp, Artificial Sequence
  Description of Artificial Sequence: Synthetic oligonucleotide
  Target: LAMA2; (-) strand; PAM type: YTN; PAM sequence: TTC
cttcatagcaccatggattt

SEQ ID NO: 273227 - DNA, 20 bp, Artificial Sequence
  Description of Artificial Sequence: Synthetic oligonucleotide
  Target: LAMA2; (-) strand; PAM type: YTN; PAM sequence: TTT
ccttcatagcaccatggatt

SEQ ID NO: 273228 - DNA, 20 bp, Artificial Sequence
  Description of Artificial Sequence: Synthetic oligonucleotide
  Target: LAMA2; (-) strand; PAM type: YTN; PAM sequence: CTG
cagcaggacgtttccttcat

SEQ ID NO: 273229 - DNA, 20 bp, Artificial Sequence
  Description of Artificial Sequence: Synthetic oligonucleotide
  Target: LAMA2; (-) strand; PAM type: YTN; PAM sequence: TTC
ctgcagcaggacgtttcctt

SEQ ID NO: 273230 - DNA, 20 bp, Artificial Sequence
  Description of Artificial Sequence: Synthetic oligonucleotide
  Target: LAMA2; (-) strand; PAM type: YTN; PAM sequence: CTT
cctgcagcaggacgtttcct

SEQ ID NO: 273231 - DNA, 20 bp, Artificial Sequence
  Description of Artificial Sequence: Synthetic oligonucleotide
  Target: LAMA2; (-) strand; PAM type: YTN; PAM sequence: TTC
cacacttcctgcagcaggac

SEQ ID NO: 273232 - DNA, 20 bp, Artificial Sequence
  Description of Artificial Sequence: Synthetic oligonucleotide
  Target: LAMA2; (-) strand; PAM type: YTN; PAM sequence: TTT
ccacacttcctgcagcagga

SEQ ID NO: 273233 - DNA, 20 bp, Artificial Sequence
  Description of Artificial Sequence: Synthetic oligonucleotide
  Target: LAMA2; (-) strand; PAM type: YTN; PAM sequence: CTA
ggtttccacacttcctgcag

SEQ ID NO: 273234 - DNA, 20 bp, Artificial Sequence
  Description of Artificial Sequence: Synthetic oligonucleotide
  Target: LAMA2; (-) strand; PAM type: YTN; PAM sequence: CTA
cctaggtttccacacttcct

SEQ ID NO: 273235 - DNA, 20 bp, Artificial Sequence
  Description of Artificial Sequence: Synthetic oligonucleotide
  Target: LAMA2; (-) strand; PAM type: YTN; PAM sequence: TTC
ccagggtgctacctaggttt

SEQ ID NO: 273236 - DNA, 20 bp, Artificial Sequence
  Description of Artificial Sequence: Synthetic oligonucleotide
  Target: LAMA2; (-) strand; PAM type: YTN; PAM sequence: TTA
gcgtggccattcccagggtg

SEQ ID NO: 273237 - DNA, 20 bp, Artificial Sequence
  Description of Artificial Sequence: Synthetic oligonucleotide
  Target: LAMA2; (-) strand; PAM type: YTN; PAM sequence: CTT
agcgtggccattcccagggt

SEQ ID NO: 273238 - DNA, 20 bp, Artificial Sequence
  Description of Artificial Sequence: Synthetic oligonucleotide
  Target: LAMA2; (-) strand; PAM type: YTN; PAM sequence: CTC
cttagcgtggccattcccag

SEQ ID NO: 273239 - DNA, 20 bp, Artificial Sequence
  Description of Artificial Sequence: Synthetic oligonucleotide
  Target: LAMA2; (-) strand; PAM type: YTN; PAM sequence: TTC
tccttagcgtggccattccc

SEQ ID NO: 273240 - DNA, 20 bp, Artificial Sequence
  Description of Artificial Sequence: Synthetic oligonucleotide
  Target: LAMA2; (-) strand; PAM type: YTN; PAM sequence: CTT
ctccttagcgtggccattcc

SEQ ID NO: 273241 - DNA, 20 bp, Artificial Sequence
  Description of Artificial Sequence: Synthetic oligonucleotide
  Target: LAMA2; (-) strand; PAM type: YTN; PAM sequence: TTA
agtgcttctccttagcgtgg

SEQ ID NO: 273242 - DNA, 20 bp, Artificial Sequence
  Description of Artificial Sequence: Synthetic oligonucleotide
  Target: LAMA2; (-) strand; PAM type: YTN; PAM sequence: TTT
aagtgcttctccttagcgtg

SEQ ID NO: 273243 - DNA, 20 bp, Artificial Sequence
  Description of Artificial Sequence: Synthetic oligonucleotide
  Target: LAMA2; (-) strand; PAM type: YTN; PAM sequence: TTC
agtttaagtgcttctcctta

SEQ ID NO: 273244 - DNA, 20 bp, Artificial Sequence
  Description of Artificial Sequence: Synthetic oligonucleotide
  Target: LAMA2; (-) strand; PAM type: YTN; PAM sequence: TTT
cagtttaagtgcttctcctt

SEQ ID NO: 273245 - DNA, 20 bp, Artificial Sequence
  Description of Artificial Sequence: Synthetic oligonucleotide
  Target: LAMA2; (-) strand; PAM type: YTN; PAM sequence: CTT
tcagtttaagtgcttctcct

SEQ ID NO: 273246 - DNA, 20 bp, Artificial Sequence
  Description of Artificial Sequence: Synthetic oligonucleotide
  Target: LAMA2; (-) strand; PAM type: YTN; PAM sequence: TTA
cccatcagctttcagtttaa

SEQ ID NO: 273247 - DNA, 20 bp, Artificial Sequence
  Description of Artificial Sequence: Synthetic oligonucleotide
  Target: LAMA2; (-) strand; PAM type: YTN; PAM sequence: TTG
ttacccatcagctttcagtt

SEQ ID NO: 273248 - DNA, 20 bp, Artificial Sequence
  Description of Artificial Sequence: Synthetic oligonucleotide
  Target: LAMA2; (-) strand; PAM type: YTN; PAM sequence: CTT
gttacccatcagctttcagt

SEQ ID NO: 273249 - DNA, 20 bp, Artificial Sequence
  Description of Artificial Sequence: Synthetic oligonucleotide
  Target: LAMA2; (-) strand; PAM type: YTN; PAM sequence: CTG
ggtccttgttacccatcagc

SEQ ID NO: 273250 - DNA, 20 bp, Artificial Sequence
  Description of Artificial Sequence: Synthetic oligonucleotide
  Target: LAMA2; (-) strand; PAM type: YTN; PAM sequence: CTG
taaagactgggtccttgtta

SEQ ID NO: 273251 - DNA, 20 bp, Artificial Sequence
  Description of Artificial Sequence: Synthetic oligonucleotide
  Target: LAMA2; (-) strand; PAM type: YTN; PAM sequence: CTC
aacacctgtaaagactgggt

SEQ ID NO: 273252 - DNA, 20 bp, Artificial Sequence
  Description of Artificial Sequence: Synthetic oligonucleotide
  Target: LAMA2; (-) strand; PAM type: YTN; PAM sequence: CTC
ctcaacacctgtaaagactg

SEQ ID NO: 273253 - DNA, 20 bp, Artificial Sequence
  Description of Artificial Sequence: Synthetic oligonucleotide
  Target: LAMA2; (-) strand; PAM type: YTN; PAM sequence: TTC
tcctcaacacctgtaaagac

SEQ ID NO: 273254 - DNA, 20 bp, Artificial Sequence
  Description of Artificial Sequence: Synthetic oligonucleotide
  Target: LAMA2; (-) strand; PAM type: YTN; PAM sequence: CTT
ctcctcaacacctgtaaaga

SEQ ID NO: 273255 - DNA, 20 bp, Artificial Sequence
  Description of Artificial Sequence: Synthetic oligonucleotide
  Target: LAMA2; (-) strand; PAM type: YTN; PAM sequence: CTA
gaatgagcttctcctcaaca

SEQ ID NO: 273256 - DNA, 20 bp, Artificial Sequence
  Description of Artificial Sequence: Synthetic oligonucleotide
  Target: LAMA2; (-) strand; PAM type: YTN; PAM sequence: TTA
cctagaatgagcttctcctc

SEQ ID NO: 273257 - DNA, 20 bp, Artificial Sequence
  Description of Artificial Sequence: Synthetic oligonucleotide
  Target: LAMA2; (-) strand; PAM type: YTN; PAM sequence: TTT
acctagaatgagcttctcct

SEQ ID NO: 273258 - DNA, 20 bp, Artificial Sequence
  Description of Artificial Sequence: Synthetic oligonucleotide
  Target: LAMA2; (-) strand; PAM type: YTN; PAM sequence: CTT
tacctagaatgagcttctcc

SEQ ID NO: 273259 - DNA, 20 bp, Artificial Sequence
  Description of Artificial Sequence: Synthetic oligonucleotide
  Target: LAMA2; (-) strand; PAM type: YTN; PAM sequence: TTG
tctttacctagaatgagctt

SEQ ID NO: 273260 - DNA, 20 bp, Artificial Sequence
  Description of Artificial Sequence: Synthetic oligonucleotide
  Target: LAMA2; (-) strand; PAM type: YTN; PAM sequence: TTG
tatcccattgtctttaccta

SEQ ID NO: 273261 - DNA, 20 bp, Artificial Sequence
  Description of Artificial Sequence: Synthetic oligonucleotide
  Target: LAMA2; (-) strand; PAM type: YTN; PAM sequence: CTT
gtatcccattgtctttacct

SEQ ID NO: 273262 - DNA, 20 bp, Artificial Sequence
  Description of Artificial Sequence: Synthetic oligonucleotide
  Target: LAMA2; (-) strand; PAM type: YTN; PAM sequence: TTC
ttgtatcccattgtctttac

SEQ ID NO: 273263 - DNA, 20 bp, Artificial Sequence
  Description of Artificial Sequence: Synthetic oligonucleotide
  Target: LAMA2; (-) strand; PAM type: YTN; PAM sequence: CTT
cttgtatcccattgtcttta

SEQ ID NO: 273264 - DNA, 20 bp, Artificial Sequence
  Description of Artificial Sequence: Synthetic oligonucleotide
  Target: LAMA2; (-) strand; PAM type: YTN; PAM sequence: TTA
gcaccttcttgtatcccatt

SEQ ID NO: 273265 - DNA, 20 bp, Artificial Sequence
  Description of Artificial Sequence: Synthetic oligonucleotide
  Target: LAMA2; (-) strand; PAM type: YTN; PAM sequence: CTT
agcaccttcttgtatcccat

SEQ ID NO: 273266 - DNA, 20 bp, Artificial Sequence
  Description of Artificial Sequence: Synthetic oligonucleotide
  Target: LAMA2; (-) strand; PAM type: YTN; PAM sequence: TTC
ttagcaccttcttgtatccc

SEQ ID NO: 273267 - DNA, 20 bp, Artificial Sequence
  Description of Artificial Sequence: Synthetic oligonucleotide
  Target: LAMA2; (-) strand; PAM type: YTN; PAM sequence: CTT
cttagcaccttcttgtatcc

SEQ ID NO: 273268 - DNA, 20 bp, Artificial Sequence
  Description of Artificial Sequence: Synthetic oligonucleotide
  Target: LAMA2; (-) strand; PAM type: YTN; PAM sequence: CTC
atcccttcttagcaccttct

SEQ ID NO: 273269 - DNA, 20 bp, Artificial Sequence
  Description of Artificial Sequence: Synthetic oligonucleotide
  Target: LAMA2; (-) strand; PAM type: YTN; PAM sequence: TTA
aatatgcaaaactcatccct

SEQ ID NO: 273270 - DNA, 20 bp, Artificial Sequence
  Description of Artificial Sequence: Synthetic oligonucleotide
  Target: LAMA2; (-) strand; PAM type: YTN; PAM sequence: TTA
gtatattaaatatgcaaaac

SEQ ID NO: 273271 - DNA, 20 bp, Artificial Sequence
  Description of Artificial Sequence: Synthetic oligonucleotide
  Target: LAMA2; (-) strand; PAM type: YTN; PAM sequence: TTT
agtatattaaatatgcaaaa

SEQ ID NO: 273272 - DNA, 20 bp, Artificial Sequence
  Description of Artificial Sequence: Synthetic oligonucleotide
  Target: LAMA2; (-) strand; PAM type: YTN; PAM sequence: TTT
tagtatattaaatatgcaaa

SEQ ID NO: 273273 - DNA, 20 bp, Artificial Sequence
  Description of Artificial Sequence: Synthetic oligonucleotide
  Target: LAMA2; (-) strand; PAM type: YTN; PAM sequence: CTG
gcatagttttagtatattaa

SEQ ID NO: 273274 - DNA, 20 bp, Artificial Sequence
  Description of Artificial Sequence: Synthetic oligonucleotide
  Target: LAMA2; (-) strand; PAM type: YTN; PAM sequence: CTC
cctggcatagttttagtata

SEQ ID NO: 273275 - DNA, 20 bp, Artificial Sequence
  Description of Artificial Sequence: Synthetic oligonucleotide
  Target: LAMA2; (-) strand; PAM type: YTN; PAM sequence: CTA
tgcaatcaacctccctggca

SEQ ID NO: 273276 - DNA, 20 bp, Artificial Sequence
  Description of Artificial Sequence: Synthetic oligonucleotide
  Target: LAMA2; (-) strand; PAM type: YTN; PAM sequence: CTA
agaccctatgcaatcaacct

SEQ ID NO: 273277 - DNA, 20 bp, Artificial Sequence
  Description of Artificial Sequence: Synthetic oligonucleotide
  Target: LAMA2; (-) strand; PAM type: YTN; PAM sequence: TTA
gcactaagaccctatgcaat

SEQ ID NO: 273278 - DNA, 20 bp, Artificial Sequence
  Description of Artificial Sequence: Synthetic oligonucleotide
  Target: LAMA2; (-) strand; PAM type: YTN; PAM sequence: TTA
aaacaattagcactaagacc

SEQ ID NO: 273279 - DNA, 20 bp, Artificial Sequence
  Description of Artificial Sequence: Synthetic oligonucleotide
  Target: LAMA2; (-) strand; PAM type: YTN; PAM sequence: CTC
catgataagaaagaagttaa

SEQ ID NO: 273280 - DNA, 20 bp, Artificial Sequence
  Description of Artificial Sequence: Synthetic oligonucleotide
  Target: LAMA2; (-) strand; PAM type: YTN; PAM sequence: CTA
caaactccatgataagaaag

SEQ ID NO: 273281 - DNA, 20 bp, Artificial Sequence
  Description of Artificial Sequence: Synthetic oligonucleotide
  Target: LAMA2; (-) strand; PAM type: YTN; PAM sequence: TTG
tcaagaatcctacaaactcc

SEQ ID NO: 273282 - DNA, 20 bp, Artificial Sequence
  Description of Artificial Sequence: Synthetic oligonucleotide
  Target: LAMA2; (-) strand; PAM type: YTN; PAM sequence: CTA
aattgtcaagaatcctacaa

SEQ ID NO: 273283 - DNA, 20 bp, Artificial Sequence
  Description of Artificial Sequence: Synthetic oligonucleotide
  Target: LAMA2; (-) strand; PAM type: YTN; PAM sequence: TTC
aatactaaattgtcaagaat

SEQ ID NO: 273284 - DNA, 20 bp, Artificial Sequence
  Description of Artificial Sequence: Synthetic oligonucleotide
  Target: LAMA2; (-) strand; PAM type: YTN; PAM sequence: CTT
caatactaaattgtcaagaa

SEQ ID NO: 273285 - DNA, 20 bp, Artificial Sequence
  Description of Artificial Sequence: Synthetic oligonucleotide
  Target: LAMA2; (-) strand; PAM type: YTN; PAM sequence: TTA
cttcaatactaaattgtcaa

SEQ ID NO: 273286 - DNA, 20 bp, Artificial Sequence
  Description of Artificial Sequence: Synthetic oligonucleotide
  Target: LAMA2; (-) strand; PAM type: YTN; PAM sequence: TTA
tatgattacttcaatactaa

SEQ ID NO: 273287 - DNA, 20 bp, Artificial Sequence
  Description of Artificial Sequence: Synthetic oligonucleotide
  Target: LAMA2; (-) strand; PAM type: YTN; PAM sequence: TTG
attatatgattacttcaata

SEQ ID NO: 273288 - DNA, 20 bp, Artificial Sequence
  Description of Artificial Sequence: Synthetic oligonucleotide
  Target: LAMA2; (-) strand; PAM type: YTN; PAM sequence: TTA
gtattgattatatgattact

SEQ ID NO: 273289 - DNA, 20 bp, Artificial Sequence
  Description of Artificial Sequence: Synthetic oligonucleotide
  Target: LAMA2; (-) strand; PAM type: YTN; PAM sequence: CTT
agtattgattatatgattac

SEQ ID NO: 273290 - DNA, 20 bp, Artificial Sequence
  Description of Artificial Sequence: Synthetic oligonucleotide
  Target: LAMA2; (-) strand; PAM type: YTN; PAM sequence: TTC
ttagtattgattatatgatt

SEQ ID NO: 273291 - DNA, 20 bp, Artificial Sequence
  Description of Artificial Sequence: Synthetic oligonucleotide
  Target: LAMA2; (-) strand; PAM type: YTN; PAM sequence: TTA
ttcttagtattgattatatg

SEQ ID NO: 273292 - DNA, 20 bp, Artificial Sequence
  Description of Artificial Sequence: Synthetic oligonucleotide
  Target: LAMA2; (-) strand; PAM type: YTN; PAM sequence: TTT
attcttagtattgattatat

SEQ ID NO: 273293 - DNA, 20 bp, Artificial Sequence
  Description of Artificial Sequence: Synthetic oligonucleotide
  Target: LAMA2; (-) strand; PAM type: YTN; PAM sequence: TTT
tattcttagtattgattata

SEQ ID NO: 273294 - DNA, 20 bp, Artificial Sequence
  Description of Artificial Sequence: Synthetic oligonucleotide
  Target: LAMA2; (-) strand; PAM type: YTN; PAM sequence: TTC
acatgcattttattcttagt

SEQ ID NO: 273295 - DNA, 20 bp, Artificial Sequence
  Description of Artificial Sequence: Synthetic oligonucleotide
  Target: LAMA2; (-) strand; PAM type: YTN; PAM sequence: TTA
cgtagtaatgtgtaagagtc

SEQ ID NO: 273296 - DNA, 20 bp, Artificial Sequence
  Description of Artificial Sequence: Synthetic oligonucleotide
  Target: LAMA2; (-) strand; PAM type: YTN; PAM sequence: TTT
acgtagtaatgtgtaagagt

SEQ ID NO: 273297 - DNA, 20 bp, Artificial Sequence
  Description of Artificial Sequence: Synthetic oligonucleotide
  Target: LAMA2; (-) strand; PAM type: YTN; PAM sequence: TTC
atttacgtagtaatgtgtaa

SEQ ID NO: 273298 - DNA, 20 bp, Artificial Sequence
  Description of Artificial Sequence: Synthetic oligonucleotide
  Target: LAMA2; (-) strand; PAM type: YTN; PAM sequence: TTT
catttacgtagtaatgtgta

SEQ ID NO: 273299 - DNA, 20 bp, Artificial Sequence
  Description of Artificial Sequence: Synthetic oligonucleotide
  Target: LAMA2; (-) strand; PAM type: YTN; PAM sequence: TTA
tttcatttacgtagtaatgt

SEQ ID NO: 273300 - DNA, 20 bp, Artificial Sequence
  Description of Artificial Sequence: Synthetic oligonucleotide
  Target: LAMA2; (-) strand; PAM type: YTN; PAM sequence: TTG
tacaggttatttcatttacg

SEQ ID NO: 273301 - DNA, 20 bp, Artificial Sequence
  Description of Artificial Sequence: Synthetic oligonucleotide
  Target: LAMA2; (-) strand; PAM type: YTN; PAM sequence: CTG
ttgtacaggttatttcattt

SEQ ID NO: 273302 - DNA, 20 bp, Artificial Sequence
  Description of Artificial Sequence: Synthetic oligonucleotide
  Target: LAMA2; (-) strand; PAM type: YTN; PAM sequence: TTA
tgatctgttgtacaggttat

SEQ ID NO: 273303 - DNA, 20 bp, Artificial Sequence
  Description of Artificial Sequence: Synthetic oligonucleotide
  Target: LAMA2; (-) strand; PAM type: YTN; PAM sequence: CTT
atgatctgttgtacaggtta

SEQ ID NO: 273304 - DNA, 20 bp, Artificial Sequence
  Description of Artificial Sequence: Synthetic oligonucleotide
  Target: LAMA2; (-) strand; PAM type: YTN; PAM sequence: CTG
gcttatgatctgttgtacag

SEQ ID NO: 273305 - DNA, 20 bp, Artificial Sequence
  Description of Artificial Sequence: Synthetic oligonucleotide
  Target: LAMA2; (-) strand; PAM type: YTN; PAM sequence: CTC
tggcttatgatctgttgtac

SEQ ID NO: 273306 - DNA, 20 bp, Artificial Sequence
  Description of Artificial Sequence: Synthetic oligonucleotide
  Target: LAMA2; (-) strand; PAM type: YTN; PAM sequence: TTC
ctctggcttatgatctgttg

SEQ ID NO: 273307 - DNA, 20 bp, Artificial Sequence
  Description of Artificial Sequence: Synthetic oligonucleotide
  Target: LAMA2; (-) strand; PAM type: YTN; PAM sequence: CTT
cctctggcttatgatctgtt

SEQ ID NO: 273308 - DNA, 20 bp, Artificial Sequence
  Description of Artificial Sequence: Synthetic oligonucleotide
  Target: LAMA2; (-) strand; PAM type: YTN; PAM sequence: TTA
acttcctctggcttatgatc

SEQ ID NO: 273309 - DNA, 20 bp, Artificial Sequence
  Description of Artificial Sequence: Synthetic oligonucleotide
  Target: LAMA2; (-) strand; PAM type: YTN; PAM sequence: CTT
aacttcctctggcttatgat

SEQ ID NO: 273310 - DNA, 20 bp, Artificial Sequence
  Description of Artificial Sequence: Synthetic oligonucleotide
  Target: LAMA2; (-) strand; PAM type: YTN; PAM sequence: TTG
tcttaacttcctctggctta

SEQ ID NO: 273311 - DNA, 20 bp, Artificial Sequence
  Description of Artificial Sequence: Synthetic oligonucleotide
  Target: LAMA2; (-) strand; PAM type: YTN; PAM sequence: TTC
attgtcttaacttcctctgg

SEQ ID NO: 273312 - DNA, 20 bp, Artificial Sequence
  Description of Artificial Sequence: Synthetic oligonucleotide
  Target: LAMA2; (-) strand; PAM type: YTN; PAM sequence: CTG
gatgatcaagatcatattca

SEQ ID NO: 273313 - DNA, 20 bp, Artificial Sequence
  Description of Artificial Sequence: Synthetic oligonucleotide
  Target: LAMA2; (-) strand; PAM type: YTN; PAM sequence: TTC
tggatgatcaagatcatatt

SEQ ID NO: 273314 - DNA, 20 bp, Artificial Sequence
  Description of Artificial Sequence: Synthetic oligonucleotide
  Target: LAMA2; (-) strand; PAM type: YTN; PAM sequence: TTA
aattctggatgatcaagatc

SEQ ID NO: 273315 - DNA, 20 bp, Artificial Sequence
  Description of Artificial Sequence: Synthetic oligonucleotide
  Target: LAMA2; (-) strand; PAM type: YTN; PAM sequence: TTT
aaattctggatgatcaagat

SEQ ID NO: 273316 - DNA, 20 bp, Artificial Sequence
  Description of Artificial Sequence: Synthetic oligonucleotide
  Target: LAMA2; (-) strand; PAM type: YTN; PAM sequence: TTT
taaattctggatgatcaaga

SEQ ID NO: 273317 - DNA, 20 bp, Artificial Sequence
  Description of Artificial Sequence: Synthetic oligonucleotide
  Target: LAMA2; (-) strand; PAM type: YTN; PAM sequence: CTT
ttaaattctggatgatcaag

SEQ ID NO: 273318 - DNA, 20 bp, Artificial Sequence
  Description of Artificial Sequence: Synthetic oligonucleotide
  Target: LAMA2; (-) strand; PAM type: YTN; PAM sequence: CTC
ttttaaattctggatgatca

SEQ ID NO: 273319 - DNA, 20 bp, Artificial Sequence
  Description of Artificial Sequence: Synthetic oligonucleotide
  Target: LAMA2; (-) strand; PAM type: YTN; PAM sequence: CTG
tctcttttaaattctggatg

SEQ ID NO: 273320 - DNA, 20 bp, Artificial Sequence
  Description of Artificial Sequence: Synthetic oligonucleotide
  Target: LAMA2; (-) strand; PAM type: YTN; PAM sequence: TTA
aaaagtaaatgtatatcata

SEQ ID NO: 273321 - DNA, 20 bp, Artificial Sequence
  Description of Artificial Sequence: Synthetic oligonucleotide
  Target: LAMA2; (-) strand; PAM type: YTN; PAM sequence: TTT
aaaaagtaaatgtatatcat

SEQ ID NO: 273322 - DNA, 20 bp, Artificial Sequence
  Description of Artificial Sequence: Synthetic oligonucleotide
  Target: LAMA2; (-) strand; PAM type: YTN; PAM sequence: TTT
taaaaagtaaatgtatatca

SEQ ID NO: 273323 - DNA, 20 bp, Artificial Sequence
  Description of Artificial Sequence: Synthetic oligonucleotide
  Target: LAMA2; (-) strand; PAM type: YTN; PAM sequence: CTA
aattttaaaaagtaaatgta

SEQ ID NO: 273324 - DNA, 20 bp, Artificial Sequence
  Description of Artificial Sequence: Synthetic oligonucleotide
  Target: LAMA2; (-) strand; PAM type: YTN; PAM sequence: CTC
aaagtgtctaaattttaaaa

SEQ ID NO: 273325 - DNA, 20 bp, Artificial Sequence
  Description of Artificial Sequence: Synthetic oligonucleotide
  Target: LAMA2; (-) strand; PAM type: YTN; PAM sequence: TTA
taactcaaagtgtctaaatt

SEQ ID NO: 273326 - DNA, 20 bp, Artificial Sequence
  Description of Artificial Sequence: Synthetic oligonucleotide
  Target: LAMA2; (-) strand; PAM type: YTN; PAM sequence: TTT
ataactcaaagtgtctaaat

SEQ ID NO: 273327 - DNA, 20 bp, Artificial Sequence
  Description of Artificial Sequence: Synthetic oligonucleotide
  Target: LAMA2; (-) strand; PAM type: YTN; PAM sequence: TTA
tttataactcaaagtgtcta

SEQ ID NO: 273328 - DNA, 20 bp, Artificial Sequence
  Description of Artificial Sequence: Synthetic oligonucleotide
  Target: LAMA2; (-) strand; PAM type: YTN; PAM sequence: CTT
atttataactcaaagtgtct

SEQ ID NO: 273329 - DNA, 20 bp, Artificial Sequence
  Description of Artificial Sequence: Synthetic oligonucleotide
  Target: LAMA2; (-) strand; PAM type: YTN; PAM sequence: TTC
ttatttataactcaaagtgt

SEQ ID NO: 273330 - DNA, 20 bp, Artificial Sequence
  Description of Artificial Sequence: Synthetic oligonucleotide
  Target: LAMA2; (-) strand; PAM type: YTN; PAM sequence: TTC
acaccaagtggaccaattct

SEQ ID NO: 273331 - DNA, 20 bp, Artificial Sequence
  Description of Artificial Sequence: Synthetic oligonucleotide
  Target: LAMA2; (-) strand; PAM type: YTN; PAM sequence: TTT
cacaccaagtggaccaattc

SEQ ID NO: 273332 - DNA, 20 bp, Artificial Sequence
  Description of Artificial Sequence: Synthetic oligonucleotide
  Target: LAMA2; (-) strand; PAM type: YTN; PAM sequence: TTA
ccaaaagatcataatttcac

SEQ ID NO: 273333 - DNA, 20 bp, Artificial Sequence
  Description of Artificial Sequence: Synthetic oligonucleotide
  Target: LAMA2; (-) strand; PAM type: YTN; PAM sequence: CTG
tattaccaaaagatcataat

SEQ ID NO: 273334 - DNA, 20 bp, Artificial Sequence
  Description of Artificial Sequence: Synthetic oligonucleotide
  Target: LAMA2; (-) strand; PAM type: YTN; PAM sequence: TTC
tgtattaccaaaagatcata

SEQ ID NO: 273335 - DNA, 20 bp, Artificial Sequence
  Description of Artificial Sequence: Synthetic oligonucleotide
  Target: LAMA2; (-) strand; PAM type: YTN; PAM sequence: TTT
ctgtattaccaaaagatcat

SEQ ID NO: 273336 - DNA, 20 bp, Artificial Sequence
  Description of Artificial Sequence: Synthetic oligonucleotide
  Target: LAMA2; (-) strand; PAM type: YTN; PAM sequence: TTT
tctgtattaccaaaagatca

SEQ ID NO: 273337 - DNA, 20 bp, Artificial Sequence
  Description of Artificial Sequence: Synthetic oligonucleotide
  Target: LAMA2; (-) strand; PAM type: YTN; PAM sequence: TTC
atcaatatattttctgtatt

SEQ ID NO: 273338 - DNA, 20 bp, Artificial Sequence
  Description of Artificial Sequence: Synthetic oligonucleotide
  Target: LAMA2; (-) strand; PAM type: YTN; PAM sequence: CTT
catcaatatattttctgtat

SEQ ID NO: 273339 - DNA, 20 bp, Artificial Sequence
  Description of Artificial Sequence: Synthetic oligonucleotide
  Target: LAMA2; (-) strand; PAM type: YTN; PAM sequence: TTC
ttcatcaatatattttctgt

SEQ ID NO: 273340 - DNA, 20 bp, Artificial Sequence
  Description of Artificial Sequence: Synthetic oligonucleotide
  Target: LAMA2; (-) strand; PAM type: YTN; PAM sequence: TTT
cttcatcaatatattttctg

SEQ ID NO: 273341 - DNA, 20 bp, Artificial Sequence
  Description of Artificial Sequence: Synthetic oligonucleotide
  Target: LAMA2; (-) strand; PAM type: YTN; PAM sequence: TTT
tcttcatcaatatattttct

SEQ ID NO: 273342 - DNA, 20 bp, Artificial Sequence
  Description of Artificial Sequence: Synthetic oligonucleotide
  Target: LAMA2; (-) strand; PAM type: YTN; PAM sequence: TTT
ttcttcatcaatatattttc

SEQ ID NO: 273343 - DNA, 20 bp, Artificial Sequence
  Description of Artificial Sequence: Synthetic oligonucleotide
  Target: LAMA2; (-) strand; PAM type: YTN; PAM sequence: CTT
tttcttcatcaatatatttt

SEQ ID NO: 273344 - DNA, 20 bp, Artificial Sequence
  Description of Artificial Sequence: Synthetic oligonucleotide
  Target: LAMA2; (-) strand; PAM type: YTN; PAM sequence: TTC
tttttcttcatcaatatatt

SEQ ID NO: 273345 - DNA, 20 bp, Artificial Sequence
  Description of Artificial Sequence: Synthetic oligonucleotide
  Target: LAMA2; (-) strand; PAM type: YTN; PAM sequence: TTA
aaatatattctttttcttca

SEQ ID NO: 273346 - DNA, 20 bp, Artificial Sequence
  Description of Artificial Sequence: Synthetic oligonucleotide
  Target: LAMA2; (-) strand; PAM type: YTN; PAM sequence: CTT
aaaatatattctttttcttc

SEQ ID NO: 273347 - DNA, 20 bp, Artificial Sequence
  Description of Artificial Sequence: Synthetic oligonucleotide
  Target: LAMA2; (-) strand; PAM type: YTN; PAM sequence: TTA
aacttaaaatatattctttt

SEQ ID NO: 273348 - DNA, 20 bp, Artificial Sequence
  Description of Artificial Sequence: Synthetic oligonucleotide
  Target: LAMA2; (-) strand; PAM type: YTN; PAM sequence: TTT
aaacttaaaatatattcttt

SEQ ID NO: 273349 - DNA, 20 bp, Artificial Sequence
  Description of Artificial Sequence: Synthetic oligonucleotide
  Target: LAMA2; (-) strand; PAM type: YTN; PAM sequence: TTA
taatttaaacttaaaatata

SEQ ID NO: 273350 - DNA, 20 bp, Artificial Sequence
  Description of Artificial Sequence: Synthetic oligonucleotide
  Target: LAMA2; (-) strand; PAM type: YTN; PAM sequence: TTA
tggtacagaaaatgtacatt

SEQ ID NO: 273351 - DNA, 20 bp, Artificial Sequence
  Description of Artificial Sequence: Synthetic oligonucleotide
  Target: LAMA2; (-) strand; PAM type: YTN; PAM sequence: CTT
atggtacagaaaatgtacat

SEQ ID NO: 273352 - DNA, 20 bp, Artificial Sequence
  Description of Artificial Sequence: Synthetic oligonucleotide
  Target: LAMA2; (-) strand; PAM type: YTN; PAM sequence: CTC
ttatggtacagaaaatgtac

SEQ ID NO: 273353 - DNA, 20 bp, Artificial Sequence
  Description of Artificial Sequence: Synthetic oligonucleotide
  Target: LAMA2; (-) strand; PAM type: YTN; PAM sequence: CTA
gtgtctcttatggtacagaa

SEQ ID NO: 273354 - DNA, 20 bp, Artificial Sequence
  Description of Artificial Sequence: Synthetic oligonucleotide
  Target: LAMA2; (-) strand; PAM type: YTN; PAM sequence: TTA
atgtatcaataccactagtg

SEQ ID NO: 273355 - DNA, 20 bp, Artificial Sequence
  Description of Artificial Sequence: Synthetic oligonucleotide
  Target: LAMA2; (-) strand; PAM type: YTN; PAM sequence: TTA
cggattaatgtatcaatacc

SEQ ID NO: 273356 - DNA, 20 bp, Artificial Sequence
  Description of Artificial Sequence: Synthetic oligonucleotide
  Target: LAMA2; (-) strand; PAM type: YTN; PAM sequence: CTT
acggattaatgtatcaatac

SEQ ID NO: 273357 - DNA, 20 bp, Artificial Sequence
  Description of Artificial Sequence: Synthetic oligonucleotide
  Target: LAMA2; (-) strand; PAM type: YTN; PAM sequence: TTA
ccttacggattaatgtatca

SEQ ID NO: 273358 - DNA, 20 bp, Artificial Sequence
  Description of Artificial Sequence: Synthetic oligonucleotide
  Target: LAMA2; (-) strand; PAM type: YTN; PAM sequence: CTT
accttacggattaatgtatc

SEQ ID NO: 273359 - DNA, 20 bp, Artificial Sequence
  Description of Artificial Sequence: Synthetic oligonucleotide
  Target: LAMA2; (-) strand; PAM type: YTN; PAM sequence: TTC
caatatcttaccttacggat

SEQ ID NO: 273360 - DNA, 20 bp, Artificial Sequence
  Description of Artificial Sequence: Synthetic oligonucleotide
  Target: LAMA2; (-) strand; PAM type: YTN; PAM sequence: CTT
ccaatatcttaccttacgga

SEQ ID NO: 273361 - DNA, 20 bp, Artificial Sequence
  Description of Artificial Sequence: Synthetic oligonucleotide
  Target: LAMA2; (-) strand; PAM type: YTN; PAM sequence: TTG
gtcatcttccaatatcttac

SEQ ID NO: 273362 - DNA, 20 bp, Artificial Sequence
  Description of Artificial Sequence: Synthetic oligonucleotide
  Target: LAMA2; (-) strand; PAM type: YTN; PAM sequence: TTT
ggtcatcttccaatatctta

SEQ ID NO: 273363 - DNA, 20 bp, Artificial Sequence
  Description of Artificial Sequence: Synthetic oligonucleotide
  Target: LAMA2; (-) strand; PAM type: YTN; PAM sequence: TTT
tggtcatcttccaatatctt

SEQ ID NO: 273364 - DNA, 20 bp, Artificial Sequence
  Description of Artificial Sequence: Synthetic oligonucleotide
  Target: LAMA2; (-) strand; PAM type: YTN; PAM sequence: CTA
tattttggtcatcttccaat

SEQ ID NO: 273365 - DNA, 20 bp, Artificial Sequence
  Description of Artificial Sequence: Synthetic oligonucleotide
  Target: LAMA2; (-) strand; PAM type: YTN; PAM sequence: TTG
atctatattttggtcatctt

SEQ ID NO: 273366 - DNA, 20 bp, Artificial Sequence
  Description of Artificial Sequence: Synthetic oligonucleotide
  Target: LAMA2; (-) strand; PAM type: YTN; PAM sequence: CTT
gatctatattttggtcatct

SEQ ID NO: 273367 - DNA, 20 bp, Artificial Sequence
  Description of Artificial Sequence: Synthetic oligonucleotide
  Target: LAMA2; (-) strand; PAM type: YTN; PAM sequence: CTG
aacaccataataaggaactt

SEQ ID NO: 273368 - DNA, 20 bp, Artificial Sequence
  Description of Artificial Sequence: Synthetic oligonucleotide
  Target: LAMA2; (-) strand; PAM type: YTN; PAM sequence: TTA
ctgaacaccataataaggaa

SEQ ID NO: 273369 - DNA, 20 bp, Artificial Sequence
  Description of Artificial Sequence: Synthetic oligonucleotide
  Target: LAMA2; (-) strand; PAM type: YTN; PAM sequence: TTC
acatattactgaacaccata

SEQ ID NO: 273370 - DNA, 20 bp, Artificial Sequence
  Description of Artificial Sequence: Synthetic oligonucleotide
  Target: LAMA2; (-) strand; PAM type: YTN; PAM sequence: TTT
cacatattactgaacaccat

SEQ ID NO: 273371 - DNA, 20 bp, Artificial Sequence
  Description of Artificial Sequence: Synthetic oligonucleotide
  Target: LAMA2; (-) strand; PAM type: YTN; PAM sequence: CTT
tcacatattactgaacacca

SEQ ID NO: 273372 - DNA, 20 bp, Artificial Sequence
  Description of Artificial Sequence: Synthetic oligonucleotide
  Target: LAMA2; (-) strand; PAM type: YTN; PAM sequence: TTA
ctttcacatattactgaaca

SEQ ID NO: 273373 - DNA, 20 bp, Artificial Sequence
  Description of Artificial Sequence: Synthetic oligonucleotide
  Target: LAMA2; (-) strand; PAM type: YTN; PAM sequence: CTT
actttcacatattactgaac

SEQ ID NO: 273374 - DNA, 20 bp, Artificial Sequence
  Description of Artificial Sequence: Synthetic oligonucleotide
  Target: LAMA2; (-) strand; PAM type: YTN; PAM sequence: CTC
ttactttcacatattactga

SEQ ID NO: 273375 - DNA, 20 bp, Artificial Sequence
  Description of Artificial Sequence: Synthetic oligonucleotide
  Target: LAMA2; (-) strand; PAM type: YTN; PAM sequence: TTA
tggtaccactcttactttca

SEQ ID NO: 273376 - DNA, 20 bp, Artificial Sequence
  Description of Artificial Sequence: Synthetic oligonucleotide
  Target: LAMA2; (-) strand; PAM type: YTN; PAM sequence: TTT
atggtaccactcttactttc

SEQ ID NO: 273377 - DNA, 20 bp, Artificial Sequence
  Description of Artificial Sequence: Synthetic oligonucleotide
  Target: LAMA2; (-) strand; PAM type: YTN; PAM sequence: CTT
tatggtaccactcttacttt

SEQ ID NO: 273378 - DNA, 20 bp, Artificial Sequence
  Description of Artificial Sequence: Synthetic oligonucleotide
  Target: LAMA2; (-) strand; PAM type: YTN; PAM sequence: CTG
aactttatggtaccactctt

SEQ ID NO: 273379 - DNA, 20 bp, Artificial Sequence
  Description of Artificial Sequence: Synthetic oligonucleotide
  Target: LAMA2; (-) strand; PAM type: YTN; PAM sequence: TTG
actgaactttatggtaccac

SEQ ID NO: 273380 - DNA, 20 bp, Artificial Sequence
  Description of Artificial Sequence: Synthetic oligonucleotide
  Target: LAMA2; (-) strand; PAM type: YTN; PAM sequence: CTT
gactgaactttatggtacca

SEQ ID NO: 273381 - DNA, 20 bp, Artificial Sequence
  Description of Artificial Sequence: Synthetic oligonucleotide
  Target: LAMA2; (-) strand; PAM type: YTN; PAM sequence: CTA
gacttgactgaactttatgg

SEQ ID NO: 273382 - DNA, 20 bp, Artificial Sequence
  Description of Artificial Sequence: Synthetic oligonucleotide
  Target: LAMA2; (-) strand; PAM type: YTN; PAM sequence: CTA
gtctagacttgactgaactt

SEQ ID NO: 273383 - DNA, 20 bp, Artificial Sequence
  Description of Artificial Sequence: Synthetic oligonucleotide
  Target: LAMA2; (-) strand; PAM type: YTN; PAM sequence: TTC
tagtctagacttgactgaac

SEQ ID NO: 273384 - DNA, 20 bp, Artificial Sequence
  Description of Artificial Sequence: Synthetic oligonucleotide
  Target: LAMA2; (-) strand; PAM type: YTN; PAM sequence: TTT
ctagtctagacttgactgaa

SEQ ID NO: 273385 - DNA, 20 bp, Artificial Sequence
  Description of Artificial Sequence: Synthetic oligonucleotide
  Target: LAMA2; (-) strand; PAM type: YTN; PAM sequence: TTT
tctagtctagacttgactga

SEQ ID NO: 273386 - DNA, 20 bp, Artificial Sequence
  Description of Artificial Sequence: Synthetic oligonucleotide
  Target: LAMA2; (-) strand; PAM type: YTN; PAM sequence: TTT
ttctagtctagacttgactg

SEQ ID NO: 273387 - DNA, 20 bp, Artificial Sequence
  Description of Artificial Sequence: Synthetic oligonucleotide
  Target: LAMA2; (-) strand; PAM type: YTN; PAM sequence: TTG
gatatttttctagtctagac

SEQ ID NO: 273388 - DNA, 20 bp, Artificial Sequence
  Description of Artificial Sequence: Synthetic oligonucleotide
  Target: LAMA2; (-) strand; PAM type: YTN; PAM sequence: TTT
ggatatttttctagtctaga

SEQ ID NO: 273389 - DNA, 20 bp, Artificial Sequence
  Description of Artificial Sequence: Synthetic oligonucleotide
  Target: LAMA2; (-) strand; PAM type: YTN; PAM sequence: CTT
tggatatttttctagtctag

SEQ ID NO: 273390 - DNA, 20 bp, Artificial Sequence
  Description of Artificial Sequence: Synthetic oligonucleotide
  Target: LAMA2; (-) strand; PAM type: YTN; PAM sequence: CTG
ctttggatatttttctagtc

SEQ ID NO: 273391 - DNA, 20 bp, Artificial Sequence
  Description of Artificial Sequence: Synthetic oligonucleotide
  Target: LAMA2; (-) strand; PAM type: YTN; PAM sequence: CTA
aactgctttggatatttttc

SEQ ID NO: 273392 - DNA, 20 bp, Artificial Sequence
  Description of Artificial Sequence: Synthetic oligonucleotide
  Target: LAMA2; (-) strand; PAM type: YTN; PAM sequence: TTC
gtagtctaaactgctttgga

SEQ ID NO: 273393 - DNA, 20 bp, Artificial Sequence
  Description of Artificial Sequence: Synthetic oligonucleotide
  Target: LAMA2; (-) strand; PAM type: YTN; PAM sequence: CTC
aaaaaaaaagaaaagaaaag

SEQ ID NO: 273394 - DNA, 20 bp, Artificial Sequence
  Description of Artificial Sequence: Synthetic oligonucleotide
  Target: LAMA2; (-) strand; PAM type: YTN; PAM sequence: CTG
tctcaaaaaaaaagaaaaga

SEQ ID NO: 273395 - DNA, 20 bp, Artificial Sequence
  Description of Artificial Sequence: Synthetic oligonucleotide
  Target: LAMA2; (-) strand; PAM type: YTN; PAM sequence: CTC
tgtctcaaaaaaaaagaaaa

SEQ ID NO: 273396 - DNA, 20 bp, Artificial Sequence
  Description of Artificial Sequence: Synthetic oligonucleotide
  Target: LAMA2; (-) strand; PAM type: YTN; PAM sequence: CTG
gcgacagagcgagcctctgt

SEQ ID NO: 273397 - DNA, 20 bp, Artificial Sequence
  Description of Artificial Sequence: Synthetic oligonucleotide
  Target: LAMA2; (-) strand; PAM type: YTN; PAM sequence: CTC
cagcctggcgacagagcgag

SEQ ID NO: 273398 - DNA, 20 bp, Artificial Sequence
  Description of Artificial Sequence: Synthetic oligonucleotide
  Target: LAMA2; (-) strand; PAM type: YTN; PAM sequence: CTG
cactccagcctggcgacaga

SEQ ID NO: 273399 - DNA, 20 bp, Artificial Sequence
  Description of Artificial Sequence: Synthetic oligonucleotide
  Target: LAMA2; (-) strand; PAM type: YTN; PAM sequence: TTG
gcagtgagccgagatcacgc

SEQ ID NO: 273400 - DNA, 20 bp, Artificial Sequence
  Description of Artificial Sequence: Synthetic oligonucleotide
  Target: LAMA2; (-) strand; PAM type: YTN; PAM sequence: CTT
ggcagtgagccgagatcacg

SEQ ID NO: 273401 - DNA, 20 bp, Artificial Sequence
  Description of Artificial Sequence: Synthetic oligonucleotide
  Target: LAMA2; (-) strand; PAM type: YTN; PAM sequence: CTA
aggtcaacagcttggcagtg

SEQ ID NO: 273402 - DNA, 20 bp, Artificial Sequence
  Description of Artificial Sequence: Synthetic oligonucleotide
  Target: LAMA2; (-) strand; PAM type: YTN; PAM sequence: CTA
actaaggtcaacagcttggc

SEQ ID NO: 273403 - DNA, 20 bp, Artificial Sequence
  Description of Artificial Sequence: Synthetic oligonucleotide
  Target: LAMA2; (-) strand; PAM type: YTN; PAM sequence: CTG
aatcactaactaaggtcaac

SEQ ID NO: 273404 - DNA, 20 bp, Artificial Sequence
  Description of Artificial Sequence: Synthetic oligonucleotide
  Target: LAMA2; (-) strand; PAM type: YTN; PAM sequence: TTC
tgaatcactaactaaggtca

SEQ ID NO: 273405 - DNA, 20 bp, Artificial Sequence
  Description of Artificial Sequence: Synthetic oligonucleotide
  Target: LAMA2; (-) strand; PAM type: YTN; PAM sequence: CTT
ctgaatcactaactaaggtc

SEQ ID NO: 273406 - DNA, 20 bp, Artificial Sequence
  Description of Artificial Sequence: Synthetic oligonucleotide
  Target: LAMA2; (-) strand; PAM type: YTN; PAM sequence: TTA
cttctgaatcactaactaag

SEQ ID NO: 273407 - DNA, 20 bp, Artificial Sequence
  Description of Artificial Sequence: Synthetic oligonucleotide
  Target: LAMA2; (-) strand; PAM type: YTN; PAM sequence: TTA
aatgttacttctgaatcact

SEQ ID NO: 273408 - DNA, 20 bp, Artificial Sequence
  Description of Artificial Sequence: Synthetic oligonucleotide
  Target: LAMA2; (-) strand; PAM type: YTN; PAM sequence: TTT
aaatgttacttctgaatcac

SEQ ID NO: 273409 - DNA, 20 bp, Artificial Sequence
  Description of Artificial Sequence: Synthetic oligonucleotide
  Target: LAMA2; (-) strand; PAM type: YTN; PAM sequence: TTA
tttaaatgttacttctgaat

SEQ ID NO: 273410 - DNA, 20 bp, Artificial Sequence
  Description of Artificial Sequence: Synthetic oligonucleotide
  Target: LAMA2; (-) strand; PAM type: YTN; PAM sequence: CTC
atacccaattatttaaatgt

SEQ ID NO: 273411 - DNA, 20 bp, Artificial Sequence
  Description of Artificial Sequence: Synthetic oligonucleotide
  Target: LAMA2; (-) strand; PAM type: YTN; PAM sequence: TTC
acatacacacacacatactc

SEQ ID NO: 273412 - DNA, 20 bp, Artificial Sequence
  Description of Artificial Sequence: Synthetic oligonucleotide
  Target: LAMA2; (-) strand; PAM type: YTN; PAM sequence: TTA
cacacagacacatatacata

SEQ ID NO: 273413 - DNA, 20 bp, Artificial Sequence
  Description of Artificial Sequence: Synthetic oligonucleotide
  Target: LAMA2; (-) strand; PAM type: YTN; PAM sequence: TTT
acacacagacacatatacat

SEQ ID NO: 273414 - DNA, 20 bp, Artificial Sequence
  Description of Artificial Sequence: Synthetic oligonucleotide
  Target: LAMA2; (-) strand; PAM type: YTN; PAM sequence: TTT
tacacacagacacatataca

SEQ ID NO: 273415 - DNA, 20 bp, Artificial Sequence
  Description of Artificial Sequence: Synthetic oligonucleotide
  Target: LAMA2; (-) strand; PAM type: YTN; PAM sequence: TTT
ttacacacagacacatatac

SEQ ID NO: 273416 - DNA, 20 bp, Artificial Sequence
  Description of Artificial Sequence: Synthetic oligonucleotide
  Target: LAMA2; (-) strand; PAM type: YTN; PAM sequence: CTT
tttacacacagacacatata

SEQ ID NO: 273417 - DNA, 20 bp, Artificial Sequence
  Description of Artificial Sequence: Synthetic oligonucleotide
  Target: LAMA2; (-) strand; PAM type: YTN; PAM sequence: CTG
atgggtcaaataacttttta

SEQ ID NO: 273418 - DNA, 20 bp, Artificial Sequence
  Description of Artificial Sequence: Synthetic oligonucleotide
  Target: LAMA2; (-) strand; PAM type: YTN; PAM sequence: CTC
aaaggtctgatgggtcaaat

SEQ ID NO: 273419 - DNA, 20 bp, Artificial Sequence
  Description of Artificial Sequence: Synthetic oligonucleotide
  Target: LAMA2; (-) strand; PAM type: YTN; PAM sequence: TTG
cactcaaaggtctgatgggt

SEQ ID NO: 273420 - DNA, 20 bp, Artificial Sequence
  Description of Artificial Sequence: Synthetic oligonucleotide
  Target: LAMA2; (-) strand; PAM type: YTN; PAM sequence: TTT
gcactcaaaggtctgatggg

SEQ ID NO: 273421 - DNA, 20 bp, Artificial Sequence
  Description of Artificial Sequence: Synthetic oligonucleotide
  Target: LAMA2; (-) strand; PAM type: YTN; PAM sequence: CTG
cacgtgtttgcactcaaagg

SEQ ID NO: 273422 - DNA, 20 bp, Artificial Sequence
  Description of Artificial Sequence: Synthetic oligonucleotide
  Target: LAMA2; (-) strand; PAM type: YTN; PAM sequence: TTC
ctgcacgtgtttgcactcaa

SEQ ID NO: 273423 - DNA, 20 bp, Artificial Sequence
  Description of Artificial Sequence: Synthetic oligonucleotide
  Target: LAMA2; (-) strand; PAM type: YTN; PAM sequence: CTT
cctgcacgtgtttgcactca

SEQ ID NO: 273424 - DNA, 20 bp, Artificial Sequence
  Description of Artificial Sequence: Synthetic oligonucleotide
  Target: LAMA2; (-) strand; PAM type: YTN; PAM sequence: TTG
gcttcctgcacgtgtttgca

SEQ ID NO: 273425 - DNA, 20 bp, Artificial Sequence
  Description of Artificial Sequence: Synthetic oligonucleotide
  Target: LAMA2; (-) strand; PAM type: YTN; PAM sequence: CTT
ggcttcctgcacgtgtttgc

SEQ ID NO: 273426 - DNA, 20 bp, Artificial Sequence
  Description of Artificial Sequence: Synthetic oligonucleotide
  Target: LAMA2; (-) strand; PAM type: YTN; PAM sequence: TTA
aacttggcttcctgcacgtg

SEQ ID NO: 273427 - DNA, 20 bp, Artificial Sequence
  Description of Artificial Sequence: Synthetic oligonucleotide
  Target: LAMA2; (-) strand; PAM type: YTN; PAM sequence: CTT
aaacttggcttcctgcacgt

SEQ ID NO: 273428 - DNA, 20 bp, Artificial Sequence
  Description of Artificial Sequence: Synthetic oligonucleotide
  Target: LAMA2; (-) strand; PAM type: YTN; PAM sequence: TTC
cttaaacttggcttcctgca

SEQ ID NO: 273429 - DNA, 20 bp, Artificial Sequence
  Description of Artificial Sequence: Synthetic oligonucleotide
  Target: LAMA2; (-) strand; PAM type: YTN; PAM sequence: TTT
ccttaaacttggcttcctgc

SEQ ID NO: 273430 - DNA, 20 bp, Artificial Sequence
  Description of Artificial Sequence: Synthetic oligonucleotide
  Target: LAMA2; (-) strand; PAM type: YTN; PAM sequence: TTA
atttccttaaacttggcttc

SEQ ID NO: 273431 - DNA, 20 bp, Artificial Sequence
  Description of Artificial Sequence: Synthetic oligonucleotide
  Target: LAMA2; (-) strand; PAM type: YTN; PAM sequence: TTC
cattaatttccttaaacttg

SEQ ID NO: 273432 - DNA, 20 bp, Artificial Sequence
  Description of Artificial Sequence: Synthetic oligonucleotide
  Target: LAMA2; (-) strand; PAM type: YTN; PAM sequence: TTA
tgttccattaatttccttaa

SEQ ID NO: 273433 - DNA, 20 bp, Artificial Sequence
  Description of Artificial Sequence: Synthetic oligonucleotide
  Target: LAMA2; (-) strand; PAM type: YTN; PAM sequence: TTG
taattatgttccattaattt

SEQ ID NO: 273434 - DNA, 20 bp, Artificial Sequence
  Description of Artificial Sequence: Synthetic oligonucleotide
  Target: LAMA2; (-) strand; PAM type: YTN; PAM sequence: CTG
gtgagtgttgtaattatgtt

SEQ ID NO: 273435 - DNA, 20 bp, Artificial Sequence
  Description of Artificial Sequence: Synthetic oligonucleotide
  Target: LAMA2; (-) strand; PAM type: YTN; PAM sequence: TTC
tggtgagtgttgtaattatg

SEQ ID NO: 273436 - DNA, 20 bp, Artificial Sequence
  Description of Artificial Sequence: Synthetic oligonucleotide
  Target: LAMA2; (-) strand; PAM type: YTN; PAM sequence: TTT
ctggtgagtgttgtaattat

SEQ ID NO: 273437 - DNA, 20 bp, Artificial Sequence
  Description of Artificial Sequence: Synthetic oligonucleotide
  Target: LAMA2; (-) strand; PAM type: YTN; PAM sequence: TTT
tctggtgagtgttgtaatta

SEQ ID NO: 273438 - DNA, 20 bp, Artificial Sequence
  Description of Artificial Sequence: Synthetic oligonucleotide
  Target: LAMA2; (-) strand; PAM type: YTN; PAM sequence: CTT
ttctggtgagtgttgtaatt

SEQ ID NO: 273439 - DNA, 20 bp, Artificial Sequence
  Description of Artificial Sequence: Synthetic oligonucleotide
  Target: LAMA2; (-) strand; PAM type: YTN; PAM sequence: TTG
cttttctggtgagtgttgta

SEQ ID NO: 273440 - DNA, 20 bp, Artificial Sequence
  Description of Artificial Sequence: Synthetic oligonucleotide
  Target: LAMA2; (-) strand; PAM type: YTN; PAM sequence: CTT
gcttttctggtgagtgttgt

SEQ ID NO: 273441 - DNA, 20 bp, Artificial Sequence
  Description of Artificial Sequence: Synthetic oligonucleotide
  Target: LAMA2; (-) strand; PAM type: YTN; PAM sequence: CTC
aaatccttgcttttctggtg

SEQ ID NO: 273442 - DNA, 20 bp, Artificial Sequence
  Description of Artificial Sequence: Synthetic oligonucleotide
  Target: LAMA2; (-) strand; PAM type: YTN; PAM sequence: TTA
ctcaaatccttgcttttctg

SEQ ID NO: 273443 - DNA, 20 bp, Artificial Sequence
  Description of Artificial Sequence: Synthetic oligonucleotide
  Target: LAMA2; (-) strand; PAM type: YTN; PAM sequence: CTA
ggttactcaaatccttgctt

SEQ ID NO: 273444 - DNA, 20 bp, Artificial Sequence
  Description of Artificial Sequence: Synthetic oligonucleotide
  Target: LAMA2; (-) strand; PAM type: YTN; PAM sequence: CTG
tgcatccagtccctaggtta

SEQ ID NO: 273445 - DNA, 20 bp, Artificial Sequence
  Description of Artificial Sequence: Synthetic oligonucleotide
  Target: LAMA2; (-) strand; PAM type: YTN; PAM sequence: TTG
ggataaactgtgcatccagt

SEQ ID NO: 273446 - DNA, 20 bp, Artificial Sequence
  Description of Artificial Sequence: Synthetic oligonucleotide
  Target: LAMA2; (-) strand; PAM type: YTN; PAM sequence: TTT
gggataaactgtgcatccag

SEQ ID NO: 273447 - DNA, 20 bp, Artificial Sequence
  Description of Artificial Sequence: Synthetic oligonucleotide
  Target: LAMA2; (-) strand; PAM type: YTN; PAM sequence: TTT
tgggataaactgtgcatcca

SEQ ID NO: 273448 - DNA, 20 bp, Artificial Sequence
  Description of Artificial Sequence: Synthetic oligonucleotide
  Target: LAMA2; (-) strand; PAM type: YTN; PAM sequence: TTT
ttgggataaactgtgcatcc

SEQ ID NO: 273449 - DNA, 20 bp, Artificial Sequence
  Description of Artificial Sequence: Synthetic oligonucleotide
  Target: LAMA2; (-) strand; PAM type: YTN; PAM sequence: TTT
tttgggataaactgtgcatc

SEQ ID NO: 273450 - DNA, 20 bp, Artificial Sequence
  Description of Artificial Sequence: Synthetic oligonucleotide
  Target: LAMA2; (-) strand; PAM type: YTN; PAM sequence: TTT
ttttgggataaactgtgcat

SEQ ID NO: 273451 - DNA, 20 bp, Artificial Sequence
  Description of Artificial Sequence: Synthetic oligonucleotide
  Target: LAMA2; (-) strand; PAM type: YTN; PAM sequence: TTA
aaaatttttttgggataaac

SEQ ID NO: 273452 - DNA, 20 bp, Artificial Sequence
  Description of Artificial Sequence: Synthetic oligonucleotide
  Target: LAMA2; (-) strand; PAM type: YTN; PAM sequence: TTT
aaaaatttttttgggataaa

SEQ ID NO: 273453 - DNA, 20 bp, Artificial Sequence
  Description of Artificial Sequence: Synthetic oligonucleotide
  Target: LAMA2; (-) strand; PAM type: YTN; PAM sequence: TTG
gatttaaaaatttttttggg

SEQ ID NO: 273454 - DNA, 20 bp, Artificial Sequence
  Description of Artificial Sequence: Synthetic oligonucleotide
  Target: LAMA2; (-) strand; PAM type: YTN; PAM sequence: TTT
ggatttaaaaatttttttgg

SEQ ID NO: 273455 - DNA, 20 bp, Artificial Sequence
  Description of Artificial Sequence: Synthetic oligonucleotide
  Target: LAMA2; (-) strand; PAM type: YTN; PAM sequence: TTT
tggatttaaaaatttttttg

SEQ ID NO: 273456 - DNA, 20 bp, Artificial Sequence
  Description of Artificial Sequence: Synthetic oligonucleotide
  Target: LAMA2; (-) strand; PAM type: YTN; PAM sequence: CTT
ttggatttaaaaattttttt

SEQ ID NO: 273457 - DNA, 20 bp, Artificial Sequence
  Description of Artificial Sequence: Synthetic oligonucleotide
  Target: LAMA2; (-) strand; PAM type: YTN; PAM sequence: TTC
acttttggatttaaaaattt

SEQ ID NO: 273458 - DNA, 20 bp, Artificial Sequence
  Description of Artificial Sequence: Synthetic oligonucleotide
  Target: LAMA2; (-) strand; PAM type: YTN; PAM sequence: TTT
cacttttggatttaaaaatt

SEQ ID NO: 273459 - DNA, 20 bp, Artificial Sequence
  Description of Artificial Sequence: Synthetic oligonucleotide
  Target: LAMA2; (-) strand; PAM type: YTN; PAM sequence: TTT
tcacttttggatttaaaaat

SEQ ID NO: 273460 - DNA, 20 bp, Artificial Sequence
  Description of Artificial Sequence: Synthetic oligonucleotide
  Target: LAMA2; (-) strand; PAM type: YTN; PAM sequence: TTA
ttttcacttttggatttaaa

SEQ ID NO: 273461 - DNA, 20 bp, Artificial Sequence
  Description of Artificial Sequence: Synthetic oligonucleotide
  Target: LAMA2; (-) strand; PAM type: YTN; PAM sequence: TTA
ataatggaattattttcact

SEQ ID NO: 273462 - DNA, 20 bp, Artificial Sequence
  Description of Artificial Sequence: Synthetic oligonucleotide
  Target: LAMA2; (-) strand; PAM type: YTN; PAM sequence: CTA
aaacattaataatggaatta

SEQ ID NO: 273463 - DNA, 20 bp, Artificial Sequence
  Description of Artificial Sequence: Synthetic oligonucleotide
  Target: LAMA2; (-) strand; PAM type: YTN; PAM sequence: TTC
taaaacattaataatggaat

SEQ ID NO: 273464 - DNA, 20 bp, Artificial Sequence
  Description of Artificial Sequence: Synthetic oligonucleotide
  Target: LAMA2; (-) strand; PAM type: YTN; PAM sequence: CTT
ctaaaacattaataatggaa

SEQ ID NO: 273465 - DNA, 20 bp, Artificial Sequence
  Description of Artificial Sequence: Synthetic oligonucleotide
  Target: LAMA2; (-) strand; PAM type: YTN; PAM sequence: TTC
ttctaaaacattaataatgg

SEQ ID NO: 273466 - DNA, 20 bp, Artificial Sequence
  Description of Artificial Sequence: Synthetic oligonucleotide
  Target: LAMA2; (-) strand; PAM type: YTN; PAM sequence: TTA
ttcttctaaaacattaataa

SEQ ID NO: 273467 - DNA, 20 bp, Artificial Sequence
  Description of Artificial Sequence: Synthetic oligonucleotide
  Target: LAMA2; (-) strand; PAM type: YTN; PAM sequence: TTT
attcttctaaaacattaata

SEQ ID NO: 273468 - DNA, 20 bp, Artificial Sequence
  Description of Artificial Sequence: Synthetic oligonucleotide
  Target: LAMA2; (-) strand; PAM type: YTN; PAM sequence: CTG
gatttattcttctaaaacat

SEQ ID NO: 273469 - DNA, 20 bp, Artificial Sequence
  Description of Artificial Sequence: Synthetic oligonucleotide
  Target: LAMA2; (-) strand; PAM type: YTN; PAM sequence: CTC
tggatttattcttctaaaac

SEQ ID NO: 273470 - DNA, 20 bp, Artificial Sequence
  Description of Artificial Sequence: Synthetic oligonucleotide
  Target: LAMA2; (-) strand; PAM type: YTN; PAM sequence: TTA
taatgctctggatttattct

SEQ ID NO: 273471 - DNA, 20 bp, Artificial Sequence
  Description of Artificial Sequence: Synthetic oligonucleotide
  Target: LAMA2; (-) strand; PAM type: YTN; PAM sequence: TTA
accaaagtattataatgctc

SEQ ID NO: 273472 - DNA, 20 bp, Artificial Sequence
  Description of Artificial Sequence: Synthetic oligonucleotide
  Target: LAMA2; (-) strand; PAM type: YTN; PAM sequence: TTG
gagagtattaaccaaagtat

SEQ ID NO: 273473 - DNA, 20 bp, Artificial Sequence
  Description of Artificial Sequence: Synthetic oligonucleotide
  Target: LAMA2; (-) strand; PAM type: YTN; PAM sequence: TTT
ggagagtattaaccaaagta

SEQ ID NO: 273474 - DNA, 20 bp, Artificial Sequence
  Description of Artificial Sequence: Synthetic oligonucleotide
  Target: LAMA2; (-) strand; PAM type: YTN; PAM sequence: TTG
cagtacatatacacaataat

SEQ ID NO: 273475 - DNA, 20 bp, Artificial Sequence
  Description of Artificial Sequence: Synthetic oligonucleotide
  Target: LAMA2; (-) strand; PAM type: YTN; PAM sequence: TTT
gcagtacatatacacaataa

SEQ ID NO: 273476 - DNA, 20 bp, Artificial Sequence
  Description of Artificial Sequence: Synthetic oligonucleotide
  Target: LAMA2; (-) strand; PAM type: YTN; PAM sequence: CTG
tataatttgcagtacatata

SEQ ID NO: 273477 - DNA, 20 bp, Artificial Sequence
  Description of Artificial Sequence: Synthetic oligonucleotide
  Target: LAMA2; (-) strand; PAM type: YTN; PAM sequence: TTC
tgtataatttgcagtacata

SEQ ID NO: 273478 - DNA, 20 bp, Artificial Sequence
  Description of Artificial Sequence: Synthetic oligonucleotide
  Target: LAMA2; (-) strand; PAM type: YTN; PAM sequence: TTT
ctgtataatttgcagtacat

SEQ ID NO: 273479 - DNA, 20 bp, Artificial Sequence
  Description of Artificial Sequence: Synthetic oligonucleotide
  Target: LAMA2; (-) strand; PAM type: YTN; PAM sequence: TTT
tctgtataatttgcagtaca

SEQ ID NO: 273480 - DNA, 20 bp, Artificial Sequence
  Description of Artificial Sequence: Synthetic oligonucleotide
  Target: LAMA2; (-) strand; PAM type: YTN; PAM sequence: TTT
ttctgtataatttgcagtac

SEQ ID NO: 273481 - DNA, 20 bp, Artificial Sequence
  Description of Artificial Sequence: Synthetic oligonucleotide
  Target: LAMA2; (-) strand; PAM type: YTN; PAM sequence: TTT
tttctgtataatttgcagta

SEQ ID NO: 273482 - DNA, 20 bp, Artificial Sequence
  Description of Artificial Sequence: Synthetic oligonucleotide
  Target: LAMA2; (-) strand; PAM type: YTN; PAM sequence: TTT
ttttctgtataatttgcagt

SEQ ID NO: 273483 - DNA, 20 bp, Artificial Sequence
  Description of Artificial Sequence: Synthetic oligonucleotide
  Target: LAMA2; (-) strand; PAM type: YTN; PAM sequence: TTA
aaatttttttctgtataatt

SEQ ID NO: 273484 - DNA, 20 bp, Artificial Sequence
  Description of Artificial Sequence: Synthetic oligonucleotide
  Target: LAMA2; (-) strand; PAM type: YTN; PAM sequence: TTG
gaaaattaaaatttttttct

SEQ ID NO: 273485 - DNA, 20 bp, Artificial Sequence
  Description of Artificial Sequence: Synthetic oligonucleotide
  Target: LAMA2; (-) strand; PAM type: YTN; PAM sequence: TTA
acatcacaaatgaaaggatg

SEQ ID NO: 273486 - DNA, 20 bp, Artificial Sequence
  Description of Artificial Sequence: Synthetic oligonucleotide
  Target: LAMA2; (-) strand; PAM type: YTN; PAM sequence: CTG
caagtgttaacatcacaaat

SEQ ID NO: 273487 - DNA, 20 bp, Artificial Sequence
  Description of Artificial Sequence: Synthetic oligonucleotide
  Target: LAMA2; (-) strand; PAM type: YTN; PAM sequence: CTC
atcctgcaagtgttaacatc

SEQ ID NO: 273488 - DNA, 20 bp, Artificial Sequence
  Description of Artificial Sequence: Synthetic oligonucleotide
  Target: LAMA2; (-) strand; PAM type: YTN; PAM sequence: TTC
tcatcctgcaagtgttaaca

SEQ ID NO: 273489 - DNA, 20 bp, Artificial Sequence
  Description of Artificial Sequence: Synthetic oligonucleotide
  Target: LAMA2; (-) strand; PAM type: YTN; PAM sequence: CTT
ctcatcctgcaagtgttaac

SEQ ID NO: 273490 - DNA, 20 bp, Artificial Sequence
  Description of Artificial Sequence: Synthetic oligonucleotide
  Target: LAMA2; (-) strand; PAM type: YTN; PAM sequence: CTA
acttctcatcctgcaagtgt

SEQ ID NO: 273491 - DNA, 20 bp, Artificial Sequence
  Description of Artificial Sequence: Synthetic oligonucleotide
  Target: LAMA2; (-) strand; PAM type: YTN; PAM sequence: TTA
tcatctaacttctcatcctg

SEQ ID NO: 273492 - DNA, 20 bp, Artificial Sequence
  Description of Artificial Sequence: Synthetic oligonucleotide
  Target: LAMA2; (-) strand; PAM type: YTN; PAM sequence: CTA
ttatcatctaacttctcatc

SEQ ID NO: 273493 - DNA, 20 bp, Artificial Sequence
  Description of Artificial Sequence: Synthetic oligonucleotide
  Target: LAMA2; (-) strand; PAM type: YTN; PAM sequence: TTG
cacaaatgaaggaatataaa

SEQ ID NO: 273494 - DNA, 20 bp, Artificial Sequence
  Description of Artificial Sequence: Synthetic oligonucleotide
  Target: LAMA2; (-) strand; PAM type: YTN; PAM sequence: TTT
gcacaaatgaaggaatataa

SEQ ID NO: 273495 - DNA, 20 bp, Artificial Sequence
  Description of Artificial Sequence: Synthetic oligonucleotide
  Target: LAMA2; (-) strand; PAM type: YTN; PAM sequence: TTT
tgcacaaatgaaggaatata

SEQ ID NO: 273496 - DNA, 20 bp, Artificial Sequence
  Description of Artificial Sequence: Synthetic oligonucleotide
  Target: LAMA2; (-) strand; PAM type: YTN; PAM sequence: TTC
aaggttttgcacaaatgaag

SEQ ID NO: 273497 - DNA, 20 bp, Artificial Sequence
  Description of Artificial Sequence: Synthetic oligonucleotide
  Target: LAMA2; (-) strand; PAM type: YTN; PAM sequence: TTT
caaggttttgcacaaatgaa

SEQ ID NO: 273498 - DNA, 20 bp, Artificial Sequence
  Description of Artificial Sequence: Synthetic oligonucleotide
  Target: LAMA2; (-) strand; PAM type: YTN; PAM sequence: TTT
tcaaggttttgcacaaatga

SEQ ID NO: 273499 - DNA, 20 bp, Artificial Sequence
  Description of Artificial Sequence: Synthetic oligonucleotide
  Target: LAMA2; (-) strand; PAM type: YTN; PAM sequence: TTA
tgaaagttttcaaggttttg

SEQ ID NO: 273500 - DNA, 20 bp, Artificial Sequence
  Description of Artificial Sequence: Synthetic oligonucleotide
  Target: LAMA2; (-) strand; PAM type: YTN; PAM sequence: TTT
atgaaagttttcaaggtttt

SEQ ID NO: 273501 - DNA, 20 bp, Artificial Sequence
  Description of Artificial Sequence: Synthetic oligonucleotide
  Target: LAMA2; (-) strand; PAM type: YTN; PAM sequence: TTA
atttatgaaagttttcaagg

SEQ ID NO: 273502 - DNA, 20 bp, Artificial Sequence
  Description of Artificial Sequence: Synthetic oligonucleotide
  Target: LAMA2; (-) strand; PAM type: YTN; PAM sequence: TTT
aatttatgaaagttttcaag

SEQ ID NO: 273503 - DNA, 20 bp, Artificial Sequence
  Description of Artificial Sequence: Synthetic oligonucleotide
  Target: LAMA2; (-) strand; PAM type: YTN; PAM sequence: TTC
caagggcagcaagaggttta

SEQ ID NO: 273504 - DNA, 20 bp, Artificial Sequence
  Description of Artificial Sequence: Synthetic oligonucleotide
  Target: LAMA2; (-) strand; PAM type: YTN; PAM sequence: TTT
ccaagggcagcaagaggttt

SEQ ID NO: 273505 - DNA, 20 bp, Artificial Sequence
  Description of Artificial Sequence: Synthetic oligonucleotide
  Target: LAMA2; (-) strand; PAM type: YTN; PAM sequence: TTT
tccaagggcagcaagaggtt

SEQ ID NO: 273506 - DNA, 20 bp, Artificial Sequence
  Description of Artificial Sequence: Synthetic oligonucleotide
  Target: LAMA2; (-) strand; PAM type: YTN; PAM sequence: TTG
tgattttccaagggcagcaa

SEQ ID NO: 273507 - DNA, 20 bp, Artificial Sequence
  Description of Artificial Sequence: Synthetic oligonucleotide
  Target: LAMA2; (-) strand; PAM type: YTN; PAM sequence: TTT
gtgattttccaagggcagca

SEQ ID NO: 273508 - DNA, 20 bp, Artificial Sequence
  Description of Artificial Sequence: Synthetic oligonucleotide
  Target: LAMA2; (-) strand; PAM type: YTN; PAM sequence: TTT
tgtgattttccaagggcagc

SEQ ID NO: 273509 - DNA, 20 bp, Artificial Sequence
  Description of Artificial Sequence: Synthetic oligonucleotide
  Target: LAMA2; (-) strand; PAM type: YTN; PAM sequence: CTG
cattttgtgattttccaagg

SEQ ID NO: 273510 - DNA, 20 bp, Artificial Sequence
  Description of Artificial Sequence: Synthetic oligonucleotide
  Target: LAMA2; (-) strand; PAM type: YTN; PAM sequence: TTG
tactgcattttgtgattttc

SEQ ID NO: 273511 - DNA, 20 bp, Artificial Sequence
  Description of Artificial Sequence: Synthetic oligonucleotide
  Target: LAMA2; (-) strand; PAM type: YTN; PAM sequence: CTA
gaggaattgtactgcatttt

SEQ ID NO: 273512 - DNA, 20 bp, Artificial Sequence
  Description of Artificial Sequence: Synthetic oligonucleotide
  Target: LAMA2; (-) strand; PAM type: YTN; PAM sequence: CTG
gccagcacagaacatggtaa

SEQ ID NO: 273513 - DNA, 20 bp, Artificial Sequence
  Description of Artificial Sequence: Synthetic oligonucleotide
  Target: LAMA2; (-) strand; PAM type: YTN; PAM sequence: CTA
aatgtctggccagcacagaa

SEQ ID NO: 273514 - DNA, 20 bp, Artificial Sequence
  Description of Artificial Sequence: Synthetic oligonucleotide
  Target: LAMA2; (-) strand; PAM type: YTN; PAM sequence: TTA
aatagaactaaatgtctggc

SEQ ID NO: 273515 - DNA, 20 bp, Artificial Sequence
  Description of Artificial Sequence: Synthetic oligonucleotide
  Target: LAMA2; (-) strand; PAM type: YTN; PAM sequence: TTT
aaatagaactaaatgtctgg

SEQ ID NO: 273516 - DNA, 20 bp, Artificial Sequence
  Description of Artificial Sequence: Synthetic oligonucleotide
  Target: LAMA2; (-) strand; PAM type: YTN; PAM sequence: TTT
taaatagaactaaatgtctg

SEQ ID NO: 273517 - DNA, 20 bp, Artificial Sequence
  Description of Artificial Sequence: Synthetic oligonucleotide
  Target: LAMA2; (-) strand; PAM type: YTN; PAM sequence: TTA
aaatatacgtaagtggattt

SEQ ID NO: 273518 - DNA, 20 bp, Artificial Sequence
  Description of Artificial Sequence: Synthetic oligonucleotide
  Target: LAMA2; (-) strand; PAM type: YTN; PAM sequence: TTT
aaaatatacgtaagtggatt

SEQ ID NO: 273519 - DNA, 20 bp, Artificial Sequence
  Description of Artificial Sequence: Synthetic oligonucleotide
  Target: LAMA2; (-) strand; PAM type: YTN; PAM sequence: TTA
atatttaaaatatacgtaag

SEQ ID NO: 273520 - DNA, 20 bp, Artificial Sequence
  Description of Artificial Sequence: Synthetic oligonucleotide
  Target: LAMA2; (-) strand; PAM type: YTN; PAM sequence: CTA
ggcatggccagagaattaat

SEQ ID NO: 273521 - DNA, 20 bp, Artificial Sequence
  Description of Artificial Sequence: Synthetic oligonucleotide
  Target: LAMA2; (-) strand; PAM type: YTN; PAM sequence: TTG
catactaggcatggccagag

SEQ ID NO: 273522 - DNA, 20 bp, Artificial Sequence
  Description of Artificial Sequence: Synthetic oligonucleotide
  Target: LAMA2; (-) strand; PAM type: YTN; PAM sequence: CTT
gcatactaggcatggccaga

SEQ ID NO: 273523 - DNA, 20 bp, Artificial Sequence
  Description of Artificial Sequence: Synthetic oligonucleotide
  Target: LAMA2; (-) strand; PAM type: YTN; PAM sequence: TTG
taccagagtgcttgcatact

SEQ ID NO: 273524 - DNA, 20 bp, Artificial Sequence
  Description of Artificial Sequence: Synthetic oligonucleotide
  Target: LAMA2; (-) strand; PAM type: YTN; PAM sequence: CTT
gtaccagagtgcttgcatac

SEQ ID NO: 273525 - DNA, 20 bp, Artificial Sequence
  Description of Artificial Sequence: Synthetic oligonucleotide
  Target: LAMA2; (-) strand; PAM type: YTN; PAM sequence: CTA
gaatcttgtaccagagtgct

SEQ ID NO: 273526 - DNA, 20 bp, Artificial Sequence
  Description of Artificial Sequence: Synthetic oligonucleotide
  Target: LAMA2; (-) strand; PAM type: YTN; PAM sequence: CTC
tagaatcttgtaccagagtg

SEQ ID NO: 273527 - DNA, 20 bp, Artificial Sequence
  Description of Artificial Sequence: Synthetic oligonucleotide
  Target: LAMA2; (-) strand; PAM type: YTN; PAM sequence: TTA
acactctagaatcttgtacc

SEQ ID NO: 273528 - DNA, 20 bp, Artificial Sequence
  Description of Artificial Sequence: Synthetic oligonucleotide
  Target: LAMA2; (-) strand; PAM type: YTN; PAM sequence: TTG
gcagcatattaacactctag

SEQ ID NO: 273529 - DNA, 20 bp, Artificial Sequence
  Description of Artificial Sequence: Synthetic oligonucleotide
  Target: LAMA2; (-) strand; PAM type: YTN; PAM sequence: TTG
aataaggtccaagttggcag

SEQ ID NO: 273530 - DNA, 20 bp, Artificial Sequence
  Description of Artificial Sequence: Synthetic oligonucleotide
  Target: LAMA2; (-) strand; PAM type: YTN; PAM sequence: TTT
gaataaggtccaagttggca

SEQ ID NO: 273531 - DNA, 20 bp, Artificial Sequence
  Description of Artificial Sequence: Synthetic oligonucleotide
  Target: LAMA2; (-) strand; PAM type: YTN; PAM sequence: TTT
tgaataaggtccaagttggc

SEQ ID NO: 273532 - DNA, 20 bp, Artificial Sequence
  Description of Artificial Sequence: Synthetic oligonucleotide
  Target: LAMA2; (-) strand; PAM type: YTN; PAM sequence: CTC
aatatagttttgaataaggt

SEQ ID NO: 273533 - DNA, 20 bp, Artificial Sequence
  Description of Artificial Sequence: Synthetic oligonucleotide
  Target: LAMA2; (-) strand; PAM type: YTN; PAM sequence: CTG
tctcaatatagttttgaata

SEQ ID NO: 273534 - DNA, 20 bp, Artificial Sequence
  Description of Artificial Sequence: Synthetic oligonucleotide
  Target: LAMA2; (-) strand; PAM type: YTN; PAM sequence: TTA
gagaatcacaaactgtctca

SEQ ID NO: 273535 - DNA, 20 bp, Artificial Sequence
  Description of Artificial Sequence: Synthetic oligonucleotide
  Target: LAMA2; (-) strand; PAM type: YTN; PAM sequence: CTA
cagataatgaattagagaat

SEQ ID NO: 273536 - DNA, 20 bp, Artificial Sequence
  Description of Artificial Sequence: Synthetic oligonucleotide
  Target: LAMA2; (-) strand; PAM type: YTN; PAM sequence: CTA
actacagataatgaattaga

SEQ ID NO: 273537 - DNA, 20 bp, Artificial Sequence
  Description of Artificial Sequence: Synthetic oligonucleotide
  Target: LAMA2; (-) strand; PAM type: YTN; PAM sequence: CTA
aaaagatatggatagtctaa

SEQ ID NO: 273538 - DNA, 20 bp, Artificial Sequence
  Description of Artificial Sequence: Synthetic oligonucleotide
  Target: LAMA2; (-) strand; PAM type: YTN; PAM sequence: TTA
ctaaaaagatatggatagtc

SEQ ID NO: 273539 - DNA, 20 bp, Artificial Sequence
  Description of Artificial Sequence: Synthetic oligonucleotide
  Target: LAMA2; (-) strand; PAM type: YTN; PAM sequence: TTT
actaaaaagatatggatagt

SEQ ID NO: 273540 - DNA, 20 bp, Artificial Sequence
  Description of Artificial Sequence: Synthetic oligonucleotide
  Target: LAMA2; (-) strand; PAM type: YTN; PAM sequence: TTT
tactaaaaagatatggatag

SEQ ID NO: 273541 - DNA, 20 bp, Artificial Sequence
  Description of Artificial Sequence: Synthetic oligonucleotide
  Target: LAMA2; (-) strand; PAM type: YTN; PAM sequence: CTT
ttactaaaaagatatggata

SEQ ID NO: 273542 - DNA, 20 bp, Artificial Sequence
  Description of Artificial Sequence: Synthetic oligonucleotide
  Target: LAMA2; (-) strand; PAM type: YTN; PAM sequence: CTC
ttttactaaaaagatatgga

SEQ ID NO: 273543 - DNA, 20 bp, Artificial Sequence
  Description of Artificial Sequence: Synthetic oligonucleotide
  Target: LAMA2; (-) strand; PAM type: YTN; PAM sequence: TTC
tcttttactaaaaagatatg

SEQ ID NO: 273544 - DNA, 20 bp, Artificial Sequence
  Description of Artificial Sequence: Synthetic oligonucleotide
  Target: LAMA2; (-) strand; PAM type: YTN; PAM sequence: CTT
ctcttttactaaaaagatat

SEQ ID NO: 273545 - DNA, 20 bp, Artificial Sequence
  Description of Artificial Sequence: Synthetic oligonucleotide
  Target: LAMA2; (-) strand; PAM type: YTN; PAM sequence: TTC
ttctcttttactaaaaagat

SEQ ID NO: 273546 - DNA, 20 bp, Artificial Sequence
  Description of Artificial Sequence: Synthetic oligonucleotide
  Target: LAMA2; (-) strand; PAM type: YTN; PAM sequence: CTT
cttctcttttactaaaaaga

SEQ ID NO: 273547 - DNA, 20 bp, Artificial Sequence
  Description of Artificial Sequence: Synthetic oligonucleotide
  Target: LAMA2; (-) strand; PAM type: YTN; PAM sequence: CTA
atatataagccttcttctct

SEQ ID NO: 273548 - DNA, 20 bp, Artificial Sequence
  Description of Artificial Sequence: Synthetic oligonucleotide
  Target: LAMA2; (-) strand; PAM type: YTN; PAM sequence: TTG
catatgctaatatataagcc

SEQ ID NO: 273549 - DNA, 20 bp, Artificial Sequence
  Description of Artificial Sequence: Synthetic oligonucleotide
  Target: LAMA2; (-) strand; PAM type: YTN; PAM sequence: CTA
tgtgttgcatatgctaatat

SEQ ID NO: 273550 - DNA, 20 bp, Artificial Sequence
  Description of Artificial Sequence: Synthetic oligonucleotide
  Target: LAMA2; (-) strand; PAM type: YTN; PAM sequence: TTC
tatgtgttgcatatgctaat

SEQ ID NO: 273551 - DNA, 20 bp, Artificial Sequence
  Description of Artificial Sequence: Synthetic oligonucleotide
  Target: LAMA2; (-) strand; PAM type: YTN; PAM sequence: TTT
ctatgtgttgcatatgctaa

SEQ ID NO: 273552 - DNA, 20 bp, Artificial Sequence
  Description of Artificial Sequence: Synthetic oligonucleotide
  Target: LAMA2; (-) strand; PAM type: YTN; PAM sequence: TTT
tctatgtgttgcatatgcta

SEQ ID NO: 273553 - DNA, 20 bp, Artificial Sequence
  Description of Artificial Sequence: Synthetic oligonucleotide
  Target: LAMA2; (-) strand; PAM type: YTN; PAM sequence: TTT
ttctatgtgttgcatatgct

SEQ ID NO: 273554 - DNA, 20 bp, Artificial Sequence
  Description of Artificial Sequence: Synthetic oligonucleotide
  Target: LAMA2; (-) strand; PAM type: YTN; PAM sequence: TTC
atttttctatgtgttgcata

SEQ ID NO: 273555 - DNA, 20 bp, Artificial Sequence
  Description of Artificial Sequence: Synthetic oligonucleotide
  Target: LAMA2; (-) strand; PAM type: YTN; PAM sequence: CTT
catttttctatgtgttgcat

SEQ ID NO: 273556 - DNA, 20 bp, Artificial Sequence
  Description of Artificial Sequence: Synthetic oligonucleotide
  Target: LAMA2; (-) strand; PAM type: YTN; PAM sequence: TTA
tacttcatttttctatgtgt

SEQ ID NO: 273557 - DNA, 20 bp, Artificial Sequence
  Description of Artificial Sequence: Synthetic oligonucleotide
  Target: LAMA2; (-) strand; PAM type: YTN; PAM sequence: TTT
atacttcatttttctatgtg

SEQ ID NO: 273558 - DNA, 20 bp, Artificial Sequence
  Description of Artificial Sequence: Synthetic oligonucleotide
  Target: LAMA2; (-) strand; PAM type: YTN; PAM sequence: CTG
aaaggtttatacttcatttt

SEQ ID NO: 273559 - DNA, 20 bp, Artificial Sequence
  Description of Artificial Sequence: Synthetic oligonucleotide
  Target: LAMA2; (-) strand; PAM type: YTN; PAM sequence: TTA
gagtaccctgaaaggtttat

SEQ ID NO: 273560 - DNA, 20 bp, Artificial Sequence
  Description of Artificial Sequence: Synthetic oligonucleotide
  Target: LAMA2; (-) strand; PAM type: YTN; PAM sequence: TTT
agagtaccctgaaaggttta

SEQ ID NO: 273561 - DNA, 20 bp, Artificial Sequence
  Description of Artificial Sequence: Synthetic oligonucleotide
  Target: LAMA2; (-) strand; PAM type: YTN; PAM sequence: TTA
caaggtttagagtaccctga

SEQ ID NO: 273562 - DNA, 20 bp, Artificial Sequence
  Description of Artificial Sequence: Synthetic oligonucleotide
  Target: LAMA2; (-) strand; PAM type: YTN; PAM sequence: TTA
aaaattacaaggtttagagt

SEQ ID NO: 273563 - DNA, 20 bp, Artificial Sequence
  Description of Artificial Sequence: Synthetic oligonucleotide
  Target: LAMA2; (-) strand; PAM type: YTN; PAM sequence: TTT
aaaaattacaaggtttagag

SEQ ID NO: 273564 - DNA, 20 bp, Artificial Sequence
  Description of Artificial Sequence: Synthetic oligonucleotide
  Target: LAMA2; (-) strand; PAM type: YTN; PAM sequence: CTT
taaaaattacaaggtttaga

SEQ ID NO: 273565 - DNA, 20 bp, Artificial Sequence
  Description of Artificial Sequence: Synthetic oligonucleotide
  Target: LAMA2; (-) strand; PAM type: YTN; PAM sequence: TTC
tttaaaaattacaaggttta

SEQ ID NO: 273566 - DNA, 20 bp, Artificial Sequence
  Description of Artificial Sequence: Synthetic oligonucleotide
  Target: LAMA2; (-) strand; PAM type: YTN; PAM sequence: TTT
ctttaaaaattacaaggttt

SEQ ID NO: 273567 - DNA, 20 bp, Artificial Sequence
  Description of Artificial Sequence: Synthetic oligonucleotide
  Target: LAMA2; (-) strand; PAM type: YTN; PAM sequence: TTG
tttctttaaaaattacaagg

SEQ ID NO: 273568 - DNA, 20 bp, Artificial Sequence
  Description of Artificial Sequence: Synthetic oligonucleotide
  Target: LAMA2; (-) strand; PAM type: YTN; PAM sequence: TTA
gtcaaacaaaaatggtgtgt

SEQ ID NO: 273569 - DNA, 20 bp, Artificial Sequence
  Description of Artificial Sequence: Synthetic oligonucleotide
  Target: LAMA2; (-) strand; PAM type: YTN; PAM sequence: TTT
agtcaaacaaaaatggtgtg

SEQ ID NO: 273570 - DNA, 20 bp, Artificial Sequence
  Description of Artificial Sequence: Synthetic oligonucleotide
  Target: LAMA2; (-) strand; PAM type: YTN; PAM sequence: TTA
aaatataccatatttagtca

SEQ ID NO: 273571 - DNA, 20 bp, Artificial Sequence
  Description of Artificial Sequence: Synthetic oligonucleotide
  Target: LAMA2; (-) strand; PAM type: YTN; PAM sequence: TTC
acggttaaaatataccatat

SEQ ID NO: 273572 - DNA, 20 bp, Artificial Sequence
  Description of Artificial Sequence: Synthetic oligonucleotide
  Target: LAMA2; (-) strand; PAM type: YTN; PAM sequence: TTC
aacgtgttcacggttaaaat

SEQ ID NO: 273573 - DNA, 20 bp, Artificial Sequence
  Description of Artificial Sequence: Synthetic oligonucleotide
  Target: LAMA2; (-) strand; PAM type: YTN; PAM sequence: CTG
gaatgcattcaacgtgttca

SEQ ID NO: 273574 - DNA, 20 bp, Artificial Sequence
  Description of Artificial Sequence: Synthetic oligonucleotide
  Target: LAMA2; (-) strand; PAM type: YTN; PAM sequence: TTG
acacactggaatgcattcaa

SEQ ID NO: 273575 - DNA, 20 bp, Artificial Sequence
  Description of Artificial Sequence: Synthetic oligonucleotide
  Target: LAMA2; (-) strand; PAM type: YTN; PAM sequence: TTT
gacacactggaatgcattca

SEQ ID NO: 273576 - DNA, 20 bp, Artificial Sequence
  Description of Artificial Sequence: Synthetic oligonucleotide
  Target: LAMA2; (-) strand; PAM type: YTN; PAM sequence: TTA
aaatatcatttgacacactg

SEQ ID NO: 273577 - DNA, 20 bp, Artificial Sequence
  Description of Artificial Sequence: Synthetic oligonucleotide
  Target: LAMA2; (-) strand; PAM type: YTN; PAM sequence: TTT
aaaatatcatttgacacact

SEQ ID NO: 273578 - DNA, 20 bp, Artificial Sequence
  Description of Artificial Sequence: Synthetic oligonucleotide
  Target: LAMA2; (-) strand; PAM type: YTN; PAM sequence: TTA
catttaaaatatcatttgac

SEQ ID NO: 273579 - DNA, 20 bp, Artificial Sequence
  Description of Artificial Sequence: Synthetic oligonucleotide
  Target: LAMA2; (-) strand; PAM type: YTN; PAM sequence: TTT
acatttaaaatatcatttga

SEQ ID NO: 273580 - DNA, 20 bp, Artificial Sequence
  Description of Artificial Sequence: Synthetic oligonucleotide
  Target: LAMA2; (-) strand; PAM type: YTN; PAM sequence: CTA
tttacatttaaaatatcatt

SEQ ID NO: 273581 - DNA, 20 bp, Artificial Sequence
  Description of Artificial Sequence: Synthetic oligonucleotide
  Target: LAMA2; (-) strand; PAM type: YTN; PAM sequence: CTC
tatttacatttaaaatatca

SEQ ID NO: 273582 - DNA, 20 bp, Artificial Sequence
  Description of Artificial Sequence: Synthetic oligonucleotide
  Target: LAMA2; (-) strand; PAM type: YTN; PAM sequence: TTC
acctctatttacatttaaaa

SEQ ID NO: 273583 - DNA, 20 bp, Artificial Sequence
  Description of Artificial Sequence: Synthetic oligonucleotide
  Target: LAMA2; (-) strand; PAM type: YTN; PAM sequence: CTC
aggcacattcacctctattt

SEQ ID NO: 273584 - DNA, 20 bp, Artificial Sequence
  Description of Artificial Sequence: Synthetic oligonucleotide
  Target: LAMA2; (-) strand; PAM type: YTN; PAM sequence: TTC
tcaggcacattcacctctat

SEQ ID NO: 273585 - DNA, 20 bp, Artificial Sequence
  Description of Artificial Sequence: Synthetic oligonucleotide
  Target: LAMA2; (-) strand; PAM type: YTN; PAM sequence: CTC
ccaaagagtattctcaggca

SEQ ID NO: 273586 - DNA, 20 bp, Artificial Sequence
  Description of Artificial Sequence: Synthetic oligonucleotide
  Target: LAMA2; (-) strand; PAM type: YTN; PAM sequence: TTA
atcacagaatcatgcagcag

SEQ ID NO: 273587 - DNA, 20 bp, Artificial Sequence
  Description of Artificial Sequence: Synthetic oligonucleotide
  Target: LAMA2; (-) strand; PAM type: YTN; PAM sequence: TTG
ttaatcacagaatcatgcag

SEQ ID NO: 273588 - DNA, 20 bp, Artificial Sequence
  Description of Artificial Sequence: Synthetic oligonucleotide
  Target: LAMA2; (-) strand; PAM type: YTN; PAM sequence: CTT
gttaatcacagaatcatgca

SEQ ID NO: 273589 - DNA, 20 bp, Artificial Sequence
  Description of Artificial Sequence: Synthetic oligonucleotide
  Target: LAMA2; (-) strand; PAM type: YTN; PAM sequence: TTC
catatgatagcaccagaaat

SEQ ID NO: 273590 - DNA, 20 bp, Artificial Sequence
  Description of Artificial Sequence: Synthetic oligonucleotide
  Target: LAMA2; (-) strand; PAM type: YTN; PAM sequence: TTT
ccatatgatagcaccagaaa

SEQ ID NO: 273591 - DNA, 20 bp, Artificial Sequence
  Description of Artificial Sequence: Synthetic oligonucleotide
  Target: LAMA2; (-) strand; PAM type: YTN; PAM sequence: TTT
tccatatgatagcaccagaa

SEQ ID NO: 273592 - DNA, 20 bp, Artificial Sequence
  Description of Artificial Sequence: Synthetic oligonucleotide
  Target: LAMA2; (-) strand; PAM type: YTN; PAM sequence: CTT
ttccatatgatagcaccaga

SEQ ID NO: 273593 - DNA, 20 bp, Artificial Sequence
  Description of Artificial Sequence: Synthetic oligonucleotide
  Target: LAMA2; (-) strand; PAM type: YTN; PAM sequence: CTA
acttttccatatgatagcac

SEQ ID NO: 273594 - DNA, 20 bp, Artificial Sequence
  Description of Artificial Sequence: Synthetic oligonucleotide
  Target: LAMA2; (-) strand; PAM type: YTN; PAM sequence: TTA
agggagaataaatgctaact

SEQ ID NO: 273595 - DNA, 20 bp, Artificial Sequence
  Description of Artificial Sequence: Synthetic oligonucleotide
  Target: LAMA2; (-) strand; PAM type: YTN; PAM sequence: TTA
taacacatcaaagatgccaa

SEQ ID NO: 273596 - DNA, 20 bp, Artificial Sequence
  Description of Artificial Sequence: Synthetic oligonucleotide
  Target: LAMA2; (-) strand; PAM type: YTN; PAM sequence: TTT
ataacacatcaaagatgcca

SEQ ID NO: 273597 - DNA, 20 bp, Artificial Sequence
  Description of Artificial Sequence: Synthetic oligonucleotide
  Target: LAMA2; (-) strand; PAM type: YTN; PAM sequence: TTT
tataacacatcaaagatgcc

SEQ ID NO: 273598 - DNA, 20 bp, Artificial Sequence
  Description of Artificial Sequence: Synthetic oligonucleotide
  Target: LAMA2; (-) strand; PAM type: YTN; PAM sequence: CTG
ttttataacacatcaaagat

SEQ ID NO: 273599 - DNA, 20 bp, Artificial Sequence
  Description of Artificial Sequence: Synthetic oligonucleotide
  Target: LAMA2; (-) strand; PAM type: YTN; PAM sequence: CTC
agtagtaaatgcctgtttta

SEQ ID NO: 273600 - DNA, 20 bp, Artificial Sequence
  Description of Artificial Sequence: Synthetic oligonucleotide
  Target: LAMA2; (-) strand; PAM type: YTN; PAM sequence: CTA
ctcagtagtaaatgcctgtt

SEQ ID NO: 273601 - DNA, 20 bp, Artificial Sequence
  Description of Artificial Sequence: Synthetic oligonucleotide
  Target: LAMA2; (-) strand; PAM type: YTN; PAM sequence: TTA
gctactcagtagtaaatgcc

SEQ ID NO: 273602 - DNA, 20 bp, Artificial Sequence
  Description of Artificial Sequence: Synthetic oligonucleotide
  Target: LAMA2; (-) strand; PAM type: YTN; PAM sequence: CTT
agctactcagtagtaaatgc

SEQ ID NO: 273603 - DNA, 20 bp, Artificial Sequence
  Description of Artificial Sequence: Synthetic oligonucleotide
  Target: LAMA2; (-) strand; PAM type: YTN; PAM sequence: TTA
aagaaacaaagagggagaaa

SEQ ID NO: 273604 - DNA, 20 bp, Artificial Sequence
  Description of Artificial Sequence: Synthetic oligonucleotide
  Target: LAMA2; (-) strand; PAM type: YTN; PAM sequence: TTA
attaaagaaacaaagaggga

SEQ ID NO: 273605 - DNA, 20 bp, Artificial Sequence
  Description of Artificial Sequence: Synthetic oligonucleotide
  Target: LAMA2; (-) strand; PAM type: YTN; PAM sequence: TTA
gatcaatacgttaattaaag

SEQ ID NO: 273606 - DNA, 20 bp, Artificial Sequence
  Description of Artificial Sequence: Synthetic oligonucleotide
  Target: LAMA2; (-) strand; PAM type: YTN; PAM sequence: TTT
agatcaatacgttaattaaa

SEQ ID NO: 273607 - DNA, 20 bp, Artificial Sequence
  Description of Artificial Sequence: Synthetic oligonucleotide
  Target: LAMA2; (-) strand; PAM type: YTN; PAM sequence: TTT
tagatcaatacgttaattaa

SEQ ID NO: 273608 - DNA, 20 bp, Artificial Sequence
  Description of Artificial Sequence: Synthetic oligonucleotide
  Target: LAMA2; (-) strand; PAM type: YTN; PAM sequence: TTG
ttttagatcaatacgttaat

SEQ ID NO: 273609 - DNA, 20 bp, Artificial Sequence
  Description of Artificial Sequence: Synthetic oligonucleotide
  Target: LAMA2; (-) strand; PAM type: YTN; PAM sequence: TTT
gttttagatcaatacgttaa

SEQ ID NO: 273610 - DNA, 20 bp, Artificial Sequence
  Description of Artificial Sequence: Synthetic oligonucleotide
  Target: LAMA2; (-) strand; PAM type: YTN; PAM sequence: CTA
tagatttgttttagatcaat

SEQ ID NO: 273611 - DNA, 20 bp, Artificial Sequence
  Description of Artificial Sequence: Synthetic oligonucleotide
  Target: LAMA2; (-) strand; PAM type: YTN; PAM sequence: TTG
atcctatagatttgttttag

SEQ ID NO: 273612 - DNA, 20 bp, Artificial Sequence
  Description of Artificial Sequence: Synthetic oligonucleotide
  Target: LAMA2; (-) strand; PAM type: YTN; PAM sequence: CTT
gatcctatagatttgtttta

SEQ ID NO: 273613 - DNA, 20 bp, Artificial Sequence
  Description of Artificial Sequence: Synthetic oligonucleotide
  Target: LAMA2; (-) strand; PAM type: YTN; PAM sequence: CTC
aataagcttgatcctataga

SEQ ID NO: 273614 - DNA, 20 bp, Artificial Sequence
  Description of Artificial Sequence: Synthetic oligonucleotide
  Target: LAMA2; (-) strand; PAM type: YTN; PAM sequence: CTG
cctcaataagcttgatccta

SEQ ID NO: 273615 - DNA, 20 bp, Artificial Sequence
  Description of Artificial Sequence: Synthetic oligonucleotide
  Target: LAMA2; (-) strand; PAM type: YTN; PAM sequence: CTG
tctgcctcaataagcttgat

SEQ ID NO: 273616 - DNA, 20 bp, Artificial Sequence
  Description of Artificial Sequence: Synthetic oligonucleotide
  Target: LAMA2; (-) strand; PAM type: YTN; PAM sequence: TTG
agagacaaacaggctgtctg

SEQ ID NO: 273617 - DNA, 20 bp, Artificial Sequence
  Description of Artificial Sequence: Synthetic oligonucleotide
  Target: LAMA2; (-) strand; PAM type: YTN; PAM sequence: CTT
gagagacaaacaggctgtct

SEQ ID NO: 273618 - DNA, 20 bp, Artificial Sequence
  Description of Artificial Sequence: Synthetic oligonucleotide
  Target: LAMA2; (-) strand; PAM type: YTN; PAM sequence: CTC
ttgagagacaaacaggctgt

SEQ ID NO: 273619 - DNA, 20 bp, Artificial Sequence
  Description of Artificial Sequence: Synthetic oligonucleotide
  Target: LAMA2; (-) strand; PAM type: YTN; PAM sequence: CTG
aaaaagtgtgtggagtgcag

SEQ ID NO: 273620 - DNA, 20 bp, Artificial Sequence
  Description of Artificial Sequence: Synthetic oligonucleotide
  Target: LAMA2; (-) strand; PAM type: YTN; PAM sequence: TTA
ctgaaaaagtgtgtggagtg

SEQ ID NO: 273621 - DNA, 20 bp, Artificial Sequence
  Description of Artificial Sequence: Synthetic oligonucleotide
  Target: LAMA2; (-) strand; PAM type: YTN; PAM sequence: TTT
actgaaaaagtgtgtggagt

SEQ ID NO: 273622 - DNA, 20 bp, Artificial Sequence
  Description of Artificial Sequence: Synthetic oligonucleotide
  Target: LAMA2; (-) strand; PAM type: YTN; PAM sequence: TTA
tttactgaaaaagtgtgtgg

SEQ ID NO: 273623 - DNA, 20 bp, Artificial Sequence
  Description of Artificial Sequence: Synthetic oligonucleotide
  Target: LAMA2; (-) strand; PAM type: YTN; PAM sequence: TTT
atttactgaaaaagtgtgtg

SEQ ID NO: 273624 - DNA, 20 bp, Artificial Sequence
  Description of Artificial Sequence: Synthetic oligonucleotide
  Target: LAMA2; (-) strand; PAM type: YTN; PAM sequence: TTT
tatttactgaaaaagtgtgt

SEQ ID NO: 273625 - DNA, 20 bp, Artificial Sequence
  Description of Artificial Sequence: Synthetic oligonucleotide
  Target: LAMA2; (-) strand; PAM type: YTN; PAM sequence: TTG
tccatattttatttactgaa

SEQ ID NO: 273626 - DNA, 20 bp, Artificial Sequence
  Description of Artificial Sequence: Synthetic oligonucleotide
  Target: LAMA2; (-) strand; PAM type: YTN; PAM sequence: TTT
gtccatattttatttactga

SEQ ID NO: 273627 - DNA, 20 bp, Artificial Sequence
  Description of Artificial Sequence: Synthetic oligonucleotide
  Target: LAMA2; (-) strand; PAM type: YTN; PAM sequence: TTT
tgtccatattttatttactg

SEQ ID NO: 273628 - DNA, 20 bp, Artificial Sequence
  Description of Artificial Sequence: Synthetic oligonucleotide
  Target: LAMA2; (-) strand; PAM type: YTN; PAM sequence: TTG
cagttttgtccatattttat

SEQ ID NO: 273629 - DNA, 20 bp, Artificial Sequence
  Description of Artificial Sequence: Synthetic oligonucleotide
  Target: LAMA2; (-) strand; PAM type: YTN; PAM sequence: CTC
cacatgttgcagttttgtcc

SEQ ID NO: 273630 - DNA, 20 bp, Artificial Sequence
  Description of Artificial Sequence: Synthetic oligonucleotide
  Target: LAMA2; (-) strand; PAM type: YTN; PAM sequence: TTC
agcctccacatgttgcagtt

SEQ ID NO: 273631 - DNA, 20 bp, Artificial Sequence
  Description of Artificial Sequence: Synthetic oligonucleotide
  Target: LAMA2; (-) strand; PAM type: YTN; PAM sequence: CTT
cagcctccacatgttgcagt

SEQ ID NO: 273632 - DNA, 20 bp, Artificial Sequence
  Description of Artificial Sequence: Synthetic oligonucleotide
  Target: LAMA2; (-) strand; PAM type: YTN; PAM sequence: TTA
atggaatcttcagcctccac

SEQ ID NO: 273633 - DNA, 20 bp, Artificial Sequence
  Description of Artificial Sequence: Synthetic oligonucleotide
  Target: LAMA2; (-) strand; PAM type: YTN; PAM sequence: CTT
aatggaatcttcagcctcca

SEQ ID NO: 273634 - DNA, 20 bp, Artificial Sequence
  Description of Artificial Sequence: Synthetic oligonucleotide
  Target: LAMA2; (-) strand; PAM type: YTN; PAM sequence: TTA
aggtacagatgccaaaagtc

SEQ ID NO: 273635 - DNA, 20 bp, Artificial Sequence
  Description of Artificial Sequence: Synthetic oligonucleotide
  Target: LAMA2; (-) strand; PAM type: YTN; PAM sequence: TTT
aaggtacagatgccaaaagt

SEQ ID NO: 273636 - DNA, 20 bp, Artificial Sequence
  Description of Artificial Sequence: Synthetic oligonucleotide
  Target: LAMA2; (-) strand; PAM type: YTN; PAM sequence: CTT
taaggtacagatgccaaaag

SEQ ID NO: 273637 - DNA, 20 bp, Artificial Sequence
  Description of Artificial Sequence: Synthetic oligonucleotide
  Target: LAMA2; (-) strand; PAM type: YTN; PAM sequence: TTG
aaatatctttaaggtacaga

SEQ ID NO: 273638 - DNA, 20 bp, Artificial Sequence
  Description of Artificial Sequence: Synthetic oligonucleotide
  Target: LAMA2; (-) strand; PAM type: YTN; PAM sequence: TTT
gaaatatctttaaggtacag

SEQ ID NO: 273639 - DNA, 20 bp, Artificial Sequence
  Description of Artificial Sequence: Synthetic oligonucleotide
  Target: LAMA2; (-) strand; PAM type: YTN; PAM sequence: TTT
tgaaatatctttaaggtaca

SEQ ID NO: 273640 - DNA, 20 bp, Artificial Sequence
  Description of Artificial Sequence: Synthetic oligonucleotide
  Target: LAMA2; (-) strand; PAM type: YTN; PAM sequence: TTT
ttgaaatatctttaaggtac

SEQ ID NO: 273641 - DNA, 20 bp, Artificial Sequence
  Description of Artificial Sequence: Synthetic oligonucleotide
  Target: LAMA2; (-) strand; PAM type: YTN; PAM sequence: TTA
tttttgaaatatctttaagg

SEQ ID NO: 273642 - DNA, 20 bp, Artificial Sequence
  Description of Artificial Sequence: Synthetic oligonucleotide
  Target: LAMA2; (-) strand; PAM type: YTN; PAM sequence: CTA
tggcagagaagaagcaataa

SEQ ID NO: 273643 - DNA, 20 bp, Artificial Sequence
  Description of Artificial Sequence: Synthetic oligonucleotide
  Target: LAMA2; (-) strand; PAM type: YTN; PAM sequence: TTA
tatgctatggcagagaagaa

SEQ ID NO: 273644 - DNA, 20 bp, Artificial Sequence
  Description of Artificial Sequence: Synthetic oligonucleotide
  Target: LAMA2; (-) strand; PAM type: YTN; PAM sequence: TTG
ttatatgctatggcagagaa

SEQ ID NO: 273645 - DNA, 20 bp, Artificial Sequence
  Description of Artificial Sequence: Synthetic oligonucleotide
  Target: LAMA2; (-) strand; PAM type: YTN; PAM sequence: CTT
gttatatgctatggcagaga

SEQ ID NO: 273646 - DNA, 20 bp, Artificial Sequence
  Description of Artificial Sequence: Synthetic oligonucleotide
  Target: LAMA2; (-) strand; PAM type: YTN; PAM sequence: TTA
aaaaacgcttgttatatgct

SEQ ID NO: 273647 - DNA, 20 bp, Artificial Sequence
  Description of Artificial Sequence: Synthetic oligonucleotide
  Target: LAMA2; (-) strand; PAM type: YTN; PAM sequence: TTT
aaaaaacgcttgttatatgc

SEQ ID NO: 273648 - DNA, 20 bp, Artificial Sequence
  Description of Artificial Sequence: Synthetic oligonucleotide
  Target: LAMA2; (-) strand; PAM type: YTN; PAM sequence: TTT
taaaaaacgcttgttatatg

SEQ ID NO: 273649 - DNA, 20 bp, Artificial Sequence
  Description of Artificial Sequence: Synthetic oligonucleotide
  Target: LAMA2; (-) strand; PAM type: YTN; PAM sequence: CTT
ttaaaaaacgcttgttatat

SEQ ID NO: 273650 - DNA, 20 bp, Artificial Sequence
  Description of Artificial Sequence: Synthetic oligonucleotide
  Target: LAMA2; (-) strand; PAM type: YTN; PAM sequence: TTG
gtcttttaaaaaacgcttgt

SEQ ID NO: 273651 - DNA, 20 bp, Artificial Sequence
  Description of Artificial Sequence: Synthetic oligonucleotide
  Target: LAMA2; (-) strand; PAM type: YTN; PAM sequence: TTT
ggtcttttaaaaaacgcttg

SEQ ID NO: 273652 - DNA, 20 bp, Artificial Sequence
  Description of Artificial Sequence: Synthetic oligonucleotide
  Target: LAMA2; (-) strand; PAM type: YTN; PAM sequence: CTG
tatttggtcttttaaaaaac

SEQ ID NO: 273653 - DNA, 20 bp, Artificial Sequence
  Description of Artificial Sequence: Synthetic oligonucleotide
  Target: LAMA2; (-) strand; PAM type: YTN; PAM sequence: TTA
aatggaaatcagagagctgt

SEQ ID NO: 273654 - DNA, 20 bp, Artificial Sequence
  Description of Artificial Sequence: Synthetic oligonucleotide
  Target: LAMA2; (-) strand; PAM type: YTN; PAM sequence: TTC
cattaaatggaaatcagaga

SEQ ID NO: 273655 - DNA, 20 bp, Artificial Sequence
  Description of Artificial Sequence: Synthetic oligonucleotide
  Target: LAMA2; (-) strand; PAM type: YTN; PAM sequence: CTT
ccattaaatggaaatcagag

SEQ ID NO: 273656 - DNA, 20 bp, Artificial Sequence
  Description of Artificial Sequence: Synthetic oligonucleotide
  Target: LAMA2; (-) strand; PAM type: YTN; PAM sequence: TTC
ttccattaaatggaaatcag

SEQ ID NO: 273657 - DNA, 20 bp, Artificial Sequence
  Description of Artificial Sequence: Synthetic oligonucleotide
  Target: LAMA2; (-) strand; PAM type: YTN; PAM sequence: CTT
cttccattaaatggaaatca

SEQ ID NO: 273658 - DNA, 20 bp, Artificial Sequence
  Description of Artificial Sequence: Synthetic oligonucleotide
  Target: LAMA2; (-) strand; PAM type: YTN; PAM sequence: TTA
cttcttccattaaatggaaa

SEQ ID NO: 273659 - DNA, 20 bp, Artificial Sequence
  Description of Artificial Sequence: Synthetic oligonucleotide
  Target: LAMA2; (-) strand; PAM type: YTN; PAM sequence: TTA
ttacttcttccattaaatgg

SEQ ID NO: 273660 - DNA, 20 bp, Artificial Sequence
  Description of Artificial Sequence: Synthetic oligonucleotide
  Target: LAMA2; (-) strand; PAM type: YTN; PAM sequence: TTT
attacttcttccattaaatg

SEQ ID NO: 273661 - DNA, 20 bp, Artificial Sequence
  Description of Artificial Sequence: Synthetic oligonucleotide
  Target: LAMA2; (-) strand; PAM type: YTN; PAM sequence: CTT
tattacttcttccattaaat

SEQ ID NO: 273662 - DNA, 20 bp, Artificial Sequence
  Description of Artificial Sequence: Synthetic oligonucleotide
  Target: LAMA2; (-) strand; PAM type: YTN; PAM sequence: TTA
aactttattacttcttccat

SEQ ID NO: 273663 - DNA, 20 bp, Artificial Sequence
  Description of Artificial Sequence: Synthetic oligonucleotide
  Target: LAMA2; (-) strand; PAM type: YTN; PAM sequence: CTC
acgtatacaattaaacttta

SEQ ID NO: 273664 - DNA, 20 bp, Artificial Sequence
  Description of Artificial Sequence: Synthetic oligonucleotide
  Target: LAMA2; (-) strand; PAM type: YTN; PAM sequence: TTG
caaatgatgccccatgctca

SEQ ID NO: 273665 - DNA, 20 bp, Artificial Sequence
  Description of Artificial Sequence: Synthetic oligonucleotide
  Target: LAMA2; (-) strand; PAM type: YTN; PAM sequence: TTG
atcagatgtattgcaaatga

SEQ ID NO: 273666 - DNA, 20 bp, Artificial Sequence
  Description of Artificial Sequence: Synthetic oligonucleotide
  Target: LAMA2; (-) strand; PAM type: YTN; PAM sequence: TTA
ttgatcagatgtattgcaaa

SEQ ID NO: 273667 - DNA, 20 bp, Artificial Sequence
  Description of Artificial Sequence: Synthetic oligonucleotide
  Target: LAMA2; (-) strand; PAM type: YTN; PAM sequence: TTG
agccaacggcaatcgatgaa

SEQ ID NO: 273668 - DNA, 20 bp, Artificial Sequence
  Description of Artificial Sequence: Synthetic oligonucleotide
  Target: LAMA2; (-) strand; PAM type: YTN; PAM sequence: TTT
gagccaacggcaatcgatga

SEQ ID NO: 273669 - DNA, 20 bp, Artificial Sequence
  Description of Artificial Sequence: Synthetic oligonucleotide
  Target: LAMA2; (-) strand; PAM type: YTN; PAM sequence: CTT
tgagccaacggcaatcgatg

SEQ ID NO: 273670 - DNA, 20 bp, Artificial Sequence
  Description of Artificial Sequence: Synthetic oligonucleotide
  Target: LAMA2; (-) strand; PAM type: YTN; PAM sequence: TTA
ctttgagccaacggcaatcg

SEQ ID NO: 273671 - DNA, 20 bp, Artificial Sequence
  Description of Artificial Sequence: Synthetic oligonucleotide
  Target: LAMA2; (-) strand; PAM type: YTN; PAM sequence: TTC
aaatattactttgagccaac

SEQ ID NO: 273672 - DNA, 20 bp, Artificial Sequence
  Description of Artificial Sequence: Synthetic oligonucleotide
  Target: LAMA2; (-) strand; PAM type: YTN; PAM sequence: TTT
caaatattactttgagccaa

SEQ ID NO: 273673 - DNA, 20 bp, Artificial Sequence
  Description of Artificial Sequence: Synthetic oligonucleotide
  Target: LAMA2; (-) strand; PAM type: YTN; PAM sequence: CTT
tcaaatattactttgagcca

SEQ ID NO: 273674 - DNA, 20 bp, Artificial Sequence
  Description of Artificial Sequence: Synthetic oligonucleotide
  Target: LAMA2; (-) strand; PAM type: YTN; PAM sequence: TTC
tttcaaatattactttgagc

SEQ ID NO: 273675 - DNA, 20 bp, Artificial Sequence
  Description of Artificial Sequence: Synthetic oligonucleotide
  Target: LAMA2; (-) strand; PAM type: YTN; PAM sequence: TTT
ctttcaaatattactttgag

SEQ ID NO: 273676 - DNA, 20 bp, Artificial Sequence
  Description of Artificial Sequence: Synthetic oligonucleotide
  Target: LAMA2; (-) strand; PAM type: YTN; PAM sequence: TTT
tctttcaaatattactttga

SEQ ID NO: 273677 - DNA, 20 bp, Artificial Sequence
  Description of Artificial Sequence: Synthetic oligonucleotide
  Target: LAMA2; (-) strand; PAM type: YTN; PAM sequence: CTG
cattttctttcaaatattac

SEQ ID NO: 273678 - DNA, 20 bp, Artificial Sequence
  Description of Artificial Sequence: Synthetic oligonucleotide
  Target: LAMA2; (-) strand; PAM type: YTN; PAM sequence: CTG
gctgcattttctttcaaata

SEQ ID NO: 273679 - DNA, 20 bp, Artificial Sequence
  Description of Artificial Sequence: Synthetic oligonucleotide
  Target: LAMA2; (-) strand; PAM type: YTN; PAM sequence: CTC
ccactggctgcattttcttt

SEQ ID NO: 273680 - DNA, 20 bp, Artificial Sequence
  Description of Artificial Sequence: Synthetic oligonucleotide
  Target: LAMA2; (-) strand; PAM type: YTN; PAM sequence: CTA
gataagctcccactggctgc

SEQ ID NO: 273681 - DNA, 20 bp, Artificial Sequence
  Description of Artificial Sequence: Synthetic oligonucleotide
  Target: LAMA2; (-) strand; PAM type: YTN; PAM sequence: CTA
cagctagataagctcccact

SEQ ID NO: 273682 - DNA, 20 bp, Artificial Sequence
  Description of Artificial Sequence: Synthetic oligonucleotide
  Target: LAMA2; (-) strand; PAM type: YTN; PAM sequence: TTA
atagagatgatgaagctaca

SEQ ID NO: 273683 - DNA, 20 bp, Artificial Sequence
  Description of Artificial Sequence: Synthetic oligonucleotide
  Target: LAMA2; (-) strand; PAM type: YTN; PAM sequence: TTC
gggaaacacataattaatag

SEQ ID NO: 273684 - DNA, 20 bp, Artificial Sequence
  Description of Artificial Sequence: Synthetic oligonucleotide
  Target: LAMA2; (-) strand; PAM type: YTN; PAM sequence: CTA
atgatccaaattcgggaaac

SEQ ID NO: 273685 - DNA, 20 bp, Artificial Sequence
  Description of Artificial Sequence: Synthetic oligonucleotide
  Target: LAMA2; (-) strand; PAM type: YTN; PAM sequence: TTG
gtagcctaatgatccaaatt

SEQ ID NO: 273686 - DNA, 20 bp, Artificial Sequence
  Description of Artificial Sequence: Synthetic oligonucleotide
  Target: LAMA2; (-) strand; PAM type: YTN; PAM sequence: TTT
ggtagcctaatgatccaaat

SEQ ID NO: 273687 - DNA, 20 bp, Artificial Sequence
  Description of Artificial Sequence: Synthetic oligonucleotide
  Target: LAMA2; (-) strand; PAM type: YTN; PAM sequence: CTT
tggtagcctaatgatccaaa

SEQ ID NO: 273688 - DNA, 20 bp, Artificial Sequence
  Description of Artificial Sequence: Synthetic oligonucleotide
  Target: LAMA2; (-) strand; PAM type: YTN; PAM sequence: CTG
tcactttggtagcctaatga

SEQ ID NO: 273689 - DNA, 20 bp, Artificial Sequence
  Description of Artificial Sequence: Synthetic oligonucleotide
  Target: LAMA2; (-) strand; PAM type: YTN; PAM sequence: CTG
ctgtcactttggtagcctaa

SEQ ID NO: 273690 - DNA, 20 bp, Artificial Sequence
  Description of Artificial Sequence: Synthetic oligonucleotide
  Target: LAMA2; (-) strand; PAM type: YTN; PAM sequence: CTC
gccatctgctgtcactttgg

SEQ ID NO: 273691 - DNA, 20 bp, Artificial Sequence
  Description of Artificial Sequence: Synthetic oligonucleotide
  Target: LAMA2; (-) strand; PAM type: YTN; PAM sequence: CTG
ctcgccatctgctgtcactt

SEQ ID NO: 273692 - DNA, 20 bp, Artificial Sequence
  Description of Artificial Sequence: Synthetic oligonucleotide
  Target: LAMA2; (-) strand; PAM type: YTN; PAM sequence: CTG
tccggtctgctcgccatctg

SEQ ID NO: 273693 - DNA, 20 bp, Artificial Sequence
  Description of Artificial Sequence: Synthetic oligonucleotide
  Target: LAMA2; (-) strand; PAM type: YTN; PAM sequence: CTC
agcatcctgtccggtctgct

SEQ ID NO: 273694 - DNA, 20 bp, Artificial Sequence
  Description of Artificial Sequence: Synthetic oligonucleotide
  Target: LAMA2; (-) strand; PAM type: YTN; PAM sequence: CTC
tcagcatcctgtccggtctg

SEQ ID NO: 273695 - DNA, 20 bp, Artificial Sequence
  Description of Artificial Sequence: Synthetic oligonucleotide
  Target: LAMA2; (-) strand; PAM type: YTN; PAM sequence: TTG
gtcctctcagcatcctgtcc

SEQ ID NO: 273696 - DNA, 20 bp, Artificial Sequence
  Description of Artificial Sequence: Synthetic oligonucleotide
  Target: LAMA2; (-) strand; PAM type: YTN; PAM sequence: TTG
tgttggtcctctcagcatcc

SEQ ID NO: 273697 - DNA, 20 bp, Artificial Sequence
  Description of Artificial Sequence: Synthetic oligonucleotide
  Target: LAMA2; (-) strand; PAM type: YTN; PAM sequence: CTT
gtgttggtcctctcagcatc

SEQ ID NO: 273698 - DNA, 20 bp, Artificial Sequence
  Description of Artificial Sequence: Synthetic oligonucleotide
  Target: LAMA2; (-) strand; PAM type: YTN; PAM sequence: CTC
ttgtgttggtcctctcagca

SEQ ID NO: 273699 - DNA, 20 bp, Artificial Sequence
  Description of Artificial Sequence: Synthetic oligonucleotide
  Target: LAMA2; (-) strand; PAM type: YTN; PAM sequence: TTG
ctcttgtgttggtcctctca

SEQ ID NO: 273700 - DNA, 20 bp, Artificial Sequence
  Description of Artificial Sequence: Synthetic oligonucleotide
  Target: LAMA2; (-) strand; PAM type: YTN; PAM sequence: TTT
gctcttgtgttggtcctctc

SEQ ID NO: 273701 - DNA, 20 bp, Artificial Sequence
  Description of Artificial Sequence: Synthetic oligonucleotide
  Target: LAMA2; (-) strand; PAM type: YTN; PAM sequence: CTT
tgctcttgtgttggtcctct

SEQ ID NO: 273702 - DNA, 20 bp, Artificial Sequence
  Description of Artificial Sequence: Synthetic oligonucleotide
  Target: LAMA2; (-) strand; PAM type: YTN; PAM sequence: CTC
ccagggactttgctcttgtg

SEQ ID NO: 273703 - DNA, 20 bp, Artificial Sequence
  Description of Artificial Sequence: Synthetic oligonucleotide
  Target: LAMA2; (-) strand; PAM type: YTN; PAM sequence: TTC
tcccagggactttgctcttg

SEQ ID NO: 273704 - DNA, 20 bp, Artificial Sequence
  Description of Artificial Sequence: Synthetic oligonucleotide
  Target: LAMA2; (-) strand; PAM type: YTN; PAM sequence: TTA
atgaattctcccagggactt

SEQ ID NO: 273705 - DNA, 20 bp, Artificial Sequence
  Description of Artificial Sequence: Synthetic oligonucleotide
  Target: LAMA2; (-) strand; PAM type: YTN; PAM sequence: CTT
aatgaattctcccagggact

SEQ ID NO: 273706 - DNA, 20 bp, Artificial Sequence
  Description of Artificial Sequence: Synthetic oligonucleotide
  Target: LAMA2; (-) strand; PAM type: YTN; PAM sequence: CTC
cttaatgaattctcccaggg

SEQ ID NO: 273707 - DNA, 20 bp, Artificial Sequence
  Description of Artificial Sequence: Synthetic oligonucleotide
  Target: LAMA2; (-) strand; PAM type: YTN; PAM sequence: CTG
catcccgggcaagctcctta

SEQ ID NO: 273708 - DNA, 20 bp, Artificial Sequence
  Description of Artificial Sequence: Synthetic oligonucleotide
  Target: LAMA2; (-) strand; PAM type: YTN; PAM sequence: TTC
tgcatcccgggcaagctcct

SEQ ID NO: 273709 - DNA, 20 bp, Artificial Sequence
  Description of Artificial Sequence: Synthetic oligonucleotide
  Target: LAMA2; (-) strand; PAM type: YTN; PAM sequence: CTT
ctgcatcccgggcaagctcc

SEQ ID NO: 273710 - DNA, 20 bp, Artificial Sequence
  Description of Artificial Sequence: Synthetic oligonucleotide
  Target: LAMA2; (-) strand; PAM type: YTN; PAM sequence: CTA
ataccttctgcatcccgggc

SEQ ID NO: 273711 - DNA, 20 bp, Artificial Sequence
  Description of Artificial Sequence: Synthetic oligonucleotide
  Target: LAMA2; (-) strand; PAM type: YTN; PAM sequence: TTC
taataccttctgcatcccgg

SEQ ID NO: 273712 - DNA, 20 bp, Artificial Sequence
  Description of Artificial Sequence: Synthetic oligonucleotide
  Target: LAMA2; (-) strand; PAM type: YTN; PAM sequence: TTT
ctaataccttctgcatcccg

SEQ ID NO: 273713 - DNA, 20 bp, Artificial Sequence
  Description of Artificial Sequence: Synthetic oligonucleotide
  Target: LAMA2; (-) strand; PAM type: YTN; PAM sequence: CTT
tctaataccttctgcatccc

SEQ ID NO: 273714 - DNA, 20 bp, Artificial Sequence
  Description of Artificial Sequence: Synthetic oligonucleotide
  Target: LAMA2; (-) strand; PAM type: YTN; PAM sequence: TTC
tttctaataccttctgcatc

SEQ ID NO: 273715 - DNA, 20 bp, Artificial Sequence
  Description of Artificial Sequence: Synthetic oligonucleotide
  Target: LAMA2; (-) strand; PAM type: YTN; PAM sequence: TTA
aaatgtgattctttctaata

SEQ ID NO: 273716 - DNA, 20 bp, Artificial Sequence
  Description of Artificial Sequence: Synthetic oligonucleotide
  Target: LAMA2; (-) strand; PAM type: YTN; PAM sequence: TTG
ggagaaatgatgattaaaat

SEQ ID NO: 273717 - DNA, 20 bp, Artificial Sequence
  Description of Artificial Sequence: Synthetic oligonucleotide
  Target: LAMA2; (-) strand; PAM type: YTN; PAM sequence: CTG
ttgggagaaatgatgattaa

SEQ ID NO: 273718 - DNA, 20 bp, Artificial Sequence
  Description of Artificial Sequence: Synthetic oligonucleotide
  Target: LAMA2; (-) strand; PAM type: YTN; PAM sequence: TTC
tgttgggagaaatgatgatt

SEQ ID NO: 273719 - DNA, 20 bp, Artificial Sequence
  Description of Artificial Sequence: Synthetic oligonucleotide
  Target: LAMA2; (-) strand; PAM type: YTN; PAM sequence: TTT
ctgttgggagaaatgatgat

SEQ ID NO: 273720 - DNA, 20 bp, Artificial Sequence
  Description of Artificial Sequence: Synthetic oligonucleotide
  Target: LAMA2; (-) strand; PAM type: YTN; PAM sequence: TTT
tctgttgggagaaatgatga

SEQ ID NO: 273721 - DNA, 20 bp, Artificial Sequence
  Description of Artificial Sequence: Synthetic oligonucleotide
  Target: LAMA2; (-) strand; PAM type: YTN; PAM sequence: TTT
ttctgttgggagaaatgatg

SEQ ID NO: 273722 - DNA, 20 bp, Artificial Sequence
  Description of Artificial Sequence: Synthetic oligonucleotide
  Target: LAMA2; (-) strand; PAM type: YTN; PAM sequence: CTG
tgtttttctgttgggagaaa

SEQ ID NO: 273723 - DNA, 20 bp, Artificial Sequence
  Description of Artificial Sequence: Synthetic oligonucleotide
  Target: LAMA2; (-) strand; PAM type: YTN; PAM sequence: TTC
tgtgtttttctgttgggaga

SEQ ID NO: 273724 - DNA, 20 bp, Artificial Sequence
  Description of Artificial Sequence: Synthetic oligonucleotide
  Target: LAMA2; (-) strand; PAM type: YTN; PAM sequence: TTT
ctgtgtttttctgttgggag

SEQ ID NO: 273725 - DNA, 20 bp, Artificial Sequence
  Description of Artificial Sequence: Synthetic oligonucleotide
  Target: LAMA2; (-) strand; PAM type: YTN; PAM sequence: CTT
tctgtgtttttctgttggga

SEQ ID NO: 273726 - DNA, 20 bp, Artificial Sequence
  Description of Artificial Sequence: Synthetic oligonucleotide
  Target: LAMA2; (-) strand; PAM type: YTN; PAM sequence: CTG
tgtcatccctttctgtgttt

SEQ ID NO: 273727 - DNA, 20 bp, Artificial Sequence
  Description of Artificial Sequence: Synthetic oligonucleotide
  Target: LAMA2; (-) strand; PAM type: YTN; PAM sequence: TTC
cagtcctgtgtcatcccttt

SEQ ID NO: 273728 - DNA, 20 bp, Artificial Sequence
  Description of Artificial Sequence: Synthetic oligonucleotide
  Target: LAMA2; (-) strand; PAM type: YTN; PAM sequence: TTA
taacaagagaaattccagtc

SEQ ID NO: 273729 - DNA, 20 bp, Artificial Sequence
  Description of Artificial Sequence: Synthetic oligonucleotide
  Target: LAMA2; (-) strand; PAM type: YTN; PAM sequence: CTT
ataacaagagaaattccagt

SEQ ID NO: 273730 - DNA, 20 bp, Artificial Sequence
  Description of Artificial Sequence: Synthetic oligonucleotide
  Target: LAMA2; (-) strand; PAM type: YTN; PAM sequence: TTA
cagatgtcacttataacaag

SEQ ID NO: 273731 - DNA, 20 bp, Artificial Sequence
  Description of Artificial Sequence: Synthetic oligonucleotide
  Target: LAMA2; (-) strand; PAM type: YTN; PAM sequence: TTT
acagatgtcacttataacaa

SEQ ID NO: 273732 - DNA, 20 bp, Artificial Sequence
  Description of Artificial Sequence: Synthetic oligonucleotide
  Target: LAMA2; (-) strand; PAM type: YTN; PAM sequence: TTT
tacagatgtcacttataaca

SEQ ID NO: 273733 - DNA, 20 bp, Artificial Sequence
  Description of Artificial Sequence: Synthetic oligonucleotide
  Target: LAMA2; (-) strand; PAM type: YTN; PAM sequence: TTG
attttacagatgtcacttat

SEQ ID NO: 273734 - DNA, 20 bp, Artificial Sequence
  Description of Artificial Sequence: Synthetic oligonucleotide
  Target: LAMA2; (-) strand; PAM type: YTN; PAM sequence: TTT
gattttacagatgtcactta

SEQ ID NO: 273735 - DNA, 20 bp, Artificial Sequence
  Description of Artificial Sequence: Synthetic oligonucleotide
  Target: LAMA2; (-) strand; PAM type: YTN; PAM sequence: CTT
tgattttacagatgtcactt

SEQ ID NO: 273736 - DNA, 20 bp, Artificial Sequence
  Description of Artificial Sequence: Synthetic oligonucleotide
  Target: LAMA2; (-) strand; PAM type: YTN; PAM sequence: CTA
cctttgattttacagatgtc

SEQ ID NO: 273737 - DNA, 20 bp, Artificial Sequence
  Description of Artificial Sequence: Synthetic oligonucleotide
  Target: LAMA2; (-) strand; PAM type: YTN; PAM sequence: CTC
tacctttgattttacagatg

SEQ ID NO: 273738 - DNA, 20 bp, Artificial Sequence
  Description of Artificial Sequence: Synthetic oligonucleotide
  Target: LAMA2; (-) strand; PAM type: YTN; PAM sequence: TTG
aaactctacctttgatttta

SEQ ID NO: 273739 - DNA, 20 bp, Artificial Sequence
  Description of Artificial Sequence: Synthetic oligonucleotide
  Target: LAMA2; (-) strand; PAM type: YTN; PAM sequence: TTT
gaaactctacctttgatttt

SEQ ID NO: 273740 - DNA, 20 bp, Artificial Sequence
  Description of Artificial Sequence: Synthetic oligonucleotide
  Target: LAMA2; (-) strand; PAM type: YTN; PAM sequence: TTT
tgaaactctacctttgattt

SEQ ID NO: 273741 - DNA, 20 bp, Artificial Sequence
  Description of Artificial Sequence: Synthetic oligonucleotide
  Target: LAMA2; (-) strand; PAM type: YTN; PAM sequence: TTT
ttgaaactctacctttgatt

SEQ ID NO: 273742 - DNA, 20 bp, Artificial Sequence
  Description of Artificial Sequence: Synthetic oligonucleotide
  Target: LAMA2; (-) strand; PAM type: YTN; PAM sequence: CTT
tttgaaactctacctttgat

SEQ ID NO: 273743 - DNA, 20 bp, Artificial Sequence
  Description of Artificial Sequence: Synthetic oligonucleotide
  Target: LAMA2; (-) strand; PAM type: YTN; PAM sequence: CTA
ctttttgaaactctaccttt

SEQ ID NO: 273744 - DNA, 20 bp, Artificial Sequence
  Description of Artificial Sequence: Synthetic oligonucleotide
  Target: LAMA2; (-) strand; PAM type: YTN; PAM sequence: TTA
accacactactttttgaaac

SEQ ID NO: 273745 - DNA, 20 bp, Artificial Sequence
  Description of Artificial Sequence: Synthetic oligonucleotide
  Target: LAMA2; (-) strand; PAM type: YTN; PAM sequence: CTT
aaccacactactttttgaaa

SEQ ID NO: 273746 - DNA, 20 bp, Artificial Sequence
  Description of Artificial Sequence: Synthetic oligonucleotide
  Target: LAMA2; (-) strand; PAM type: YTN; PAM sequence: TTG
aatatcttaaccacactact

SEQ ID NO: 273747 - DNA, 20 bp, Artificial Sequence
  Description of Artificial Sequence: Synthetic oligonucleotide
  Target: LAMA2; (-) strand; PAM type: YTN; PAM sequence: CTT
gaatatcttaaccacactac

SEQ ID NO: 273748 - DNA, 20 bp, Artificial Sequence
  Description of Artificial Sequence: Synthetic oligonucleotide
  Target: LAMA2; (-) strand; PAM type: YTN; PAM sequence: CTC
agcagataatacccttgaat

SEQ ID NO: 273749 - DNA, 20 bp, Artificial Sequence
  Description of Artificial Sequence: Synthetic oligonucleotide
  Target: LAMA2; (-) strand; PAM type: YTN; PAM sequence: TTC
tcagcagataatacccttga

SEQ ID NO: 273750 - DNA, 20 bp, Artificial Sequence
  Description of Artificial Sequence: Synthetic oligonucleotide
  Target: LAMA2; (-) strand; PAM type: YTN; PAM sequence: CTG
caggtcacaggttctcagca

SEQ ID NO: 273751 - DNA, 20 bp, Artificial Sequence
  Description of Artificial Sequence: Synthetic oligonucleotide
  Target: LAMA2; (-) strand; PAM type: YTN; PAM sequence: TTA
acactgcaggtcacaggttc

SEQ ID NO: 273752 - DNA, 20 bp, Artificial Sequence
  Description of Artificial Sequence: Synthetic oligonucleotide
  Target: LAMA2; (-) strand; PAM type: YTN; PAM sequence: TTT
aacactgcaggtcacaggtt

SEQ ID NO: 273753 - DNA, 20 bp, Artificial Sequence
  Description of Artificial Sequence: Synthetic oligonucleotide
  Target: LAMA2; (-) strand; PAM type: YTN; PAM sequence: CTA
atttaacactgcaggtcaca

SEQ ID NO: 273754 - DNA, 20 bp, Artificial Sequence
  Description of Artificial Sequence: Synthetic oligonucleotide
  Target: LAMA2; (-) strand; PAM type: YTN; PAM sequence: TTG
tcgctaatttaacactgcag

SEQ ID NO: 273755 - DNA, 20 bp, Artificial Sequence
  Description of Artificial Sequence: Synthetic oligonucleotide
  Target: LAMA2; (-) strand; PAM type: YTN; PAM sequence: CTA
ttgtcgctaatttaacactg

SEQ ID NO: 273756 - DNA, 20 bp, Artificial Sequence
  Description of Artificial Sequence: Synthetic oligonucleotide
  Target: LAMA2; (-) strand; PAM type: YTN; PAM sequence: TTC
actattgtcgctaatttaac

SEQ ID NO: 273757 - DNA, 20 bp, Artificial Sequence
  Description of Artificial Sequence: Synthetic oligonucleotide
  Target: LAMA2; (-) strand; PAM type: YTN; PAM sequence: CTA
attcactattgtcgctaatt

SEQ ID NO: 273758 - DNA, 20 bp, Artificial Sequence
  Description of Artificial Sequence: Synthetic oligonucleotide
  Target: LAMA2; (-) strand; PAM type: YTN; PAM sequence: TTG
tcgctaattcactattgtcg

SEQ ID NO: 273759 - DNA, 20 bp, Artificial Sequence
  Description of Artificial Sequence: Synthetic oligonucleotide
  Target: LAMA2; (-) strand; PAM type: YTN; PAM sequence: CTC
attgtcgctaattcactatt

SEQ ID NO: 273760 - DNA, 20 bp, Artificial Sequence
  Description of Artificial Sequence: Synthetic oligonucleotide
  Target: LAMA2; (-) strand; PAM type: YTN; PAM sequence: CTG
ccctcattgtcgctaattca

SEQ ID NO: 273761 - DNA, 20 bp, Artificial Sequence
  Description of Artificial Sequence: Synthetic oligonucleotide
  Target: LAMA2; (-) strand; PAM type: YTN; PAM sequence: TTC
tgccctcattgtcgctaatt

SEQ ID NO: 273762 - DNA, 20 bp, Artificial Sequence
  Description of Artificial Sequence: Synthetic oligonucleotide
  Target: LAMA2; (-) strand; PAM type: YTN; PAM sequence: CTA
ttctgccctcattgtcgcta

SEQ ID NO: 273763 - DNA, 20 bp, Artificial Sequence
  Description of Artificial Sequence: Synthetic oligonucleotide
  Target: LAMA2; (-) strand; PAM type: YTN; PAM sequence: CTG
ctattctgccctcattgtcg

SEQ ID NO: 273764 - DNA, 20 bp, Artificial Sequence
  Description of Artificial Sequence: Synthetic oligonucleotide
  Target: LAMA2; (-) strand; PAM type: YTN; PAM sequence: TTA
ctgctattctgccctcattg

SEQ ID NO: 273765 - DNA, 20 bp, Artificial Sequence
  Description of Artificial Sequence: Synthetic oligonucleotide
  Target: LAMA2; (-) strand; PAM type: YTN; PAM sequence: TTT
actgctattctgccctcatt

SEQ ID NO: 273766 - DNA, 20 bp, Artificial Sequence
  Description of Artificial Sequence: Synthetic oligonucleotide
  Target: LAMA2; (-) strand; PAM type: YTN; PAM sequence: TTA
caagaatttactgctattct

SEQ ID NO: 273767 - DNA, 20 bp, Artificial Sequence
  Description of Artificial Sequence: Synthetic oligonucleotide
  Target: LAMA2; (-) strand; PAM type: YTN; PAM sequence: TTA
taatagccatgttacaagaa

SEQ ID NO: 273768 - DNA, 20 bp, Artificial Sequence
  Description of Artificial Sequence: Synthetic oligonucleotide
  Target: LAMA2; (-) strand; PAM type: YTN; PAM sequence: TTA
tgtaattataatagccatgt

SEQ ID NO: 273769 - DNA, 20 bp, Artificial Sequence
  Description of Artificial Sequence: Synthetic oligonucleotide
  Target: LAMA2; (-) strand; PAM type: YTN; PAM sequence: CTT
atgtaattataatagccatg

SEQ ID NO: 273770 - DNA, 20 bp, Artificial Sequence
  Description of Artificial Sequence: Synthetic oligonucleotide
  Target: LAMA2; (-) strand; PAM type: YTN; PAM sequence: TTC
ttatgtaattataatagcca

SEQ ID NO: 273771 - DNA, 20 bp, Artificial Sequence
  Description of Artificial Sequence: Synthetic oligonucleotide
  Target: LAMA2; (-) strand; PAM type: YTN; PAM sequence: CTA
ttcttatgtaattataatag

SEQ ID NO: 273772 - DNA, 20 bp, Artificial Sequence
  Description of Artificial Sequence: Synthetic oligonucleotide
  Target: LAMA2; (-) strand; PAM type: YTN; PAM sequence: TTG
cctattcttatgtaattata

SEQ ID NO: 273773 - DNA, 20 bp, Artificial Sequence
  Description of Artificial Sequence: Synthetic oligonucleotide
  Target: LAMA2; (-) strand; PAM type: YTN; PAM sequence: TTC
aaataaaaacaataacaaaa

SEQ ID NO: 273774 - DNA, 20 bp, Artificial Sequence
  Description of Artificial Sequence: Synthetic oligonucleotide
  Target: LAMA2; (-) strand; PAM type: YTN; PAM sequence: TTT
caaataaaaacaataacaaa

SEQ ID NO: 273775 - DNA, 20 bp, Artificial Sequence
  Description of Artificial Sequence: Synthetic oligonucleotide
  Target: LAMA2; (-) strand; PAM type: YTN; PAM sequence: CTT
tcaaataaaaacaataacaa

SEQ ID NO: 273776 - DNA, 20 bp, Artificial Sequence
  Description of Artificial Sequence: Synthetic oligonucleotide
  Target: LAMA2; (-) strand; PAM type: YTN; PAM sequence: TTA
aatactttcaaataaaaaca

SEQ ID NO: 273777 - DNA, 20 bp, Artificial Sequence
  Description of Artificial Sequence: Synthetic oligonucleotide
  Target: LAMA2; (-) strand; PAM type: YTN; PAM sequence: TTT
aaatactttcaaataaaaac

SEQ ID NO: 273778 - DNA, 20 bp, Artificial Sequence
  Description of Artificial Sequence: Synthetic oligonucleotide
  Target: LAMA2; (-) strand; PAM type: YTN; PAM sequence: CTT
taaatactttcaaataaaaa

SEQ ID NO: 273779 - DNA, 20 bp, Artificial Sequence
  Description of Artificial Sequence: Synthetic oligonucleotide
  Target: LAMA2; (-) strand; PAM type: YTN; PAM sequence: TTG
aaaatgaaaaatactttaaa

SEQ ID NO: 273780 - DNA, 20 bp, Artificial Sequence
  Description of Artificial Sequence: Synthetic oligonucleotide
  Target: LAMA2; (-) strand; PAM type: YTN; PAM sequence: CTT
gaaaatgaaaaatactttaa

SEQ ID NO: 273781 - DNA, 20 bp, Artificial Sequence
  Description of Artificial Sequence: Synthetic oligonucleotide
  Target: LAMA2; (-) strand; PAM type: YTN; PAM sequence: TTG
cttgaaaatgaaaaatactt

SEQ ID NO: 273782 - DNA, 20 bp, Artificial Sequence
  Description of Artificial Sequence: Synthetic oligonucleotide
  Target: LAMA2; (-) strand; PAM type: YTN; PAM sequence: CTT
gcttgaaaatgaaaaatact

SEQ ID NO: 273783 - DNA, 20 bp, Artificial Sequence
  Description of Artificial Sequence: Synthetic oligonucleotide
  Target: LAMA2; (-) strand; PAM type: YTN; PAM sequence: TTA
gcttgcttgaaaatgaaaaa

SEQ ID NO: 273784 - DNA, 20 bp, Artificial Sequence
  Description of Artificial Sequence: Synthetic oligonucleotide
  Target: LAMA2; (-) strand; PAM type: YTN; PAM sequence: TTA
atgtatcaagtggaatgatg

SEQ ID NO: 273785 - DNA, 20 bp, Artificial Sequence
  Description of Artificial Sequence: Synthetic oligonucleotide
  Target: LAMA2; (-) strand; PAM type: YTN; PAM sequence: TTT
aatgtatcaagtggaatgat

SEQ ID NO: 273786 - DNA, 20 bp, Artificial Sequence
  Description of Artificial Sequence: Synthetic oligonucleotide
  Target: LAMA2; (-) strand; PAM type: YTN; PAM sequence: CTT
taatgtatcaagtggaatga

SEQ ID NO: 273787 - DNA, 20 bp, Artificial Sequence
  Description of Artificial Sequence: Synthetic oligonucleotide
  Target: LAMA2; (-) strand; PAM type: YTN; PAM sequence: CTG
ctttaatgtatcaagtggaa

SEQ ID NO: 273788 - DNA, 20 bp, Artificial Sequence
  Description of Artificial Sequence: Synthetic oligonucleotide
  Target: LAMA2; (-) strand; PAM type: YTN; PAM sequence: CTA
aagtgctgctttaatgtatc

SEQ ID NO: 273789 - DNA, 20 bp, Artificial Sequence
  Description of Artificial Sequence: Synthetic oligonucleotide
  Target: LAMA2; (-) strand; PAM type: YTN; PAM sequence: TTG
gagaaactaaagtgctgctt

SEQ ID NO: 273790 - DNA, 20 bp, Artificial Sequence
  Description of Artificial Sequence: Synthetic oligonucleotide
  Target: LAMA2; (-) strand; PAM type: YTN; PAM sequence: TTT
ggagaaactaaagtgctgct

SEQ ID NO: 273791 - DNA, 20 bp, Artificial Sequence
  Description of Artificial Sequence: Synthetic oligonucleotide
  Target: LAMA2; (-) strand; PAM type: YTN; PAM sequence: TTG
aaaagccatttggagaaact

SEQ ID NO: 273792 - DNA, 20 bp, Artificial Sequence
  Description of Artificial Sequence: Synthetic oligonucleotide
  Target: LAMA2; (-) strand; PAM type: YTN; PAM sequence: TTT
gaaaagccatttggagaaac

SEQ ID NO: 273793 - DNA, 20 bp, Artificial Sequence
  Description of Artificial Sequence: Synthetic oligonucleotide
  Target: LAMA2; (-) strand; PAM type: YTN; PAM sequence: TTA
aaaaccagtccccagtattt

SEQ ID NO: 273794 - DNA, 20 bp, Artificial Sequence
  Description of Artificial Sequence: Synthetic oligonucleotide
  Target: LAMA2; (-) strand; PAM type: YTN; PAM sequence: TTC
attaaaaaccagtccccagt

SEQ ID NO: 273795 - DNA, 20 bp, Artificial Sequence
  Description of Artificial Sequence: Synthetic oligonucleotide
  Target: LAMA2; (-) strand; PAM type: YTN; PAM sequence: CTC
ataaagtagcacatccaaat

SEQ ID NO: 273796 - DNA, 20 bp, Artificial Sequence
  Description of Artificial Sequence: Synthetic oligonucleotide
  Target: LAMA2; (-) strand; PAM type: YTN; PAM sequence: TTC
tcataaagtagcacatccaa

SEQ ID NO: 273797 - DNA, 20 bp, Artificial Sequence
  Description of Artificial Sequence: Synthetic oligonucleotide
  Target: LAMA2; (-) strand; PAM type: YTN; PAM sequence: CTT
ctcataaagtagcacatcca

SEQ ID NO: 273798 - DNA, 20 bp, Artificial Sequence
  Description of Artificial Sequence: Synthetic oligonucleotide
  Target: LAMA2; (-) strand; PAM type: YTN; PAM sequence: CTA
aatgcaccagagcttctcat

SEQ ID NO: 273799 - DNA, 20 bp, Artificial Sequence
  Description of Artificial Sequence: Synthetic oligonucleotide
  Target: LAMA2; (-) strand; PAM type: YTN; PAM sequence: TTG
tgagctaaatgcaccagagc

SEQ ID NO: 273800 - DNA, 20 bp, Artificial Sequence
  Description of Artificial Sequence: Synthetic oligonucleotide
  Target: LAMA2; (-) strand; PAM type: YTN; PAM sequence: CTA
gagaattgtgagctaaatgc

SEQ ID NO: 273801 - DNA, 20 bp, Artificial Sequence
  Description of Artificial Sequence: Synthetic oligonucleotide
  Target: LAMA2; (-) strand; PAM type: YTN; PAM sequence: CTC
ctagagaattgtgagctaaa

SEQ ID NO: 273802 - DNA, 20 bp, Artificial Sequence
  Description of Artificial Sequence: Synthetic oligonucleotide
  Target: LAMA2; (-) strand; PAM type: YTN; PAM sequence: CTA
actcctagagaattgtgagc

SEQ ID NO: 273803 - DNA, 20 bp, Artificial Sequence
  Description of Artificial Sequence: Synthetic oligonucleotide
  Target: LAMA2; (-) strand; PAM type: YTN; PAM sequence: TTA
gtagatggcaagaactaact

SEQ ID NO: 273804 - DNA, 20 bp, Artificial Sequence
  Description of Artificial Sequence: Synthetic oligonucleotide
  Target: LAMA2; (-) strand; PAM type: YTN; PAM sequence: TTC
atgttagtagatggcaagaa

SEQ ID NO: 273805 - DNA, 20 bp, Artificial Sequence
  Description of Artificial Sequence: Synthetic oligonucleotide
  Target: LAMA2; (-) strand; PAM type: YTN; PAM sequence: CTC
attcatgttagtagatggca

SEQ ID NO: 273806 - DNA, 20 bp, Artificial Sequence
  Description of Artificial Sequence: Synthetic oligonucleotide
  Target: LAMA2; (-) strand; PAM type: YTN; PAM sequence: TTC
tcattcatgttagtagatgg

SEQ ID NO: 273807 - DNA, 20 bp, Artificial Sequence
  Description of Artificial Sequence: Synthetic oligonucleotide
  Target: LAMA2; (-) strand; PAM type: YTN; PAM sequence: TTT
ctcattcatgttagtagatg

SEQ ID NO: 273808 - DNA, 20 bp, Artificial Sequence
  Description of Artificial Sequence: Synthetic oligonucleotide
  Target: LAMA2; (-) strand; PAM type: YTN; PAM sequence: CTT
tctcattcatgttagtagat

SEQ ID NO: 273809 - DNA, 20 bp, Artificial Sequence
  Description of Artificial Sequence: Synthetic oligonucleotide
  Target: LAMA2; (-) strand; PAM type: YTN; PAM sequence: TTC
cactttctcattcatgttag

SEQ ID NO: 273810 - DNA, 20 bp, Artificial Sequence
  Description of Artificial Sequence: Synthetic oligonucleotide
  Target: LAMA2; (-) strand; PAM type: YTN; PAM sequence: CTT
ccactttctcattcatgtta

SEQ ID NO: 273811 - DNA, 20 bp, Artificial Sequence
  Description of Artificial Sequence: Synthetic oligonucleotide
  Target: LAMA2; (-) strand; PAM type: YTN; PAM sequence: TTG
ccaaaaaatggcttccactt

SEQ ID NO: 273812 - DNA, 20 bp, Artificial Sequence
  Description of Artificial Sequence: Synthetic oligonucleotide
  Target: LAMA2; (-) strand; PAM type: YTN; PAM sequence: TTT
gccaaaaaatggcttccact

SEQ ID NO: 273813 - DNA, 20 bp, Artificial Sequence
  Description of Artificial Sequence: Synthetic oligonucleotide
  Target: LAMA2; (-) strand; PAM type: YTN; PAM sequence: TTT
tgccaaaaaatggcttccac

SEQ ID NO: 273814 - DNA, 20 bp, Artificial Sequence
  Description of Artificial Sequence: Synthetic oligonucleotide
  Target: LAMA2; (-) strand; PAM type: YTN; PAM sequence: CTT
ttgccaaaaaatggcttcca

SEQ ID NO: 273815 - DNA, 20 bp, Artificial Sequence
  Description of Artificial Sequence: Synthetic oligonucleotide
  Target: LAMA2; (-) strand; PAM type: YTN; PAM sequence: TTG
ggcttttgccaaaaaatggc

SEQ ID NO: 273816 - DNA, 20 bp, Artificial Sequence
  Description of Artificial Sequence: Synthetic oligonucleotide
  Target: LAMA2; (-) strand; PAM type: YTN; PAM sequence: TTT
gggcttttgccaaaaaatgg

SEQ ID NO: 273817 - DNA, 20 bp, Artificial Sequence
  Description of Artificial Sequence: Synthetic oligonucleotide
  Target: LAMA2; (-) strand; PAM type: YTN; PAM sequence: TTA
atttgggcttttgccaaaaa

SEQ ID NO: 273818 - DNA, 20 bp, Artificial Sequence
  Description of Artificial Sequence: Synthetic oligonucleotide
  Target: LAMA2; (-) strand; PAM type: YTN; PAM sequence: CTT
aatttgggcttttgccaaaa

SEQ ID NO: 273819 - DNA, 20 bp, Artificial Sequence
  Description of Artificial Sequence: Synthetic oligonucleotide
  Target: LAMA2; (-) strand; PAM type: YTN; PAM sequence: TTC
ttaatttgggcttttgccaa

SEQ ID NO: 273820 - DNA, 20 bp, Artificial Sequence
  Description of Artificial Sequence: Synthetic oligonucleotide
  Target: LAMA2; (-) strand; PAM type: YTN; PAM sequence: TTT
cttaatttgggcttttgcca

SEQ ID NO: 273821 - DNA, 20 bp, Artificial Sequence
  Description of Artificial Sequence: Synthetic oligonucleotide
  Target: LAMA2; (-) strand; PAM type: YTN; PAM sequence: TTA
agtttcttaatttgggcttt

SEQ ID NO: 273822 - DNA, 20 bp, Artificial Sequence
  Description of Artificial Sequence: Synthetic oligonucleotide
  Target: LAMA2; (-) strand; PAM type: YTN; PAM sequence: TTT
aagtttcttaatttgggctt

SEQ ID NO: 273823 - DNA, 20 bp, Artificial Sequence
  Description of Artificial Sequence: Synthetic oligonucleotide
  Target: LAMA2; (-) strand; PAM type: YTN; PAM sequence: CTT
taagtttcttaatttgggct

SEQ ID NO: 273824 - DNA, 20 bp, Artificial Sequence
  Description of Artificial Sequence: Synthetic oligonucleotide
  Target: LAMA2; (-) strand; PAM type: YTN; PAM sequence: TTC
tttaagtttcttaatttggg

SEQ ID NO: 273825 - DNA, 20 bp, Artificial Sequence
  Description of Artificial Sequence: Synthetic oligonucleotide
  Target: LAMA2; (-) strand; PAM type: YTN; PAM sequence: CTG
tattctttaagtttcttaat

SEQ ID NO: 273826 - DNA, 20 bp, Artificial Sequence
  Description of Artificial Sequence: Synthetic oligonucleotide
  Target: LAMA2; (-) strand; PAM type: YTN; PAM sequence: TTA
tctgtattctttaagtttct

SEQ ID NO: 273827 - DNA, 20 bp, Artificial Sequence
  Description of Artificial Sequence: Synthetic oligonucleotide
  Target: LAMA2; (-) strand; PAM type: YTN; PAM sequence: TTG
gggggcgagtgcggatgggg

SEQ ID NO: 273828 - DNA, 20 bp, Artificial Sequence
  Description of Artificial Sequence: Synthetic oligonucleotide
  Target: LAMA2; (-) strand; PAM type: YTN; PAM sequence: TTT
ggggggcgagtgcggatggg

SEQ ID NO: 273829 - DNA, 20 bp, Artificial Sequence
  Description of Artificial Sequence: Synthetic oligonucleotide
  Target: LAMA2; (-) strand; PAM type: YTN; PAM sequence: TTT
tggggggcgagtgcggatgg

SEQ ID NO: 273830 - DNA, 20 bp, Artificial Sequence
  Description of Artificial Sequence: Synthetic oligonucleotide
  Target: LAMA2; (-) strand; PAM type: YTN; PAM sequence: TTT
ttggggggcgagtgcggatg

SEQ ID NO: 273831 - DNA, 20 bp, Artificial Sequence
  Description of Artificial Sequence: Synthetic oligonucleotide
  Target: LAMA2; (-) strand; PAM type: YTN; PAM sequence: TTT
tttggggggcgagtgcggat

SEQ ID NO: 273832 - DNA, 20 bp, Artificial Sequence
  Description of Artificial Sequence: Synthetic oligonucleotide
  Target: LAMA2; (-) strand; PAM type: YTN; PAM sequence: TTT
ttttggggggcgagtgcgga

SEQ ID NO: 273833 - DNA, 20 bp, Artificial Sequence
  Description of Artificial Sequence: Synthetic oligonucleotide
  Target: LAMA2; (-) strand; PAM type: YTN; PAM sequence: CTA
ggtttttttggggggcgagt

SEQ ID NO: 273834 - DNA, 20 bp, Artificial Sequence
  Description of Artificial Sequence: Synthetic oligonucleotide
  Target: LAMA2; (-) strand; PAM type: YTN; PAM sequence: TTA
aggactaggtttttttgggg

SEQ ID NO: 273835 - DNA, 20 bp, Artificial Sequence
  Description of Artificial Sequence: Synthetic oligonucleotide
  Target: LAMA2; (-) strand; PAM type: YTN; PAM sequence: TTT
aaggactaggtttttttggg

SEQ ID NO: 273836 - DNA, 20 bp, Artificial Sequence
  Description of Artificial Sequence: Synthetic oligonucleotide
  Target: LAMA2; (-) strand; PAM type: YTN; PAM sequence: TTA
acagatatttaaggactagg

SEQ ID NO: 273837 - DNA, 20 bp, Artificial Sequence
  Description of Artificial Sequence: Synthetic oligonucleotide
  Target: LAMA2; (-) strand; PAM type: YTN; PAM sequence: TTT
aacagatatttaaggactag

SEQ ID NO: 273838 - DNA, 20 bp, Artificial Sequence
  Description of Artificial Sequence: Synthetic oligonucleotide
  Target: LAMA2; (-) strand; PAM type: YTN; PAM sequence: TTT
taacagatatttaaggacta

SEQ ID NO: 273839 - DNA, 20 bp, Artificial Sequence
  Description of Artificial Sequence: Synthetic oligonucleotide
  Target: LAMA2; (-) strand; PAM type: YTN; PAM sequence: TTA
tattttaacagatatttaag

SEQ ID NO: 273840 - DNA, 20 bp, Artificial Sequence
  Description of Artificial Sequence: Synthetic oligonucleotide
  Target: LAMA2; (-) strand; PAM type: YTN; PAM sequence: TTA
ttatattttaacagatattt

SEQ ID NO: 273841 - DNA, 20 bp, Artificial Sequence
  Description of Artificial Sequence: Synthetic oligonucleotide
  Target: LAMA2; (-) strand; PAM type: YTN; PAM sequence: TTT
attatattttaacagatatt

SEQ ID NO: 273842 - DNA, 20 bp, Artificial Sequence
  Description of Artificial Sequence: Synthetic oligonucleotide
  Target: LAMA2; (-) strand; PAM type: YTN; PAM sequence: CTA
aacatgcatgcacgtttatt

SEQ ID NO: 273843 - DNA, 20 bp, Artificial Sequence
  Description of Artificial Sequence: Synthetic oligonucleotide
  Target: LAMA2; (-) strand; PAM type: YTN; PAM sequence: TTC
taaacatgcatgcacgttta

SEQ ID NO: 273844 - DNA, 20 bp, Artificial Sequence
  Description of Artificial Sequence: Synthetic oligonucleotide
  Target: LAMA2; (-) strand; PAM type: YTN; PAM sequence: TTT
ctaaacatgcatgcacgttt

SEQ ID NO: 273845 - DNA, 20 bp, Artificial Sequence
  Description of Artificial Sequence: Synthetic oligonucleotide
  Target: LAMA2; (-) strand; PAM type: YTN; PAM sequence: TTC
ccaatttctaaacatgcatg

SEQ ID NO: 273846 - DNA, 20 bp, Artificial Sequence
  Description of Artificial Sequence: Synthetic oligonucleotide
  Target: LAMA2; (-) strand; PAM type: YTN; PAM sequence: TTT
cccaatttctaaacatgcat

SEQ ID NO: 273847 - DNA, 20 bp, Artificial Sequence
  Description of Artificial Sequence: Synthetic oligonucleotide
  Target: LAMA2; (-) strand; PAM type: YTN; PAM sequence: TTT
tcccaatttctaaacatgca

SEQ ID NO: 273848 - DNA, 20 bp, Artificial Sequence
  Description of Artificial Sequence: Synthetic oligonucleotide
  Target: LAMA2; (-) strand; PAM type: YTN; PAM sequence: TTT
ttcccaatttctaaacatgc

SEQ ID NO: 273849 - DNA, 20 bp, Artificial Sequence
  Description of Artificial Sequence: Synthetic oligonucleotide
  Target: LAMA2; (-) strand; PAM type: YTN; PAM sequence: TTC
aagcaaaaaacaacaaaaag

SEQ ID NO: 273850 - DNA, 20 bp, Artificial Sequence
  Description of Artificial Sequence: Synthetic oligonucleotide
  Target: LAMA2; (-) strand; PAM type: YTN; PAM sequence: CTT
caagcaaaaaacaacaaaaa

SEQ ID NO: 273851 - DNA, 20 bp, Artificial Sequence
  Description of Artificial Sequence: Synthetic oligonucleotide
  Target: LAMA2; (-) strand; PAM type: YTN; PAM sequence: CTG
cttcaagcaaaaaacaacaa

SEQ ID NO: 273852 - DNA, 20 bp, Artificial Sequence
  Description of Artificial Sequence: Synthetic oligonucleotide
  Target: LAMA2; (-) strand; PAM type: YTN; PAM sequence: TTA
ctgcttcaagcaaaaaacaa

SEQ ID NO: 273853 - DNA, 20 bp, Artificial Sequence
  Description of Artificial Sequence: Synthetic oligonucleotide
  Target: LAMA2; (-) strand; PAM type: YTN; PAM sequence: TTT
actgcttcaagcaaaaaaca

SEQ ID NO: 273854 - DNA, 20 bp, Artificial Sequence
  Description of Artificial Sequence: Synthetic oligonucleotide
  Target: LAMA2; (-) strand; PAM type: YTN; PAM sequence: TTT
tactgcttcaagcaaaaaac

SEQ ID NO: 273855 - DNA, 20 bp, Artificial Sequence
  Description of Artificial Sequence: Synthetic oligonucleotide
  Target: LAMA2; (-) strand; PAM type: YTN; PAM sequence: TTG
cagagcaagaaaaatgtttt

SEQ ID NO: 273856 - DNA, 20 bp, Artificial Sequence
  Description of Artificial Sequence: Synthetic oligonucleotide
  Target: LAMA2; (-) strand; PAM type: YTN; PAM sequence: CTA
aaatgcataatattgcagag

SEQ ID NO: 273857 - DNA, 20 bp, Artificial Sequence
  Description of Artificial Sequence: Synthetic oligonucleotide
  Target: LAMA2; (-) strand; PAM type: YTN; PAM sequence: TTA
tgaagcaaagtatctaaaat

SEQ ID NO: 273858 - DNA, 20 bp, Artificial Sequence
  Description of Artificial Sequence: Synthetic oligonucleotide
  Target: LAMA2; (-) strand; PAM type: YTN; PAM sequence: CTA
cattatgaagcaaagtatct

SEQ ID NO: 273859 - DNA, 20 bp, Artificial Sequence
  Description of Artificial Sequence: Synthetic oligonucleotide
  Target: LAMA2; (-) strand; PAM type: YTN; PAM sequence: TTG
gctacattatgaagcaaagt

SEQ ID NO: 273860 - DNA, 20 bp, Artificial Sequence
  Description of Artificial Sequence: Synthetic oligonucleotide
  Target: LAMA2; (-) strand; PAM type: YTN; PAM sequence: TTT
ggctacattatgaagcaaag

SEQ ID NO: 273861 - DNA, 20 bp, Artificial Sequence
  Description of Artificial Sequence: Synthetic oligonucleotide
  Target: LAMA2; (-) strand; PAM type: YTN; PAM sequence: TTA
tttggctacattatgaagca

SEQ ID NO: 273862 - DNA, 20 bp, Artificial Sequence
  Description of Artificial Sequence: Synthetic oligonucleotide
  Target: LAMA2; (-) strand; PAM type: YTN; PAM sequence: TTT
atttggctacattatgaagc

SEQ ID NO: 273863 - DNA, 20 bp, Artificial Sequence
  Description of Artificial Sequence: Synthetic oligonucleotide
  Target: LAMA2; (-) strand; PAM type: YTN; PAM sequence: TTA
tttatttggctacattatga

SEQ ID NO: 273864 - DNA, 20 bp, Artificial Sequence
  Description of Artificial Sequence: Synthetic oligonucleotide
  Target: LAMA2; (-) strand; PAM type: YTN; PAM sequence: CTT
atttatttggctacattatg

SEQ ID NO: 273865 - DNA, 20 bp, Artificial Sequence
  Description of Artificial Sequence: Synthetic oligonucleotide
  Target: LAMA2; (-) strand; PAM type: YTN; PAM sequence: CTC
acatccttatttatttggct

SEQ ID NO: 273866 - DNA, 20 bp, Artificial Sequence
  Description of Artificial Sequence: Synthetic oligonucleotide
  Target: LAMA2; (-) strand; PAM type: YTN; PAM sequence: TTG
atctcacatccttatttatt

SEQ ID NO: 273867 - DNA, 20 bp, Artificial Sequence
  Description of Artificial Sequence: Synthetic oligonucleotide
  Target: LAMA2; (-) strand; PAM type: YTN; PAM sequence: TTG
aagttgatctcacatcctta

SEQ ID NO: 273868 - DNA, 20 bp, Artificial Sequence
  Description of Artificial Sequence: Synthetic oligonucleotide
  Target: LAMA2; (-) strand; PAM type: YTN; PAM sequence: CTT
gaagttgatctcacatcctt

SEQ ID NO: 273869 - DNA, 20 bp, Artificial Sequence
  Description of Artificial Sequence: Synthetic oligonucleotide
  Target: LAMA2; (-) strand; PAM type: YTN; PAM sequence: CTG
ccttgaagttgatctcacat

SEQ ID NO: 273870 - DNA, 20 bp, Artificial Sequence
  Description of Artificial Sequence: Synthetic oligonucleotide
  Target: LAMA2; (-) strand; PAM type: YTN; PAM sequence: TTA
tcagtcagaatctgccttga

SEQ ID NO: 273871 - DNA, 20 bp, Artificial Sequence
  Description of Artificial Sequence: Synthetic oligonucleotide
  Target: LAMA2; (-) strand; PAM type: YTN; PAM sequence: CTA
agaattatcagtcagaatct

SEQ ID NO: 273872 - DNA, 20 bp, Artificial Sequence
  Description of Artificial Sequence: Synthetic oligonucleotide
  Target: LAMA2; (-) strand; PAM type: YTN; PAM sequence: TTG
gccagtgatgcctaagaatt

SEQ ID NO: 273873 - DNA, 20 bp, Artificial Sequence
  Description of Artificial Sequence: Synthetic oligonucleotide
  Target: LAMA2; (-) strand; PAM type: YTN; PAM sequence: CTT
ggccagtgatgcctaagaat

SEQ ID NO: 273874 - DNA, 20 bp, Artificial Sequence
  Description of Artificial Sequence: Synthetic oligonucleotide
  Target: LAMA2; (-) strand; PAM type: YTN; PAM sequence: TTC
ttggccagtgatgcctaaga

SEQ ID NO: 273875 - DNA, 20 bp, Artificial Sequence
  Description of Artificial Sequence: Synthetic oligonucleotide
  Target: LAMA2; (-) strand; PAM type: YTN; PAM sequence: CTT
cttggccagtgatgcctaag

SEQ ID NO: 273876 - DNA, 20 bp, Artificial Sequence
  Description of Artificial Sequence: Synthetic oligonucleotide
  Target: LAMA2; (-) strand; PAM type: YTN; PAM sequence: CTC
ttcttggccagtgatgccta

SEQ ID NO: 273877 - DNA, 20 bp, Artificial Sequence
  Description of Artificial Sequence: Synthetic oligonucleotide
  Target: LAMA2; (-) strand; PAM type: YTN; PAM sequence: TTG
tctcttcttggccagtgatg

SEQ ID NO: 273878 - DNA, 20 bp, Artificial Sequence
  Description of Artificial Sequence: Synthetic oligonucleotide
  Target: LAMA2; (-) strand; PAM type: YTN; PAM sequence: TTT
gtctcttcttggccagtgat

SEQ ID NO: 273879 - DNA, 20 bp, Artificial Sequence
  Description of Artificial Sequence: Synthetic oligonucleotide
  Target: LAMA2; (-) strand; PAM type: YTN; PAM sequence: TTG
ggagtttgtctcttcttggc

SEQ ID NO: 273880 - DNA, 20 bp, Artificial Sequence
  Description of Artificial Sequence: Synthetic oligonucleotide
  Target: LAMA2; (-) strand; PAM type: YTN; PAM sequence: TTT
gggagtttgtctcttcttgg

SEQ ID NO: 273881 - DNA, 20 bp, Artificial Sequence
  Description of Artificial Sequence: Synthetic oligonucleotide
  Target: LAMA2; (-) strand; PAM type: YTN; PAM sequence: TTG
cagtggtgaacatttgggag

SEQ ID NO: 273882 - DNA, 20 bp, Artificial Sequence
  Description of Artificial Sequence: Synthetic oligonucleotide
  Target: LAMA2; (-) strand; PAM type: YTN; PAM sequence: CTT
gcagtggtgaacatttggga

SEQ ID NO: 273883 - DNA, 20 bp, Artificial Sequence
  Description of Artificial Sequence: Synthetic oligonucleotide
  Target: LAMA2; (-) strand; PAM type: YTN; PAM sequence: TTC
ttgcagtggtgaacatttgg

SEQ ID NO: 273884 - DNA, 20 bp, Artificial Sequence
  Description of Artificial Sequence: Synthetic oligonucleotide
  Target: LAMA2; (-) strand; PAM type: YTN; PAM sequence: CTT
cttgcagtggtgaacatttg

SEQ ID NO: 273885 - DNA, 20 bp, Artificial Sequence
  Description of Artificial Sequence: Synthetic oligonucleotide
  Target: LAMA2; (-) strand; PAM type: YTN; PAM sequence: TTG
cttcttgcagtggtgaacat

SEQ ID NO: 273886 - DNA, 20 bp, Artificial Sequence
  Description of Artificial Sequence: Synthetic oligonucleotide
  Target: LAMA2; (-) strand; PAM type: YTN; PAM sequence: CTG
ttgcttcttgcagtggtgaa

SEQ ID NO: 273887 - DNA, 20 bp, Artificial Sequence
  Description of Artificial Sequence: Synthetic oligonucleotide
  Target: LAMA2; (-) strand; PAM type: YTN; PAM sequence: TTA
aaaccctgttgcttcttgca

SEQ ID NO: 273888 - DNA, 20 bp, Artificial Sequence
  Description of Artificial Sequence: Synthetic oligonucleotide
  Target: LAMA2; (-) strand; PAM type: YTN; PAM sequence: CTC
aaattaaaaccctgttgctt

SEQ ID NO: 273889 - DNA, 20 bp, Artificial Sequence
  Description of Artificial Sequence: Synthetic oligonucleotide
  Target: LAMA2; (-) strand; PAM type: YTN; PAM sequence: CTC
tcaaattaaaaccctgttgc

SEQ ID NO: 273890 - DNA, 20 bp, Artificial Sequence
  Description of Artificial Sequence: Synthetic oligonucleotide
  Target: LAMA2; (-) strand; PAM type: YTN; PAM sequence: TTA
gctctcaaattaaaaccctg

SEQ ID NO: 273891 - DNA, 20 bp, Artificial Sequence
  Description of Artificial Sequence: Synthetic oligonucleotide
  Target: LAMA2; (-) strand; PAM type: YTN; PAM sequence: CTC
aaattagctctcaaattaaa

SEQ ID NO: 273892 - DNA, 20 bp, Artificial Sequence
  Description of Artificial Sequence: Synthetic oligonucleotide
  Target: LAMA2; (-) strand; PAM type: YTN; PAM sequence: TTG
cctcaaattagctctcaaat

SEQ ID NO: 273893 - DNA, 20 bp, Artificial Sequence
  Description of Artificial Sequence: Synthetic oligonucleotide
  Target: LAMA2; (-) strand; PAM type: YTN; PAM sequence: TTT
gcctcaaattagctctcaaa

SEQ ID NO: 273894 - DNA, 20 bp, Artificial Sequence
  Description of Artificial Sequence: Synthetic oligonucleotide
  Target: LAMA2; (-) strand; PAM type: YTN; PAM sequence: CTT
tgcctcaaattagctctcaa

SEQ ID NO: 273895 - DNA, 20 bp, Artificial Sequence
  Description of Artificial Sequence: Synthetic oligonucleotide
  Target: LAMA2; (-) strand; PAM type: YTN; PAM sequence: CTC
acacctttgcctcaaattag

SEQ ID NO: 273896 - DNA, 20 bp, Artificial Sequence
  Description of Artificial Sequence: Synthetic oligonucleotide
  Target: LAMA2; (-) strand; PAM type: YTN; PAM sequence: TTC
agaacctcacacctttgcct

SEQ ID NO: 273897 - DNA, 20 bp, Artificial Sequence
  Description of Artificial Sequence: Synthetic oligonucleotide
  Target: LAMA2; (-) strand; PAM type: YTN; PAM sequence: TTT
cagaacctcacacctttgcc

SEQ ID NO: 273898 - DNA, 20 bp, Artificial Sequence
  Description of Artificial Sequence: Synthetic oligonucleotide
  Target: LAMA2; (-) strand; PAM type: YTN; PAM sequence: CTG
tttcagaacctcacaccttt

SEQ ID NO: 273899 - DNA, 20 bp, Artificial Sequence
  Description of Artificial Sequence: Synthetic oligonucleotide
  Target: LAMA2; (-) strand; PAM type: YTN; PAM sequence: TTC
tgtttcagaacctcacacct

SEQ ID NO: 273900 - DNA, 20 bp, Artificial Sequence
  Description of Artificial Sequence: Synthetic oligonucleotide
  Target: LAMA2; (-) strand; PAM type: YTN; PAM sequence: TTT
ctgtttcagaacctcacacc

SEQ ID NO: 273901 - DNA, 20 bp, Artificial Sequence
  Description of Artificial Sequence: Synthetic oligonucleotide
  Target: LAMA2; (-) strand; PAM type: YTN; PAM sequence: CTG
gcagaaataatttctgtttc

SEQ ID NO: 273902 - DNA, 20 bp, Artificial Sequence
  Description of Artificial Sequence: Synthetic oligonucleotide
  Target: LAMA2; (-) strand; PAM type: YTN; PAM sequence: TTC
tggcagaaataatttctgtt

SEQ ID NO: 273903 - DNA, 20 bp, Artificial Sequence
  Description of Artificial Sequence: Synthetic oligonucleotide
  Target: LAMA2; (-) strand; PAM type: YTN; PAM sequence: TTT
ctggcagaaataatttctgt

SEQ ID NO: 273904 - DNA, 20 bp, Artificial Sequence
  Description of Artificial Sequence: Synthetic oligonucleotide
  Target: LAMA2; (-) strand; PAM type: YTN; PAM sequence: TTT
tctggcagaaataatttctg

SEQ ID NO: 273905 - DNA, 20 bp, Artificial Sequence
  Description of Artificial Sequence: Synthetic oligonucleotide
  Target: LAMA2; (-) strand; PAM type: YTN; PAM sequence: TTT
ttctggcagaaataatttct

SEQ ID NO: 273906 - DNA, 20 bp, Artificial Sequence
  Description of Artificial Sequence: Synthetic oligonucleotide
  Target: LAMA2; (-) strand; PAM type: YTN; PAM sequence: CTG
agatttttctggcagaaata

SEQ ID NO: 273907 - DNA, 20 bp, Artificial Sequence
  Description of Artificial Sequence: Synthetic oligonucleotide
  Target: LAMA2; (-) strand; PAM type: YTN; PAM sequence: TTA
actgagatttttctggcaga

SEQ ID NO: 273908 - DNA, 20 bp, Artificial Sequence
  Description of Artificial Sequence: Synthetic oligonucleotide
  Target: LAMA2; (-) strand; PAM type: YTN; PAM sequence: CTA
gcagaggataaaccacaatg

SEQ ID NO: 273909 - DNA, 20 bp, Artificial Sequence
  Description of Artificial Sequence: Synthetic oligonucleotide
  Target: LAMA2; (-) strand; PAM type: YTN; PAM sequence: TTC
atctagcagaggataaacca

SEQ ID NO: 273910 - DNA, 20 bp, Artificial Sequence
  Description of Artificial Sequence: Synthetic oligonucleotide
  Target: LAMA2; (-) strand; PAM type: YTN; PAM sequence: CTT
catctagcagaggataaacc

SEQ ID NO: 273911 - DNA, 20 bp, Artificial Sequence
  Description of Artificial Sequence: Synthetic oligonucleotide
  Target: LAMA2; (-) strand; PAM type: YTN; PAM sequence: CTA
gggaaagtacaacagcttca

SEQ ID NO: 273912 - DNA, 20 bp, Artificial Sequence
  Description of Artificial Sequence: Synthetic oligonucleotide
  Target: LAMA2; (-) strand; PAM type: YTN; PAM sequence: TTA
atggaaaataatactaggga

SEQ ID NO: 273913 - DNA, 20 bp, Artificial Sequence
  Description of Artificial Sequence: Synthetic oligonucleotide
  Target: LAMA2; (-) strand; PAM type: YTN; PAM sequence: TTC
aagtagcattaatggaaaat

SEQ ID NO: 273914 - DNA, 20 bp, Artificial Sequence
  Description of Artificial Sequence: Synthetic oligonucleotide
  Target: LAMA2; (-) strand; PAM type: YTN; PAM sequence: CTT
caagtagcattaatggaaaa

SEQ ID NO: 273915 - DNA, 20 bp, Artificial Sequence
  Description of Artificial Sequence: Synthetic oligonucleotide
  Target: LAMA2; (-) strand; PAM type: YTN; PAM sequence: TTG
gagggggacacttcaagtag

SEQ ID NO: 273916 - DNA, 20 bp, Artificial Sequence
  Description of Artificial Sequence: Synthetic oligonucleotide
  Target: LAMA2; (-) strand; PAM type: YTN; PAM sequence: TTG
ggttggagggggacacttca

SEQ ID NO: 273917 - DNA, 20 bp, Artificial Sequence
  Description of Artificial Sequence: Synthetic oligonucleotide
  Target: LAMA2; (-) strand; PAM type: YTN; PAM sequence: TTT
gggttggagggggacacttc

SEQ ID NO: 273918 - DNA, 20 bp, Artificial Sequence
  Description of Artificial Sequence: Synthetic oligonucleotide
  Target: LAMA2; (-) strand; PAM type: YTN; PAM sequence: TTT
tgggttggagggggacactt

SEQ ID NO: 273919 - DNA, 20 bp, Artificial Sequence
  Description of Artificial Sequence: Synthetic oligonucleotide
  Target: LAMA2; (-) strand; PAM type: YTN; PAM sequence: TTG
ttttgggttggagggggaca

SEQ ID NO: 273920 - DNA, 20 bp, Artificial Sequence
  Description of Artificial Sequence: Synthetic oligonucleotide
  Target: LAMA2; (-) strand; PAM type: YTN; PAM sequence: TTG
ttgttttgggttggaggggg

SEQ ID NO: 273921 - DNA, 20 bp, Artificial Sequence
  Description of Artificial Sequence: Synthetic oligonucleotide
  Target: LAMA2; (-) strand; PAM type: YTN; PAM sequence: TTG
ttgttgttttgggttggagg

SEQ ID NO: 273922 - DNA, 20 bp, Artificial Sequence
  Description of Artificial Sequence: Synthetic oligonucleotide
  Target: LAMA2; (-) strand; PAM type: YTN; PAM sequence: TTG
ttgttgttgttttgggttgg

SEQ ID NO: 273923 - DNA, 20 bp, Artificial Sequence
  Description of Artificial Sequence: Synthetic oligonucleotide
  Target: LAMA2; (-) strand; PAM type: YTN; PAM sequence: TTG
ttgttgttgttgttttgggt

SEQ ID NO: 273924 - DNA, 20 bp, Artificial Sequence
  Description of Artificial Sequence: Synthetic oligonucleotide
  Target: LAMA2; (-) strand; PAM type: YTN; PAM sequence: TTT
gttgttgttgttgttttggg

SEQ ID NO: 273925 - DNA, 20 bp, Artificial Sequence
  Description of Artificial Sequence: Synthetic oligonucleotide
  Target: LAMA2; (-) strand; PAM type: YTN; PAM sequence: CTG
cagtgggatttgttgttgtt

SEQ ID NO: 273926 - DNA, 20 bp, Artificial Sequence
  Description of Artificial Sequence: Synthetic oligonucleotide
  Target: LAMA2; (-) strand; PAM type: YTN; PAM sequence: CTA
cctgcagtgggatttgttgt

SEQ ID NO: 273927 - DNA, 20 bp, Artificial Sequence
  Description of Artificial Sequence: Synthetic oligonucleotide
  Target: LAMA2; (-) strand; PAM type: YTN; PAM sequence: CTC
tacctgcagtgggatttgtt

SEQ ID NO: 273928 - DNA, 20 bp, Artificial Sequence
  Description of Artificial Sequence: Synthetic oligonucleotide
  Target: LAMA2; (-) strand; PAM type: YTN; PAM sequence: CTC
agagtgaaggtgctctacct

SEQ ID NO: 273929 - DNA, 20 bp, Artificial Sequence
  Description of Artificial Sequence: Synthetic oligonucleotide
  Target: LAMA2; (-) strand; PAM type: YTN; PAM sequence: TTG
gggatccgctcagagtgaag

SEQ ID NO: 273930 - DNA, 20 bp, Artificial Sequence
  Description of Artificial Sequence: Synthetic oligonucleotide
  Target: LAMA2; (-) strand; PAM type: YTN; PAM sequence: TTT
ggggatccgctcagagtgaa

SEQ ID NO: 273931 - DNA, 20 bp, Artificial Sequence
  Description of Artificial Sequence: Synthetic oligonucleotide
  Target: LAMA2; (-) strand; PAM type: YTN; PAM sequence: CTT
tggggatccgctcagagtga

SEQ ID NO: 273932 - DNA, 20 bp, Artificial Sequence
  Description of Artificial Sequence: Synthetic oligonucleotide
  Target: LAMA2; (-) strand; PAM type: YTN; PAM sequence: CTA
gggcctttggggatccgctc

SEQ ID NO: 273933 - DNA, 20 bp, Artificial Sequence
  Description of Artificial Sequence: Synthetic oligonucleotide
  Target: LAMA2; (-) strand; PAM type: YTN; PAM sequence: TTG
actagggcctttggggatcc

SEQ ID NO: 273934 - DNA, 20 bp, Artificial Sequence
  Description of Artificial Sequence: Synthetic oligonucleotide
  Target: LAMA2; (-) strand; PAM type: YTN; PAM sequence: CTG
gagcattgactagggccttt

SEQ ID NO: 273935 - DNA, 20 bp, Artificial Sequence
  Description of Artificial Sequence: Synthetic oligonucleotide
  Target: LAMA2; (-) strand; PAM type: YTN; PAM sequence: TTC
ctggagcattgactagggcc

SEQ ID NO: 273936 - DNA, 20 bp, Artificial Sequence
  Description of Artificial Sequence: Synthetic oligonucleotide
  Target: LAMA2; (-) strand; PAM type: YTN; PAM sequence: TTG
aaatgtcaatggaaagaaaa

SEQ ID NO: 273937 - DNA, 20 bp, Artificial Sequence
  Description of Artificial Sequence: Synthetic oligonucleotide
  Target: LAMA2; (-) strand; PAM type: YTN; PAM sequence: TTT
gaaatgtcaatggaaagaaa

SEQ ID NO: 273938 - DNA, 20 bp, Artificial Sequence
  Description of Artificial Sequence: Synthetic oligonucleotide
  Target: LAMA2; (-) strand; PAM type: YTN; PAM sequence: TTG
ggtgtttgaaatgtcaatgg

SEQ ID NO: 273939 - DNA, 20 bp, Artificial Sequence
  Description of Artificial Sequence: Synthetic oligonucleotide
  Target: LAMA2; (-) strand; PAM type: YTN; PAM sequence: CTA
ggtgttgggtgtttgaaatg

SEQ ID NO: 273940 - DNA, 20 bp, Artificial Sequence
  Description of Artificial Sequence: Synthetic oligonucleotide
  Target: LAMA2; (-) strand; PAM type: YTN; PAM sequence: CTG
ctaggtgttgggtgtttgaa

SEQ ID NO: 273941 - DNA, 20 bp, Artificial Sequence
  Description of Artificial Sequence: Synthetic oligonucleotide
  Target: LAMA2; (-) strand; PAM type: YTN; PAM sequence: TTG
aaaatgagtccccaggatgg

SEQ ID NO: 273942 - DNA, 20 bp, Artificial Sequence
  Description of Artificial Sequence: Synthetic oligonucleotide
  Target: LAMA2; (-) strand; PAM type: YTN; PAM sequence: TTG
aaacaaattgaaaatgagtc

SEQ ID NO: 273943 - DNA, 20 bp, Artificial Sequence
  Description of Artificial Sequence: Synthetic oligonucleotide
  Target: LAMA2; (-) strand; PAM type: YTN; PAM sequence: TTG
attgaaacaaattgaaaatg

SEQ ID NO: 273944 - DNA, 20 bp, Artificial Sequence
  Description of Artificial Sequence: Synthetic oligonucleotide
  Target: LAMA2; (-) strand; PAM type: YTN; PAM sequence: TTT
gattgaaacaaattgaaaat

SEQ ID NO: 273945 - DNA, 20 bp, Artificial Sequence
  Description of Artificial Sequence: Synthetic oligonucleotide
  Target: LAMA2; (-) strand; PAM type: YTN; PAM sequence: CTC
ataccagtgtttgattgaaa

SEQ ID NO: 273946 - DNA, 20 bp, Artificial Sequence
  Description of Artificial Sequence: Synthetic oligonucleotide
  Target: LAMA2; (-) strand; PAM type: YTN; PAM sequence: TTC
tcataccagtgtttgattga

SEQ ID NO: 273947 - DNA, 20 bp, Artificial Sequence
  Description of Artificial Sequence: Synthetic oligonucleotide
  Target: LAMA2; (-) strand; PAM type: YTN; PAM sequence: TTA
ttctcataccagtgtttgat

SEQ ID NO: 273948 - DNA, 20 bp, Artificial Sequence
  Description of Artificial Sequence: Synthetic oligonucleotide
  Target: LAMA2; (-) strand; PAM type: YTN; PAM sequence: TTT
attctcataccagtgtttga

SEQ ID NO: 273949 - DNA, 20 bp, Artificial Sequence
  Description of Artificial Sequence: Synthetic oligonucleotide
  Target: LAMA2; (-) strand; PAM type: YTN; PAM sequence: CTA
gcatttattctcataccagt

SEQ ID NO: 273950 - DNA, 20 bp, Artificial Sequence
  Description of Artificial Sequence: Synthetic oligonucleotide
  Target: LAMA2; (-) strand; PAM type: YTN; PAM sequence: CTA
aaacatatgctagcatttat

SEQ ID NO: 273951 - DNA, 20 bp, Artificial Sequence
  Description of Artificial Sequence: Synthetic oligonucleotide
  Target: LAMA2; (-) strand; PAM type: YTN; PAM sequence: CTA
ctaaaacatatgctagcatt

SEQ ID NO: 273952 - DNA, 20 bp, Artificial Sequence
  Description of Artificial Sequence: Synthetic oligonucleotide
  Target: LAMA2; (-) strand; PAM type: YTN; PAM sequence: TTG
ataataggatctactaaaac

SEQ ID NO: 273953 - DNA, 20 bp, Artificial Sequence
  Description of Artificial Sequence: Synthetic oligonucleotide
  Target: LAMA2; (-) strand; PAM type: YTN; PAM sequence: TTG
cagagaacaaagtaagcagt

SEQ ID NO: 273954 - DNA, 20 bp, Artificial Sequence
  Description of Artificial Sequence: Synthetic oligonucleotide
  Target: LAMA2; (-) strand; PAM type: YTN; PAM sequence: TTC
attgcagagaacaaagtaag

SEQ ID NO: 273955 - DNA, 20 bp, Artificial Sequence
  Description of Artificial Sequence: Synthetic oligonucleotide
  Target: LAMA2; (-) strand; PAM type: YTN; PAM sequence: TTG
gtgggagatggaaggttcat

SEQ ID NO: 273956 - DNA, 20 bp, Artificial Sequence
  Description of Artificial Sequence: Synthetic oligonucleotide
  Target: LAMA2; (-) strand; PAM type: YTN; PAM sequence: TTT
ggtgggagatggaaggttca

SEQ ID NO: 273957 - DNA, 20 bp, Artificial Sequence
  Description of Artificial Sequence: Synthetic oligonucleotide
  Target: LAMA2; (-) strand; PAM type: YTN; PAM sequence: CTT
tggtgggagatggaaggttc

SEQ ID NO: 273958 - DNA, 20 bp, Artificial Sequence
  Description of Artificial Sequence: Synthetic oligonucleotide
  Target: LAMA2; (-) strand; PAM type: YTN; PAM sequence: CTC
tttggtgggagatggaaggt

SEQ ID NO: 273959 - DNA, 20 bp, Artificial Sequence
  Description of Artificial Sequence: Synthetic oligonucleotide
  Target: LAMA2; (-) strand; PAM type: YTN; PAM sequence: CTC
tctttggtgggagatggaag

SEQ ID NO: 273960 - DNA, 20 bp, Artificial Sequence
  Description of Artificial Sequence: Synthetic oligonucleotide
  Target: LAMA2; (-) strand; PAM type: YTN; PAM sequence: TTG
accaaagaggtaaccatgaa

SEQ ID NO: 273961 - DNA, 20 bp, Artificial Sequence
  Description of Artificial Sequence: Synthetic oligonucleotide
  Target: LAMA2; (-) strand; PAM type: YTN; PAM sequence: TTC
atattgaccaaagaggtaac

SEQ ID NO: 273962 - DNA, 20 bp, Artificial Sequence
  Description of Artificial Sequence: Synthetic oligonucleotide
  Target: LAMA2; (-) strand; PAM type: YTN; PAM sequence: CTA
ggcacccagaagaagcaaat

SEQ ID NO: 273963 - DNA, 20 bp, Artificial Sequence
  Description of Artificial Sequence: Synthetic oligonucleotide
  Target: LAMA2; (-) strand; PAM type: YTN; PAM sequence: CTA
gaggccctaggcacccagaa

SEQ ID NO: 273964 - DNA, 20 bp, Artificial Sequence
  Description of Artificial Sequence: Synthetic oligonucleotide
  Target: LAMA2; (-) strand; PAM type: YTN; PAM sequence: TTG
tacaaatagtacctagaggc

SEQ ID NO: 273965 - DNA, 20 bp, Artificial Sequence
  Description of Artificial Sequence: Synthetic oligonucleotide
  Target: LAMA2; (-) strand; PAM type: YTN; PAM sequence: TTG
gtccacaaattgtacaaata

SEQ ID NO: 273966 - DNA, 20 bp, Artificial Sequence
  Description of Artificial Sequence: Synthetic oligonucleotide
  Target: LAMA2; (-) strand; PAM type: YTN; PAM sequence: CTG
ttggtccacaaattgtacaa

SEQ ID NO: 273967 - DNA, 20 bp, Artificial Sequence
  Description of Artificial Sequence: Synthetic oligonucleotide
  Target: LAMA2; (-) strand; PAM type: YTN; PAM sequence: CTA
cccctgttggtccacaaatt

SEQ ID NO: 273968 - DNA, 20 bp, Artificial Sequence
  Description of Artificial Sequence: Synthetic oligonucleotide
  Target: LAMA2; (-) strand; PAM type: YTN; PAM sequence: CTC
cagtctacccctgttggtcc

SEQ ID NO: 273969 - DNA, 20 bp, Artificial Sequence
  Description of Artificial Sequence: Synthetic oligonucleotide
  Target: LAMA2; (-) strand; PAM type: YTN; PAM sequence: CTC
catctccagtctacccctgt

SEQ ID NO: 273970 - DNA, 20 bp, Artificial Sequence
  Description of Artificial Sequence: Synthetic oligonucleotide
  Target: LAMA2; (-) strand; PAM type: YTN; PAM sequence: CTG
ggataaatctccatctccag

SEQ ID NO: 273971 - DNA, 20 bp, Artificial Sequence
  Description of Artificial Sequence: Synthetic oligonucleotide
  Target: LAMA2; (-) strand; PAM type: YTN; PAM sequence: TTG
gggtggtgagcaagcctggg

SEQ ID NO: 273972 - DNA, 20 bp, Artificial Sequence
  Description of Artificial Sequence: Synthetic oligonucleotide
  Target: LAMA2; (-) strand; PAM type: YTN; PAM sequence: TTT
ggggtggtgagcaagcctgg

SEQ ID NO: 273973 - DNA, 20 bp, Artificial Sequence
  Description of Artificial Sequence: Synthetic oligonucleotide
  Target: LAMA2; (-) strand; PAM type: YTN; PAM sequence: CTG
gtgtatagacgtgggatttg

SEQ ID NO: 273974 - DNA, 20 bp, Artificial Sequence
  Description of Artificial Sequence: Synthetic oligonucleotide
  Target: LAMA2; (-) strand; PAM type: YTN; PAM sequence: CTC
tggtgtatagacgtgggatt

SEQ ID NO: 273975 - DNA, 20 bp, Artificial Sequence
  Description of Artificial Sequence: Synthetic oligonucleotide
  Target: LAMA2; (-) strand; PAM type: YTN; PAM sequence: TTC
tctggtgtatagacgtggga

SEQ ID NO: 273976 - DNA, 20 bp, Artificial Sequence
  Description of Artificial Sequence: Synthetic oligonucleotide
  Target: LAMA2; (-) strand; PAM type: YTN; PAM sequence: TTT
ctctggtgtatagacgtggg

SEQ ID NO: 273977 - DNA, 20 bp, Artificial Sequence
  Description of Artificial Sequence: Synthetic oligonucleotide
  Target: LAMA2; (-) strand; PAM type: YTN; PAM sequence: CTT
tctctggtgtatagacgtgg

SEQ ID NO: 273978 - DNA, 20 bp, Artificial Sequence
  Description of Artificial Sequence: Synthetic oligonucleotide
  Target: LAMA2; (-) strand; PAM type: YTN; PAM sequence: TTG
gtgatgggtaatcctttctc

SEQ ID NO: 273979 - DNA, 20 bp, Artificial Sequence
  Description of Artificial Sequence: Synthetic oligonucleotide
  Target: LAMA2; (-) strand; PAM type: YTN; PAM sequence: TTT
ggtgatgggtaatcctttct

SEQ ID NO: 273980 - DNA, 20 bp, Artificial Sequence
  Description of Artificial Sequence: Synthetic oligonucleotide
  Target: LAMA2; (-) strand; PAM type: YTN; PAM sequence: CTT
tggtgatgggtaatcctttc

SEQ ID NO: 273981 - DNA, 20 bp, Artificial Sequence
  Description of Artificial Sequence: Synthetic oligonucleotide
  Target: LAMA2; (-) strand; PAM type: YTN; PAM sequence: TTA
gggaacgagagacacctttg

SEQ ID NO: 273982 - DNA, 20 bp, Artificial Sequence
  Description of Artificial Sequence: Synthetic oligonucleotide
  Target: LAMA2; (-) strand; PAM type: YTN; PAM sequence: TTT
agggaacgagagacaccttt

SEQ ID NO: 273983 - DNA, 20 bp, Artificial Sequence
  Description of Artificial Sequence: Synthetic oligonucleotide
  Target: LAMA2; (-) strand; PAM type: YTN; PAM sequence: CTA
tgcataatttagggaacgag

SEQ ID NO: 273984 - DNA, 20 bp, Artificial Sequence
  Description of Artificial Sequence: Synthetic oligonucleotide
  Target: LAMA2; (-) strand; PAM type: YTN; PAM sequence: CTG
atctatgcataatttaggga

SEQ ID NO: 273985 - DNA, 20 bp, Artificial Sequence
  Description of Artificial Sequence: Synthetic oligonucleotide
  Target: LAMA2; (-) strand; PAM type: YTN; PAM sequence: CTG
gacagacacaatcagaccac

SEQ ID NO: 273986 - DNA, 20 bp, Artificial Sequence
  Description of Artificial Sequence: Synthetic oligonucleotide
  Target: LAMA2; (-) strand; PAM type: YTN; PAM sequence: CTA
tctggacagacacaatcaga

SEQ ID NO: 273987 - DNA, 20 bp, Artificial Sequence
  Description of Artificial Sequence: Synthetic oligonucleotide
  Target: LAMA2; (-) strand; PAM type: YTN; PAM sequence: TTA
gaaaagggtgccctatctgg

SEQ ID NO: 273988 - DNA, 20 bp, Artificial Sequence
  Description of Artificial Sequence: Synthetic oligonucleotide
  Target: LAMA2; (-) strand; PAM type: YTN; PAM sequence: TTC
acataaattagaaaagggtg

SEQ ID NO: 273989 - DNA, 20 bp, Artificial Sequence
  Description of Artificial Sequence: Synthetic oligonucleotide
  Target: LAMA2; (-) strand; PAM type: YTN; PAM sequence: CTT
cacataaattagaaaagggt

SEQ ID NO: 273990 - DNA, 20 bp, Artificial Sequence
  Description of Artificial Sequence: Synthetic oligonucleotide
  Target: LAMA2; (-) strand; PAM type: YTN; PAM sequence: CTA
tcccacatggcacttcacat

SEQ ID NO: 273991 - DNA, 20 bp, Artificial Sequence
  Description of Artificial Sequence: Synthetic oligonucleotide
  Target: LAMA2; (-) strand; PAM type: YTN; PAM sequence: CTA
aagtatagctatcccacatg

SEQ ID NO: 273992 - DNA, 20 bp, Artificial Sequence
  Description of Artificial Sequence: Synthetic oligonucleotide
  Target: LAMA2; (-) strand; PAM type: YTN; PAM sequence: TTC
cctaaagtatagctatccca

SEQ ID NO: 273993 - DNA, 20 bp, Artificial Sequence
  Description of Artificial Sequence: Synthetic oligonucleotide
  Target: LAMA2; (-) strand; PAM type: YTN; PAM sequence: TTT
ccctaaagtatagctatccc

SEQ ID NO: 273994 - DNA, 20 bp, Artificial Sequence
  Description of Artificial Sequence: Synthetic oligonucleotide
  Target: LAMA2; (-) strand; PAM type: YTN; PAM sequence: TTA
tttccctaaagtatagctat

SEQ ID NO: 273995 - DNA, 20 bp, Artificial Sequence
  Description of Artificial Sequence: Synthetic oligonucleotide
  Target: LAMA2; (-) strand; PAM type: YTN; PAM sequence: CTT
atttccctaaagtatagcta

SEQ ID NO: 273996 - DNA, 20 bp, Artificial Sequence
  Description of Artificial Sequence: Synthetic oligonucleotide
  Target: LAMA2; (-) strand; PAM type: YTN; PAM sequence: TTC
ttatttccctaaagtatagc

SEQ ID NO: 273997 - DNA, 20 bp, Artificial Sequence
  Description of Artificial Sequence: Synthetic oligonucleotide
  Target: LAMA2; (-) strand; PAM type: YTN; PAM sequence: CTG
caggcaaaagtgagtggtgt

SEQ ID NO: 273998 - DNA, 20 bp, Artificial Sequence
  Description of Artificial Sequence: Synthetic oligonucleotide
  Target: LAMA2; (-) strand; PAM type: YTN; PAM sequence: CTA
ccaaatagtgcctgcaggca

SEQ ID NO: 273999 - DNA, 20 bp, Artificial Sequence
  Description of Artificial Sequence: Synthetic oligonucleotide
  Target: LAMA2; (-) strand; PAM type: YTN; PAM sequence: TTC
taccaaatagtgcctgcagg

SEQ ID NO: 274000 - DNA, 20 bp, Artificial Sequence
  Description of Artificial Sequence: Synthetic oligonucleotide
  Target: LAMA2; (-) strand; PAM type: YTN; PAM sequence: TTA
attctaccaaatagtgcctg

SEQ ID NO: 274001 - DNA, 20 bp, Artificial Sequence
  Description of Artificial Sequence: Synthetic oligonucleotide
  Target: LAMA2; (-) strand; PAM type: YTN; PAM sequence: TTG
gattaattctaccaaatagt

SEQ ID NO: 274002 - DNA, 20 bp, Artificial Sequence
  Description of Artificial Sequence: Synthetic oligonucleotide
  Target: LAMA2; (-) strand; PAM type: YTN; PAM sequence: TTA
acagttggattaattctacc

SEQ ID NO: 274003 - DNA, 20 bp, Artificial Sequence
  Description of Artificial Sequence: Synthetic oligonucleotide
  Target: LAMA2; (-) strand; PAM type: YTN; PAM sequence: TTT
aacagttggattaattctac

SEQ ID NO: 274004 - DNA, 20 bp, Artificial Sequence
  Description of Artificial Sequence: Synthetic oligonucleotide
  Target: LAMA2; (-) strand; PAM type: YTN; PAM sequence: TTT
taacagttggattaattcta

SEQ ID NO: 274005 - DNA, 20 bp, Artificial Sequence
  Description of Artificial Sequence: Synthetic oligonucleotide
  Target: LAMA2; (-) strand; PAM type: YTN; PAM sequence: TTC
aattttaacagttggattaa

SEQ ID NO: 274006 - DNA, 20 bp, Artificial Sequence
  Description of Artificial Sequence: Synthetic oligonucleotide
  Target: LAMA2; (-) strand; PAM type: YTN; PAM sequence: TTC
attcaattttaacagttgga

SEQ ID NO: 274007 - DNA, 20 bp, Artificial Sequence
  Description of Artificial Sequence: Synthetic oligonucleotide
  Target: LAMA2; (-) strand; PAM type: YTN; PAM sequence: TTT
cattcaattttaacagttgg

SEQ ID NO: 274008 - DNA, 20 bp, Artificial Sequence
  Description of Artificial Sequence: Synthetic oligonucleotide
  Target: LAMA2; (-) strand; PAM type: YTN; PAM sequence: CTT
tcattcaattttaacagttg

SEQ ID NO: 274009 - DNA, 20 bp, Artificial Sequence
  Description of Artificial Sequence: Synthetic oligonucleotide
  Target: LAMA2; (-) strand; PAM type: YTN; PAM sequence: TTG
acctttcattcaattttaac

SEQ ID NO: 274010 - DNA, 20 bp, Artificial Sequence
  Description of Artificial Sequence: Synthetic oligonucleotide
  Target: LAMA2; (-) strand; PAM type: YTN; PAM sequence: TTT
gacctttcattcaattttaa

SEQ ID NO: 274011 - DNA, 20 bp, Artificial Sequence
  Description of Artificial Sequence: Synthetic oligonucleotide
  Target: LAMA2; (-) strand; PAM type: YTN; PAM sequence: TTA
aatttgacctttcattcaat

SEQ ID NO: 274012 - DNA, 20 bp, Artificial Sequence
  Description of Artificial Sequence: Synthetic oligonucleotide
  Target: LAMA2; (-) strand; PAM type: YTN; PAM sequence: TTT
aaatttgacctttcattcaa

SEQ ID NO: 274013 - DNA, 20 bp, Artificial Sequence
  Description of Artificial Sequence: Synthetic oligonucleotide
  Target: LAMA2; (-) strand; PAM type: YTN; PAM sequence: CTG
gtacaatttaaatttgacct

SEQ ID NO: 274014 - DNA, 20 bp, Artificial Sequence
  Description of Artificial Sequence: Synthetic oligonucleotide
  Target: LAMA2; (-) strand; PAM type: YTN; PAM sequence: CTC
tggtacaatttaaatttgac

SEQ ID NO: 274015 - DNA, 20 bp, Artificial Sequence
  Description of Artificial Sequence: Synthetic oligonucleotide
  Target: LAMA2; (-) strand; PAM type: YTN; PAM sequence: TTG
ctctggtacaatttaaattt

SEQ ID NO: 274016 - DNA, 20 bp, Artificial Sequence
  Description of Artificial Sequence: Synthetic oligonucleotide
  Target: LAMA2; (-) strand; PAM type: YTN; PAM sequence: TTA
gtgttgctctggtacaattt

SEQ ID NO: 274017 - DNA, 20 bp, Artificial Sequence
  Description of Artificial Sequence: Synthetic oligonucleotide
  Target: LAMA2; (-) strand; PAM type: YTN; PAM sequence: TTT
agtgttgctctggtacaatt

SEQ ID NO: 274018 - DNA, 20 bp, Artificial Sequence
  Description of Artificial Sequence: Synthetic oligonucleotide
  Target: LAMA2; (-) strand; PAM type: YTN; PAM sequence: CTC
aatgaacatttagtgttgct

SEQ ID NO: 274019 - DNA, 20 bp, Artificial Sequence
  Description of Artificial Sequence: Synthetic oligonucleotide
  Target: LAMA2; (-) strand; PAM type: YTN; PAM sequence: TTA
catctcaatgaacatttagt

SEQ ID NO: 274020 - DNA, 20 bp, Artificial Sequence
  Description of Artificial Sequence: Synthetic oligonucleotide
  Target: LAMA2; (-) strand; PAM type: YTN; PAM sequence: TTG
tattacatctcaatgaacat

SEQ ID NO: 274021 - DNA, 20 bp, Artificial Sequence
  Description of Artificial Sequence: Synthetic oligonucleotide
  Target: LAMA2; (-) strand; PAM type: YTN; PAM sequence: TTT
gtattacatctcaatgaaca

SEQ ID NO: 274022 - DNA, 20 bp, Artificial Sequence
  Description of Artificial Sequence: Synthetic oligonucleotide
  Target: LAMA2; (-) strand; PAM type: YTN; PAM sequence: CTT
tgtattacatctcaatgaac

SEQ ID NO: 274023 - DNA, 20 bp, Artificial Sequence
  Description of Artificial Sequence: Synthetic oligonucleotide
  Target: LAMA2; (-) strand; PAM type: YTN; PAM sequence: CTG
ccaagctttgtattacatct

SEQ ID NO: 274024 - DNA, 20 bp, Artificial Sequence
  Description of Artificial Sequence: Synthetic oligonucleotide
  Target: LAMA2; (-) strand; PAM type: YTN; PAM sequence: TTA
aactgccaagctttgtatta

SEQ ID NO: 274025 - DNA, 20 bp, Artificial Sequence
  Description of Artificial Sequence: Synthetic oligonucleotide
  Target: LAMA2; (-) strand; PAM type: YTN; PAM sequence: CTC
cattaaactgccaagctttg

SEQ ID NO: 274026 - DNA, 20 bp, Artificial Sequence
  Description of Artificial Sequence: Synthetic oligonucleotide
  Target: LAMA2; (-) strand; PAM type: YTN; PAM sequence: TTC
tccattaaactgccaagctt

SEQ ID NO: 274027 - DNA, 20 bp, Artificial Sequence
  Description of Artificial Sequence: Synthetic oligonucleotide
  Target: LAMA2; (-) strand; PAM type: YTN; PAM sequence: TTT
ctccattaaactgccaagct

SEQ ID NO: 274028 - DNA, 20 bp, Artificial Sequence
  Description of Artificial Sequence: Synthetic oligonucleotide
  Target: LAMA2; (-) strand; PAM type: YTN; PAM sequence: TTT
tctccattaaactgccaagc

SEQ ID NO: 274029 - DNA, 20 bp, Artificial Sequence
  Description of Artificial Sequence: Synthetic oligonucleotide
  Target: LAMA2; (-) strand; PAM type: YTN; PAM sequence: TTT
ttctccattaaactgccaag

SEQ ID NO: 274030 - DNA, 20 bp, Artificial Sequence
  Description of Artificial Sequence: Synthetic oligonucleotide
  Target: LAMA2; (-) strand; PAM type: YTN; PAM sequence: TTT
tttctccattaaactgccaa

SEQ ID NO: 274031 - DNA, 20 bp, Artificial Sequence
  Description of Artificial Sequence: Synthetic oligonucleotide
  Target: LAMA2; (-) strand; PAM type: YTN; PAM sequence: TTT
ttttctccattaaactgcca

SEQ ID NO: 274032 - DNA, 20 bp, Artificial Sequence
  Description of Artificial Sequence: Synthetic oligonucleotide
  Target: LAMA2; (-) strand; PAM type: YTN; PAM sequence: CTT
tttttctccattaaactgcc

SEQ ID NO: 274033 - DNA, 20 bp, Artificial Sequence
  Description of Artificial Sequence: Synthetic oligonucleotide
  Target: LAMA2; (-) strand; PAM type: YTN; PAM sequence: CTC
tttttttctccattaaactg

SEQ ID NO: 274034 - DNA, 20 bp, Artificial Sequence
  Description of Artificial Sequence: Synthetic oligonucleotide
  Target: LAMA2; (-) strand; PAM type: YTN; PAM sequence: TTC
tctttttttctccattaaac

SEQ ID NO: 274035 - DNA, 20 bp, Artificial Sequence
  Description of Artificial Sequence: Synthetic oligonucleotide
  Target: LAMA2; (-) strand; PAM type: YTN; PAM sequence: TTT
ctctttttttctccattaaa

SEQ ID NO: 274036 - DNA, 20 bp, Artificial Sequence
  Description of Artificial Sequence: Synthetic oligonucleotide
  Target: LAMA2; (-) strand; PAM type: YTN; PAM sequence: CTT
tctctttttttctccattaa

SEQ ID NO: 274037 - DNA, 20 bp, Artificial Sequence
  Description of Artificial Sequence: Synthetic oligonucleotide
  Target: LAMA2; (-) strand; PAM type: YTN; PAM sequence: TTC
ccccactttctctttttttc

SEQ ID NO: 274038 - DNA, 20 bp, Artificial Sequence
  Description of Artificial Sequence: Synthetic oligonucleotide
  Target: LAMA2; (-) strand; PAM type: YTN; PAM sequence: CTT
cccccactttctcttttttt

SEQ ID NO: 274039 - DNA, 20 bp, Artificial Sequence
  Description of Artificial Sequence: Synthetic oligonucleotide
  Target: LAMA2; (-) strand; PAM type: YTN; PAM sequence: TTC
cttcccccactttctctttt

SEQ ID NO: 274040 - DNA, 20 bp, Artificial Sequence
  Description of Artificial Sequence: Synthetic oligonucleotide
  Target: LAMA2; (-) strand; PAM type: YTN; PAM sequence: CTT
ccttcccccactttctcttt

SEQ ID NO: 274041 - DNA, 20 bp, Artificial Sequence
  Description of Artificial Sequence: Synthetic oligonucleotide
  Target: LAMA2; (-) strand; PAM type: YTN; PAM sequence: CTC
ccttccttcccccactttct

SEQ ID NO: 274042 - DNA, 20 bp, Artificial Sequence
  Description of Artificial Sequence: Synthetic oligonucleotide
  Target: LAMA2; (-) strand; PAM type: YTN; PAM sequence: CTC
ccctcccttccttcccccac

SEQ ID NO: 274043 - DNA, 20 bp, Artificial Sequence
  Description of Artificial Sequence: Synthetic oligonucleotide
  Target: LAMA2; (-) strand; PAM type: YTN; PAM sequence: TTC
cctcccctcccttccttccc

SEQ ID NO: 274044 - DNA, 20 bp, Artificial Sequence
  Description of Artificial Sequence: Synthetic oligonucleotide
  Target: LAMA2; (-) strand; PAM type: YTN; PAM sequence: CTT
ccctcccctcccttccttcc

SEQ ID NO: 274045 - DNA, 20 bp, Artificial Sequence
  Description of Artificial Sequence: Synthetic oligonucleotide
  Target: LAMA2; (-) strand; PAM type: YTN; PAM sequence: TTC
cttccctcccctcccttcct

SEQ ID NO: 274046 - DNA, 20 bp, Artificial Sequence
  Description of Artificial Sequence: Synthetic oligonucleotide
  Target: LAMA2; (-) strand; PAM type: YTN; PAM sequence: CTT
ccttccctcccctcccttcc

SEQ ID NO: 274047 - DNA, 20 bp, Artificial Sequence
  Description of Artificial Sequence: Synthetic oligonucleotide
  Target: LAMA2; (-) strand; PAM type: YTN; PAM sequence: CTC
ttccttccctcccctccctt

SEQ ID NO: 274048 - DNA, 20 bp, Artificial Sequence
  Description of Artificial Sequence: Synthetic oligonucleotide
  Target: LAMA2; (-) strand; PAM type: YTN; PAM sequence: CTC
tcttccttccctcccctccc

SEQ ID NO: 274049 - DNA, 20 bp, Artificial Sequence
  Description of Artificial Sequence: Synthetic oligonucleotide
  Target: LAMA2; (-) strand; PAM type: YTN; PAM sequence: CTC
ccctctcttccttccctccc

SEQ ID NO: 274050 - DNA, 20 bp, Artificial Sequence
  Description of Artificial Sequence: Synthetic oligonucleotide
  Target: LAMA2; (-) strand; PAM type: YTN; PAM sequence: CTC
cctcccctctcttccttccc

SEQ ID NO: 274051 - DNA, 20 bp, Artificial Sequence
  Description of Artificial Sequence: Synthetic oligonucleotide
  Target: LAMA2; (-) strand; PAM type: YTN; PAM sequence: TTC
ctccctcccctctcttcctt

SEQ ID NO: 274052 - DNA, 20 bp, Artificial Sequence
  Description of Artificial Sequence: Synthetic oligonucleotide
  Target: LAMA2; (-) strand; PAM type: YTN; PAM sequence: TTT
cctccctcccctctcttcct

SEQ ID NO: 274053 - DNA, 20 bp, Artificial Sequence
  Description of Artificial Sequence: Synthetic oligonucleotide
  Target: LAMA2; (-) strand; PAM type: YTN; PAM sequence: TTT
tcctccctcccctctcttcc

SEQ ID NO: 274054 - DNA, 20 bp, Artificial Sequence
  Description of Artificial Sequence: Synthetic oligonucleotide
  Target: LAMA2; (-) strand; PAM type: YTN; PAM sequence: TTT
ttcctccctcccctctcttc

SEQ ID NO: 274055 - DNA, 20 bp, Artificial Sequence
  Description of Artificial Sequence: Synthetic oligonucleotide
  Target: LAMA2; (-) strand; PAM type: YTN; PAM sequence: CTT
tttcctccctcccctctctt

SEQ ID NO: 274056 - DNA, 20 bp, Artificial Sequence
  Description of Artificial Sequence: Synthetic oligonucleotide
  Target: LAMA2; (-) strand; PAM type: YTN; PAM sequence: TTC
ctttttcctccctcccctct

SEQ ID NO: 274057 - DNA, 20 bp, Artificial Sequence
  Description of Artificial Sequence: Synthetic oligonucleotide
  Target: LAMA2; (-) strand; PAM type: YTN; PAM sequence: CTT
cctttttcctccctcccctc

SEQ ID NO: 274058 - DNA, 20 bp, Artificial Sequence
  Description of Artificial Sequence: Synthetic oligonucleotide
  Target: LAMA2; (-) strand; PAM type: YTN; PAM sequence: TTC
cttcctttttcctccctccc

SEQ ID NO: 274059 - DNA, 20 bp, Artificial Sequence
  Description of Artificial Sequence: Synthetic oligonucleotide
  Target: LAMA2; (-) strand; PAM type: YTN; PAM sequence: CTT
ccttcctttttcctccctcc

SEQ ID NO: 274060 - DNA, 20 bp, Artificial Sequence
  Description of Artificial Sequence: Synthetic oligonucleotide
  Target: LAMA2; (-) strand; PAM type: YTN; PAM sequence: CTC
ccttccttcctttttcctcc

SEQ ID NO: 274061 - DNA, 20 bp, Artificial Sequence
  Description of Artificial Sequence: Synthetic oligonucleotide
  Target: LAMA2; (-) strand; PAM type: YTN; PAM sequence: CTC
cctcccttccttcctttttc

SEQ ID NO: 274062 - DNA, 20 bp, Artificial Sequence
  Description of Artificial Sequence: Synthetic oligonucleotide
  Target: LAMA2; (-) strand; PAM type: YTN; PAM sequence: CTC
cctccctcccttccttcctt

SEQ ID NO: 274063 - DNA, 20 bp, Artificial Sequence
  Description of Artificial Sequence: Synthetic oligonucleotide
  Target: LAMA2; (-) strand; PAM type: YTN; PAM sequence: CTC
ctccctccctcccttccttc

SEQ ID NO: 274064 - DNA, 20 bp, Artificial Sequence
  Description of Artificial Sequence: Synthetic oligonucleotide
  Target: LAMA2; (-) strand; PAM type: YTN; PAM sequence: CTC
tcctccctccctcccttcct

SEQ ID NO: 274065 - DNA, 20 bp, Artificial Sequence
  Description of Artificial Sequence: Synthetic oligonucleotide
  Target: LAMA2; (-) strand; PAM type: YTN; PAM sequence: TTC
cctctcctccctccctccct

SEQ ID NO: 274066 - DNA, 20 bp, Artificial Sequence
  Description of Artificial Sequence: Synthetic oligonucleotide
  Target: LAMA2; (-) strand; PAM type: YTN; PAM sequence: CTT
ccctctcctccctccctccc

SEQ ID NO: 274067 - DNA, 20 bp, Artificial Sequence
  Description of Artificial Sequence: Synthetic oligonucleotide
  Target: LAMA2; (-) strand; PAM type: YTN; PAM sequence: TTC
cttccctctcctccctccct

SEQ ID NO: 274068 - DNA, 20 bp, Artificial Sequence
  Description of Artificial Sequence: Synthetic oligonucleotide
  Target: LAMA2; (-) strand; PAM type: YTN; PAM sequence: CTT
ccttccctctcctccctccc

SEQ ID NO: 274069 - DNA, 20 bp, Artificial Sequence
  Description of Artificial Sequence: Synthetic oligonucleotide
  Target: LAMA2; (-) strand; PAM type: YTN; PAM sequence: CTC
ccttccttccctctcctccc

SEQ ID NO: 274070 - DNA, 20 bp, Artificial Sequence
  Description of Artificial Sequence: Synthetic oligonucleotide
  Target: LAMA2; (-) strand; PAM type: YTN; PAM sequence: CTC
ccctcccttccttccctctc

SEQ ID NO: 274071 - DNA, 20 bp, Artificial Sequence
  Description of Artificial Sequence: Synthetic oligonucleotide
  Target: LAMA2; (-) strand; PAM type: YTN; PAM sequence: CTC
cctcccctcccttccttccc

SEQ ID NO: 274072 - DNA, 20 bp, Artificial Sequence
  Description of Artificial Sequence: Synthetic oligonucleotide
  Target: LAMA2; (-) strand; PAM type: YTN; PAM sequence: CTC
ccctccctcccctcccttcc

SEQ ID NO: 274073 - DNA, 20 bp, Artificial Sequence
  Description of Artificial Sequence: Synthetic oligonucleotide
  Target: LAMA2; (-) strand; PAM type: YTN; PAM sequence: CTC
cctcccctccctcccctccc

SEQ ID NO: 274074 - DNA, 20 bp, Artificial Sequence
  Description of Artificial Sequence: Synthetic oligonucleotide
  Target: LAMA2; (-) strand; PAM type: YTN; PAM sequence: CTC
cctccctcccctccctcccc

SEQ ID NO: 274075 - DNA, 20 bp, Artificial Sequence
  Description of Artificial Sequence: Synthetic oligonucleotide
  Target: LAMA2; (-) strand; PAM type: YTN; PAM sequence: TTC
ctccctccctcccctccctc

SEQ ID NO: 274076 - DNA, 20 bp, Artificial Sequence
  Description of Artificial Sequence: Synthetic oligonucleotide
  Target: LAMA2; (-) strand; PAM type: YTN; PAM sequence: CTT
cctccctccctcccctccct

SEQ ID NO: 274077 - DNA, 20 bp, Artificial Sequence
  Description of Artificial Sequence: Synthetic oligonucleotide
  Target: LAMA2; (-) strand; PAM type: YTN; PAM sequence: TTC
cttcctccctccctcccctc

SEQ ID NO: 274078 - DNA, 20 bp, Artificial Sequence
  Description of Artificial Sequence: Synthetic oligonucleotide
  Target: LAMA2; (-) strand; PAM type: YTN; PAM sequence: CTG
ttccttcctccctccctccc

SEQ ID NO: 274079 - DNA, 20 bp, Artificial Sequence
  Description of Artificial Sequence: Synthetic oligonucleotide
  Target: LAMA2; (-) strand; PAM type: YTN; PAM sequence: CTC
tgttccttcctccctccctc

SEQ ID NO: 274080 - DNA, 20 bp, Artificial Sequence
  Description of Artificial Sequence: Synthetic oligonucleotide
  Target: LAMA2; (-) strand; PAM type: YTN; PAM sequence: CTC
cctctgttccttcctccctc

SEQ ID NO: 274081 - DNA, 20 bp, Artificial Sequence
  Description of Artificial Sequence: Synthetic oligonucleotide
  Target: LAMA2; (-) strand; PAM type: YTN; PAM sequence: TTC
ctccctctgttccttcctcc

SEQ ID NO: 274082 - DNA, 20 bp, Artificial Sequence
  Description of Artificial Sequence: Synthetic oligonucleotide
  Target: LAMA2; (-) strand; PAM type: YTN; PAM sequence: TTT
cctccctctgttccttcctc

SEQ ID NO: 274083 - DNA, 20 bp, Artificial Sequence
  Description of Artificial Sequence: Synthetic oligonucleotide
  Target: LAMA2; (-) strand; PAM type: YTN; PAM sequence: CTT
tcctccctctgttccttcct

SEQ ID NO: 274084 - DNA, 20 bp, Artificial Sequence
  Description of Artificial Sequence: Synthetic oligonucleotide
  Target: LAMA2; (-) strand; PAM type: YTN; PAM sequence: TTC
ccctttcctccctctgttcc

SEQ ID NO: 274085 - DNA, 20 bp, Artificial Sequence
  Description of Artificial Sequence: Synthetic oligonucleotide
  Target: LAMA2; (-) strand; PAM type: YTN; PAM sequence: CTT
cccctttcctccctctgttc

SEQ ID NO: 274086 - DNA, 20 bp, Artificial Sequence
  Description of Artificial Sequence: Synthetic oligonucleotide
  Target: LAMA2; (-) strand; PAM type: YTN; PAM sequence: CTC
ccttcccctttcctccctct

SEQ ID NO: 274087 - DNA, 20 bp, Artificial Sequence
  Description of Artificial Sequence: Synthetic oligonucleotide
  Target: LAMA2; (-) strand; PAM type: YTN; PAM sequence: CTC
tcccttcccctttcctccct

SEQ ID NO: 274088 - DNA, 20 bp, Artificial Sequence
  Description of Artificial Sequence: Synthetic oligonucleotide
  Target: LAMA2; (-) strand; PAM type: YTN; PAM sequence: CTC
tctcccttcccctttcctcc

SEQ ID NO: 274089 - DNA, 20 bp, Artificial Sequence
  Description of Artificial Sequence: Synthetic oligonucleotide
  Target: LAMA2; (-) strand; PAM type: YTN; PAM sequence: TTC
ctctctcccttcccctttcc

SEQ ID NO: 274090 - DNA, 20 bp, Artificial Sequence
  Description of Artificial Sequence: Synthetic oligonucleotide
  Target: LAMA2; (-) strand; PAM type: YTN; PAM sequence: TTT
cctctctcccttcccctttc

SEQ ID NO: 274091 - DNA, 20 bp, Artificial Sequence
  Description of Artificial Sequence: Synthetic oligonucleotide
  Target: LAMA2; (-) strand; PAM type: YTN; PAM sequence: CTT
tcctctctcccttccccttt

SEQ ID NO: 274092 - DNA, 20 bp, Artificial Sequence
  Description of Artificial Sequence: Synthetic oligonucleotide
  Target: LAMA2; (-) strand; PAM type: YTN; PAM sequence: TTC
tttcctctctcccttcccct

SEQ ID NO: 274093 - DNA, 20 bp, Artificial Sequence
  Description of Artificial Sequence: Synthetic oligonucleotide
  Target: LAMA2; (-) strand; PAM type: YTN; PAM sequence: CTT
ctttcctctctcccttcccc

SEQ ID NO: 274094 - DNA, 20 bp, Artificial Sequence
  Description of Artificial Sequence: Synthetic oligonucleotide
  Target: LAMA2; (-) strand; PAM type: YTN; PAM sequence: TTC
cttctttcctctctcccttc

SEQ ID NO: 274095 - DNA, 20 bp, Artificial Sequence
  Description of Artificial Sequence: Synthetic oligonucleotide
  Target: LAMA2; (-) strand; PAM type: YTN; PAM sequence: CTT
ccttctttcctctctccctt

SEQ ID NO: 274096 - DNA, 20 bp, Artificial Sequence
  Description of Artificial Sequence: Synthetic oligonucleotide
  Target: LAMA2; (-) strand; PAM type: YTN; PAM sequence: TTC
ccttccttctttcctctctc

SEQ ID NO: 274097 - DNA, 20 bp, Artificial Sequence
  Description of Artificial Sequence: Synthetic oligonucleotide
  Target: LAMA2; (-) strand; PAM type: YTN; PAM sequence: TTT
cccttccttctttcctctct

SEQ ID NO: 274098 - DNA, 20 bp, Artificial Sequence
  Description of Artificial Sequence: Synthetic oligonucleotide
  Target: LAMA2; (-) strand; PAM type: YTN; PAM sequence: CTT
tcccttccttctttcctctc

SEQ ID NO: 274099 - DNA, 20 bp, Artificial Sequence
  Description of Artificial Sequence: Synthetic oligonucleotide
  Target: LAMA2; (-) strand; PAM type: YTN; PAM sequence: CTC
ctttcccttccttctttcct

SEQ ID NO: 274100 - DNA, 20 bp, Artificial Sequence
  Description of Artificial Sequence: Synthetic oligonucleotide
  Target: LAMA2; (-) strand; PAM type: YTN; PAM sequence: CTC
cctcctttcccttccttctt

SEQ ID NO: 274101 - DNA, 20 bp, Artificial Sequence
  Description of Artificial Sequence: Synthetic oligonucleotide
  Target: LAMA2; (-) strand; PAM type: YTN; PAM sequence: TTC
ctccctcctttcccttcctt

SEQ ID NO: 274102 - DNA, 20 bp, Artificial Sequence
  Description of Artificial Sequence: Synthetic oligonucleotide
  Target: LAMA2; (-) strand; PAM type: YTN; PAM sequence: CTT
cctccctcctttcccttcct

SEQ ID NO: 274103 - DNA, 20 bp, Artificial Sequence
  Description of Artificial Sequence: Synthetic oligonucleotide
  Target: LAMA2; (-) strand; PAM type: YTN; PAM sequence: TTC
cttcctccctcctttccctt

SEQ ID NO: 274104 - DNA, 20 bp, Artificial Sequence
  Description of Artificial Sequence: Synthetic oligonucleotide
  Target: LAMA2; (-) strand; PAM type: YTN; PAM sequence: CTT
ccttcctccctcctttccct

SEQ ID NO: 274105 - DNA, 20 bp, Artificial Sequence
  Description of Artificial Sequence: Synthetic oligonucleotide
  Target: LAMA2; (-) strand; PAM type: YTN; PAM sequence: TTC
ttccttcctccctcctttcc

SEQ ID NO: 274106 - DNA, 20 bp, Artificial Sequence
  Description of Artificial Sequence: Synthetic oligonucleotide
  Target: LAMA2; (-) strand; PAM type: YTN; PAM sequence: TTT
cttccttcctccctcctttc

SEQ ID NO: 274107 - DNA, 20 bp, Artificial Sequence
  Description of Artificial Sequence: Synthetic oligonucleotide
  Target: LAMA2; (-) strand; PAM type: YTN; PAM sequence: CTT
tcttccttcctccctccttt

SEQ ID NO: 274108 - DNA, 20 bp, Artificial Sequence
  Description of Artificial Sequence: Synthetic oligonucleotide
  Target: LAMA2; (-) strand; PAM type: YTN; PAM sequence: TTC
ctttcttccttcctccctcc

SEQ ID NO: 274109 - DNA, 20 bp, Artificial Sequence
  Description of Artificial Sequence: Synthetic oligonucleotide
  Target: LAMA2; (-) strand; PAM type: YTN; PAM sequence: TTT
cctttcttccttcctccctc

SEQ ID NO: 274110 - DNA, 20 bp, Artificial Sequence
  Description of Artificial Sequence: Synthetic oligonucleotide
  Target: LAMA2; (-) strand; PAM type: YTN; PAM sequence: TTC
catttcctttcttccttcct

SEQ ID NO: 274111 - DNA, 20 bp, Artificial Sequence
  Description of Artificial Sequence: Synthetic oligonucleotide
  Target: LAMA2; (-) strand; PAM type: YTN; PAM sequence: TTT
ccatttcctttcttccttcc

SEQ ID NO: 274112 - DNA, 20 bp, Artificial Sequence
  Description of Artificial Sequence: Synthetic oligonucleotide
  Target: LAMA2; (-) strand; PAM type: YTN; PAM sequence: CTT
tccatttcctttcttccttc

SEQ ID NO: 274113 - DNA, 20 bp, Artificial Sequence
  Description of Artificial Sequence: Synthetic oligonucleotide
  Target: LAMA2; (-) strand; PAM type: YTN; PAM sequence: TTC
tttccatttcctttcttcct

SEQ ID NO: 274114 - DNA, 20 bp, Artificial Sequence
  Description of Artificial Sequence: Synthetic oligonucleotide
  Target: LAMA2; (-) strand; PAM type: YTN; PAM sequence: CTT
ctttccatttcctttcttcc

SEQ ID NO: 274115 - DNA, 20 bp, Artificial Sequence
  Description of Artificial Sequence: Synthetic oligonucleotide
  Target: LAMA2; (-) strand; PAM type: YTN; PAM sequence: TTC
cttctttccatttcctttct

SEQ ID NO: 274116 - DNA, 20 bp, Artificial Sequence
  Description of Artificial Sequence: Synthetic oligonucleotide
  Target: LAMA2; (-) strand; PAM type: YTN; PAM sequence: CTT
ccttctttccatttcctttc

SEQ ID NO: 274117 - DNA, 20 bp, Artificial Sequence
  Description of Artificial Sequence: Synthetic oligonucleotide
  Target: LAMA2; (-) strand; PAM type: YTN; PAM sequence: TTC
cttccttctttccatttcct

SEQ ID NO: 274118 - DNA, 20 bp, Artificial Sequence
  Description of Artificial Sequence: Synthetic oligonucleotide
  Target: LAMA2; (-) strand; PAM type: YTN; PAM sequence: TTT
ccttccttctttccatttcc

SEQ ID NO: 274119 - DNA, 20 bp, Artificial Sequence
  Description of Artificial Sequence: Synthetic oligonucleotide
  Target: LAMA2; (-) strand; PAM type: YTN; PAM sequence: CTT
tccttccttctttccatttc

SEQ ID NO: 274120 - DNA, 20 bp, Artificial Sequence
  Description of Artificial Sequence: Synthetic oligonucleotide
  Target: LAMA2; (-) strand; PAM type: YTN; PAM sequence: CTC
tttccttccttctttccatt

SEQ ID NO: 274121 - DNA, 20 bp, Artificial Sequence
  Description of Artificial Sequence: Synthetic oligonucleotide
  Target: LAMA2; (-) strand; PAM type: YTN; PAM sequence: TTC
ctctttccttccttctttcc

SEQ ID NO: 274122 - DNA, 20 bp, Artificial Sequence
  Description of Artificial Sequence: Synthetic oligonucleotide
  Target: LAMA2; (-) strand; PAM type: YTN; PAM sequence: CTT
cctctttccttccttctttc

SEQ ID NO: 274123 - DNA, 20 bp, Artificial Sequence
  Description of Artificial Sequence: Synthetic oligonucleotide
  Target: LAMA2; (-) strand; PAM type: YTN; PAM sequence: TTC
ccccccttcctctttccttc

SEQ ID NO: 274124 - DNA, 20 bp, Artificial Sequence
  Description of Artificial Sequence: Synthetic oligonucleotide
  Target: LAMA2; (-) strand; PAM type: YTN; PAM sequence: TTT
cccccccttcctctttcctt

SEQ ID NO: 274125 - DNA, 20 bp, Artificial Sequence
  Description of Artificial Sequence: Synthetic oligonucleotide
  Target: LAMA2; (-) strand; PAM type: YTN; PAM sequence: CTT
tcccccccttcctctttcct

SEQ ID NO: 274126 - DNA, 20 bp, Artificial Sequence
  Description of Artificial Sequence: Synthetic oligonucleotide
  Target: LAMA2; (-) strand; PAM type: YTN; PAM sequence: TTC
tttcccccccttcctctttc

SEQ ID NO: 274127 - DNA, 20 bp, Artificial Sequence
  Description of Artificial Sequence: Synthetic oligonucleotide
  Target: LAMA2; (-) strand; PAM type: YTN; PAM sequence: CTT
ctttcccccccttcctcttt

SEQ ID NO: 274128 - DNA, 20 bp, Artificial Sequence
  Description of Artificial Sequence: Synthetic oligonucleotide
  Target: LAMA2; (-) strand; PAM type: YTN; PAM sequence: TTC
cttctttcccccccttcctc

SEQ ID NO: 274129 - DNA, 20 bp, Artificial Sequence
  Description of Artificial Sequence: Synthetic oligonucleotide
  Target: LAMA2; (-) strand; PAM type: YTN; PAM sequence: CTT
ccttctttcccccccttcct

SEQ ID NO: 274130 - DNA, 20 bp, Artificial Sequence
  Description of Artificial Sequence: Synthetic oligonucleotide
  Target: LAMA2; (-) strand; PAM type: YTN; PAM sequence: TTC
ccttccttctttccccccct

SEQ ID NO: 274131 - DNA, 20 bp, Artificial Sequence
  Description of Artificial Sequence: Synthetic oligonucleotide
  Target: LAMA2; (-) strand; PAM type: YTN; PAM sequence: TTT
cccttccttctttccccccc

SEQ ID NO: 274132 - DNA, 20 bp, Artificial Sequence
  Description of Artificial Sequence: Synthetic oligonucleotide
  Target: LAMA2; (-) strand; PAM type: YTN; PAM sequence: CTT
tcccttccttctttcccccc

SEQ ID NO: 274133 - DNA, 20 bp, Artificial Sequence
  Description of Artificial Sequence: Synthetic oligonucleotide
  Target: LAMA2; (-) strand; PAM type: YTN; PAM sequence: CTC
ctttcccttccttctttccc

SEQ ID NO: 274134 - DNA, 20 bp, Artificial Sequence
  Description of Artificial Sequence: Synthetic oligonucleotide
  Target: LAMA2; (-) strand; PAM type: YTN; PAM sequence: CTC
cctcctttcccttccttctt

SEQ ID NO: 274135 - DNA, 20 bp, Artificial Sequence
  Description of Artificial Sequence: Synthetic oligonucleotide
  Target: LAMA2; (-) strand; PAM type: YTN; PAM sequence: CTC
cctccctcctttcccttcct

SEQ ID NO: 274136 - DNA, 20 bp, Artificial Sequence
  Description of Artificial Sequence: Synthetic oligonucleotide
  Target: LAMA2; (-) strand; PAM type: YTN; PAM sequence: TTC
ctccctccctcctttccctt

SEQ ID NO: 274137 - DNA, 20 bp, Artificial Sequence
  Description of Artificial Sequence: Synthetic oligonucleotide
  Target: LAMA2; (-) strand; PAM type: YTN; PAM sequence: CTT
cctccctccctcctttccct

SEQ ID NO: 274138 - DNA, 20 bp, Artificial Sequence
  Description of Artificial Sequence: Synthetic oligonucleotide
  Target: LAMA2; (-) strand; PAM type: YTN; PAM sequence: TTC
ttcctccctccctcctttcc

SEQ ID NO: 274139 - DNA, 20 bp, Artificial Sequence
  Description of Artificial Sequence: Synthetic oligonucleotide
  Target: LAMA2; (-) strand; PAM type: YTN; PAM sequence: TTT
cttcctccctccctcctttc

SEQ ID NO: 274140 - DNA, 20 bp, Artificial Sequence
  Description of Artificial Sequence: Synthetic oligonucleotide
  Target: LAMA2; (-) strand; PAM type: YTN; PAM sequence: TTT
tcttcctccctccctccttt

SEQ ID NO: 274141 - DNA, 20 bp, Artificial Sequence
  Description of Artificial Sequence: Synthetic oligonucleotide
  Target: LAMA2; (-) strand; PAM type: YTN; PAM sequence: CTT
ttcttcctccctccctcctt

SEQ ID NO: 274142 - DNA, 20 bp, Artificial Sequence
  Description of Artificial Sequence: Synthetic oligonucleotide
  Target: LAMA2; (-) strand; PAM type: YTN; PAM sequence: TTC
ttttcttcctccctccctcc

SEQ ID NO: 274143 - DNA, 20 bp, Artificial Sequence
  Description of Artificial Sequence: Synthetic oligonucleotide
  Target: LAMA2; (-) strand; PAM type: YTN; PAM sequence: CTT
cttttcttcctccctccctc

SEQ ID NO: 274144 - DNA, 20 bp, Artificial Sequence
  Description of Artificial Sequence: Synthetic oligonucleotide
  Target: LAMA2; (-) strand; PAM type: YTN; PAM sequence: TTC
ttcttttcttcctccctccc

SEQ ID NO: 274145 - DNA, 20 bp, Artificial Sequence
  Description of Artificial Sequence: Synthetic oligonucleotide
  Target: LAMA2; (-) strand; PAM type: YTN; PAM sequence: TTT
cttcttttcttcctccctcc

SEQ ID NO: 274146 - DNA, 20 bp, Artificial Sequence
  Description of Artificial Sequence: Synthetic oligonucleotide
  Target: LAMA2; (-) strand; PAM type: YTN; PAM sequence: TTT
tcttcttttcttcctccctc

SEQ ID NO: 274147 - DNA, 20 bp, Artificial Sequence
  Description of Artificial Sequence: Synthetic oligonucleotide
  Target: LAMA2; (-) strand; PAM type: YTN; PAM sequence: CTT
ttcttcttttcttcctccct

SEQ ID NO: 274148 - DNA, 20 bp, Artificial Sequence
  Description of Artificial Sequence: Synthetic oligonucleotide
  Target: LAMA2; (-) strand; PAM type: YTN; PAM sequence: TTC
ccttttcttcttttcttcct

SEQ ID NO: 274149 - DNA, 20 bp, Artificial Sequence
  Description of Artificial Sequence: Synthetic oligonucleotide
  Target: LAMA2; (-) strand; PAM type: YTN; PAM sequence: CTT
cccttttcttcttttcttcc

SEQ ID NO: 274150 - DNA, 20 bp, Artificial Sequence
  Description of Artificial Sequence: Synthetic oligonucleotide
  Target: LAMA2; (-) strand; PAM type: YTN; PAM sequence: TTC
cttcccttttcttcttttct

SEQ ID NO: 274151 - DNA, 20 bp, Artificial Sequence
  Description of Artificial Sequence: Synthetic oligonucleotide
  Target: LAMA2; (-) strand; PAM type: YTN; PAM sequence: CTT
ccttcccttttcttcttttc

SEQ ID NO: 274152 - DNA, 20 bp, Artificial Sequence
  Description of Artificial Sequence: Synthetic oligonucleotide
  Target: LAMA2; (-) strand; PAM type: YTN; PAM sequence: TTC
cttccttcccttttcttctt

SEQ ID NO: 274153 - DNA, 20 bp, Artificial Sequence
  Description of Artificial Sequence: Synthetic oligonucleotide
  Target: LAMA2; (-) strand; PAM type: YTN; PAM sequence: CTT
ccttccttcccttttcttct

SEQ ID NO: 274154 - DNA, 20 bp, Artificial Sequence
  Description of Artificial Sequence: Synthetic oligonucleotide
  Target: LAMA2; (-) strand; PAM type: YTN; PAM sequence: TTC
cttccttccttcccttttct

SEQ ID NO: 274155 - DNA, 20 bp, Artificial Sequence
  Description of Artificial Sequence: Synthetic oligonucleotide
  Target: LAMA2; (-) strand; PAM type: YTN; PAM sequence: CTT
ccttccttccttcccttttc

SEQ ID NO: 274156 - DNA, 20 bp, Artificial Sequence
  Description of Artificial Sequence: Synthetic oligonucleotide
  Target: LAMA2; (-) strand; PAM type: YTN; PAM sequence: TTC
cttccttccttccttccctt

SEQ ID NO: 274157 - DNA, 20 bp, Artificial Sequence
  Description of Artificial Sequence: Synthetic oligonucleotide
  Target: LAMA2; (-) strand; PAM type: YTN; PAM sequence: CTT
ccttccttccttccttccct

SEQ ID NO: 274158 - DNA, 20 bp, Artificial Sequence
  Description of Artificial Sequence: Synthetic oligonucleotide
  Target: LAMA2; (-) strand; PAM type: YTN; PAM sequence: TTC
cttccttccttccttccttc

SEQ ID NO: 274159 - DNA, 20 bp, Artificial Sequence
  Description of Artificial Sequence: Synthetic oligonucleotide
  Target: LAMA2; (-) strand; PAM type: YTN; PAM sequence: CTT
ccttccttccttccttcctt

SEQ ID NO: 274160 - DNA, 20 bp, Artificial Sequence
  Description of Artificial Sequence: Synthetic oligonucleotide
  Target: LAMA2; (-) strand; PAM type: YTN; PAM sequence: TTC
cccttccttccttccttcct

SEQ ID NO: 274161 - DNA, 20 bp, Artificial Sequence
  Description of Artificial Sequence: Synthetic oligonucleotide
  Target: LAMA2; (-) strand; PAM type: YTN; PAM sequence: TTT
ccccttccttccttccttcc

SEQ ID NO: 274162 - DNA, 20 bp, Artificial Sequence
  Description of Artificial Sequence: Synthetic oligonucleotide
  Target: LAMA2; (-) strand; PAM type: YTN; PAM sequence: TTA
tttccccttccttccttcct

SEQ ID NO: 274163 - DNA, 20 bp, Artificial Sequence
  Description of Artificial Sequence: Synthetic oligonucleotide
  Target: LAMA2; (-) strand; PAM type: YTN; PAM sequence: CTT
atttccccttccttccttcc

SEQ ID NO: 274164 - DNA, 20 bp, Artificial Sequence
  Description of Artificial Sequence: Synthetic oligonucleotide
  Target: LAMA2; (-) strand; PAM type: YTN; PAM sequence: TTC
ttatttccccttccttcctt

SEQ ID NO: 274165 - DNA, 20 bp, Artificial Sequence
  Description of Artificial Sequence: Synthetic oligonucleotide
  Target: LAMA2; (-) strand; PAM type: YTN; PAM sequence: TTT
cttatttccccttccttcct

SEQ ID NO: 274166 - DNA, 20 bp, Artificial Sequence
  Description of Artificial Sequence: Synthetic oligonucleotide
  Target: LAMA2; (-) strand; PAM type: YTN; PAM sequence: CTT
tcttatttccccttccttcc

SEQ ID NO: 274167 - DNA, 20 bp, Artificial Sequence
  Description of Artificial Sequence: Synthetic oligonucleotide
  Target: LAMA2; (-) strand; PAM type: YTN; PAM sequence: CTC
cctttcttatttccccttcc

SEQ ID NO: 274168 - DNA, 20 bp, Artificial Sequence
  Description of Artificial Sequence: Synthetic oligonucleotide
  Target: LAMA2; (-) strand; PAM type: YTN; PAM sequence: TTC
cgtccctccctttcttattt

SEQ ID NO: 274169 - DNA, 20 bp, Artificial Sequence
  Description of Artificial Sequence: Synthetic oligonucleotide
  Target: LAMA2; (-) strand; PAM type: YTN; PAM sequence: CTT
ccgtccctccctttcttatt

SEQ ID NO: 274170 - DNA, 20 bp, Artificial Sequence
  Description of Artificial Sequence: Synthetic oligonucleotide
  Target: LAMA2; (-) strand; PAM type: YTN; PAM sequence: TTC
cttccgtccctccctttctt

SEQ ID NO: 274171 - DNA, 20 bp, Artificial Sequence
  Description of Artificial Sequence: Synthetic oligonucleotide
  Target: LAMA2; (-) strand; PAM type: YTN; PAM sequence: CTT
ccttccgtccctccctttct

SEQ ID NO: 274172 - DNA, 20 bp, Artificial Sequence
  Description of Artificial Sequence: Synthetic oligonucleotide
  Target: LAMA2; (-) strand; PAM type: YTN; PAM sequence: TTG
gtgagtccttccttccgtcc

SEQ ID NO: 274173 - DNA, 20 bp, Artificial Sequence
  Description of Artificial Sequence: Synthetic oligonucleotide
  Target: LAMA2; (-) strand; PAM type: YTN; PAM sequence: TTT
ggtgagtccttccttccgtc

SEQ ID NO: 274174 - DNA, 20 bp, Artificial Sequence
  Description of Artificial Sequence: Synthetic oligonucleotide
  Target: LAMA2; (-) strand; PAM type: YTN; PAM sequence: CTT
tggtgagtccttccttccgt

SEQ ID NO: 274175 - DNA, 20 bp, Artificial Sequence
  Description of Artificial Sequence: Synthetic oligonucleotide
  Target: LAMA2; (-) strand; PAM type: YTN; PAM sequence: TTA
aagcctttggtgagtccttc

SEQ ID NO: 274176 - DNA, 20 bp, Artificial Sequence
  Description of Artificial Sequence: Synthetic oligonucleotide
  Target: LAMA2; (-) strand; PAM type: YTN; PAM sequence: TTT
aaagcctttggtgagtcctt

SEQ ID NO: 274177 - DNA, 20 bp, Artificial Sequence
  Description of Artificial Sequence: Synthetic oligonucleotide
  Target: LAMA2; (-) strand; PAM type: YTN; PAM sequence: CTT
taaagcctttggtgagtcct

SEQ ID NO: 274178 - DNA, 20 bp, Artificial Sequence
  Description of Artificial Sequence: Synthetic oligonucleotide
  Target: LAMA2; (-) strand; PAM type: YTN; PAM sequence: CTA
ctttaaagcctttggtgagt

SEQ ID NO: 274179 - DNA, 20 bp, Artificial Sequence
  Description of Artificial Sequence: Synthetic oligonucleotide
  Target: LAMA2; (-) strand; PAM type: YTN; PAM sequence: TTA
gagagagagaaaaagaggtg

SEQ ID NO: 274180 - DNA, 20 bp, Artificial Sequence
  Description of Artificial Sequence: Synthetic oligonucleotide
  Target: LAMA2; (-) strand; PAM type: YTN; PAM sequence: TTT
agagagagagaaaaagaggt

SEQ ID NO: 274181 - DNA, 20 bp, Artificial Sequence
  Description of Artificial Sequence: Synthetic oligonucleotide
  Target: LAMA2; (-) strand; PAM type: YTN; PAM sequence: TTA
tagtttagagagagagaaaa

SEQ ID NO: 274182 - DNA, 20 bp, Artificial Sequence
  Description of Artificial Sequence: Synthetic oligonucleotide
  Target: LAMA2; (-) strand; PAM type: YTN; PAM sequence: TTA
ttatagtttagagagagaga

SEQ ID NO: 274183 - DNA, 20 bp, Artificial Sequence
  Description of Artificial Sequence: Synthetic oligonucleotide
  Target: LAMA2; (-) strand; PAM type: YTN; PAM sequence: CTC
attattatagtttagagaga

SEQ ID NO: 274184 - DNA, 20 bp, Artificial Sequence
  Description of Artificial Sequence: Synthetic oligonucleotide
  Target: LAMA2; (-) strand; PAM type: YTN; PAM sequence: TTA
tccctcattattatagttta

SEQ ID NO: 274185 - DNA, 20 bp, Artificial Sequence
  Description of Artificial Sequence: Synthetic oligonucleotide
  Target: LAMA2; (-) strand; PAM type: YTN; PAM sequence: CTG
atggttatccctcattatta

SEQ ID NO: 274186 - DNA, 20 bp, Artificial Sequence
  Description of Artificial Sequence: Synthetic oligonucleotide
  Target: LAMA2; (-) strand; PAM type: YTN; PAM sequence: CTG
acaaacaaaaatgtaaaagt

SEQ ID NO: 274187 - DNA, 20 bp, Artificial Sequence
  Description of Artificial Sequence: Synthetic oligonucleotide
  Target: LAMA2; (-) strand; PAM type: YTN; PAM sequence: TTA
caactgacaaacaaaaatgt

SEQ ID NO: 274188 - DNA, 20 bp, Artificial Sequence
  Description of Artificial Sequence: Synthetic oligonucleotide
  Target: LAMA2; (-) strand; PAM type: YTN; PAM sequence: TTA
ttacaactgacaaacaaaaa

SEQ ID NO: 274189 - DNA, 20 bp, Artificial Sequence
  Description of Artificial Sequence: Synthetic oligonucleotide
  Target: LAMA2; (-) strand; PAM type: YTN; PAM sequence: TTT
attacaactgacaaacaaaa

SEQ ID NO: 274190 - DNA, 20 bp, Artificial Sequence
  Description of Artificial Sequence: Synthetic oligonucleotide
  Target: LAMA2; (-) strand; PAM type: YTN; PAM sequence: TTC
ccacagcaatttattacaac

SEQ ID NO: 274191 - DNA, 20 bp, Artificial Sequence
  Description of Artificial Sequence: Synthetic oligonucleotide
  Target: LAMA2; (-) strand; PAM type: YTN; PAM sequence: TTT
cccacagcaatttattacaa

SEQ ID NO: 274192 - DNA, 20 bp, Artificial Sequence
  Description of Artificial Sequence: Synthetic oligonucleotide
  Target: LAMA2; (-) strand; PAM type: YTN; PAM sequence: TTT
tcccacagcaatttattaca

SEQ ID NO: 274193 - DNA, 20 bp, Artificial Sequence
  Description of Artificial Sequence: Synthetic oligonucleotide
  Target: LAMA2; (-) strand; PAM type: YTN; PAM sequence: CTT
ttcccacagcaatttattac

SEQ ID NO: 274194 - DNA, 20 bp, Artificial Sequence
  Description of Artificial Sequence: Synthetic oligonucleotide
  Target: LAMA2; (-) strand; PAM type: YTN; PAM sequence: TTA
cttttcccacagcaatttat

SEQ ID NO: 274195 - DNA, 20 bp, Artificial Sequence
  Description of Artificial Sequence: Synthetic oligonucleotide
  Target: LAMA2; (-) strand; PAM type: YTN; PAM sequence: TTT
acttttcccacagcaattta

SEQ ID NO: 274196 - DNA, 20 bp, Artificial Sequence
  Description of Artificial Sequence: Synthetic oligonucleotide
  Target: LAMA2; (-) strand; PAM type: YTN; PAM sequence: CTG
aagcatttacttttcccaca

SEQ ID NO: 274197 - DNA, 20 bp, Artificial Sequence
  Description of Artificial Sequence: Synthetic oligonucleotide
  Target: LAMA2; (-) strand; PAM type: YTN; PAM sequence: CTG
aaatagataaatgtcagtct

SEQ ID NO: 274198 - DNA, 20 bp, Artificial Sequence
  Description of Artificial Sequence: Synthetic oligonucleotide
  Target: LAMA2; (-) strand; PAM type: YTN; PAM sequence: CTA
tccaaacataaagctgaaat

SEQ ID NO: 274199 - DNA, 20 bp, Artificial Sequence
  Description of Artificial Sequence: Synthetic oligonucleotide
  Target: LAMA2; (-) strand; PAM type: YTN; PAM sequence: CTC
ataatgaaagataggatgaa

SEQ ID NO: 274200 - DNA, 20 bp, Artificial Sequence
  Description of Artificial Sequence: Synthetic oligonucleotide
  Target: LAMA2; (-) strand; PAM type: YTN; PAM sequence: CTA
taacgaggtcatgactcata

SEQ ID NO: 274201 - DNA, 20 bp, Artificial Sequence
  Description of Artificial Sequence: Synthetic oligonucleotide
  Target: LAMA2; (-) strand; PAM type: YTN; PAM sequence: TTA
tctataacgaggtcatgact

SEQ ID NO: 274202 - DNA, 20 bp, Artificial Sequence
  Description of Artificial Sequence: Synthetic oligonucleotide
  Target: LAMA2; (-) strand; PAM type: YTN; PAM sequence: TTA
gatgaatagaaggtgattat

SEQ ID NO: 274203 - DNA, 20 bp, Artificial Sequence
  Description of Artificial Sequence: Synthetic oligonucleotide
  Target: LAMA2; (-) strand; PAM type: YTN; PAM sequence: CTT
agatgaatagaaggtgatta

SEQ ID NO: 274204 - DNA, 20 bp, Artificial Sequence
  Description of Artificial Sequence: Synthetic oligonucleotide
  Target: LAMA2; (-) strand; PAM type: YTN; PAM sequence: TTA
tagtgagataagaatgcctt

SEQ ID NO: 274205 - DNA, 20 bp, Artificial Sequence
  Description of Artificial Sequence: Synthetic oligonucleotide
  Target: LAMA2; (-) strand; PAM type: YTN; PAM sequence: TTA
taaaattatagtgagataag

SEQ ID NO: 274206 - DNA, 20 bp, Artificial Sequence
  Description of Artificial Sequence: Synthetic oligonucleotide
  Target: LAMA2; (-) strand; PAM type: YTN; PAM sequence: CTA
atcaggagtcatagcacggt

SEQ ID NO: 274207 - DNA, 20 bp, Artificial Sequence
  Description of Artificial Sequence: Synthetic oligonucleotide
  Target: LAMA2; (-) strand; PAM type: YTN; PAM sequence: TTA
tgaactaatcaggagtcata

SEQ ID NO: 274208 - DNA, 20 bp, Artificial Sequence
  Description of Artificial Sequence: Synthetic oligonucleotide
  Target: LAMA2; (-) strand; PAM type: YTN; PAM sequence: TTT
atgaactaatcaggagtcat

SEQ ID NO: 274209 - DNA, 20 bp, Artificial Sequence
  Description of Artificial Sequence: Synthetic oligonucleotide
  Target: LAMA2; (-) strand; PAM type: YTN; PAM sequence: TTA
tttatgaactaatcaggagt

SEQ ID NO: 274210 - DNA, 20 bp, Artificial Sequence
  Description of Artificial Sequence: Synthetic oligonucleotide
  Target: LAMA2; (-) strand; PAM type: YTN; PAM sequence: TTT
atttatgaactaatcaggag

SEQ ID NO: 274211 - DNA, 20 bp, Artificial Sequence
  Description of Artificial Sequence: Synthetic oligonucleotide
  Target: LAMA2; (-) strand; PAM type: YTN; PAM sequence: CTA
ataatgcgtggaataaaaca

SEQ ID NO: 274212 - DNA, 20 bp, Artificial Sequence
  Description of Artificial Sequence: Synthetic oligonucleotide
  Target: LAMA2; (-) strand; PAM type: YTN; PAM sequence: TTC
taataatgcgtggaataaaa

SEQ ID NO: 274213 - DNA, 20 bp, Artificial Sequence
  Description of Artificial Sequence: Synthetic oligonucleotide
  Target: LAMA2; (-) strand; PAM type: YTN; PAM sequence: TTA
attctaataatgcgtggaat

SEQ ID NO: 274214 - DNA, 20 bp, Artificial Sequence
  Description of Artificial Sequence: Synthetic oligonucleotide
  Target: LAMA2; (-) strand; PAM type: YTN; PAM sequence: CTC
attaattctaataatgcgtg

SEQ ID NO: 274215 - DNA, 20 bp, Artificial Sequence
  Description of Artificial Sequence: Synthetic oligonucleotide
  Target: LAMA2; (-) strand; PAM type: YTN; PAM sequence: CTA
tgtccactcattaattctaa

SEQ ID NO: 274216 - DNA, 20 bp, Artificial Sequence
  Description of Artificial Sequence: Synthetic oligonucleotide
  Target: LAMA2; (-) strand; PAM type: YTN; PAM sequence: TTA
cctatgtccactcattaatt

SEQ ID NO: 274217 - DNA, 20 bp, Artificial Sequence
  Description of Artificial Sequence: Synthetic oligonucleotide
  Target: LAMA2; (-) strand; PAM type: YTN; PAM sequence: TTT
acctatgtccactcattaat

SEQ ID NO: 274218 - DNA, 20 bp, Artificial Sequence
  Description of Artificial Sequence: Synthetic oligonucleotide
  Target: LAMA2; (-) strand; PAM type: YTN; PAM sequence: CTA
atgggtttacctatgtccac

SEQ ID NO: 274219 - DNA, 20 bp, Artificial Sequence
  Description of Artificial Sequence: Synthetic oligonucleotide
  Target: LAMA2; (-) strand; PAM type: YTN; PAM sequence: TTG
tatgtcaggaaataaacact

SEQ ID NO: 274220 - DNA, 20 bp, Artificial Sequence
  Description of Artificial Sequence: Synthetic oligonucleotide
  Target: LAMA2; (-) strand; PAM type: YTN; PAM sequence: CTA
ttgtatgtcaggaaataaac

SEQ ID NO: 274221 - DNA, 20 bp, Artificial Sequence
  Description of Artificial Sequence: Synthetic oligonucleotide
  Target: LAMA2; (-) strand; PAM type: YTN; PAM sequence: TTA
agtcctattgtatgtcagga

SEQ ID NO: 274222 - DNA, 20 bp, Artificial Sequence
  Description of Artificial Sequence: Synthetic oligonucleotide
  Target: LAMA2; (-) strand; PAM type: YTN; PAM sequence: TTG
attaagtcctattgtatgtc

SEQ ID NO: 274223 - DNA, 20 bp, Artificial Sequence
  Description of Artificial Sequence: Synthetic oligonucleotide
  Target: LAMA2; (-) strand; PAM type: YTN; PAM sequence: CTA
tcattgattaagtcctattg

SEQ ID NO: 274224 - DNA, 20 bp, Artificial Sequence
  Description of Artificial Sequence: Synthetic oligonucleotide
  Target: LAMA2; (-) strand; PAM type: YTN; PAM sequence: CTG
agaaacaggaaggaaaggtg

SEQ ID NO: 274225 - DNA, 20 bp, Artificial Sequence
  Description of Artificial Sequence: Synthetic oligonucleotide
  Target: LAMA2; (-) strand; PAM type: YTN; PAM sequence: CTG
atctgagaaacaggaaggaa

SEQ ID NO: 274226 - DNA, 20 bp, Artificial Sequence
  Description of Artificial Sequence: Synthetic oligonucleotide
  Target: LAMA2; (-) strand; PAM type: YTN; PAM sequence: CTC
tgatctgagaaacaggaagg

SEQ ID NO: 274227 - DNA, 20 bp, Artificial Sequence
  Description of Artificial Sequence: Synthetic oligonucleotide
  Target: LAMA2; (-) strand; PAM type: YTN; PAM sequence: TTA
agaatagaaagtaatactct

SEQ ID NO: 274228 - DNA, 20 bp, Artificial Sequence
  Description of Artificial Sequence: Synthetic oligonucleotide
  Target: LAMA2; (-) strand; PAM type: YTN; PAM sequence: TTA
ttaagaatagaaagtaatac

SEQ ID NO: 274229 - DNA, 20 bp, Artificial Sequence
  Description of Artificial Sequence: Synthetic oligonucleotide
  Target: LAMA2; (-) strand; PAM type: YTN; PAM sequence: TTT
attaagaatagaaagtaata

SEQ ID NO: 274230 - DNA, 20 bp, Artificial Sequence
  Description of Artificial Sequence: Synthetic oligonucleotide
  Target: LAMA2; (-) strand; PAM type: YTN; PAM sequence: CTG
atgggtaaatttattaagaa

SEQ ID NO: 274231 - DNA, 20 bp, Artificial Sequence
  Description of Artificial Sequence: Synthetic oligonucleotide
  Target: LAMA2; (-) strand; PAM type: YTN; PAM sequence: CTC
tgatgggtaaatttattaag

SEQ ID NO: 274232 - DNA, 20 bp, Artificial Sequence
  Description of Artificial Sequence: Synthetic oligonucleotide
  Target: LAMA2; (-) strand; PAM type: YTN; PAM sequence: CTG
aaaacaaaatcctctgatgg

SEQ ID NO: 274233 - DNA, 20 bp, Artificial Sequence
  Description of Artificial Sequence: Synthetic oligonucleotide
  Target: LAMA2; (-) strand; PAM type: YTN; PAM sequence: CTA
agactgaaaacaaaatcctc

SEQ ID NO: 274234 - DNA, 20 bp, Artificial Sequence
  Description of Artificial Sequence: Synthetic oligonucleotide
  Target: LAMA2; (-) strand; PAM type: YTN; PAM sequence: TTC
atactaagactgaaaacaaa

SEQ ID NO: 274235 - DNA, 20 bp, Artificial Sequence
  Description of Artificial Sequence: Synthetic oligonucleotide
  Target: LAMA2; (-) strand; PAM type: YTN; PAM sequence: TTT
catactaagactgaaaacaa

SEQ ID NO: 274236 - DNA, 20 bp, Artificial Sequence
  Description of Artificial Sequence: Synthetic oligonucleotide
  Target: LAMA2; (-) strand; PAM type: YTN; PAM sequence: TTT
tcatactaagactgaaaaca

SEQ ID NO: 274237 - DNA, 20 bp, Artificial Sequence
  Description of Artificial Sequence: Synthetic oligonucleotide
  Target: LAMA2; (-) strand; PAM type: YTN; PAM sequence: CTG
ttttcatactaagactgaaa

SEQ ID NO: 274238 - DNA, 20 bp, Artificial Sequence
  Description of Artificial Sequence: Synthetic oligonucleotide
  Target: LAMA2; (-) strand; PAM type: YTN; PAM sequence: CTC
aggagaagcaaaactgtttt

SEQ ID NO: 274239 - DNA, 20 bp, Artificial Sequence
  Description of Artificial Sequence: Synthetic oligonucleotide
  Target: LAMA2; (-) strand; PAM type: YTN; PAM sequence: TTC
ctcaggagaagcaaaactgt

SEQ ID NO: 274240 - DNA, 20 bp, Artificial Sequence
  Description of Artificial Sequence: Synthetic oligonucleotide
  Target: LAMA2; (-) strand; PAM type: YTN; PAM sequence: CTA
taaaggtaagtaaaaattcc

SEQ ID NO: 274241 - DNA, 20 bp, Artificial Sequence
  Description of Artificial Sequence: Synthetic oligonucleotide
  Target: LAMA2; (-) strand; PAM type: YTN; PAM sequence: TTA
agaggcatacagtatctata

SEQ ID NO: 274242 - DNA, 20 bp, Artificial Sequence
  Description of Artificial Sequence: Synthetic oligonucleotide
  Target: LAMA2; (-) strand; PAM type: YTN; PAM sequence: CTT
aagaggcatacagtatctat

SEQ ID NO: 274243 - DNA, 20 bp, Artificial Sequence
  Description of Artificial Sequence: Synthetic oligonucleotide
  Target: LAMA2; (-) strand; PAM type: YTN; PAM sequence: TTC
ttaagaggcatacagtatct

SEQ ID NO: 274244 - DNA, 20 bp, Artificial Sequence
  Description of Artificial Sequence: Synthetic oligonucleotide
  Target: LAMA2; (-) strand; PAM type: YTN; PAM sequence: CTA
cgcgtagcagggaatacaaa

SEQ ID NO: 274245 - DNA, 20 bp, Artificial Sequence
  Description of Artificial Sequence: Synthetic oligonucleotide
  Target: LAMA2; (-) strand; PAM type: YTN; PAM sequence: TTA
gtagactacgcgtagcaggg

SEQ ID NO: 274246 - DNA, 20 bp, Artificial Sequence
  Description of Artificial Sequence: Synthetic oligonucleotide
  Target: LAMA2; (-) strand; PAM type: YTN; PAM sequence: CTT
agtagactacgcgtagcagg

SEQ ID NO: 274247 - DNA, 20 bp, Artificial Sequence
  Description of Artificial Sequence: Synthetic oligonucleotide
  Target: LAMA2; (-) strand; PAM type: YTN; PAM sequence: CTA
agcatcttagtagactacgc

SEQ ID NO: 274248 - DNA, 20 bp, Artificial Sequence
  Description of Artificial Sequence: Synthetic oligonucleotide
  Target: LAMA2; (-) strand; PAM type: YTN; PAM sequence: CTA
ctaagcatcttagtagacta

SEQ ID NO: 274249 - DNA, 20 bp, Artificial Sequence
  Description of Artificial Sequence: Synthetic oligonucleotide
  Target: LAMA2; (-) strand; PAM type: YTN; PAM sequence: CTA
agtccactactaagcatctt

SEQ ID NO: 274250 - DNA, 20 bp, Artificial Sequence
  Description of Artificial Sequence: Synthetic oligonucleotide
  Target: LAMA2; (-) strand; PAM type: YTN; PAM sequence: TTC
aatgcagtgcatcctaagtc

SEQ ID NO: 274251 - DNA, 20 bp, Artificial Sequence
  Description of Artificial Sequence: Synthetic oligonucleotide
  Target: LAMA2; (-) strand; PAM type: YTN; PAM sequence: TTA
gtagacagaaaaccatgcca

SEQ ID NO: 274252 - DNA, 20 bp, Artificial Sequence
  Description of Artificial Sequence: Synthetic oligonucleotide
  Target: LAMA2; (-) strand; PAM type: YTN; PAM sequence: TTA
gggaaagaattagtagacag

SEQ ID NO: 274253 - DNA, 20 bp, Artificial Sequence
  Description of Artificial Sequence: Synthetic oligonucleotide
  Target: LAMA2; (-) strand; PAM type: YTN; PAM sequence: TTG
tataaattagggaaagaatt

SEQ ID NO: 274254 - DNA, 20 bp, Artificial Sequence
  Description of Artificial Sequence: Synthetic oligonucleotide
  Target: LAMA2; (-) strand; PAM type: YTN; PAM sequence: CTA
caggtaaaaaaaaaagttgt

SEQ ID NO: 274255 - DNA, 20 bp, Artificial Sequence
  Description of Artificial Sequence: Synthetic oligonucleotide
  Target: LAMA2; (-) strand; PAM type: YTN; PAM sequence: TTA
aaataaaaggaaatagcact

SEQ ID NO: 274256 - DNA, 20 bp, Artificial Sequence
  Description of Artificial Sequence: Synthetic oligonucleotide
  Target: LAMA2; (-) strand; PAM type: YTN; PAM sequence: CTA
atatcagataaaattaaaat

SEQ ID NO: 274257 - DNA, 20 bp, Artificial Sequence
  Description of Artificial Sequence: Synthetic oligonucleotide
  Target: LAMA2; (-) strand; PAM type: YTN; PAM sequence: TTA
aaaatcctaatatcagataa

SEQ ID NO: 274258 - DNA, 20 bp, Artificial Sequence
  Description of Artificial Sequence: Synthetic oligonucleotide
  Target: LAMA2; (-) strand; PAM type: YTN; PAM sequence: TTT
aaaaatcctaatatcagata

SEQ ID NO: 274259 - DNA, 20 bp, Artificial Sequence
  Description of Artificial Sequence: Synthetic oligonucleotide
  Target: LAMA2; (-) strand; PAM type: YTN; PAM sequence: TTT
taaaaatcctaatatcagat

SEQ ID NO: 274260 - DNA, 20 bp, Artificial Sequence
  Description of Artificial Sequence: Synthetic oligonucleotide
  Target: LAMA2; (-) strand; PAM type: YTN; PAM sequence: TTT
ttaaaaatcctaatatcaga

SEQ ID NO: 274261 - DNA, 20 bp, Artificial Sequence
  Description of Artificial Sequence: Synthetic oligonucleotide
  Target: LAMA2; (-) strand; PAM type: YTN; PAM sequence: TTT
tttaaaaatcctaatatcag

SEQ ID NO: 274262 - DNA, 20 bp, Artificial Sequence
  Description of Artificial Sequence: Synthetic oligonucleotide
  Target: LAMA2; (-) strand; PAM type: YTN; PAM sequence: TTA
ggtaattttttaaaaatcct

SEQ ID NO: 274263 - DNA, 20 bp, Artificial Sequence
  Description of Artificial Sequence: Synthetic oligonucleotide
  Target: LAMA2; (-) strand; PAM type: YTN; PAM sequence: TTT
aggtaattttttaaaaatcc

SEQ ID NO: 274264 - DNA, 20 bp, Artificial Sequence
  Description of Artificial Sequence: Synthetic oligonucleotide
  Target: LAMA2; (-) strand; PAM type: YTN; PAM sequence: TTC
aaaggaggatttaggtaatt

SEQ ID NO: 274265 - DNA, 20 bp, Artificial Sequence
  Description of Artificial Sequence: Synthetic oligonucleotide
  Target: LAMA2; (-) strand; PAM type: YTN; PAM sequence: TTA
attcaaaggaggatttaggt

SEQ ID NO: 274266 - DNA, 20 bp, Artificial Sequence
  Description of Artificial Sequence: Synthetic oligonucleotide
  Target: LAMA2; (-) strand; PAM type: YTN; PAM sequence: CTT
aattcaaaggaggatttagg

SEQ ID NO: 274267 - DNA, 20 bp, Artificial Sequence
  Description of Artificial Sequence: Synthetic oligonucleotide
  Target: LAMA2; (-) strand; PAM type: YTN; PAM sequence: TTC
caacttaattcaaaggagga

SEQ ID NO: 274268 - DNA, 20 bp, Artificial Sequence
  Description of Artificial Sequence: Synthetic oligonucleotide
  Target: LAMA2; (-) strand; PAM type: YTN; PAM sequence: TTT
ccaacttaattcaaaggagg

SEQ ID NO: 274269 - DNA, 20 bp, Artificial Sequence
  Description of Artificial Sequence: Synthetic oligonucleotide
  Target: LAMA2; (-) strand; PAM type: YTN; PAM sequence: TTA
tttccaacttaattcaaagg

SEQ ID NO: 274270 - DNA, 20 bp, Artificial Sequence
  Description of Artificial Sequence: Synthetic oligonucleotide
  Target: LAMA2; (-) strand; PAM type: YTN; PAM sequence: TTT
atttccaacttaattcaaag

SEQ ID NO: 274271 - DNA, 20 bp, Artificial Sequence
  Description of Artificial Sequence: Synthetic oligonucleotide
  Target: LAMA2; (-) strand; PAM type: YTN; PAM sequence: TTA
tttatttccaacttaattca

SEQ ID NO: 274272 - DNA, 20 bp, Artificial Sequence
  Description of Artificial Sequence: Synthetic oligonucleotide
  Target: LAMA2; (-) strand; PAM type: YTN; PAM sequence: CTT
atttatttccaacttaattc

SEQ ID NO: 274273 - DNA, 20 bp, Artificial Sequence
  Description of Artificial Sequence: Synthetic oligonucleotide
  Target: LAMA2; (-) strand; PAM type: YTN; PAM sequence: TTA
cttatttatttccaacttaa

SEQ ID NO: 274274 - DNA, 20 bp, Artificial Sequence
  Description of Artificial Sequence: Synthetic oligonucleotide
  Target: LAMA2; (-) strand; PAM type: YTN; PAM sequence: TTT
acttatttatttccaactta

SEQ ID NO: 274275 - DNA, 20 bp, Artificial Sequence
  Description of Artificial Sequence: Synthetic oligonucleotide
  Target: LAMA2; (-) strand; PAM type: YTN; PAM sequence: TTG
gaatttacttatttatttcc

SEQ ID NO: 274276 - DNA, 20 bp, Artificial Sequence
  Description of Artificial Sequence: Synthetic oligonucleotide
  Target: LAMA2; (-) strand; PAM type: YTN; PAM sequence: TTT
ggaatttacttatttatttc

SEQ ID NO: 274277 - DNA, 20 bp, Artificial Sequence
  Description of Artificial Sequence: Synthetic oligonucleotide
  Target: LAMA2; (-) strand; PAM type: YTN; PAM sequence: CTT
tggaatttacttatttattt

SEQ ID NO: 274278 - DNA, 20 bp, Artificial Sequence
  Description of Artificial Sequence: Synthetic oligonucleotide
  Target: LAMA2; (-) strand; PAM type: YTN; PAM sequence: TTG
taaaagatgtatctttggaa

SEQ ID NO: 274279 - DNA, 20 bp, Artificial Sequence
  Description of Artificial Sequence: Synthetic oligonucleotide
  Target: LAMA2; (-) strand; PAM type: YTN; PAM sequence: TTG
aaaatgattgtaaaagatgt

SEQ ID NO: 274280 - DNA, 20 bp, Artificial Sequence
  Description of Artificial Sequence: Synthetic oligonucleotide
  Target: LAMA2; (-) strand; PAM type: YTN; PAM sequence: TTC
ccacagtattgaaaatgatt

SEQ ID NO: 274281 - DNA, 20 bp, Artificial Sequence
  Description of Artificial Sequence: Synthetic oligonucleotide
  Target: LAMA2; (-) strand; PAM type: YTN; PAM sequence: TTT
cccacagtattgaaaatgat

SEQ ID NO: 274282 - DNA, 20 bp, Artificial Sequence
  Description of Artificial Sequence: Synthetic oligonucleotide
  Target: LAMA2; (-) strand; PAM type: YTN; PAM sequence: CTT
tcccacagtattgaaaatga

SEQ ID NO: 274283 - DNA, 20 bp, Artificial Sequence
  Description of Artificial Sequence: Synthetic oligonucleotide
  Target: LAMA2; (-) strand; PAM type: YTN; PAM sequence: TTC
tttcccacagtattgaaaat

SEQ ID NO: 274284 - DNA, 20 bp, Artificial Sequence
  Description of Artificial Sequence: Synthetic oligonucleotide
  Target: LAMA2; (-) strand; PAM type: YTN; PAM sequence: TTT
ctttcccacagtattgaaaa

SEQ ID NO: 274285 - DNA, 20 bp, Artificial Sequence
  Description of Artificial Sequence: Synthetic oligonucleotide
  Target: LAMA2; (-) strand; PAM type: YTN; PAM sequence: TTT
tctttcccacagtattgaaa

SEQ ID NO: 274286 - DNA, 20 bp, Artificial Sequence
  Description of Artificial Sequence: Synthetic oligonucleotide
  Target: LAMA2; (-) strand; PAM type: YTN; PAM sequence: TTC
aatatattttctttcccaca

SEQ ID NO: 274287 - DNA, 20 bp, Artificial Sequence
  Description of Artificial Sequence: Synthetic oligonucleotide
  Target: LAMA2; (-) strand; PAM type: YTN; PAM sequence: CTT
caatatattttctttcccac

SEQ ID NO: 274288 - DNA, 20 bp, Artificial Sequence
  Description of Artificial Sequence: Synthetic oligonucleotide
  Target: LAMA2; (-) strand; PAM type: YTN; PAM sequence: CTA
tcacttcaatatattttctt

SEQ ID NO: 274289 - DNA, 20 bp, Artificial Sequence
  Description of Artificial Sequence: Synthetic oligonucleotide
  Target: LAMA2; (-) strand; PAM type: YTN; PAM sequence: TTC
aaaagtatgcactatcactt

SEQ ID NO: 274290 - DNA, 20 bp, Artificial Sequence
  Description of Artificial Sequence: Synthetic oligonucleotide
  Target: LAMA2; (-) strand; PAM type: YTN; PAM sequence: TTA
ttcaaaagtatgcactatca

SEQ ID NO: 274291 - DNA, 20 bp, Artificial Sequence
  Description of Artificial Sequence: Synthetic oligonucleotide
  Target: LAMA2; (-) strand; PAM type: YTN; PAM sequence: CTT
attcaaaagtatgcactatc

SEQ ID NO: 274292 - DNA, 20 bp, Artificial Sequence
  Description of Artificial Sequence: Synthetic oligonucleotide
  Target: LAMA2; (-) strand; PAM type: YTN; PAM sequence: CTC
ttattcaaaagtatgcacta

SEQ ID NO: 274293 - DNA, 20 bp, Artificial Sequence
  Description of Artificial Sequence: Synthetic oligonucleotide
  Target: LAMA2; (-) strand; PAM type: YTN; PAM sequence: TTC
atctcttattcaaaagtatg

SEQ ID NO: 274294 - DNA, 20 bp, Artificial Sequence
  Description of Artificial Sequence: Synthetic oligonucleotide
  Target: LAMA2; (-) strand; PAM type: YTN; PAM sequence: TTT
catctcttattcaaaagtat

SEQ ID NO: 274295 - DNA, 20 bp, Artificial Sequence
  Description of Artificial Sequence: Synthetic oligonucleotide
  Target: LAMA2; (-) strand; PAM type: YTN; PAM sequence: TTT
tcatctcttattcaaaagta

SEQ ID NO: 274296 - DNA, 20 bp, Artificial Sequence
  Description of Artificial Sequence: Synthetic oligonucleotide
  Target: LAMA2; (-) strand; PAM type: YTN; PAM sequence: TTT
ttcatctcttattcaaaagt

SEQ ID NO: 274297 - DNA, 20 bp, Artificial Sequence
  Description of Artificial Sequence: Synthetic oligonucleotide
  Target: LAMA2; (-) strand; PAM type: YTN; PAM sequence: TTA
aagatgaatgtgtttttcat

SEQ ID NO: 274298 - DNA, 20 bp, Artificial Sequence
  Description of Artificial Sequence: Synthetic oligonucleotide
  Target: LAMA2; (-) strand; PAM type: YTN; PAM sequence: CTT
aaagatgaatgtgtttttca

SEQ ID NO: 274299 - DNA, 20 bp, Artificial Sequence
  Description of Artificial Sequence: Synthetic oligonucleotide
  Target: LAMA2; (-) strand; PAM type: YTN; PAM sequence: TTC
ttaaagatgaatgtgttttt

SEQ ID NO: 274300 - DNA, 20 bp, Artificial Sequence
  Description of Artificial Sequence: Synthetic oligonucleotide
  Target: LAMA2; (-) strand; PAM type: YTN; PAM sequence: CTG
agcattcttaaagatgaatg

SEQ ID NO: 274301 - DNA, 20 bp, Artificial Sequence
  Description of Artificial Sequence: Synthetic oligonucleotide
  Target: LAMA2; (-) strand; PAM type: YTN; PAM sequence: CTC
tgagcattcttaaagatgaa

SEQ ID NO: 274302 - DNA, 20 bp, Artificial Sequence
  Description of Artificial Sequence: Synthetic oligonucleotide
  Target: LAMA2; (-) strand; PAM type: YTN; PAM sequence: TTC
tctgagcattcttaaagatg

SEQ ID NO: 274303 - DNA, 20 bp, Artificial Sequence
  Description of Artificial Sequence: Synthetic oligonucleotide
  Target: LAMA2; (-) strand; PAM type: YTN; PAM sequence: CTT
ctctgagcattcttaaagat

SEQ ID NO: 274304 - DNA, 20 bp, Artificial Sequence
  Description of Artificial Sequence: Synthetic oligonucleotide
  Target: LAMA2; (-) strand; PAM type: YTN; PAM sequence: CTG
gaacttctctgagcattctt

SEQ ID NO: 274305 - DNA, 20 bp, Artificial Sequence
  Description of Artificial Sequence: Synthetic oligonucleotide
  Target: LAMA2; (-) strand; PAM type: YTN; PAM sequence: CTA
tgtataaataggatctggaa

SEQ ID NO: 274306 - DNA, 20 bp, Artificial Sequence
  Description of Artificial Sequence: Synthetic oligonucleotide
  Target: LAMA2; (-) strand; PAM type: YTN; PAM sequence: TTC
cagatcctatgtataaatag

SEQ ID NO: 274307 - DNA, 20 bp, Artificial Sequence
  Description of Artificial Sequence: Synthetic oligonucleotide
  Target: LAMA2; (-) strand; PAM type: YTN; PAM sequence: TTA
tatacatatatatagttcca

SEQ ID NO: 274308 - DNA, 20 bp, Artificial Sequence
  Description of Artificial Sequence: Synthetic oligonucleotide
  Target: LAMA2; (-) strand; PAM type: YTN; PAM sequence: TTT
atatacatatatatagttcc

SEQ ID NO: 274309 - DNA, 20 bp, Artificial Sequence
  Description of Artificial Sequence: Synthetic oligonucleotide
  Target: LAMA2; (-) strand; PAM type: YTN; PAM sequence: TTA
tgtttatatacatatatata

SEQ ID NO: 274310 - DNA, 20 bp, Artificial Sequence
  Description of Artificial Sequence: Synthetic oligonucleotide
  Target: LAMA2; (-) strand; PAM type: YTN; PAM sequence: TTT
atgtttatatacatatatat

SEQ ID NO: 274311 - DNA, 20 bp, Artificial Sequence
  Description of Artificial Sequence: Synthetic oligonucleotide
  Target: LAMA2; (-) strand; PAM type: YTN; PAM sequence: TTT
tatgtttatatacatatata

SEQ ID NO: 274312 - DNA, 20 bp, Artificial Sequence
  Description of Artificial Sequence: Synthetic oligonucleotide
  Target: LAMA2; (-) strand; PAM type: YTN; PAM sequence: TTA
tagacatatataaacataca

SEQ ID NO: 274313 - DNA, 20 bp, Artificial Sequence
  Description of Artificial Sequence: Synthetic oligonucleotide
  Target: LAMA2; (-) strand; PAM type: YTN; PAM sequence: TTT
atagacatatataaacatac

SEQ ID NO: 274314 - DNA, 20 bp, Artificial Sequence
  Description of Artificial Sequence: Synthetic oligonucleotide
  Target: LAMA2; (-) strand; PAM type: YTN; PAM sequence: CTT
tatagacatatataaacata

SEQ ID NO: 274315 - DNA, 20 bp, Artificial Sequence
  Description of Artificial Sequence: Synthetic oligonucleotide
  Target: LAMA2; (-) strand; PAM type: YTN; PAM sequence: CTC
tttatagacatatataaaca

SEQ ID NO: 274316 - DNA, 20 bp, Artificial Sequence
  Description of Artificial Sequence: Synthetic oligonucleotide
  Target: LAMA2; (-) strand; PAM type: YTN; PAM sequence: TTC
actctttatagacatatata

SEQ ID NO: 274317 - DNA, 20 bp, Artificial Sequence
  Description of Artificial Sequence: Synthetic oligonucleotide
  Target: LAMA2; (-) strand; PAM type: YTN; PAM sequence: TTT
cactctttatagacatatat

SEQ ID NO: 274318 - DNA, 20 bp, Artificial Sequence
  Description of Artificial Sequence: Synthetic oligonucleotide
  Target: LAMA2; (-) strand; PAM type: YTN; PAM sequence: CTG
tttcactctttatagacata

SEQ ID NO: 274319 - DNA, 20 bp, Artificial Sequence
  Description of Artificial Sequence: Synthetic oligonucleotide
  Target: LAMA2; (-) strand; PAM type: YTN; PAM sequence: TTA
atagaagtctgtttcactct

SEQ ID NO: 274320 - DNA, 20 bp, Artificial Sequence
  Description of Artificial Sequence: Synthetic oligonucleotide
  Target: LAMA2; (-) strand; PAM type: YTN; PAM sequence: TTT
aatagaagtctgtttcactc

SEQ ID NO: 274321 - DNA, 20 bp, Artificial Sequence
  Description of Artificial Sequence: Synthetic oligonucleotide
  Target: LAMA2; (-) strand; PAM type: YTN; PAM sequence: TTT
taatagaagtctgtttcact

SEQ ID NO: 274322 - DNA, 20 bp, Artificial Sequence
  Description of Artificial Sequence: Synthetic oligonucleotide
  Target: LAMA2; (-) strand; PAM type: YTN; PAM sequence: CTC
ccccaccaaaaaaggaaagg

SEQ ID NO: 274323 - DNA, 20 bp, Artificial Sequence
  Description of Artificial Sequence: Synthetic oligonucleotide
  Target: LAMA2; (-) strand; PAM type: YTN; PAM sequence: TTA
gaaatctcccccaccaaaaa

SEQ ID NO: 274324 - DNA, 20 bp, Artificial Sequence
  Description of Artificial Sequence: Synthetic oligonucleotide
  Target: LAMA2; (-) strand; PAM type: YTN; PAM sequence: CTT
agaaatctcccccaccaaaa

SEQ ID NO: 274325 - DNA, 20 bp, Artificial Sequence
  Description of Artificial Sequence: Synthetic oligonucleotide
  Target: LAMA2; (-) strand; PAM type: YTN; PAM sequence: TTC
ttagaaatctcccccaccaa

SEQ ID NO: 274326 - DNA, 20 bp, Artificial Sequence
  Description of Artificial Sequence: Synthetic oligonucleotide
  Target: LAMA2; (-) strand; PAM type: YTN; PAM sequence: TTT
cttagaaatctcccccacca

SEQ ID NO: 274327 - DNA, 20 bp, Artificial Sequence
  Description of Artificial Sequence: Synthetic oligonucleotide
  Target: LAMA2; (-) strand; PAM type: YTN; PAM sequence: TTT
tcttagaaatctcccccacc

SEQ ID NO: 274328 - DNA, 20 bp, Artificial Sequence
  Description of Artificial Sequence: Synthetic oligonucleotide
  Target: LAMA2; (-) strand; PAM type: YTN; PAM sequence: CTA
ggcaatatgattttcttaga

SEQ ID NO: 274329 - DNA, 20 bp, Artificial Sequence
  Description of Artificial Sequence: Synthetic oligonucleotide
  Target: LAMA2; (-) strand; PAM type: YTN; PAM sequence: TTG
ctaggcaatatgattttctt

SEQ ID NO: 274330 - DNA, 20 bp, Artificial Sequence
  Description of Artificial Sequence: Synthetic oligonucleotide
  Target: LAMA2; (-) strand; PAM type: YTN; PAM sequence: CTT
gctaggcaatatgattttct

SEQ ID NO: 274331 - DNA, 20 bp, Artificial Sequence
  Description of Artificial Sequence: Synthetic oligonucleotide
  Target: LAMA2; (-) strand; PAM type: YTN; PAM sequence: CTA
tcacttgctaggcaatatga

SEQ ID NO: 274332 - DNA, 20 bp, Artificial Sequence
  Description of Artificial Sequence: Synthetic oligonucleotide
  Target: LAMA2; (-) strand; PAM type: YTN; PAM sequence: CTC
ataggcatctatcacttgct

SEQ ID NO: 274333 - DNA, 20 bp, Artificial Sequence
  Description of Artificial Sequence: Synthetic oligonucleotide
  Target: LAMA2; (-) strand; PAM type: YTN; PAM sequence: CTC
tcataggcatctatcacttg

SEQ ID NO: 274334 - DNA, 20 bp, Artificial Sequence
  Description of Artificial Sequence: Synthetic oligonucleotide
  Target: LAMA2; (-) strand; PAM type: YTN; PAM sequence: TTC
tctcataggcatctatcact

SEQ ID NO: 274335 - DNA, 20 bp, Artificial Sequence
  Description of Artificial Sequence: Synthetic oligonucleotide
  Target: LAMA2; (-) strand; PAM type: YTN; PAM sequence: TTT
ctctcataggcatctatcac

SEQ ID NO: 274336 - DNA, 20 bp, Artificial Sequence
  Description of Artificial Sequence: Synthetic oligonucleotide
  Target: LAMA2; (-) strand; PAM type: YTN; PAM sequence: TTC
catttctctcataggcatct

SEQ ID NO: 274337 - DNA, 20 bp, Artificial Sequence
  Description of Artificial Sequence: Synthetic oligonucleotide
  Target: LAMA2; (-) strand; PAM type: YTN; PAM sequence: TTT
ccatttctctcataggcatc

SEQ ID NO: 274338 - DNA, 20 bp, Artificial Sequence
  Description of Artificial Sequence: Synthetic oligonucleotide
  Target: LAMA2; (-) strand; PAM type: YTN; PAM sequence: TTT
tccatttctctcataggcat

SEQ ID NO: 274339 - DNA, 20 bp, Artificial Sequence
  Description of Artificial Sequence: Synthetic oligonucleotide
  Target: LAMA2; (-) strand; PAM type: YTN; PAM sequence: CTG
tcattttccatttctctcat

SEQ ID NO: 274340 - DNA, 20 bp, Artificial Sequence
  Description of Artificial Sequence: Synthetic oligonucleotide
  Target: LAMA2; (-) strand; PAM type: YTN; PAM sequence: TTA
aaatgctgtcattttccatt

SEQ ID NO: 274341 - DNA, 20 bp, Artificial Sequence
  Description of Artificial Sequence: Synthetic oligonucleotide
  Target: LAMA2; (-) strand; PAM type: YTN; PAM sequence: TTT
aaaatgctgtcattttccat

SEQ ID NO: 274342 - DNA, 20 bp, Artificial Sequence
  Description of Artificial Sequence: Synthetic oligonucleotide
  Target: LAMA2; (-) strand; PAM type: YTN; PAM sequence: TTT
taaaatgctgtcattttcca

SEQ ID NO: 274343 - DNA, 20 bp, Artificial Sequence
  Description of Artificial Sequence: Synthetic oligonucleotide
  Target: LAMA2; (-) strand; PAM type: YTN; PAM sequence: TTA
aattttaaaatgctgtcatt

SEQ ID NO: 274344 - DNA, 20 bp, Artificial Sequence
  Description of Artificial Sequence: Synthetic oligonucleotide
  Target: LAMA2; (-) strand; PAM type: YTN; PAM sequence: CTG
aaagttaaattttaaaatgc

SEQ ID NO: 274345 - DNA, 20 bp, Artificial Sequence
  Description of Artificial Sequence: Synthetic oligonucleotide
  Target: LAMA2; (-) strand; PAM type: YTN; PAM sequence: CTA
ctgaaagttaaattttaaaa

SEQ ID NO: 274346 - DNA, 20 bp, Artificial Sequence
  Description of Artificial Sequence: Synthetic oligonucleotide
  Target: LAMA2; (-) strand; PAM type: YTN; PAM sequence: TTC
tactgaaagttaaattttaa

SEQ ID NO: 274347 - DNA, 20 bp, Artificial Sequence
  Description of Artificial Sequence: Synthetic oligonucleotide
  Target: LAMA2; (-) strand; PAM type: YTN; PAM sequence: TTT
ctactgaaagttaaatttta

SEQ ID NO: 274348 - DNA, 20 bp, Artificial Sequence
  Description of Artificial Sequence: Synthetic oligonucleotide
  Target: LAMA2; (-) strand; PAM type: YTN; PAM sequence: TTT
tctactgaaagttaaatttt

SEQ ID NO: 274349 - DNA, 20 bp, Artificial Sequence
  Description of Artificial Sequence: Synthetic oligonucleotide
  Target: LAMA2; (-) strand; PAM type: YTN; PAM sequence: TTT
ttctactgaaagttaaattt

SEQ ID NO: 274350 - DNA, 20 bp, Artificial Sequence
  Description of Artificial Sequence: Synthetic oligonucleotide
  Target: LAMA2; (-) strand; PAM type: YTN; PAM sequence: TTA
tttttctactgaaagttaaa

SEQ ID NO: 274351 - DNA, 20 bp, Artificial Sequence
  Description of Artificial Sequence: Synthetic oligonucleotide
  Target: LAMA2; (-) strand; PAM type: YTN; PAM sequence: TTC
cattatttttctactgaaag

SEQ ID NO: 274352 - DNA, 20 bp, Artificial Sequence
  Description of Artificial Sequence: Synthetic oligonucleotide
  Target: LAMA2; (-) strand; PAM type: YTN; PAM sequence: TTT
ccattatttttctactgaaa

SEQ ID NO: 274353 - DNA, 20 bp, Artificial Sequence
  Description of Artificial Sequence: Synthetic oligonucleotide
  Target: LAMA2; (-) strand; PAM type: YTN; PAM sequence: TTA
tttccattatttttctactg

SEQ ID NO: 274354 - DNA, 20 bp, Artificial Sequence
  Description of Artificial Sequence: Synthetic oligonucleotide
  Target: LAMA2; (-) strand; PAM type: YTN; PAM sequence: TTT
atttccattatttttctact

SEQ ID NO: 274355 - DNA, 20 bp, Artificial Sequence
  Description of Artificial Sequence: Synthetic oligonucleotide
  Target: LAMA2; (-) strand; PAM type: YTN; PAM sequence: TTT
tatttccattatttttctac

SEQ ID NO: 274356 - DNA, 20 bp, Artificial Sequence
  Description of Artificial Sequence: Synthetic oligonucleotide
  Target: LAMA2; (-) strand; PAM type: YTN; PAM sequence: TTT
ttatttccattatttttcta

SEQ ID NO: 274357 - DNA, 20 bp, Artificial Sequence
  Description of Artificial Sequence: Synthetic oligonucleotide
  Target: LAMA2; (-) strand; PAM type: YTN; PAM sequence: TTA
atttttatttccattatttt

SEQ ID NO: 274358 - DNA, 20 bp, Artificial Sequence
  Description of Artificial Sequence: Synthetic oligonucleotide
  Target: LAMA2; (-) strand; PAM type: YTN; PAM sequence: TTT
aatttttatttccattattt

SEQ ID NO: 274359 - DNA, 20 bp, Artificial Sequence
  Description of Artificial Sequence: Synthetic oligonucleotide
  Target: LAMA2; (-) strand; PAM type: YTN; PAM sequence: CTA
gtttaatttttatttccatt

SEQ ID NO: 274360 - DNA, 20 bp, Artificial Sequence
  Description of Artificial Sequence: Synthetic oligonucleotide
  Target: LAMA2; (-) strand; PAM type: YTN; PAM sequence: CTG
tctagtttaatttttatttc

SEQ ID NO: 274361 - DNA, 20 bp, Artificial Sequence
  Description of Artificial Sequence: Synthetic oligonucleotide
  Target: LAMA2; (-) strand; PAM type: YTN; PAM sequence: TTG
tatggtgaactgtctagttt

SEQ ID NO: 274362 - DNA, 20 bp, Artificial Sequence
  Description of Artificial Sequence: Synthetic oligonucleotide
  Target: LAMA2; (-) strand; PAM type: YTN; PAM sequence: TTT
gtatggtgaactgtctagtt

SEQ ID NO: 274363 - DNA, 20 bp, Artificial Sequence
  Description of Artificial Sequence: Synthetic oligonucleotide
  Target: LAMA2; (-) strand; PAM type: YTN; PAM sequence: TTT
tgtatggtgaactgtctagt

SEQ ID NO: 274364 - DNA, 20 bp, Artificial Sequence
  Description of Artificial Sequence: Synthetic oligonucleotide
  Target: LAMA2; (-) strand; PAM type: YTN; PAM sequence: TTT
ttgtatggtgaactgtctag

SEQ ID NO: 274365 - DNA, 20 bp, Artificial Sequence
  Description of Artificial Sequence: Synthetic oligonucleotide
  Target: LAMA2; (-) strand; PAM type: YTN; PAM sequence: TTA
tttttgtatggtgaactgtc

SEQ ID NO: 274366 - DNA, 20 bp, Artificial Sequence
  Description of Artificial Sequence: Synthetic oligonucleotide
  Target: LAMA2; (-) strand; PAM type: YTN; PAM sequence: TTA
acattatttttgtatggtga

SEQ ID NO: 274367 - DNA, 20 bp, Artificial Sequence
  Description of Artificial Sequence: Synthetic oligonucleotide
  Target: LAMA2; (-) strand; PAM type: YTN; PAM sequence: TTT
aacattatttttgtatggtg

SEQ ID NO: 274368 - DNA, 20 bp, Artificial Sequence
  Description of Artificial Sequence: Synthetic oligonucleotide
  Target: LAMA2; (-) strand; PAM type: YTN; PAM sequence: CTC
atttaacattatttttgtat

SEQ ID NO: 274369 - DNA, 20 bp, Artificial Sequence
  Description of Artificial Sequence: Synthetic oligonucleotide
  Target: LAMA2; (-) strand; PAM type: YTN; PAM sequence: TTA
ccctcatttaacattatttt

SEQ ID NO: 274370 - DNA, 20 bp, Artificial Sequence
  Description of Artificial Sequence: Synthetic oligonucleotide
  Target: LAMA2; (-) strand; PAM type: YTN; PAM sequence: CTT
accctcatttaacattattt

SEQ ID NO: 274371 - DNA, 20 bp, Artificial Sequence
  Description of Artificial Sequence: Synthetic oligonucleotide
  Target: LAMA2; (-) strand; PAM type: YTN; PAM sequence: TTA
cttaccctcatttaacatta

SEQ ID NO: 274372 - DNA, 20 bp, Artificial Sequence
  Description of Artificial Sequence: Synthetic oligonucleotide
  Target: LAMA2; (-) strand; PAM type: YTN; PAM sequence: TTT
acttaccctcatttaacatt

SEQ ID NO: 274373 - DNA, 20 bp, Artificial Sequence
  Description of Artificial Sequence: Synthetic oligonucleotide
  Target: LAMA2; (-) strand; PAM type: YTN; PAM sequence: CTT
tacttaccctcatttaacat

SEQ ID NO: 274374 - DNA, 20 bp, Artificial Sequence
  Description of Artificial Sequence: Synthetic oligonucleotide
  Target: LAMA2; (-) strand; PAM type: YTN; PAM sequence: CTG
cgctttacttaccctcattt

SEQ ID NO: 274375 - DNA, 20 bp, Artificial Sequence
  Description of Artificial Sequence: Synthetic oligonucleotide
  Target: LAMA2; (-) strand; PAM type: YTN; PAM sequence: TTC
actgcgctttacttaccctc

SEQ ID NO: 274376 - DNA, 20 bp, Artificial Sequence
  Description of Artificial Sequence: Synthetic oligonucleotide
  Target: LAMA2; (-) strand; PAM type: YTN; PAM sequence: TTT
cactgcgctttacttaccct

SEQ ID NO: 274377 - DNA, 20 bp, Artificial Sequence
  Description of Artificial Sequence: Synthetic oligonucleotide
  Target: LAMA2; (-) strand; PAM type: YTN; PAM sequence: TTA
tttcactgcgctttacttac

SEQ ID NO: 274378 - DNA, 20 bp, Artificial Sequence
  Description of Artificial Sequence: Synthetic oligonucleotide
  Target: LAMA2; (-) strand; PAM type: YTN; PAM sequence: TTC
cagattatttcactgcgctt

SEQ ID NO: 274379 - DNA, 20 bp, Artificial Sequence
  Description of Artificial Sequence: Synthetic oligonucleotide
  Target: LAMA2; (-) strand; PAM type: YTN; PAM sequence: TTT
ccagattatttcactgcgct

SEQ ID NO: 274380 - DNA, 20 bp, Artificial Sequence
  Description of Artificial Sequence: Synthetic oligonucleotide
  Target: LAMA2; (-) strand; PAM type: YTN; PAM sequence: TTT
tccagattatttcactgcgc

SEQ ID NO: 274381 - DNA, 20 bp, Artificial Sequence
  Description of Artificial Sequence: Synthetic oligonucleotide
  Target: LAMA2; (-) strand; PAM type: YTN; PAM sequence: TTA
ttttccagattatttcactg

SEQ ID NO: 274382 - DNA, 20 bp, Artificial Sequence
  Description of Artificial Sequence: Synthetic oligonucleotide
  Target: LAMA2; (-) strand; PAM type: YTN; PAM sequence: TTA
tagttattttccagattatt

SEQ ID NO: 274383 - DNA, 20 bp, Artificial Sequence
  Description of Artificial Sequence: Synthetic oligonucleotide
  Target: LAMA2; (-) strand; PAM type: YTN; PAM sequence: TTT
atagttattttccagattat

SEQ ID NO: 274384 - DNA, 20 bp, Artificial Sequence
  Description of Artificial Sequence: Synthetic oligonucleotide
  Target: LAMA2; (-) strand; PAM type: YTN; PAM sequence: TTT
tatagttattttccagatta

SEQ ID NO: 274385 - DNA, 20 bp, Artificial Sequence
  Description of Artificial Sequence: Synthetic oligonucleotide
  Target: LAMA2; (-) strand; PAM type: YTN; PAM sequence: TTA
aagttttatagttattttcc

SEQ ID NO: 274386 - DNA, 20 bp, Artificial Sequence
  Description of Artificial Sequence: Synthetic oligonucleotide
  Target: LAMA2; (-) strand; PAM type: YTN; PAM sequence: TTT
aaagttttatagttattttc

SEQ ID NO: 274387 - DNA, 20 bp, Artificial Sequence
  Description of Artificial Sequence: Synthetic oligonucleotide
  Target: LAMA2; (-) strand; PAM type: YTN; PAM sequence: TTT
taaagttttatagttatttt

SEQ ID NO: 274388 - DNA, 20 bp, Artificial Sequence
  Description of Artificial Sequence: Synthetic oligonucleotide
  Target: LAMA2; (-) strand; PAM type: YTN; PAM sequence: TTA
gtgttttaaagttttatagt

SEQ ID NO: 274389 - DNA, 20 bp, Artificial Sequence
  Description of Artificial Sequence: Synthetic oligonucleotide
  Target: LAMA2; (-) strand; PAM type: YTN; PAM sequence: TTA
ttagtgttttaaagttttat

SEQ ID NO: 274390 - DNA, 20 bp, Artificial Sequence
  Description of Artificial Sequence: Synthetic oligonucleotide
  Target: LAMA2; (-) strand; PAM type: YTN; PAM sequence: TTA
ttattagtgttttaaagttt

SEQ ID NO: 274391 - DNA, 20 bp, Artificial Sequence
  Description of Artificial Sequence: Synthetic oligonucleotide
  Target: LAMA2; (-) strand; PAM type: YTN; PAM sequence: TTT
attattagtgttttaaagtt

SEQ ID NO: 274392 - DNA, 20 bp, Artificial Sequence
  Description of Artificial Sequence: Synthetic oligonucleotide
  Target: LAMA2; (-) strand; PAM type: YTN; PAM sequence: TTA
tttattattagtgttttaaa

SEQ ID NO: 274393 - DNA, 20 bp, Artificial Sequence
  Description of Artificial Sequence: Synthetic oligonucleotide
  Target: LAMA2; (-) strand; PAM type: YTN; PAM sequence: TTT
atttattattagtgttttaa

SEQ ID NO: 274394 - DNA, 20 bp, Artificial Sequence
  Description of Artificial Sequence: Synthetic oligonucleotide
  Target: LAMA2; (-) strand; PAM type: YTN; PAM sequence: TTG
gataacatttatttattatt

SEQ ID NO: 274395 - DNA, 20 bp, Artificial Sequence
  Description of Artificial Sequence: Synthetic oligonucleotide
  Target: LAMA2; (-) strand; PAM type: YTN; PAM sequence: TTT
ggataacatttatttattat

SEQ ID NO: 274396 - DNA, 20 bp, Artificial Sequence
  Description of Artificial Sequence: Synthetic oligonucleotide
  Target: LAMA2; (-) strand; PAM type: YTN; PAM sequence: TTA
atttggataacatttattta

SEQ ID NO: 274397 - DNA, 20 bp, Artificial Sequence
  Description of Artificial Sequence: Synthetic oligonucleotide
  Target: LAMA2; (-) strand; PAM type: YTN; PAM sequence: TTT
aatttggataacatttattt

SEQ ID NO: 274398 - DNA, 20 bp, Artificial Sequence
  Description of Artificial Sequence: Synthetic oligonucleotide
  Target: LAMA2; (-) strand; PAM type: YTN; PAM sequence: TTG
ccagtttaatttggataaca

SEQ ID NO: 274399 - DNA, 20 bp, Artificial Sequence
  Description of Artificial Sequence: Synthetic oligonucleotide
  Target: LAMA2; (-) strand; PAM type: YTN; PAM sequence: CTT
gccagtttaatttggataac

SEQ ID NO: 274400 - DNA, 20 bp, Artificial Sequence
  Description of Artificial Sequence: Synthetic oligonucleotide
  Target: LAMA2; (-) strand; PAM type: YTN; PAM sequence: TTA
aaacttgccagtttaatttg

SEQ ID NO: 274401 - DNA, 20 bp, Artificial Sequence
  Description of Artificial Sequence: Synthetic oligonucleotide
  Target: LAMA2; (-) strand; PAM type: YTN; PAM sequence: TTA
cacatggcccattaaaactt

SEQ ID NO: 274402 - DNA, 20 bp, Artificial Sequence
  Description of Artificial Sequence: Synthetic oligonucleotide
  Target: LAMA2; (-) strand; PAM type: YTN; PAM sequence: CTC
atcgggacacagataaatta

SEQ ID NO: 274403 - DNA, 20 bp, Artificial Sequence
  Description of Artificial Sequence: Synthetic oligonucleotide
  Target: LAMA2; (-) strand; PAM type: YTN; PAM sequence: TTG
gagaaaaatatggcctcatc

SEQ ID NO: 274404 - DNA, 20 bp, Artificial Sequence
  Description of Artificial Sequence: Synthetic oligonucleotide
  Target: LAMA2; (-) strand; PAM type: YTN; PAM sequence: TTT
ggagaaaaatatggcctcat

SEQ ID NO: 274405 - DNA, 20 bp, Artificial Sequence
  Description of Artificial Sequence: Synthetic oligonucleotide
  Target: LAMA2; (-) strand; PAM type: YTN; PAM sequence: TTT
tggagaaaaatatggcctca

SEQ ID NO: 274406 - DNA, 20 bp, Artificial Sequence
  Description of Artificial Sequence: Synthetic oligonucleotide
  Target: LAMA2; (-) strand; PAM type: YTN; PAM sequence: TTA
gatatgggttttggagaaaa

SEQ ID NO: 274407 - DNA, 20 bp, Artificial Sequence
  Description of Artificial Sequence: Synthetic oligonucleotide
  Target: LAMA2; (-) strand; PAM type: YTN; PAM sequence: TTT
agatatgggttttggagaaa

SEQ ID NO: 274408 - DNA, 20 bp, Artificial Sequence
  Description of Artificial Sequence: Synthetic oligonucleotide
  Target: LAMA2; (-) strand; PAM type: YTN; PAM sequence: TTT
tagatatgggttttggagaa

SEQ ID NO: 274409 - DNA, 20 bp, Artificial Sequence
  Description of Artificial Sequence: Synthetic oligonucleotide
  Target: LAMA2; (-) strand; PAM type: YTN; PAM sequence: TTA
tgaaaaacaaattttagata

SEQ ID NO: 274410 - DNA, 20 bp, Artificial Sequence
  Description of Artificial Sequence: Synthetic oligonucleotide
  Target: LAMA2; (-) strand; PAM type: YTN; PAM sequence: TTC
attatgaaaaacaaatttta

SEQ ID NO: 274411 - DNA, 20 bp, Artificial Sequence
  Description of Artificial Sequence: Synthetic oligonucleotide
  Target: LAMA2; (-) strand; PAM type: YTN; PAM sequence: CTT
cattatgaaaaacaaatttt

SEQ ID NO: 274412 - DNA, 20 bp, Artificial Sequence
  Description of Artificial Sequence: Synthetic oligonucleotide
  Target: LAMA2; (-) strand; PAM type: YTN; PAM sequence: TTA
tcttcattatgaaaaacaaa

SEQ ID NO: 274413 - DNA, 20 bp, Artificial Sequence
  Description of Artificial Sequence: Synthetic oligonucleotide
  Target: LAMA2; (-) strand; PAM type: YTN; PAM sequence: TTT
atcttcattatgaaaaacaa

SEQ ID NO: 274414 - DNA, 20 bp, Artificial Sequence
  Description of Artificial Sequence: Synthetic oligonucleotide
  Target: LAMA2; (-) strand; PAM type: YTN; PAM sequence: CTT
tatcttcattatgaaaaaca

SEQ ID NO: 274415 - DNA, 20 bp, Artificial Sequence
  Description of Artificial Sequence: Synthetic oligonucleotide
  Target: LAMA2; (-) strand; PAM type: YTN; PAM sequence: CTA
ctttatcttcattatgaaaa

SEQ ID NO: 274416 - DNA, 20 bp, Artificial Sequence
  Description of Artificial Sequence: Synthetic oligonucleotide
  Target: LAMA2; (-) strand; PAM type: YTN; PAM sequence: TTG
gtatgtgtgctactttatct

SEQ ID NO: 274417 - DNA, 20 bp, Artificial Sequence
  Description of Artificial Sequence: Synthetic oligonucleotide
  Target: LAMA2; (-) strand; PAM type: YTN; PAM sequence: TTT
ggtatgtgtgctactttatc

SEQ ID NO: 274418 - DNA, 20 bp, Artificial Sequence
  Description of Artificial Sequence: Synthetic oligonucleotide
  Target: LAMA2; (-) strand; PAM type: YTN; PAM sequence: TTT
tggtatgtgtgctactttat

SEQ ID NO: 274419 - DNA, 20 bp, Artificial Sequence
  Description of Artificial Sequence: Synthetic oligonucleotide
  Target: LAMA2; (-) strand; PAM type: YTN; PAM sequence: TTT
ttggtatgtgtgctacttta

SEQ ID NO: 274420 - DNA, 20 bp, Artificial Sequence
  Description of Artificial Sequence: Synthetic oligonucleotide
  Target: LAMA2; (-) strand; PAM type: YTN; PAM sequence: TTC
aaatgggtttttggtatgtg

SEQ ID NO: 274421 - DNA, 20 bp, Artificial Sequence
  Description of Artificial Sequence: Synthetic oligonucleotide
  Target: LAMA2; (-) strand; PAM type: YTN; PAM sequence: TTT
caaatgggtttttggtatgt

SEQ ID NO: 274422 - DNA, 20 bp, Artificial Sequence
  Description of Artificial Sequence: Synthetic oligonucleotide
  Target: LAMA2; (-) strand; PAM type: YTN; PAM sequence: CTT
tcaaatgggtttttggtatg

SEQ ID NO: 274423 - DNA, 20 bp, Artificial Sequence
  Description of Artificial Sequence: Synthetic oligonucleotide
  Target: LAMA2; (-) strand; PAM type: YTN; PAM sequence: TTA
aatgagagcatctttcaaat

SEQ ID NO: 274424 - DNA, 20 bp, Artificial Sequence
  Description of Artificial Sequence: Synthetic oligonucleotide
  Target: LAMA2; (-) strand; PAM type: YTN; PAM sequence: TTG
gattaaatgagagcatcttt

SEQ ID NO: 274425 - DNA, 20 bp, Artificial Sequence
  Description of Artificial Sequence: Synthetic oligonucleotide
  Target: LAMA2; (-) strand; PAM type: YTN; PAM sequence: TTT
ggattaaatgagagcatctt

SEQ ID NO: 274426 - DNA, 20 bp, Artificial Sequence
  Description of Artificial Sequence: Synthetic oligonucleotide
  Target: LAMA2; (-) strand; PAM type: YTN; PAM sequence: TTT
tggattaaatgagagcatct

SEQ ID NO: 274427 - DNA, 20 bp, Artificial Sequence
  Description of Artificial Sequence: Synthetic oligonucleotide
  Target: LAMA2; (-) strand; PAM type: YTN; PAM sequence: TTT
ttggattaaatgagagcatc

SEQ ID NO: 274428 - DNA, 20 bp, Artificial Sequence
  Description of Artificial Sequence: Synthetic oligonucleotide
  Target: LAMA2; (-) strand; PAM type: YTN; PAM sequence: CTT
tttggattaaatgagagcat

SEQ ID NO: 274429 - DNA, 20 bp, Artificial Sequence
  Description of Artificial Sequence: Synthetic oligonucleotide
  Target: LAMA2; (-) strand; PAM type: YTN; PAM sequence: TTC
agtatctttttggattaaat

SEQ ID NO: 274430 - DNA, 20 bp, Artificial Sequence
  Description of Artificial Sequence: Synthetic oligonucleotide
  Target: LAMA2; (-) strand; PAM type: YTN; PAM sequence: CTT
cagtatctttttggattaaa

SEQ ID NO: 274431 - DNA, 20 bp, Artificial Sequence
  Description of Artificial Sequence: Synthetic oligonucleotide
  Target: LAMA2; (-) strand; PAM type: YTN; PAM sequence: CTC
cccaaaatggacatgggcct

SEQ ID NO: 274432 - DNA, 20 bp, Artificial Sequence
  Description of Artificial Sequence: Synthetic oligonucleotide
  Target: LAMA2; (-) strand; PAM type: YTN; PAM sequence: TTA
tgtaaaaaaaatacaagctc

SEQ ID NO: 274433 - DNA, 20 bp, Artificial Sequence
  Description of Artificial Sequence: Synthetic oligonucleotide
  Target: LAMA2; (-) strand; PAM type: YTN; PAM sequence: TTG
caacccatgttatgtaaaaa

SEQ ID NO: 274434 - DNA, 20 bp, Artificial Sequence
  Description of Artificial Sequence: Synthetic oligonucleotide
  Target: LAMA2; (-) strand; PAM type: YTN; PAM sequence: TTG
ttgcaacccatgttatgtaa

SEQ ID NO: 274435 - DNA, 20 bp, Artificial Sequence
  Description of Artificial Sequence: Synthetic oligonucleotide
  Target: LAMA2; (-) strand; PAM type: YTN; PAM sequence: TTT
gttgcaacccatgttatgta

SEQ ID NO: 274436 - DNA, 20 bp, Artificial Sequence
  Description of Artificial Sequence: Synthetic oligonucleotide
  Target: LAMA2; (-) strand; PAM type: YTN; PAM sequence: TTT
tgttgcaacccatgttatgt

SEQ ID NO: 274437 - DNA, 20 bp, Artificial Sequence
  Description of Artificial Sequence: Synthetic oligonucleotide
  Target: LAMA2; (-) strand; PAM type: YTN; PAM sequence: TTT
ttgttgcaacccatgttatg

SEQ ID NO: 274438 - DNA, 20 bp, Artificial Sequence
  Description of Artificial Sequence: Synthetic oligonucleotide
  Target: LAMA2; (-) strand; PAM type: YTN; PAM sequence: CTT
tttgttgcaacccatgttat

SEQ ID NO: 274439 - DNA, 20 bp, Artificial Sequence
  Description of Artificial Sequence: Synthetic oligonucleotide
  Target: LAMA2; (-) strand; PAM type: YTN; PAM sequence: TTC
catggccagctttttgttgc

SEQ ID NO: 274440 - DNA, 20 bp, Artificial Sequence
  Description of Artificial Sequence: Synthetic oligonucleotide
  Target: LAMA2; (-) strand; PAM type: YTN; PAM sequence: CTA
ttccatggccagctttttgt

SEQ ID NO: 274441 - DNA, 20 bp, Artificial Sequence
  Description of Artificial Sequence: Synthetic oligonucleotide
  Target: LAMA2; (-) strand; PAM type: YTN; PAM sequence: CTG
ctattccatggccagctttt

SEQ ID NO: 274442 - DNA, 20 bp, Artificial Sequence
  Description of Artificial Sequence: Synthetic oligonucleotide
  Target: LAMA2; (-) strand; PAM type: YTN; PAM sequence: TTA
tggaataaactgctattcca

SEQ ID NO: 274443 - DNA, 20 bp, Artificial Sequence
  Description of Artificial Sequence: Synthetic oligonucleotide
  Target: LAMA2; (-) strand; PAM type: YTN; PAM sequence: CTT
atggaataaactgctattcc

SEQ ID NO: 274444 - DNA, 20 bp, Artificial Sequence
  Description of Artificial Sequence: Synthetic oligonucleotide
  Target: LAMA2; (-) strand; PAM type: YTN; PAM sequence: CTG
cttatggaataaactgctat

SEQ ID NO: 274445 - DNA, 20 bp, Artificial Sequence
  Description of Artificial Sequence: Synthetic oligonucleotide
  Target: LAMA2; (-) strand; PAM type: YTN; PAM sequence: TTG
gctgcttatggaataaactg

SEQ ID NO: 274446 - DNA, 20 bp, Artificial Sequence
  Description of Artificial Sequence: Synthetic oligonucleotide
  Target: LAMA2; (-) strand; PAM type: YTN; PAM sequence: TTA
gcaaatatattggctgctta

SEQ ID NO: 274447 - DNA, 20 bp, Artificial Sequence
  Description of Artificial Sequence: Synthetic oligonucleotide
  Target: LAMA2; (-) strand; PAM type: YTN; PAM sequence: TTT
agcaaatatattggctgctt

SEQ ID NO: 274448 - DNA, 20 bp, Artificial Sequence
  Description of Artificial Sequence: Synthetic oligonucleotide
  Target: LAMA2; (-) strand; PAM type: YTN; PAM sequence: TTT
tagcaaatatattggctgct

SEQ ID NO: 274449 - DNA, 20 bp, Artificial Sequence
  Description of Artificial Sequence: Synthetic oligonucleotide
  Target: LAMA2; (-) strand; PAM type: YTN; PAM sequence: TTA
ggaccaaaagaacaaacatt

SEQ ID NO: 274450 - DNA, 20 bp, Artificial Sequence
  Description of Artificial Sequence: Synthetic oligonucleotide
  Target: LAMA2; (-) strand; PAM type: YTN; PAM sequence: TTC
aatgtggttaggaccaaaag

SEQ ID NO: 274451 - DNA, 20 bp, Artificial Sequence
  Description of Artificial Sequence: Synthetic oligonucleotide
  Target: LAMA2; (-) strand; PAM type: YTN; PAM sequence: TTT
caatgtggttaggaccaaaa

SEQ ID NO: 274452 - DNA, 20 bp, Artificial Sequence
  Description of Artificial Sequence: Synthetic oligonucleotide
  Target: LAMA2; (-) strand; PAM type: YTN; PAM sequence: TTG
aaatagtcccagaagatttc

SEQ ID NO: 274453 - DNA, 20 bp, Artificial Sequence
  Description of Artificial Sequence: Synthetic oligonucleotide
  Target: LAMA2; (-) strand; PAM type: YTN; PAM sequence: TTA
ttgaaatagtcccagaagat

SEQ ID NO: 274454 - DNA, 20 bp, Artificial Sequence
  Description of Artificial Sequence: Synthetic oligonucleotide
  Target: LAMA2; (-) strand; PAM type: YTN; PAM sequence: CTG
ttattgaaatagtcccagaa

SEQ ID NO: 274455 - DNA, 20 bp, Artificial Sequence
  Description of Artificial Sequence: Synthetic oligonucleotide
  Target: LAMA2; (-) strand; PAM type: YTN; PAM sequence: TTA
ctgttattgaaatagtccca

SEQ ID NO: 274456 - DNA, 20 bp, Artificial Sequence
  Description of Artificial Sequence: Synthetic oligonucleotide
  Target: LAMA2; (-) strand; PAM type: YTN; PAM sequence: TTG
caattactgttattgaaata

SEQ ID NO: 274457 - DNA, 20 bp, Artificial Sequence
  Description of Artificial Sequence: Synthetic oligonucleotide
  Target: LAMA2; (-) strand; PAM type: YTN; PAM sequence: TTG
ttgcaattactgttattgaa

SEQ ID NO: 274458 - DNA, 20 bp, Artificial Sequence
  Description of Artificial Sequence: Synthetic oligonucleotide
  Target: LAMA2; (-) strand; PAM type: YTN; PAM sequence: TTA
tcaattgttgcaattactgt

SEQ ID NO: 274459 - DNA, 20 bp, Artificial Sequence
  Description of Artificial Sequence: Synthetic oligonucleotide
  Target: LAMA2; (-) strand; PAM type: YTN; PAM sequence: TTG
gatattatcaattgttgcaa

SEQ ID NO: 274460 - DNA, 20 bp, Artificial Sequence
  Description of Artificial Sequence: Synthetic oligonucleotide
  Target: LAMA2; (-) strand; PAM type: YTN; PAM sequence: TTC
cagttggatattatcaattg

SEQ ID NO: 274461 - DNA, 20 bp, Artificial Sequence
  Description of Artificial Sequence: Synthetic oligonucleotide
  Target: LAMA2; (-) strand; PAM type: YTN; PAM sequence: TTT
ccagttggatattatcaatt

SEQ ID NO: 274462 - DNA, 20 bp, Artificial Sequence
  Description of Artificial Sequence: Synthetic oligonucleotide
  Target: LAMA2; (-) strand; PAM type: YTN; PAM sequence: TTT
tccagttggatattatcaat

SEQ ID NO: 274463 - DNA, 20 bp, Artificial Sequence
  Description of Artificial Sequence: Synthetic oligonucleotide
  Target: LAMA2; (-) strand; PAM type: YTN; PAM sequence: TTT
ttccagttggatattatcaa

SEQ ID NO: 274464 - DNA, 20 bp, Artificial Sequence
  Description of Artificial Sequence: Synthetic oligonucleotide
  Target: LAMA2; (-) strand; PAM type: YTN; PAM sequence: TTT
tttccagttggatattatca

SEQ ID NO: 274465 - DNA, 20 bp, Artificial Sequence
  Description of Artificial Sequence: Synthetic oligonucleotide
  Target: LAMA2; (-) strand; PAM type: YTN; PAM sequence: TTT
ttttccagttggatattatc

SEQ ID NO: 274466 - DNA, 20 bp, Artificial Sequence
  Description of Artificial Sequence: Synthetic oligonucleotide
  Target: LAMA2; (-) strand; PAM type: YTN; PAM sequence: TTT
tttttccagttggatattat

SEQ ID NO: 274467 - DNA, 20 bp, Artificial Sequence
  Description of Artificial Sequence: Synthetic oligonucleotide
  Target: LAMA2; (-) strand; PAM type: YTN; PAM sequence: TTT
ttttttccagttggatatta

SEQ ID NO: 274468 - DNA, 20 bp, Artificial Sequence
  Description of Artificial Sequence: Synthetic oligonucleotide
  Target: LAMA2; (-) strand; PAM type: YTN; PAM sequence: TTT
tttttttccagttggatatt

SEQ ID NO: 274469 - DNA, 20 bp, Artificial Sequence
  Description of Artificial Sequence: Synthetic oligonucleotide
  Target: LAMA2; (-) strand; PAM type: YTN; PAM sequence: TTT
ttttttttccagttggatat

SEQ ID NO: 274470 - DNA, 20 bp, Artificial Sequence
  Description of Artificial Sequence: Synthetic oligonucleotide
  Target: LAMA2; (-) strand; PAM type: YTN; PAM sequence: TTG
tttttttttttccagttgga

SEQ ID NO: 274471 - DNA, 20 bp, Artificial Sequence
  Description of Artificial Sequence: Synthetic oligonucleotide
  Target: LAMA2; (-) strand; PAM type: YTN; PAM sequence: CTC
agtcatgaggttgttttttt

SEQ ID NO: 274472 - DNA, 20 bp, Artificial Sequence
  Description of Artificial Sequence: Synthetic oligonucleotide
  Target: LAMA2; (-) strand; PAM type: YTN; PAM sequence: CTG
tgcagctcagtcatgaggtt

SEQ ID NO: 274473 - DNA, 20 bp, Artificial Sequence
  Description of Artificial Sequence: Synthetic oligonucleotide
  Target: LAMA2; (-) strand; PAM type: YTN; PAM sequence: CTA
taggacatcactgtgcagct

SEQ ID NO: 274474 - DNA, 20 bp, Artificial Sequence
  Description of Artificial Sequence: Synthetic oligonucleotide
  Target: LAMA2; (-) strand; PAM type: YTN; PAM sequence: TTC
tataggacatcactgtgcag

SEQ ID NO: 274475 - DNA, 20 bp, Artificial Sequence
  Description of Artificial Sequence: Synthetic oligonucleotide
  Target: LAMA2; (-) strand; PAM type: YTN; PAM sequence: TTT
ctataggacatcactgtgca

SEQ ID NO: 274476 - DNA, 20 bp, Artificial Sequence
  Description of Artificial Sequence: Synthetic oligonucleotide
  Target: LAMA2; (-) strand; PAM type: YTN; PAM sequence: TTA
aagtaaaaaggaaaataaaa

SEQ ID NO: 274477 - DNA, 20 bp, Artificial Sequence
  Description of Artificial Sequence: Synthetic oligonucleotide
  Target: LAMA2; (-) strand; PAM type: YTN; PAM sequence: CTT
aaagtaaaaaggaaaataaa

SEQ ID NO: 274478 - DNA, 20 bp, Artificial Sequence
  Description of Artificial Sequence: Synthetic oligonucleotide
  Target: LAMA2; (-) strand; PAM type: YTN; PAM sequence: CTG
tgcatgcatcccagaactta

SEQ ID NO: 274479 - DNA, 20 bp, Artificial Sequence
  Description of Artificial Sequence: Synthetic oligonucleotide
  Target: LAMA2; (-) strand; PAM type: YTN; PAM sequence: TTC
tgtgcatgcatcccagaact

SEQ ID NO: 274480 - DNA, 20 bp, Artificial Sequence
  Description of Artificial Sequence: Synthetic oligonucleotide
  Target: LAMA2; (-) strand; PAM type: YTN; PAM sequence: CTG
aacattctgtgcatgcatcc

SEQ ID NO: 274481 - DNA, 20 bp, Artificial Sequence
  Description of Artificial Sequence: Synthetic oligonucleotide
  Target: LAMA2; (-) strand; PAM type: YTN; PAM sequence: CTA
tgcaacaaacctgaacattc

SEQ ID NO: 274482 - DNA, 20 bp, Artificial Sequence
  Description of Artificial Sequence: Synthetic oligonucleotide
  Target: LAMA2; (-) strand; PAM type: YTN; PAM sequence: TTG
ataggtgcagcaaaccacca

SEQ ID NO: 274483 - DNA, 20 bp, Artificial Sequence
  Description of Artificial Sequence: Synthetic oligonucleotide
  Target: LAMA2; (-) strand; PAM type: YTN; PAM sequence: TTG
atgggttgataggtgcagca

SEQ ID NO: 274484 - DNA, 20 bp, Artificial Sequence
  Description of Artificial Sequence: Synthetic oligonucleotide
  Target: LAMA2; (-) strand; PAM type: YTN; PAM sequence: TTT
gatgggttgataggtgcagc

SEQ ID NO: 274485 - DNA, 20 bp, Artificial Sequence
  Description of Artificial Sequence: Synthetic oligonucleotide
  Target: LAMA2; (-) strand; PAM type: YTN; PAM sequence: TTT
tgatgggttgataggtgcag

SEQ ID NO: 274486 - DNA, 20 bp, Artificial Sequence
  Description of Artificial Sequence: Synthetic oligonucleotide
  Target: LAMA2; (-) strand; PAM type: YTN; PAM sequence: CTT
ttgatgggttgataggtgca

SEQ ID NO: 274487 - DNA, 20 bp, Artificial Sequence
  Description of Artificial Sequence: Synthetic oligonucleotide
  Target: LAMA2; (-) strand; PAM type: YTN; PAM sequence: TTC
ttttgatgggttgataggtg

SEQ ID NO: 274488 - DNA, 20 bp, Artificial Sequence
  Description of Artificial Sequence: Synthetic oligonucleotide
  Target: LAMA2; (-) strand; PAM type: YTN; PAM sequence: CTT
cttttgatgggttgataggt

SEQ ID NO: 274489 - DNA, 20 bp, Artificial Sequence
  Description of Artificial Sequence: Synthetic oligonucleotide
  Target: LAMA2; (-) strand; PAM type: YTN; PAM sequence: CTG
cataaatgtcttcttttgat

SEQ ID NO: 274490 - DNA, 20 bp, Artificial Sequence
  Description of Artificial Sequence: Synthetic oligonucleotide
  Target: LAMA2; (-) strand; PAM type: YTN; PAM sequence: TTG
gctgcataaatgtcttcttt

SEQ ID NO: 274491 - DNA, 20 bp, Artificial Sequence
  Description of Artificial Sequence: Synthetic oligonucleotide
  Target: LAMA2; (-) strand; PAM type: YTN; PAM sequence: TTG
ttggctgcataaatgtcttc

SEQ ID NO: 274492 - DNA, 20 bp, Artificial Sequence
  Description of Artificial Sequence: Synthetic oligonucleotide
  Target: LAMA2; (-) strand; PAM type: YTN; PAM sequence: TTT
gttggctgcataaatgtctt

SEQ ID NO: 274493 - DNA, 20 bp, Artificial Sequence
  Description of Artificial Sequence: Synthetic oligonucleotide
  Target: LAMA2; (-) strand; PAM type: YTN; PAM sequence: TTC
atatgtttgttggctgcata

SEQ ID NO: 274494 - DNA, 20 bp, Artificial Sequence
  Description of Artificial Sequence: Synthetic oligonucleotide
  Target: LAMA2; (-) strand; PAM type: YTN; PAM sequence: TTT
catatgtttgttggctgcat

SEQ ID NO: 274495 - DNA, 20 bp, Artificial Sequence
  Description of Artificial Sequence: Synthetic oligonucleotide
  Target: LAMA2; (-) strand; PAM type: YTN; PAM sequence: TTT
tcatatgtttgttggctgca

SEQ ID NO: 274496 - DNA, 20 bp, Artificial Sequence
  Description of Artificial Sequence: Synthetic oligonucleotide
  Target: LAMA2; (-) strand; PAM type: YTN; PAM sequence: TTT
ttcatatgtttgttggctgc

SEQ ID NO: 274497 - DNA, 20 bp, Artificial Sequence
  Description of Artificial Sequence: Synthetic oligonucleotide
  Target: LAMA2; (-) strand; PAM type: YTN; PAM sequence: TTT
tttcatatgtttgttggctg

SEQ ID NO: 274498 - DNA, 20 bp, Artificial Sequence
  Description of Artificial Sequence: Synthetic oligonucleotide
  Target: LAMA2; (-) strand; PAM type: YTN; PAM sequence: CTT
ttttcatatgtttgttggct

SEQ ID NO: 274499 - DNA, 20 bp, Artificial Sequence
  Description of Artificial Sequence: Synthetic oligonucleotide
  Target: LAMA2; (-) strand; PAM type: YTN; PAM sequence: CTA
atgatcagtggtgatgagct

SEQ ID NO: 274500 - DNA, 20 bp, Artificial Sequence
  Description of Artificial Sequence: Synthetic oligonucleotide
  Target: LAMA2; (-) strand; PAM type: YTN; PAM sequence: CTC
taatgatcagtggtgatgag

SEQ ID NO: 274501 - DNA, 20 bp, Artificial Sequence
  Description of Artificial Sequence: Synthetic oligonucleotide
  Target: LAMA2; (-) strand; PAM type: YTN; PAM sequence: TTC
tctaatgatcagtggtgatg

SEQ ID NO: 274502 - DNA, 20 bp, Artificial Sequence
  Description of Artificial Sequence: Synthetic oligonucleotide
  Target: LAMA2; (-) strand; PAM type: YTN; PAM sequence: TTT
ctctaatgatcagtggtgat

SEQ ID NO: 274503 - DNA, 20 bp, Artificial Sequence
  Description of Artificial Sequence: Synthetic oligonucleotide
  Target: LAMA2; (-) strand; PAM type: YTN; PAM sequence: TTG
catttctctaatgatcagtg

SEQ ID NO: 274504 - DNA, 20 bp, Artificial Sequence
  Description of Artificial Sequence: Synthetic oligonucleotide
  Target: LAMA2; (-) strand; PAM type: YTN; PAM sequence: CTT
gcatttctctaatgatcagt

SEQ ID NO: 274505 - DNA, 20 bp, Artificial Sequence
  Description of Artificial Sequence: Synthetic oligonucleotide
  Target: LAMA2; (-) strand; PAM type: YTN; PAM sequence: TTG
acttgcatttctctaatgat

SEQ ID NO: 274506 - DNA, 20 bp, Artificial Sequence
  Description of Artificial Sequence: Synthetic oligonucleotide
  Target: LAMA2; (-) strand; PAM type: YTN; PAM sequence: TTT
gacttgcatttctctaatga

SEQ ID NO: 274507 - DNA, 20 bp, Artificial Sequence
  Description of Artificial Sequence: Synthetic oligonucleotide
  Target: LAMA2; (-) strand; PAM type: YTN; PAM sequence: TTT
tgacttgcatttctctaatg

SEQ ID NO: 274508 - DNA, 20 bp, Artificial Sequence
  Description of Artificial Sequence: Synthetic oligonucleotide
  Target: LAMA2; (-) strand; PAM type: YTN; PAM sequence: TTG
tggttttgacttgcatttct

SEQ ID NO: 274509 - DNA, 20 bp, Artificial Sequence
  Description of Artificial Sequence: Synthetic oligonucleotide
  Target: LAMA2; (-) strand; PAM type: YTN; PAM sequence: CTC
attgtggttttgacttgcat

SEQ ID NO: 274510 - DNA, 20 bp, Artificial Sequence
  Description of Artificial Sequence: Synthetic oligonucleotide
  Target: LAMA2; (-) strand; PAM type: YTN; PAM sequence: TTA
tctcattgtggttttgactt

SEQ ID NO: 274511 - DNA, 20 bp, Artificial Sequence
  Description of Artificial Sequence: Synthetic oligonucleotide
  Target: LAMA2; (-) strand; PAM type: YTN; PAM sequence: CTG
gtgtcatatgttatctcatt

SEQ ID NO: 274512 - DNA, 20 bp, Artificial Sequence
  Description of Artificial Sequence: Synthetic oligonucleotide
  Target: LAMA2; (-) strand; PAM type: YTN; PAM sequence: CTG
actggtgtcatatgttatct

SEQ ID NO: 274513 - DNA, 20 bp, Artificial Sequence
  Description of Artificial Sequence: Synthetic oligonucleotide
  Target: LAMA2; (-) strand; PAM type: YTN; PAM sequence: TTA
ccaatctgactggtgtcata

SEQ ID NO: 274514 - DNA, 20 bp, Artificial Sequence
  Description of Artificial Sequence: Synthetic oligonucleotide
  Target: LAMA2; (-) strand; PAM type: YTN; PAM sequence: TTA
ataattaccaatctgactgg

SEQ ID NO: 274515 - DNA, 20 bp, Artificial Sequence
  Description of Artificial Sequence: Synthetic oligonucleotide
  Target: LAMA2; (-) strand; PAM type: YTN; PAM sequence: TTT
aataattaccaatctgactg

SEQ ID NO: 274516 - DNA, 20 bp, Artificial Sequence
  Description of Artificial Sequence: Synthetic oligonucleotide
  Target: LAMA2; (-) strand; PAM type: YTN; PAM sequence: TTT
taataattaccaatctgact

SEQ ID NO: 274517 - DNA, 20 bp, Artificial Sequence
  Description of Artificial Sequence: Synthetic oligonucleotide
  Target: LAMA2; (-) strand; PAM type: YTN; PAM sequence: TTT
ttaataattaccaatctgac

SEQ ID NO: 274518 - DNA, 20 bp, Artificial Sequence
  Description of Artificial Sequence: Synthetic oligonucleotide
  Target: LAMA2; (-) strand; PAM type: YTN; PAM sequence: CTT
tttaataattaccaatctga

SEQ ID NO: 274519 - DNA, 20 bp, Artificial Sequence
  Description of Artificial Sequence: Synthetic oligonucleotide
  Target: LAMA2; (-) strand; PAM type: YTN; PAM sequence: CTG
actttttaataattaccaat

SEQ ID NO: 274520 - DNA, 20 bp, Artificial Sequence
  Description of Artificial Sequence: Synthetic oligonucleotide
  Target: LAMA2; (-) strand; PAM type: YTN; PAM sequence: TTC
ctgactttttaataattacc

SEQ ID NO: 274521 - DNA, 20 bp, Artificial Sequence
  Description of Artificial Sequence: Synthetic oligonucleotide
  Target: LAMA2; (-) strand; PAM type: YTN; PAM sequence: TTT
cctgactttttaataattac

SEQ ID NO: 274522 - DNA, 20 bp, Artificial Sequence
  Description of Artificial Sequence: Synthetic oligonucleotide
  Target: LAMA2; (-) strand; PAM type: YTN; PAM sequence: TTG
tttcctgactttttaataat

SEQ ID NO: 274523 - DNA, 20 bp, Artificial Sequence
  Description of Artificial Sequence: Synthetic oligonucleotide
  Target: LAMA2; (-) strand; PAM type: YTN; PAM sequence: CTA
ttgtttcctgactttttaat

SEQ ID NO: 274524 - DNA, 20 bp, Artificial Sequence
  Description of Artificial Sequence: Synthetic oligonucleotide
  Target: LAMA2; (-) strand; PAM type: YTN; PAM sequence: TTG
ccagcatctattgtttcctg

SEQ ID NO: 274525 - DNA, 20 bp, Artificial Sequence
  Description of Artificial Sequence: Synthetic oligonucleotide
  Target: LAMA2; (-) strand; PAM type: YTN; PAM sequence: CTT
gccagcatctattgtttcct

SEQ ID NO: 274526 - DNA, 20 bp, Artificial Sequence
  Description of Artificial Sequence: Synthetic oligonucleotide
  Target: LAMA2; (-) strand; PAM type: YTN; PAM sequence: CTC
cacagccttgccagcatcta

SEQ ID NO: 274527 - DNA, 20 bp, Artificial Sequence
  Description of Artificial Sequence: Synthetic oligonucleotide
  Target: LAMA2; (-) strand; PAM type: YTN; PAM sequence: TTC
tccacagccttgccagcatc

SEQ ID NO: 274528 - DNA, 20 bp, Artificial Sequence
  Description of Artificial Sequence: Synthetic oligonucleotide
  Target: LAMA2; (-) strand; PAM type: YTN; PAM sequence: CTT
ctccacagccttgccagcat

SEQ ID NO: 274529 - DNA, 20 bp, Artificial Sequence
  Description of Artificial Sequence: Synthetic oligonucleotide
  Target: LAMA2; (-) strand; PAM type: YTN; PAM sequence: CTA
cttctccacagccttgccag

SEQ ID NO: 274530 - DNA, 20 bp, Artificial Sequence
  Description of Artificial Sequence: Synthetic oligonucleotide
  Target: LAMA2; (-) strand; PAM type: YTN; PAM sequence: TTC
tacttctccacagccttgcc

SEQ ID NO: 274531 - DNA, 20 bp, Artificial Sequence
  Description of Artificial Sequence: Synthetic oligonucleotide
  Target: LAMA2; (-) strand; PAM type: YTN; PAM sequence: TTT
ctacttctccacagccttgc

SEQ ID NO: 274532 - DNA, 20 bp, Artificial Sequence
  Description of Artificial Sequence: Synthetic oligonucleotide
  Target: LAMA2; (-) strand; PAM type: YTN; PAM sequence: TTC
ccaccaacagtgtaaaagtg

SEQ ID NO: 274533 - DNA, 20 bp, Artificial Sequence
  Description of Artificial Sequence: Synthetic oligonucleotide
  Target: LAMA2; (-) strand; PAM type: YTN; PAM sequence: TTA
cattcccaccaacagtgtaa

SEQ ID NO: 274534 - DNA, 20 bp, Artificial Sequence
  Description of Artificial Sequence: Synthetic oligonucleotide
  Target: LAMA2; (-) strand; PAM type: YTN; PAM sequence: TTT
acattcccaccaacagtgta

SEQ ID NO: 274535 - DNA, 20 bp, Artificial Sequence
  Description of Artificial Sequence: Synthetic oligonucleotide
  Target: LAMA2; (-) strand; PAM type: YTN; PAM sequence: CTA
atttacattcccaccaacag

SEQ ID NO: 274536 - DNA, 20 bp, Artificial Sequence
  Description of Artificial Sequence: Synthetic oligonucleotide
  Target: LAMA2; (-) strand; PAM type: YTN; PAM sequence: TTA
aactaatttacattcccacc

SEQ ID NO: 274537 - DNA, 20 bp, Artificial Sequence
  Description of Artificial Sequence: Synthetic oligonucleotide
  Target: LAMA2; (-) strand; PAM type: YTN; PAM sequence: TTC
cacaatggttaaactaattt

SEQ ID NO: 274538 - DNA, 20 bp, Artificial Sequence
  Description of Artificial Sequence: Synthetic oligonucleotide
  Target: LAMA2; (-) strand; PAM type: YTN; PAM sequence: CTT
ccacaatggttaaactaatt

SEQ ID NO: 274539 - DNA, 20 bp, Artificial Sequence
  Description of Artificial Sequence: Synthetic oligonucleotide
  Target: LAMA2; (-) strand; PAM type: YTN; PAM sequence: CTG
tcttccacaatggttaaact

SEQ ID NO: 274540 - DNA, 20 bp, Artificial Sequence
  Description of Artificial Sequence: Synthetic oligonucleotide
  Target: LAMA2; (-) strand; PAM type: YTN; PAM sequence: TTG
aggaatcgccacactgtctt

SEQ ID NO: 274541 - DNA, 20 bp, Artificial Sequence
  Description of Artificial Sequence: Synthetic oligonucleotide
  Target: LAMA2; (-) strand; PAM type: YTN; PAM sequence: CTT
gaggaatcgccacactgtct

SEQ ID NO: 274542 - DNA, 20 bp, Artificial Sequence
  Description of Artificial Sequence: Synthetic oligonucleotide
  Target: LAMA2; (-) strand; PAM type: YTN; PAM sequence: CTG
gatccttgaggaatcgccac

SEQ ID NO: 274543 - DNA, 20 bp, Artificial Sequence
  Description of Artificial Sequence: Synthetic oligonucleotide
  Target: LAMA2; (-) strand; PAM type: YTN; PAM sequence: TTC
tggatccttgaggaatcgcc

SEQ ID NO: 274544 - DNA, 20 bp, Artificial Sequence
  Description of Artificial Sequence: Synthetic oligonucleotide
  Target: LAMA2; (-) strand; PAM type: YTN; PAM sequence: CTG
gttctggatccttgaggaat

SEQ ID NO: 274545 - DNA, 20 bp, Artificial Sequence
  Description of Artificial Sequence: Synthetic oligonucleotide
  Target: LAMA2; (-) strand; PAM type: YTN; PAM sequence: TTC
tggttctggatccttgagga

SEQ ID NO: 274546 - DNA, 20 bp, Artificial Sequence
  Description of Artificial Sequence: Synthetic oligonucleotide
  Target: LAMA2; (-) strand; PAM type: YTN; PAM sequence: TTT
ctggttctggatccttgagg

SEQ ID NO: 274547 - DNA, 20 bp, Artificial Sequence
  Description of Artificial Sequence: Synthetic oligonucleotide
  Target: LAMA2; (-) strand; PAM type: YTN; PAM sequence: CTG
ggtcaaatggtatttctggt

SEQ ID NO: 274548 - DNA, 20 bp, Artificial Sequence
  Description of Artificial Sequence: Synthetic oligonucleotide
  Target: LAMA2; (-) strand; PAM type: YTN; PAM sequence: TTG
ctgggtcaaatggtatttct

SEQ ID NO: 274549 - DNA, 20 bp, Artificial Sequence
  Description of Artificial Sequence: Synthetic oligonucleotide
  Target: LAMA2; (-) strand; PAM type: YTN; PAM sequence: TTA
tggggttgctgggtcaaatg

SEQ ID NO: 274550 - DNA, 20 bp, Artificial Sequence
  Description of Artificial Sequence: Synthetic oligonucleotide
  Target: LAMA2; (-) strand; PAM type: YTN; PAM sequence: TTG
ggtatatacccagttatggg

SEQ ID NO: 274551 - DNA, 20 bp, Artificial Sequence
  Description of Artificial Sequence: Synthetic oligonucleotide
  Target: LAMA2; (-) strand; PAM type: YTN; PAM sequence: TTT
gggtatatacccagttatgg

SEQ ID NO: 274552 - DNA, 20 bp, Artificial Sequence
  Description of Artificial Sequence: Synthetic oligonucleotide
  Target: LAMA2; (-) strand; PAM type: YTN; PAM sequence: CTT
tgggtatatacccagttatg

SEQ ID NO: 274553 - DNA, 20 bp, Artificial Sequence
  Description of Artificial Sequence: Synthetic oligonucleotide
  Target: LAMA2; (-) strand; PAM type: YTN; PAM sequence: TTC
ctttgggtatatacccagtt

SEQ ID NO: 274554 - DNA, 20 bp, Artificial Sequence
  Description of Artificial Sequence: Synthetic oligonucleotide
  Target: LAMA2; (-) strand; PAM type: YTN; PAM sequence: TTA
tattcctttgggtatatacc

SEQ ID NO: 274555 - DNA, 20 bp, Artificial Sequence
  Description of Artificial Sequence: Synthetic oligonucleotide
  Target: LAMA2; (-) strand; PAM type: YTN; PAM sequence: TTT
atattcctttgggtatatac

SEQ ID NO: 274556 - DNA, 20 bp, Artificial Sequence
  Description of Artificial Sequence: Synthetic oligonucleotide
  Target: LAMA2; (-) strand; PAM type: YTN; PAM sequence: TTA
gagtagaatgatttatattc

SEQ ID NO: 274557 - DNA, 20 bp, Artificial Sequence
  Description of Artificial Sequence: Synthetic oligonucleotide
  Target: LAMA2; (-) strand; PAM type: YTN; PAM sequence: TTT
agagtagaatgatttatatt

SEQ ID NO: 274558 - DNA, 20 bp, Artificial Sequence
  Description of Artificial Sequence: Synthetic oligonucleotide
  Target: LAMA2; (-) strand; PAM type: YTN; PAM sequence: CTT
tagagtagaatgatttatat

SEQ ID NO: 274559 - DNA, 20 bp, Artificial Sequence
  Description of Artificial Sequence: Synthetic oligonucleotide
  Target: LAMA2; (-) strand; PAM type: YTN; PAM sequence: CTG
tatatgtgtctttagagtag

SEQ ID NO: 274560 - DNA, 20 bp, Artificial Sequence
  Description of Artificial Sequence: Synthetic oligonucleotide
  Target: LAMA2; (-) strand; PAM type: YTN; PAM sequence: TTG
caataaacatactgtatatg

SEQ ID NO: 274561 - DNA, 20 bp, Artificial Sequence
  Description of Artificial Sequence: Synthetic oligonucleotide
  Target: LAMA2; (-) strand; PAM type: YTN; PAM sequence: TTG
cataaatagtgttgcaataa

SEQ ID NO: 274562 - DNA, 20 bp, Artificial Sequence
  Description of Artificial Sequence: Synthetic oligonucleotide
  Target: LAMA2; (-) strand; PAM type: YTN; PAM sequence: TTT
gcataaatagtgttgcaata

SEQ ID NO: 274563 - DNA, 20 bp, Artificial Sequence
  Description of Artificial Sequence: Synthetic oligonucleotide
  Target: LAMA2; (-) strand; PAM type: YTN; PAM sequence: CTT
tgcataaatagtgttgcaat

SEQ ID NO: 274564 - DNA, 20 bp, Artificial Sequence
  Description of Artificial Sequence: Synthetic oligonucleotide
  Target: LAMA2; (-) strand; PAM type: YTN; PAM sequence: CTC
tttgcataaatagtgttgca

SEQ ID NO: 274565 - DNA, 20 bp, Artificial Sequence
  Description of Artificial Sequence: Synthetic oligonucleotide
  Target: LAMA2; (-) strand; PAM type: YTN; PAM sequence: TTC
catctctttgcataaatagt

SEQ ID NO: 274566 - DNA, 20 bp, Artificial Sequence
  Description of Artificial Sequence: Synthetic oligonucleotide
  Target: LAMA2; (-) strand; PAM type: YTN; PAM sequence: TTG
gttccatctctttgcataaa

SEQ ID NO: 274567 - DNA, 20 bp, Artificial Sequence
  Description of Artificial Sequence: Synthetic oligonucleotide
  Target: LAMA2; (-) strand; PAM type: YTN; PAM sequence: TTG
ggttggttccatctctttgc

SEQ ID NO: 274568 - DNA, 20 bp, Artificial Sequence
  Description of Artificial Sequence: Synthetic oligonucleotide
  Target: LAMA2; (-) strand; PAM type: YTN; PAM sequence: TTT
gggttggttccatctctttg

SEQ ID NO: 274569 - DNA, 20 bp, Artificial Sequence
  Description of Artificial Sequence: Synthetic oligonucleotide
  Target: LAMA2; (-) strand; PAM type: YTN; PAM sequence: TTG
atgggcatttgggttggttc

SEQ ID NO: 274570 - DNA, 20 bp, Artificial Sequence
  Description of Artificial Sequence: Synthetic oligonucleotide
  Target: LAMA2; (-) strand; PAM type: YTN; PAM sequence: CTA
tcattgatgggcatttgggt

SEQ ID NO: 274571 - DNA, 20 bp, Artificial Sequence
  Description of Artificial Sequence: Synthetic oligonucleotide
  Target: LAMA2; (-) strand; PAM type: YTN; PAM sequence: CTA
atctatcattgatgggcatt

SEQ ID NO: 274572 - DNA, 20 bp, Artificial Sequence
  Description of Artificial Sequence: Synthetic oligonucleotide
  Target: LAMA2; (-) strand; PAM type: YTN; PAM sequence: TTA
cctaatctatcattgatggg

SEQ ID NO: 274573 - DNA, 20 bp, Artificial Sequence
  Description of Artificial Sequence: Synthetic oligonucleotide
  Target: LAMA2; (-) strand; PAM type: YTN; PAM sequence: TTT
acctaatctatcattgatgg

SEQ ID NO: 274574 - DNA, 20 bp, Artificial Sequence
  Description of Artificial Sequence: Synthetic oligonucleotide
  Target: LAMA2; (-) strand; PAM type: YTN; PAM sequence: CTT
tacctaatctatcattgatg

SEQ ID NO: 274575 - DNA, 20 bp, Artificial Sequence
  Description of Artificial Sequence: Synthetic oligonucleotide
  Target: LAMA2; (-) strand; PAM type: YTN; PAM sequence: TTC
tttacctaatctatcattga

SEQ ID NO: 274576 - DNA, 20 bp, Artificial Sequence
  Description of Artificial Sequence: Synthetic oligonucleotide
  Target: LAMA2; (-) strand; PAM type: YTN; PAM sequence: TTT
ctttacctaatctatcattg

SEQ ID NO: 274577 - DNA, 20 bp, Artificial Sequence
  Description of Artificial Sequence: Synthetic oligonucleotide
  Target: LAMA2; (-) strand; PAM type: YTN; PAM sequence: TTT
tctttacctaatctatcatt

SEQ ID NO: 274578 - DNA, 20 bp, Artificial Sequence
  Description of Artificial Sequence: Synthetic oligonucleotide
  Target: LAMA2; (-) strand; PAM type: YTN; PAM sequence: TTC
catggtgtatatgtaccaca

SEQ ID NO: 274579 - DNA, 20 bp, Artificial Sequence
  Description of Artificial Sequence: Synthetic oligonucleotide
  Target: LAMA2; (-) strand; PAM type: YTN; PAM sequence: CTG
catagtattccatggtgtat

SEQ ID NO: 274580 - DNA, 20 bp, Artificial Sequence
  Description of Artificial Sequence: Synthetic oligonucleotide
  Target: LAMA2; (-) strand; PAM type: YTN; PAM sequence: TTA
tggctgcatagtattccatg

SEQ ID NO: 274581 - DNA, 20 bp, Artificial Sequence
  Description of Artificial Sequence: Synthetic oligonucleotide
  Target: LAMA2; (-) strand; PAM type: YTN; PAM sequence: TTT
atggctgcatagtattccat

SEQ ID NO: 274582 - DNA, 20 bp, Artificial Sequence
  Description of Artificial Sequence: Synthetic oligonucleotide
  Target: LAMA2; (-) strand; PAM type: YTN; PAM sequence: TTT
tatggctgcatagtattcca

SEQ ID NO: 274583 - DNA, 20 bp, Artificial Sequence
  Description of Artificial Sequence: Synthetic oligonucleotide
  Target: LAMA2; (-) strand; PAM type: YTN; PAM sequence: TTT
ttatggctgcatagtattcc

SEQ ID NO: 274584 - DNA, 20 bp, Artificial Sequence
  Description of Artificial Sequence: Synthetic oligonucleotide
  Target: LAMA2; (-) strand; PAM type: YTN; PAM sequence: TTT
tttatggctgcatagtattc

SEQ ID NO: 274585 - DNA, 20 bp, Artificial Sequence
  Description of Artificial Sequence: Synthetic oligonucleotide
  Target: LAMA2; (-) strand; PAM type: YTN; PAM sequence: CTT
ttttatggctgcatagtatt

SEQ ID NO: 274586 - DNA, 20 bp, Artificial Sequence
  Description of Artificial Sequence: Synthetic oligonucleotide
  Target: LAMA2; (-) strand; PAM type: YTN; PAM sequence: TTC
ttttttatggctgcatagta

SEQ ID NO: 274587 - DNA, 20 bp, Artificial Sequence
  Description of Artificial Sequence: Synthetic oligonucleotide
  Target: LAMA2; (-) strand; PAM type: YTN; PAM sequence: CTG
caaaggacatgatatcattc

SEQ ID NO: 274588 - DNA, 20 bp, Artificial Sequence
  Description of Artificial Sequence: Synthetic oligonucleotide
  Target: LAMA2; (-) strand; PAM type: YTN; PAM sequence: TTC
atccatatccctgcaaagga

SEQ ID NO: 274589 - DNA, 20 bp, Artificial Sequence
  Description of Artificial Sequence: Synthetic oligonucleotide
  Target: LAMA2; (-) strand; PAM type: YTN; PAM sequence: CTT
catccatatccctgcaaagg

SEQ ID NO: 274590 - DNA, 20 bp, Artificial Sequence
  Description of Artificial Sequence: Synthetic oligonucleotide
  Target: LAMA2; (-) strand; PAM type: YTN; PAM sequence: TTC
agcttcatccatatccctgc

SEQ ID NO: 274591 - DNA, 20 bp, Artificial Sequence
  Description of Artificial Sequence: Synthetic oligonucleotide
  Target: LAMA2; (-) strand; PAM type: YTN; PAM sequence: TTT
cagcttcatccatatccctg

SEQ ID NO: 274592 - DNA, 20 bp, Artificial Sequence
  Description of Artificial Sequence: Synthetic oligonucleotide
  Target: LAMA2; (-) strand; PAM type: YTN; PAM sequence: CTT
tcagcttcatccatatccct

SEQ ID NO: 274593 - DNA, 20 bp, Artificial Sequence
  Description of Artificial Sequence: Synthetic oligonucleotide
  Target: LAMA2; (-) strand; PAM type: YTN; PAM sequence: CTG
aagctttcagcttcatccat

SEQ ID NO: 274594 - DNA, 20 bp, Artificial Sequence
  Description of Artificial Sequence: Synthetic oligonucleotide
  Target: LAMA2; (-) strand; PAM type: YTN; PAM sequence: CTG
aggatgctgaagctttcagc

SEQ ID NO: 274595 - DNA, 20 bp, Artificial Sequence
  Description of Artificial Sequence: Synthetic oligonucleotide
  Target: LAMA2; (-) strand; PAM type: YTN; PAM sequence: TTG
ctgaggatgctgaagctttc

SEQ ID NO: 274596 - DNA, 20 bp, Artificial Sequence
  Description of Artificial Sequence: Synthetic oligonucleotide
  Target: LAMA2; (-) strand; PAM type: YTN; PAM sequence: TTT
gctgaggatgctgaagcttt

SEQ ID NO: 274597 - DNA, 20 bp, Artificial Sequence
  Description of Artificial Sequence: Synthetic oligonucleotide
  Target: LAMA2; (-) strand; PAM type: YTN; PAM sequence: TTA
gtttgctgaggatgctgaag

SEQ ID NO: 274598 - DNA, 20 bp, Artificial Sequence
  Description of Artificial Sequence: Synthetic oligonucleotide
  Target: LAMA2; (-) strand; PAM type: YTN; PAM sequence: CTG
gattagtttgctgaggatgc

SEQ ID NO: 274599 - DNA, 20 bp, Artificial Sequence
  Description of Artificial Sequence: Synthetic oligonucleotide
  Target: LAMA2; (-) strand; PAM type: YTN; PAM sequence: TTC
ctggattagtttgctgagga

SEQ ID NO: 274600 - DNA, 20 bp, Artificial Sequence
  Description of Artificial Sequence: Synthetic oligonucleotide
  Target: LAMA2; (-) strand; PAM type: YTN; PAM sequence: TTC
cattcctggattagtttgct

SEQ ID NO: 274601 - DNA, 20 bp, Artificial Sequence
  Description of Artificial Sequence: Synthetic oligonucleotide
  Target: LAMA2; (-) strand; PAM type: YTN; PAM sequence: TTT
ccattcctggattagtttgc

SEQ ID NO: 274602 - DNA, 20 bp, Artificial Sequence
  Description of Artificial Sequence: Synthetic oligonucleotide
  Target: LAMA2; (-) strand; PAM type: YTN; PAM sequence: TTT
tccattcctggattagtttg

SEQ ID NO: 274603 - DNA, 20 bp, Artificial Sequence
  Description of Artificial Sequence: Synthetic oligonucleotide
  Target: LAMA2; (-) strand; PAM type: YTN; PAM sequence: TTG
gttttccattcctggattag

SEQ ID NO: 274604 - DNA, 20 bp, Artificial Sequence
  Description of Artificial Sequence: Synthetic oligonucleotide
  Target: LAMA2; (-) strand; PAM type: YTN; PAM sequence: TTT
ggttttccattcctggatta

SEQ ID NO: 274605 - DNA, 20 bp, Artificial Sequence
  Description of Artificial Sequence: Synthetic oligonucleotide
  Target: LAMA2; (-) strand; PAM type: YTN; PAM sequence: TTA
tgagcgagaacatgtggtgt

SEQ ID NO: 274606 - DNA, 20 bp, Artificial Sequence
  Description of Artificial Sequence: Synthetic oligonucleotide
  Target: LAMA2; (-) strand; PAM type: YTN; PAM sequence: CTT
atgagcgagaacatgtggtg

SEQ ID NO: 274607 - DNA, 20 bp, Artificial Sequence
  Description of Artificial Sequence: Synthetic oligonucleotide
  Target: LAMA2; (-) strand; PAM type: YTN; PAM sequence: CTC
ccacttatgagcgagaacat

SEQ ID NO: 274608 - DNA, 20 bp, Artificial Sequence
  Description of Artificial Sequence: Synthetic oligonucleotide
  Target: LAMA2; (-) strand; PAM type: YTN; PAM sequence: TTC
aactcccacttatgagcgag

SEQ ID NO: 274609 - DNA, 20 bp, Artificial Sequence
  Description of Artificial Sequence: Synthetic oligonucleotide
  Target: LAMA2; (-) strand; PAM type: YTN; PAM sequence: CTG
ttcaactcccacttatgagc

SEQ ID NO: 274610 - DNA, 20 bp, Artificial Sequence
  Description of Artificial Sequence: Synthetic oligonucleotide
  Target: LAMA2; (-) strand; PAM type: YTN; PAM sequence: CTC
actgttcaactcccacttat

SEQ ID NO: 274611 - DNA, 20 bp, Artificial Sequence
  Description of Artificial Sequence: Synthetic oligonucleotide
  Target: LAMA2; (-) strand; PAM type: YTN; PAM sequence: TTC
tcactgttcaactcccactt

SEQ ID NO: 274612 - DNA, 20 bp, Artificial Sequence
  Description of Artificial Sequence: Synthetic oligonucleotide
  Target: LAMA2; (-) strand; PAM type: YTN; PAM sequence: TTG
tccatgtgttctcactgttc

SEQ ID NO: 274613 - DNA, 20 bp, Artificial Sequence
  Description of Artificial Sequence: Synthetic oligonucleotide
  Target: LAMA2; (-) strand; PAM type: YTN; PAM sequence: CTT
gtccatgtgttctcactgtt

SEQ ID NO: 274614 - DNA, 20 bp, Artificial Sequence
  Description of Artificial Sequence: Synthetic oligonucleotide
  Target: LAMA2; (-) strand; PAM type: YTN; PAM sequence: CTC
cttgtccatgtgttctcact

SEQ ID NO: 274615 - DNA, 20 bp, Artificial Sequence
  Description of Artificial Sequence: Synthetic oligonucleotide
  Target: LAMA2; (-) strand; PAM type: YTN; PAM sequence: TTC
ccctccttgtccatgtgttc

SEQ ID NO: 274616 - DNA, 20 bp, Artificial Sequence
  Description of Artificial Sequence: Synthetic oligonucleotide
  Target: LAMA2; (-) strand; PAM type: YTN; PAM sequence: TTG
ttcccctccttgtccatgtg

SEQ ID NO: 274617 - DNA, 20 bp, Artificial Sequence
  Description of Artificial Sequence: Synthetic oligonucleotide
  Target: LAMA2; (-) strand; PAM type: YTN; PAM sequence: CTC
cagtgtgtgttgttcccctc

SEQ ID NO: 274618 - DNA, 20 bp, Artificial Sequence
  Description of Artificial Sequence: Synthetic oligonucleotide
  Target: LAMA2; (-) strand; PAM type: YTN; PAM sequence: CTC
cccacaacccccaatagact

SEQ ID NO: 274619 - DNA, 20 bp, Artificial Sequence
  Description of Artificial Sequence: Synthetic oligonucleotide
  Target: LAMA2; (-) strand; PAM type: YTN; PAM sequence: CTC
tccccacaacccccaataga

SEQ ID NO: 274620 - DNA, 20 bp, Artificial Sequence
  Description of Artificial Sequence: Synthetic oligonucleotide
  Target: LAMA2; (-) strand; PAM type: YTN; PAM sequence: TTC
ctctccccacaacccccaat

SEQ ID NO: 274621 - DNA, 20 bp, Artificial Sequence
  Description of Artificial Sequence: Synthetic oligonucleotide
  Target: LAMA2; (-) strand; PAM type: YTN; PAM sequence: TTT
cctctccccacaacccccaa

SEQ ID NO: 274622 - DNA, 20 bp, Artificial Sequence
  Description of Artificial Sequence: Synthetic oligonucleotide
  Target: LAMA2; (-) strand; PAM type: YTN; PAM sequence: TTT
tcctctccccacaaccccca

SEQ ID NO: 274623 - DNA, 20 bp, Artificial Sequence
  Description of Artificial Sequence: Synthetic oligonucleotide
  Target: LAMA2; (-) strand; PAM type: YTN; PAM sequence: CTT
ttcctctccccacaaccccc

SEQ ID NO: 274624 - DNA, 20 bp, Artificial Sequence
  Description of Artificial Sequence: Synthetic oligonucleotide
  Target: LAMA2; (-) strand; PAM type: YTN; PAM sequence: TTC
cttttcctctccccacaacc

SEQ ID NO: 274625 - DNA, 20 bp, Artificial Sequence
  Description of Artificial Sequence: Synthetic oligonucleotide
  Target: LAMA2; (-) strand; PAM type: YTN; PAM sequence: TTT
ccttttcctctccccacaac

SEQ ID NO: 274626 - DNA, 20 bp, Artificial Sequence
  Description of Artificial Sequence: Synthetic oligonucleotide
  Target: LAMA2; (-) strand; PAM type: YTN; PAM sequence: CTT
tccttttcctctccccacaa

SEQ ID NO: 274627 - DNA, 20 bp, Artificial Sequence
  Description of Artificial Sequence: Synthetic oligonucleotide
  Target: LAMA2; (-) strand; PAM type: YTN; PAM sequence: CTA
atgctttccttttcctctcc

SEQ ID NO: 274628 - DNA, 20 bp, Artificial Sequence
  Description of Artificial Sequence: Synthetic oligonucleotide
  Target: LAMA2; (-) strand; PAM type: YTN; PAM sequence: TTG
tcctaatgctttccttttcc

SEQ ID NO: 274629 - DNA, 20 bp, Artificial Sequence
  Description of Artificial Sequence: Synthetic oligonucleotide
  Target: LAMA2; (-) strand; PAM type: YTN; PAM sequence: TTT
gtcctaatgctttccttttc

SEQ ID NO: 274630 - DNA, 20 bp, Artificial Sequence
  Description of Artificial Sequence: Synthetic oligonucleotide
  Target: LAMA2; (-) strand; PAM type: YTN; PAM sequence: CTA
tttgtcctaatgctttcctt

SEQ ID NO: 274631 - DNA, 20 bp, Artificial Sequence
  Description of Artificial Sequence: Synthetic oligonucleotide
  Target: LAMA2; (-) strand; PAM type: YTN; PAM sequence: TTA
actatttgtcctaatgcttt

SEQ ID NO: 274632 - DNA, 20 bp, Artificial Sequence
  Description of Artificial Sequence: Synthetic oligonucleotide
  Target: LAMA2; (-) strand; PAM type: YTN; PAM sequence: CTC
atgcattaactatttgtcct

SEQ ID NO: 274633 - DNA, 20 bp, Artificial Sequence
  Description of Artificial Sequence: Synthetic oligonucleotide
  Target: LAMA2; (-) strand; PAM type: YTN; PAM sequence: TTA
aagcccctcatgcattaact

SEQ ID NO: 274634 - DNA, 20 bp, Artificial Sequence
  Description of Artificial Sequence: Synthetic oligonucleotide
  Target: LAMA2; (-) strand; PAM type: YTN; PAM sequence: TTT
aaagcccctcatgcattaac

SEQ ID NO: 274635 - DNA, 20 bp, Artificial Sequence
  Description of Artificial Sequence: Synthetic oligonucleotide
  Target: LAMA2; (-) strand; PAM type: YTN; PAM sequence: TTT
taaagcccctcatgcattaa

SEQ ID NO: 274636 - DNA, 20 bp, Artificial Sequence
  Description of Artificial Sequence: Synthetic oligonucleotide
  Target: LAMA2; (-) strand; PAM type: YTN; PAM sequence: CTA
ggttttaaagcccctcatgc

SEQ ID NO: 274637 - DNA, 20 bp, Artificial Sequence
  Description of Artificial Sequence: Synthetic oligonucleotide
  Target: LAMA2; (-) strand; PAM type: YTN; PAM sequence: TTA
caggagtgagccaccacgcc

SEQ ID NO: 274638 - DNA, 20 bp, Artificial Sequence
  Description of Artificial Sequence: Synthetic oligonucleotide
  Target: LAMA2; (-) strand; PAM type: YTN; PAM sequence: CTG
ggattacaggagtgagccac

SEQ ID NO: 274639 - DNA, 20 bp, Artificial Sequence
  Description of Artificial Sequence: Synthetic oligonucleotide
  Target: LAMA2; (-) strand; PAM type: YTN; PAM sequence: CTC
aaagtactgggattacagga

SEQ ID NO: 274640 - DNA, 20 bp, Artificial Sequence
  Description of Artificial Sequence: Synthetic oligonucleotide
  Target: LAMA2; (-) strand; PAM type: YTN; PAM sequence: CTC
tcaaagtactgggattacag

SEQ ID NO: 274641 - DNA, 20 bp, Artificial Sequence
  Description of Artificial Sequence: Synthetic oligonucleotide
  Target: LAMA2; (-) strand; PAM type: YTN; PAM sequence: TTG
gcctctcaaagtactgggat

SEQ ID NO: 274642 - DNA, 20 bp, Artificial Sequence
  Description of Artificial Sequence: Synthetic oligonucleotide
  Target: LAMA2; (-) strand; PAM type: YTN; PAM sequence: CTT
ggcctctcaaagtactggga

SEQ ID NO: 274643 - DNA, 20 bp, Artificial Sequence
  Description of Artificial Sequence: Synthetic oligonucleotide
  Target: LAMA2; (-) strand; PAM type: YTN; PAM sequence: CTG
ccttggcctctcaaagtact

SEQ ID NO: 274644 - DNA, 20 bp, Artificial Sequence
  Description of Artificial Sequence: Synthetic oligonucleotide
  Target: LAMA2; (-) strand; PAM type: YTN; PAM sequence: CTG
cctgccttggcctctcaaag

SEQ ID NO: 274645 - DNA, 20 bp, Artificial Sequence
  Description of Artificial Sequence: Synthetic oligonucleotide
  Target: LAMA2; (-) strand; PAM type: YTN; PAM sequence: CTC
aggtgatctgcctgccttgg

SEQ ID NO: 274646 - DNA, 20 bp, Artificial Sequence
  Description of Artificial Sequence: Synthetic oligonucleotide
  Target: LAMA2; (-) strand; PAM type: YTN; PAM sequence: CTG
acctcaggtgatctgcctgc

SEQ ID NO: 274647 - DNA, 20 bp, Artificial Sequence
  Description of Artificial Sequence: Synthetic oligonucleotide
  Target: LAMA2; (-) strand; PAM type: YTN; PAM sequence: TTG
aacgcctgacctcaggtgat

SEQ ID NO: 274648 - DNA, 20 bp, Artificial Sequence
  Description of Artificial Sequence: Synthetic oligonucleotide
  Target: LAMA2; (-) strand; PAM type: YTN; PAM sequence: CTT
gaacgcctgacctcaggtga

SEQ ID NO: 274649 - DNA, 20 bp, Artificial Sequence
  Description of Artificial Sequence: Synthetic oligonucleotide
  Target: LAMA2; (-) strand; PAM type: YTN; PAM sequence: CTG
gtcttgaacgcctgacctca

SEQ ID NO: 274650 - DNA, 20 bp, Artificial Sequence
  Description of Artificial Sequence: Synthetic oligonucleotide
  Target: LAMA2; (-) strand; PAM type: YTN; PAM sequence: TTG
gccaggctggtcttgaacgc

SEQ ID NO: 274651 - DNA, 20 bp, Artificial Sequence
  Description of Artificial Sequence: Synthetic oligonucleotide
  Target: LAMA2; (-) strand; PAM type: YTN; PAM sequence: TTG
ccatgttggccaggctggtc

SEQ ID NO: 274652 - DNA, 20 bp, Artificial Sequence
  Description of Artificial Sequence: Synthetic oligonucleotide
  Target: LAMA2; (-) strand; PAM type: YTN; PAM sequence: TTT
gccatgttggccaggctggt

SEQ ID NO: 274653 - DNA, 20 bp, Artificial Sequence
  Description of Artificial Sequence: Synthetic oligonucleotide
  Target: LAMA2; (-) strand; PAM type: YTN; PAM sequence: TTT
tgccatgttggccaggctgg

SEQ ID NO: 274654 - DNA, 20 bp, Artificial Sequence
  Description of Artificial Sequence: Synthetic oligonucleotide
  Target: LAMA2; (-) strand; PAM type: YTN; PAM sequence: TTA
gtagagatggggttttgcca

SEQ ID NO: 274655 - DNA, 20 bp, Artificial Sequence
  Description of Artificial Sequence: Synthetic oligonucleotide
  Target: LAMA2; (-) strand; PAM type: YTN; PAM sequence: TTT
agtagagatggggttttgcc

SEQ ID NO: 274656 - DNA, 20 bp, Artificial Sequence
  Description of Artificial Sequence: Synthetic oligonucleotide
  Target: LAMA2; (-) strand; PAM type: YTN; PAM sequence: TTT
tagtagagatggggttttgc

SEQ ID NO: 274657 - DNA, 20 bp, Artificial Sequence
  Description of Artificial Sequence: Synthetic oligonucleotide
  Target: LAMA2; (-) strand; PAM type: YTN; PAM sequence: TTT
ttagtagagatggggttttg

SEQ ID NO: 274658 - DNA, 20 bp, Artificial Sequence
  Description of Artificial Sequence: Synthetic oligonucleotide
  Target: LAMA2; (-) strand; PAM type: YTN; PAM sequence: TTG
tatttttagtagagatgggg

SEQ ID NO: 274659 - DNA, 20 bp, Artificial Sequence
  Description of Artificial Sequence: Synthetic oligonucleotide
  Target: LAMA2; (-) strand; PAM type: YTN; PAM sequence: TTT
gtatttttagtagagatggg

SEQ ID NO: 274660 - DNA, 20 bp, Artificial Sequence
  Description of Artificial Sequence: Synthetic oligonucleotide
  Target: LAMA2; (-) strand; PAM type: YTN; PAM sequence: TTT
tgtatttttagtagagatgg

SEQ ID NO: 274661 - DNA, 20 bp, Artificial Sequence
  Description of Artificial Sequence: Synthetic oligonucleotide
  Target: LAMA2; (-) strand; PAM type: YTN; PAM sequence: TTT
ttgtatttttagtagagatg

SEQ ID NO: 274662 - DNA, 20 bp, Artificial Sequence
  Description of Artificial Sequence: Synthetic oligonucleotide
  Target: LAMA2; (-) strand; PAM type: YTN; PAM sequence: CTG
atttttgtatttttagtaga

SEQ ID NO: 274663 - DNA, 20 bp, Artificial Sequence
  Description of Artificial Sequence: Synthetic oligonucleotide
  Target: LAMA2; (-) strand; PAM type: YTN; PAM sequence: TTA
tagcgcatgccaccgtgccc

SEQ ID NO: 274664 - DNA, 20 bp, Artificial Sequence
  Description of Artificial Sequence: Synthetic oligonucleotide
  Target: LAMA2; (-) strand; PAM type: YTN; PAM sequence: CTG
gaattatagcgcatgccacc

SEQ ID NO: 274665 - DNA, 20 bp, Artificial Sequence
  Description of Artificial Sequence: Synthetic oligonucleotide
  Target: LAMA2; (-) strand; PAM type: YTN; PAM sequence: CTC
ccgagtagctggaattatag

SEQ ID NO: 274666 - DNA, 20 bp, Artificial Sequence
  Description of Artificial Sequence: Synthetic oligonucleotide
  Target: LAMA2; (-) strand; PAM type: YTN; PAM sequence: CTC
agcctcccgagtagctggaa

SEQ ID NO: 274667 - DNA, 20 bp, Artificial Sequence
  Description of Artificial Sequence: Synthetic oligonucleotide
  Target: LAMA2; (-) strand; PAM type: YTN; PAM sequence: CTG
tctcagcctcccgagtagct

SEQ ID NO: 274668 - DNA, 20 bp, Artificial Sequence
  Description of Artificial Sequence: Synthetic oligonucleotide
  Target: LAMA2; (-) strand; PAM type: YTN; PAM sequence: CTA
ctgtctcagcctcccgagta

SEQ ID NO: 274669 - DNA, 20 bp, Artificial Sequence
  Description of Artificial Sequence: Synthetic oligonucleotide
  Target: LAMA2; (-) strand; PAM type: YTN; PAM sequence: TTC
tactgtctcagcctcccgag

SEQ ID NO: 274670 - DNA, 20 bp, Artificial Sequence
  Description of Artificial Sequence: Synthetic oligonucleotide
  Target: LAMA2; (-) strand; PAM type: YTN; PAM sequence: TTC
aagcgattctactgtctcag

SEQ ID NO: 274671 - DNA, 20 bp, Artificial Sequence
  Description of Artificial Sequence: Synthetic oligonucleotide
  Target: LAMA2; (-) strand; PAM type: YTN; PAM sequence: CTG
ggttcaagcgattctactgt

SEQ ID NO: 274672 - DNA, 20 bp, Artificial Sequence
  Description of Artificial Sequence: Synthetic oligonucleotide
  Target: LAMA2; (-) strand; PAM type: YTN; PAM sequence: CTC
ctgggttcaagcgattctac

SEQ ID NO: 274673 - DNA, 20 bp, Artificial Sequence
  Description of Artificial Sequence: Synthetic oligonucleotide
  Target: LAMA2; (-) strand; PAM type: YTN; PAM sequence: CTG
cgaccgcacctcctgggttc

SEQ ID NO: 274674 - DNA, 20 bp, Artificial Sequence
  Description of Artificial Sequence: Synthetic oligonucleotide
  Target: LAMA2; (-) strand; PAM type: YTN; PAM sequence: CTC
actgcgaccgcacctcctgg

SEQ ID NO: 274675 - DNA, 20 bp, Artificial Sequence
  Description of Artificial Sequence: Synthetic oligonucleotide
  Target: LAMA2; (-) strand; PAM type: YTN; PAM sequence: CTG
ctcactgcgaccgcacctcc

SEQ ID NO: 274676 - DNA, 20 bp, Artificial Sequence
  Description of Artificial Sequence: Synthetic oligonucleotide
  Target: LAMA2; (-) strand; PAM type: YTN; PAM sequence: TTC
tgctcactgcgaccgcacct

SEQ ID NO: 274677 - DNA, 20 bp, Artificial Sequence
  Description of Artificial Sequence: Synthetic oligonucleotide
  Target: LAMA2; (-) strand; PAM type: YTN; PAM sequence: TTT
ctgctcactgcgaccgcacc

SEQ ID NO: 274678 - DNA, 20 bp, Artificial Sequence
  Description of Artificial Sequence: Synthetic oligonucleotide
  Target: LAMA2; (-) strand; PAM type: YTN; PAM sequence: CTG
gagtgcagtggcacaatttc

SEQ ID NO: 274679 - DNA, 20 bp, Artificial Sequence
  Description of Artificial Sequence: Synthetic oligonucleotide
  Target: LAMA2; (-) strand; PAM type: YTN; PAM sequence: TTG
cccaggctggagtgcagtgg

SEQ ID NO: 274680 - DNA, 20 bp, Artificial Sequence
  Description of Artificial Sequence: Synthetic oligonucleotide
  Target: LAMA2; (-) strand; PAM type: YTN; PAM sequence: CTG
ttgcccaggctggagtgcag

SEQ ID NO: 274681 - DNA, 20 bp, Artificial Sequence
  Description of Artificial Sequence: Synthetic oligonucleotide
  Target: LAMA2; (-) strand; PAM type: YTN; PAM sequence: CTC
tgttgcccaggctggagtgc

SEQ ID NO: 274682 - DNA, 20 bp, Artificial Sequence
  Description of Artificial Sequence: Synthetic oligonucleotide
  Target: LAMA2; (-) strand; PAM type: YTN; PAM sequence: TTG
ctctgttgcccaggctggag

SEQ ID NO: 274683 - DNA, 20 bp, Artificial Sequence
  Description of Artificial Sequence: Synthetic oligonucleotide
  Target: LAMA2; (-) strand; PAM type: YTN; PAM sequence: CTT
gctctgttgcccaggctgga

SEQ ID NO: 274684 - DNA, 20 bp, Artificial Sequence
  Description of Artificial Sequence: Synthetic oligonucleotide
  Target: LAMA2; (-) strand; PAM type: YTN; PAM sequence: TTG
agatggagtcttgctctgtt

SEQ ID NO: 274685 - DNA, 20 bp, Artificial Sequence
  Description of Artificial Sequence: Synthetic oligonucleotide
  Target: LAMA2; (-) strand; PAM type: YTN; PAM sequence: TTT
gagatggagtcttgctctgt

SEQ ID NO: 274686 - DNA, 20 bp, Artificial Sequence
  Description of Artificial Sequence: Synthetic oligonucleotide
  Target: LAMA2; (-) strand; PAM type: YTN; PAM sequence: TTT
tgagatggagtcttgctctg

SEQ ID NO: 274687 - DNA, 20 bp, Artificial Sequence
  Description of Artificial Sequence: Synthetic oligonucleotide
  Target: LAMA2; (-) strand; PAM type: YTN; PAM sequence: TTT
ttgagatggagtcttgctct

SEQ ID NO: 274688 - DNA, 20 bp, Artificial Sequence
  Description of Artificial Sequence: Synthetic oligonucleotide
  Target: LAMA2; (-) strand; PAM type: YTN; PAM sequence: TTT
tttgagatggagtcttgctc

SEQ ID NO: 274689 - DNA, 20 bp, Artificial Sequence
  Description of Artificial Sequence: Synthetic oligonucleotide
  Target: LAMA2; (-) strand; PAM type: YTN; PAM sequence: TTT
ttttgagatggagtcttgct

SEQ ID NO: 274690 - DNA, 20 bp, Artificial Sequence
  Description of Artificial Sequence: Synthetic oligonucleotide
  Target: LAMA2; (-) strand; PAM type: YTN; PAM sequence: TTT
tttttgagatggagtcttgc

SEQ ID NO: 274691 - DNA, 20 bp, Artificial Sequence
  Description of Artificial Sequence: Synthetic oligonucleotide
  Target: LAMA2; (-) strand; PAM type: YTN; PAM sequence: TTT
ttttttgagatggagtcttg

SEQ ID NO: 274692 - DNA, 20 bp, Artificial Sequence
  Description of Artificial Sequence: Synthetic oligonucleotide
  Target: LAMA2; (-) strand; PAM type: YTN; PAM sequence: TTT
tttttttgagatggagtctt

SEQ ID NO: 274693 - DNA, 20 bp, Artificial Sequence
  Description of Artificial Sequence: Synthetic oligonucleotide
  Target: LAMA2; (-) strand; PAM type: YTN; PAM sequence: TTT
ttttttttgagatggagtct

SEQ ID NO: 274694 - DNA, 20 bp, Artificial Sequence
  Description of Artificial Sequence: Synthetic oligonucleotide
  Target: LAMA2; (-) strand; PAM type: YTN; PAM sequence: TTT
tttttttttgagatggagtc

SEQ ID NO: 274695 - DNA, 20 bp, Artificial Sequence
  Description of Artificial Sequence: Synthetic oligonucleotide
  Target: LAMA2; (-) strand; PAM type: YTN; PAM sequence: TTT
ttttttttttgagatggagt

SEQ ID NO: 274696 - DNA, 20 bp, Artificial Sequence
  Description of Artificial Sequence: Synthetic oligonucleotide
  Target: LAMA2; (-) strand; PAM type: YTN; PAM sequence: TTG
tttttttttttttgagatgg

SEQ ID NO: 274697 - DNA, 20 bp, Artificial Sequence
  Description of Artificial Sequence: Synthetic oligonucleotide
  Target: LAMA2; (-) strand; PAM type: YTN; PAM sequence: TTT
gtttttttttttttgagatg

SEQ ID NO: 274698 - DNA, 20 bp, Artificial Sequence
  Description of Artificial Sequence: Synthetic oligonucleotide
  Target: LAMA2; (-) strand; PAM type: YTN; PAM sequence: TTT
tgtttttttttttttgagat

SEQ ID NO: 274699 - DNA, 20 bp, Artificial Sequence
  Description of Artificial Sequence: Synthetic oligonucleotide
  Target: LAMA2; (-) strand; PAM type: YTN; PAM sequence: TTT
ttgtttttttttttttgaga

SEQ ID NO: 274700 - DNA, 20 bp, Artificial Sequence
  Description of Artificial Sequence: Synthetic oligonucleotide
  Target: LAMA2; (-) strand; PAM type: YTN; PAM sequence: TTG
tttttgtttttttttttttg

SEQ ID NO: 274701 - DNA, 20 bp, Artificial Sequence
  Description of Artificial Sequence: Synthetic oligonucleotide
  Target: LAMA2; (-) strand; PAM type: YTN; PAM sequence: TTT
gtttttgttttttttttttt

SEQ ID NO: 274702 - DNA, 20 bp, Artificial Sequence
  Description of Artificial Sequence: Synthetic oligonucleotide
  Target: LAMA2; (-) strand; PAM type: YTN; PAM sequence: TTG
tttgtttttgtttttttttt

SEQ ID NO: 274703 - DNA, 20 bp, Artificial Sequence
  Description of Artificial Sequence: Synthetic oligonucleotide
  Target: LAMA2; (-) strand; PAM type: YTN; PAM sequence: TTT
gtttgtttttgttttttttt

SEQ ID NO: 274704 - DNA, 20 bp, Artificial Sequence
  Description of Artificial Sequence: Synthetic oligonucleotide
  Target: LAMA2; (-) strand; PAM type: YTN; PAM sequence: TTG
tttgtttgtttttgtttttt

SEQ ID NO: 274705 - DNA, 20 bp, Artificial Sequence
  Description of Artificial Sequence: Synthetic oligonucleotide
  Target: LAMA2; (-) strand; PAM type: YTN; PAM sequence: TTT
gtttgtttgtttttgttttt

SEQ ID NO: 274706 - DNA, 20 bp, Artificial Sequence
  Description of Artificial Sequence: Synthetic oligonucleotide
  Target: LAMA2; (-) strand; PAM type: YTN; PAM sequence: TTT
tgtttgtttgtttttgtttt

SEQ ID NO: 274707 - DNA, 20 bp, Artificial Sequence
  Description of Artificial Sequence: Synthetic oligonucleotide
  Target: LAMA2; (-) strand; PAM type: YTN; PAM sequence: TTT
ttgtttgtttgtttttgttt

SEQ ID NO: 274708 - DNA, 20 bp, Artificial Sequence
  Description of Artificial Sequence: Synthetic oligonucleotide
  Target: LAMA2; (-) strand; PAM type: YTN; PAM sequence: TTT
tttgtttgtttgtttttgtt

SEQ ID NO: 274709 - DNA, 20 bp, Artificial Sequence
  Description of Artificial Sequence: Synthetic oligonucleotide
  Target: LAMA2; (-) strand; PAM type: YTN; PAM sequence: CTA
tcaacccgtcaaccagtttt

SEQ ID NO: 274710 - DNA, 20 bp, Artificial Sequence
  Description of Artificial Sequence: Synthetic oligonucleotide
  Target: LAMA2; (-) strand; PAM type: YTN; PAM sequence: CTG
cacctatcaacccgtcaacc

SEQ ID NO: 274711 - DNA, 20 bp, Artificial Sequence
  Description of Artificial Sequence: Synthetic oligonucleotide
  Target: LAMA2; (-) strand; PAM type: YTN; PAM sequence: TTG
ctgcacctatcaacccgtca

SEQ ID NO: 274712 - DNA, 20 bp, Artificial Sequence
  Description of Artificial Sequence: Synthetic oligonucleotide
  Target: LAMA2; (-) strand; PAM type: YTN; PAM sequence: TTT
gctgcacctatcaacccgtc

SEQ ID NO: 274713 - DNA, 20 bp, Artificial Sequence
  Description of Artificial Sequence: Synthetic oligonucleotide
  Target: LAMA2; (-) strand; PAM type: YTN; PAM sequence: TTA
cataggaatacatatgccat

SEQ ID NO: 274714 - DNA, 20 bp, Artificial Sequence
  Description of Artificial Sequence: Synthetic oligonucleotide
  Target: LAMA2; (-) strand; PAM type: YTN; PAM sequence: TTG
ttacataggaatacatatgc

SEQ ID NO: 274715 - DNA, 20 bp, Artificial Sequence
  Description of Artificial Sequence: Synthetic oligonucleotide
  Target: LAMA2; (-) strand; PAM type: YTN; PAM sequence: TTT
gttacataggaatacatatg

SEQ ID NO: 274716 - DNA, 20 bp, Artificial Sequence
  Description of Artificial Sequence: Synthetic oligonucleotide
  Target: LAMA2; (-) strand; PAM type: YTN; PAM sequence: CTT
tgttacataggaatacatat

SEQ ID NO: 274717 - DNA, 20 bp, Artificial Sequence
  Description of Artificial Sequence: Synthetic oligonucleotide
  Target: LAMA2; (-) strand; PAM type: YTN; PAM sequence: TTA
agaaagcaagctttgttaca

SEQ ID NO: 274718 - DNA, 20 bp, Artificial Sequence
  Description of Artificial Sequence: Synthetic oligonucleotide
  Target: LAMA2; (-) strand; PAM type: YTN; PAM sequence: TTA
gcaaaatgatcatgtattaa

SEQ ID NO: 274719 - DNA, 20 bp, Artificial Sequence
  Description of Artificial Sequence: Synthetic oligonucleotide
  Target: LAMA2; (-) strand; PAM type: YTN; PAM sequence: TTT
agcaaaatgatcatgtatta

SEQ ID NO: 274720 - DNA, 20 bp, Artificial Sequence
  Description of Artificial Sequence: Synthetic oligonucleotide
  Target: LAMA2; (-) strand; PAM type: YTN; PAM sequence: CTT
tagcaaaatgatcatgtatt

SEQ ID NO: 274721 - DNA, 20 bp, Artificial Sequence
  Description of Artificial Sequence: Synthetic oligonucleotide
  Target: LAMA2; (-) strand; PAM type: YTN; PAM sequence: TTA
aggtgcacaaaaatgacttt

SEQ ID NO: 274722 - DNA, 20 bp, Artificial Sequence
  Description of Artificial Sequence: Synthetic oligonucleotide
  Target: LAMA2; (-) strand; PAM type: YTN; PAM sequence: TTG
taaacaagaagcaatcatta

SEQ ID NO: 274723 - DNA, 20 bp, Artificial Sequence
  Description of Artificial Sequence: Synthetic oligonucleotide
  Target: LAMA2; (-) strand; PAM type: YTN; PAM sequence: TTT
gtaaacaagaagcaatcatt

SEQ ID NO: 274724 - DNA, 20 bp, Artificial Sequence
  Description of Artificial Sequence: Synthetic oligonucleotide
  Target: LAMA2; (-) strand; PAM type: YTN; PAM sequence: TTA
aaaccatttgtaaacaagaa

SEQ ID NO: 274725 - DNA, 20 bp, Artificial Sequence
  Description of Artificial Sequence: Synthetic oligonucleotide
  Target: LAMA2; (-) strand; PAM type: YTN; PAM sequence: TTA
aattaaaaccatttgtaaac

SEQ ID NO: 274726 - DNA, 20 bp, Artificial Sequence
  Description of Artificial Sequence: Synthetic oligonucleotide
  Target: LAMA2; (-) strand; PAM type: YTN; PAM sequence: TTT
aaattaaaaccatttgtaaa

SEQ ID NO: 274727 - DNA, 20 bp, Artificial Sequence
  Description of Artificial Sequence: Synthetic oligonucleotide
  Target: LAMA2; (-) strand; PAM type: YTN; PAM sequence: CTT
taaattaaaaccatttgtaa

SEQ ID NO: 274728 - DNA, 20 bp, Artificial Sequence
  Description of Artificial Sequence: Synthetic oligonucleotide
  Target: LAMA2; (-) strand; PAM type: YTN; PAM sequence: TTC
tttaaattaaaaccatttgt

SEQ ID NO: 274729 - DNA, 20 bp, Artificial Sequence
  Description of Artificial Sequence: Synthetic oligonucleotide
  Target: LAMA2; (-) strand; PAM type: YTN; PAM sequence: TTT
ctttaaattaaaaccatttg

SEQ ID NO: 274730 - DNA, 20 bp, Artificial Sequence
  Description of Artificial Sequence: Synthetic oligonucleotide
  Target: LAMA2; (-) strand; PAM type: YTN; PAM sequence: TTG
gatggcatacataatttctt

SEQ ID NO: 274731 - DNA, 20 bp, Artificial Sequence
  Description of Artificial Sequence: Synthetic oligonucleotide
  Target: LAMA2; (-) strand; PAM type: YTN; PAM sequence: TTT
ggatggcatacataatttct

SEQ ID NO: 274732 - DNA, 20 bp, Artificial Sequence
  Description of Artificial Sequence: Synthetic oligonucleotide
  Target: LAMA2; (-) strand; PAM type: YTN; PAM sequence: TTT
tggatggcatacataatttc

SEQ ID NO: 274733 - DNA, 20 bp, Artificial Sequence
  Description of Artificial Sequence: Synthetic oligonucleotide
  Target: LAMA2; (-) strand; PAM type: YTN; PAM sequence: CTT
ttggatggcatacataattt

SEQ ID NO: 274734 - DNA, 20 bp, Artificial Sequence
  Description of Artificial Sequence: Synthetic oligonucleotide
  Target: LAMA2; (-) strand; PAM type: YTN; PAM sequence: CTG
tatcttttggatggcataca

SEQ ID NO: 274735 - DNA, 20 bp, Artificial Sequence
  Description of Artificial Sequence: Synthetic oligonucleotide
  Target: LAMA2; (-) strand; PAM type: YTN; PAM sequence: CTG
gtggaaaaagaatgacaaca

SEQ ID NO: 274736 - DNA, 20 bp, Artificial Sequence
  Description of Artificial Sequence: Synthetic oligonucleotide
  Target: LAMA2; (-) strand; PAM type: YTN; PAM sequence: CTG
cagagaagaatctggtggaa

SEQ ID NO: 274737 - DNA, 20 bp, Artificial Sequence
  Description of Artificial Sequence: Synthetic oligonucleotide
  Target: LAMA2; (-) strand; PAM type: YTN; PAM sequence: TTC
tgcagagaagaatctggtgg

SEQ ID NO: 274738 - DNA, 20 bp, Artificial Sequence
  Description of Artificial Sequence: Synthetic oligonucleotide
  Target: LAMA2; (-) strand; PAM type: YTN; PAM sequence: CTT
ctgcagagaagaatctggtg

SEQ ID NO: 274739 - DNA, 20 bp, Artificial Sequence
  Description of Artificial Sequence: Synthetic oligonucleotide
  Target: LAMA2; (-) strand; PAM type: YTN; PAM sequence: CTA
aacttctgcagagaagaatc

SEQ ID NO: 274740 - DNA, 20 bp, Artificial Sequence
  Description of Artificial Sequence: Synthetic oligonucleotide
  Target: LAMA2; (-) strand; PAM type: YTN; PAM sequence: CTC
aaagctaaacttctgcagag

SEQ ID NO: 274741 - DNA, 20 bp, Artificial Sequence
  Description of Artificial Sequence: Synthetic oligonucleotide
  Target: LAMA2; (-) strand; PAM type: YTN; PAM sequence: CTG
gtctcaaagctaaacttctg

SEQ ID NO: 274742 - DNA, 20 bp, Artificial Sequence
  Description of Artificial Sequence: Synthetic oligonucleotide
  Target: LAMA2; (-) strand; PAM type: YTN; PAM sequence: CTC
tggtctcaaagctaaacttc

SEQ ID NO: 274743 - DNA, 20 bp, Artificial Sequence
  Description of Artificial Sequence: Synthetic oligonucleotide
  Target: LAMA2; (-) strand; PAM type: YTN; PAM sequence: TTG
tgctctggtctcaaagctaa

SEQ ID NO: 274744 - DNA, 20 bp, Artificial Sequence
  Description of Artificial Sequence: Synthetic oligonucleotide
  Target: LAMA2; (-) strand; PAM type: YTN; PAM sequence: CTT
gtgctctggtctcaaagcta

SEQ ID NO: 274745 - DNA, 20 bp, Artificial Sequence
  Description of Artificial Sequence: Synthetic oligonucleotide
  Target: LAMA2; (-) strand; PAM type: YTN; PAM sequence: CTC
ttgtgctctggtctcaaagc

SEQ ID NO: 274746 - DNA, 20 bp, Artificial Sequence
  Description of Artificial Sequence: Synthetic oligonucleotide
  Target: LAMA2; (-) strand; PAM type: YTN; PAM sequence: TTC
tcttgtgctctggtctcaaa

SEQ ID NO: 274747 - DNA, 20 bp, Artificial Sequence
  Description of Artificial Sequence: Synthetic oligonucleotide
  Target: LAMA2; (-) strand; PAM type: YTN; PAM sequence: TTT
ctcttgtgctctggtctcaa

SEQ ID NO: 274748 - DNA, 20 bp, Artificial Sequence
  Description of Artificial Sequence: Synthetic oligonucleotide
  Target: LAMA2; (-) strand; PAM type: YTN; PAM sequence: CTA
tttctcttgtgctctggtct

SEQ ID NO: 274749 - DNA, 20 bp, Artificial Sequence
  Description of Artificial Sequence: Synthetic oligonucleotide
  Target: LAMA2; (-) strand; PAM type: YTN; PAM sequence: CTC
actatttctcttgtgctctg

SEQ ID NO: 274750 - DNA, 20 bp, Artificial Sequence
  Description of Artificial Sequence: Synthetic oligonucleotide
  Target: LAMA2; (-) strand; PAM type: YTN; PAM sequence: CTA
ggcagtatagaggaagggaa

SEQ ID NO: 274751 - DNA, 20 bp, Artificial Sequence
  Description of Artificial Sequence: Synthetic oligonucleotide
  Target: LAMA2; (-) strand; PAM type: YTN; PAM sequence: CTG
ggcctaggcagtatagagga

SEQ ID NO: 274752 - DNA, 20 bp, Artificial Sequence
  Description of Artificial Sequence: Synthetic oligonucleotide
  Target: LAMA2; (-) strand; PAM type: YTN; PAM sequence: TTC
tgggcctaggcagtatagag

SEQ ID NO: 274753 - DNA, 20 bp, Artificial Sequence
  Description of Artificial Sequence: Synthetic oligonucleotide
  Target: LAMA2; (-) strand; PAM type: YTN; PAM sequence: TTA
gattctgggcctaggcagta

SEQ ID NO: 274754 - DNA, 20 bp, Artificial Sequence
  Description of Artificial Sequence: Synthetic oligonucleotide
  Target: LAMA2; (-) strand; PAM type: YTN; PAM sequence: TTT
agattctgggcctaggcagt

SEQ ID NO: 274755 - DNA, 20 bp, Artificial Sequence
  Description of Artificial Sequence: Synthetic oligonucleotide
  Target: LAMA2; (-) strand; PAM type: YTN; PAM sequence: CTA
atttagattctgggcctagg

SEQ ID NO: 274756 - DNA, 20 bp, Artificial Sequence
  Description of Artificial Sequence: Synthetic oligonucleotide
  Target: LAMA2; (-) strand; PAM type: YTN; PAM sequence: TTG
atctaatttagattctgggc

SEQ ID NO: 274757 - DNA, 20 bp, Artificial Sequence
  Description of Artificial Sequence: Synthetic oligonucleotide
  Target: LAMA2; (-) strand; PAM type: YTN; PAM sequence: TTT
gatctaatttagattctggg

SEQ ID NO: 274758 - DNA, 20 bp, Artificial Sequence
  Description of Artificial Sequence: Synthetic oligonucleotide
  Target: LAMA2; (-) strand; PAM type: YTN; PAM sequence: TTG
aaatttgatctaatttagat

SEQ ID NO: 274759 - DNA, 20 bp, Artificial Sequence
  Description of Artificial Sequence: Synthetic oligonucleotide
  Target: LAMA2; (-) strand; PAM type: YTN; PAM sequence: TTT
gaaatttgatctaatttaga

SEQ ID NO: 274760 - DNA, 20 bp, Artificial Sequence
  Description of Artificial Sequence: Synthetic oligonucleotide
  Target: LAMA2; (-) strand; PAM type: YTN; PAM sequence: TTT
tgaaatttgatctaatttag

SEQ ID NO: 274761 - DNA, 20 bp, Artificial Sequence
  Description of Artificial Sequence: Synthetic oligonucleotide
  Target: LAMA2; (-) strand; PAM type: YTN; PAM sequence: CTT
ttgaaatttgatctaattta

SEQ ID NO: 274762 - DNA, 20 bp, Artificial Sequence
  Description of Artificial Sequence: Synthetic oligonucleotide
  Target: LAMA2; (-) strand; PAM type: YTN; PAM sequence: TTC
ataagaaatatcttttgaaa

SEQ ID NO: 274763 - DNA, 20 bp, Artificial Sequence
  Description of Artificial Sequence: Synthetic oligonucleotide
  Target: LAMA2; (-) strand; PAM type: YTN; PAM sequence: TTT
cataagaaatatcttttgaa

SEQ ID NO: 274764 - DNA, 20 bp, Artificial Sequence
  Description of Artificial Sequence: Synthetic oligonucleotide
  Target: LAMA2; (-) strand; PAM type: YTN; PAM sequence: CTT
tcataagaaatatcttttga

SEQ ID NO: 274765 - DNA, 20 bp, Artificial Sequence
  Description of Artificial Sequence: Synthetic oligonucleotide
  Target: LAMA2; (-) strand; PAM type: YTN; PAM sequence: TTA
aatgaatatgtgtgtgtgcg

SEQ ID NO: 274766 - DNA, 20 bp, Artificial Sequence
  Description of Artificial Sequence: Synthetic oligonucleotide
  Target: LAMA2; (-) strand; PAM type: YTN; PAM sequence: TTG
ttaaatgaatatgtgtgtgt

SEQ ID NO: 274767 - DNA, 20 bp, Artificial Sequence
  Description of Artificial Sequence: Synthetic oligonucleotide
  Target: LAMA2; (-) strand; PAM type: YTN; PAM sequence: TTT
gttaaatgaatatgtgtgtg

SEQ ID NO: 274768 - DNA, 20 bp, Artificial Sequence
  Description of Artificial Sequence: Synthetic oligonucleotide
  Target: LAMA2; (-) strand; PAM type: YTN; PAM sequence: CTT
tgttaaatgaatatgtgtgt

SEQ ID NO: 274769 - DNA, 20 bp, Artificial Sequence
  Description of Artificial Sequence: Synthetic oligonucleotide
  Target: LAMA2; (-) strand; PAM type: YTN; PAM sequence: TTC
tttgttaaatgaatatgtgt

SEQ ID NO: 274770 - DNA, 20 bp, Artificial Sequence
  Description of Artificial Sequence: Synthetic oligonucleotide
  Target: LAMA2; (-) strand; PAM type: YTN; PAM sequence: TTT
ctttgttaaatgaatatgtg

SEQ ID NO: 274771 - DNA, 20 bp, Artificial Sequence
  Description of Artificial Sequence: Synthetic oligonucleotide
  Target: LAMA2; (-) strand; PAM type: YTN; PAM sequence: TTT
tctttgttaaatgaatatgt

SEQ ID NO: 274772 - DNA, 20 bp, Artificial Sequence
  Description of Artificial Sequence: Synthetic oligonucleotide
  Target: LAMA2; (-) strand; PAM type: YTN; PAM sequence: TTT
ttctttgttaaatgaatatg

SEQ ID NO: 274773 - DNA, 20 bp, Artificial Sequence
  Description of Artificial Sequence: Synthetic oligonucleotide
  Target: LAMA2; (-) strand; PAM type: YTN; PAM sequence: TTT
tttctttgttaaatgaatat

SEQ ID NO: 274774 - DNA, 20 bp, Artificial Sequence
  Description of Artificial Sequence: Synthetic oligonucleotide
  Target: LAMA2; (-) strand; PAM type: YTN; PAM sequence: CTG
tatgttttttctttgttaaa

SEQ ID NO: 274775 - DNA, 20 bp, Artificial Sequence
  Description of Artificial Sequence: Synthetic oligonucleotide
  Target: LAMA2; (-) strand; PAM type: YTN; PAM sequence: CTA
aagctgtatgttttttcttt

SEQ ID NO: 274776 - DNA, 20 bp, Artificial Sequence
  Description of Artificial Sequence: Synthetic oligonucleotide
  Target: LAMA2; (-) strand; PAM type: YTN; PAM sequence: CTG
ctaaagctgtatgttttttc

SEQ ID NO: 274777 - DNA, 20 bp, Artificial Sequence
  Description of Artificial Sequence: Synthetic oligonucleotide
  Target: LAMA2; (-) strand; PAM type: YTN; PAM sequence: TTC
ccaacctgctaaagctgtat

SEQ ID NO: 274778 - DNA, 20 bp, Artificial Sequence
  Description of Artificial Sequence: Synthetic oligonucleotide
  Target: LAMA2; (-) strand; PAM type: YTN; PAM sequence: CTT
cccaacctgctaaagctgta

SEQ ID NO: 274779 - DNA, 20 bp, Artificial Sequence
  Description of Artificial Sequence: Synthetic oligonucleotide
  Target: LAMA2; (-) strand; PAM type: YTN; PAM sequence: TTA
ataaatgccacttcccaacc

SEQ ID NO: 274780 - DNA, 20 bp, Artificial Sequence
  Description of Artificial Sequence: Synthetic oligonucleotide
  Target: LAMA2; (-) strand; PAM type: YTN; PAM sequence: TTA
aaatgaagatgatattaata

SEQ ID NO: 274781 - DNA, 20 bp, Artificial Sequence
  Description of Artificial Sequence: Synthetic oligonucleotide
  Target: LAMA2; (-) strand; PAM type: YTN; PAM sequence: TTT
aaaatgaagatgatattaat

SEQ ID NO: 274782 - DNA, 20 bp, Artificial Sequence
  Description of Artificial Sequence: Synthetic oligonucleotide
  Target: LAMA2; (-) strand; PAM type: YTN; PAM sequence: TTT
taaaatgaagatgatattaa

SEQ ID NO: 274783 - DNA, 20 bp, Artificial Sequence
  Description of Artificial Sequence: Synthetic oligonucleotide
  Target: LAMA2; (-) strand; PAM type: YTN; PAM sequence: TTT
ttaaaatgaagatgatatta

SEQ ID NO: 274784 - DNA, 20 bp, Artificial Sequence
  Description of Artificial Sequence: Synthetic oligonucleotide
  Target: LAMA2; (-) strand; PAM type: YTN; PAM sequence: CTT
tttaaaatgaagatgatatt

SEQ ID NO: 274785 - DNA, 20 bp, Artificial Sequence
  Description of Artificial Sequence: Synthetic oligonucleotide
  Target: LAMA2; (-) strand; PAM type: YTN; PAM sequence: CTC
actttttaaaatgaagatga

SEQ ID NO: 274786 - DNA, 20 bp, Artificial Sequence
  Description of Artificial Sequence: Synthetic oligonucleotide
  Target: LAMA2; (-) strand; PAM type: YTN; PAM sequence: TTG
tactcactttttaaaatgaa

SEQ ID NO: 274787 - DNA, 20 bp, Artificial Sequence
  Description of Artificial Sequence: Synthetic oligonucleotide
  Target: LAMA2; (-) strand; PAM type: YTN; PAM sequence: TTT
gtactcactttttaaaatga

SEQ ID NO: 274788 - DNA, 20 bp, Artificial Sequence
  Description of Artificial Sequence: Synthetic oligonucleotide
  Target: LAMA2; (-) strand; PAM type: YTN; PAM sequence: CTG
atataatttgtactcacttt

SEQ ID NO: 274789 - DNA, 20 bp, Artificial Sequence
  Description of Artificial Sequence: Synthetic oligonucleotide
  Target: LAMA2; (-) strand; PAM type: YTN; PAM sequence: CTA
ctgatataatttgtactcac

SEQ ID NO: 274790 - DNA, 20 bp, Artificial Sequence
  Description of Artificial Sequence: Synthetic oligonucleotide
  Target: LAMA2; (-) strand; PAM type: YTN; PAM sequence: TTG
tagcatgtaagtaactactg

SEQ ID NO: 274791 - DNA, 20 bp, Artificial Sequence
  Description of Artificial Sequence: Synthetic oligonucleotide
  Target: LAMA2; (-) strand; PAM type: YTN; PAM sequence: TTA
accaattgtagcatgtaagt

SEQ ID NO: 274792 - DNA, 20 bp, Artificial Sequence
  Description of Artificial Sequence: Synthetic oligonucleotide
  Target: LAMA2; (-) strand; PAM type: YTN; PAM sequence: TTT
aaccaattgtagcatgtaag

SEQ ID NO: 274793 - DNA, 20 bp, Artificial Sequence
  Description of Artificial Sequence: Synthetic oligonucleotide
  Target: LAMA2; (-) strand; PAM type: YTN; PAM sequence: CTT
taaccaattgtagcatgtaa

SEQ ID NO: 274794 - DNA, 20 bp, Artificial Sequence
  Description of Artificial Sequence: Synthetic oligonucleotide
  Target: LAMA2; (-) strand; PAM type: YTN; PAM sequence: CTG
actttaaccaattgtagcat

SEQ ID NO: 274795 - DNA, 20 bp, Artificial Sequence
  Description of Artificial Sequence: Synthetic oligonucleotide
  Target: LAMA2; (-) strand; PAM type: YTN; PAM sequence: CTG
tatagctgactttaaccaat

SEQ ID NO: 274796 - DNA, 20 bp, Artificial Sequence
  Description of Artificial Sequence: Synthetic oligonucleotide
  Target: LAMA2; (-) strand; PAM type: YTN; PAM sequence: CTA
tctgtatagctgactttaac

SEQ ID NO: 274797 - DNA, 20 bp, Artificial Sequence
  Description of Artificial Sequence: Synthetic oligonucleotide
  Target: LAMA2; (-) strand; PAM type: YTN; PAM sequence: CTG
agtgcatgctatctgtatag

SEQ ID NO: 274798 - DNA, 20 bp, Artificial Sequence
  Description of Artificial Sequence: Synthetic oligonucleotide
  Target: LAMA2; (-) strand; PAM type: YTN; PAM sequence: TTA
gtctgagtgcatgctatctg

SEQ ID NO: 274799 - DNA, 20 bp, Artificial Sequence
  Description of Artificial Sequence: Synthetic oligonucleotide
  Target: LAMA2; (-) strand; PAM type: YTN; PAM sequence: TTT
agtctgagtgcatgctatct

SEQ ID NO: 274800 - DNA, 20 bp, Artificial Sequence
  Description of Artificial Sequence: Synthetic oligonucleotide
  Target: LAMA2; (-) strand; PAM type: YTN; PAM sequence: CTT
tagtctgagtgcatgctatc

SEQ ID NO: 274801 - DNA, 20 bp, Artificial Sequence
  Description of Artificial Sequence: Synthetic oligonucleotide
  Target: LAMA2; (-) strand; PAM type: YTN; PAM sequence: CTC
atcctttagtctgagtgcat

SEQ ID NO: 274802 - DNA, 20 bp, Artificial Sequence
  Description of Artificial Sequence: Synthetic oligonucleotide
  Target: LAMA2; (-) strand; PAM type: YTN; PAM sequence: CTA
tctcatcctttagtctgagt

SEQ ID NO: 274803 - DNA, 20 bp, Artificial Sequence
  Description of Artificial Sequence: Synthetic oligonucleotide
  Target: LAMA2; (-) strand; PAM type: YTN; PAM sequence: CTA
tggtactatctcatccttta

SEQ ID NO: 274804 - DNA, 20 bp, Artificial Sequence
  Description of Artificial Sequence: Synthetic oligonucleotide
  Target: LAMA2; (-) strand; PAM type: YTN; PAM sequence: CTA
cctatggtactatctcatcc

SEQ ID NO: 274805 - DNA, 20 bp, Artificial Sequence
  Description of Artificial Sequence: Synthetic oligonucleotide
  Target: LAMA2; (-) strand; PAM type: YTN; PAM sequence: CTC
tacctatggtactatctcat

SEQ ID NO: 274806 - DNA, 20 bp, Artificial Sequence
  Description of Artificial Sequence: Synthetic oligonucleotide
  Target: LAMA2; (-) strand; PAM type: YTN; PAM sequence: TTG
gctctacctatggtactatc

SEQ ID NO: 274807 - DNA, 20 bp, Artificial Sequence
  Description of Artificial Sequence: Synthetic oligonucleotide
  Target: LAMA2; (-) strand; PAM type: YTN; PAM sequence: TTT
ggctctacctatggtactat

SEQ ID NO: 274808 - DNA, 20 bp, Artificial Sequence
  Description of Artificial Sequence: Synthetic oligonucleotide
  Target: LAMA2; (-) strand; PAM type: YTN; PAM sequence: TTC
aagaaagcagtagcagattt

SEQ ID NO: 274809 - DNA, 20 bp, Artificial Sequence
  Description of Artificial Sequence: Synthetic oligonucleotide
  Target: LAMA2; (-) strand; PAM type: YTN; PAM sequence: TTT
caagaaagcagtagcagatt

SEQ ID NO: 274810 - DNA, 20 bp, Artificial Sequence
  Description of Artificial Sequence: Synthetic oligonucleotide
  Target: LAMA2; (-) strand; PAM type: YTN; PAM sequence: TTA
gatttcaagaaagcagtagc

SEQ ID NO: 274811 - DNA, 20 bp, Artificial Sequence
  Description of Artificial Sequence: Synthetic oligonucleotide
  Target: LAMA2; (-) strand; PAM type: YTN; PAM sequence: CTT
agatttcaagaaagcagtag

SEQ ID NO: 274812 - DNA, 20 bp, Artificial Sequence
  Description of Artificial Sequence: Synthetic oligonucleotide
  Target: LAMA2; (-) strand; PAM type: YTN; PAM sequence: TTC
ttagatttcaagaaagcagt

SEQ ID NO: 274813 - DNA, 20 bp, Artificial Sequence
  Description of Artificial Sequence: Synthetic oligonucleotide
  Target: LAMA2; (-) strand; PAM type: YTN; PAM sequence: CTT
cttagatttcaagaaagcag

SEQ ID NO: 274814 - DNA, 20 bp, Artificial Sequence
  Description of Artificial Sequence: Synthetic oligonucleotide
  Target: LAMA2; (-) strand; PAM type: YTN; PAM sequence: CTG
cttcttagatttcaagaaag

SEQ ID NO: 274815 - DNA, 20 bp, Artificial Sequence
  Description of Artificial Sequence: Synthetic oligonucleotide
  Target: LAMA2; (-) strand; PAM type: YTN; PAM sequence: TTC
tgcttcttagatttcaagaa

SEQ ID NO: 274816 - DNA, 20 bp, Artificial Sequence
  Description of Artificial Sequence: Synthetic oligonucleotide
  Target: LAMA2; (-) strand; PAM type: YTN; PAM sequence: TTT
ctgcttcttagatttcaaga

SEQ ID NO: 274817 - DNA, 20 bp, Artificial Sequence
  Description of Artificial Sequence: Synthetic oligonucleotide
  Target: LAMA2; (-) strand; PAM type: YTN; PAM sequence: CTT
tctgcttcttagatttcaag

SEQ ID NO: 274818 - DNA, 20 bp, Artificial Sequence
  Description of Artificial Sequence: Synthetic oligonucleotide
  Target: LAMA2; (-) strand; PAM type: YTN; PAM sequence: TTA
aatgtaagaagctttctgct

SEQ ID NO: 274819 - DNA, 20 bp, Artificial Sequence
  Description of Artificial Sequence: Synthetic oligonucleotide
  Target: LAMA2; (-) strand; PAM type: YTN; PAM sequence: TTC
cagagtaccaatgattaaat

SEQ ID NO: 274820 - DNA, 20 bp, Artificial Sequence
  Description of Artificial Sequence: Synthetic oligonucleotide
  Target: LAMA2; (-) strand; PAM type: YTN; PAM sequence: CTT
ccagagtaccaatgattaaa

SEQ ID NO: 274821 - DNA, 20 bp, Artificial Sequence
  Description of Artificial Sequence: Synthetic oligonucleotide
  Target: LAMA2; (-) strand; PAM type: YTN; PAM sequence: CTA
ggtgggaagccttccagagt

SEQ ID NO: 274822 - DNA, 20 bp, Artificial Sequence
  Description of Artificial Sequence: Synthetic oligonucleotide
  Target: LAMA2; (-) strand; PAM type: YTN; PAM sequence: CTG
gtccagcaaactaggtggga

SEQ ID NO: 274823 - DNA, 20 bp, Artificial Sequence
  Description of Artificial Sequence: Synthetic oligonucleotide
  Target: LAMA2; (-) strand; PAM type: YTN; PAM sequence: CTC
cctggtccagcaaactaggt

SEQ ID NO: 274824 - DNA, 20 bp, Artificial Sequence
  Description of Artificial Sequence: Synthetic oligonucleotide
  Target: LAMA2; (-) strand; PAM type: YTN; PAM sequence: TTG
aaagctccctggtccagcaa

SEQ ID NO: 274825 - DNA, 20 bp, Artificial Sequence
  Description of Artificial Sequence: Synthetic oligonucleotide
  Target: LAMA2; (-) strand; PAM type: YTN; PAM sequence: TTT
gaaagctccctggtccagca

SEQ ID NO: 274826 - DNA, 20 bp, Artificial Sequence
  Description of Artificial Sequence: Synthetic oligonucleotide
  Target: LAMA2; (-) strand; PAM type: YTN; PAM sequence: TTA
gtttgaaagctccctggtcc

SEQ ID NO: 274827 - DNA, 20 bp, Artificial Sequence
  Description of Artificial Sequence: Synthetic oligonucleotide
  Target: LAMA2; (-) strand; PAM type: YTN; PAM sequence: CTG
attagtttgaaagctccctg

SEQ ID NO: 274828 - DNA, 20 bp, Artificial Sequence
  Description of Artificial Sequence: Synthetic oligonucleotide
  Target: LAMA2; (-) strand; PAM type: YTN; PAM sequence: TTA
cagaatcacagtaaccatag

SEQ ID NO: 274829 - DNA, 20 bp, Artificial Sequence
  Description of Artificial Sequence: Synthetic oligonucleotide
  Target: LAMA2; (-) strand; PAM type: YTN; PAM sequence: TTG
ttacagaatcacagtaacca

SEQ ID NO: 274830 - DNA, 20 bp, Artificial Sequence
  Description of Artificial Sequence: Synthetic oligonucleotide
  Target: LAMA2; (-) strand; PAM type: YTN; PAM sequence: TTT
gttacagaatcacagtaacc

SEQ ID NO: 274831 - DNA, 20 bp, Artificial Sequence
  Description of Artificial Sequence: Synthetic oligonucleotide
  Target: LAMA2; (-) strand; PAM type: YTN; PAM sequence: TTT
tgttacagaatcacagtaac

SEQ ID NO: 274832 - DNA, 20 bp, Artificial Sequence
  Description of Artificial Sequence: Synthetic oligonucleotide
  Target: LAMA2; (-) strand; PAM type: YTN; PAM sequence: CTC
aattttgttacagaatcaca

SEQ ID NO: 274833 - DNA, 20 bp, Artificial Sequence
  Description of Artificial Sequence: Synthetic oligonucleotide
  Target: LAMA2; (-) strand; PAM type: YTN; PAM sequence: CTG
tgtctcaattttgttacaga

SEQ ID NO: 274834 - DNA, 20 bp, Artificial Sequence
  Description of Artificial Sequence: Synthetic oligonucleotide
  Target: LAMA2; (-) strand; PAM type: YTN; PAM sequence: CTA
ggctgtgtctcaattttgtt

SEQ ID NO: 274835 - DNA, 20 bp, Artificial Sequence
  Description of Artificial Sequence: Synthetic oligonucleotide
  Target: LAMA2; (-) strand; PAM type: YTN; PAM sequence: TTG
tcagtaagatacatcaccta

SEQ ID NO: 274836 - DNA, 20 bp, Artificial Sequence
  Description of Artificial Sequence: Synthetic oligonucleotide
  Target: LAMA2; (-) strand; PAM type: YTN; PAM sequence: CTA
ttgtcagtaagatacatcac

SEQ ID NO: 274837 - DNA, 20 bp, Artificial Sequence
  Description of Artificial Sequence: Synthetic oligonucleotide
  Target: LAMA2; (-) strand; PAM type: YTN; PAM sequence: TTC
accactattgtcagtaagat

SEQ ID NO: 274838 - DNA, 20 bp, Artificial Sequence
  Description of Artificial Sequence: Synthetic oligonucleotide
  Target: LAMA2; (-) strand; PAM type: YTN; PAM sequence: TTT
caccactattgtcagtaaga

SEQ ID NO: 274839 - DNA, 20 bp, Artificial Sequence
  Description of Artificial Sequence: Synthetic oligonucleotide
  Target: LAMA2; (-) strand; PAM type: YTN; PAM sequence: CTC
ccaatatttcaccactattg

SEQ ID NO: 274840 - DNA, 20 bp, Artificial Sequence
  Description of Artificial Sequence: Synthetic oligonucleotide
  Target: LAMA2; (-) strand; PAM type: YTN; PAM sequence: TTG
acatatgccaaagaatcctc

SEQ ID NO: 274841 - DNA, 20 bp, Artificial Sequence
  Description of Artificial Sequence: Synthetic oligonucleotide
  Target: LAMA2; (-) strand; PAM type: YTN; PAM sequence: CTT
gacatatgccaaagaatcct

SEQ ID NO: 274842 - DNA, 20 bp, Artificial Sequence
  Description of Artificial Sequence: Synthetic oligonucleotide
  Target: LAMA2; (-) strand; PAM type: YTN; PAM sequence: TTA
taccttgacatatgccaaag

SEQ ID NO: 274843 - DNA, 20 bp, Artificial Sequence
  Description of Artificial Sequence: Synthetic oligonucleotide
  Target: LAMA2; (-) strand; PAM type: YTN; PAM sequence: CTA
acagttataccttgacatat

SEQ ID NO: 274844 - DNA, 20 bp, Artificial Sequence
  Description of Artificial Sequence: Synthetic oligonucleotide
  Target: LAMA2; (-) strand; PAM type: YTN; PAM sequence: CTG
cctaacagttataccttgac

SEQ ID NO: 274845 - DNA, 20 bp, Artificial Sequence
  Description of Artificial Sequence: Synthetic oligonucleotide
  Target: LAMA2; (-) strand; PAM type: YTN; PAM sequence: TTG
acccactgcctaacagttat

SEQ ID NO: 274846 - DNA, 20 bp, Artificial Sequence
  Description of Artificial Sequence: Synthetic oligonucleotide
  Target: LAMA2; (-) strand; PAM type: YTN; PAM sequence: CTT
gacccactgcctaacagtta

SEQ ID NO: 274847 - DNA, 20 bp, Artificial Sequence
  Description of Artificial Sequence: Synthetic oligonucleotide
  Target: LAMA2; (-) strand; PAM type: YTN; PAM sequence: TTC
ttgacccactgcctaacagt

SEQ ID NO: 274848 - DNA, 20 bp, Artificial Sequence
  Description of Artificial Sequence: Synthetic oligonucleotide
  Target: LAMA2; (-) strand; PAM type: YTN; PAM sequence: TTT
cttgacccactgcctaacag

SEQ ID NO: 274849 - DNA, 20 bp, Artificial Sequence
  Description of Artificial Sequence: Synthetic oligonucleotide
  Target: LAMA2; (-) strand; PAM type: YTN; PAM sequence: CTT
tcttgacccactgcctaaca

SEQ ID NO: 274850 - DNA, 20 bp, Artificial Sequence
  Description of Artificial Sequence: Synthetic oligonucleotide
  Target: LAMA2; (-) strand; PAM type: YTN; PAM sequence: CTC
tttcttgacccactgcctaa

SEQ ID NO: 274851 - DNA, 20 bp, Artificial Sequence
  Description of Artificial Sequence: Synthetic oligonucleotide
  Target: LAMA2; (-) strand; PAM type: YTN; PAM sequence: TTA
gtgagggtggctctttcttg

SEQ ID NO: 274852 - DNA, 20 bp, Artificial Sequence
  Description of Artificial Sequence: Synthetic oligonucleotide
  Target: LAMA2; (-) strand; PAM type: YTN; PAM sequence: CTA
gaagttagtgagggtggctc

SEQ ID NO: 274853 - DNA, 20 bp, Artificial Sequence
  Description of Artificial Sequence: Synthetic oligonucleotide
  Target: LAMA2; (-) strand; PAM type: YTN; PAM sequence: TTC
ctagaagttagtgagggtgg

SEQ ID NO: 274854 - DNA, 20 bp, Artificial Sequence
  Description of Artificial Sequence: Synthetic oligonucleotide
  Target: LAMA2; (-) strand; PAM type: YTN; PAM sequence: CTG
tattcctagaagttagtgag

SEQ ID NO: 274855 - DNA, 20 bp, Artificial Sequence
  Description of Artificial Sequence: Synthetic oligonucleotide
  Target: LAMA2; (-) strand; PAM type: YTN; PAM sequence: TTG
tcaggtgctgtattcctaga

SEQ ID NO: 274856 - DNA, 20 bp, Artificial Sequence
  Description of Artificial Sequence: Synthetic oligonucleotide
  Target: LAMA2; (-) strand; PAM type: YTN; PAM sequence: TTA
ttgtcaggtgctgtattcct

SEQ ID NO: 274857 - DNA, 20 bp, Artificial Sequence
  Description of Artificial Sequence: Synthetic oligonucleotide
  Target: LAMA2; (-) strand; PAM type: YTN; PAM sequence: CTG
tggtagaagttattgtcagg

SEQ ID NO: 274858 - DNA, 20 bp, Artificial Sequence
  Description of Artificial Sequence: Synthetic oligonucleotide
  Target: LAMA2; (-) strand; PAM type: YTN; PAM sequence: CTA
gccctgtggtagaagttatt

SEQ ID NO: 274859 - DNA, 20 bp, Artificial Sequence
  Description of Artificial Sequence: Synthetic oligonucleotide
  Target: LAMA2; (-) strand; PAM type: YTN; PAM sequence: TTC
ctagccctgtggtagaagtt

SEQ ID NO: 274860 - DNA, 20 bp, Artificial Sequence
  Description of Artificial Sequence: Synthetic oligonucleotide
  Target: LAMA2; (-) strand; PAM type: YTN; PAM sequence: TTA
aagaacaaatatggccattc

SEQ ID NO: 274861 - DNA, 20 bp, Artificial Sequence
  Description of Artificial Sequence: Synthetic oligonucleotide
  Target: LAMA2; (-) strand; PAM type: YTN; PAM sequence: CTT
aaagaacaaatatggccatt

SEQ ID NO: 274862 - DNA, 20 bp, Artificial Sequence
  Description of Artificial Sequence: Synthetic oligonucleotide
  Target: LAMA2; (-) strand; PAM type: YTN; PAM sequence: TTG
aatcacatgtcttaaagaac

SEQ ID NO: 274863 - DNA, 20 bp, Artificial Sequence
  Description of Artificial Sequence: Synthetic oligonucleotide
  Target: LAMA2; (-) strand; PAM type: YTN; PAM sequence: TTT
gaatcacatgtcttaaagaa

SEQ ID NO: 274864 - DNA, 20 bp, Artificial Sequence
  Description of Artificial Sequence: Synthetic oligonucleotide
  Target: LAMA2; (-) strand; PAM type: YTN; PAM sequence: TTA
gcagaaatatttgaatcaca

SEQ ID NO: 274865 - DNA, 20 bp, Artificial Sequence
  Description of Artificial Sequence: Synthetic oligonucleotide
  Target: LAMA2; (-) strand; PAM type: YTN; PAM sequence: TTA
attagcagaaatatttgaat

SEQ ID NO: 274866 - DNA, 20 bp, Artificial Sequence
  Description of Artificial Sequence: Synthetic oligonucleotide
  Target: LAMA2; (-) strand; PAM type: YTN; PAM sequence: TTT
aattagcagaaatatttgaa

SEQ ID NO: 274867 - DNA, 20 bp, Artificial Sequence
  Description of Artificial Sequence: Synthetic oligonucleotide
  Target: LAMA2; (-) strand; PAM type: YTN; PAM sequence: CTA
agacagccatggtttaatta

SEQ ID NO: 274868 - DNA, 20 bp, Artificial Sequence
  Description of Artificial Sequence: Synthetic oligonucleotide
  Target: LAMA2; (-) strand; PAM type: YTN; PAM sequence: TTA
tagcagcccaaatgggctaa

SEQ ID NO: 274869 - DNA, 20 bp, Artificial Sequence
  Description of Artificial Sequence: Synthetic oligonucleotide
  Target: LAMA2; (-) strand; PAM type: YTN; PAM sequence: TTC
attatagcagcccaaatggg

SEQ ID NO: 274870 - DNA, 20 bp, Artificial Sequence
  Description of Artificial Sequence: Synthetic oligonucleotide
  Target: LAMA2; (-) strand; PAM type: YTN; PAM sequence: TTT
cattatagcagcccaaatgg

SEQ ID NO: 274871 - DNA, 20 bp, Artificial Sequence
  Description of Artificial Sequence: Synthetic oligonucleotide
  Target: LAMA2; (-) strand; PAM type: YTN; PAM sequence: TTT
tcattatagcagcccaaatg

SEQ ID NO: 274872 - DNA, 20 bp, Artificial Sequence
  Description of Artificial Sequence: Synthetic oligonucleotide
  Target: LAMA2; (-) strand; PAM type: YTN; PAM sequence: CTA
tgatattttcattatagcag

SEQ ID NO: 274873 - DNA, 20 bp, Artificial Sequence
  Description of Artificial Sequence: Synthetic oligonucleotide
  Target: LAMA2; (-) strand; PAM type: YTN; PAM sequence: TTA
taaggcacaaaatctatgat

SEQ ID NO: 274874 - DNA, 20 bp, Artificial Sequence
  Description of Artificial Sequence: Synthetic oligonucleotide
  Target: LAMA2; (-) strand; PAM type: YTN; PAM sequence: TTC
agttataaggcacaaaatct

SEQ ID NO: 274875 - DNA, 20 bp, Artificial Sequence
  Description of Artificial Sequence: Synthetic oligonucleotide
  Target: LAMA2; (-) strand; PAM type: YTN; PAM sequence: TTT
cagttataaggcacaaaatc

SEQ ID NO: 274876 - DNA, 20 bp, Artificial Sequence
  Description of Artificial Sequence: Synthetic oligonucleotide
  Target: LAMA2; (-) strand; PAM type: YTN; PAM sequence: TTC
acaaatgagaaatgcatttc

SEQ ID NO: 274877 - DNA, 20 bp, Artificial Sequence
  Description of Artificial Sequence: Synthetic oligonucleotide
  Target: LAMA2; (-) strand; PAM type: YTN; PAM sequence: CTT
cacaaatgagaaatgcattt

SEQ ID NO: 274878 - DNA, 20 bp, Artificial Sequence
  Description of Artificial Sequence: Synthetic oligonucleotide
  Target: LAMA2; (-) strand; PAM type: YTN; PAM sequence: CTC
agccttcacaaatgagaaat

SEQ ID NO: 274879 - DNA, 20 bp, Artificial Sequence
  Description of Artificial Sequence: Synthetic oligonucleotide
  Target: LAMA2; (-) strand; PAM type: YTN; PAM sequence: CTC
tcagccttcacaaatgagaa

SEQ ID NO: 274880 - DNA, 20 bp, Artificial Sequence
  Description of Artificial Sequence: Synthetic oligonucleotide
  Target: LAMA2; (-) strand; PAM type: YTN; PAM sequence: TTG
gacctctcagccttcacaaa

SEQ ID NO: 274881 - DNA, 20 bp, Artificial Sequence
  Description of Artificial Sequence: Synthetic oligonucleotide
  Target: LAMA2; (-) strand; PAM type: YTN; PAM sequence: CTT
ggacctctcagccttcacaa

SEQ ID NO: 274882 - DNA, 20 bp, Artificial Sequence
  Description of Artificial Sequence: Synthetic oligonucleotide
  Target: LAMA2; (-) strand; PAM type: YTN; PAM sequence: TTG
atcttggacctctcagcctt

SEQ ID NO: 274883 - DNA, 20 bp, Artificial Sequence
  Description of Artificial Sequence: Synthetic oligonucleotide
  Target: LAMA2; (-) strand; PAM type: YTN; PAM sequence: CTT
gatcttggacctctcagcct

SEQ ID NO: 274884 - DNA, 20 bp, Artificial Sequence
  Description of Artificial Sequence: Synthetic oligonucleotide
  Target: LAMA2; (-) strand; PAM type: YTN; PAM sequence: TTA
ccaggcaccaaaccagccag

SEQ ID NO: 274885 - DNA, 20 bp, Artificial Sequence
  Description of Artificial Sequence: Synthetic oligonucleotide
  Target: LAMA2; (-) strand; PAM type: YTN; PAM sequence: CTT
accaggcaccaaaccagcca

SEQ ID NO: 274886 - DNA, 20 bp, Artificial Sequence
  Description of Artificial Sequence: Synthetic oligonucleotide
  Target: LAMA2; (-) strand; PAM type: YTN; PAM sequence: CTC
cttaccaggcaccaaaccag

SEQ ID NO: 274887 - DNA, 20 bp, Artificial Sequence
  Description of Artificial Sequence: Synthetic oligonucleotide
  Target: LAMA2; (-) strand; PAM type: YTN; PAM sequence: CTG
aaccaggaagcagctcctta

SEQ ID NO: 274888 - DNA, 20 bp, Artificial Sequence
  Description of Artificial Sequence: Synthetic oligonucleotide
  Target: LAMA2; (-) strand; PAM type: YTN; PAM sequence: CTC
tgaaccaggaagcagctcct

SEQ ID NO: 274889 - DNA, 20 bp, Artificial Sequence
  Description of Artificial Sequence: Synthetic oligonucleotide
  Target: LAMA2; (-) strand; PAM type: YTN; PAM sequence: CTA
taacaaggagacagccatct

SEQ ID NO: 274890 - DNA, 20 bp, Artificial Sequence
  Description of Artificial Sequence: Synthetic oligonucleotide
  Target: LAMA2; (-) strand; PAM type: YTN; PAM sequence: CTA
ccacatgaaactataacaag

SEQ ID NO: 274891 - DNA, 20 bp, Artificial Sequence
  Description of Artificial Sequence: Synthetic oligonucleotide
  Target: LAMA2; (-) strand; PAM type: YTN; PAM sequence: TTC
taccacatgaaactataaca

SEQ ID NO: 274892 - DNA, 20 bp, Artificial Sequence
  Description of Artificial Sequence: Synthetic oligonucleotide
  Target: LAMA2; (-) strand; PAM type: YTN; PAM sequence: TTT
ctaccacatgaaactataac

SEQ ID NO: 274893 - DNA, 20 bp, Artificial Sequence
  Description of Artificial Sequence: Synthetic oligonucleotide
  Target: LAMA2; (-) strand; PAM type: YTN; PAM sequence: CTT
tctaccacatgaaactataa

SEQ ID NO: 274894 - DNA, 20 bp, Artificial Sequence
  Description of Artificial Sequence: Synthetic oligonucleotide
  Target: LAMA2; (-) strand; PAM type: YTN; PAM sequence: TTG
ccctttctaccacatgaaac

SEQ ID NO: 274895 - DNA, 20 bp, Artificial Sequence
  Description of Artificial Sequence: Synthetic oligonucleotide
  Target: LAMA2; (-) strand; PAM type: YTN; PAM sequence: CTT
gccctttctaccacatgaaa

SEQ ID NO: 274896 - DNA, 20 bp, Artificial Sequence
  Description of Artificial Sequence: Synthetic oligonucleotide
  Target: LAMA2; (-) strand; PAM type: YTN; PAM sequence: TTA
taaaagggatgccagataac

SEQ ID NO: 274897 - DNA, 20 bp, Artificial Sequence
  Description of Artificial Sequence: Synthetic oligonucleotide
  Target: LAMA2; (-) strand; PAM type: YTN; PAM sequence: CTT
ataaaagggatgccagataa

SEQ ID NO: 274898 - DNA, 20 bp, Artificial Sequence
  Description of Artificial Sequence: Synthetic oligonucleotide
  Target: LAMA2; (-) strand; PAM type: YTN; PAM sequence: CTC
ttataaaagggatgccagat

SEQ ID NO: 274899 - DNA, 20 bp, Artificial Sequence
  Description of Artificial Sequence: Synthetic oligonucleotide
  Target: LAMA2; (-) strand; PAM type: YTN; PAM sequence: TTA
gtgctcttataaaagggatg

SEQ ID NO: 274900 - DNA, 20 bp, Artificial Sequence
  Description of Artificial Sequence: Synthetic oligonucleotide
  Target: LAMA2; (-) strand; PAM type: YTN; PAM sequence: TTA
ggtcataagggcaagaatga

SEQ ID NO: 274901 - DNA, 20 bp, Artificial Sequence
  Description of Artificial Sequence: Synthetic oligonucleotide
  Target: LAMA2; (-) strand; PAM type: YTN; PAM sequence: TTG
agaggagattaggtcataag

SEQ ID NO: 274902 - DNA, 20 bp, Artificial Sequence
  Description of Artificial Sequence: Synthetic oligonucleotide
  Target: LAMA2; (-) strand; PAM type: YTN; PAM sequence: TTT
gagaggagattaggtcataa

SEQ ID NO: 274903 - DNA, 20 bp, Artificial Sequence
  Description of Artificial Sequence: Synthetic oligonucleotide
  Target: LAMA2; (-) strand; PAM type: YTN; PAM sequence: CTT
tgagaggagattaggtcata

SEQ ID NO: 274904 - DNA, 20 bp, Artificial Sequence
  Description of Artificial Sequence: Synthetic oligonucleotide
  Target: LAMA2; (-) strand; PAM type: YTN; PAM sequence: TTA
atacagagcctttgagagga

SEQ ID NO: 274905 - DNA, 20 bp, Artificial Sequence
  Description of Artificial Sequence: Synthetic oligonucleotide
  Target: LAMA2; (-) strand; PAM type: YTN; PAM sequence: TTA
tagcagcgtgagaagagatt

SEQ ID NO: 274906 - DNA, 20 bp, Artificial Sequence
  Description of Artificial Sequence: Synthetic oligonucleotide
  Target: LAMA2; (-) strand; PAM type: YTN; PAM sequence: TTT
atagcagcgtgagaagagat

SEQ ID NO: 274907 - DNA, 20 bp, Artificial Sequence
  Description of Artificial Sequence: Synthetic oligonucleotide
  Target: LAMA2; (-) strand; PAM type: YTN; PAM sequence: CTT
tatagcagcgtgagaagaga

SEQ ID NO: 274908 - DNA, 20 bp, Artificial Sequence
  Description of Artificial Sequence: Synthetic oligonucleotide
  Target: LAMA2; (-) strand; PAM type: YTN; PAM sequence: TTC
tttatagcagcgtgagaaga

SEQ ID NO: 274909 - DNA, 20 bp, Artificial Sequence
  Description of Artificial Sequence: Synthetic oligonucleotide
  Target: LAMA2; (-) strand; PAM type: YTN; PAM sequence: CTC
aggtagttctttatagcagc

SEQ ID NO: 274910 - DNA, 20 bp, Artificial Sequence
  Description of Artificial Sequence: Synthetic oligonucleotide
  Target: LAMA2; (-) strand; PAM type: YTN; PAM sequence: TTA
cccagtctcaggtagttctt

SEQ ID NO: 274911 - DNA, 20 bp, Artificial Sequence
  Description of Artificial Sequence: Synthetic oligonucleotide
  Target: LAMA2; (-) strand; PAM type: YTN; PAM sequence: TTC
ataagttacccagtctcagg

SEQ ID NO: 274912 - DNA, 20 bp, Artificial Sequence
  Description of Artificial Sequence: Synthetic oligonucleotide
  Target: LAMA2; (-) strand; PAM type: YTN; PAM sequence: CTT
cataagttacccagtctcag

SEQ ID NO: 274913 - DNA, 20 bp, Artificial Sequence
  Description of Artificial Sequence: Synthetic oligonucleotide
  Target: LAMA2; (-) strand; PAM type: YTN; PAM sequence: TTC
ttcataagttacccagtctc

SEQ ID NO: 274914 - DNA, 20 bp, Artificial Sequence
  Description of Artificial Sequence: Synthetic oligonucleotide
  Target: LAMA2; (-) strand; PAM type: YTN; PAM sequence: TTT
cttcataagttacccagtct

SEQ ID NO: 274915 - DNA, 20 bp, Artificial Sequence
  Description of Artificial Sequence: Synthetic oligonucleotide
  Target: LAMA2; (-) strand; PAM type: YTN; PAM sequence: TTT
tcttcataagttacccagtc

SEQ ID NO: 274916 - DNA, 20 bp, Artificial Sequence
  Description of Artificial Sequence: Synthetic oligonucleotide
  Target: LAMA2; (-) strand; PAM type: YTN; PAM sequence: CTT
ttcttcataagttacccagt

SEQ ID NO: 274917 - DNA, 20 bp, Artificial Sequence
  Description of Artificial Sequence: Synthetic oligonucleotide
  Target: LAMA2; (-) strand; PAM type: YTN; PAM sequence: TTA
tacgtcttttcttcataagt

SEQ ID NO: 274918 - DNA, 20 bp, Artificial Sequence
  Description of Artificial Sequence: Synthetic oligonucleotide
  Target: LAMA2; (-) strand; PAM type: YTN; PAM sequence: TTT
atacgtcttttcttcataag

SEQ ID NO: 274919 - DNA, 20 bp, Artificial Sequence
  Description of Artificial Sequence: Synthetic oligonucleotide
  Target: LAMA2; (-) strand; PAM type: YTN; PAM sequence: CTG
tggtcaatttatacgtcttt

SEQ ID NO: 274920 - DNA, 20 bp, Artificial Sequence
  Description of Artificial Sequence: Synthetic oligonucleotide
  Target: LAMA2; (-) strand; PAM type: YTN; PAM sequence: CTG
cagaactgtggtcaatttat

SEQ ID NO: 274921 - DNA, 20 bp, Artificial Sequence
  Description of Artificial Sequence: Synthetic oligonucleotide
  Target: LAMA2; (-) strand; PAM type: YTN; PAM sequence: TTA
agcctgcagaactgtggtca

SEQ ID NO: 274922 - DNA, 20 bp, Artificial Sequence
  Description of Artificial Sequence: Synthetic oligonucleotide
  Target: LAMA2; (-) strand; PAM type: YTN; PAM sequence: TTG
ttaagcctgcagaactgtgg

SEQ ID NO: 274923 - DNA, 20 bp, Artificial Sequence
  Description of Artificial Sequence: Synthetic oligonucleotide
  Target: LAMA2; (-) strand; PAM type: YTN; PAM sequence: CTT
gttaagcctgcagaactgtg

SEQ ID NO: 274924 - DNA, 20 bp, Artificial Sequence
  Description of Artificial Sequence: Synthetic oligonucleotide
  Target: LAMA2; (-) strand; PAM type: YTN; PAM sequence: TTC
ttgttaagcctgcagaactg

SEQ ID NO: 274925 - DNA, 20 bp, Artificial Sequence
  Description of Artificial Sequence: Synthetic oligonucleotide
  Target: LAMA2; (-) strand; PAM type: YTN; PAM sequence: CTT
cttgttaagcctgcagaact

SEQ ID NO: 274926 - DNA, 20 bp, Artificial Sequence
  Description of Artificial Sequence: Synthetic oligonucleotide
  Target: LAMA2; (-) strand; PAM type: YTN; PAM sequence: CTA
gtcatgcttcttgttaagcc

SEQ ID NO: 274927 - DNA, 20 bp, Artificial Sequence
  Description of Artificial Sequence: Synthetic oligonucleotide
  Target: LAMA2; (-) strand; PAM type: YTN; PAM sequence: CTC
ctagtcatgcttcttgttaa

SEQ ID NO: 274928 - DNA, 20 bp, Artificial Sequence
  Description of Artificial Sequence: Synthetic oligonucleotide
  Target: LAMA2; (-) strand; PAM type: YTN; PAM sequence: CTG
aggcctcctagtcatgcttc

SEQ ID NO: 274929 - DNA, 20 bp, Artificial Sequence
  Description of Artificial Sequence: Synthetic oligonucleotide
  Target: LAMA2; (-) strand; PAM type: YTN; PAM sequence: TTC
ctgaggcctcctagtcatgc

SEQ ID NO: 274930 - DNA, 20 bp, Artificial Sequence
  Description of Artificial Sequence: Synthetic oligonucleotide
  Target: LAMA2; (-) strand; PAM type: YTN; PAM sequence: TTT
cctgaggcctcctagtcatg

SEQ ID NO: 274931 - DNA, 20 bp, Artificial Sequence
  Description of Artificial Sequence: Synthetic oligonucleotide
  Target: LAMA2; (-) strand; PAM type: YTN; PAM sequence: CTG
ccatgatcgtaaatttcctg

SEQ ID NO: 274932 - DNA, 20 bp, Artificial Sequence
  Description of Artificial Sequence: Synthetic oligonucleotide
  Target: LAMA2; (-) strand; PAM type: YTN; PAM sequence: TTC
tgccatgatcgtaaatttcc

SEQ ID NO: 274933 - DNA, 20 bp, Artificial Sequence
  Description of Artificial Sequence: Synthetic oligonucleotide
  Target: LAMA2; (-) strand; PAM type: YTN; PAM sequence: CTT
ctgccatgatcgtaaatttc

SEQ ID NO: 274934 - DNA, 20 bp, Artificial Sequence
  Description of Artificial Sequence: Synthetic oligonucleotide
  Target: LAMA2; (-) strand; PAM type: YTN; PAM sequence: TTG
ccttctgccatgatcgtaaa

SEQ ID NO: 274935 - DNA, 20 bp, Artificial Sequence
  Description of Artificial Sequence: Synthetic oligonucleotide
  Target: LAMA2; (-) strand; PAM type: YTN; PAM sequence: TTT
gccttctgccatgatcgtaa

SEQ ID NO: 274936 - DNA, 20 bp, Artificial Sequence
  Description of Artificial Sequence: Synthetic oligonucleotide
  Target: LAMA2; (-) strand; PAM type: YTN; PAM sequence: CTT
tgccttctgccatgatcgta

SEQ ID NO: 274937 - DNA, 20 bp, Artificial Sequence
  Description of Artificial Sequence: Synthetic oligonucleotide
  Target: LAMA2; (-) strand; PAM type: YTN; PAM sequence: TTC
cctttgccttctgccatgat

SEQ ID NO: 274938 - DNA, 20 bp, Artificial Sequence
  Description of Artificial Sequence: Synthetic oligonucleotide
  Target: LAMA2; (-) strand; PAM type: YTN; PAM sequence: TTT
ccctttgccttctgccatga

SEQ ID NO: 274939 - DNA, 20 bp, Artificial Sequence
  Description of Artificial Sequence: Synthetic oligonucleotide
  Target: LAMA2; (-) strand; PAM type: YTN; PAM sequence: CTT
tccctttgccttctgccatg

SEQ ID NO: 274940 - DNA, 20 bp, Artificial Sequence
  Description of Artificial Sequence: Synthetic oligonucleotide
  Target: LAMA2; (-) strand; PAM type: YTN; PAM sequence: TTG
ctttccctttgccttctgcc

SEQ ID NO: 274941 - DNA, 20 bp, Artificial Sequence
  Description of Artificial Sequence: Synthetic oligonucleotide
  Target: LAMA2; (-) strand; PAM type: YTN; PAM sequence: CTT
gctttccctttgccttctgc

SEQ ID NO: 274942 - DNA, 20 bp, Artificial Sequence
  Description of Artificial Sequence: Synthetic oligonucleotide
  Target: LAMA2; (-) strand; PAM type: YTN; PAM sequence: CTA
tgtgaagaaggtccttgctt

SEQ ID NO: 274943 - DNA, 20 bp, Artificial Sequence
  Description of Artificial Sequence: Synthetic oligonucleotide
  Target: LAMA2; (-) strand; PAM type: YTN; PAM sequence: CTG
ccactatgtgaagaaggtcc

SEQ ID NO: 274944 - DNA, 20 bp, Artificial Sequence
  Description of Artificial Sequence: Synthetic oligonucleotide
  Target: LAMA2; (-) strand; PAM type: YTN; PAM sequence: TTC
ctgccactatgtgaagaagg

SEQ ID NO: 274945 - DNA, 20 bp, Artificial Sequence
  Description of Artificial Sequence: Synthetic oligonucleotide
  Target: LAMA2; (-) strand; PAM type: YTN; PAM sequence: TTT
cctgccactatgtgaagaag

SEQ ID NO: 274946 - DNA, 20 bp, Artificial Sequence
  Description of Artificial Sequence: Synthetic oligonucleotide
  Target: LAMA2; (-) strand; PAM type: YTN; PAM sequence: CTT
tcctgccactatgtgaagaa

SEQ ID NO: 274947 - DNA, 20 bp, Artificial Sequence
  Description of Artificial Sequence: Synthetic oligonucleotide
  Target: LAMA2; (-) strand; PAM type: YTN; PAM sequence: CTC
tttcctgccactatgtgaag

SEQ ID NO: 274948 - DNA, 20 bp, Artificial Sequence
  Description of Artificial Sequence: Synthetic oligonucleotide
  Target: LAMA2; (-) strand; PAM type: YTN; PAM sequence: CTC
tctttcctgccactatgtga

SEQ ID NO: 274949 - DNA, 20 bp, Artificial Sequence
  Description of Artificial Sequence: Synthetic oligonucleotide
  Target: LAMA2; (-) strand; PAM type: YTN; PAM sequence: CTC
tctctttcctgccactatgt

SEQ ID NO: 274950 - DNA, 20 bp, Artificial Sequence
  Description of Artificial Sequence: Synthetic oligonucleotide
  Target: LAMA2; (-) strand; PAM type: YTN; PAM sequence: TTC
tctctctttcctgccactat

SEQ ID NO: 274951 - DNA, 20 bp, Artificial Sequence
  Description of Artificial Sequence: Synthetic oligonucleotide
  Target: LAMA2; (-) strand; PAM type: YTN; PAM sequence: TTC
attctctctctttcctgcca

SEQ ID NO: 274952 - DNA, 20 bp, Artificial Sequence
  Description of Artificial Sequence: Synthetic oligonucleotide
  Target: LAMA2; (-) strand; PAM type: YTN; PAM sequence: TTT
cattctctctctttcctgcc

SEQ ID NO: 274953 - DNA, 20 bp, Artificial Sequence
  Description of Artificial Sequence: Synthetic oligonucleotide
  Target: LAMA2; (-) strand; PAM type: YTN; PAM sequence: CTT
tcattctctctctttcctgc

SEQ ID NO: 274954 - DNA, 20 bp, Artificial Sequence
  Description of Artificial Sequence: Synthetic oligonucleotide
  Target: LAMA2; (-) strand; PAM type: YTN; PAM sequence: TTC
ccctttcattctctctcttt

SEQ ID NO: 274955 - DNA, 20 bp, Artificial Sequence
  Description of Artificial Sequence: Synthetic oligonucleotide
  Target: LAMA2; (-) strand; PAM type: YTN; PAM sequence: CTT
cccctttcattctctctctt

SEQ ID NO: 274956 - DNA, 20 bp, Artificial Sequence
  Description of Artificial Sequence: Synthetic oligonucleotide
  Target: LAMA2; (-) strand; PAM type: YTN; PAM sequence: TTC
gaaggtatgtggcacttccc

SEQ ID NO: 274957 - DNA, 20 bp, Artificial Sequence
  Description of Artificial Sequence: Synthetic oligonucleotide
  Target: LAMA2; (-) strand; PAM type: YTN; PAM sequence: TTG
ttcgaaggtatgtggcactt

SEQ ID NO: 274958 - DNA, 20 bp, Artificial Sequence
  Description of Artificial Sequence: Synthetic oligonucleotide
  Target: LAMA2; (-) strand; PAM type: YTN; PAM sequence: CTC
acaagatcaggttgttcgaa

SEQ ID NO: 274959 - DNA, 20 bp, Artificial Sequence
  Description of Artificial Sequence: Synthetic oligonucleotide
  Target: LAMA2; (-) strand; PAM type: YTN; PAM sequence: TTC
tcacaagatcaggttgttcg

SEQ ID NO: 274960 - DNA, 20 bp, Artificial Sequence
  Description of Artificial Sequence: Synthetic oligonucleotide
  Target: LAMA2; (-) strand; PAM type: YTN; PAM sequence: TTG
tgatagtgaataaattctca

SEQ ID NO: 274961 - DNA, 20 bp, Artificial Sequence
  Description of Artificial Sequence: Synthetic oligonucleotide
  Target: LAMA2; (-) strand; PAM type: YTN; PAM sequence: CTT
gtgatagtgaataaattctc

SEQ ID NO: 274962 - DNA, 20 bp, Artificial Sequence
  Description of Artificial Sequence: Synthetic oligonucleotide
  Target: LAMA2; (-) strand; PAM type: YTN; PAM sequence: TTC
ttgtgatagtgaataaattc

SEQ ID NO: 274963 - DNA, 20 bp, Artificial Sequence
  Description of Artificial Sequence: Synthetic oligonucleotide
  Target: LAMA2; (-) strand; PAM type: YTN; PAM sequence: CTG
ttcttgtgatagtgaataaa

SEQ ID NO: 274964 - DNA, 20 bp, Artificial Sequence
  Description of Artificial Sequence: Synthetic oligonucleotide
  Target: LAMA2; (-) strand; PAM type: YTN; PAM sequence: TTG
ctgttcttgtgatagtgaat

SEQ ID NO: 274965 - DNA, 20 bp, Artificial Sequence
  Description of Artificial Sequence: Synthetic oligonucleotide
  Target: LAMA2; (-) strand; PAM type: YTN; PAM sequence: CTT
gctgttcttgtgatagtgaa

SEQ ID NO: 274966 - DNA, 20 bp, Artificial Sequence
  Description of Artificial Sequence: Synthetic oligonucleotide
  Target: LAMA2; (-) strand; PAM type: YTN; PAM sequence: CTC
cccccttgctgttcttgtga

SEQ ID NO: 274967 - DNA, 20 bp, Artificial Sequence
  Description of Artificial Sequence: Synthetic oligonucleotide
  Target: LAMA2; (-) strand; PAM type: YTN; PAM sequence: CTG
aatcatgggagcaaacctcc

SEQ ID NO: 274968 - DNA, 20 bp, Artificial Sequence
  Description of Artificial Sequence: Synthetic oligonucleotide
  Target: LAMA2; (-) strand; PAM type: YTN; PAM sequence: CTG
gtgggtggtgactgaatcat

SEQ ID NO: 274969 - DNA, 20 bp, Artificial Sequence
  Description of Artificial Sequence: Synthetic oligonucleotide
  Target: LAMA2; (-) strand; PAM type: YTN; PAM sequence: TTG
agggaggggcctggtgggtg

SEQ ID NO: 274970 - DNA, 20 bp, Artificial Sequence
  Description of Artificial Sequence: Synthetic oligonucleotide
  Target: LAMA2; (-) strand; PAM type: YTN; PAM sequence: TTG
taatacccacatgttgaggg

SEQ ID NO: 274971 - DNA, 20 bp, Artificial Sequence
  Description of Artificial Sequence: Synthetic oligonucleotide
  Target: LAMA2; (-) strand; PAM type: YTN; PAM sequence: CTC
aagttgtaatacccacatgt

SEQ ID NO: 274972 - DNA, 20 bp, Artificial Sequence
  Description of Artificial Sequence: Synthetic oligonucleotide
  Target: LAMA2; (-) strand; PAM type: YTN; PAM sequence: CTC
atctcaagttgtaataccca

SEQ ID NO: 274973 - DNA, 20 bp, Artificial Sequence
  Description of Artificial Sequence: Synthetic oligonucleotide
  Target: LAMA2; (-) strand; PAM type: YTN; PAM sequence: CTC
aaatctcatctcaagttgta

SEQ ID NO: 274974 - DNA, 20 bp, Artificial Sequence
  Description of Artificial Sequence: Synthetic oligonucleotide
  Target: LAMA2; (-) strand; PAM type: YTN; PAM sequence: CTG
tgtccccccaccgaccacct

SEQ ID NO: 274975 - DNA, 20 bp, Artificial Sequence
  Description of Artificial Sequence: Synthetic oligonucleotide
  Target: LAMA2; (-) strand; PAM type: YTN; PAM sequence: CTC
tgtgtccccccaccgaccac

SEQ ID NO: 274976 - DNA, 20 bp, Artificial Sequence
  Description of Artificial Sequence: Synthetic oligonucleotide
  Target: LAMA2; (-) strand; PAM type: YTN; PAM sequence: TTC
tctgtgtccccccaccgacc

SEQ ID NO: 274977 - DNA, 20 bp, Artificial Sequence
  Description of Artificial Sequence: Synthetic oligonucleotide
  Target: LAMA2; (-) strand; PAM type: YTN; PAM sequence: TTT
ctctgtgtccccccaccgac

SEQ ID NO: 274978 - DNA, 20 bp, Artificial Sequence
  Description of Artificial Sequence: Synthetic oligonucleotide
  Target: LAMA2; (-) strand; PAM type: YTN; PAM sequence: TTT
tctctgtgtccccccaccga

SEQ ID NO: 274979 - DNA, 20 bp, Artificial Sequence
  Description of Artificial Sequence: Synthetic oligonucleotide
  Target: LAMA2; (-) strand; PAM type: YTN; PAM sequence: TTT
ttctctgtgtccccccaccg

SEQ ID NO: 274980 - DNA, 20 bp, Artificial Sequence
  Description of Artificial Sequence: Synthetic oligonucleotide
  Target: LAMA2; (-) strand; PAM type: YTN; PAM sequence: CTG
atatggtttttctctgtgtc

SEQ ID NO: 274981 - DNA, 20 bp, Artificial Sequence
  Description of Artificial Sequence: Synthetic oligonucleotide
  Target: LAMA2; (-) strand; PAM type: YTN; PAM sequence: TTG
gaggcagagcctgatatggt

SEQ ID NO: 274982 - DNA, 20 bp, Artificial Sequence
  Description of Artificial Sequence: Synthetic oligonucleotide
  Target: LAMA2; (-) strand; PAM type: YTN; PAM sequence: TTT
ggaggcagagcctgatatgg

SEQ ID NO: 274983 - DNA, 20 bp, Artificial Sequence
  Description of Artificial Sequence: Synthetic oligonucleotide
  Target: LAMA2; (-) strand; PAM type: YTN; PAM sequence: TTC
ccaatgtgatggtatttgga

SEQ ID NO: 274984 - DNA, 20 bp, Artificial Sequence
  Description of Artificial Sequence: Synthetic oligonucleotide
  Target: LAMA2; (-) strand; PAM type: YTN; PAM sequence: CTA
attcccaatgtgatggtatt

SEQ ID NO: 274985 - DNA, 20 bp, Artificial Sequence
  Description of Artificial Sequence: Synthetic oligonucleotide
  Target: LAMA2; (-) strand; PAM type: YTN; PAM sequence: TTG
aaacctaattcccaatgtga

SEQ ID NO: 274986 - DNA, 20 bp, Artificial Sequence
  Description of Artificial Sequence: Synthetic oligonucleotide
  Target: LAMA2; (-) strand; PAM type: YTN; PAM sequence: TTC
atatgttgaaacctaattcc

SEQ ID NO: 274987 - DNA, 20 bp, Artificial Sequence
  Description of Artificial Sequence: Synthetic oligonucleotide
  Target: LAMA2; (-) strand; PAM type: YTN; PAM sequence: CTC
aaattcatatgttgaaacct

SEQ ID NO: 274988 - DNA, 20 bp, Artificial Sequence
  Description of Artificial Sequence: Synthetic oligonucleotide
  Target: LAMA2; (-) strand; PAM type: YTN; PAM sequence: CTC
ctcaaattcatatgttgaaa

SEQ ID NO: 274989 - DNA, 20 bp, Artificial Sequence
  Description of Artificial Sequence: Synthetic oligonucleotide
  Target: LAMA2; (-) strand; PAM type: YTN; PAM sequence: TTC
tcctcaaattcatatgttga

SEQ ID NO: 274990 - DNA, 20 bp, Artificial Sequence
  Description of Artificial Sequence: Synthetic oligonucleotide
  Target: LAMA2; (-) strand; PAM type: YTN; PAM sequence: TTA
tgttctcctcaaattcatat

SEQ ID NO: 274991 - DNA, 20 bp, Artificial Sequence
  Description of Artificial Sequence: Synthetic oligonucleotide
  Target: LAMA2; (-) strand; PAM type: YTN; PAM sequence: TTT
atgttctcctcaaattcata

SEQ ID NO: 274992 - DNA, 20 bp, Artificial Sequence
  Description of Artificial Sequence: Synthetic oligonucleotide
  Target: LAMA2; (-) strand; PAM type: YTN; PAM sequence: TTG
aatgtttatgttctcctcaa

SEQ ID NO: 274993 - DNA, 20 bp, Artificial Sequence
  Description of Artificial Sequence: Synthetic oligonucleotide
  Target: LAMA2; (-) strand; PAM type: YTN; PAM sequence: CTG
tagattgaatgtttatgttc

SEQ ID NO: 274994 - DNA, 20 bp, Artificial Sequence
  Description of Artificial Sequence: Synthetic oligonucleotide
  Target: LAMA2; (-) strand; PAM type: YTN; PAM sequence: CTG
atagccaatgctgtagattg

SEQ ID NO: 274995 - DNA, 20 bp, Artificial Sequence
  Description of Artificial Sequence: Synthetic oligonucleotide
  Target: LAMA2; (-) strand; PAM type: YTN; PAM sequence: TTA
accctgatagccaatgctgt

SEQ ID NO: 274996 - DNA, 20 bp, Artificial Sequence
  Description of Artificial Sequence: Synthetic oligonucleotide
  Target: LAMA2; (-) strand; PAM type: YTN; PAM sequence: TTT
aaccctgatagccaatgctg

SEQ ID NO: 274997 - DNA, 20 bp, Artificial Sequence
  Description of Artificial Sequence: Synthetic oligonucleotide
  Target: LAMA2; (-) strand; PAM type: YTN; PAM sequence: CTT
taaccctgatagccaatgct

SEQ ID NO: 274998 - DNA, 20 bp, Artificial Sequence
  Description of Artificial Sequence: Synthetic oligonucleotide
  Target: LAMA2; (-) strand; PAM type: YTN; PAM sequence: CTG
tagtcagtactttaaccctg

SEQ ID NO: 274999 - DNA, 20 bp, Artificial Sequence
  Description of Artificial Sequence: Synthetic oligonucleotide
  Target: LAMA2; (-) strand; PAM type: YTN; PAM sequence: TTC
ctgtagtcagtactttaacc

SEQ ID NO: 275000 - DNA, 20 bp, Artificial Sequence
  Description of Artificial Sequence: Synthetic oligonucleotide
  Target: LAMA2; (-) strand; PAM type: YTN; PAM sequence: TTA
aaagttcctgtagtcagtac

SEQ ID NO: 275001 - DNA, 20 bp, Artificial Sequence
  Description of Artificial Sequence: Synthetic oligonucleotide
  Target: LAMA2; (-) strand; PAM type: YTN; PAM sequence: TTT
aaaagttcctgtagtcagta

SEQ ID NO: 275002 - DNA, 20 bp, Artificial Sequence
  Description of Artificial Sequence: Synthetic oligonucleotide
  Target: LAMA2; (-) strand; PAM type: YTN; PAM sequence: TTG
gtttaaaagttcctgtagtc

SEQ ID NO: 275003 - DNA, 20 bp, Artificial Sequence
  Description of Artificial Sequence: Synthetic oligonucleotide
  Target: LAMA2; (-) strand; PAM type: YTN; PAM sequence: TTT
ggtttaaaagttcctgtagt

SEQ ID NO: 275004 - DNA, 20 bp, Artificial Sequence
  Description of Artificial Sequence: Synthetic oligonucleotide
  Target: LAMA2; (-) strand; PAM type: YTN; PAM sequence: CTT
tggtttaaaagttcctgtag

SEQ ID NO: 275005 - DNA, 20 bp, Artificial Sequence
  Description of Artificial Sequence: Synthetic oligonucleotide
  Target: LAMA2; (-) strand; PAM type: YTN; PAM sequence: TTA
tatatgtctttggtttaaaa

SEQ ID NO: 275006 - DNA, 20 bp, Artificial Sequence
  Description of Artificial Sequence: Synthetic oligonucleotide
  Target: LAMA2; (-) strand; PAM type: YTN; PAM sequence: TTC
gttatatatgtctttggttt

SEQ ID NO: 275007 - DNA, 20 bp, Artificial Sequence
  Description of Artificial Sequence: Synthetic oligonucleotide
  Target: LAMA2; (-) strand; PAM type: YTN; PAM sequence: TTT
cgttatatatgtctttggtt

SEQ ID NO: 275008 - DNA, 20 bp, Artificial Sequence
  Description of Artificial Sequence: Synthetic oligonucleotide
  Target: LAMA2; (-) strand; PAM type: YTN; PAM sequence: TTT
tcgttatatatgtctttggt

SEQ ID NO: 275009 - DNA, 20 bp, Artificial Sequence
  Description of Artificial Sequence: Synthetic oligonucleotide
  Target: LAMA2; (-) strand; PAM type: YTN; PAM sequence: TTT
ttcgttatatatgtctttgg

SEQ ID NO: 275010 - DNA, 20 bp, Artificial Sequence
  Description of Artificial Sequence: Synthetic oligonucleotide
  Target: LAMA2; (-) strand; PAM type: YTN; PAM sequence: TTT
tttcgttatatatgtctttg

SEQ ID NO: 275011 - DNA, 20 bp, Artificial Sequence
  Description of Artificial Sequence: Synthetic oligonucleotide
  Target: LAMA2; (-) strand; PAM type: YTN; PAM sequence: CTT
ttttcgttatatatgtcttt

SEQ ID NO: 275012 - DNA, 20 bp, Artificial Sequence
  Description of Artificial Sequence: Synthetic oligonucleotide
  Target: LAMA2; (-) strand; PAM type: YTN; PAM sequence: TTC
ttttttcgttatatatgtct

SEQ ID NO: 275013 - DNA, 20 bp, Artificial Sequence
  Description of Artificial Sequence: Synthetic oligonucleotide
  Target: LAMA2; (-) strand; PAM type: YTN; PAM sequence: TTA
taattcttttttcgttatat

SEQ ID NO: 275014 - DNA, 20 bp, Artificial Sequence
  Description of Artificial Sequence: Synthetic oligonucleotide
  Target: LAMA2; (-) strand; PAM type: YTN; PAM sequence: TTT
ataattcttttttcgttata

SEQ ID NO: 275015 - DNA, 20 bp, Artificial Sequence
  Description of Artificial Sequence: Synthetic oligonucleotide
  Target: LAMA2; (-) strand; PAM type: YTN; PAM sequence: CTT
tataattcttttttcgttat

SEQ ID NO: 275016 - DNA, 20 bp, Artificial Sequence
  Description of Artificial Sequence: Synthetic oligonucleotide
  Target: LAMA2; (-) strand; PAM type: YTN; PAM sequence: TTC
cacaatgcatctttataatt

SEQ ID NO: 275017 - DNA, 20 bp, Artificial Sequence
  Description of Artificial Sequence: Synthetic oligonucleotide
  Target: LAMA2; (-) strand; PAM type: YTN; PAM sequence: TTT
ccacaatgcatctttataat

SEQ ID NO: 275018 - DNA, 20 bp, Artificial Sequence
  Description of Artificial Sequence: Synthetic oligonucleotide
  Target: LAMA2; (-) strand; PAM type: YTN; PAM sequence: CTT
tccacaatgcatctttataa

SEQ ID NO: 275019 - DNA, 20 bp, Artificial Sequence
  Description of Artificial Sequence: Synthetic oligonucleotide
  Target: LAMA2; (-) strand; PAM type: YTN; PAM sequence: CTA
atataccctttccacaatgc

SEQ ID NO: 275020 - DNA, 20 bp, Artificial Sequence
  Description of Artificial Sequence: Synthetic oligonucleotide
  Target: LAMA2; (-) strand; PAM type: YTN; PAM sequence: TTC
aatgtctaatataccctttc

SEQ ID NO: 275021 - DNA, 20 bp, Artificial Sequence
  Description of Artificial Sequence: Synthetic oligonucleotide
  Target: LAMA2; (-) strand; PAM type: YTN; PAM sequence: TTT
caatgtctaatatacccttt

SEQ ID NO: 275022 - DNA, 20 bp, Artificial Sequence
  Description of Artificial Sequence: Synthetic oligonucleotide
  Target: LAMA2; (-) strand; PAM type: YTN; PAM sequence: TTG
agtttcaatgtctaatatac

SEQ ID NO: 275023 - DNA, 20 bp, Artificial Sequence
  Description of Artificial Sequence: Synthetic oligonucleotide
  Target: LAMA2; (-) strand; PAM type: YTN; PAM sequence: CTG
ggatagtagaaagaattgag

SEQ ID NO: 275024 - DNA, 20 bp, Artificial Sequence
  Description of Artificial Sequence: Synthetic oligonucleotide
  Target: LAMA2; (-) strand; PAM type: YTN; PAM sequence: TTG
agaaacactgggatagtaga

SEQ ID NO: 275025 - DNA, 20 bp, Artificial Sequence
  Description of Artificial Sequence: Synthetic oligonucleotide
  Target: LAMA2; (-) strand; PAM type: YTN; PAM sequence: CTT
gagaaacactgggatagtag

SEQ ID NO: 275026 - DNA, 20 bp, Artificial Sequence
  Description of Artificial Sequence: Synthetic oligonucleotide
  Target: LAMA2; (-) strand; PAM type: YTN; PAM sequence: CTA
gagcttgagaaacactggga

SEQ ID NO: 275027 - DNA, 20 bp, Artificial Sequence
  Description of Artificial Sequence: Synthetic oligonucleotide
  Target: LAMA2; (-) strand; PAM type: YTN; PAM sequence: CTG
atgtaccctagagcttgaga

SEQ ID NO: 275028 - DNA, 20 bp, Artificial Sequence
  Description of Artificial Sequence: Synthetic oligonucleotide
  Target: LAMA2; (-) strand; PAM type: YTN; PAM sequence: TTC
tgatgtaccctagagcttga

SEQ ID NO: 275029 - DNA, 20 bp, Artificial Sequence
  Description of Artificial Sequence: Synthetic oligonucleotide
  Target: LAMA2; (-) strand; PAM type: YTN; PAM sequence: CTT
ctgatgtaccctagagcttg

SEQ ID NO: 275030 - DNA, 20 bp, Artificial Sequence
  Description of Artificial Sequence: Synthetic oligonucleotide
  Target: LAMA2; (-) strand; PAM type: YTN; PAM sequence: CTC
agagcttctgatgtacccta

SEQ ID NO: 275031 - DNA, 20 bp, Artificial Sequence
  Description of Artificial Sequence: Synthetic oligonucleotide
  Target: LAMA2; (-) strand; PAM type: YTN; PAM sequence: TTC
tcagagcttctgatgtaccc

SEQ ID NO: 275032 - DNA, 20 bp, Artificial Sequence
  Description of Artificial Sequence: Synthetic oligonucleotide
  Target: LAMA2; (-) strand; PAM type: YTN; PAM sequence: CTT
ctcagagcttctgatgtacc

SEQ ID NO: 275033 - DNA, 20 bp, Artificial Sequence
  Description of Artificial Sequence: Synthetic oligonucleotide
  Target: LAMA2; (-) strand; PAM type: YTN; PAM sequence: TTA
acaagccttctcagagcttc

SEQ ID NO: 275034 - DNA, 20 bp, Artificial Sequence
  Description of Artificial Sequence: Synthetic oligonucleotide
  Target: LAMA2; (-) strand; PAM type: YTN; PAM sequence: TTT
aacaagccttctcagagctt

SEQ ID NO: 275035 - DNA, 20 bp, Artificial Sequence
  Description of Artificial Sequence: Synthetic oligonucleotide
  Target: LAMA2; (-) strand; PAM type: YTN; PAM sequence: CTT
taacaagccttctcagagct

SEQ ID NO: 275036 - DNA, 20 bp, Artificial Sequence
  Description of Artificial Sequence: Synthetic oligonucleotide
  Target: LAMA2; (-) strand; PAM type: YTN; PAM sequence: CTG
ggctttaacaagccttctca

SEQ ID NO: 275037 - DNA, 20 bp, Artificial Sequence
  Description of Artificial Sequence: Synthetic oligonucleotide
  Target: LAMA2; (-) strand; PAM type: YTN; PAM sequence: CTG
ggggtgaggaccagcaatct

SEQ ID NO: 275038 - DNA, 20 bp, Artificial Sequence
  Description of Artificial Sequence: Synthetic oligonucleotide
  Target: LAMA2; (-) strand; PAM type: YTN; PAM sequence: TTC
tgggggtgaggaccagcaat

SEQ ID NO: 275039 - DNA, 20 bp, Artificial Sequence
  Description of Artificial Sequence: Synthetic oligonucleotide
  Target: LAMA2; (-) strand; PAM type: YTN; PAM sequence: CTC
agaaattctgggggtgagga

SEQ ID NO: 275040 - DNA, 20 bp, Artificial Sequence
  Description of Artificial Sequence: Synthetic oligonucleotide
  Target: LAMA2; (-) strand; PAM type: YTN; PAM sequence: CTA
cagactcagaaattctgggg

SEQ ID NO: 275041 - DNA, 20 bp, Artificial Sequence
  Description of Artificial Sequence: Synthetic oligonucleotide
  Target: LAMA2; (-) strand; PAM type: YTN; PAM sequence: CTG
ccacaaacctacagactcag

SEQ ID NO: 275042 - DNA, 20 bp, Artificial Sequence
  Description of Artificial Sequence: Synthetic oligonucleotide
  Target: LAMA2; (-) strand; PAM type: YTN; PAM sequence: CTC
aggccctgccacaaacctac

SEQ ID NO: 275043 - DNA, 20 bp, Artificial Sequence
  Description of Artificial Sequence: Synthetic oligonucleotide
  Target: LAMA2; (-) strand; PAM type: YTN; PAM sequence: TTC
tcaggccctgccacaaacct

SEQ ID NO: 275044 - DNA, 20 bp, Artificial Sequence
  Description of Artificial Sequence: Synthetic oligonucleotide
  Target: LAMA2; (-) strand; PAM type: YTN; PAM sequence: TTA
gaaatgcagattctcaggcc

SEQ ID NO: 275045 - DNA, 20 bp, Artificial Sequence
  Description of Artificial Sequence: Synthetic oligonucleotide
  Target: LAMA2; (-) strand; PAM type: YTN; PAM sequence: TTG
gagcccattagaaatgcaga

SEQ ID NO: 275046 - DNA, 20 bp, Artificial Sequence
  Description of Artificial Sequence: Synthetic oligonucleotide
  Target: LAMA2; (-) strand; PAM type: YTN; PAM sequence: CTT
ggagcccattagaaatgcag

SEQ ID NO: 275047 - DNA, 20 bp, Artificial Sequence
  Description of Artificial Sequence: Synthetic oligonucleotide
  Target: LAMA2; (-) strand; PAM type: YTN; PAM sequence: CTA
taagcagcagcagcatcacc

SEQ ID NO: 275048 - DNA, 20 bp, Artificial Sequence
  Description of Artificial Sequence: Synthetic oligonucleotide
  Target: LAMA2; (-) strand; PAM type: YTN; PAM sequence: CTA
aaatgtggtcccctataagc

SEQ ID NO: 275049 - DNA, 20 bp, Artificial Sequence
  Description of Artificial Sequence: Synthetic oligonucleotide
  Target: LAMA2; (-) strand; PAM type: YTN; PAM sequence: TTC
taaaatgtggtcccctataa

SEQ ID NO: 275050 - DNA, 20 bp, Artificial Sequence
  Description of Artificial Sequence: Synthetic oligonucleotide
  Target: LAMA2; (-) strand; PAM type: YTN; PAM sequence: CTG
aaacaggtgtacatagtcag

SEQ ID NO: 275051 - DNA, 20 bp, Artificial Sequence
  Description of Artificial Sequence: Synthetic oligonucleotide
  Target: LAMA2; (-) strand; PAM type: YTN; PAM sequence: CTC
ctgaaacaggtgtacatagt

SEQ ID NO: 275052 - DNA, 20 bp, Artificial Sequence
  Description of Artificial Sequence: Synthetic oligonucleotide
  Target: LAMA2; (-) strand; PAM type: YTN; PAM sequence: CTG
ggcagagctcctgaaacagg

SEQ ID NO: 275053 - DNA, 20 bp, Artificial Sequence
  Description of Artificial Sequence: Synthetic oligonucleotide
  Target: LAMA2; (-) strand; PAM type: YTN; PAM sequence: TTG
cactgggcagagctcctgaa

SEQ ID NO: 275054 - DNA, 20 bp, Artificial Sequence
  Description of Artificial Sequence: Synthetic oligonucleotide
  Target: LAMA2; (-) strand; PAM type: YTN; PAM sequence: TTT
gcactgggcagagctcctga

SEQ ID NO: 275055 - DNA, 20 bp, Artificial Sequence
  Description of Artificial Sequence: Synthetic oligonucleotide
  Target: LAMA2; (-) strand; PAM type: YTN; PAM sequence: TTT
tgcactgggcagagctcctg

SEQ ID NO: 275056 - DNA, 20 bp, Artificial Sequence
  Description of Artificial Sequence: Synthetic oligonucleotide
  Target: LAMA2; (-) strand; PAM type: YTN; PAM sequence: TTG
gagagagttttgcactgggc

SEQ ID NO: 275057 - DNA, 20 bp, Artificial Sequence
  Description of Artificial Sequence: Synthetic oligonucleotide
  Target: LAMA2; (-) strand; PAM type: YTN; PAM sequence: CTT
ggagagagttttgcactggg

SEQ ID NO: 275058 - DNA, 20 bp, Artificial Sequence
  Description of Artificial Sequence: Synthetic oligonucleotide
  Target: LAMA2; (-) strand; PAM type: YTN; PAM sequence: TTC
ttggagagagttttgcactg

SEQ ID NO: 275059 - DNA, 20 bp, Artificial Sequence
  Description of Artificial Sequence: Synthetic oligonucleotide
  Target: LAMA2; (-) strand; PAM type: YTN; PAM sequence: CTA
ttcttggagagagttttgca

SEQ ID NO: 275060 - DNA, 20 bp, Artificial Sequence
  Description of Artificial Sequence: Synthetic oligonucleotide
  Target: LAMA2; (-) strand; PAM type: YTN; PAM sequence: TTC
tattcttggagagagttttg

SEQ ID NO: 275061 - DNA, 20 bp, Artificial Sequence
  Description of Artificial Sequence: Synthetic oligonucleotide
  Target: LAMA2; (-) strand; PAM type: YTN; PAM sequence: TTT
ctattcttggagagagtttt

SEQ ID NO: 275062 - DNA, 20 bp, Artificial Sequence
  Description of Artificial Sequence: Synthetic oligonucleotide
  Target: LAMA2; (-) strand; PAM type: YTN; PAM sequence: TTA
atttctattcttggagagag

SEQ ID NO: 275063 - DNA, 20 bp, Artificial Sequence
  Description of Artificial Sequence: Synthetic oligonucleotide
  Target: LAMA2; (-) strand; PAM type: YTN; PAM sequence: CTG
aaaattaatttctattcttg

SEQ ID NO: 275064 - DNA, 20 bp, Artificial Sequence
  Description of Artificial Sequence: Synthetic oligonucleotide
  Target: LAMA2; (-) strand; PAM type: YTN; PAM sequence: TTC
ctgaaaattaatttctattc

SEQ ID NO: 275065 - DNA, 20 bp, Artificial Sequence
  Description of Artificial Sequence: Synthetic oligonucleotide
  Target: LAMA2; (-) strand; PAM type: YTN; PAM sequence: TTA
tgacatagagattcctgaaa

SEQ ID NO: 275066 - DNA, 20 bp, Artificial Sequence
  Description of Artificial Sequence: Synthetic oligonucleotide
  Target: LAMA2; (-) strand; PAM type: YTN; PAM sequence: CTT
atgacatagagattcctgaa

SEQ ID NO: 275067 - DNA, 20 bp, Artificial Sequence
  Description of Artificial Sequence: Synthetic oligonucleotide
  Target: LAMA2; (-) strand; PAM type: YTN; PAM sequence: CTC
cttatgacatagagattcct

SEQ ID NO: 275068 - DNA, 20 bp, Artificial Sequence
  Description of Artificial Sequence: Synthetic oligonucleotide
  Target: LAMA2; (-) strand; PAM type: YTN; PAM sequence: TTC
aagggtgtatccgaagatct

SEQ ID NO: 275069 - DNA, 20 bp, Artificial Sequence
  Description of Artificial Sequence: Synthetic oligonucleotide
  Target: LAMA2; (-) strand; PAM type: YTN; PAM sequence: CTA
ccattcaagggtgtatccga

SEQ ID NO: 275070 - DNA, 20 bp, Artificial Sequence
  Description of Artificial Sequence: Synthetic oligonucleotide
  Target: LAMA2; (-) strand; PAM type: YTN; PAM sequence: TTC
taccattcaagggtgtatcc

SEQ ID NO: 275071 - DNA, 20 bp, Artificial Sequence
  Description of Artificial Sequence: Synthetic oligonucleotide
  Target: LAMA2; (-) strand; PAM type: YTN; PAM sequence: TTT
ctaccattcaagggtgtatc

SEQ ID NO: 275072 - DNA, 20 bp, Artificial Sequence
  Description of Artificial Sequence: Synthetic oligonucleotide
  Target: LAMA2; (-) strand; PAM type: YTN; PAM sequence: TTT
tctaccattcaagggtgtat

SEQ ID NO: 275073 - DNA, 20 bp, Artificial Sequence
  Description of Artificial Sequence: Synthetic oligonucleotide
  Target: LAMA2; (-) strand; PAM type: YTN; PAM sequence: TTG
gccaagaggcattttctacc

SEQ ID NO: 275074 - DNA, 20 bp, Artificial Sequence
  Description of Artificial Sequence: Synthetic oligonucleotide
  Target: LAMA2; (-) strand; PAM type: YTN; PAM sequence: CTC
ggttggccaagaggcatttt

SEQ ID NO: 275075 - DNA, 20 bp, Artificial Sequence
  Description of Artificial Sequence: Synthetic oligonucleotide
  Target: LAMA2; (-) strand; PAM type: YTN; PAM sequence: CTA
gaatgaggggtctcggttgg

SEQ ID NO: 275076 - DNA, 20 bp, Artificial Sequence
  Description of Artificial Sequence: Synthetic oligonucleotide
  Target: LAMA2; (-) strand; PAM type: YTN; PAM sequence: CTC
ctagaatgaggggtctcggt

SEQ ID NO: 275077 - DNA, 20 bp, Artificial Sequence
  Description of Artificial Sequence: Synthetic oligonucleotide
  Target: LAMA2; (-) strand; PAM type: YTN; PAM sequence: TTG
aaaactcctagaatgagggg

SEQ ID NO: 275078 - DNA, 20 bp, Artificial Sequence
  Description of Artificial Sequence: Synthetic oligonucleotide
  Target: LAMA2; (-) strand; PAM type: YTN; PAM sequence: TTT
gaaaactcctagaatgaggg

SEQ ID NO: 275079 - DNA, 20 bp, Artificial Sequence
  Description of Artificial Sequence: Synthetic oligonucleotide
  Target: LAMA2; (-) strand; PAM type: YTN; PAM sequence: CTT
tgaaaactcctagaatgagg

SEQ ID NO: 275080 - DNA, 20 bp, Artificial Sequence
  Description of Artificial Sequence: Synthetic oligonucleotide
  Target: LAMA2; (-) strand; PAM type: YTN; PAM sequence: TTA
cctttgaaaactcctagaat

SEQ ID NO: 275081 - DNA, 20 bp, Artificial Sequence
  Description of Artificial Sequence: Synthetic oligonucleotide
  Target: LAMA2; (-) strand; PAM type: YTN; PAM sequence: CTA
taatattacctttgaaaact

SEQ ID NO: 275082 - DNA, 20 bp, Artificial Sequence
  Description of Artificial Sequence: Synthetic oligonucleotide
  Target: LAMA2; (-) strand; PAM type: YTN; PAM sequence: TTC
tataatattacctttgaaaa

SEQ ID NO: 275083 - DNA, 20 bp, Artificial Sequence
  Description of Artificial Sequence: Synthetic oligonucleotide
  Target: LAMA2; (-) strand; PAM type: YTN; PAM sequence: TTT
ctataatattacctttgaaa

SEQ ID NO: 275084 - DNA, 20 bp, Artificial Sequence
  Description of Artificial Sequence: Synthetic oligonucleotide
  Target: LAMA2; (-) strand; PAM type: YTN; PAM sequence: TTA
tttctataatattacctttg

SEQ ID NO: 275085 - DNA, 20 bp, Artificial Sequence
  Description of Artificial Sequence: Synthetic oligonucleotide
  Target: LAMA2; (-) strand; PAM type: YTN; PAM sequence: CTT
atttctataatattaccttt

SEQ ID NO: 275086 - DNA, 20 bp, Artificial Sequence
  Description of Artificial Sequence: Synthetic oligonucleotide
  Target: LAMA2; (-) strand; PAM type: YTN; PAM sequence: CTG
aatacttatttctataatat

SEQ ID NO: 275087 - DNA, 20 bp, Artificial Sequence
  Description of Artificial Sequence: Synthetic oligonucleotide
  Target: LAMA2; (-) strand; PAM type: YTN; PAM sequence: TTG
tcagctgaatacttatttct

SEQ ID NO: 275088 - DNA, 20 bp, Artificial Sequence
  Description of Artificial Sequence: Synthetic oligonucleotide
  Target: LAMA2; (-) strand; PAM type: YTN; PAM sequence: TTT
gtcagctgaatacttatttc

SEQ ID NO: 275089 - DNA, 20 bp, Artificial Sequence
  Description of Artificial Sequence: Synthetic oligonucleotide
  Target: LAMA2; (-) strand; PAM type: YTN; PAM sequence: TTT
tgtcagctgaatacttattt

SEQ ID NO: 275090 - DNA, 20 bp, Artificial Sequence
  Description of Artificial Sequence: Synthetic oligonucleotide
  Target: LAMA2; (-) strand; PAM type: YTN; PAM sequence: CTT
ttgtcagctgaatacttatt

SEQ ID NO: 275091 - DNA, 20 bp, Artificial Sequence
  Description of Artificial Sequence: Synthetic oligonucleotide
  Target: LAMA2; (-) strand; PAM type: YTN; PAM sequence: CTC
ttttgtcagctgaatactta

SEQ ID NO: 275092 - DNA, 20 bp, Artificial Sequence
  Description of Artificial Sequence: Synthetic oligonucleotide
  Target: LAMA2; (-) strand; PAM type: YTN; PAM sequence: CTC
aaactcttttgtcagctgaa

SEQ ID NO: 275093 - DNA, 20 bp, Artificial Sequence
  Description of Artificial Sequence: Synthetic oligonucleotide
  Target: LAMA2; (-) strand; PAM type: YTN; PAM sequence: TTC
tcaaactcttttgtcagctg

SEQ ID NO: 275094 - DNA, 20 bp, Artificial Sequence
  Description of Artificial Sequence: Synthetic oligonucleotide
  Target: LAMA2; (-) strand; PAM type: YTN; PAM sequence: TTT
ctcaaactcttttgtcagct

SEQ ID NO: 275095 - DNA, 20 bp, Artificial Sequence
  Description of Artificial Sequence: Synthetic oligonucleotide
  Target: LAMA2; (-) strand; PAM type: YTN; PAM sequence: TTT
tctcaaactcttttgtcagc

SEQ ID NO: 275096 - DNA, 20 bp, Artificial Sequence
  Description of Artificial Sequence: Synthetic oligonucleotide
  Target: LAMA2; (-) strand; PAM type: YTN; PAM sequence: TTA
agagagatgttttctcaaac

SEQ ID NO: 275097 - DNA, 20 bp, Artificial Sequence
  Description of Artificial Sequence: Synthetic oligonucleotide
  Target: LAMA2; (-) strand; PAM type: YTN; PAM sequence: TTT
aagagagatgttttctcaaa

SEQ ID NO: 275098 - DNA, 20 bp, Artificial Sequence
  Description of Artificial Sequence: Synthetic oligonucleotide
  Target: LAMA2; (-) strand; PAM type: YTN; PAM sequence: TTG
gtgaatttaagagagatgtt

SEQ ID NO: 275099 - DNA, 20 bp, Artificial Sequence
  Description of Artificial Sequence: Synthetic oligonucleotide
  Target: LAMA2; (-) strand; PAM type: YTN; PAM sequence: TTT
ggtgaatttaagagagatgt

SEQ ID NO: 275100 - DNA, 20 bp, Artificial Sequence
  Description of Artificial Sequence: Synthetic oligonucleotide
  Target: LAMA2; (-) strand; PAM type: YTN; PAM sequence: TTT
tggtgaatttaagagagatg

SEQ ID NO: 275101 - DNA, 20 bp, Artificial Sequence
  Description of Artificial Sequence: Synthetic oligonucleotide
  Target: LAMA2; (-) strand; PAM type: YTN; PAM sequence: TTT
ttggtgaatttaagagagat

SEQ ID NO: 275102 - DNA, 20 bp, Artificial Sequence
  Description of Artificial Sequence: Synthetic oligonucleotide
  Target: LAMA2; (-) strand; PAM type: YTN; PAM sequence: TTT
tttggtgaatttaagagaga

SEQ ID NO: 275103 - DNA, 20 bp, Artificial Sequence
  Description of Artificial Sequence: Synthetic oligonucleotide
  Target: LAMA2; (-) strand; PAM type: YTN; PAM sequence: TTT
ttttggtgaatttaagagag

SEQ ID NO: 275104 - DNA, 20 bp, Artificial Sequence
  Description of Artificial Sequence: Synthetic oligonucleotide
  Target: LAMA2; (-) strand; PAM type: YTN; PAM sequence: CTA
taggacatttttttggtgaa

SEQ ID NO: 275105 - DNA, 20 bp, Artificial Sequence
  Description of Artificial Sequence: Synthetic oligonucleotide
  Target: LAMA2; (-) strand; PAM type: YTN; PAM sequence: TTC
tataggacatttttttggtg

SEQ ID NO: 275106 - DNA, 20 bp, Artificial Sequence
  Description of Artificial Sequence: Synthetic oligonucleotide
  Target: LAMA2; (-) strand; PAM type: YTN; PAM sequence: CTG
gagtgtgttctataggacat

SEQ ID NO: 275107 - DNA, 20 bp, Artificial Sequence
  Description of Artificial Sequence: Synthetic oligonucleotide
  Target: LAMA2; (-) strand; PAM type: YTN; PAM sequence: TTC
ctggagtgtgttctatagga

SEQ ID NO: 275108 - DNA, 20 bp, Artificial Sequence
  Description of Artificial Sequence: Synthetic oligonucleotide
  Target: LAMA2; (-) strand; PAM type: YTN; PAM sequence: TTT
cctggagtgtgttctatagg

SEQ ID NO: 275109 - DNA, 20 bp, Artificial Sequence
  Description of Artificial Sequence: Synthetic oligonucleotide
  Target: LAMA2; (-) strand; PAM type: YTN; PAM sequence: CTA
aagtttcctggagtgtgttc

SEQ ID NO: 275110 - DNA, 20 bp, Artificial Sequence
  Description of Artificial Sequence: Synthetic oligonucleotide
  Target: LAMA2; (-) strand; PAM type: YTN; PAM sequence: TTA
gactaaagtttcctggagtg

SEQ ID NO: 275111 - DNA, 20 bp, Artificial Sequence
  Description of Artificial Sequence: Synthetic oligonucleotide
  Target: LAMA2; (-) strand; PAM type: YTN; PAM sequence: TTT
agactaaagtttcctggagt

SEQ ID NO: 275112 - DNA, 20 bp, Artificial Sequence
  Description of Artificial Sequence: Synthetic oligonucleotide
  Target: LAMA2; (-) strand; PAM type: YTN; PAM sequence: TTT
tagactaaagtttcctggag

SEQ ID NO: 275113 - DNA, 20 bp, Artificial Sequence
  Description of Artificial Sequence: Synthetic oligonucleotide
  Target: LAMA2; (-) strand; PAM type: YTN; PAM sequence: TTA
gttttagactaaagtttcct

SEQ ID NO: 275114 - DNA, 20 bp, Artificial Sequence
  Description of Artificial Sequence: Synthetic oligonucleotide
  Target: LAMA2; (-) strand; PAM type: YTN; PAM sequence: TTA
ttagttttagactaaagttt

SEQ ID NO: 275115 - DNA, 20 bp, Artificial Sequence
  Description of Artificial Sequence: Synthetic oligonucleotide
  Target: LAMA2; (-) strand; PAM type: YTN; PAM sequence: TTA
tattattagttttagactaa

SEQ ID NO: 275116 - DNA, 20 bp, Artificial Sequence
  Description of Artificial Sequence: Synthetic oligonucleotide
  Target: LAMA2; (-) strand; PAM type: YTN; PAM sequence: TTA
cacagttatattattagttt

SEQ ID NO: 275117 - DNA, 20 bp, Artificial Sequence
  Description of Artificial Sequence: Synthetic oligonucleotide
  Target: LAMA2; (-) strand; PAM type: YTN; PAM sequence: TTT
acacagttatattattagtt

SEQ ID NO: 275118 - DNA, 20 bp, Artificial Sequence
  Description of Artificial Sequence: Synthetic oligonucleotide
  Target: LAMA2; (-) strand; PAM type: YTN; PAM sequence: TTG
aaacatttacacagttatat

SEQ ID NO: 275119 - DNA, 20 bp, Artificial Sequence
  Description of Artificial Sequence: Synthetic oligonucleotide
  Target: LAMA2; (-) strand; PAM type: YTN; PAM sequence: TTA
aaatggtgaattgaaacatt

SEQ ID NO: 275120 - DNA, 20 bp, Artificial Sequence
  Description of Artificial Sequence: Synthetic oligonucleotide
  Target: LAMA2; (-) strand; PAM type: YTN; PAM sequence: TTT
aaaatggtgaattgaaacat

SEQ ID NO: 275121 - DNA, 20 bp, Artificial Sequence
  Description of Artificial Sequence: Synthetic oligonucleotide
  Target: LAMA2; (-) strand; PAM type: YTN; PAM sequence: CTA
cgtcaaataaaagtttaaaa

SEQ ID NO: 275122 - DNA, 20 bp, Artificial Sequence
  Description of Artificial Sequence: Synthetic oligonucleotide
  Target: LAMA2; (-) strand; PAM type: YTN; PAM sequence: TTC
tacgtcaaataaaagtttaa

SEQ ID NO: 275123 - DNA, 20 bp, Artificial Sequence
  Description of Artificial Sequence: Synthetic oligonucleotide
  Target: LAMA2; (-) strand; PAM type: YTN; PAM sequence: TTG
agaaaagaattctacgtcaa

SEQ ID NO: 275124 - DNA, 20 bp, Artificial Sequence
  Description of Artificial Sequence: Synthetic oligonucleotide
  Target: LAMA2; (-) strand; PAM type: YTN; PAM sequence: TTT
gagaaaagaattctacgtca

SEQ ID NO: 275125 - DNA, 20 bp, Artificial Sequence
  Description of Artificial Sequence: Synthetic oligonucleotide
  Target: LAMA2; (-) strand; PAM type: YTN; PAM sequence: TTC
atttgagaaaagaattctac

SEQ ID NO: 275126 - DNA, 20 bp, Artificial Sequence
  Description of Artificial Sequence: Synthetic oligonucleotide
  Target: LAMA2; (-) strand; PAM type: YTN; PAM sequence: TTT
catttgagaaaagaattcta

SEQ ID NO: 275127 - DNA, 20 bp, Artificial Sequence
  Description of Artificial Sequence: Synthetic oligonucleotide
  Target: LAMA2; (-) strand; PAM type: YTN; PAM sequence: CTG
ggcaggatttcatttgagaa

SEQ ID NO: 275128 - DNA, 20 bp, Artificial Sequence
  Description of Artificial Sequence: Synthetic oligonucleotide
  Target: LAMA2; (-) strand; PAM type: YTN; PAM sequence: TTC
tgggcaggatttcatttgag

SEQ ID NO: 275129 - DNA, 20 bp, Artificial Sequence
  Description of Artificial Sequence: Synthetic oligonucleotide
  Target: LAMA2; (-) strand; PAM type: YTN; PAM sequence: CTG
atgttctgggcaggatttca

SEQ ID NO: 275130 - DNA, 20 bp, Artificial Sequence
  Description of Artificial Sequence: Synthetic oligonucleotide
  Target: LAMA2; (-) strand; PAM type: YTN; PAM sequence: TTA
taggctgatgttctgggcag

SEQ ID NO: 275131 - DNA, 20 bp, Artificial Sequence
  Description of Artificial Sequence: Synthetic oligonucleotide
  Target: LAMA2; (-) strand; PAM type: YTN; PAM sequence: TTT
ataggctgatgttctgggca

SEQ ID NO: 275132 - DNA, 20 bp, Artificial Sequence
  Description of Artificial Sequence: Synthetic oligonucleotide
  Target: LAMA2; (-) strand; PAM type: YTN; PAM sequence: CTT
tataggctgatgttctgggc

SEQ ID NO: 275133 - DNA, 20 bp, Artificial Sequence
  Description of Artificial Sequence: Synthetic oligonucleotide
  Target: LAMA2; (-) strand; PAM type: YTN; PAM sequence: CTG
ctttataggctgatgttctg

SEQ ID NO: 275134 - DNA, 20 bp, Artificial Sequence
  Description of Artificial Sequence: Synthetic oligonucleotide
  Target: LAMA2; (-) strand; PAM type: YTN; PAM sequence: CTG
ccaagagtctgctttatagg

SEQ ID NO: 275135 - DNA, 20 bp, Artificial Sequence
  Description of Artificial Sequence: Synthetic oligonucleotide
  Target: LAMA2; (-) strand; PAM type: YTN; PAM sequence: TTC
tgccaagagtctgctttata

SEQ ID NO: 275136 - DNA, 20 bp, Artificial Sequence
  Description of Artificial Sequence: Synthetic oligonucleotide
  Target: LAMA2; (-) strand; PAM type: YTN; PAM sequence: CTA
ttctgccaagagtctgcttt

SEQ ID NO: 275137 - DNA, 20 bp, Artificial Sequence
  Description of Artificial Sequence: Synthetic oligonucleotide
  Target: LAMA2; (-) strand; PAM type: YTN; PAM sequence: CTA
caaatgatgtctattctgcc

SEQ ID NO: 275138 - DNA, 20 bp, Artificial Sequence
  Description of Artificial Sequence: Synthetic oligonucleotide
  Target: LAMA2; (-) strand; PAM type: YTN; PAM sequence: TTC
tacaaatgatgtctattctg

SEQ ID NO: 275139 - DNA, 20 bp, Artificial Sequence
  Description of Artificial Sequence: Synthetic oligonucleotide
  Target: LAMA2; (-) strand; PAM type: YTN; PAM sequence: TTT
ctacaaatgatgtctattct

SEQ ID NO: 275140 - DNA, 20 bp, Artificial Sequence
  Description of Artificial Sequence: Synthetic oligonucleotide
  Target: LAMA2; (-) strand; PAM type: YTN; PAM sequence: TTT
tctacaaatgatgtctattc

SEQ ID NO: 275141 - DNA, 20 bp, Artificial Sequence
  Description of Artificial Sequence: Synthetic oligonucleotide
  Target: LAMA2; (-) strand; PAM type: YTN; PAM sequence: TTC
aggttttctacaaatgatgt

SEQ ID NO: 275142 - DNA, 20 bp, Artificial Sequence
  Description of Artificial Sequence: Synthetic oligonucleotide
  Target: LAMA2; (-) strand; PAM type: YTN; PAM sequence: CTT
caggttttctacaaatgatg

SEQ ID NO: 275143 - DNA, 20 bp, Artificial Sequence
  Description of Artificial Sequence: Synthetic oligonucleotide
  Target: LAMA2; (-) strand; PAM type: YTN; PAM sequence: CTC
caggtgcttcaggttttcta

SEQ ID NO: 275144 - DNA, 20 bp, Artificial Sequence
  Description of Artificial Sequence: Synthetic oligonucleotide
  Target: LAMA2; (-) strand; PAM type: YTN; PAM sequence: TTC
tccaggtgcttcaggttttc

SEQ ID NO: 275145 - DNA, 20 bp, Artificial Sequence
  Description of Artificial Sequence: Synthetic oligonucleotide
  Target: LAMA2; (-) strand; PAM type: YTN; PAM sequence: TTG
gaatcgtaggattctccagg

SEQ ID NO: 275146 - DNA, 20 bp, Artificial Sequence
  Description of Artificial Sequence: Synthetic oligonucleotide
  Target: LAMA2; (-) strand; PAM type: YTN; PAM sequence: CTT
ggaatcgtaggattctccag

SEQ ID NO: 275147 - DNA, 20 bp, Artificial Sequence
  Description of Artificial Sequence: Synthetic oligonucleotide
  Target: LAMA2; (-) strand; PAM type: YTN; PAM sequence: CTC
cttggaatcgtaggattctc

SEQ ID NO: 275148 - DNA, 20 bp, Artificial Sequence
  Description of Artificial Sequence: Synthetic oligonucleotide
  Target: LAMA2; (-) strand; PAM type: YTN; PAM sequence: CTG
tactccttggaatcgtagga

SEQ ID NO: 275149 - DNA, 20 bp, Artificial Sequence
  Description of Artificial Sequence: Synthetic oligonucleotide
  Target: LAMA2; (-) strand; PAM type: YTN; PAM sequence: TTC
aaactgtactccttggaatc

SEQ ID NO: 275150 - DNA, 20 bp, Artificial Sequence
  Description of Artificial Sequence: Synthetic oligonucleotide
  Target: LAMA2; (-) strand; PAM type: YTN; PAM sequence: TTT
caaactgtactccttggaat

SEQ ID NO: 275151 - DNA, 20 bp, Artificial Sequence
  Description of Artificial Sequence: Synthetic oligonucleotide
  Target: LAMA2; (-) strand; PAM type: YTN; PAM sequence: TTA
aatggggtttcaaactgtac

SEQ ID NO: 275152 - DNA, 20 bp, Artificial Sequence
  Description of Artificial Sequence: Synthetic oligonucleotide
  Target: LAMA2; (-) strand; PAM type: YTN; PAM sequence: TTA
tgcattaaatggggtttcaa

SEQ ID NO: 275153 - DNA, 20 bp, Artificial Sequence
  Description of Artificial Sequence: Synthetic oligonucleotide
  Target: LAMA2; (-) strand; PAM type: YTN; PAM sequence: TTA
ttatgcattaaatggggttt

SEQ ID NO: 275154 - DNA, 20 bp, Artificial Sequence
  Description of Artificial Sequence: Synthetic oligonucleotide
  Target: LAMA2; (-) strand; PAM type: YTN; PAM sequence: TTT
attatgcattaaatggggtt

SEQ ID NO: 275155 - DNA, 20 bp, Artificial Sequence
  Description of Artificial Sequence: Synthetic oligonucleotide
  Target: LAMA2; (-) strand; PAM type: YTN; PAM sequence: CTG
tgtttattatgcattaaatg

SEQ ID NO: 275156 - DNA, 20 bp, Artificial Sequence
  Description of Artificial Sequence: Synthetic oligonucleotide
  Target: LAMA2; (-) strand; PAM type: YTN; PAM sequence: TTC
acaagggtctgtgtttatta

SEQ ID NO: 275157 - DNA, 20 bp, Artificial Sequence
  Description of Artificial Sequence: Synthetic oligonucleotide
  Target: LAMA2; (-) strand; PAM type: YTN; PAM sequence: CTT
cacaagggtctgtgtttatt

SEQ ID NO: 275158 - DNA, 20 bp, Artificial Sequence
  Description of Artificial Sequence: Synthetic oligonucleotide
  Target: LAMA2; (-) strand; PAM type: YTN; PAM sequence: TTC
cagcaatagcatccttcaca

SEQ ID NO: 275159 - DNA, 20 bp, Artificial Sequence
  Description of Artificial Sequence: Synthetic oligonucleotide
  Target: LAMA2; (-) strand; PAM type: YTN; PAM sequence: TTT
ccagcaatagcatccttcac

SEQ ID NO: 275160 - DNA, 20 bp, Artificial Sequence
  Description of Artificial Sequence: Synthetic oligonucleotide
  Target: LAMA2; (-) strand; PAM type: YTN; PAM sequence: CTT
tccagcaatagcatccttca

SEQ ID NO: 275161 - DNA, 20 bp, Artificial Sequence
  Description of Artificial Sequence: Synthetic oligonucleotide
  Target: LAMA2; (-) strand; PAM type: YTN; PAM sequence: TTC
aaggacactttccagcaata

SEQ ID NO: 275162 - DNA, 20 bp, Artificial Sequence
  Description of Artificial Sequence: Synthetic oligonucleotide
  Target: LAMA2; (-) strand; PAM type: YTN; PAM sequence: CTT
caaggacactttccagcaat

SEQ ID NO: 275163 - DNA, 20 bp, Artificial Sequence
  Description of Artificial Sequence: Synthetic oligonucleotide
  Target: LAMA2; (-) strand; PAM type: YTN; PAM sequence: TTA
ggcttcaaggacactttcca

SEQ ID NO: 275164 - DNA, 20 bp, Artificial Sequence
  Description of Artificial Sequence: Synthetic oligonucleotide
  Target: LAMA2; (-) strand; PAM type: YTN; PAM sequence: TTA
taaattaggcttcaaggaca

SEQ ID NO: 275165 - DNA, 20 bp, Artificial Sequence
  Description of Artificial Sequence: Synthetic oligonucleotide
  Target: LAMA2; (-) strand; PAM type: YTN; PAM sequence: CTA
ggagaagggttataaattag

SEQ ID NO: 275166 - DNA, 20 bp, Artificial Sequence
  Description of Artificial Sequence: Synthetic oligonucleotide
  Target: LAMA2; (-) strand; PAM type: YTN; PAM sequence: TTC
taggagaagggttataaatt

SEQ ID NO: 275167 - DNA, 20 bp, Artificial Sequence
  Description of Artificial Sequence: Synthetic oligonucleotide
  Target: LAMA2; (-) strand; PAM type: YTN; PAM sequence: CTT
ctaggagaagggttataaat

SEQ ID NO: 275168 - DNA, 20 bp, Artificial Sequence
  Description of Artificial Sequence: Synthetic oligonucleotide
  Target: LAMA2; (-) strand; PAM type: YTN; PAM sequence: TTA
taacccttctaggagaaggg

SEQ ID NO: 275169 - DNA, 20 bp, Artificial Sequence
  Description of Artificial Sequence: Synthetic oligonucleotide
  Target: LAMA2; (-) strand; PAM type: YTN; PAM sequence: CTT
ataacccttctaggagaagg

SEQ ID NO: 275170 - DNA, 20 bp, Artificial Sequence
  Description of Artificial Sequence: Synthetic oligonucleotide
  Target: LAMA2; (-) strand; PAM type: YTN; PAM sequence: CTA
gacttataacccttctagga

SEQ ID NO: 275171 - DNA, 20 bp, Artificial Sequence
  Description of Artificial Sequence: Synthetic oligonucleotide
  Target: LAMA2; (-) strand; PAM type: YTN; PAM sequence: CTG
gtctagacttataacccttc

SEQ ID NO: 275172 - DNA, 20 bp, Artificial Sequence
  Description of Artificial Sequence: Synthetic oligonucleotide
  Target: LAMA2; (-) strand; PAM type: YTN; PAM sequence: TTA
aaggagtgaagaaagaagca

SEQ ID NO: 275173 - DNA, 20 bp, Artificial Sequence
  Description of Artificial Sequence: Synthetic oligonucleotide
  Target: LAMA2; (-) strand; PAM type: YTN; PAM sequence: TTT
aaaggagtgaagaaagaagc

SEQ ID NO: 275174 - DNA, 20 bp, Artificial Sequence
  Description of Artificial Sequence: Synthetic oligonucleotide
  Target: LAMA2; (-) strand; PAM type: YTN; PAM sequence: TTT
taaaggagtgaagaaagaag

SEQ ID NO: 275175 - DNA, 20 bp, Artificial Sequence
  Description of Artificial Sequence: Synthetic oligonucleotide
  Target: LAMA2; (-) strand; PAM type: YTN; PAM sequence: TTT
ttaaaggagtgaagaaagaa

SEQ ID NO: 275176 - DNA, 20 bp, Artificial Sequence
  Description of Artificial Sequence: Synthetic oligonucleotide
  Target: LAMA2; (-) strand; PAM type: YTN; PAM sequence: TTT
tttaaaggagtgaagaaaga

SEQ ID NO: 275177 - DNA, 20 bp, Artificial Sequence
  Description of Artificial Sequence: Synthetic oligonucleotide
  Target: LAMA2; (-) strand; PAM type: YTN; PAM sequence: TTC
attttttaaaggagtgaaga

SEQ ID NO: 275178 - DNA, 20 bp, Artificial Sequence
  Description of Artificial Sequence: Synthetic oligonucleotide
  Target: LAMA2; (-) strand; PAM type: YTN; PAM sequence: CTG
tgttcattttttaaaggagt

SEQ ID NO: 275179 - DNA, 20 bp, Artificial Sequence
  Description of Artificial Sequence: Synthetic oligonucleotide
  Target: LAMA2; (-) strand; PAM type: YTN; PAM sequence: CTC
ctgtgttcattttttaaagg

SEQ ID NO: 275180 - DNA, 20 bp, Artificial Sequence
  Description of Artificial Sequence: Synthetic oligonucleotide
  Target: LAMA2; (-) strand; PAM type: YTN; PAM sequence: TTC
tcctgtgttcattttttaaa

SEQ ID NO: 275181 - DNA, 20 bp, Artificial Sequence
  Description of Artificial Sequence: Synthetic oligonucleotide
  Target: LAMA2; (-) strand; PAM type: YTN; PAM sequence: TTC
cacatagttctcctgtgttc

SEQ ID NO: 275182 - DNA, 20 bp, Artificial Sequence
  Description of Artificial Sequence: Synthetic oligonucleotide
  Target: LAMA2; (-) strand; PAM type: YTN; PAM sequence: TTT
ccacatagttctcctgtgtt

SEQ ID NO: 275183 - DNA, 20 bp, Artificial Sequence
  Description of Artificial Sequence: Synthetic oligonucleotide
  Target: LAMA2; (-) strand; PAM type: YTN; PAM sequence: TTG
tatttccacatagttctcct

SEQ ID NO: 275184 - DNA, 20 bp, Artificial Sequence
  Description of Artificial Sequence: Synthetic oligonucleotide
  Target: LAMA2; (-) strand; PAM type: YTN; PAM sequence: CTT
gtatttccacatagttctcc

SEQ ID NO: 275185 - DNA, 20 bp, Artificial Sequence
  Description of Artificial Sequence: Synthetic oligonucleotide
  Target: LAMA2; (-) strand; PAM type: YTN; PAM sequence: CTG
cccttgtatttccacatagt

SEQ ID NO: 275186 - DNA, 20 bp, Artificial Sequence
  Description of Artificial Sequence: Synthetic oligonucleotide
  Target: LAMA2; (-) strand; PAM type: YTN; PAM sequence: CTG
aaaatgaacctgcccttgta

SEQ ID NO: 275187 - DNA, 20 bp, Artificial Sequence
  Description of Artificial Sequence: Synthetic oligonucleotide
  Target: LAMA2; (-) strand; PAM type: YTN; PAM sequence: CTC
tgaaaatgaacctgcccttg

SEQ ID NO: 275188 - DNA, 20 bp, Artificial Sequence
  Description of Artificial Sequence: Synthetic oligonucleotide
  Target: LAMA2; (-) strand; PAM type: YTN; PAM sequence: CTC
agtgatgagatctctgaaaa

SEQ ID NO: 275189 - DNA, 20 bp, Artificial Sequence
  Description of Artificial Sequence: Synthetic oligonucleotide
  Target: LAMA2; (-) strand; PAM type: YTN; PAM sequence: CTG
agtgtggaaatacactcagt

SEQ ID NO: 275190 - DNA, 20 bp, Artificial Sequence
  Description of Artificial Sequence: Synthetic oligonucleotide
  Target: LAMA2; (-) strand; PAM type: YTN; PAM sequence: TTA
aaaatactgagtgtggaaat

SEQ ID NO: 275191 - DNA, 20 bp, Artificial Sequence
  Description of Artificial Sequence: Synthetic oligonucleotide
  Target: LAMA2; (-) strand; PAM type: YTN; PAM sequence: TTT
aaaaatactgagtgtggaaa

SEQ ID NO: 275192 - DNA, 20 bp, Artificial Sequence
  Description of Artificial Sequence: Synthetic oligonucleotide
  Target: LAMA2; (-) strand; PAM type: YTN; PAM sequence: CTA
tcagtcagtttaaaaatact

SEQ ID NO: 275193 - DNA, 20 bp, Artificial Sequence
  Description of Artificial Sequence: Synthetic oligonucleotide
  Target: LAMA2; (-) strand; PAM type: YTN; PAM sequence: CTG
ataagatagtcatagcagtg

SEQ ID NO: 275194 - DNA, 20 bp, Artificial Sequence
  Description of Artificial Sequence: Synthetic oligonucleotide
  Target: LAMA2; (-) strand; PAM type: YTN; PAM sequence: TTG
ctgataagatagtcatagca

SEQ ID NO: 275195 - DNA, 20 bp, Artificial Sequence
  Description of Artificial Sequence: Synthetic oligonucleotide
  Target: LAMA2; (-) strand; PAM type: YTN; PAM sequence: CTG
cattgctgataagatagtca

SEQ ID NO: 275196 - DNA, 20 bp, Artificial Sequence
  Description of Artificial Sequence: Synthetic oligonucleotide
  Target: LAMA2; (-) strand; PAM type: YTN; PAM sequence: CTC
tgcattgctgataagatagt

SEQ ID NO: 275197 - DNA, 20 bp, Artificial Sequence
  Description of Artificial Sequence: Synthetic oligonucleotide
  Target: LAMA2; (-) strand; PAM type: YTN; PAM sequence: CTG
gaaacgcaagctctgcattg

SEQ ID NO: 275198 - DNA, 20 bp, Artificial Sequence
  Description of Artificial Sequence: Synthetic oligonucleotide
  Target: LAMA2; (-) strand; PAM type: YTN; PAM sequence: TTG
gaggctggaaacgcaagctc

SEQ ID NO: 275199 - DNA, 20 bp, Artificial Sequence
  Description of Artificial Sequence: Synthetic oligonucleotide
  Target: LAMA2; (-) strand; PAM type: YTN; PAM sequence: CTT
ggaggctggaaacgcaagct

SEQ ID NO: 275200 - DNA, 20 bp, Artificial Sequence
  Description of Artificial Sequence: Synthetic oligonucleotide
  Target: LAMA2; (-) strand; PAM type: YTN; PAM sequence: CTG
tagcataacacttggaggct

SEQ ID NO: 275201 - DNA, 20 bp, Artificial Sequence
  Description of Artificial Sequence: Synthetic oligonucleotide
  Target: LAMA2; (-) strand; PAM type: YTN; PAM sequence: TTA
aaaaaaacagtgacctgtag

SEQ ID NO: 275202 - DNA, 20 bp, Artificial Sequence
  Description of Artificial Sequence: Synthetic oligonucleotide
  Target: LAMA2; (-) strand; PAM type: YTN; PAM sequence: TTT
aaaaaaaacagtgacctgta

SEQ ID NO: 275203 - DNA, 20 bp, Artificial Sequence
  Description of Artificial Sequence: Synthetic oligonucleotide
  Target: LAMA2; (-) strand; PAM type: YTN; PAM sequence: CTC
aggtaagagtttaaaaaaaa

SEQ ID NO: 275204 - DNA, 20 bp, Artificial Sequence
  Description of Artificial Sequence: Synthetic oligonucleotide
  Target: LAMA2; (-) strand; PAM type: YTN; PAM sequence: TTA
aaataaagaagtaggtcgaa

SEQ ID NO: 275205 - DNA, 20 bp, Artificial Sequence
  Description of Artificial Sequence: Synthetic oligonucleotide
  Target: LAMA2; (-) strand; PAM type: YTN; PAM sequence: CTC
aaaagaaagaaagaattaaa

SEQ ID NO: 275206 - DNA, 20 bp, Artificial Sequence
  Description of Artificial Sequence: Synthetic oligonucleotide
  Target: LAMA2; (-) strand; PAM type: YTN; PAM sequence: CTA
acctcaaaagaaagaaagaa

SEQ ID NO: 275207 - DNA, 20 bp, Artificial Sequence
  Description of Artificial Sequence: Synthetic oligonucleotide
  Target: LAMA2; (-) strand; PAM type: YTN; PAM sequence: TTC
taacctcaaaagaaagaaag

SEQ ID NO: 275208 - DNA, 20 bp, Artificial Sequence
  Description of Artificial Sequence: Synthetic oligonucleotide
  Target: LAMA2; (-) strand; PAM type: YTN; PAM sequence: TTT
ctaacctcaaaagaaagaaa

SEQ ID NO: 275209 - DNA, 20 bp, Artificial Sequence
  Description of Artificial Sequence: Synthetic oligonucleotide
  Target: LAMA2; (-) strand; PAM type: YTN; PAM sequence: TTA
aagcatggtgtttctaacct

SEQ ID NO: 275210 - DNA, 20 bp, Artificial Sequence
  Description of Artificial Sequence: Synthetic oligonucleotide
  Target: LAMA2; (-) strand; PAM type: YTN; PAM sequence: TTA
cagcaattaaagcatggtgt

SEQ ID NO: 275211 - DNA, 20 bp, Artificial Sequence
  Description of Artificial Sequence: Synthetic oligonucleotide
  Target: LAMA2; (-) strand; PAM type: YTN; PAM sequence: TTG
ggggttacagcaattaaagc

SEQ ID NO: 275212 - DNA, 20 bp, Artificial Sequence
  Description of Artificial Sequence: Synthetic oligonucleotide
  Target: LAMA2; (-) strand; PAM type: YTN; PAM sequence: TTT
gggggttacagcaattaaag

SEQ ID NO: 275213 - DNA, 20 bp, Artificial Sequence
  Description of Artificial Sequence: Synthetic oligonucleotide
  Target: LAMA2; (-) strand; PAM type: YTN; PAM sequence: TTT
tgggggttacagcaattaaa

SEQ ID NO: 275214 - DNA, 20 bp, Artificial Sequence
  Description of Artificial Sequence: Synthetic oligonucleotide
  Target: LAMA2; (-) strand; PAM type: YTN; PAM sequence: CTT
ttgggggttacagcaattaa

SEQ ID NO: 275215 - DNA, 20 bp, Artificial Sequence
  Description of Artificial Sequence: Synthetic oligonucleotide
  Target: LAMA2; (-) strand; PAM type: YTN; PAM sequence: TTC
ttttgggggttacagcaatt

SEQ ID NO: 275216 - DNA, 20 bp, Artificial Sequence
  Description of Artificial Sequence: Synthetic oligonucleotide
  Target: LAMA2; (-) strand; PAM type: YTN; PAM sequence: TTT
cttttgggggttacagcaat

SEQ ID NO: 275217 - DNA, 20 bp, Artificial Sequence
  Description of Artificial Sequence: Synthetic oligonucleotide
  Target: LAMA2; (-) strand; PAM type: YTN; PAM sequence: TTA
tatttcttttgggggttaca

SEQ ID NO: 275218 - DNA, 20 bp, Artificial Sequence
  Description of Artificial Sequence: Synthetic oligonucleotide
  Target: LAMA2; (-) strand; PAM type: YTN; PAM sequence: CTC
aatattatatttcttttggg

SEQ ID NO: 275219 - DNA, 20 bp, Artificial Sequence
  Description of Artificial Sequence: Synthetic oligonucleotide
  Target: LAMA2; (-) strand; PAM type: YTN; PAM sequence: TTC
tcaatattatatttcttttg

SEQ ID NO: 275220 - DNA, 20 bp, Artificial Sequence
  Description of Artificial Sequence: Synthetic oligonucleotide
  Target: LAMA2; (-) strand; PAM type: YTN; PAM sequence: TTT
ctcaatattatatttctttt

SEQ ID NO: 275221 - DNA, 20 bp, Artificial Sequence
  Description of Artificial Sequence: Synthetic oligonucleotide
  Target: LAMA2; (-) strand; PAM type: YTN; PAM sequence: TTA
agacaacaatcagtaacaaa

SEQ ID NO: 275222 - DNA, 20 bp, Artificial Sequence
  Description of Artificial Sequence: Synthetic oligonucleotide
  Target: LAMA2; (-) strand; PAM type: YTN; PAM sequence: CTG
ggaaccacagaggcagttaa

SEQ ID NO: 275223 - DNA, 20 bp, Artificial Sequence
  Description of Artificial Sequence: Synthetic oligonucleotide
  Target: LAMA2; (-) strand; PAM type: YTN; PAM sequence: CTG
ctgggaaccacagaggcagt

SEQ ID NO: 275224 - DNA, 20 bp, Artificial Sequence
  Description of Artificial Sequence: Synthetic oligonucleotide
  Target: LAMA2; (-) strand; PAM type: YTN; PAM sequence: TTC
ctgctgggaaccacagaggc

SEQ ID NO: 275225 - DNA, 20 bp, Artificial Sequence
  Description of Artificial Sequence: Synthetic oligonucleotide
  Target: LAMA2; (-) strand; PAM type: YTN; PAM sequence: TTG
ccgtgagtgttcctgctggg

SEQ ID NO: 275226 - DNA, 20 bp, Artificial Sequence
  Description of Artificial Sequence: Synthetic oligonucleotide
  Target: LAMA2; (-) strand; PAM type: YTN; PAM sequence: TTT
gccgtgagtgttcctgctgg

SEQ ID NO: 275227 - DNA, 20 bp, Artificial Sequence
  Description of Artificial Sequence: Synthetic oligonucleotide
  Target: LAMA2; (-) strand; PAM type: YTN; PAM sequence: TTT
tgccgtgagtgttcctgctg

SEQ ID NO: 275228 - DNA, 20 bp, Artificial Sequence
  Description of Artificial Sequence: Synthetic oligonucleotide
  Target: LAMA2; (-) strand; PAM type: YTN; PAM sequence: CTC
caaatgaagagtattttgcc

SEQ ID NO: 275229 - DNA, 20 bp, Artificial Sequence
  Description of Artificial Sequence: Synthetic oligonucleotide
  Target: LAMA2; (-) strand; PAM type: YTN; PAM sequence: CTG
ggcaccaccatctccaaatg

SEQ ID NO: 275230 - DNA, 20 bp, Artificial Sequence
  Description of Artificial Sequence: Synthetic oligonucleotide
  Target: LAMA2; (-) strand; PAM type: YTN; PAM sequence: CTG
ctgggcaccaccatctccaa

SEQ ID NO: 275231 - DNA, 20 bp, Artificial Sequence
  Description of Artificial Sequence: Synthetic oligonucleotide
  Target: LAMA2; (-) strand; PAM type: YTN; PAM sequence: TTC
agcatctgctgggcaccacc

SEQ ID NO: 275232 - DNA, 20 bp, Artificial Sequence
  Description of Artificial Sequence: Synthetic oligonucleotide
  Target: LAMA2; (-) strand; PAM type: YTN; PAM sequence: TTA
gtaaacaaacatgccacatg

SEQ ID NO: 275233 - DNA, 20 bp, Artificial Sequence
  Description of Artificial Sequence: Synthetic oligonucleotide
  Target: LAMA2; (-) strand; PAM type: YTN; PAM sequence: TTG
taaattagtaaacaaacatg

SEQ ID NO: 275234 - DNA, 20 bp, Artificial Sequence
  Description of Artificial Sequence: Synthetic oligonucleotide
  Target: LAMA2; (-) strand; PAM type: YTN; PAM sequence: TTT
gtaaattagtaaacaaacat

SEQ ID NO: 275235 - DNA, 20 bp, Artificial Sequence
  Description of Artificial Sequence: Synthetic oligonucleotide
  Target: LAMA2; (-) strand; PAM type: YTN; PAM sequence: TTT
tgtaaattagtaaacaaaca

SEQ ID NO: 275236 - DNA, 20 bp, Artificial Sequence
  Description of Artificial Sequence: Synthetic oligonucleotide
  Target: LAMA2; (-) strand; PAM type: YTN; PAM sequence: CTG
cagggggtaaaacaaatttt

SEQ ID NO: 275237 - DNA, 20 bp, Artificial Sequence
  Description of Artificial Sequence: Synthetic oligonucleotide
  Target: LAMA2; (-) strand; PAM type: YTN; PAM sequence: TTA
cagctgcagggggtaaaaca

SEQ ID NO: 275238 - DNA, 20 bp, Artificial Sequence
  Description of Artificial Sequence: Synthetic oligonucleotide
  Target: LAMA2; (-) strand; PAM type: YTN; PAM sequence: TTT
acagctgcagggggtaaaac

SEQ ID NO: 275239 - DNA, 20 bp, Artificial Sequence
  Description of Artificial Sequence: Synthetic oligonucleotide
  Target: LAMA2; (-) strand; PAM type: YTN; PAM sequence: TTC
atttacagctgcagggggta

SEQ ID NO: 275240 - DNA, 20 bp, Artificial Sequence
  Description of Artificial Sequence: Synthetic oligonucleotide
  Target: LAMA2; (-) strand; PAM type: YTN; PAM sequence: TTT
catttacagctgcagggggt

SEQ ID NO: 275241 - DNA, 20 bp, Artificial Sequence
  Description of Artificial Sequence: Synthetic oligonucleotide
  Target: LAMA2; (-) strand; PAM type: YTN; PAM sequence: TTT
tcatttacagctgcaggggg

SEQ ID NO: 275242 - DNA, 20 bp, Artificial Sequence
  Description of Artificial Sequence: Synthetic oligonucleotide
  Target: LAMA2; (-) strand; PAM type: YTN; PAM sequence: TTT
ttcatttacagctgcagggg

SEQ ID NO: 275243 - DNA, 20 bp, Artificial Sequence
  Description of Artificial Sequence: Synthetic oligonucleotide
  Target: LAMA2; (-) strand; PAM type: YTN; PAM sequence: CTT
tttcatttacagctgcaggg

SEQ ID NO: 275244 - DNA, 20 bp, Artificial Sequence
  Description of Artificial Sequence: Synthetic oligonucleotide
  Target: LAMA2; (-) strand; PAM type: YTN; PAM sequence: TTA
tagctttttcatttacagct

SEQ ID NO: 275245 - DNA, 20 bp, Artificial Sequence
  Description of Artificial Sequence: Synthetic oligonucleotide
  Target: LAMA2; (-) strand; PAM type: YTN; PAM sequence: TTT
atagctttttcatttacagc

SEQ ID NO: 275246 - DNA, 20 bp, Artificial Sequence
  Description of Artificial Sequence: Synthetic oligonucleotide
  Target: LAMA2; (-) strand; PAM type: YTN; PAM sequence: TTT
tatagctttttcatttacag

SEQ ID NO: 275247 - DNA, 20 bp, Artificial Sequence
  Description of Artificial Sequence: Synthetic oligonucleotide
  Target: LAMA2; (-) strand; PAM type: YTN; PAM sequence: TTA
gttttatagctttttcattt

SEQ ID NO: 275248 - DNA, 20 bp, Artificial Sequence
  Description of Artificial Sequence: Synthetic oligonucleotide
  Target: LAMA2; (-) strand; PAM type: YTN; PAM sequence: TTT
agttttatagctttttcatt

SEQ ID NO: 275249 - DNA, 20 bp, Artificial Sequence
  Description of Artificial Sequence: Synthetic oligonucleotide
  Target: LAMA2; (-) strand; PAM type: YTN; PAM sequence: TTC
atttagttttatagcttttt

SEQ ID NO: 275250 - DNA, 20 bp, Artificial Sequence
  Description of Artificial Sequence: Synthetic oligonucleotide
  Target: LAMA2; (-) strand; PAM type: YTN; PAM sequence: TTT
catttagttttatagctttt

SEQ ID NO: 275251 - DNA, 20 bp, Artificial Sequence
  Description of Artificial Sequence: Synthetic oligonucleotide
  Target: LAMA2; (-) strand; PAM type: YTN; PAM sequence: CTA
gagtttcatttagttttata

SEQ ID NO: 275252 - DNA, 20 bp, Artificial Sequence
  Description of Artificial Sequence: Synthetic oligonucleotide
  Target: LAMA2; (-) strand; PAM type: YTN; PAM sequence: TTC
ctagagtttcatttagtttt

SEQ ID NO: 275253 - DNA, 20 bp, Artificial Sequence
  Description of Artificial Sequence: Synthetic oligonucleotide
  Target: LAMA2; (-) strand; PAM type: YTN; PAM sequence: CTC
gagttcctagagtttcattt

SEQ ID NO: 275254 - DNA, 20 bp, Artificial Sequence
  Description of Artificial Sequence: Synthetic oligonucleotide
  Target: LAMA2; (-) strand; PAM type: YTN; PAM sequence: CTC
gtctcgagttcctagagttt

SEQ ID NO: 275255 - DNA, 20 bp, Artificial Sequence
  Description of Artificial Sequence: Synthetic oligonucleotide
  Target: LAMA2; (-) strand; PAM type: YTN; PAM sequence: CTC
aaaggcctcgtctcgagttc

SEQ ID NO: 275256 - DNA, 20 bp, Artificial Sequence
  Description of Artificial Sequence: Synthetic oligonucleotide
  Target: LAMA2; (-) strand; PAM type: YTN; PAM sequence: CTC
tcaaaggcctcgtctcgagt

SEQ ID NO: 275257 - DNA, 20 bp, Artificial Sequence
  Description of Artificial Sequence: Synthetic oligonucleotide
  Target: LAMA2; (-) strand; PAM type: YTN; PAM sequence: TTC
tctcaaaggcctcgtctcga

SEQ ID NO: 275258 - DNA, 20 bp, Artificial Sequence
  Description of Artificial Sequence: Synthetic oligonucleotide
  Target: LAMA2; (-) strand; PAM type: YTN; PAM sequence: TTT
ctctcaaaggcctcgtctcg

SEQ ID NO: 275259 - DNA, 20 bp, Artificial Sequence
  Description of Artificial Sequence: Synthetic oligonucleotide
  Target: LAMA2; (-) strand; PAM type: YTN; PAM sequence: TTC
caaatttctctcaaaggcct

SEQ ID NO: 275260 - DNA, 20 bp, Artificial Sequence
  Description of Artificial Sequence: Synthetic oligonucleotide
  Target: LAMA2; (-) strand; PAM type: YTN; PAM sequence: CTT
ccaaatttctctcaaaggcc

SEQ ID NO: 275261 - DNA, 20 bp, Artificial Sequence
  Description of Artificial Sequence: Synthetic oligonucleotide
  Target: LAMA2; (-) strand; PAM type: YTN; PAM sequence: CTG
aagcccttccaaatttctct

SEQ ID NO: 275262 - DNA, 20 bp, Artificial Sequence
  Description of Artificial Sequence: Synthetic oligonucleotide
  Target: LAMA2; (-) strand; PAM type: YTN; PAM sequence: TTC
tgaagcccttccaaatttct

SEQ ID NO: 275263 - DNA, 20 bp, Artificial Sequence
  Description of Artificial Sequence: Synthetic oligonucleotide
  Target: LAMA2; (-) strand; PAM type: YTN; PAM sequence: TTT
ctgaagcccttccaaatttc

SEQ ID NO: 275264 - DNA, 20 bp, Artificial Sequence
  Description of Artificial Sequence: Synthetic oligonucleotide
  Target: LAMA2; (-) strand; PAM type: YTN; PAM sequence: CTT
tctgaagcccttccaaattt

SEQ ID NO: 275265 - DNA, 20 bp, Artificial Sequence
  Description of Artificial Sequence: Synthetic oligonucleotide
  Target: LAMA2; (-) strand; PAM type: YTN; PAM sequence: CTC
tttctgaagcccttccaaat

SEQ ID NO: 275266 - DNA, 20 bp, Artificial Sequence
  Description of Artificial Sequence: Synthetic oligonucleotide
  Target: LAMA2; (-) strand; PAM type: YTN; PAM sequence: CTG
gtcaatctctttctgaagcc

SEQ ID NO: 275267 - DNA, 20 bp, Artificial Sequence
  Description of Artificial Sequence: Synthetic oligonucleotide
  Target: LAMA2; (-) strand; PAM type: YTN; PAM sequence: TTA
atcatctggtcaatctcttt

SEQ ID NO: 275268 - DNA, 20 bp, Artificial Sequence
  Description of Artificial Sequence: Synthetic oligonucleotide
  Target: LAMA2; (-) strand; PAM type: YTN; PAM sequence: TTT
aatcatctggtcaatctctt

SEQ ID NO: 275269 - DNA, 20 bp, Artificial Sequence
  Description of Artificial Sequence: Synthetic oligonucleotide
  Target: LAMA2; (-) strand; PAM type: YTN; PAM sequence: CTT
taatcatctggtcaatctct

SEQ ID NO: 275270 - DNA, 20 bp, Artificial Sequence
  Description of Artificial Sequence: Synthetic oligonucleotide
  Target: LAMA2; (-) strand; PAM type: YTN; PAM sequence: TTC
tttaatcatctggtcaatct

SEQ ID NO: 275271 - DNA, 20 bp, Artificial Sequence
  Description of Artificial Sequence: Synthetic oligonucleotide
  Target: LAMA2; (-) strand; PAM type: YTN; PAM sequence: CTC
agttctttaatcatctggtc

SEQ ID NO: 275272 - DNA, 20 bp, Artificial Sequence
  Description of Artificial Sequence: Synthetic oligonucleotide
  Target: LAMA2; (-) strand; PAM type: YTN; PAM sequence: CTC
ctcagttctttaatcatctg

SEQ ID NO: 275273 - DNA, 20 bp, Artificial Sequence
  Description of Artificial Sequence: Synthetic oligonucleotide
  Target: LAMA2; (-) strand; PAM type: YTN; PAM sequence: TTC
ctcctcagttctttaatcat

SEQ ID NO: 275274 - DNA, 20 bp, Artificial Sequence
  Description of Artificial Sequence: Synthetic oligonucleotide
  Target: LAMA2; (-) strand; PAM type: YTN; PAM sequence: TTT
cctcctcagttctttaatca

SEQ ID NO: 275275 - DNA, 20 bp, Artificial Sequence
  Description of Artificial Sequence: Synthetic oligonucleotide
  Target: LAMA2; (-) strand; PAM type: YTN; PAM sequence: TTT
tcctcctcagttctttaatc

SEQ ID NO: 275276 - DNA, 20 bp, Artificial Sequence
  Description of Artificial Sequence: Synthetic oligonucleotide
  Target: LAMA2; (-) strand; PAM type: YTN; PAM sequence: TTT
ttcctcctcagttctttaat

SEQ ID NO: 275277 - DNA, 20 bp, Artificial Sequence
  Description of Artificial Sequence: Synthetic oligonucleotide
  Target: LAMA2; (-) strand; PAM type: YTN; PAM sequence: CTA
gatttttcctcctcagttct

SEQ ID NO: 275278 - DNA, 20 bp, Artificial Sequence
  Description of Artificial Sequence: Synthetic oligonucleotide
  Target: LAMA2; (-) strand; PAM type: YTN; PAM sequence: CTC
tagatttttcctcctcagtt

SEQ ID NO: 275279 - DNA, 20 bp, Artificial Sequence
  Description of Artificial Sequence: Synthetic oligonucleotide
  Target: LAMA2; (-) strand; PAM type: YTN; PAM sequence: TTG
tgtctctagatttttcctcc

SEQ ID NO: 275280 - DNA, 20 bp, Artificial Sequence
  Description of Artificial Sequence: Synthetic oligonucleotide
  Target: LAMA2; (-) strand; PAM type: YTN; PAM sequence: TTT
gtgtctctagatttttcctc

SEQ ID NO: 275281 - DNA, 20 bp, Artificial Sequence
  Description of Artificial Sequence: Synthetic oligonucleotide
  Target: LAMA2; (-) strand; PAM type: YTN; PAM sequence: TTT
tgtgtctctagatttttcct

SEQ ID NO: 275282 - DNA, 20 bp, Artificial Sequence
  Description of Artificial Sequence: Synthetic oligonucleotide
  Target: LAMA2; (-) strand; PAM type: YTN; PAM sequence: CTT
ttgtgtctctagatttttcc

SEQ ID NO: 275283 - DNA, 20 bp, Artificial Sequence
  Description of Artificial Sequence: Synthetic oligonucleotide
  Target: LAMA2; (-) strand; PAM type: YTN; PAM sequence: TTC
cttttgtgtctctagatttt

SEQ ID NO: 275284 - DNA, 20 bp, Artificial Sequence
  Description of Artificial Sequence: Synthetic oligonucleotide
  Target: LAMA2; (-) strand; PAM type: YTN; PAM sequence: TTT
ccttttgtgtctctagattt

SEQ ID NO: 275285 - DNA, 20 bp, Artificial Sequence
  Description of Artificial Sequence: Synthetic oligonucleotide
  Target: LAMA2; (-) strand; PAM type: YTN; PAM sequence: TTC
agcaatttccttttgtgtct

SEQ ID NO: 275286 - DNA, 20 bp, Artificial Sequence
  Description of Artificial Sequence: Synthetic oligonucleotide
  Target: LAMA2; (-) strand; PAM type: YTN; PAM sequence: CTT
cagcaatttccttttgtgtc

SEQ ID NO: 275287 - DNA, 20 bp, Artificial Sequence
  Description of Artificial Sequence: Synthetic oligonucleotide
  Target: LAMA2; (-) strand; PAM type: YTN; PAM sequence: CTC
atcttcagcaatttcctttt

SEQ ID NO: 275288 - DNA, 20 bp, Artificial Sequence
  Description of Artificial Sequence: Synthetic oligonucleotide
  Target: LAMA2; (-) strand; PAM type: YTN; PAM sequence: CTC
acaccaactcatcttcagca

SEQ ID NO: 275289 - DNA, 20 bp, Artificial Sequence
  Description of Artificial Sequence: Synthetic oligonucleotide
  Target: LAMA2; (-) strand; PAM type: YTN; PAM sequence: CTA
ctcacaccaactcatcttca

SEQ ID NO: 275290 - DNA, 20 bp, Artificial Sequence
  Description of Artificial Sequence: Synthetic oligonucleotide
  Target: LAMA2; (-) strand; PAM type: YTN; PAM sequence: CTC
atctactcacaccaactcat

SEQ ID NO: 275291 - DNA, 20 bp, Artificial Sequence
  Description of Artificial Sequence: Synthetic oligonucleotide
  Target: LAMA2; (-) strand; PAM type: YTN; PAM sequence: TTG
tcaaaagaaaaaataataac

SEQ ID NO: 275292 - DNA, 20 bp, Artificial Sequence
  Description of Artificial Sequence: Synthetic oligonucleotide
  Target: LAMA2; (-) strand; PAM type: YTN; PAM sequence: TTT
gtcaaaagaaaaaataataa

SEQ ID NO: 275293 - DNA, 20 bp, Artificial Sequence
  Description of Artificial Sequence: Synthetic oligonucleotide
  Target: LAMA2; (-) strand; PAM type: YTN; PAM sequence: CTC
agtttgtcaaaagaaaaaat

SEQ ID NO: 275294 - DNA, 20 bp, Artificial Sequence
  Description of Artificial Sequence: Synthetic oligonucleotide
  Target: LAMA2; (-) strand; PAM type: YTN; PAM sequence: CTG
gaaatctcagtttgtcaaaa

SEQ ID NO: 275295 - DNA, 20 bp, Artificial Sequence
  Description of Artificial Sequence: Synthetic oligonucleotide
  Target: LAMA2; (-) strand; PAM type: YTN; PAM sequence: TTA
tctggaaatctcagtttgtc

SEQ ID NO: 275296 - DNA, 20 bp, Artificial Sequence
  Description of Artificial Sequence: Synthetic oligonucleotide
  Target: LAMA2; (-) strand; PAM type: YTN; PAM sequence: CTG
taaattatctggaaatctca

SEQ ID NO: 275297 - DNA, 20 bp, Artificial Sequence
  Description of Artificial Sequence: Synthetic oligonucleotide
  Target: LAMA2; (-) strand; PAM type: YTN; PAM sequence: TTA
gaaaactgtaaattatctgg

SEQ ID NO: 275298 - DNA, 20 bp, Artificial Sequence
  Description of Artificial Sequence: Synthetic oligonucleotide
  Target: LAMA2; (-) strand; PAM type: YTN; PAM sequence: TTT
agaaaactgtaaattatctg

SEQ ID NO: 275299 - DNA, 20 bp, Artificial Sequence
  Description of Artificial Sequence: Synthetic oligonucleotide
  Target: LAMA2; (-) strand; PAM type: YTN; PAM sequence: TTA
tacgtgtgataaaaatttag

SEQ ID NO: 275300 - DNA, 20 bp, Artificial Sequence
  Description of Artificial Sequence: Synthetic oligonucleotide
  Target: LAMA2; (-) strand; PAM type: YTN; PAM sequence: CTT
atacgtgtgataaaaattta

SEQ ID NO: 275301 - DNA, 20 bp, Artificial Sequence
  Description of Artificial Sequence: Synthetic oligonucleotide
  Target: LAMA2; (-) strand; PAM type: YTN; PAM sequence: TTA
cttatacgtgtgataaaaat

SEQ ID NO: 275302 - DNA, 20 bp, Artificial Sequence
  Description of Artificial Sequence: Synthetic oligonucleotide
  Target: LAMA2; (-) strand; PAM type: YTN; PAM sequence: TTT
acttatacgtgtgataaaaa

SEQ ID NO: 275303 - DNA, 20 bp, Artificial Sequence
  Description of Artificial Sequence: Synthetic oligonucleotide
  Target: LAMA2; (-) strand; PAM type: YTN; PAM sequence: TTT
tacttatacgtgtgataaaa

SEQ ID NO: 275304 - DNA, 20 bp, Artificial Sequence
  Description of Artificial Sequence: Synthetic oligonucleotide
  Target: LAMA2; (-) strand; PAM type: YTN; PAM sequence: CTT
ttacttatacgtgtgataaa

SEQ ID NO: 275305 - DNA, 20 bp, Artificial Sequence
  Description of Artificial Sequence: Synthetic oligonucleotide
  Target: LAMA2; (-) strand; PAM type: YTN; PAM sequence: TTG
gaaaaacaaagcatctttta

SEQ ID NO: 275306 - DNA, 20 bp, Artificial Sequence
  Description of Artificial Sequence: Synthetic oligonucleotide
  Target: LAMA2; (-) strand; PAM type: YTN; PAM sequence: CTC
caggttggaaaaacaaagca

SEQ ID NO: 275307 - DNA, 20 bp, Artificial Sequence
  Description of Artificial Sequence: Synthetic oligonucleotide
  Target: LAMA2; (-) strand; PAM type: YTN; PAM sequence: TTA
aataagtaaatgaataaata

SEQ ID NO: 275308 - DNA, 20 bp, Artificial Sequence
  Description of Artificial Sequence: Synthetic oligonucleotide
  Target: LAMA2; (-) strand; PAM type: YTN; PAM sequence: TTG
gaacaatggtaaagtacaat

SEQ ID NO: 275309 - DNA, 20 bp, Artificial Sequence
  Description of Artificial Sequence: Synthetic oligonucleotide
  Target: LAMA2; (-) strand; PAM type: YTN; PAM sequence: TTT
ggaacaatggtaaagtacaa

SEQ ID NO: 275310 - DNA, 20 bp, Artificial Sequence
  Description of Artificial Sequence: Synthetic oligonucleotide
  Target: LAMA2; (-) strand; PAM type: YTN; PAM sequence: TTT
tggaacaatggtaaagtaca

SEQ ID NO: 275311 - DNA, 20 bp, Artificial Sequence
  Description of Artificial Sequence: Synthetic oligonucleotide
  Target: LAMA2; (-) strand; PAM type: YTN; PAM sequence: TTC
attttggaacaatggtaaag

SEQ ID NO: 275312 - DNA, 20 bp, Artificial Sequence
  Description of Artificial Sequence: Synthetic oligonucleotide
  Target: LAMA2; (-) strand; PAM type: YTN; PAM sequence: TTG
attcattttggaacaatggt

SEQ ID NO: 275313 - DNA, 20 bp, Artificial Sequence
  Description of Artificial Sequence: Synthetic oligonucleotide
  Target: LAMA2; (-) strand; PAM type: YTN; PAM sequence: TTT
gattcattttggaacaatgg

SEQ ID NO: 275314 - DNA, 20 bp, Artificial Sequence
  Description of Artificial Sequence: Synthetic oligonucleotide
  Target: LAMA2; (-) strand; PAM type: YTN; PAM sequence: TTT
tgattcattttggaacaatg

SEQ ID NO: 275315 - DNA, 20 bp, Artificial Sequence
  Description of Artificial Sequence: Synthetic oligonucleotide
  Target: LAMA2; (-) strand; PAM type: YTN; PAM sequence: CTT
ttgattcattttggaacaat

SEQ ID NO: 275316 - DNA, 20 bp, Artificial Sequence
  Description of Artificial Sequence: Synthetic oligonucleotide
  Target: LAMA2; (-) strand; PAM type: YTN; PAM sequence: TTA
tatgtaggcaagaacatgct

SEQ ID NO: 275317 - DNA, 20 bp, Artificial Sequence
  Description of Artificial Sequence: Synthetic oligonucleotide
  Target: LAMA2; (-) strand; PAM type: YTN; PAM sequence: TTG
attatatgtaggcaagaaca

SEQ ID NO: 275318 - DNA, 20 bp, Artificial Sequence
  Description of Artificial Sequence: Synthetic oligonucleotide
  Target: LAMA2; (-) strand; PAM type: YTN; PAM sequence: CTT
gattatatgtaggcaagaac

SEQ ID NO: 275319 - DNA, 20 bp, Artificial Sequence
  Description of Artificial Sequence: Synthetic oligonucleotide
  Target: LAMA2; (-) strand; PAM type: YTN; PAM sequence: TTA
cttgattatatgtaggcaag

SEQ ID NO: 275320 - DNA, 20 bp, Artificial Sequence
  Description of Artificial Sequence: Synthetic oligonucleotide
  Target: LAMA2; (-) strand; PAM type: YTN; PAM sequence: TTT
acttgattatatgtaggcaa

SEQ ID NO: 275321 - DNA, 20 bp, Artificial Sequence
  Description of Artificial Sequence: Synthetic oligonucleotide
  Target: LAMA2; (-) strand; PAM type: YTN; PAM sequence: TTA
cagaaggagcagcaccagaa

SEQ ID NO: 275322 - DNA, 20 bp, Artificial Sequence
  Description of Artificial Sequence: Synthetic oligonucleotide
  Target: LAMA2; (-) strand; PAM type: YTN; PAM sequence: CTA
attacagaaggagcagcacc

SEQ ID NO: 275323 - DNA, 20 bp, Artificial Sequence
  Description of Artificial Sequence: Synthetic oligonucleotide
  Target: LAMA2; (-) strand; PAM type: YTN; PAM sequence: TTA
gcctaattacagaaggagca

SEQ ID NO: 275324 - DNA, 20 bp, Artificial Sequence
  Description of Artificial Sequence: Synthetic oligonucleotide
  Target: LAMA2; (-) strand; PAM type: YTN; PAM sequence: CTC
attagcctaattacagaagg

SEQ ID NO: 275325 - DNA, 20 bp, Artificial Sequence
  Description of Artificial Sequence: Synthetic oligonucleotide
  Target: LAMA2; (-) strand; PAM type: YTN; PAM sequence: TTA
acaaaacaaactcattagcc

SEQ ID NO: 275326 - DNA, 20 bp, Artificial Sequence
  Description of Artificial Sequence: Synthetic oligonucleotide
  Target: LAMA2; (-) strand; PAM type: YTN; PAM sequence: CTA
atgcagatgattaacaaaac

SEQ ID NO: 275327 - DNA, 20 bp, Artificial Sequence
  Description of Artificial Sequence: Synthetic oligonucleotide
  Target: LAMA2; (-) strand; PAM type: YTN; PAM sequence: CTG
atagtccaaaagtccctaat

SEQ ID NO: 275328 - DNA, 20 bp, Artificial Sequence
  Description of Artificial Sequence: Synthetic oligonucleotide
  Target: LAMA2; (-) strand; PAM type: YTN; PAM sequence: TTA
aaacaaaaatcaactgatag

SEQ ID NO: 275329 - DNA, 20 bp, Artificial Sequence
  Description of Artificial Sequence: Synthetic oligonucleotide
  Target: LAMA2; (-) strand; PAM type: YTN; PAM sequence: TTA
ttaaaacaaaaatcaactga

SEQ ID NO: 275330 - DNA, 20 bp, Artificial Sequence
  Description of Artificial Sequence: Synthetic oligonucleotide
  Target: LAMA2; (-) strand; PAM type: YTN; PAM sequence: TTT
attaaaacaaaaatcaactg

SEQ ID NO: 275331 - DNA, 20 bp, Artificial Sequence
  Description of Artificial Sequence: Synthetic oligonucleotide
  Target: LAMA2; (-) strand; PAM type: YTN; PAM sequence: TTT
tattaaaacaaaaatcaact

SEQ ID NO: 275332 - DNA, 20 bp, Artificial Sequence
  Description of Artificial Sequence: Synthetic oligonucleotide
  Target: LAMA2; (-) strand; PAM type: YTN; PAM sequence: TTT
ttattaaaacaaaaatcaac

SEQ ID NO: 275333 - DNA, 20 bp, Artificial Sequence
  Description of Artificial Sequence: Synthetic oligonucleotide
  Target: LAMA2; (-) strand; PAM type: YTN; PAM sequence: TTA
tccaaaggtatttttattaa

SEQ ID NO: 275334 - DNA, 20 bp, Artificial Sequence
  Description of Artificial Sequence: Synthetic oligonucleotide
  Target: LAMA2; (-) strand; PAM type: YTN; PAM sequence: TTT
atccaaaggtatttttatta

SEQ ID NO: 275335 - DNA, 20 bp, Artificial Sequence
  Description of Artificial Sequence: Synthetic oligonucleotide
  Target: LAMA2; (-) strand; PAM type: YTN; PAM sequence: TTG
tttatccaaaggtattttta

SEQ ID NO: 275336 - DNA, 20 bp, Artificial Sequence
  Description of Artificial Sequence: Synthetic oligonucleotide
  Target: LAMA2; (-) strand; PAM type: YTN; PAM sequence: TTT
gtttatccaaaggtattttt

SEQ ID NO: 275337 - DNA, 20 bp, Artificial Sequence
  Description of Artificial Sequence: Synthetic oligonucleotide
  Target: LAMA2; (-) strand; PAM type: YTN; PAM sequence: CTT
tgtttatccaaaggtatttt

SEQ ID NO: 275338 - DNA, 20 bp, Artificial Sequence
  Description of Artificial Sequence: Synthetic oligonucleotide
  Target: LAMA2; (-) strand; PAM type: YTN; PAM sequence: TTG
gccaatatatgaatggtaaa

SEQ ID NO: 275339 - DNA, 20 bp, Artificial Sequence
  Description of Artificial Sequence: Synthetic oligonucleotide
  Target: LAMA2; (-) strand; PAM type: YTN; PAM sequence: TTA
agatgataaaatgtataggt

SEQ ID NO: 275340 - DNA, 20 bp, Artificial Sequence
  Description of Artificial Sequence: Synthetic oligonucleotide
  Target: LAMA2; (-) strand; PAM type: YTN; PAM sequence: CTT
aagatgataaaatgtatagg

SEQ ID NO: 275341 - DNA, 20 bp, Artificial Sequence
  Description of Artificial Sequence: Synthetic oligonucleotide
  Target: LAMA2; (-) strand; PAM type: YTN; PAM sequence: TTC
ttaagatgataaaatgtata

SEQ ID NO: 275342 - DNA, 20 bp, Artificial Sequence
  Description of Artificial Sequence: Synthetic oligonucleotide
  Target: LAMA2; (-) strand; PAM type: YTN; PAM sequence: TTT
cttaagatgataaaatgtat

SEQ ID NO: 275343 - DNA, 20 bp, Artificial Sequence
  Description of Artificial Sequence: Synthetic oligonucleotide
  Target: LAMA2; (-) strand; PAM type: YTN; PAM sequence: TTC
agcatttcttaagatgataa

SEQ ID NO: 275344 - DNA, 20 bp, Artificial Sequence
  Description of Artificial Sequence: Synthetic oligonucleotide
  Target: LAMA2; (-) strand; PAM type: YTN; PAM sequence: TTT
cagcatttcttaagatgata

SEQ ID NO: 275345 - DNA, 20 bp, Artificial Sequence
  Description of Artificial Sequence: Synthetic oligonucleotide
  Target: LAMA2; (-) strand; PAM type: YTN; PAM sequence: TTT
tcagcatttcttaagatgat

SEQ ID NO: 275346 - DNA, 20 bp, Artificial Sequence
  Description of Artificial Sequence: Synthetic oligonucleotide
  Target: LAMA2; (-) strand; PAM type: YTN; PAM sequence: CTT
ttcagcatttcttaagatga

SEQ ID NO: 275347 - DNA, 20 bp, Artificial Sequence
  Description of Artificial Sequence: Synthetic oligonucleotide
  Target: LAMA2; (-) strand; PAM type: YTN; PAM sequence: TTC
ttttcagcatttcttaagat

SEQ ID NO: 275348 - DNA, 20 bp, Artificial Sequence
  Description of Artificial Sequence: Synthetic oligonucleotide
  Target: LAMA2; (-) strand; PAM type: YTN; PAM sequence: TTT
cttttcagcatttcttaaga

SEQ ID NO: 275349 - DNA, 20 bp, Artificial Sequence
  Description of Artificial Sequence: Synthetic oligonucleotide
  Target: LAMA2; (-) strand; PAM type: YTN; PAM sequence: TTT
tcttttcagcatttcttaag

SEQ ID NO: 275350 - DNA, 20 bp, Artificial Sequence
  Description of Artificial Sequence: Synthetic oligonucleotide
  Target: LAMA2; (-) strand; PAM type: YTN; PAM sequence: CTT
ttcttttcagcatttcttaa

SEQ ID NO: 275351 - DNA, 20 bp, Artificial Sequence
  Description of Artificial Sequence: Synthetic oligonucleotide
  Target: LAMA2; (-) strand; PAM type: YTN; PAM sequence: TTG
atgacttttcttttcagcat

SEQ ID NO: 275352 - DNA, 20 bp, Artificial Sequence
  Description of Artificial Sequence: Synthetic oligonucleotide
  Target: LAMA2; (-) strand; PAM type: YTN; PAM sequence: TTT
gatgacttttcttttcagca

SEQ ID NO: 275353 - DNA, 20 bp, Artificial Sequence
  Description of Artificial Sequence: Synthetic oligonucleotide
  Target: LAMA2; (-) strand; PAM type: YTN; PAM sequence: TTA
tttgatgacttttcttttca

SEQ ID NO: 275354 - DNA, 20 bp, Artificial Sequence
  Description of Artificial Sequence: Synthetic oligonucleotide
  Target: LAMA2; (-) strand; PAM type: YTN; PAM sequence: TTA
ttatttgatgacttttcttt

SEQ ID NO: 275355 - DNA, 20 bp, Artificial Sequence
  Description of Artificial Sequence: Synthetic oligonucleotide
  Target: LAMA2; (-) strand; PAM type: YTN; PAM sequence: TTT
attatttgatgacttttctt

SEQ ID NO: 275356 - DNA, 20 bp, Artificial Sequence
  Description of Artificial Sequence: Synthetic oligonucleotide
  Target: LAMA2; (-) strand; PAM type: YTN; PAM sequence: TTA
ggtgtttattatttgatgac

SEQ ID NO: 275357 - DNA, 20 bp, Artificial Sequence
  Description of Artificial Sequence: Synthetic oligonucleotide
  Target: LAMA2; (-) strand; PAM type: YTN; PAM sequence: TTG
aaagtattaggtgtttatta

SEQ ID NO: 275358 - DNA, 20 bp, Artificial Sequence
  Description of Artificial Sequence: Synthetic oligonucleotide
  Target: LAMA2; (-) strand; PAM type: YTN; PAM sequence: TTT
gaaagtattaggtgtttatt

SEQ ID NO: 275359 - DNA, 20 bp, Artificial Sequence
  Description of Artificial Sequence: Synthetic oligonucleotide
  Target: LAMA2; (-) strand; PAM type: YTN; PAM sequence: TTA
tttgaaagtattaggtgttt

SEQ ID NO: 275360 - DNA, 20 bp, Artificial Sequence
  Description of Artificial Sequence: Synthetic oligonucleotide
  Target: LAMA2; (-) strand; PAM type: YTN; PAM sequence: CTT
atttgaaagtattaggtgtt

SEQ ID NO: 275361 - DNA, 20 bp, Artificial Sequence
  Description of Artificial Sequence: Synthetic oligonucleotide
  Target: LAMA2; (-) strand; PAM type: YTN; PAM sequence: CTC
ttatttgaaagtattaggtg

SEQ ID NO: 275362 - DNA, 20 bp, Artificial Sequence
  Description of Artificial Sequence: Synthetic oligonucleotide
  Target: LAMA2; (-) strand; PAM type: YTN; PAM sequence: TTC
gcaactcttatttgaaagta

SEQ ID NO: 275363 - DNA, 20 bp, Artificial Sequence
  Description of Artificial Sequence: Synthetic oligonucleotide
  Target: LAMA2; (-) strand; PAM type: YTN; PAM sequence: CTC
atattcgcaactcttatttg

SEQ ID NO: 275364 - DNA, 20 bp, Artificial Sequence
  Description of Artificial Sequence: Synthetic oligonucleotide
  Target: LAMA2; (-) strand; PAM type: YTN; PAM sequence: TTC
ccaaccctcatattcgcaac

SEQ ID NO: 275365 - DNA, 20 bp, Artificial Sequence
  Description of Artificial Sequence: Synthetic oligonucleotide
  Target: LAMA2; (-) strand; PAM type: YTN; PAM sequence: TTT
cccaaccctcatattcgcaa

SEQ ID NO: 275366 - DNA, 20 bp, Artificial Sequence
  Description of Artificial Sequence: Synthetic oligonucleotide
  Target: LAMA2; (-) strand; PAM type: YTN; PAM sequence: TTT
tcccaaccctcatattcgca

SEQ ID NO: 275367 - DNA, 20 bp, Artificial Sequence
  Description of Artificial Sequence: Synthetic oligonucleotide
  Target: LAMA2; (-) strand; PAM type: YTN; PAM sequence: CTT
ttcccaaccctcatattcgc

SEQ ID NO: 275368 - DNA, 20 bp, Artificial Sequence
  Description of Artificial Sequence: Synthetic oligonucleotide
  Target: LAMA2; (-) strand; PAM type: YTN; PAM sequence: CTA
tcacttttcccaaccctcat

SEQ ID NO: 275369 - DNA, 20 bp, Artificial Sequence
  Description of Artificial Sequence: Synthetic oligonucleotide
  Target: LAMA2; (-) strand; PAM type: YTN; PAM sequence: TTA
gcatgggtaaaatcactatc

SEQ ID NO: 275370 - DNA, 20 bp, Artificial Sequence
  Description of Artificial Sequence: Synthetic oligonucleotide
  Target: LAMA2; (-) strand; PAM type: YTN; PAM sequence: TTT
agcatgggtaaaatcactat

SEQ ID NO: 275371 - DNA, 20 bp, Artificial Sequence
  Description of Artificial Sequence: Synthetic oligonucleotide
  Target: LAMA2; (-) strand; PAM type: YTN; PAM sequence: CTT
tagcatgggtaaaatcacta

SEQ ID NO: 275372 - DNA, 20 bp, Artificial Sequence
  Description of Artificial Sequence: Synthetic oligonucleotide
  Target: LAMA2; (-) strand; PAM type: YTN; PAM sequence: TTC
tttagcatgggtaaaatcac

SEQ ID NO: 275373 - DNA, 20 bp, Artificial Sequence
  Description of Artificial Sequence: Synthetic oligonucleotide
  Target: LAMA2; (-) strand; PAM type: YTN; PAM sequence: TTA
tcataaaagttctttagcat

SEQ ID NO: 275374 - DNA, 20 bp, Artificial Sequence
  Description of Artificial Sequence: Synthetic oligonucleotide
  Target: LAMA2; (-) strand; PAM type: YTN; PAM sequence: TTG
agtgcgttatcataaaagtt

SEQ ID NO: 275375 - DNA, 20 bp, Artificial Sequence
  Description of Artificial Sequence: Synthetic oligonucleotide
  Target: LAMA2; (-) strand; PAM type: YTN; PAM sequence: TTA
ttgagtgcgttatcataaaa

SEQ ID NO: 275376 - DNA, 20 bp, Artificial Sequence
  Description of Artificial Sequence: Synthetic oligonucleotide
  Target: LAMA2; (-) strand; PAM type: YTN; PAM sequence: TTT
attgagtgcgttatcataaa

SEQ ID NO: 275377 - DNA, 20 bp, Artificial Sequence
  Description of Artificial Sequence: Synthetic oligonucleotide
  Target: LAMA2; (-) strand; PAM type: YTN; PAM sequence: TTT
tattgagtgcgttatcataa

SEQ ID NO: 275378 - DNA, 20 bp, Artificial Sequence
  Description of Artificial Sequence: Synthetic oligonucleotide
  Target: LAMA2; (-) strand; PAM type: YTN; PAM sequence: CTA
ttttattgagtgcgttatca

SEQ ID NO: 275379 - DNA, 20 bp, Artificial Sequence
  Description of Artificial Sequence: Synthetic oligonucleotide
  Target: LAMA2; (-) strand; PAM type: YTN; PAM sequence: CTA
tgaatgtagagatgtatcta

SEQ ID NO: 275380 - DNA, 20 bp, Artificial Sequence
  Description of Artificial Sequence: Synthetic oligonucleotide
  Target: LAMA2; (-) strand; PAM type: YTN; PAM sequence: CTG
actatgaatgtagagatgta

SEQ ID NO: 275381 - DNA, 20 bp, Artificial Sequence
  Description of Artificial Sequence: Synthetic oligonucleotide
  Target: LAMA2; (-) strand; PAM type: YTN; PAM sequence: TTA
gctgactatgaatgtagaga

SEQ ID NO: 275382 - DNA, 20 bp, Artificial Sequence
  Description of Artificial Sequence: Synthetic oligonucleotide
  Target: LAMA2; (-) strand; PAM type: YTN; PAM sequence: TTG
aagttagctgactatgaatg

SEQ ID NO: 275383 - DNA, 20 bp, Artificial Sequence
  Description of Artificial Sequence: Synthetic oligonucleotide
  Target: LAMA2; (-) strand; PAM type: YTN; PAM sequence: TTT
gaagttagctgactatgaat

SEQ ID NO: 275384 - DNA, 20 bp, Artificial Sequence
  Description of Artificial Sequence: Synthetic oligonucleotide
  Target: LAMA2; (-) strand; PAM type: YTN; PAM sequence: CTT
tgaagttagctgactatgaa

SEQ ID NO: 275385 - DNA, 20 bp, Artificial Sequence
  Description of Artificial Sequence: Synthetic oligonucleotide
  Target: LAMA2; (-) strand; PAM type: YTN; PAM sequence: CTA
ccactttgaagttagctgac

SEQ ID NO: 275386 - DNA, 20 bp, Artificial Sequence
  Description of Artificial Sequence: Synthetic oligonucleotide
  Target: LAMA2; (-) strand; PAM type: YTN; PAM sequence: TTA
gtaatactaccactttgaag

SEQ ID NO: 275387 - DNA, 20 bp, Artificial Sequence
  Description of Artificial Sequence: Synthetic oligonucleotide
  Target: LAMA2; (-) strand; PAM type: YTN; PAM sequence: TTA
agtattagtaatactaccac

SEQ ID NO: 275388 - DNA, 20 bp, Artificial Sequence
  Description of Artificial Sequence: Synthetic oligonucleotide
  Target: LAMA2; (-) strand; PAM type: YTN; PAM sequence: TTT
aagtattagtaatactacca

SEQ ID NO: 275389 - DNA, 20 bp, Artificial Sequence
  Description of Artificial Sequence: Synthetic oligonucleotide
  Target: LAMA2; (-) strand; PAM type: YTN; PAM sequence: TTA
tttaagtattagtaatacta

SEQ ID NO: 275390 - DNA, 20 bp, Artificial Sequence
  Description of Artificial Sequence: Synthetic oligonucleotide
  Target: LAMA2; (-) strand; PAM type: YTN; PAM sequence: TTA
gtataaattatttaagtatt

SEQ ID NO: 275391 - DNA, 20 bp, Artificial Sequence
  Description of Artificial Sequence: Synthetic oligonucleotide
  Target: LAMA2; (-) strand; PAM type: YTN; PAM sequence: TTT
agtataaattatttaagtat

SEQ ID NO: 275392 - DNA, 20 bp, Artificial Sequence
  Description of Artificial Sequence: Synthetic oligonucleotide
  Target: LAMA2; (-) strand; PAM type: YTN; PAM sequence: CTG
gtttagtataaattatttaa

SEQ ID NO: 275393 - DNA, 20 bp, Artificial Sequence
  Description of Artificial Sequence: Synthetic oligonucleotide
  Target: LAMA2; (-) strand; PAM type: YTN; PAM sequence: TTG
ctggtttagtataaattatt

SEQ ID NO: 275394 - DNA, 20 bp, Artificial Sequence
  Description of Artificial Sequence: Synthetic oligonucleotide
  Target: LAMA2; (-) strand; PAM type: YTN; PAM sequence: CTG
atattgctggtttagtataa

SEQ ID NO: 275395 - DNA, 20 bp, Artificial Sequence
  Description of Artificial Sequence: Synthetic oligonucleotide
  Target: LAMA2; (-) strand; PAM type: YTN; PAM sequence: CTG
gtgtgctgatattgctggtt

SEQ ID NO: 275396 - DNA, 20 bp, Artificial Sequence
  Description of Artificial Sequence: Synthetic oligonucleotide
  Target: LAMA2; (-) strand; PAM type: YTN; PAM sequence: CTC
tggtgtgctgatattgctgg

SEQ ID NO: 275397 - DNA, 20 bp, Artificial Sequence
  Description of Artificial Sequence: Synthetic oligonucleotide
  Target: LAMA2; (-) strand; PAM type: YTN; PAM sequence: TTC
tctggtgtgctgatattgct

SEQ ID NO: 275398 - DNA, 20 bp, Artificial Sequence
  Description of Artificial Sequence: Synthetic oligonucleotide
  Target: LAMA2; (-) strand; PAM type: YTN; PAM sequence: TTA
acaagttctctggtgtgctg

SEQ ID NO: 275399 - DNA, 20 bp, Artificial Sequence
  Description of Artificial Sequence: Synthetic oligonucleotide
  Target: LAMA2; (-) strand; PAM type: YTN; PAM sequence: TTT
aacaagttctctggtgtgct

SEQ ID NO: 275400 - DNA, 20 bp, Artificial Sequence
  Description of Artificial Sequence: Synthetic oligonucleotide
  Target: LAMA2; (-) strand; PAM type: YTN; PAM sequence: TTT
taacaagttctctggtgtgc

SEQ ID NO: 275401 - DNA, 20 bp, Artificial Sequence
  Description of Artificial Sequence: Synthetic oligonucleotide
  Target: LAMA2; (-) strand; PAM type: YTN; PAM sequence: TTT
ttaacaagttctctggtgtg

SEQ ID NO: 275402 - DNA, 20 bp, Artificial Sequence
  Description of Artificial Sequence: Synthetic oligonucleotide
  Target: LAMA2; (-) strand; PAM type: YTN; PAM sequence: CTG
tatttttaacaagttctctg

SEQ ID NO: 275403 - DNA, 20 bp, Artificial Sequence
  Description of Artificial Sequence: Synthetic oligonucleotide
  Target: LAMA2; (-) strand; PAM type: YTN; PAM sequence: CTG
acaatctgtatttttaacaa

SEQ ID NO: 275404 - DNA, 20 bp, Artificial Sequence
  Description of Artificial Sequence: Synthetic oligonucleotide
  Target: LAMA2; (-) strand; PAM type: YTN; PAM sequence: CTG
ggagggggtctgacaatctg

SEQ ID NO: 275405 - DNA, 20 bp, Artificial Sequence
  Description of Artificial Sequence: Synthetic oligonucleotide
  Target: LAMA2; (-) strand; PAM type: YTN; PAM sequence: TTC
aggaggtctgggagggggtc

SEQ ID NO: 275406 - DNA, 20 bp, Artificial Sequence
  Description of Artificial Sequence: Synthetic oligonucleotide
  Target: LAMA2; (-) strand; PAM type: YTN; PAM sequence: CTG
attcaggaggtctgggaggg

SEQ ID NO: 275407 - DNA, 20 bp, Artificial Sequence
  Description of Artificial Sequence: Synthetic oligonucleotide
  Target: LAMA2; (-) strand; PAM type: YTN; PAM sequence: TTC
tgattcaggaggtctgggag

SEQ ID NO: 275408 - DNA, 20 bp, Artificial Sequence
  Description of Artificial Sequence: Synthetic oligonucleotide
  Target: LAMA2; (-) strand; PAM type: YTN; PAM sequence: TTT
ctgattcaggaggtctggga

SEQ ID NO: 275409 - DNA, 20 bp, Artificial Sequence
  Description of Artificial Sequence: Synthetic oligonucleotide
  Target: LAMA2; (-) strand; PAM type: YTN; PAM sequence: CTG
ggtcccatccccaaagtttc

SEQ ID NO: 275410 - DNA, 20 bp, Artificial Sequence
  Description of Artificial Sequence: Synthetic oligonucleotide
  Target: LAMA2; (-) strand; PAM type: YTN; PAM sequence: TTG
ctgggtcccatccccaaagt

SEQ ID NO: 275411 - DNA, 20 bp, Artificial Sequence
  Description of Artificial Sequence: Synthetic oligonucleotide
  Target: LAMA2; (-) strand; PAM type: YTN; PAM sequence: TTT
gctgggtcccatccccaaag

SEQ ID NO: 275412 - DNA, 20 bp, Artificial Sequence
  Description of Artificial Sequence: Synthetic oligonucleotide
  Target: LAMA2; (-) strand; PAM type: YTN; PAM sequence: TTA
atacatggtttgctgggtcc

SEQ ID NO: 275413 - DNA, 20 bp, Artificial Sequence
  Description of Artificial Sequence: Synthetic oligonucleotide
  Target: LAMA2; (-) strand; PAM type: YTN; PAM sequence: TTG
ttaatacatggtttgctggg

SEQ ID NO: 275414 - DNA, 20 bp, Artificial Sequence
  Description of Artificial Sequence: Synthetic oligonucleotide
  Target: LAMA2; (-) strand; PAM type: YTN; PAM sequence: CTT
gttaatacatggtttgctgg

SEQ ID NO: 275415 - DNA, 20 bp, Artificial Sequence
  Description of Artificial Sequence: Synthetic oligonucleotide
  Target: LAMA2; (-) strand; PAM type: YTN; PAM sequence: CTG
aagggcttgttaatacatgg

SEQ ID NO: 275416 - DNA, 20 bp, Artificial Sequence
  Description of Artificial Sequence: Synthetic oligonucleotide
  Target: LAMA2; (-) strand; PAM type: YTN; PAM sequence: CTC
ataatcccctgaagggcttg

SEQ ID NO: 275417 - DNA, 20 bp, Artificial Sequence
  Description of Artificial Sequence: Synthetic oligonucleotide
  Target: LAMA2; (-) strand; PAM type: YTN; PAM sequence: CTA
acatgcctcataatcccctg

SEQ ID NO: 275418 - DNA, 20 bp, Artificial Sequence
  Description of Artificial Sequence: Synthetic oligonucleotide
  Target: LAMA2; (-) strand; PAM type: YTN; PAM sequence: CTC
aaactaacatgcctcataat

SEQ ID NO: 275419 - DNA, 20 bp, Artificial Sequence
  Description of Artificial Sequence: Synthetic oligonucleotide
  Target: LAMA2; (-) strand; PAM type: YTN; PAM sequence: TTC
tcaaactaacatgcctcata

SEQ ID NO: 275420 - DNA, 20 bp, Artificial Sequence
  Description of Artificial Sequence: Synthetic oligonucleotide
  Target: LAMA2; (-) strand; PAM type: YTN; PAM sequence: TTG
aaagacagtaattctcaaac

SEQ ID NO: 275421 - DNA, 20 bp, Artificial Sequence
  Description of Artificial Sequence: Synthetic oligonucleotide
  Target: LAMA2; (-) strand; PAM type: YTN; PAM sequence: CTT
gaaagacagtaattctcaaa

SEQ ID NO: 275422 - DNA, 20 bp, Artificial Sequence
  Description of Artificial Sequence: Synthetic oligonucleotide
  Target: LAMA2; (-) strand; PAM type: YTN; PAM sequence: CTA
aatacttgaaagacagtaat

SEQ ID NO: 275423 - DNA, 20 bp, Artificial Sequence
  Description of Artificial Sequence: Synthetic oligonucleotide
  Target: LAMA2; (-) strand; PAM type: YTN; PAM sequence: CTC
taaatacttgaaagacagta

SEQ ID NO: 275424 - DNA, 20 bp, Artificial Sequence
  Description of Artificial Sequence: Synthetic oligonucleotide
  Target: LAMA2; (-) strand; PAM type: YTN; PAM sequence: TTA
agaaactctaaatacttgaa

SEQ ID NO: 275425 - DNA, 20 bp, Artificial Sequence
  Description of Artificial Sequence: Synthetic oligonucleotide
  Target: LAMA2; (-) strand; PAM type: YTN; PAM sequence: TTC
gagtcattaagaaactctaa

SEQ ID NO: 275426 - DNA, 20 bp, Artificial Sequence
  Description of Artificial Sequence: Synthetic oligonucleotide
  Target: LAMA2; (-) strand; PAM type: YTN; PAM sequence: TTT
cgagtcattaagaaactcta

SEQ ID NO: 275427 - DNA, 20 bp, Artificial Sequence
  Description of Artificial Sequence: Synthetic oligonucleotide
  Target: LAMA2; (-) strand; PAM type: YTN; PAM sequence: TTT
tcgagtcattaagaaactct

SEQ ID NO: 275428 - DNA, 20 bp, Artificial Sequence
  Description of Artificial Sequence: Synthetic oligonucleotide
  Target: LAMA2; (-) strand; PAM type: YTN; PAM sequence: CTA
aagtgataattttcgagtca

SEQ ID NO: 275429 - DNA, 20 bp, Artificial Sequence
  Description of Artificial Sequence: Synthetic oligonucleotide
  Target: LAMA2; (-) strand; PAM type: YTN; PAM sequence: TTC
taaagtgataattttcgagt

SEQ ID NO: 275430 - DNA, 20 bp, Artificial Sequence
  Description of Artificial Sequence: Synthetic oligonucleotide
  Target: LAMA2; (-) strand; PAM type: YTN; PAM sequence: TTT
ctaaagtgataattttcgag

SEQ ID NO: 275431 - DNA, 20 bp, Artificial Sequence
  Description of Artificial Sequence: Synthetic oligonucleotide
  Target: LAMA2; (-) strand; PAM type: YTN; PAM sequence: TTT
tctaaagtgataattttcga

SEQ ID NO: 275432 - DNA, 20 bp, Artificial Sequence
  Description of Artificial Sequence: Synthetic oligonucleotide
  Target: LAMA2; (-) strand; PAM type: YTN; PAM sequence: TTT
ttctaaagtgataattttcg

SEQ ID NO: 275433 - DNA, 20 bp, Artificial Sequence
  Description of Artificial Sequence: Synthetic oligonucleotide
  Target: LAMA2; (-) strand; PAM type: YTN; PAM sequence: CTA
gtttttctaaagtgataatt

SEQ ID NO: 275434 - DNA, 20 bp, Artificial Sequence
  Description of Artificial Sequence: Synthetic oligonucleotide
  Target: LAMA2; (-) strand; PAM type: YTN; PAM sequence: TTA
cctagtttttctaaagtgat

SEQ ID NO: 275435 - DNA, 20 bp, Artificial Sequence
  Description of Artificial Sequence: Synthetic oligonucleotide
  Target: LAMA2; (-) strand; PAM type: YTN; PAM sequence: CTT
acctagtttttctaaagtga

SEQ ID NO: 275436 - DNA, 20 bp, Artificial Sequence
  Description of Artificial Sequence: Synthetic oligonucleotide
  Target: LAMA2; (-) strand; PAM type: YTN; PAM sequence: TTA
acttacctagtttttctaaa

SEQ ID NO: 275437 - DNA, 20 bp, Artificial Sequence
  Description of Artificial Sequence: Synthetic oligonucleotide
  Target: LAMA2; (-) strand; PAM type: YTN; PAM sequence: TTT
aacttacctagtttttctaa

SEQ ID NO: 275438 - DNA, 20 bp, Artificial Sequence
  Description of Artificial Sequence: Synthetic oligonucleotide
  Target: LAMA2; (-) strand; PAM type: YTN; PAM sequence: TTG
gatttaacttacctagtttt

SEQ ID NO: 275439 - DNA, 20 bp, Artificial Sequence
  Description of Artificial Sequence: Synthetic oligonucleotide
  Target: LAMA2; (-) strand; PAM type: YTN; PAM sequence: TTT
ggatttaacttacctagttt

SEQ ID NO: 275440 - DNA, 20 bp, Artificial Sequence
  Description of Artificial Sequence: Synthetic oligonucleotide
  Target: LAMA2; (-) strand; PAM type: YTN; PAM sequence: TTT
tggatttaacttacctagtt

SEQ ID NO: 275441 - DNA, 20 bp, Artificial Sequence
  Description of Artificial Sequence: Synthetic oligonucleotide
  Target: LAMA2; (-) strand; PAM type: YTN; PAM sequence: TTT
ttggatttaacttacctagt

SEQ ID NO: 275442 - DNA, 20 bp, Artificial Sequence
  Description of Artificial Sequence: Synthetic oligonucleotide
  Target: LAMA2; (-) strand; PAM type: YTN; PAM sequence: CTG
gaagtttttggatttaactt

SEQ ID NO: 275443 - DNA, 20 bp, Artificial Sequence
  Description of Artificial Sequence: Synthetic oligonucleotide
  Target: LAMA2; (-) strand; PAM type: YTN; PAM sequence: TTG
atctggaagtttttggattt

SEQ ID NO: 275444 - DNA, 20 bp, Artificial Sequence
  Description of Artificial Sequence: Synthetic oligonucleotide
  Target: LAMA2; (-) strand; PAM type: YTN; PAM sequence: CTG
attgatctggaagtttttgg

SEQ ID NO: 275445 - DNA, 20 bp, Artificial Sequence
  Description of Artificial Sequence: Synthetic oligonucleotide
  Target: LAMA2; (-) strand; PAM type: YTN; PAM sequence: TTC
caactgattgatctggaagt

SEQ ID NO: 275446 - DNA, 20 bp, Artificial Sequence
  Description of Artificial Sequence: Synthetic oligonucleotide
  Target: LAMA2; (-) strand; PAM type: YTN; PAM sequence: CTT
ccaactgattgatctggaag

SEQ ID NO: 275447 - DNA, 20 bp, Artificial Sequence
  Description of Artificial Sequence: Synthetic oligonucleotide
  Target: LAMA2; (-) strand; PAM type: YTN; PAM sequence: TTC
ttccaactgattgatctgga

SEQ ID NO: 275448 - DNA, 20 bp, Artificial Sequence
  Description of Artificial Sequence: Synthetic oligonucleotide
  Target: LAMA2; (-) strand; PAM type: YTN; PAM sequence: TTT
cttccaactgattgatctgg

SEQ ID NO: 275449 - DNA, 20 bp, Artificial Sequence
  Description of Artificial Sequence: Synthetic oligonucleotide
  Target: LAMA2; (-) strand; PAM type: YTN; PAM sequence: TTT
tcttccaactgattgatctg

SEQ ID NO: 275450 - DNA, 20 bp, Artificial Sequence
  Description of Artificial Sequence: Synthetic oligonucleotide
  Target: LAMA2; (-) strand; PAM type: YTN; PAM sequence: TTT
ttcttccaactgattgatct

SEQ ID NO: 275451 - DNA, 20 bp, Artificial Sequence
  Description of Artificial Sequence: Synthetic oligonucleotide
  Target: LAMA2; (-) strand; PAM type: YTN; PAM sequence: CTT
tttcttccaactgattgatc

SEQ ID NO: 275452 - DNA, 20 bp, Artificial Sequence
  Description of Artificial Sequence: Synthetic oligonucleotide
  Target: LAMA2; (-) strand; PAM type: YTN; PAM sequence: TTC
tttttcttccaactgattga

SEQ ID NO: 275453 - DNA, 20 bp, Artificial Sequence
  Description of Artificial Sequence: Synthetic oligonucleotide
  Target: LAMA2; (-) strand; PAM type: YTN; PAM sequence: TTT
ctttttcttccaactgattg

SEQ ID NO: 275454 - DNA, 20 bp, Artificial Sequence
  Description of Artificial Sequence: Synthetic oligonucleotide
  Target: LAMA2; (-) strand; PAM type: YTN; PAM sequence: CTA
tgtttctttttcttccaact

SEQ ID NO: 275455 - DNA, 20 bp, Artificial Sequence
  Description of Artificial Sequence: Synthetic oligonucleotide
  Target: LAMA2; (-) strand; PAM type: YTN; PAM sequence: TTA
atctatgtttctttttcttc

SEQ ID NO: 275456 - DNA, 20 bp, Artificial Sequence
  Description of Artificial Sequence: Synthetic oligonucleotide
  Target: LAMA2; (-) strand; PAM type: YTN; PAM sequence: TTT
aatctatgtttctttttctt

SEQ ID NO: 275457 - DNA, 20 bp, Artificial Sequence
  Description of Artificial Sequence: Synthetic oligonucleotide
  Target: LAMA2; (-) strand; PAM type: YTN; PAM sequence: TTT
taatctatgtttctttttct

SEQ ID NO: 275458 - DNA, 20 bp, Artificial Sequence
  Description of Artificial Sequence: Synthetic oligonucleotide
  Target: LAMA2; (-) strand; PAM type: YTN; PAM sequence: CTA
gcataattttaatctatgtt

SEQ ID NO: 275459 - DNA, 20 bp, Artificial Sequence
  Description of Artificial Sequence: Synthetic oligonucleotide
  Target: LAMA2; (-) strand; PAM type: YTN; PAM sequence: CTA
gtagactagcataattttaa

SEQ ID NO: 275460 - DNA, 20 bp, Artificial Sequence
  Description of Artificial Sequence: Synthetic oligonucleotide
  Target: LAMA2; (-) strand; PAM type: YTN; PAM sequence: TTG
tcatgctagtagactagcat

SEQ ID NO: 275461 - DNA, 20 bp, Artificial Sequence
  Description of Artificial Sequence: Synthetic oligonucleotide
  Target: LAMA2; (-) strand; PAM type: YTN; PAM sequence: CTA
ggtcattgtcatgctagtag

SEQ ID NO: 275462 - DNA, 20 bp, Artificial Sequence
  Description of Artificial Sequence: Synthetic oligonucleotide
  Target: LAMA2; (-) strand; PAM type: YTN; PAM sequence: TTC
taggtcattgtcatgctagt

SEQ ID NO: 275463 - DNA, 20 bp, Artificial Sequence
  Description of Artificial Sequence: Synthetic oligonucleotide
  Target: LAMA2; (-) strand; PAM type: YTN; PAM sequence: CTG
tgaacagaattctaggtcat

SEQ ID NO: 275464 - DNA, 20 bp, Artificial Sequence
  Description of Artificial Sequence: Synthetic oligonucleotide
  Target: LAMA2; (-) strand; PAM type: YTN; PAM sequence: CTC
agaaactgtgaacagaattc

SEQ ID NO: 275465 - DNA, 20 bp, Artificial Sequence
  Description of Artificial Sequence: Synthetic oligonucleotide
  Target: LAMA2; (-) strand; PAM type: YTN; PAM sequence: TTG
ctcagaaactgtgaacagaa

SEQ ID NO: 275466 - DNA, 20 bp, Artificial Sequence
  Description of Artificial Sequence: Synthetic oligonucleotide
  Target: LAMA2; (-) strand; PAM type: YTN; PAM sequence: TTT
gctcagaaactgtgaacaga

SEQ ID NO: 275467 - DNA, 20 bp, Artificial Sequence
  Description of Artificial Sequence: Synthetic oligonucleotide
  Target: LAMA2; (-) strand; PAM type: YTN; PAM sequence: TTA
tgtttgctcagaaactgtga

SEQ ID NO: 275468 - DNA, 20 bp, Artificial Sequence
  Description of Artificial Sequence: Synthetic oligonucleotide
  Target: LAMA2; (-) strand; PAM type: YTN; PAM sequence: TTG
ttatgtttgctcagaaactg

SEQ ID NO: 275469 - DNA, 20 bp, Artificial Sequence
  Description of Artificial Sequence: Synthetic oligonucleotide
  Target: LAMA2; (-) strand; PAM type: YTN; PAM sequence: TTG
aatgtaatgatgaatattgt

SEQ ID NO: 275470 - DNA, 20 bp, Artificial Sequence
  Description of Artificial Sequence: Synthetic oligonucleotide
  Target: LAMA2; (-) strand; PAM type: YTN; PAM sequence: TTT
gaatgtaatgatgaatattg

SEQ ID NO: 275471 - DNA, 20 bp, Artificial Sequence
  Description of Artificial Sequence: Synthetic oligonucleotide
  Target: LAMA2; (-) strand; PAM type: YTN; PAM sequence: CTT
tgaatgtaatgatgaatatt

SEQ ID NO: 275472 - DNA, 20 bp, Artificial Sequence
  Description of Artificial Sequence: Synthetic oligonucleotide
  Target: LAMA2; (-) strand; PAM type: YTN; PAM sequence: TTA
ctttgaatgtaatgatgaat

SEQ ID NO: 275473 - DNA, 20 bp, Artificial Sequence
  Description of Artificial Sequence: Synthetic oligonucleotide
  Target: LAMA2; (-) strand; PAM type: YTN; PAM sequence: CTA
ttactttgaatgtaatgatg

SEQ ID NO: 275474 - DNA, 20 bp, Artificial Sequence
  Description of Artificial Sequence: Synthetic oligonucleotide
  Target: LAMA2; (-) strand; PAM type: YTN; PAM sequence: CTC
tattactttgaatgtaatga

SEQ ID NO: 275475 - DNA, 20 bp, Artificial Sequence
  Description of Artificial Sequence: Synthetic oligonucleotide
  Target: LAMA2; (-) strand; PAM type: YTN; PAM sequence: TTC
tctattactttgaatgtaat

SEQ ID NO: 275476 - DNA, 20 bp, Artificial Sequence
  Description of Artificial Sequence: Synthetic oligonucleotide
  Target: LAMA2; (-) strand; PAM type: YTN; PAM sequence: TTT
ctctattactttgaatgtaa

SEQ ID NO: 275477 - DNA, 20 bp, Artificial Sequence
  Description of Artificial Sequence: Synthetic oligonucleotide
  Target: LAMA2; (-) strand; PAM type: YTN; PAM sequence: TTT
tctctattactttgaatgta

SEQ ID NO: 275478 - DNA, 20 bp, Artificial Sequence
  Description of Artificial Sequence: Synthetic oligonucleotide
  Target: LAMA2; (-) strand; PAM type: YTN; PAM sequence: CTT
ttctctattactttgaatgt

SEQ ID NO: 275479 - DNA, 20 bp, Artificial Sequence
  Description of Artificial Sequence: Synthetic oligonucleotide
  Target: LAMA2; (-) strand; PAM type: YTN; PAM sequence: CTG
agaccttttctctattactt

SEQ ID NO: 275480 - DNA, 20 bp, Artificial Sequence
  Description of Artificial Sequence: Synthetic oligonucleotide
  Target: LAMA2; (-) strand; PAM type: YTN; PAM sequence: TTG
tactgagaccttttctctat

SEQ ID NO: 275481 - DNA, 20 bp, Artificial Sequence
  Description of Artificial Sequence: Synthetic oligonucleotide
  Target: LAMA2; (-) strand; PAM type: YTN; PAM sequence: TTC
attgtactgagaccttttct

SEQ ID NO: 275482 - DNA, 20 bp, Artificial Sequence
  Description of Artificial Sequence: Synthetic oligonucleotide
  Target: LAMA2; (-) strand; PAM type: YTN; PAM sequence: TTT
cattgtactgagaccttttc

SEQ ID NO: 275483 - DNA, 20 bp, Artificial Sequence
  Description of Artificial Sequence: Synthetic oligonucleotide
  Target: LAMA2; (-) strand; PAM type: YTN; PAM sequence: TTG
tttcattgtactgagacctt

SEQ ID NO: 275484 - DNA, 20 bp, Artificial Sequence
  Description of Artificial Sequence: Synthetic oligonucleotide
  Target: LAMA2; (-) strand; PAM type: YTN; PAM sequence: CTT
gtttcattgtactgagacct

SEQ ID NO: 275485 - DNA, 20 bp, Artificial Sequence
  Description of Artificial Sequence: Synthetic oligonucleotide
  Target: LAMA2; (-) strand; PAM type: YTN; PAM sequence: TTC
acataccaaaatcaaacaat

SEQ ID NO: 275486 - DNA, 20 bp, Artificial Sequence
  Description of Artificial Sequence: Synthetic oligonucleotide
  Target: LAMA2; (-) strand; PAM type: YTN; PAM sequence: CTT
cacataccaaaatcaaacaa

SEQ ID NO: 275487 - DNA, 20 bp, Artificial Sequence
  Description of Artificial Sequence: Synthetic oligonucleotide
  Target: LAMA2; (-) strand; PAM type: YTN; PAM sequence: TTC
acttcacataccaaaatcaa

SEQ ID NO: 275488 - DNA, 20 bp, Artificial Sequence
  Description of Artificial Sequence: Synthetic oligonucleotide
  Target: LAMA2; (-) strand; PAM type: YTN; PAM sequence: TTA
agattcacttcacataccaa

SEQ ID NO: 275489 - DNA, 20 bp, Artificial Sequence
  Description of Artificial Sequence: Synthetic oligonucleotide
  Target: LAMA2; (-) strand; PAM type: YTN; PAM sequence: TTT
aagattcacttcacatacca

SEQ ID NO: 275490 - DNA, 20 bp, Artificial Sequence
  Description of Artificial Sequence: Synthetic oligonucleotide
  Target: LAMA2; (-) strand; PAM type: YTN; PAM sequence: TTT
taagattcacttcacatacc

SEQ ID NO: 275491 - DNA, 20 bp, Artificial Sequence
  Description of Artificial Sequence: Synthetic oligonucleotide
  Target: LAMA2; (-) strand; PAM type: YTN; PAM sequence: TTG
atgaaatgagttttaagatt

SEQ ID NO: 275492 - DNA, 20 bp, Artificial Sequence
  Description of Artificial Sequence: Synthetic oligonucleotide
  Target: LAMA2; (-) strand; PAM type: YTN; PAM sequence: CTG
attgatgaaatgagttttaa

SEQ ID NO: 275493 - DNA, 20 bp, Artificial Sequence
  Description of Artificial Sequence: Synthetic oligonucleotide
  Target: LAMA2; (-) strand; PAM type: YTN; PAM sequence: CTA
ggaatctgattgatgaaatg

SEQ ID NO: 275494 - DNA, 20 bp, Artificial Sequence
  Description of Artificial Sequence: Synthetic oligonucleotide
  Target: LAMA2; (-) strand; PAM type: YTN; PAM sequence: TTC
taggaatctgattgatgaaa

SEQ ID NO: 275495 - DNA, 20 bp, Artificial Sequence
  Description of Artificial Sequence: Synthetic oligonucleotide
  Target: LAMA2; (-) strand; PAM type: YTN; PAM sequence: TTG
aatcatgtcattctaggaat

SEQ ID NO: 275496 - DNA, 20 bp, Artificial Sequence
  Description of Artificial Sequence: Synthetic oligonucleotide
  Target: LAMA2; (-) strand; PAM type: YTN; PAM sequence: TTT
gaatcatgtcattctaggaa

SEQ ID NO: 275497 - DNA, 20 bp, Artificial Sequence
  Description of Artificial Sequence: Synthetic oligonucleotide
  Target: LAMA2; (-) strand; PAM type: YTN; PAM sequence: TTT
tgaatcatgtcattctagga

SEQ ID NO: 275498 - DNA, 20 bp, Artificial Sequence
  Description of Artificial Sequence: Synthetic oligonucleotide
  Target: LAMA2; (-) strand; PAM type: YTN; PAM sequence: TTG
taagtaaaataacattttga

SEQ ID NO: 275499 - DNA, 20 bp, Artificial Sequence
  Description of Artificial Sequence: Synthetic oligonucleotide
  Target: LAMA2; (-) strand; PAM type: YTN; PAM sequence: TTT
gtaagtaaaataacattttg

SEQ ID NO: 275500 - DNA, 20 bp, Artificial Sequence
  Description of Artificial Sequence: Synthetic oligonucleotide
  Target: LAMA2; (-) strand; PAM type: YTN; PAM sequence: TTA
aatttgtaagtaaaataaca

SEQ ID NO: 275501 - DNA, 20 bp, Artificial Sequence
  Description of Artificial Sequence: Synthetic oligonucleotide
  Target: LAMA2; (-) strand; PAM type: YTN; PAM sequence: TTT
aaatttgtaagtaaaataac

SEQ ID NO: 275502 - DNA, 20 bp, Artificial Sequence
  Description of Artificial Sequence: Synthetic oligonucleotide
  Target: LAMA2; (-) strand; PAM type: YTN; PAM sequence: TTT
taaatttgtaagtaaaataa

SEQ ID NO: 275503 - DNA, 20 bp, Artificial Sequence
  Description of Artificial Sequence: Synthetic oligonucleotide
  Target: LAMA2; (-) strand; PAM type: YTN; PAM sequence: CTT
ttaaatttgtaagtaaaata

SEQ ID NO: 275504 - DNA, 20 bp, Artificial Sequence
  Description of Artificial Sequence: Synthetic oligonucleotide
  Target: LAMA2; (-) strand; PAM type: YTN; PAM sequence: TTA
agaaaccttttaaatttgta

SEQ ID NO: 275505 - DNA, 20 bp, Artificial Sequence
  Description of Artificial Sequence: Synthetic oligonucleotide
  Target: LAMA2; (-) strand; PAM type: YTN; PAM sequence: TTT
aagaaaccttttaaatttgt

SEQ ID NO: 275506 - DNA, 20 bp, Artificial Sequence
  Description of Artificial Sequence: Synthetic oligonucleotide
  Target: LAMA2; (-) strand; PAM type: YTN; PAM sequence: TTT
taagaaaccttttaaatttg

SEQ ID NO: 275507 - DNA, 20 bp, Artificial Sequence
  Description of Artificial Sequence: Synthetic oligonucleotide
  Target: LAMA2; (-) strand; PAM type: YTN; PAM sequence: TTT
ttaagaaaccttttaaattt

SEQ ID NO: 275508 - DNA, 20 bp, Artificial Sequence
  Description of Artificial Sequence: Synthetic oligonucleotide
  Target: LAMA2; (-) strand; PAM type: YTN; PAM sequence: TTA
aaataaaagcgaaacagatt

SEQ ID NO: 275509 - DNA, 20 bp, Artificial Sequence
  Description of Artificial Sequence: Synthetic oligonucleotide
  Target: LAMA2; (-) strand; PAM type: YTN; PAM sequence: TTA
attaaaataaaagcgaaaca

SEQ ID NO: 275510 - DNA, 20 bp, Artificial Sequence
  Description of Artificial Sequence: Synthetic oligonucleotide
  Target: LAMA2; (-) strand; PAM type: YTN; PAM sequence: TTA
taattaattaaaataaaagc

SEQ ID NO: 275511 - DNA, 20 bp, Artificial Sequence
  Description of Artificial Sequence: Synthetic oligonucleotide
  Target: LAMA2; (-) strand; PAM type: YTN; PAM sequence: TTT
ataattaattaaaataaaag

SEQ ID NO: 275512 - DNA, 20 bp, Artificial Sequence
  Description of Artificial Sequence: Synthetic oligonucleotide
  Target: LAMA2; (-) strand; PAM type: YTN; PAM sequence: CTG
agaccatttataattaatta

SEQ ID NO: 275513 - DNA, 20 bp, Artificial Sequence
  Description of Artificial Sequence: Synthetic oligonucleotide
  Target: LAMA2; (-) strand; PAM type: YTN; PAM sequence: CTG
gtacctgagaccatttataa

SEQ ID NO: 275514 - DNA, 20 bp, Artificial Sequence
  Description of Artificial Sequence: Synthetic oligonucleotide
  Target: LAMA2; (-) strand; PAM type: YTN; PAM sequence: TTG
aaaactggtacctgagacca

SEQ ID NO: 275515 - DNA, 20 bp, Artificial Sequence
  Description of Artificial Sequence: Synthetic oligonucleotide
  Target: LAMA2; (-) strand; PAM type: YTN; PAM sequence: CTA
aatcaagttgaaaactggta

SEQ ID NO: 275516 - DNA, 20 bp, Artificial Sequence
  Description of Artificial Sequence: Synthetic oligonucleotide
  Target: LAMA2; (-) strand; PAM type: YTN; PAM sequence: CTG
tgtgctaaatcaagttgaaa

SEQ ID NO: 275517 - DNA, 20 bp, Artificial Sequence
  Description of Artificial Sequence: Synthetic oligonucleotide
  Target: LAMA2; (-) strand; PAM type: YTN; PAM sequence: TTC
actgtgtgctaaatcaagtt

SEQ ID NO: 275518 - DNA, 20 bp, Artificial Sequence
  Description of Artificial Sequence: Synthetic oligonucleotide
  Target: LAMA2; (-) strand; PAM type: YTN; PAM sequence: CTA
acatgaaaagaatgagaaaa

SEQ ID NO: 275519 - DNA, 20 bp, Artificial Sequence
  Description of Artificial Sequence: Synthetic oligonucleotide
  Target: LAMA2; (-) strand; PAM type: YTN; PAM sequence: TTA
caaagagatgctaacatgaa

SEQ ID NO: 275520 - DNA, 20 bp, Artificial Sequence
  Description of Artificial Sequence: Synthetic oligonucleotide
  Target: LAMA2; (-) strand; PAM type: YTN; PAM sequence: TTA
aaccatgttacaaagagatg

SEQ ID NO: 275521 - DNA, 20 bp, Artificial Sequence
  Description of Artificial Sequence: Synthetic oligonucleotide
  Target: LAMA2; (-) strand; PAM type: YTN; PAM sequence: TTG
gtattaaaccatgttacaaa

SEQ ID NO: 275522 - DNA, 20 bp, Artificial Sequence
  Description of Artificial Sequence: Synthetic oligonucleotide
  Target: LAMA2; (-) strand; PAM type: YTN; PAM sequence: TTA
ttggtattaaaccatgttac

SEQ ID NO: 275523 - DNA, 20 bp, Artificial Sequence
  Description of Artificial Sequence: Synthetic oligonucleotide
  Target: LAMA2; (-) strand; PAM type: YTN; PAM sequence: TTT
attggtattaaaccatgtta

SEQ ID NO: 275524 - DNA, 20 bp, Artificial Sequence
  Description of Artificial Sequence: Synthetic oligonucleotide
  Target: LAMA2; (-) strand; PAM type: YTN; PAM sequence: TTA
gggtttattggtattaaacc

SEQ ID NO: 275525 - DNA, 20 bp, Artificial Sequence
  Description of Artificial Sequence: Synthetic oligonucleotide
  Target: LAMA2; (-) strand; PAM type: YTN; PAM sequence: CTT
agggtttattggtattaaac

SEQ ID NO: 275526 - DNA, 20 bp, Artificial Sequence
  Description of Artificial Sequence: Synthetic oligonucleotide
  Target: LAMA2; (-) strand; PAM type: YTN; PAM sequence: CTG
ccttagggtttattggtatt

SEQ ID NO: 275527 - DNA, 20 bp, Artificial Sequence
  Description of Artificial Sequence: Synthetic oligonucleotide
  Target: LAMA2; (-) strand; PAM type: YTN; PAM sequence: CTC
atgtcactgccttagggttt

SEQ ID NO: 275528 - DNA, 20 bp, Artificial Sequence
  Description of Artificial Sequence: Synthetic oligonucleotide
  Target: LAMA2; (-) strand; PAM type: YTN; PAM sequence: CTG
taaccacccccagcccaata

SEQ ID NO: 275529 - DNA, 20 bp, Artificial Sequence
  Description of Artificial Sequence: Synthetic oligonucleotide
  Target: LAMA2; (-) strand; PAM type: YTN; PAM sequence: CTC
tgtaaccacccccagcccaa

SEQ ID NO: 275530 - DNA, 20 bp, Artificial Sequence
  Description of Artificial Sequence: Synthetic oligonucleotide
  Target: LAMA2; (-) strand; PAM type: YTN; PAM sequence: CTG
cagctctgtaaccaccccca

SEQ ID NO: 275531 - DNA, 20 bp, Artificial Sequence
  Description of Artificial Sequence: Synthetic oligonucleotide
  Target: LAMA2; (-) strand; PAM type: YTN; PAM sequence: TTC
tgcagctctgtaaccacccc

SEQ ID NO: 275532 - DNA, 20 bp, Artificial Sequence
  Description of Artificial Sequence: Synthetic oligonucleotide
  Target: LAMA2; (-) strand; PAM type: YTN; PAM sequence: CTT
ctgcagctctgtaaccaccc

SEQ ID NO: 275533 - DNA, 20 bp, Artificial Sequence
  Description of Artificial Sequence: Synthetic oligonucleotide
  Target: LAMA2; (-) strand; PAM type: YTN; PAM sequence: TTC
agaagggcttctgcagctct

SEQ ID NO: 275534 - DNA, 20 bp, Artificial Sequence
  Description of Artificial Sequence: Synthetic oligonucleotide
  Target: LAMA2; (-) strand; PAM type: YTN; PAM sequence: TTT
cagaagggcttctgcagctc

SEQ ID NO: 275535 - DNA, 20 bp, Artificial Sequence
  Description of Artificial Sequence: Synthetic oligonucleotide
  Target: LAMA2; (-) strand; PAM type: YTN; PAM sequence: TTT
tcagaagggcttctgcagct

SEQ ID NO: 275536 - DNA, 20 bp, Artificial Sequence
  Description of Artificial Sequence: Synthetic oligonucleotide
  Target: LAMA2; (-) strand; PAM type: YTN; PAM sequence: TTT
ttcagaagggcttctgcagc

SEQ ID NO: 275537 - DNA, 20 bp, Artificial Sequence
  Description of Artificial Sequence: Synthetic oligonucleotide
  Target: LAMA2; (-) strand; PAM type: YTN; PAM sequence: TTT
tttcagaagggcttctgcag

SEQ ID NO: 275538 - DNA, 20 bp, Artificial Sequence
  Description of Artificial Sequence: Synthetic oligonucleotide
  Target: LAMA2; (-) strand; PAM type: YTN; PAM sequence: CTT
ttttcagaagggcttctgca

SEQ ID NO: 275539 - DNA, 20 bp, Artificial Sequence
  Description of Artificial Sequence: Synthetic oligonucleotide
  Target: LAMA2; (-) strand; PAM type: YTN; PAM sequence: TTC
acttttttcagaagggcttc

SEQ ID NO: 275540 - DNA, 20 bp, Artificial Sequence
  Description of Artificial Sequence: Synthetic oligonucleotide
  Target: LAMA2; (-) strand; PAM type: YTN; PAM sequence: CTT
cacttttttcagaagggctt

SEQ ID NO: 275541 - DNA, 20 bp, Artificial Sequence
  Description of Artificial Sequence: Synthetic oligonucleotide
  Target: LAMA2; (-) strand; PAM type: YTN; PAM sequence: TTC
ttcacttttttcagaagggc

SEQ ID NO: 275542 - DNA, 20 bp, Artificial Sequence
  Description of Artificial Sequence: Synthetic oligonucleotide
  Target: LAMA2; (-) strand; PAM type: YTN; PAM sequence: CTT
cttcacttttttcagaaggg

SEQ ID NO: 275543 - DNA, 20 bp, Artificial Sequence
  Description of Artificial Sequence: Synthetic oligonucleotide
  Target: LAMA2; (-) strand; PAM type: YTN; PAM sequence: CTC
caaacagcttcttcactttt

SEQ ID NO: 275544 - DNA, 20 bp, Artificial Sequence
  Description of Artificial Sequence: Synthetic oligonucleotide
  Target: LAMA2; (-) strand; PAM type: YTN; PAM sequence: CTC
tccaaacagcttcttcactt

SEQ ID NO: 275545 - DNA, 20 bp, Artificial Sequence
  Description of Artificial Sequence: Synthetic oligonucleotide
  Target: LAMA2; (-) strand; PAM type: YTN; PAM sequence: TTC
cccccgggactctccaaaca

SEQ ID NO: 275546 - DNA, 20 bp, Artificial Sequence
  Description of Artificial Sequence: Synthetic oligonucleotide
  Target: LAMA2; (-) strand; PAM type: YTN; PAM sequence: TTT
ccccccgggactctccaaac

SEQ ID NO: 275547 - DNA, 20 bp, Artificial Sequence
  Description of Artificial Sequence: Synthetic oligonucleotide
  Target: LAMA2; (-) strand; PAM type: YTN; PAM sequence: TTT
tccccccgggactctccaaa

SEQ ID NO: 275548 - DNA, 20 bp, Artificial Sequence
  Description of Artificial Sequence: Synthetic oligonucleotide
  Target: LAMA2; (-) strand; PAM type: YTN; PAM sequence: TTC
attttccccccgggactctc

SEQ ID NO: 275549 - DNA, 20 bp, Artificial Sequence
  Description of Artificial Sequence: Synthetic oligonucleotide
  Target: LAMA2; (-) strand; PAM type: YTN; PAM sequence: CTT
cattttccccccgggactct

SEQ ID NO: 275550 - DNA, 20 bp, Artificial Sequence
  Description of Artificial Sequence: Synthetic oligonucleotide
  Target: LAMA2; (-) strand; PAM type: YTN; PAM sequence: TTC
ttcattttccccccgggact

SEQ ID NO: 275551 - DNA, 20 bp, Artificial Sequence
  Description of Artificial Sequence: Synthetic oligonucleotide
  Target: LAMA2; (-) strand; PAM type: YTN; PAM sequence: TTT
cttcattttccccccgggac

SEQ ID NO: 275552 - DNA, 20 bp, Artificial Sequence
  Description of Artificial Sequence: Synthetic oligonucleotide
  Target: LAMA2; (-) strand; PAM type: YTN; PAM sequence: CTC
catttcttcattttcccccc

SEQ ID NO: 275553 - DNA, 20 bp, Artificial Sequence
  Description of Artificial Sequence: Synthetic oligonucleotide
  Target: LAMA2; (-) strand; PAM type: YTN; PAM sequence: TTC
tccatttcttcattttcccc

SEQ ID NO: 275554 - DNA, 20 bp, Artificial Sequence
  Description of Artificial Sequence: Synthetic oligonucleotide
  Target: LAMA2; (-) strand; PAM type: YTN; PAM sequence: CTT
ctccatttcttcattttccc

SEQ ID NO: 275555 - DNA, 20 bp, Artificial Sequence
  Description of Artificial Sequence: Synthetic oligonucleotide
  Target: LAMA2; (-) strand; PAM type: YTN; PAM sequence: TTC
ccggagatccttctccattt

SEQ ID NO: 275556 - DNA, 20 bp, Artificial Sequence
  Description of Artificial Sequence: Synthetic oligonucleotide
  Target: LAMA2; (-) strand; PAM type: YTN; PAM sequence: TTT
cccggagatccttctccatt

SEQ ID NO: 275557 - DNA, 20 bp, Artificial Sequence
  Description of Artificial Sequence: Synthetic oligonucleotide
  Target: LAMA2; (-) strand; PAM type: YTN; PAM sequence: TTT
tcccggagatccttctccat

SEQ ID NO: 275558 - DNA, 20 bp, Artificial Sequence
  Description of Artificial Sequence: Synthetic oligonucleotide
  Target: LAMA2; (-) strand; PAM type: YTN; PAM sequence: TTT
ttcccggagatccttctcca

SEQ ID NO: 275559 - DNA, 20 bp, Artificial Sequence
  Description of Artificial Sequence: Synthetic oligonucleotide
  Target: LAMA2; (-) strand; PAM type: YTN; PAM sequence: TTG
tagtcagccagtttttcccg

SEQ ID NO: 275560 - DNA, 20 bp, Artificial Sequence
  Description of Artificial Sequence: Synthetic oligonucleotide
  Target: LAMA2; (-) strand; PAM type: YTN; PAM sequence: TTT
gtagtcagccagtttttccc

SEQ ID NO: 275561 - DNA, 20 bp, Artificial Sequence
  Description of Artificial Sequence: Synthetic oligonucleotide
  Target: LAMA2; (-) strand; PAM type: YTN; PAM sequence: TTT
tgtagtcagccagtttttcc

SEQ ID NO: 275562 - DNA, 20 bp, Artificial Sequence
  Description of Artificial Sequence: Synthetic oligonucleotide
  Target: LAMA2; (-) strand; PAM type: YTN; PAM sequence: TTT
ttgtagtcagccagtttttc

SEQ ID NO: 275563 - DNA, 20 bp, Artificial Sequence
  Description of Artificial Sequence: Synthetic oligonucleotide
  Target: LAMA2; (-) strand; PAM type: YTN; PAM sequence: TTG
tttttgtagtcagccagttt

SEQ ID NO: 275564 - DNA, 20 bp, Artificial Sequence
  Description of Artificial Sequence: Synthetic oligonucleotide
  Target: LAMA2; (-) strand; PAM type: YTN; PAM sequence: TTT
gtttttgtagtcagccagtt

SEQ ID NO: 275565 - DNA, 20 bp, Artificial Sequence
  Description of Artificial Sequence: Synthetic oligonucleotide
  Target: LAMA2; (-) strand; PAM type: YTN; PAM sequence: CTT
tgtttttgtagtcagccagt

SEQ ID NO: 275566 - DNA, 20 bp, Artificial Sequence
  Description of Artificial Sequence: Synthetic oligonucleotide
  Target: LAMA2; (-) strand; PAM type: YTN; PAM sequence: CTC
aaaaggtcccaagcatcatc

SEQ ID NO: 275567 - DNA, 20 bp, Artificial Sequence
  Description of Artificial Sequence: Synthetic oligonucleotide
  Target: LAMA2; (-) strand; PAM type: YTN; PAM sequence: CTC
tcaaaaggtcccaagcatca

SEQ ID NO: 275568 - DNA, 20 bp, Artificial Sequence
  Description of Artificial Sequence: Synthetic oligonucleotide
  Target: LAMA2; (-) strand; PAM type: YTN; PAM sequence: TTC
tctcaaaaggtcccaagcat

SEQ ID NO: 275569 - DNA, 20 bp, Artificial Sequence
  Description of Artificial Sequence: Synthetic oligonucleotide
  Target: LAMA2; (-) strand; PAM type: YTN; PAM sequence: CTT
ctctcaaaaggtcccaagca

SEQ ID NO: 275570 - DNA, 20 bp, Artificial Sequence
  Description of Artificial Sequence: Synthetic oligonucleotide
  Target: LAMA2; (-) strand; PAM type: YTN; PAM sequence: CTG
tggcttctctcaaaaggtcc

SEQ ID NO: 275571 - DNA, 20 bp, Artificial Sequence
  Description of Artificial Sequence: Synthetic oligonucleotide
  Target: LAMA2; (-) strand; PAM type: YTN; PAM sequence: TTA
tctgtggcttctctcaaaag

SEQ ID NO: 275572 - DNA, 20 bp, Artificial Sequence
  Description of Artificial Sequence: Synthetic oligonucleotide
  Target: LAMA2; (-) strand; PAM type: YTN; PAM sequence: TTT
atctgtggcttctctcaaaa

SEQ ID NO: 275573 - DNA, 20 bp, Artificial Sequence
  Description of Artificial Sequence: Synthetic oligonucleotide
  Target: LAMA2; (-) strand; PAM type: YTN; PAM sequence: TTT
tatctgtggcttctctcaaa

SEQ ID NO: 275574 - DNA, 20 bp, Artificial Sequence
  Description of Artificial Sequence: Synthetic oligonucleotide
  Target: LAMA2; (-) strand; PAM type: YTN; PAM sequence: CTG
attttatctgtggcttctct

SEQ ID NO: 275575 - DNA, 20 bp, Artificial Sequence
  Description of Artificial Sequence: Synthetic oligonucleotide
  Target: LAMA2; (-) strand; PAM type: YTN; PAM sequence: CTC
tgattttatctgtggcttct

SEQ ID NO: 275576 - DNA, 20 bp, Artificial Sequence
  Description of Artificial Sequence: Synthetic oligonucleotide
  Target: LAMA2; (-) strand; PAM type: YTN; PAM sequence: TTC
tctgattttatctgtggctt

SEQ ID NO: 275577 - DNA, 20 bp, Artificial Sequence
  Description of Artificial Sequence: Synthetic oligonucleotide
  Target: LAMA2; (-) strand; PAM type: YTN; PAM sequence: CTT
ctctgattttatctgtggct

SEQ ID NO: 275578 - DNA, 20 bp, Artificial Sequence
  Description of Artificial Sequence: Synthetic oligonucleotide
  Target: LAMA2; (-) strand; PAM type: YTN; PAM sequence: TTA
gcttctctgattttatctgt

SEQ ID NO: 275579 - DNA, 20 bp, Artificial Sequence
  Description of Artificial Sequence: Synthetic oligonucleotide
  Target: LAMA2; (-) strand; PAM type: YTN; PAM sequence: CTG
caaataggcgattagcttct

SEQ ID NO: 275580 - DNA, 20 bp, Artificial Sequence
  Description of Artificial Sequence: Synthetic oligonucleotide
  Target: LAMA2; (-) strand; PAM type: YTN; PAM sequence: TTA
ctgcaaataggcgattagct

SEQ ID NO: 275581 - DNA, 20 bp, Artificial Sequence
  Description of Artificial Sequence: Synthetic oligonucleotide
  Target: LAMA2; (-) strand; PAM type: YTN; PAM sequence: TTT
actgcaaataggcgattagc

SEQ ID NO: 275582 - DNA, 20 bp, Artificial Sequence
  Description of Artificial Sequence: Synthetic oligonucleotide
  Target: LAMA2; (-) strand; PAM type: YTN; PAM sequence: CTG
atttactgcaaataggcgat

SEQ ID NO: 275583 - DNA, 20 bp, Artificial Sequence
  Description of Artificial Sequence: Synthetic oligonucleotide
  Target: LAMA2; (-) strand; PAM type: YTN; PAM sequence: TTC
tgatttactgcaaataggcg

SEQ ID NO: 275584 - DNA, 20 bp, Artificial Sequence
  Description of Artificial Sequence: Synthetic oligonucleotide
  Target: LAMA2; (-) strand; PAM type: YTN; PAM sequence: TTT
ctgatttactgcaaataggc

SEQ ID NO: 275585 - DNA, 20 bp, Artificial Sequence
  Description of Artificial Sequence: Synthetic oligonucleotide
  Target: LAMA2; (-) strand; PAM type: YTN; PAM sequence: TTT
tctgatttactgcaaatagg

SEQ ID NO: 275586 - DNA, 20 bp, Artificial Sequence
  Description of Artificial Sequence: Synthetic oligonucleotide
  Target: LAMA2; (-) strand; PAM type: YTN; PAM sequence: TTT
ttctgatttactgcaaatag

SEQ ID NO: 275587 - DNA, 20 bp, Artificial Sequence
  Description of Artificial Sequence: Synthetic oligonucleotide
  Target: LAMA2; (-) strand; PAM type: YTN; PAM sequence: CTC
caatgcagtcatgtttttct

SEQ ID NO: 275588 - DNA, 20 bp, Artificial Sequence
  Description of Artificial Sequence: Synthetic oligonucleotide
  Target: LAMA2; (-) strand; PAM type: YTN; PAM sequence: CTC
acctccaatgcagtcatgtt

SEQ ID NO: 275589 - DNA, 20 bp, Artificial Sequence
  Description of Artificial Sequence: Synthetic oligonucleotide
  Target: LAMA2; (-) strand; PAM type: YTN; PAM sequence: CTA
agactcacctccaatgcagt

SEQ ID NO: 275590 - DNA, 20 bp, Artificial Sequence
  Description of Artificial Sequence: Synthetic oligonucleotide
  Target: LAMA2; (-) strand; PAM type: YTN; PAM sequence: TTA
agataaaagtgcccctaaga

SEQ ID NO: 275591 - DNA, 20 bp, Artificial Sequence
  Description of Artificial Sequence: Synthetic oligonucleotide
  Target: LAMA2; (-) strand; PAM type: YTN; PAM sequence: CTG
agattaagataaaagtgccc

SEQ ID NO: 275592 - DNA, 20 bp, Artificial Sequence
  Description of Artificial Sequence: Synthetic oligonucleotide
  Target: LAMA2; (-) strand; PAM type: YTN; PAM sequence: TTC
tgagattaagataaaagtgc

SEQ ID NO: 275593 - DNA, 20 bp, Artificial Sequence
  Description of Artificial Sequence: Synthetic oligonucleotide
  Target: LAMA2; (-) strand; PAM type: YTN; PAM sequence: CTT
ctgagattaagataaaagtg

SEQ ID NO: 275594 - DNA, 20 bp, Artificial Sequence
  Description of Artificial Sequence: Synthetic oligonucleotide
  Target: LAMA2; (-) strand; PAM type: YTN; PAM sequence: CTG
cccccgcagtccccaacctt

SEQ ID NO: 275595 - DNA, 20 bp, Artificial Sequence
  Description of Artificial Sequence: Synthetic oligonucleotide
  Target: LAMA2; (-) strand; PAM type: YTN; PAM sequence: TTC
aacactgcccccgcagtccc

SEQ ID NO: 275596 - DNA, 20 bp, Artificial Sequence
  Description of Artificial Sequence: Synthetic oligonucleotide
  Target: LAMA2; (-) strand; PAM type: YTN; PAM sequence: TTG
aatagtccagccatgttcaa

SEQ ID NO: 275597 - DNA, 20 bp, Artificial Sequence
  Description of Artificial Sequence: Synthetic oligonucleotide
  Target: LAMA2; (-) strand; PAM type: YTN; PAM sequence: CTT
gaatagtccagccatgttca

SEQ ID NO: 275598 - DNA, 20 bp, Artificial Sequence
  Description of Artificial Sequence: Synthetic oligonucleotide
  Target: LAMA2; (-) strand; PAM type: YTN; PAM sequence: TTG
taaatgtgcatcaacttgaa

SEQ ID NO: 275599 - DNA, 20 bp, Artificial Sequence
  Description of Artificial Sequence: Synthetic oligonucleotide
  Target: LAMA2; (-) strand; PAM type: YTN; PAM sequence: TTT
gtaaatgtgcatcaacttga

SEQ ID NO: 275600 - DNA, 20 bp, Artificial Sequence
  Description of Artificial Sequence: Synthetic oligonucleotide
  Target: LAMA2; (-) strand; PAM type: YTN; PAM sequence: TTT
tgtaaatgtgcatcaacttg

SEQ ID NO: 275601 - DNA, 20 bp, Artificial Sequence
  Description of Artificial Sequence: Synthetic oligonucleotide
  Target: LAMA2; (-) strand; PAM type: YTN; PAM sequence: CTT
ttgtaaatgtgcatcaactt

SEQ ID NO: 275602 - DNA, 20 bp, Artificial Sequence
  Description of Artificial Sequence: Synthetic oligonucleotide
  Target: LAMA2; (-) strand; PAM type: YTN; PAM sequence: TTG
acttttgtaaatgtgcatca

SEQ ID NO: 275603 - DNA, 20 bp, Artificial Sequence
  Description of Artificial Sequence: Synthetic oligonucleotide
  Target: LAMA2; (-) strand; PAM type: YTN; PAM sequence: CTT
gacttttgtaaatgtgcatc

SEQ ID NO: 275604 - DNA, 20 bp, Artificial Sequence
  Description of Artificial Sequence: Synthetic oligonucleotide
  Target: LAMA2; (-) strand; PAM type: YTN; PAM sequence: CTC
ttgacttttgtaaatgtgca

SEQ ID NO: 275605 - DNA, 20 bp, Artificial Sequence
  Description of Artificial Sequence: Synthetic oligonucleotide
  Target: LAMA2; (-) strand; PAM type: YTN; PAM sequence: TTG
tcactcttgacttttgtaaa

SEQ ID NO: 275606 - DNA, 20 bp, Artificial Sequence
  Description of Artificial Sequence: Synthetic oligonucleotide
  Target: LAMA2; (-) strand; PAM type: YTN; PAM sequence: TTC
agagttgtcactcttgactt

SEQ ID NO: 275607 - DNA, 20 bp, Artificial Sequence
  Description of Artificial Sequence: Synthetic oligonucleotide
  Target: LAMA2; (-) strand; PAM type: YTN; PAM sequence: TTT
cagagttgtcactcttgact

SEQ ID NO: 275608 - DNA, 20 bp, Artificial Sequence
  Description of Artificial Sequence: Synthetic oligonucleotide
  Target: LAMA2; (-) strand; PAM type: YTN; PAM sequence: CTT
tcagagttgtcactcttgac

SEQ ID NO: 275609 - DNA, 20 bp, Artificial Sequence
  Description of Artificial Sequence: Synthetic oligonucleotide
  Target: LAMA2; (-) strand; PAM type: YTN; PAM sequence: TTA
gaagccccctttcagagttg

SEQ ID NO: 275610 - DNA, 20 bp, Artificial Sequence
  Description of Artificial Sequence: Synthetic oligonucleotide
  Target: LAMA2; (-) strand; PAM type: YTN; PAM sequence: CTT
agaagccccctttcagagtt

SEQ ID NO: 275611 - DNA, 20 bp, Artificial Sequence
  Description of Artificial Sequence: Synthetic oligonucleotide
  Target: LAMA2; (-) strand; PAM type: YTN; PAM sequence: TTC
ttagaagccccctttcagag

SEQ ID NO: 275612 - DNA, 20 bp, Artificial Sequence
  Description of Artificial Sequence: Synthetic oligonucleotide
  Target: LAMA2; (-) strand; PAM type: YTN; PAM sequence: TTT
cttagaagccccctttcaga

SEQ ID NO: 275613 - DNA, 20 bp, Artificial Sequence
  Description of Artificial Sequence: Synthetic oligonucleotide
  Target: LAMA2; (-) strand; PAM type: YTN; PAM sequence: CTG
tttcttagaagccccctttc

SEQ ID NO: 275614 - DNA, 20 bp, Artificial Sequence
  Description of Artificial Sequence: Synthetic oligonucleotide
  Target: LAMA2; (-) strand; PAM type: YTN; PAM sequence: TTC
tgtttcttagaagccccctt

SEQ ID NO: 275615 - DNA, 20 bp, Artificial Sequence
  Description of Artificial Sequence: Synthetic oligonucleotide
  Target: LAMA2; (-) strand; PAM type: YTN; PAM sequence: TTG
ttctgtttcttagaagcccc

SEQ ID NO: 275616 - DNA, 20 bp, Artificial Sequence
  Description of Artificial Sequence: Synthetic oligonucleotide
  Target: LAMA2; (-) strand; PAM type: YTN; PAM sequence: CTT
gttctgtttcttagaagccc

SEQ ID NO: 275617 - DNA, 20 bp, Artificial Sequence
  Description of Artificial Sequence: Synthetic oligonucleotide
  Target: LAMA2; (-) strand; PAM type: YTN; PAM sequence: TTC
ttgttctgtttcttagaagc

SEQ ID NO: 275618 - DNA, 20 bp, Artificial Sequence
  Description of Artificial Sequence: Synthetic oligonucleotide
  Target: LAMA2; (-) strand; PAM type: YTN; PAM sequence: TTT
cttgttctgtttcttagaag

SEQ ID NO: 275619 - DNA, 20 bp, Artificial Sequence
  Description of Artificial Sequence: Synthetic oligonucleotide
  Target: LAMA2; (-) strand; PAM type: YTN; PAM sequence: TTA
aaaacaaaacaaaaacaaaa

SEQ ID NO: 275620 - DNA, 20 bp, Artificial Sequence
  Description of Artificial Sequence: Synthetic oligonucleotide
  Target: LAMA2; (-) strand; PAM type: YTN; PAM sequence: CTG
gtcattaaaaacaaaacaaa

SEQ ID NO: 275621 - DNA, 20 bp, Artificial Sequence
  Description of Artificial Sequence: Synthetic oligonucleotide
  Target: LAMA2; (-) strand; PAM type: YTN; PAM sequence: TTG
ggcgatggtaactggtcatt

SEQ ID NO: 275622 - DNA, 20 bp, Artificial Sequence
  Description of Artificial Sequence: Synthetic oligonucleotide
  Target: LAMA2; (-) strand; PAM type: YTN; PAM sequence: TTT
gggcgatggtaactggtcat

SEQ ID NO: 275623 - DNA, 20 bp, Artificial Sequence
  Description of Artificial Sequence: Synthetic oligonucleotide
  Target: LAMA2; (-) strand; PAM type: YTN; PAM sequence: CTT
tgggcgatggtaactggtca

SEQ ID NO: 275624 - DNA, 20 bp, Artificial Sequence
  Description of Artificial Sequence: Synthetic oligonucleotide
  Target: LAMA2; (-) strand; PAM type: YTN; PAM sequence: TTC
tttgggcgatggtaactggt

SEQ ID NO: 275625 - DNA, 20 bp, Artificial Sequence
  Description of Artificial Sequence: Synthetic oligonucleotide
  Target: LAMA2; (-) strand; PAM type: YTN; PAM sequence: TTG
attctttgggcgatggtaac

SEQ ID NO: 275626 - DNA, 20 bp, Artificial Sequence
  Description of Artificial Sequence: Synthetic oligonucleotide
  Target: LAMA2; (-) strand; PAM type: YTN; PAM sequence: TTT
gattctttgggcgatggtaa

SEQ ID NO: 275627 - DNA, 20 bp, Artificial Sequence
  Description of Artificial Sequence: Synthetic oligonucleotide
  Target: LAMA2; (-) strand; PAM type: YTN; PAM sequence: TTA
tttgattctttgggcgatgg

SEQ ID NO: 275628 - DNA, 20 bp, Artificial Sequence
  Description of Artificial Sequence: Synthetic oligonucleotide
  Target: LAMA2; (-) strand; PAM type: YTN; PAM sequence: TTT
atttgattctttgggcgatg

SEQ ID NO: 275629 - DNA, 20 bp, Artificial Sequence
  Description of Artificial Sequence: Synthetic oligonucleotide
  Target: LAMA2; (-) strand; PAM type: YTN; PAM sequence: TTT
tatttgattctttgggcgat

SEQ ID NO: 275630 - DNA, 20 bp, Artificial Sequence
  Description of Artificial Sequence: Synthetic oligonucleotide
  Target: LAMA2; (-) strand; PAM type: YTN; PAM sequence: TTA
tcaaaattttatttgattct

SEQ ID NO: 275631 - DNA, 20 bp, Artificial Sequence
  Description of Artificial Sequence: Synthetic oligonucleotide
  Target: LAMA2; (-) strand; PAM type: YTN; PAM sequence: TTT
atcaaaattttatttgattc

SEQ ID NO: 275632 - DNA, 20 bp, Artificial Sequence
  Description of Artificial Sequence: Synthetic oligonucleotide
  Target: LAMA2; (-) strand; PAM type: YTN; PAM sequence: TTA
atttatcaaaattttatttg

SEQ ID NO: 275633 - DNA, 20 bp, Artificial Sequence
  Description of Artificial Sequence: Synthetic oligonucleotide
  Target: LAMA2; (-) strand; PAM type: YTN; PAM sequence: TTT
aatttatcaaaattttattt

SEQ ID NO: 275634 - DNA, 20 bp, Artificial Sequence
  Description of Artificial Sequence: Synthetic oligonucleotide
  Target: LAMA2; (-) strand; PAM type: YTN; PAM sequence: TTC
aacagtttaatttatcaaaa

SEQ ID NO: 275635 - DNA, 20 bp, Artificial Sequence
  Description of Artificial Sequence: Synthetic oligonucleotide
  Target: LAMA2; (-) strand; PAM type: YTN; PAM sequence: CTT
caacagtttaatttatcaaa

SEQ ID NO: 275636 - DNA, 20 bp, Artificial Sequence
  Description of Artificial Sequence: Synthetic oligonucleotide
  Target: LAMA2; (-) strand; PAM type: YTN; PAM sequence: TTA
aatatcttcaacagtttaat

SEQ ID NO: 275637 - DNA, 20 bp, Artificial Sequence
  Description of Artificial Sequence: Synthetic oligonucleotide
  Target: LAMA2; (-) strand; PAM type: YTN; PAM sequence: CTT
aaatatcttcaacagtttaa

SEQ ID NO: 275638 - DNA, 20 bp, Artificial Sequence
  Description of Artificial Sequence: Synthetic oligonucleotide
  Target: LAMA2; (-) strand; PAM type: YTN; PAM sequence: TTC
ttaaatatcttcaacagttt

SEQ ID NO: 275639 - DNA, 20 bp, Artificial Sequence
  Description of Artificial Sequence: Synthetic oligonucleotide
  Target: LAMA2; (-) strand; PAM type: YTN; PAM sequence: CTG
tatcacagtgttcttaaata

SEQ ID NO: 275640 - DNA, 20 bp, Artificial Sequence
  Description of Artificial Sequence: Synthetic oligonucleotide
  Target: LAMA2; (-) strand; PAM type: YTN; PAM sequence: TTC
cactgtatcacagtgttctt

SEQ ID NO: 275641 - DNA, 20 bp, Artificial Sequence
  Description of Artificial Sequence: Synthetic oligonucleotide
  Target: LAMA2; (-) strand; PAM type: YTN; PAM sequence: CTT
ccactgtatcacagtgttct

SEQ ID NO: 275642 - DNA, 20 bp, Artificial Sequence
  Description of Artificial Sequence: Synthetic oligonucleotide
  Target: LAMA2; (-) strand; PAM type: YTN; PAM sequence: TTC
ttccactgtatcacagtgtt

SEQ ID NO: 275643 - DNA, 20 bp, Artificial Sequence
  Description of Artificial Sequence: Synthetic oligonucleotide
  Target: LAMA2; (-) strand; PAM type: YTN; PAM sequence: CTT
cttccactgtatcacagtgt

SEQ ID NO: 275644 - DNA, 20 bp, Artificial Sequence
  Description of Artificial Sequence: Synthetic oligonucleotide
  Target: LAMA2; (-) strand; PAM type: YTN; PAM sequence: CTG
taaagaacttcttccactgt

SEQ ID NO: 275645 - DNA, 20 bp, Artificial Sequence
  Description of Artificial Sequence: Synthetic oligonucleotide
  Target: LAMA2; (-) strand; PAM type: YTN; PAM sequence: CTC
cctgtaaagaacttcttcca

SEQ ID NO: 275646 - DNA, 20 bp, Artificial Sequence
  Description of Artificial Sequence: Synthetic oligonucleotide
  Target: LAMA2; (-) strand; PAM type: YTN; PAM sequence: CTG
actccctgtaaagaacttct

SEQ ID NO: 275647 - DNA, 20 bp, Artificial Sequence
  Description of Artificial Sequence: Synthetic oligonucleotide
  Target: LAMA2; (-) strand; PAM type: YTN; PAM sequence: TTG
agaccaaggtcgcctgactc

SEQ ID NO: 275648 - DNA, 20 bp, Artificial Sequence
  Description of Artificial Sequence: Synthetic oligonucleotide
  Target: LAMA2; (-) strand; PAM type: YTN; PAM sequence: TTG
tcattgagaccaaggtcgcc

SEQ ID NO: 275649 - DNA, 20 bp, Artificial Sequence
  Description of Artificial Sequence: Synthetic oligonucleotide
  Target: LAMA2; (-) strand; PAM type: YTN; PAM sequence: CTA
gatagtggcacagttgtcat

SEQ ID NO: 275650 - DNA, 20 bp, Artificial Sequence
  Description of Artificial Sequence: Synthetic oligonucleotide
  Target: LAMA2; (-) strand; PAM type: YTN; PAM sequence: TTG
tatgtctagatagtggcaca

SEQ ID NO: 275651 - DNA, 20 bp, Artificial Sequence
  Description of Artificial Sequence: Synthetic oligonucleotide
  Target: LAMA2; (-) strand; PAM type: YTN; PAM sequence: TTT
gtatgtctagatagtggcac

SEQ ID NO: 275652 - DNA, 20 bp, Artificial Sequence
  Description of Artificial Sequence: Synthetic oligonucleotide
  Target: LAMA2; (-) strand; PAM type: YTN; PAM sequence: TTG
cccaatttgtatgtctagat

SEQ ID NO: 275653 - DNA, 20 bp, Artificial Sequence
  Description of Artificial Sequence: Synthetic oligonucleotide
  Target: LAMA2; (-) strand; PAM type: YTN; PAM sequence: CTT
gcccaatttgtatgtctaga

SEQ ID NO: 275654 - DNA, 20 bp, Artificial Sequence
  Description of Artificial Sequence: Synthetic oligonucleotide
  Target: LAMA2; (-) strand; PAM type: YTN; PAM sequence: TTG
acttgcccaatttgtatgtc

SEQ ID NO: 275655 - DNA, 20 bp, Artificial Sequence
  Description of Artificial Sequence: Synthetic oligonucleotide
  Target: LAMA2; (-) strand; PAM type: YTN; PAM sequence: TTA
attgacttgcccaatttgta

SEQ ID NO: 275656 - DNA, 20 bp, Artificial Sequence
  Description of Artificial Sequence: Synthetic oligonucleotide
  Target: LAMA2; (-) strand; PAM type: YTN; PAM sequence: TTA
cagattaattgacttgccca

SEQ ID NO: 275657 - DNA, 20 bp, Artificial Sequence
  Description of Artificial Sequence: Synthetic oligonucleotide
  Target: LAMA2; (-) strand; PAM type: YTN; PAM sequence: CTT
acagattaattgacttgccc

SEQ ID NO: 275658 - DNA, 20 bp, Artificial Sequence
  Description of Artificial Sequence: Synthetic oligonucleotide
  Target: LAMA2; (-) strand; PAM type: YTN; PAM sequence: CTG
atgcttacagattaattgac

SEQ ID NO: 275659 - DNA, 20 bp, Artificial Sequence
  Description of Artificial Sequence: Synthetic oligonucleotide
  Target: LAMA2; (-) strand; PAM type: YTN; PAM sequence: TTG
gggaactgatgcttacagat

SEQ ID NO: 275660 - DNA, 20 bp, Artificial Sequence
  Description of Artificial Sequence: Synthetic oligonucleotide
  Target: LAMA2; (-) strand; PAM type: YTN; PAM sequence: TTT
ggggaactgatgcttacaga

SEQ ID NO: 275661 - DNA, 20 bp, Artificial Sequence
  Description of Artificial Sequence: Synthetic oligonucleotide
  Target: LAMA2; (-) strand; PAM type: YTN; PAM sequence: TTG
tagatttggggaactgatgc

SEQ ID NO: 275662 - DNA, 20 bp, Artificial Sequence
  Description of Artificial Sequence: Synthetic oligonucleotide
  Target: LAMA2; (-) strand; PAM type: YTN; PAM sequence: TTA
ttgtagatttggggaactga

SEQ ID NO: 275663 - DNA, 20 bp, Artificial Sequence
  Description of Artificial Sequence: Synthetic oligonucleotide
  Target: LAMA2; (-) strand; PAM type: YTN; PAM sequence: CTT
attgtagatttggggaactg

SEQ ID NO: 275664 - DNA, 20 bp, Artificial Sequence
  Description of Artificial Sequence: Synthetic oligonucleotide
  Target: LAMA2; (-) strand; PAM type: YTN; PAM sequence: CTA
tagtataatgcacttattgt

SEQ ID NO: 275665 - DNA, 20 bp, Artificial Sequence
  Description of Artificial Sequence: Synthetic oligonucleotide
  Target: LAMA2; (-) strand; PAM type: YTN; PAM sequence: CTA
tatgtatgctatagtataat

SEQ ID NO: 275666 - DNA, 20 bp, Artificial Sequence
  Description of Artificial Sequence: Synthetic oligonucleotide
  Target: LAMA2; (-) strand; PAM type: YTN; PAM sequence: TTG
aagataccctatatgtatgc

SEQ ID NO: 275667 - DNA, 20 bp, Artificial Sequence
  Description of Artificial Sequence: Synthetic oligonucleotide
  Target: LAMA2; (-) strand; PAM type: YTN; PAM sequence: TTT
gaagataccctatatgtatg

SEQ ID NO: 275668 - DNA, 20 bp, Artificial Sequence
  Description of Artificial Sequence: Synthetic oligonucleotide
  Target: LAMA2; (-) strand; PAM type: YTN; PAM sequence: CTG
caaaataatatgatatgaat

SEQ ID NO: 275669 - DNA, 20 bp, Artificial Sequence
  Description of Artificial Sequence: Synthetic oligonucleotide
  Target: LAMA2; (-) strand; PAM type: YTN; PAM sequence: TTG
ggaaagctgcaaaataatat

SEQ ID NO: 275670 - DNA, 20 bp, Artificial Sequence
  Description of Artificial Sequence: Synthetic oligonucleotide
  Target: LAMA2; (-) strand; PAM type: YTN; PAM sequence: TTT
gggaaagctgcaaaataata

SEQ ID NO: 275671 - DNA, 20 bp, Artificial Sequence
  Description of Artificial Sequence: Synthetic oligonucleotide
  Target: LAMA2; (-) strand; PAM type: YTN; PAM sequence: TTA
gtttgggaaagctgcaaaat

SEQ ID NO: 275672 - DNA, 20 bp, Artificial Sequence
  Description of Artificial Sequence: Synthetic oligonucleotide
  Target: LAMA2; (-) strand; PAM type: YTN; PAM sequence: TTG
tgaattagtttgggaaagct

SEQ ID NO: 275673 - DNA, 20 bp, Artificial Sequence
  Description of Artificial Sequence: Synthetic oligonucleotide
  Target: LAMA2; (-) strand; PAM type: YTN; PAM sequence: TTT
gtgaattagtttgggaaagc

SEQ ID NO: 275674 - DNA, 20 bp, Artificial Sequence
  Description of Artificial Sequence: Synthetic oligonucleotide
  Target: LAMA2; (-) strand; PAM type: YTN; PAM sequence: CTG
aacaagatttgtgaattagt

SEQ ID NO: 275675 - DNA, 20 bp, Artificial Sequence
  Description of Artificial Sequence: Synthetic oligonucleotide
  Target: LAMA2; (-) strand; PAM type: YTN; PAM sequence: CTC
tgaacaagatttgtgaatta

SEQ ID NO: 275676 - DNA, 20 bp, Artificial Sequence
  Description of Artificial Sequence: Synthetic oligonucleotide
  Target: LAMA2; (-) strand; PAM type: YTN; PAM sequence: TTG
gcagcaagatctctgaacaa

SEQ ID NO: 275677 - DNA, 20 bp, Artificial Sequence
  Description of Artificial Sequence: Synthetic oligonucleotide
  Target: LAMA2; (-) strand; PAM type: YTN; PAM sequence: TTT
ggcagcaagatctctgaaca

SEQ ID NO: 275678 - DNA, 20 bp, Artificial Sequence
  Description of Artificial Sequence: Synthetic oligonucleotide
  Target: LAMA2; (-) strand; PAM type: YTN; PAM sequence: TTT
tggcagcaagatctctgaac

SEQ ID NO: 275679 - DNA, 20 bp, Artificial Sequence
  Description of Artificial Sequence: Synthetic oligonucleotide
  Target: LAMA2; (-) strand; PAM type: YTN; PAM sequence: TTT
ttggcagcaagatctctgaa

SEQ ID NO: 275680 - DNA, 20 bp, Artificial Sequence
  Description of Artificial Sequence: Synthetic oligonucleotide
  Target: LAMA2; (-) strand; PAM type: YTN; PAM sequence: CTA
tgatttttggcagcaagatc

SEQ ID NO: 275681 - DNA, 20 bp, Artificial Sequence
  Description of Artificial Sequence: Synthetic oligonucleotide
  Target: LAMA2; (-) strand; PAM type: YTN; PAM sequence: TTC
tatgatttttggcagcaaga

SEQ ID NO: 275682 - DNA, 20 bp, Artificial Sequence
  Description of Artificial Sequence: Synthetic oligonucleotide
  Target: LAMA2; (-) strand; PAM type: YTN; PAM sequence: CTT
ctatgatttttggcagcaag

SEQ ID NO: 275683 - DNA, 20 bp, Artificial Sequence
  Description of Artificial Sequence: Synthetic oligonucleotide
  Target: LAMA2; (-) strand; PAM type: YTN; PAM sequence: TTG
aaagtgtagggaacttctat

SEQ ID NO: 275684 - DNA, 20 bp, Artificial Sequence
  Description of Artificial Sequence: Synthetic oligonucleotide
  Target: LAMA2; (-) strand; PAM type: YTN; PAM sequence: TTT
gaaagtgtagggaacttcta

SEQ ID NO: 275685 - DNA, 20 bp, Artificial Sequence
  Description of Artificial Sequence: Synthetic oligonucleotide
  Target: LAMA2; (-) strand; PAM type: YTN; PAM sequence: TTG
aatttgaaagtgtagggaac

SEQ ID NO: 275686 - DNA, 20 bp, Artificial Sequence
  Description of Artificial Sequence: Synthetic oligonucleotide
  Target: LAMA2; (-) strand; PAM type: YTN; PAM sequence: CTC
agattgaatttgaaagtgta

SEQ ID NO: 275687 - DNA, 20 bp, Artificial Sequence
  Description of Artificial Sequence: Synthetic oligonucleotide
  Target: LAMA2; (-) strand; PAM type: YTN; PAM sequence: TTG
tcatgtgctcagattgaatt

SEQ ID NO: 275688 - DNA, 20 bp, Artificial Sequence
  Description of Artificial Sequence: Synthetic oligonucleotide
  Target: LAMA2; (-) strand; PAM type: YTN; PAM sequence: TTT
gtcatgtgctcagattgaat

SEQ ID NO: 275689 - DNA, 20 bp, Artificial Sequence
  Description of Artificial Sequence: Synthetic oligonucleotide
  Target: LAMA2; (-) strand; PAM type: YTN; PAM sequence: CTA
tttgtcatgtgctcagattg

SEQ ID NO: 275690 - DNA, 20 bp, Artificial Sequence
  Description of Artificial Sequence: Synthetic oligonucleotide
  Target: LAMA2; (-) strand; PAM type: YTN; PAM sequence: TTG
agctatttgtcatgtgctca

SEQ ID NO: 275691 - DNA, 20 bp, Artificial Sequence
  Description of Artificial Sequence: Synthetic oligonucleotide
  Target: LAMA2; (-) strand; PAM type: YTN; PAM sequence: TTC
attgagctatttgtcatgtg

SEQ ID NO: 275692 - DNA, 20 bp, Artificial Sequence
  Description of Artificial Sequence: Synthetic oligonucleotide
  Target: LAMA2; (-) strand; PAM type: YTN; PAM sequence: CTC
aattcattgagctatttgtc

SEQ ID NO: 275693 - DNA, 20 bp, Artificial Sequence
  Description of Artificial Sequence: Synthetic oligonucleotide
  Target: LAMA2; (-) strand; PAM type: YTN; PAM sequence: CTG
gtctcaattcattgagctat

SEQ ID NO: 275694 - DNA, 20 bp, Artificial Sequence
  Description of Artificial Sequence: Synthetic oligonucleotide
  Target: LAMA2; (-) strand; PAM type: YTN; PAM sequence: CTC
tggtctcaattcattgagct

SEQ ID NO: 275695 - DNA, 20 bp, Artificial Sequence
  Description of Artificial Sequence: Synthetic oligonucleotide
  Target: LAMA2; (-) strand; PAM type: YTN; PAM sequence: TTC
caagctctggtctcaattca

SEQ ID NO: 275696 - DNA, 20 bp, Artificial Sequence
  Description of Artificial Sequence: Synthetic oligonucleotide
  Target: LAMA2; (-) strand; PAM type: YTN; PAM sequence: TTT
ccaagctctggtctcaattc

SEQ ID NO: 275697 - DNA, 20 bp, Artificial Sequence
  Description of Artificial Sequence: Synthetic oligonucleotide
  Target: LAMA2; (-) strand; PAM type: YTN; PAM sequence: TTT
tccaagctctggtctcaatt

SEQ ID NO: 275698 - DNA, 20 bp, Artificial Sequence
  Description of Artificial Sequence: Synthetic oligonucleotide
  Target: LAMA2; (-) strand; PAM type: YTN; PAM sequence: TTT
ttccaagctctggtctcaat

SEQ ID NO: 275699 - DNA, 20 bp, Artificial Sequence
  Description of Artificial Sequence: Synthetic oligonucleotide
  Target: LAMA2; (-) strand; PAM type: YTN; PAM sequence: TTG
catagaacacagcgcataga

SEQ ID NO: 275700 - DNA, 20 bp, Artificial Sequence
  Description of Artificial Sequence: Synthetic oligonucleotide
  Target: LAMA2; (-) strand; PAM type: YTN; PAM sequence: TTT
gcatagaacacagcgcatag

SEQ ID NO: 275701 - DNA, 20 bp, Artificial Sequence
  Description of Artificial Sequence: Synthetic oligonucleotide
  Target: LAMA2; (-) strand; PAM type: YTN; PAM sequence: CTA
aaagatcatttgcatagaac

SEQ ID NO: 275702 - DNA, 20 bp, Artificial Sequence
  Description of Artificial Sequence: Synthetic oligonucleotide
  Target: LAMA2; (-) strand; PAM type: YTN; PAM sequence: TTC
taaaagatcatttgcataga

SEQ ID NO: 275703 - DNA, 20 bp, Artificial Sequence
  Description of Artificial Sequence: Synthetic oligonucleotide
  Target: LAMA2; (-) strand; PAM type: YTN; PAM sequence: CTT
ctaaaagatcatttgcatag

SEQ ID NO: 275704 - DNA, 20 bp, Artificial Sequence
  Description of Artificial Sequence: Synthetic oligonucleotide
  Target: LAMA2; (-) strand; PAM type: YTN; PAM sequence: TTC
cttctaaaagatcatttgca

SEQ ID NO: 275705 - DNA, 20 bp, Artificial Sequence
  Description of Artificial Sequence: Synthetic oligonucleotide
  Target: LAMA2; (-) strand; PAM type: YTN; PAM sequence: TTA
gttccttctaaaagatcatt

SEQ ID NO: 275706 - DNA, 20 bp, Artificial Sequence
  Description of Artificial Sequence: Synthetic oligonucleotide
  Target: LAMA2; (-) strand; PAM type: YTN; PAM sequence: TTC
atgttagttccttctaaaag

SEQ ID NO: 275707 - DNA, 20 bp, Artificial Sequence
  Description of Artificial Sequence: Synthetic oligonucleotide
  Target: LAMA2; (-) strand; PAM type: YTN; PAM sequence: CTA
ttcatgttagttccttctaa

SEQ ID NO: 275708 - DNA, 20 bp, Artificial Sequence
  Description of Artificial Sequence: Synthetic oligonucleotide
  Target: LAMA2; (-) strand; PAM type: YTN; PAM sequence: CTG
atctattcatgttagttcct

SEQ ID NO: 275709 - DNA, 20 bp, Artificial Sequence
  Description of Artificial Sequence: Synthetic oligonucleotide
  Target: LAMA2; (-) strand; PAM type: YTN; PAM sequence: CTG
tgtggaaaaggaggagaaaa

SEQ ID NO: 275710 - DNA, 20 bp, Artificial Sequence
  Description of Artificial Sequence: Synthetic oligonucleotide
  Target: LAMA2; (-) strand; PAM type: YTN; PAM sequence: TTA
tctgtgtggaaaaggaggag

SEQ ID NO: 275711 - DNA, 20 bp, Artificial Sequence
  Description of Artificial Sequence: Synthetic oligonucleotide
  Target: LAMA2; (-) strand; PAM type: YTN; PAM sequence: CTG
ttatctgtgtggaaaaggag

SEQ ID NO: 275712 - DNA, 20 bp, Artificial Sequence
  Description of Artificial Sequence: Synthetic oligonucleotide
  Target: LAMA2; (-) strand; PAM type: YTN; PAM sequence: TTG
agaagtaactgttatctgtg

SEQ ID NO: 275713 - DNA, 20 bp, Artificial Sequence
  Description of Artificial Sequence: Synthetic oligonucleotide
  Target: LAMA2; (-) strand; PAM type: YTN; PAM sequence: TTG
agttgagaagtaactgttat

SEQ ID NO: 275714 - DNA, 20 bp, Artificial Sequence
  Description of Artificial Sequence: Synthetic oligonucleotide
  Target: LAMA2; (-) strand; PAM type: YTN; PAM sequence: CTT
gagttgagaagtaactgtta

SEQ ID NO: 275715 - DNA, 20 bp, Artificial Sequence
  Description of Artificial Sequence: Synthetic oligonucleotide
  Target: LAMA2; (-) strand; PAM type: YTN; PAM sequence: TTC
ttgagttgagaagtaactgt

SEQ ID NO: 275716 - DNA, 20 bp, Artificial Sequence
  Description of Artificial Sequence: Synthetic oligonucleotide
  Target: LAMA2; (-) strand; PAM type: YTN; PAM sequence: TTT
cttgagttgagaagtaactg

SEQ ID NO: 275717 - DNA, 20 bp, Artificial Sequence
  Description of Artificial Sequence: Synthetic oligonucleotide
  Target: LAMA2; (-) strand; PAM type: YTN; PAM sequence: CTG
cccataatttcttgagttga

SEQ ID NO: 275718 - DNA, 20 bp, Artificial Sequence
  Description of Artificial Sequence: Synthetic oligonucleotide
  Target: LAMA2; (-) strand; PAM type: YTN; PAM sequence: TTA
aaaagatagaggctgcccat

SEQ ID NO: 275719 - DNA, 20 bp, Artificial Sequence
  Description of Artificial Sequence: Synthetic oligonucleotide
  Target: LAMA2; (-) strand; PAM type: YTN; PAM sequence: CTT
aaaaagatagaggctgccca

SEQ ID NO: 275720 - DNA, 20 bp, Artificial Sequence
  Description of Artificial Sequence: Synthetic oligonucleotide
  Target: LAMA2; (-) strand; PAM type: YTN; PAM sequence: CTC
ttaaaaagatagaggctgcc

SEQ ID NO: 275721 - DNA, 20 bp, Artificial Sequence
  Description of Artificial Sequence: Synthetic oligonucleotide
  Target: LAMA2; (-) strand; PAM type: YTN; PAM sequence: TTC
catcagaactcttaaaaaga

SEQ ID NO: 275722 - DNA, 20 bp, Artificial Sequence
  Description of Artificial Sequence: Synthetic oligonucleotide
  Target: LAMA2; (-) strand; PAM type: YTN; PAM sequence: CTA
gttccatcagaactcttaaa

SEQ ID NO: 275723 - DNA, 20 bp, Artificial Sequence
  Description of Artificial Sequence: Synthetic oligonucleotide
  Target: LAMA2; (-) strand; PAM type: YTN; PAM sequence: TTC
tagttccatcagaactctta

SEQ ID NO: 275724 - DNA, 20 bp, Artificial Sequence
  Description of Artificial Sequence: Synthetic oligonucleotide
  Target: LAMA2; (-) strand; PAM type: YTN; PAM sequence: TTA
gttctagttccatcagaact

SEQ ID NO: 275725 - DNA, 20 bp, Artificial Sequence
  Description of Artificial Sequence: Synthetic oligonucleotide
  Target: LAMA2; (-) strand; PAM type: YTN; PAM sequence: TTT
agttctagttccatcagaac

SEQ ID NO: 275726 - DNA, 20 bp, Artificial Sequence
  Description of Artificial Sequence: Synthetic oligonucleotide
  Target: LAMA2; (-) strand; PAM type: YTN; PAM sequence: TTT
tagttctagttccatcagaa

SEQ ID NO: 275727 - DNA, 20 bp, Artificial Sequence
  Description of Artificial Sequence: Synthetic oligonucleotide
  Target: LAMA2; (-) strand; PAM type: YTN; PAM sequence: CTG
ttttagttctagttccatca

SEQ ID NO: 275728 - DNA, 20 bp, Artificial Sequence
  Description of Artificial Sequence: Synthetic oligonucleotide
  Target: LAMA2; (-) strand; PAM type: YTN; PAM sequence: TTG
gaaaaaaaagaagaaaaaat

SEQ ID NO: 275729 - DNA, 20 bp, Artificial Sequence
  Description of Artificial Sequence: Synthetic oligonucleotide
  Target: LAMA2; (-) strand; PAM type: YTN; PAM sequence: TTA
agaaagaaattggaaaaaaa

SEQ ID NO: 275730 - DNA, 20 bp, Artificial Sequence
  Description of Artificial Sequence: Synthetic oligonucleotide
  Target: LAMA2; (-) strand; PAM type: YTN; PAM sequence: TTA
agattaagaaagaaattgga

SEQ ID NO: 275731 - DNA, 20 bp, Artificial Sequence
  Description of Artificial Sequence: Synthetic oligonucleotide
  Target: LAMA2; (-) strand; PAM type: YTN; PAM sequence: CTA
tgttaagattaagaaagaaa

SEQ ID NO: 275732 - DNA, 20 bp, Artificial Sequence
  Description of Artificial Sequence: Synthetic oligonucleotide
  Target: LAMA2; (-) strand; PAM type: YTN; PAM sequence: TTA
ctatgttaagattaagaaag

SEQ ID NO: 275733 - DNA, 20 bp, Artificial Sequence
  Description of Artificial Sequence: Synthetic oligonucleotide
  Target: LAMA2; (-) strand; PAM type: YTN; PAM sequence: TTT
actatgttaagattaagaaa

SEQ ID NO: 275734 - DNA, 20 bp, Artificial Sequence
  Description of Artificial Sequence: Synthetic oligonucleotide
  Target: LAMA2; (-) strand; PAM type: YTN; PAM sequence: TTA
ggaaaagtgataatttacta

SEQ ID NO: 275735 - DNA, 20 bp, Artificial Sequence
  Description of Artificial Sequence: Synthetic oligonucleotide
  Target: LAMA2; (-) strand; PAM type: YTN; PAM sequence: CTT
aggaaaagtgataatttact

SEQ ID NO: 275736 - DNA, 20 bp, Artificial Sequence
  Description of Artificial Sequence: Synthetic oligonucleotide
  Target: LAMA2; (-) strand; PAM type: YTN; PAM sequence: CTC
ttaggaaaagtgataattta

SEQ ID NO: 275737 - DNA, 20 bp, Artificial Sequence
  Description of Artificial Sequence: Synthetic oligonucleotide
  Target: LAMA2; (-) strand; PAM type: YTN; PAM sequence: TTA
ctcttaggaaaagtgataat

SEQ ID NO: 275738 - DNA, 20 bp, Artificial Sequence
  Description of Artificial Sequence: Synthetic oligonucleotide
  Target: LAMA2; (-) strand; PAM type: YTN; PAM sequence: TTT
actcttaggaaaagtgataa

SEQ ID NO: 275739 - DNA, 20 bp, Artificial Sequence
  Description of Artificial Sequence: Synthetic oligonucleotide
  Target: LAMA2; (-) strand; PAM type: YTN; PAM sequence: CTG
agtttactcttaggaaaagt

SEQ ID NO: 275740 - DNA, 20 bp, Artificial Sequence
  Description of Artificial Sequence: Synthetic oligonucleotide
  Target: LAMA2; (-) strand; PAM type: YTN; PAM sequence: TTA
tatgtgctgagtttactctt

SEQ ID NO: 275741 - DNA, 20 bp, Artificial Sequence
  Description of Artificial Sequence: Synthetic oligonucleotide
  Target: LAMA2; (-) strand; PAM type: YTN; PAM sequence: CTG
ttatatgtgctgagtttact

SEQ ID NO: 275742 - DNA, 20 bp, Artificial Sequence
  Description of Artificial Sequence: Synthetic oligonucleotide
  Target: LAMA2; (-) strand; PAM type: YTN; PAM sequence: CTG
ctgttatatgtgctgagttt

SEQ ID NO: 275743 - DNA, 20 bp, Artificial Sequence
  Description of Artificial Sequence: Synthetic oligonucleotide
  Target: LAMA2; (-) strand; PAM type: YTN; PAM sequence: TTA
atatcacatacagggtgctg

SEQ ID NO: 275744 - DNA, 20 bp, Artificial Sequence
  Description of Artificial Sequence: Synthetic oligonucleotide
  Target: LAMA2; (-) strand; PAM type: YTN; PAM sequence: TTA
aatattaatatcacatacag

SEQ ID NO: 275745 - DNA, 20 bp, Artificial Sequence
  Description of Artificial Sequence: Synthetic oligonucleotide
  Target: LAMA2; (-) strand; PAM type: YTN; PAM sequence: TTT
aaatattaatatcacataca

SEQ ID NO: 275746 - DNA, 20 bp, Artificial Sequence
  Description of Artificial Sequence: Synthetic oligonucleotide
  Target: LAMA2; (-) strand; PAM type: YTN; PAM sequence: TTG
tttaaatattaatatcacat

SEQ ID NO: 275747 - DNA, 20 bp, Artificial Sequence
  Description of Artificial Sequence: Synthetic oligonucleotide
  Target: LAMA2; (-) strand; PAM type: YTN; PAM sequence: TTG
ttgtttaaatattaatatca

SEQ ID NO: 275748 - DNA, 20 bp, Artificial Sequence
  Description of Artificial Sequence: Synthetic oligonucleotide
  Target: LAMA2; (-) strand; PAM type: YTN; PAM sequence: TTG
ttgttgtttaaatattaata

SEQ ID NO: 275749 - DNA, 20 bp, Artificial Sequence
  Description of Artificial Sequence: Synthetic oligonucleotide
  Target: LAMA2; (-) strand; PAM type: YTN; PAM sequence: CTG
gggagaaagttgttgttgtt

SEQ ID NO: 275750 - DNA, 20 bp, Artificial Sequence
  Description of Artificial Sequence: Synthetic oligonucleotide
  Target: LAMA2; (-) strand; PAM type: YTN; PAM sequence: CTC
tggggagaaagttgttgttg

SEQ ID NO: 275751 - DNA, 20 bp, Artificial Sequence
  Description of Artificial Sequence: Synthetic oligonucleotide
  Target: LAMA2; (-) strand; PAM type: YTN; PAM sequence: TTG
tctctggggagaaagttgtt

SEQ ID NO: 275752 - DNA, 20 bp, Artificial Sequence
  Description of Artificial Sequence: Synthetic oligonucleotide
  Target: LAMA2; (-) strand; PAM type: YTN; PAM sequence: TTT
gtctctggggagaaagttgt

SEQ ID NO: 275753 - DNA, 20 bp, Artificial Sequence
  Description of Artificial Sequence: Synthetic oligonucleotide
  Target: LAMA2; (-) strand; PAM type: YTN; PAM sequence: TTG
aaaacagcaaaggtaaattt

SEQ ID NO: 275754 - DNA, 20 bp, Artificial Sequence
  Description of Artificial Sequence: Synthetic oligonucleotide
  Target: LAMA2; (-) strand; PAM type: YTN; PAM sequence: TTT
gaaaacagcaaaggtaaatt

SEQ ID NO: 275755 - DNA, 20 bp, Artificial Sequence
  Description of Artificial Sequence: Synthetic oligonucleotide
  Target: LAMA2; (-) strand; PAM type: YTN; PAM sequence: CTT
tgaaaacagcaaaggtaaat

SEQ ID NO: 275756 - DNA, 20 bp, Artificial Sequence
  Description of Artificial Sequence: Synthetic oligonucleotide
  Target: LAMA2; (-) strand; PAM type: YTN; PAM sequence: TTG
gagtcagatactttgaaaac

SEQ ID NO: 275757 - DNA, 20 bp, Artificial Sequence
  Description of Artificial Sequence: Synthetic oligonucleotide
  Target: LAMA2; (-) strand; PAM type: YTN; PAM sequence: CTG
ttggagtcagatactttgaa

SEQ ID NO: 275758 - DNA, 20 bp, Artificial Sequence
  Description of Artificial Sequence: Synthetic oligonucleotide
  Target: LAMA2; (-) strand; PAM type: YTN; PAM sequence: CTG
acctgttggagtcagatact

SEQ ID NO: 275759 - DNA, 20 bp, Artificial Sequence
  Description of Artificial Sequence: Synthetic oligonucleotide
  Target: LAMA2; (-) strand; PAM type: YTN; PAM sequence: TTC
tgacctgttggagtcagata

SEQ ID NO: 275760 - DNA, 20 bp, Artificial Sequence
  Description of Artificial Sequence: Synthetic oligonucleotide
  Target: LAMA2; (-) strand; PAM type: YTN; PAM sequence: TTT
ctgacctgttggagtcagat

SEQ ID NO: 275761 - DNA, 20 bp, Artificial Sequence
  Description of Artificial Sequence: Synthetic oligonucleotide
  Target: LAMA2; (-) strand; PAM type: YTN; PAM sequence: TTT
tctgacctgttggagtcaga

SEQ ID NO: 275762 - DNA, 20 bp, Artificial Sequence
  Description of Artificial Sequence: Synthetic oligonucleotide
  Target: LAMA2; (-) strand; PAM type: YTN; PAM sequence: CTG
ttttctgacctgttggagtc

SEQ ID NO: 275763 - DNA, 20 bp, Artificial Sequence
  Description of Artificial Sequence: Synthetic oligonucleotide
  Target: LAMA2; (-) strand; PAM type: YTN; PAM sequence: CTG
ctgttttctgacctgttgga

SEQ ID NO: 275764 - DNA, 20 bp, Artificial Sequence
  Description of Artificial Sequence: Synthetic oligonucleotide
  Target: LAMA2; (-) strand; PAM type: YTN; PAM sequence: CTG
ctgctgttttctgacctgtt

SEQ ID NO: 275765 - DNA, 20 bp, Artificial Sequence
  Description of Artificial Sequence: Synthetic oligonucleotide
  Target: LAMA2; (-) strand; PAM type: YTN; PAM sequence: TTA
gaagatgtataggtctgctg

SEQ ID NO: 275766 - DNA, 20 bp, Artificial Sequence
  Description of Artificial Sequence: Synthetic oligonucleotide
  Target: LAMA2; (-) strand; PAM type: YTN; PAM sequence: TTA
tgtgttagaagatgtatagg

SEQ ID NO: 275767 - DNA, 20 bp, Artificial Sequence
  Description of Artificial Sequence: Synthetic oligonucleotide
  Target: LAMA2; (-) strand; PAM type: YTN; PAM sequence: TTG
acggtgaaattatgtgttag

SEQ ID NO: 275768 - DNA, 20 bp, Artificial Sequence
  Description of Artificial Sequence: Synthetic oligonucleotide
  Target: LAMA2; (-) strand; PAM type: YTN; PAM sequence: CTG
ttgacggtgaaattatgtgt

SEQ ID NO: 275769 - DNA, 20 bp, Artificial Sequence
  Description of Artificial Sequence: Synthetic oligonucleotide
  Target: LAMA2; (-) strand; PAM type: YTN; PAM sequence: TTA
ctgttgacggtgaaattatg

SEQ ID NO: 275770 - DNA, 20 bp, Artificial Sequence
  Description of Artificial Sequence: Synthetic oligonucleotide
  Target: LAMA2; (-) strand; PAM type: YTN; PAM sequence: CTG
agttactgttgacggtgaaa

SEQ ID NO: 275771 - DNA, 20 bp, Artificial Sequence
  Description of Artificial Sequence: Synthetic oligonucleotide
  Target: LAMA2; (-) strand; PAM type: YTN; PAM sequence: CTA
tatgccagagggtgctgagt

SEQ ID NO: 275772 - DNA, 20 bp, Artificial Sequence
  Description of Artificial Sequence: Synthetic oligonucleotide
  Target: LAMA2; (-) strand; PAM type: YTN; PAM sequence: CTA
catacatactatatgccaga

SEQ ID NO: 275773 - DNA, 20 bp, Artificial Sequence
  Description of Artificial Sequence: Synthetic oligonucleotide
  Target: LAMA2; (-) strand; PAM type: YTN; PAM sequence: TTC
tacatacatactatatgcca

SEQ ID NO: 275774 - DNA, 20 bp, Artificial Sequence
  Description of Artificial Sequence: Synthetic oligonucleotide
  Target: LAMA2; (-) strand; PAM type: YTN; PAM sequence: TTT
ctacatacatactatatgcc

SEQ ID NO: 275775 - DNA, 20 bp, Artificial Sequence
  Description of Artificial Sequence: Synthetic oligonucleotide
  Target: LAMA2; (-) strand; PAM type: YTN; PAM sequence: TTC
aacaaacatttctacataca

SEQ ID NO: 275776 - DNA, 20 bp, Artificial Sequence
  Description of Artificial Sequence: Synthetic oligonucleotide
  Target: LAMA2; (-) strand; PAM type: YTN; PAM sequence: CTG
tcattcaacaaacatttcta

SEQ ID NO: 275777 - DNA, 20 bp, Artificial Sequence
  Description of Artificial Sequence: Synthetic oligonucleotide
  Target: LAMA2; (-) strand; PAM type: YTN; PAM sequence: TTA
ctgtcattcaacaaacattt

SEQ ID NO: 275778 - DNA, 20 bp, Artificial Sequence
  Description of Artificial Sequence: Synthetic oligonucleotide
  Target: LAMA2; (-) strand; PAM type: YTN; PAM sequence: TTG
ttactgtcattcaacaaaca

SEQ ID NO: 275779 - DNA, 20 bp, Artificial Sequence
  Description of Artificial Sequence: Synthetic oligonucleotide
  Target: LAMA2; (-) strand; PAM type: YTN; PAM sequence: TTC
aattgttactgtcattcaac

SEQ ID NO: 275780 - DNA, 20 bp, Artificial Sequence
  Description of Artificial Sequence: Synthetic oligonucleotide
  Target: LAMA2; (-) strand; PAM type: YTN; PAM sequence: TTG
tattcaattgttactgtcat

SEQ ID NO: 275781 - DNA, 20 bp, Artificial Sequence
  Description of Artificial Sequence: Synthetic oligonucleotide
  Target: LAMA2; (-) strand; PAM type: YTN; PAM sequence: TTG
attgtattcaattgttactg

SEQ ID NO: 275782 - DNA, 20 bp, Artificial Sequence
  Description of Artificial Sequence: Synthetic oligonucleotide
  Target: LAMA2; (-) strand; PAM type: YTN; PAM sequence: CTG
gttgattgtattcaattgtt

SEQ ID NO: 275783 - DNA, 20 bp, Artificial Sequence
  Description of Artificial Sequence: Synthetic oligonucleotide
  Target: LAMA2; (-) strand; PAM type: YTN; PAM sequence: TTA
aaaaatcctggttgattgta

SEQ ID NO: 275784 - DNA, 20 bp, Artificial Sequence
  Description of Artificial Sequence: Synthetic oligonucleotide
  Target: LAMA2; (-) strand; PAM type: YTN; PAM sequence: TTT
aaaaaatcctggttgattgt

SEQ ID NO: 275785 - DNA, 20 bp, Artificial Sequence
  Description of Artificial Sequence: Synthetic oligonucleotide
  Target: LAMA2; (-) strand; PAM type: YTN; PAM sequence: CTA
aaggaaaatagaaatgaata

SEQ ID NO: 275786 - DNA, 20 bp, Artificial Sequence
  Description of Artificial Sequence: Synthetic oligonucleotide
  Target: LAMA2; (-) strand; PAM type: YTN; PAM sequence: TTA
atctaaaggaaaatagaaat

SEQ ID NO: 275787 - DNA, 20 bp, Artificial Sequence
  Description of Artificial Sequence: Synthetic oligonucleotide
  Target: LAMA2; (-) strand; PAM type: YTN; PAM sequence: CTT
aatctaaaggaaaatagaaa

SEQ ID NO: 275788 - DNA, 20 bp, Artificial Sequence
  Description of Artificial Sequence: Synthetic oligonucleotide
  Target: LAMA2; (-) strand; PAM type: YTN; PAM sequence: CTA
cttaatctaaaggaaaatag

SEQ ID NO: 275789 - DNA, 20 bp, Artificial Sequence
  Description of Artificial Sequence: Synthetic oligonucleotide
  Target: LAMA2; (-) strand; PAM type: YTN; PAM sequence: TTA
ctacttaatctaaaggaaaa

SEQ ID NO: 275790 - DNA, 20 bp, Artificial Sequence
  Description of Artificial Sequence: Synthetic oligonucleotide
  Target: LAMA2; (-) strand; PAM type: YTN; PAM sequence: CTT
actacttaatctaaaggaaa

SEQ ID NO: 275791 - DNA, 20 bp, Artificial Sequence
  Description of Artificial Sequence: Synthetic oligonucleotide
  Target: LAMA2; (-) strand; PAM type: YTN; PAM sequence: CTC
ttactacttaatctaaagga

SEQ ID NO: 275792 - DNA, 20 bp, Artificial Sequence
  Description of Artificial Sequence: Synthetic oligonucleotide
  Target: LAMA2; (-) strand; PAM type: YTN; PAM sequence: TTC
ctcttactacttaatctaaa

SEQ ID NO: 275793 - DNA, 20 bp, Artificial Sequence
  Description of Artificial Sequence: Synthetic oligonucleotide
  Target: LAMA2; (-) strand; PAM type: YTN; PAM sequence: CTT
cctcttactacttaatctaa

SEQ ID NO: 275794 - DNA, 20 bp, Artificial Sequence
  Description of Artificial Sequence: Synthetic oligonucleotide
  Target: LAMA2; (-) strand; PAM type: YTN; PAM sequence: TTC
ttcctcttactacttaatct

SEQ ID NO: 275795 - DNA, 20 bp, Artificial Sequence
  Description of Artificial Sequence: Synthetic oligonucleotide
  Target: LAMA2; (-) strand; PAM type: YTN; PAM sequence: TTA
aaaaaatgtaattcttcctc

SEQ ID NO: 275796 - DNA, 20 bp, Artificial Sequence
  Description of Artificial Sequence: Synthetic oligonucleotide
  Target: LAMA2; (-) strand; PAM type: YTN; PAM sequence: CTA
agtcccagaagagggacacg

SEQ ID NO: 275797 - DNA, 20 bp, Artificial Sequence
  Description of Artificial Sequence: Synthetic oligonucleotide
  Target: LAMA2; (-) strand; PAM type: YTN; PAM sequence: CTA
ccagaatgacaaggctaagt

SEQ ID NO: 275798 - DNA, 20 bp, Artificial Sequence
  Description of Artificial Sequence: Synthetic oligonucleotide
  Target: LAMA2; (-) strand; PAM type: YTN; PAM sequence: TTC
taccagaatgacaaggctaa

SEQ ID NO: 275799 - DNA, 20 bp, Artificial Sequence
  Description of Artificial Sequence: Synthetic oligonucleotide
  Target: LAMA2; (-) strand; PAM type: YTN; PAM sequence: TTC
aatattctaccagaatgaca

SEQ ID NO: 275800 - DNA, 20 bp, Artificial Sequence
  Description of Artificial Sequence: Synthetic oligonucleotide
  Target: LAMA2; (-) strand; PAM type: YTN; PAM sequence: CTT
caatattctaccagaatgac

SEQ ID NO: 275801 - DNA, 20 bp, Artificial Sequence
  Description of Artificial Sequence: Synthetic oligonucleotide
  Target: LAMA2; (-) strand; PAM type: YTN; PAM sequence: CTC
ttcaatattctaccagaatg

SEQ ID NO: 275802 - DNA, 20 bp, Artificial Sequence
  Description of Artificial Sequence: Synthetic oligonucleotide
  Target: LAMA2; (-) strand; PAM type: YTN; PAM sequence: TTA
ggtgcatcagtgaagaaaaa

SEQ ID NO: 275803 - DNA, 20 bp, Artificial Sequence
  Description of Artificial Sequence: Synthetic oligonucleotide
  Target: LAMA2; (-) strand; PAM type: YTN; PAM sequence: TTG
gttaggtgcatcagtgaaga

SEQ ID NO: 275804 - DNA, 20 bp, Artificial Sequence
  Description of Artificial Sequence: Synthetic oligonucleotide
  Target: LAMA2; (-) strand; PAM type: YTN; PAM sequence: CTC
caaattggttaggtgcatca

SEQ ID NO: 275805 - DNA, 20 bp, Artificial Sequence
  Description of Artificial Sequence: Synthetic oligonucleotide
  Target: LAMA2; (-) strand; PAM type: YTN; PAM sequence: CTA
gcatgtcagtagactccaaa

SEQ ID NO: 275806 - DNA, 20 bp, Artificial Sequence
  Description of Artificial Sequence: Synthetic oligonucleotide
  Target: LAMA2; (-) strand; PAM type: YTN; PAM sequence: CTG
ctagcatgtcagtagactcc

SEQ ID NO: 275807 - DNA, 20 bp, Artificial Sequence
  Description of Artificial Sequence: Synthetic oligonucleotide
  Target: LAMA2; (-) strand; PAM type: YTN; PAM sequence: CTG
gaatactgctagcatgtcag

SEQ ID NO: 275808 - DNA, 20 bp, Artificial Sequence
  Description of Artificial Sequence: Synthetic oligonucleotide
  Target: LAMA2; (-) strand; PAM type: YTN; PAM sequence: TTC
tggaatactgctagcatgtc

SEQ ID NO: 275809 - DNA, 20 bp, Artificial Sequence
  Description of Artificial Sequence: Synthetic oligonucleotide
  Target: LAMA2; (-) strand; PAM type: YTN; PAM sequence: TTT
ctggaatactgctagcatgt

SEQ ID NO: 275810 - DNA, 20 bp, Artificial Sequence
  Description of Artificial Sequence: Synthetic oligonucleotide
  Target: LAMA2; (-) strand; PAM type: YTN; PAM sequence: CTC
acagcagtatttctggaata

SEQ ID NO: 275811 - DNA, 20 bp, Artificial Sequence
  Description of Artificial Sequence: Synthetic oligonucleotide
  Target: LAMA2; (-) strand; PAM type: YTN; PAM sequence: CTG
cctcacagcagtatttctgg

SEQ ID NO: 275812 - DNA, 20 bp, Artificial Sequence
  Description of Artificial Sequence: Synthetic oligonucleotide
  Target: LAMA2; (-) strand; PAM type: YTN; PAM sequence: CTG
tgacaggacagtggcccagc

SEQ ID NO: 275813 - DNA, 20 bp, Artificial Sequence
  Description of Artificial Sequence: Synthetic oligonucleotide
  Target: LAMA2; (-) strand; PAM type: YTN; PAM sequence: CTG
gagcctgtgacaggacagtg

SEQ ID NO: 275814 - DNA, 20 bp, Artificial Sequence
  Description of Artificial Sequence: Synthetic oligonucleotide
  Target: LAMA2; (-) strand; PAM type: YTN; PAM sequence: CTG
gtgtgtcaccgagcagggtg

SEQ ID NO: 275815 - DNA, 20 bp, Artificial Sequence
  Description of Artificial Sequence: Synthetic oligonucleotide
  Target: LAMA2; (-) strand; PAM type: YTN; PAM sequence: TTC
gggtaagtcacacggctggt

SEQ ID NO: 275816 - DNA, 20 bp, Artificial Sequence
  Description of Artificial Sequence: Synthetic oligonucleotide
  Target: LAMA2; (-) strand; PAM type: YTN; PAM sequence: CTT
cgggtaagtcacacggctgg

SEQ ID NO: 275817 - DNA, 20 bp, Artificial Sequence
  Description of Artificial Sequence: Synthetic oligonucleotide
  Target: LAMA2; (-) strand; PAM type: YTN; PAM sequence: TTG
ccataaaatagacaggtgca

SEQ ID NO: 275818 - DNA, 20 bp, Artificial Sequence
  Description of Artificial Sequence: Synthetic oligonucleotide
  Target: LAMA2; (-) strand; PAM type: YTN; PAM sequence: TTA
tcaaacggttgccataaaat

SEQ ID NO: 275819 - DNA, 20 bp, Artificial Sequence
  Description of Artificial Sequence: Synthetic oligonucleotide
  Target: LAMA2; (-) strand; PAM type: YTN; PAM sequence: TTT
atcaaacggttgccataaaa

SEQ ID NO: 275820 - DNA, 20 bp, Artificial Sequence
  Description of Artificial Sequence: Synthetic oligonucleotide
  Target: LAMA2; (-) strand; PAM type: YTN; PAM sequence: TTC
atttatcaaacggttgccat

SEQ ID NO: 275821 - DNA, 20 bp, Artificial Sequence
  Description of Artificial Sequence: Synthetic oligonucleotide
  Target: LAMA2; (-) strand; PAM type: YTN; PAM sequence: TTT
catttatcaaacggttgcca

SEQ ID NO: 275822 - DNA, 20 bp, Artificial Sequence
  Description of Artificial Sequence: Synthetic oligonucleotide
  Target: LAMA2; (-) strand; PAM type: YTN; PAM sequence: TTT
tcatttatcaaacggttgcc

SEQ ID NO: 275823 - DNA, 20 bp, Artificial Sequence
  Description of Artificial Sequence: Synthetic oligonucleotide
  Target: LAMA2; (-) strand; PAM type: YTN; PAM sequence: TTC
cacacaggtaattttcattt

SEQ ID NO: 275824 - DNA, 20 bp, Artificial Sequence
  Description of Artificial Sequence: Synthetic oligonucleotide
  Target: LAMA2; (-) strand; PAM type: YTN; PAM sequence: TTT
ccacacaggtaattttcatt

SEQ ID NO: 275825 - DNA, 20 bp, Artificial Sequence
  Description of Artificial Sequence: Synthetic oligonucleotide
  Target: LAMA2; (-) strand; PAM type: YTN; PAM sequence: CTT
tccacacaggtaattttcat

SEQ ID NO: 275826 - DNA, 20 bp, Artificial Sequence
  Description of Artificial Sequence: Synthetic oligonucleotide
  Target: LAMA2; (-) strand; PAM type: YTN; PAM sequence: CTA
tgctttccacacaggtaatt

SEQ ID NO: 275827 - DNA, 20 bp, Artificial Sequence
  Description of Artificial Sequence: Synthetic oligonucleotide
  Target: LAMA2; (-) strand; PAM type: YTN; PAM sequence: TTA
ctatgctttccacacaggta

SEQ ID NO: 275828 - DNA, 20 bp, Artificial Sequence
  Description of Artificial Sequence: Synthetic oligonucleotide
  Target: LAMA2; (-) strand; PAM type: YTN; PAM sequence: CTT
actatgctttccacacaggt

SEQ ID NO: 275829 - DNA, 20 bp, Artificial Sequence
  Description of Artificial Sequence: Synthetic oligonucleotide
  Target: LAMA2; (-) strand; PAM type: YTN; PAM sequence: CTC
aaatacttactatgctttcc

SEQ ID NO: 275830 - DNA, 20 bp, Artificial Sequence
  Description of Artificial Sequence: Synthetic oligonucleotide
  Target: LAMA2; (-) strand; PAM type: YTN; PAM sequence: TTC
tcaaatacttactatgcttt

SEQ ID NO: 275831 - DNA, 20 bp, Artificial Sequence
  Description of Artificial Sequence: Synthetic oligonucleotide
  Target: LAMA2; (-) strand; PAM type: YTN; PAM sequence: TTT
ctcaaatacttactatgctt

SEQ ID NO: 275832 - DNA, 20 bp, Artificial Sequence
  Description of Artificial Sequence: Synthetic oligonucleotide
  Target: LAMA2; (-) strand; PAM type: YTN; PAM sequence: TTG
aaatatttctcaaatactta

SEQ ID NO: 275833 - DNA, 20 bp, Artificial Sequence
  Description of Artificial Sequence: Synthetic oligonucleotide
  Target: LAMA2; (-) strand; PAM type: YTN; PAM sequence: CTT
gaaatatttctcaaatactt

SEQ ID NO: 275834 - DNA, 20 bp, Artificial Sequence
  Description of Artificial Sequence: Synthetic oligonucleotide
  Target: LAMA2; (-) strand; PAM type: YTN; PAM sequence: TTC
ttgaaatatttctcaaatac

SEQ ID NO: 275835 - DNA, 20 bp, Artificial Sequence
  Description of Artificial Sequence: Synthetic oligonucleotide
  Target: LAMA2; (-) strand; PAM type: YTN; PAM sequence: CTT
cttgaaatatttctcaaata

SEQ ID NO: 275836 - DNA, 20 bp, Artificial Sequence
  Description of Artificial Sequence: Synthetic oligonucleotide
  Target: LAMA2; (-) strand; PAM type: YTN; PAM sequence: CTC
ttcttgaaatatttctcaaa

SEQ ID NO: 275837 - DNA, 20 bp, Artificial Sequence
  Description of Artificial Sequence: Synthetic oligonucleotide
  Target: LAMA2; (-) strand; PAM type: YTN; PAM sequence: CTG
tgccatataactcttcttga

SEQ ID NO: 275838 - DNA, 20 bp, Artificial Sequence
  Description of Artificial Sequence: Synthetic oligonucleotide
  Target: LAMA2; (-) strand; PAM type: YTN; PAM sequence: TTG
actgtgccatataactcttc

SEQ ID NO: 275839 - DNA, 20 bp, Artificial Sequence
  Description of Artificial Sequence: Synthetic oligonucleotide
  Target: LAMA2; (-) strand; PAM type: YTN; PAM sequence: CTA
ttgactgtgccatataactc

SEQ ID NO: 275840 - DNA, 20 bp, Artificial Sequence
  Description of Artificial Sequence: Synthetic oligonucleotide
  Target: LAMA2; (-) strand; PAM type: YTN; PAM sequence: CTA
aaggtactattgactgtgcc

SEQ ID NO: 275841 - DNA, 20 bp, Artificial Sequence
  Description of Artificial Sequence: Synthetic oligonucleotide
  Target: LAMA2; (-) strand; PAM type: YTN; PAM sequence: CTA
aaagaaacgaatagctaaag

SEQ ID NO: 275842 - DNA, 20 bp, Artificial Sequence
  Description of Artificial Sequence: Synthetic oligonucleotide
  Target: LAMA2; (-) strand; PAM type: YTN; PAM sequence: TTA
aacatcactaaaagaaacga

SEQ ID NO: 275843 - DNA, 20 bp, Artificial Sequence
  Description of Artificial Sequence: Synthetic oligonucleotide
  Target: LAMA2; (-) strand; PAM type: YTN; PAM sequence: TTT
aaacatcactaaaagaaacg

SEQ ID NO: 275844 - DNA, 20 bp, Artificial Sequence
  Description of Artificial Sequence: Synthetic oligonucleotide
  Target: LAMA2; (-) strand; PAM type: YTN; PAM sequence: TTT
taaacatcactaaaagaaac

SEQ ID NO: 275845 - DNA, 20 bp, Artificial Sequence
  Description of Artificial Sequence: Synthetic oligonucleotide
  Target: LAMA2; (-) strand; PAM type: YTN; PAM sequence: CTG
gttttaaacatcactaaaag

SEQ ID NO: 275846 - DNA, 20 bp, Artificial Sequence
  Description of Artificial Sequence: Synthetic oligonucleotide
  Target: LAMA2; (-) strand; PAM type: YTN; PAM sequence: TTC
tggttttaaacatcactaaa

SEQ ID NO: 275847 - DNA, 20 bp, Artificial Sequence
  Description of Artificial Sequence: Synthetic oligonucleotide
  Target: LAMA2; (-) strand; PAM type: YTN; PAM sequence: CTT
ctggttttaaacatcactaa

SEQ ID NO: 275848 - DNA, 20 bp, Artificial Sequence
  Description of Artificial Sequence: Synthetic oligonucleotide
  Target: LAMA2; (-) strand; PAM type: YTN; PAM sequence: TTG
taggggtgcccaagaatgat

SEQ ID NO: 275849 - DNA, 20 bp, Artificial Sequence
  Description of Artificial Sequence: Synthetic oligonucleotide
  Target: LAMA2; (-) strand; PAM type: YTN; PAM sequence: TTT
gtaggggtgcccaagaatga

SEQ ID NO: 275850 - DNA, 20 bp, Artificial Sequence
  Description of Artificial Sequence: Synthetic oligonucleotide
  Target: LAMA2; (-) strand; PAM type: YTN; PAM sequence: CTC
caggtatttgtaggggtgcc

SEQ ID NO: 275851 - DNA, 20 bp, Artificial Sequence
  Description of Artificial Sequence: Synthetic oligonucleotide
  Target: LAMA2; (-) strand; PAM type: YTN; PAM sequence: CTA
tacataagctccaggtattt

SEQ ID NO: 275852 - DNA, 20 bp, Artificial Sequence
  Description of Artificial Sequence: Synthetic oligonucleotide
  Target: LAMA2; (-) strand; PAM type: YTN; PAM sequence: TTC
aataccgactatacataagc

SEQ ID NO: 275853 - DNA, 20 bp, Artificial Sequence
  Description of Artificial Sequence: Synthetic oligonucleotide
  Target: LAMA2; (-) strand; PAM type: YTN; PAM sequence: TTT
caataccgactatacataag

SEQ ID NO: 275854 - DNA, 20 bp, Artificial Sequence
  Description of Artificial Sequence: Synthetic oligonucleotide
  Target: LAMA2; (-) strand; PAM type: YTN; PAM sequence: CTC
agaatttcaataccgactat

SEQ ID NO: 275855 - DNA, 20 bp, Artificial Sequence
  Description of Artificial Sequence: Synthetic oligonucleotide
  Target: LAMA2; (-) strand; PAM type: YTN; PAM sequence: TTA
aacgtggcacatacaaggaa

SEQ ID NO: 275856 - DNA, 20 bp, Artificial Sequence
  Description of Artificial Sequence: Synthetic oligonucleotide
  Target: LAMA2; (-) strand; PAM type: YTN; PAM sequence: TTA
gttaaacgtggcacatacaa

SEQ ID NO: 275857 - DNA, 20 bp, Artificial Sequence
  Description of Artificial Sequence: Synthetic oligonucleotide
  Target: LAMA2; (-) strand; PAM type: YTN; PAM sequence: TTT
agttaaacgtggcacataca

SEQ ID NO: 275858 - DNA, 20 bp, Artificial Sequence
  Description of Artificial Sequence: Synthetic oligonucleotide
  Target: LAMA2; (-) strand; PAM type: YTN; PAM sequence: CTT
tagttaaacgtggcacatac

SEQ ID NO: 275859 - DNA, 20 bp, Artificial Sequence
  Description of Artificial Sequence: Synthetic oligonucleotide
  Target: LAMA2; (-) strand; PAM type: YTN; PAM sequence: TTA
aacaagtctttagttaaacg

SEQ ID NO: 275860 - DNA, 20 bp, Artificial Sequence
  Description of Artificial Sequence: Synthetic oligonucleotide
  Target: LAMA2; (-) strand; PAM type: YTN; PAM sequence: TTT
aaacaagtctttagttaaac

SEQ ID NO: 275861 - DNA, 20 bp, Artificial Sequence
  Description of Artificial Sequence: Synthetic oligonucleotide
  Target: LAMA2; (-) strand; PAM type: YTN; PAM sequence: TTT
taaacaagtctttagttaaa

SEQ ID NO: 275862 - DNA, 20 bp, Artificial Sequence
  Description of Artificial Sequence: Synthetic oligonucleotide
  Target: LAMA2; (-) strand; PAM type: YTN; PAM sequence: CTT
ttaaacaagtctttagttaa

SEQ ID NO: 275863 - DNA, 20 bp, Artificial Sequence
  Description of Artificial Sequence: Synthetic oligonucleotide
  Target: LAMA2; (-) strand; PAM type: YTN; PAM sequence: TTA
tccagtaacttttaaacaag

SEQ ID NO: 275864 - DNA, 20 bp, Artificial Sequence
  Description of Artificial Sequence: Synthetic oligonucleotide
  Target: LAMA2; (-) strand; PAM type: YTN; PAM sequence: TTT
atccagtaacttttaaacaa

SEQ ID NO: 275865 - DNA, 20 bp, Artificial Sequence
  Description of Artificial Sequence: Synthetic oligonucleotide
  Target: LAMA2; (-) strand; PAM type: YTN; PAM sequence: TTT
tatccagtaacttttaaaca

SEQ ID NO: 275866 - DNA, 20 bp, Artificial Sequence
  Description of Artificial Sequence: Synthetic oligonucleotide
  Target: LAMA2; (-) strand; PAM type: YTN; PAM sequence: CTA
ttttatccagtaacttttaa

SEQ ID NO: 275867 - DNA, 20 bp, Artificial Sequence
  Description of Artificial Sequence: Synthetic oligonucleotide
  Target: LAMA2; (-) strand; PAM type: YTN; PAM sequence: TTA
tctattttatccagtaactt

SEQ ID NO: 275868 - DNA, 20 bp, Artificial Sequence
  Description of Artificial Sequence: Synthetic oligonucleotide
  Target: LAMA2; (-) strand; PAM type: YTN; PAM sequence: TTT
atctattttatccagtaact

SEQ ID NO: 275869 - DNA, 20 bp, Artificial Sequence
  Description of Artificial Sequence: Synthetic oligonucleotide
  Target: LAMA2; (-) strand; PAM type: YTN; PAM sequence: TTA
gtttatctattttatccagt

SEQ ID NO: 275870 - DNA, 20 bp, Artificial Sequence
  Description of Artificial Sequence: Synthetic oligonucleotide
  Target: LAMA2; (-) strand; PAM type: YTN; PAM sequence: TTC
agttagtttatctattttat

SEQ ID NO: 275871 - DNA, 20 bp, Artificial Sequence
  Description of Artificial Sequence: Synthetic oligonucleotide
  Target: LAMA2; (-) strand; PAM type: YTN; PAM sequence: TTG
attcagttagtttatctatt

SEQ ID NO: 275872 - DNA, 20 bp, Artificial Sequence
  Description of Artificial Sequence: Synthetic oligonucleotide
  Target: LAMA2; (-) strand; PAM type: YTN; PAM sequence: TTC
atattgattcagttagttta

SEQ ID NO: 275873 - DNA, 20 bp, Artificial Sequence
  Description of Artificial Sequence: Synthetic oligonucleotide
  Target: LAMA2; (-) strand; PAM type: YTN; PAM sequence: TTA
ttcatattgattcagttagt

SEQ ID NO: 275874 - DNA, 20 bp, Artificial Sequence
  Description of Artificial Sequence: Synthetic oligonucleotide
  Target: LAMA2; (-) strand; PAM type: YTN; PAM sequence: CTT
attcatattgattcagttag

SEQ ID NO: 275875 - DNA, 20 bp, Artificial Sequence
  Description of Artificial Sequence: Synthetic oligonucleotide
  Target: LAMA2; (-) strand; PAM type: YTN; PAM sequence: CTA
tgccttattcatattgattc

SEQ ID NO: 275876 - DNA, 20 bp, Artificial Sequence
  Description of Artificial Sequence: Synthetic oligonucleotide
  Target: LAMA2; (-) strand; PAM type: YTN; PAM sequence: TTA
agcaaccataaataatctat

SEQ ID NO: 275877 - DNA, 20 bp, Artificial Sequence
  Description of Artificial Sequence: Synthetic oligonucleotide
  Target: LAMA2; (-) strand; PAM type: YTN; PAM sequence: TTT
aagcaaccataaataatcta

SEQ ID NO: 275878 - DNA, 20 bp, Artificial Sequence
  Description of Artificial Sequence: Synthetic oligonucleotide
  Target: LAMA2; (-) strand; PAM type: YTN; PAM sequence: TTG
gtttaagcaaccataaataa

SEQ ID NO: 275879 - DNA, 20 bp, Artificial Sequence
  Description of Artificial Sequence: Synthetic oligonucleotide
  Target: LAMA2; (-) strand; PAM type: YTN; PAM sequence: TTT
ggtttaagcaaccataaata

SEQ ID NO: 275880 - DNA, 20 bp, Artificial Sequence
  Description of Artificial Sequence: Synthetic oligonucleotide
  Target: LAMA2; (-) strand; PAM type: YTN; PAM sequence: TTA
tttggtttaagcaaccataa

SEQ ID NO: 275881 - DNA, 20 bp, Artificial Sequence
  Description of Artificial Sequence: Synthetic oligonucleotide
  Target: LAMA2; (-) strand; PAM type: YTN; PAM sequence: TTT
atttggtttaagcaaccata

SEQ ID NO: 275882 - DNA, 20 bp, Artificial Sequence
  Description of Artificial Sequence: Synthetic oligonucleotide
  Target: LAMA2; (-) strand; PAM type: YTN; PAM sequence: TTA
tttatttggtttaagcaacc

SEQ ID NO: 275883 - DNA, 20 bp, Artificial Sequence
  Description of Artificial Sequence: Synthetic oligonucleotide
  Target: LAMA2; (-) strand; PAM type: YTN; PAM sequence: TTG
gcagcaaccaaattatttat

SEQ ID NO: 275884 - DNA, 20 bp, Artificial Sequence
  Description of Artificial Sequence: Synthetic oligonucleotide
  Target: LAMA2; (-) strand; PAM type: YTN; PAM sequence: TTT
ggcagcaaccaaattattta

SEQ ID NO: 275885 - DNA, 20 bp, Artificial Sequence
  Description of Artificial Sequence: Synthetic oligonucleotide
  Target: LAMA2; (-) strand; PAM type: YTN; PAM sequence: TTT
tggcagcaaccaaattattt

SEQ ID NO: 275886 - DNA, 20 bp, Artificial Sequence
  Description of Artificial Sequence: Synthetic oligonucleotide
  Target: LAMA2; (-) strand; PAM type: YTN; PAM sequence: TTC
agccattttggcagcaacca

SEQ ID NO: 275887 - DNA, 20 bp, Artificial Sequence
  Description of Artificial Sequence: Synthetic oligonucleotide
  Target: LAMA2; (-) strand; PAM type: YTN; PAM sequence: TTT
cagccattttggcagcaacc

SEQ ID NO: 275888 - DNA, 20 bp, Artificial Sequence
  Description of Artificial Sequence: Synthetic oligonucleotide
  Target: LAMA2; (-) strand; PAM type: YTN; PAM sequence: TTT
tcagccattttggcagcaac

SEQ ID NO: 275889 - DNA, 20 bp, Artificial Sequence
  Description of Artificial Sequence: Synthetic oligonucleotide
  Target: LAMA2; (-) strand; PAM type: YTN; PAM sequence: TTA
acaaacaccccatgtgattt

SEQ ID NO: 275890 - DNA, 20 bp, Artificial Sequence
  Description of Artificial Sequence: Synthetic oligonucleotide
  Target: LAMA2; (-) strand; PAM type: YTN; PAM sequence: CTT
aacaaacaccccatgtgatt

SEQ ID NO: 275891 - DNA, 20 bp, Artificial Sequence
  Description of Artificial Sequence: Synthetic oligonucleotide
  Target: LAMA2; (-) strand; PAM type: YTN; PAM sequence: TTG
gcttaacaaacaccccatgt

SEQ ID NO: 275892 - DNA, 20 bp, Artificial Sequence
  Description of Artificial Sequence: Synthetic oligonucleotide
  Target: LAMA2; (-) strand; PAM type: YTN; PAM sequence: CTG
ttggcttaacaaacacccca

SEQ ID NO: 275893 - DNA, 20 bp, Artificial Sequence
  Description of Artificial Sequence: Synthetic oligonucleotide
  Target: LAMA2; (-) strand; PAM type: YTN; PAM sequence: CTA
ggtgggagcccatgaaacct

SEQ ID NO: 275894 - DNA, 20 bp, Artificial Sequence
  Description of Artificial Sequence: Synthetic oligonucleotide
  Target: LAMA2; (-) strand; PAM type: YTN; PAM sequence: CTC
taggtgggagcccatgaaac

SEQ ID NO: 275895 - DNA, 20 bp, Artificial Sequence
  Description of Artificial Sequence: Synthetic oligonucleotide
  Target: LAMA2; (-) strand; PAM type: YTN; PAM sequence: CTC
tctaggtgggagcccatgaa

SEQ ID NO: 275896 - DNA, 20 bp, Artificial Sequence
  Description of Artificial Sequence: Synthetic oligonucleotide
  Target: LAMA2; (-) strand; PAM type: YTN; PAM sequence: CTA
cacagactctctaggtggga

SEQ ID NO: 275897 - DNA, 20 bp, Artificial Sequence
  Description of Artificial Sequence: Synthetic oligonucleotide
  Target: LAMA2; (-) strand; PAM type: YTN; PAM sequence: TTA
gaatgtacacatggggccaa

SEQ ID NO: 275898 - DNA, 20 bp, Artificial Sequence
  Description of Artificial Sequence: Synthetic oligonucleotide
  Target: LAMA2; (-) strand; PAM type: YTN; PAM sequence: TTA
gcccagggagagtgttagaa

SEQ ID NO: 275899 - DNA, 20 bp, Artificial Sequence
  Description of Artificial Sequence: Synthetic oligonucleotide
  Target: LAMA2; (-) strand; PAM type: YTN; PAM sequence: CTG
tataggcatcagattagccc

SEQ ID NO: 275900 - DNA, 20 bp, Artificial Sequence
  Description of Artificial Sequence: Synthetic oligonucleotide
  Target: LAMA2; (-) strand; PAM type: YTN; PAM sequence: CTC
gaacctgtataggcatcaga

SEQ ID NO: 275901 - DNA, 20 bp, Artificial Sequence
  Description of Artificial Sequence: Synthetic oligonucleotide
  Target: LAMA2; (-) strand; PAM type: YTN; PAM sequence: TTC
ctcgaacctgtataggcatc

SEQ ID NO: 275902 - DNA, 20 bp, Artificial Sequence
  Description of Artificial Sequence: Synthetic oligonucleotide
  Target: LAMA2; (-) strand; PAM type: YTN; PAM sequence: TTT
cctcgaacctgtataggcat

SEQ ID NO: 275903 - DNA, 20 bp, Artificial Sequence
  Description of Artificial Sequence: Synthetic oligonucleotide
  Target: LAMA2; (-) strand; PAM type: YTN; PAM sequence: TTT
tcctcgaacctgtataggca

SEQ ID NO: 275904 - DNA, 20 bp, Artificial Sequence
  Description of Artificial Sequence: Synthetic oligonucleotide
  Target: LAMA2; (-) strand; PAM type: YTN; PAM sequence: TTC
aatcaaatagatgcaatgtg

SEQ ID NO: 275905 - DNA, 20 bp, Artificial Sequence
  Description of Artificial Sequence: Synthetic oligonucleotide
  Target: LAMA2; (-) strand; PAM type: YTN; PAM sequence: TTA
ttcaatcaaatagatgcaat

SEQ ID NO: 275906 - DNA, 20 bp, Artificial Sequence
  Description of Artificial Sequence: Synthetic oligonucleotide
  Target: LAMA2; (-) strand; PAM type: YTN; PAM sequence: TTA
ttattcaatcaaatagatgc

SEQ ID NO: 275907 - DNA, 20 bp, Artificial Sequence
  Description of Artificial Sequence: Synthetic oligonucleotide
  Target: LAMA2; (-) strand; PAM type: YTN; PAM sequence: CTT
attattcaatcaaatagatg

SEQ ID NO: 275908 - DNA, 20 bp, Artificial Sequence
  Description of Artificial Sequence: Synthetic oligonucleotide
  Target: LAMA2; (-) strand; PAM type: YTN; PAM sequence: TTA
aaatgcagcttattattcaa

SEQ ID NO: 275909 - DNA, 20 bp, Artificial Sequence
  Description of Artificial Sequence: Synthetic oligonucleotide
  Target: LAMA2; (-) strand; PAM type: YTN; PAM sequence: TTT
aaaatgcagcttattattca

SEQ ID NO: 275910 - DNA, 20 bp, Artificial Sequence
  Description of Artificial Sequence: Synthetic oligonucleotide
  Target: LAMA2; (-) strand; PAM type: YTN; PAM sequence: TTA
tttaaaatgcagcttattat

SEQ ID NO: 275911 - DNA, 20 bp, Artificial Sequence
  Description of Artificial Sequence: Synthetic oligonucleotide
  Target: LAMA2; (-) strand; PAM type: YTN; PAM sequence: TTT
atttaaaatgcagcttatta

SEQ ID NO: 275912 - DNA, 20 bp, Artificial Sequence
  Description of Artificial Sequence: Synthetic oligonucleotide
  Target: LAMA2; (-) strand; PAM type: YTN; PAM sequence: TTA
tttatttaaaatgcagctta

SEQ ID NO: 275913 - DNA, 20 bp, Artificial Sequence
  Description of Artificial Sequence: Synthetic oligonucleotide
  Target: LAMA2; (-) strand; PAM type: YTN; PAM sequence: TTA
taagggagttatttatttaa

SEQ ID NO: 275914 - DNA, 20 bp, Artificial Sequence
  Description of Artificial Sequence: Synthetic oligonucleotide
  Target: LAMA2; (-) strand; PAM type: YTN; PAM sequence: TTG
tggacacagttataagggag

SEQ ID NO: 275915 - DNA, 20 bp, Artificial Sequence
  Description of Artificial Sequence: Synthetic oligonucleotide
  Target: LAMA2; (-) strand; PAM type: YTN; PAM sequence: TTC
attgtggacacagttataag

SEQ ID NO: 275916 - DNA, 20 bp, Artificial Sequence
  Description of Artificial Sequence: Synthetic oligonucleotide
  Target: LAMA2; (-) strand; PAM type: YTN; PAM sequence: CTT
cattgtggacacagttataa

SEQ ID NO: 275917 - DNA, 20 bp, Artificial Sequence
  Description of Artificial Sequence: Synthetic oligonucleotide
  Target: LAMA2; (-) strand; PAM type: YTN; PAM sequence: TTA
ccttcattgtggacacagtt

SEQ ID NO: 275918 - DNA, 20 bp, Artificial Sequence
  Description of Artificial Sequence: Synthetic oligonucleotide
  Target: LAMA2; (-) strand; PAM type: YTN; PAM sequence: TTG
tgttaccttcattgtggaca

SEQ ID NO: 275919 - DNA, 20 bp, Artificial Sequence
  Description of Artificial Sequence: Synthetic oligonucleotide
  Target: LAMA2; (-) strand; PAM type: YTN; PAM sequence: TTA
attgtgttaccttcattgtg

SEQ ID NO: 275920 - DNA, 20 bp, Artificial Sequence
  Description of Artificial Sequence: Synthetic oligonucleotide
  Target: LAMA2; (-) strand; PAM type: YTN; PAM sequence: TTG
ggtattaattgtgttacctt

SEQ ID NO: 275921 - DNA, 20 bp, Artificial Sequence
  Description of Artificial Sequence: Synthetic oligonucleotide
  Target: LAMA2; (-) strand; PAM type: YTN; PAM sequence: TTG
agttgggtattaattgtgtt

SEQ ID NO: 275922 - DNA, 20 bp, Artificial Sequence
  Description of Artificial Sequence: Synthetic oligonucleotide
  Target: LAMA2; (-) strand; PAM type: YTN; PAM sequence: TTT
gagttgggtattaattgtgt

SEQ ID NO: 275923 - DNA, 20 bp, Artificial Sequence
  Description of Artificial Sequence: Synthetic oligonucleotide
  Target: LAMA2; (-) strand; PAM type: YTN; PAM sequence: TTT
tgagttgggtattaattgtg

SEQ ID NO: 275924 - DNA, 20 bp, Artificial Sequence
  Description of Artificial Sequence: Synthetic oligonucleotide
  Target: LAMA2; (-) strand; PAM type: YTN; PAM sequence: TTT
ttgagttgggtattaattgt

SEQ ID NO: 275925 - DNA, 20 bp, Artificial Sequence
  Description of Artificial Sequence: Synthetic oligonucleotide
  Target: LAMA2; (-) strand; PAM type: YTN; PAM sequence: TTA
aaataaataaaaagtttttg

SEQ ID NO: 275926 - DNA, 20 bp, Artificial Sequence
  Description of Artificial Sequence: Synthetic oligonucleotide
  Target: LAMA2; (-) strand; PAM type: YTN; PAM sequence: CTT
aaaataaataaaaagttttt

SEQ ID NO: 275927 - DNA, 20 bp, Artificial Sequence
  Description of Artificial Sequence: Synthetic oligonucleotide
  Target: LAMA2; (-) strand; PAM type: YTN; PAM sequence: TTA
catgccaccttaaaataaat

SEQ ID NO: 275928 - DNA, 20 bp, Artificial Sequence
  Description of Artificial Sequence: Synthetic oligonucleotide
  Target: LAMA2; (-) strand; PAM type: YTN; PAM sequence: TTA
aaaagaaaattacatgccac

SEQ ID NO: 275929 - DNA, 20 bp, Artificial Sequence
  Description of Artificial Sequence: Synthetic oligonucleotide
  Target: LAMA2; (-) strand; PAM type: YTN; PAM sequence: TTT
aaaaagaaaattacatgcca

SEQ ID NO: 275930 - DNA, 20 bp, Artificial Sequence
  Description of Artificial Sequence: Synthetic oligonucleotide
  Target: LAMA2; (-) strand; PAM type: YTN; PAM sequence: TTT
taaaaagaaaattacatgcc

SEQ ID NO: 275931 - DNA, 20 bp, Artificial Sequence
  Description of Artificial Sequence: Synthetic oligonucleotide
  Target: LAMA2; (-) strand; PAM type: YTN; PAM sequence: TTT
ttaaaaagaaaattacatgc

SEQ ID NO: 275932 - DNA, 20 bp, Artificial Sequence
  Description of Artificial Sequence: Synthetic oligonucleotide
  Target: LAMA2; (-) strand; PAM type: YTN; PAM sequence: TTG
ataaaatttttaaaaagaaa

SEQ ID NO: 275933 - DNA, 20 bp, Artificial Sequence
  Description of Artificial Sequence: Synthetic oligonucleotide
  Target: LAMA2; (-) strand; PAM type: YTN; PAM sequence: CTT
gataaaatttttaaaaagaa

SEQ ID NO: 275934 - DNA, 20 bp, Artificial Sequence
  Description of Artificial Sequence: Synthetic oligonucleotide
  Target: LAMA2; (-) strand; PAM type: YTN; PAM sequence: TTA
gaggcttgataaaattttta

SEQ ID NO: 275935 - DNA, 20 bp, Artificial Sequence
  Description of Artificial Sequence: Synthetic oligonucleotide
  Target: LAMA2; (-) strand; PAM type: YTN; PAM sequence: CTG
aatgaattagaggcttgata

SEQ ID NO: 275936 - DNA, 20 bp, Artificial Sequence
  Description of Artificial Sequence: Synthetic oligonucleotide
  Target: LAMA2; (-) strand; PAM type: YTN; PAM sequence: TTC
ctgaatgaattagaggcttg

SEQ ID NO: 275937 - DNA, 20 bp, Artificial Sequence
  Description of Artificial Sequence: Synthetic oligonucleotide
  Target: LAMA2; (-) strand; PAM type: YTN; PAM sequence: TTT
cctgaatgaattagaggctt

SEQ ID NO: 275938 - DNA, 20 bp, Artificial Sequence
  Description of Artificial Sequence: Synthetic oligonucleotide
  Target: LAMA2; (-) strand; PAM type: YTN; PAM sequence: CTA
gcacgtttcctgaatgaatt

SEQ ID NO: 275939 - DNA, 20 bp, Artificial Sequence
  Description of Artificial Sequence: Synthetic oligonucleotide
  Target: LAMA2; (-) strand; PAM type: YTN; PAM sequence: TTG
gtgtctagcacgtttcctga

SEQ ID NO: 275940 - DNA, 20 bp, Artificial Sequence
  Description of Artificial Sequence: Synthetic oligonucleotide
  Target: LAMA2; (-) strand; PAM type: YTN; PAM sequence: TTT
ggtgtctagcacgtttcctg

SEQ ID NO: 275941 - DNA, 20 bp, Artificial Sequence
  Description of Artificial Sequence: Synthetic oligonucleotide
  Target: LAMA2; (-) strand; PAM type: YTN; PAM sequence: TTT
tggtgtctagcacgtttcct

SEQ ID NO: 275942 - DNA, 20 bp, Artificial Sequence
  Description of Artificial Sequence: Synthetic oligonucleotide
  Target: LAMA2; (-) strand; PAM type: YTN; PAM sequence: CTG
acacaatcaattttggtgtc

SEQ ID NO: 275943 - DNA, 20 bp, Artificial Sequence
  Description of Artificial Sequence: Synthetic oligonucleotide
  Target: LAMA2; (-) strand; PAM type: YTN; PAM sequence: CTC
atcactgacacaatcaattt

SEQ ID NO: 275944 - DNA, 20 bp, Artificial Sequence
  Description of Artificial Sequence: Synthetic oligonucleotide
  Target: LAMA2; (-) strand; PAM type: YTN; PAM sequence: CTA
agggggctcatcactgacac

SEQ ID NO: 275945 - DNA, 20 bp, Artificial Sequence
  Description of Artificial Sequence: Synthetic oligonucleotide
  Target: LAMA2; (-) strand; PAM type: YTN; PAM sequence: CTC
taagggggctcatcactgac

SEQ ID NO: 275946 - DNA, 20 bp, Artificial Sequence
  Description of Artificial Sequence: Synthetic oligonucleotide
  Target: LAMA2; (-) strand; PAM type: YTN; PAM sequence: CTG
ctctaagggggctcatcact

SEQ ID NO: 275947 - DNA, 20 bp, Artificial Sequence
  Description of Artificial Sequence: Synthetic oligonucleotide
  Target: LAMA2; (-) strand; PAM type: YTN; PAM sequence: CTG
ctgctctaagggggctcatc

SEQ ID NO: 275948 - DNA, 20 bp, Artificial Sequence
  Description of Artificial Sequence: Synthetic oligonucleotide
  Target: LAMA2; (-) strand; PAM type: YTN; PAM sequence: CTG
aggctgctgctctaaggggg

SEQ ID NO: 275949 - DNA, 20 bp, Artificial Sequence
  Description of Artificial Sequence: Synthetic oligonucleotide
  Target: LAMA2; (-) strand; PAM type: YTN; PAM sequence: TTA
cgctgaggctgctgctctaa

SEQ ID NO: 275950 - DNA, 20 bp, Artificial Sequence
  Description of Artificial Sequence: Synthetic oligonucleotide
  Target: LAMA2; (-) strand; PAM type: YTN; PAM sequence: CTA
ggttacgctgaggctgctgc

SEQ ID NO: 275951 - DNA, 20 bp, Artificial Sequence
  Description of Artificial Sequence: Synthetic oligonucleotide
  Target: LAMA2; (-) strand; PAM type: YTN; PAM sequence: TTG
ctaggttacgctgaggctgc

SEQ ID NO: 275952 - DNA, 20 bp, Artificial Sequence
  Description of Artificial Sequence: Synthetic oligonucleotide
  Target: LAMA2; (-) strand; PAM type: YTN; PAM sequence: TTG
acaagttgctaggttacgct

SEQ ID NO: 275953 - DNA, 20 bp, Artificial Sequence
  Description of Artificial Sequence: Synthetic oligonucleotide
  Target: LAMA2; (-) strand; PAM type: YTN; PAM sequence: TTT
gacaagttgctaggttacgc

SEQ ID NO: 275954 - DNA, 20 bp, Artificial Sequence
  Description of Artificial Sequence: Synthetic oligonucleotide
  Target: LAMA2; (-) strand; PAM type: YTN; PAM sequence: TTT
tgacaagttgctaggttacg

SEQ ID NO: 275955 - DNA, 20 bp, Artificial Sequence
  Description of Artificial Sequence: Synthetic oligonucleotide
  Target: LAMA2; (-) strand; PAM type: YTN; PAM sequence: TTT
ttgacaagttgctaggttac

SEQ ID NO: 275956 - DNA, 20 bp, Artificial Sequence
  Description of Artificial Sequence: Synthetic oligonucleotide
  Target: LAMA2; (-) strand; PAM type: YTN; PAM sequence: CTT
tttgacaagttgctaggtta

SEQ ID NO: 275957 - DNA, 20 bp, Artificial Sequence
  Description of Artificial Sequence: Synthetic oligonucleotide
  Target: LAMA2; (-) strand; PAM type: YTN; PAM sequence: TTG
tctttttgacaagttgctag

SEQ ID NO: 275958 - DNA, 20 bp, Artificial Sequence
  Description of Artificial Sequence: Synthetic oligonucleotide
  Target: LAMA2; (-) strand; PAM type: YTN; PAM sequence: TTT
gtctttttgacaagttgcta

SEQ ID NO: 275959 - DNA, 20 bp, Artificial Sequence
  Description of Artificial Sequence: Synthetic oligonucleotide
  Target: LAMA2; (-) strand; PAM type: YTN; PAM sequence: TTA
gggatggggtccaagaattt

SEQ ID NO: 275960 - DNA, 20 bp, Artificial Sequence
  Description of Artificial Sequence: Synthetic oligonucleotide
  Target: LAMA2; (-) strand; PAM type: YTN; PAM sequence: TTT
agggatggggtccaagaatt

SEQ ID NO: 275961 - DNA, 20 bp, Artificial Sequence
  Description of Artificial Sequence: Synthetic oligonucleotide
  Target: LAMA2; (-) strand; PAM type: YTN; PAM sequence: TTG
gtcatttagggatggggtcc

SEQ ID NO: 275962 - DNA, 20 bp, Artificial Sequence
  Description of Artificial Sequence: Synthetic oligonucleotide
  Target: LAMA2; (-) strand; PAM type: YTN; PAM sequence: CTG
agttggtcatttagggatgg

SEQ ID NO: 275963 - DNA, 20 bp, Artificial Sequence
  Description of Artificial Sequence: Synthetic oligonucleotide
  Target: LAMA2; (-) strand; PAM type: YTN; PAM sequence: TTC
tgagttggtcatttagggat

SEQ ID NO: 275964 - DNA, 20 bp, Artificial Sequence
  Description of Artificial Sequence: Synthetic oligonucleotide
  Target: LAMA2; (-) strand; PAM type: YTN; PAM sequence: TTT
ctgagttggtcatttaggga

SEQ ID NO: 275965 - DNA, 20 bp, Artificial Sequence
  Description of Artificial Sequence: Synthetic oligonucleotide
  Target: LAMA2; (-) strand; PAM type: YTN; PAM sequence: CTC
agagtttctgagttggtcat

SEQ ID NO: 275966 - DNA, 20 bp, Artificial Sequence
  Description of Artificial Sequence: Synthetic oligonucleotide
  Target: LAMA2; (-) strand; PAM type: YTN; PAM sequence: TTC
tcagagtttctgagttggtc

SEQ ID NO: 275967 - DNA, 20 bp, Artificial Sequence
  Description of Artificial Sequence: Synthetic oligonucleotide
  Target: LAMA2; (-) strand; PAM type: YTN; PAM sequence: CTG
ggccccattctcagagtttc

SEQ ID NO: 275968 - DNA, 20 bp, Artificial Sequence
  Description of Artificial Sequence: Synthetic oligonucleotide
  Target: LAMA2; (-) strand; PAM type: YTN; PAM sequence: TTC
tgggccccattctcagagtt

SEQ ID NO: 275969 - DNA, 20 bp, Artificial Sequence
  Description of Artificial Sequence: Synthetic oligonucleotide
  Target: LAMA2; (-) strand; PAM type: YTN; PAM sequence: TTT
ctgggccccattctcagagt

SEQ ID NO: 275970 - DNA, 20 bp, Artificial Sequence
  Description of Artificial Sequence: Synthetic oligonucleotide
  Target: LAMA2; (-) strand; PAM type: YTN; PAM sequence: TTA
aaacacggatttctgggccc

SEQ ID NO: 275971 - DNA, 20 bp, Artificial Sequence
  Description of Artificial Sequence: Synthetic oligonucleotide
  Target: LAMA2; (-) strand; PAM type: YTN; PAM sequence: TTT
aaaacacggatttctgggcc

SEQ ID NO: 275972 - DNA, 20 bp, Artificial Sequence
  Description of Artificial Sequence: Synthetic oligonucleotide
  Target: LAMA2; (-) strand; PAM type: YTN; PAM sequence: TTT
taaaacacggatttctgggc

SEQ ID NO: 275973 - DNA, 20 bp, Artificial Sequence
  Description of Artificial Sequence: Synthetic oligonucleotide
  Target: LAMA2; (-) strand; PAM type: YTN; PAM sequence: TTT
ttaaaacacggatttctggg

SEQ ID NO: 275974 - DNA, 20 bp, Artificial Sequence
  Description of Artificial Sequence: Synthetic oligonucleotide
  Target: LAMA2; (-) strand; PAM type: YTN; PAM sequence: CTG
gaggaatttttaaaacacgg

SEQ ID NO: 275975 - DNA, 20 bp, Artificial Sequence
  Description of Artificial Sequence: Synthetic oligonucleotide
  Target: LAMA2; (-) strand; PAM type: YTN; PAM sequence: TTA
atcactggaggaatttttaa

SEQ ID NO: 275976 - DNA, 20 bp, Artificial Sequence
  Description of Artificial Sequence: Synthetic oligonucleotide
  Target: LAMA2; (-) strand; PAM type: YTN; PAM sequence: CTT
aatcactggaggaattttta

SEQ ID NO: 275977 - DNA, 20 bp, Artificial Sequence
  Description of Artificial Sequence: Synthetic oligonucleotide
  Target: LAMA2; (-) strand; PAM type: YTN; PAM sequence: CTG
catcttaatcactggaggaa

SEQ ID NO: 275978 - DNA, 20 bp, Artificial Sequence
  Description of Artificial Sequence: Synthetic oligonucleotide
  Target: LAMA2; (-) strand; PAM type: YTN; PAM sequence: TTG
aagctgcatcttaatcactg

SEQ ID NO: 275979 - DNA, 20 bp, Artificial Sequence
  Description of Artificial Sequence: Synthetic oligonucleotide
  Target: LAMA2; (-) strand; PAM type: YTN; PAM sequence: CTT
gaagctgcatcttaatcact

SEQ ID NO: 275980 - DNA, 20 bp, Artificial Sequence
  Description of Artificial Sequence: Synthetic oligonucleotide
  Target: LAMA2; (-) strand; PAM type: YTN; PAM sequence: CTC
aaccttgaagctgcatctta

SEQ ID NO: 275981 - DNA, 20 bp, Artificial Sequence
  Description of Artificial Sequence: Synthetic oligonucleotide
  Target: LAMA2; (-) strand; PAM type: YTN; PAM sequence: TTC
tcaaccttgaagctgcatct

SEQ ID NO: 275982 - DNA, 20 bp, Artificial Sequence
  Description of Artificial Sequence: Synthetic oligonucleotide
  Target: LAMA2; (-) strand; PAM type: YTN; PAM sequence: TTA
tacccgtggttctcaacctt

SEQ ID NO: 275983 - DNA, 20 bp, Artificial Sequence
  Description of Artificial Sequence: Synthetic oligonucleotide
  Target: LAMA2; (-) strand; PAM type: YTN; PAM sequence: TTT
atacccgtggttctcaacct

SEQ ID NO: 275984 - DNA, 20 bp, Artificial Sequence
  Description of Artificial Sequence: Synthetic oligonucleotide
  Target: LAMA2; (-) strand; PAM type: YTN; PAM sequence: TTA
gtgtttatacccgtggttct

SEQ ID NO: 275985 - DNA, 20 bp, Artificial Sequence
  Description of Artificial Sequence: Synthetic oligonucleotide
  Target: LAMA2; (-) strand; PAM type: YTN; PAM sequence: TTT
agtgtttatacccgtggttc

SEQ ID NO: 275986 - DNA, 20 bp, Artificial Sequence
  Description of Artificial Sequence: Synthetic oligonucleotide
  Target: LAMA2; (-) strand; PAM type: YTN; PAM sequence: TTT
tagtgtttatacccgtggtt

SEQ ID NO: 275987 - DNA, 20 bp, Artificial Sequence
  Description of Artificial Sequence: Synthetic oligonucleotide
  Target: LAMA2; (-) strand; PAM type: YTN; PAM sequence: TTG
aagtaatcagagatggtgtt

SEQ ID NO: 275988 - DNA, 20 bp, Artificial Sequence
  Description of Artificial Sequence: Synthetic oligonucleotide
  Target: LAMA2; (-) strand; PAM type: YTN; PAM sequence: CTT
gaagtaatcagagatggtgt

SEQ ID NO: 275989 - DNA, 20 bp, Artificial Sequence
  Description of Artificial Sequence: Synthetic oligonucleotide
  Target: LAMA2; (-) strand; PAM type: YTN; PAM sequence: TTA
cttgaagtaatcagagatgg

SEQ ID NO: 275990 - DNA, 20 bp, Artificial Sequence
  Description of Artificial Sequence: Synthetic oligonucleotide
  Target: LAMA2; (-) strand; PAM type: YTN; PAM sequence: CTA
aatacaagttacttgaagta

SEQ ID NO: 275991 - DNA, 20 bp, Artificial Sequence
  Description of Artificial Sequence: Synthetic oligonucleotide
  Target: LAMA2; (-) strand; PAM type: YTN; PAM sequence: CTC
ccactaaatacaagttactt

SEQ ID NO: 275992 - DNA, 20 bp, Artificial Sequence
  Description of Artificial Sequence: Synthetic oligonucleotide
  Target: LAMA2; (-) strand; PAM type: YTN; PAM sequence: TTA
tgtgtacctcccactaaata

SEQ ID NO: 275993 - DNA, 20 bp, Artificial Sequence
  Description of Artificial Sequence: Synthetic oligonucleotide
  Target: LAMA2; (-) strand; PAM type: YTN; PAM sequence: CTT
atgtgtacctcccactaaat

SEQ ID NO: 275994 - DNA, 20 bp, Artificial Sequence
  Description of Artificial Sequence: Synthetic oligonucleotide
  Target: LAMA2; (-) strand; PAM type: YTN; PAM sequence: TTG
cttatgtgtacctcccacta

SEQ ID NO: 275995 - DNA, 20 bp, Artificial Sequence
  Description of Artificial Sequence: Synthetic oligonucleotide
  Target: LAMA2; (-) strand; PAM type: YTN; PAM sequence: TTT
gcttatgtgtacctcccact

SEQ ID NO: 275996 - DNA, 20 bp, Artificial Sequence
  Description of Artificial Sequence: Synthetic oligonucleotide
  Target: LAMA2; (-) strand; PAM type: YTN; PAM sequence: TTA
tggtagcgtatggagtggtt

SEQ ID NO: 275997 - DNA, 20 bp, Artificial Sequence
  Description of Artificial Sequence: Synthetic oligonucleotide
  Target: LAMA2; (-) strand; PAM type: YTN; PAM sequence: CTG
tgataattatggtagcgtat

SEQ ID NO: 275998 - DNA, 20 bp, Artificial Sequence
  Description of Artificial Sequence: Synthetic oligonucleotide
  Target: LAMA2; (-) strand; PAM type: YTN; PAM sequence: TTA
cgcctgtgataattatggta

SEQ ID NO: 275999 - DNA, 20 bp, Artificial Sequence
  Description of Artificial Sequence: Synthetic oligonucleotide
  Target: LAMA2; (-) strand; PAM type: YTN; PAM sequence: CTT
acgcctgtgataattatggt

SEQ ID NO: 276000 - DNA, 20 bp, Artificial Sequence
  Description of Artificial Sequence: Synthetic oligonucleotide
  Target: LAMA2; (-) strand; PAM type: YTN; PAM sequence: TTG
cttacgcctgtgataattat

SEQ ID NO: 276001 - DNA, 20 bp, Artificial Sequence
  Description of Artificial Sequence: Synthetic oligonucleotide
  Target: LAMA2; (-) strand; PAM type: YTN; PAM sequence: TTT
gcttacgcctgtgataatta

SEQ ID NO: 276002 - DNA, 20 bp, Artificial Sequence
  Description of Artificial Sequence: Synthetic oligonucleotide
  Target: LAMA2; (-) strand; PAM type: YTN; PAM sequence: CTT
tgcttacgcctgtgataatt

SEQ ID NO: 276003 - DNA, 20 bp, Artificial Sequence
  Description of Artificial Sequence: Synthetic oligonucleotide
  Target: LAMA2; (-) strand; PAM type: YTN; PAM sequence: CTC
ctttgcttacgcctgtgata

SEQ ID NO: 276004 - DNA, 20 bp, Artificial Sequence
  Description of Artificial Sequence: Synthetic oligonucleotide
  Target: LAMA2; (-) strand; PAM type: YTN; PAM sequence: CTC
cctcctttgcttacgcctgt

SEQ ID NO: 276005 - DNA, 20 bp, Artificial Sequence
  Description of Artificial Sequence: Synthetic oligonucleotide
  Target: LAMA2; (-) strand; PAM type: YTN; PAM sequence: TTA
gactccctcctttgcttacg

SEQ ID NO: 276006 - DNA, 20 bp, Artificial Sequence
  Description of Artificial Sequence: Synthetic oligonucleotide
  Target: LAMA2; (-) strand; PAM type: YTN; PAM sequence: CTT
agactccctcctttgcttac

SEQ ID NO: 276007 - DNA, 20 bp, Artificial Sequence
  Description of Artificial Sequence: Synthetic oligonucleotide
  Target: LAMA2; (-) strand; PAM type: YTN; PAM sequence: CTC
aggggtgacttagactccct

SEQ ID NO: 276008 - DNA, 20 bp, Artificial Sequence
  Description of Artificial Sequence: Synthetic oligonucleotide
  Target: LAMA2; (-) strand; PAM type: YTN; PAM sequence: CTA
aactcaggggtgacttagac

SEQ ID NO: 276009 - DNA, 20 bp, Artificial Sequence
  Description of Artificial Sequence: Synthetic oligonucleotide
  Target: LAMA2; (-) strand; PAM type: YTN; PAM sequence: TTC
ctaaactcaggggtgactta

SEQ ID NO: 276010 - DNA, 20 bp, Artificial Sequence
  Description of Artificial Sequence: Synthetic oligonucleotide
  Target: LAMA2; (-) strand; PAM type: YTN; PAM sequence: CTT
cctaaactcaggggtgactt

SEQ ID NO: 276011 - DNA, 20 bp, Artificial Sequence
  Description of Artificial Sequence: Synthetic oligonucleotide
  Target: LAMA2; (-) strand; PAM type: YTN; PAM sequence: CTC
ttcctaaactcaggggtgac

SEQ ID NO: 276012 - DNA, 20 bp, Artificial Sequence
  Description of Artificial Sequence: Synthetic oligonucleotide
  Target: LAMA2; (-) strand; PAM type: YTN; PAM sequence: CTA
caaagctcttcctaaactca

SEQ ID NO: 276013 - DNA, 20 bp, Artificial Sequence
  Description of Artificial Sequence: Synthetic oligonucleotide
  Target: LAMA2; (-) strand; PAM type: YTN; PAM sequence: CTC
tacaaagctcttcctaaact

SEQ ID NO: 276014 - DNA, 20 bp, Artificial Sequence
  Description of Artificial Sequence: Synthetic oligonucleotide
  Target: LAMA2; (-) strand; PAM type: YTN; PAM sequence: CTA
gcacaagtgtcagggcctct

SEQ ID NO: 276015 - DNA, 20 bp, Artificial Sequence
  Description of Artificial Sequence: Synthetic oligonucleotide
  Target: LAMA2; (-) strand; PAM type: YTN; PAM sequence: TTA
ggatctagcacaagtgtcag

SEQ ID NO: 276016 - DNA, 20 bp, Artificial Sequence
  Description of Artificial Sequence: Synthetic oligonucleotide
  Target: LAMA2; (-) strand; PAM type: YTN; PAM sequence: TTT
aggatctagcacaagtgtca

SEQ ID NO: 276017 - DNA, 20 bp, Artificial Sequence
  Description of Artificial Sequence: Synthetic oligonucleotide
  Target: LAMA2; (-) strand; PAM type: YTN; PAM sequence: CTT
taggatctagcacaagtgtc

SEQ ID NO: 276018 - DNA, 20 bp, Artificial Sequence
  Description of Artificial Sequence: Synthetic oligonucleotide
  Target: LAMA2; (-) strand; PAM type: YTN; PAM sequence: TTA
tcctttaggatctagcacaa

SEQ ID NO: 276019 - DNA, 20 bp, Artificial Sequence
  Description of Artificial Sequence: Synthetic oligonucleotide
  Target: LAMA2; (-) strand; PAM type: YTN; PAM sequence: CTT
atcctttaggatctagcaca

SEQ ID NO: 276020 - DNA, 20 bp, Artificial Sequence
  Description of Artificial Sequence: Synthetic oligonucleotide
  Target: LAMA2; (-) strand; PAM type: YTN; PAM sequence: CTG
tgacccagtgcttatccttt

SEQ ID NO: 276021 - DNA, 20 bp, Artificial Sequence
  Description of Artificial Sequence: Synthetic oligonucleotide
  Target: LAMA2; (-) strand; PAM type: YTN; PAM sequence: TTC
tgtgacccagtgcttatcct

SEQ ID NO: 276022 - DNA, 20 bp, Artificial Sequence
  Description of Artificial Sequence: Synthetic oligonucleotide
  Target: LAMA2; (-) strand; PAM type: YTN; PAM sequence: CTT
ctgtgacccagtgcttatcc

SEQ ID NO: 276023 - DNA, 20 bp, Artificial Sequence
  Description of Artificial Sequence: Synthetic oligonucleotide
  Target: LAMA2; (-) strand; PAM type: YTN; PAM sequence: TTC
ttctgtgacccagtgcttat

SEQ ID NO: 276024 - DNA, 20 bp, Artificial Sequence
  Description of Artificial Sequence: Synthetic oligonucleotide
  Target: LAMA2; (-) strand; PAM type: YTN; PAM sequence: TTA
ttcttctgtgacccagtgct

SEQ ID NO: 276025 - DNA, 20 bp, Artificial Sequence
  Description of Artificial Sequence: Synthetic oligonucleotide
  Target: LAMA2; (-) strand; PAM type: YTN; PAM sequence: TTT
attcttctgtgacccagtgc

SEQ ID NO: 276026 - DNA, 20 bp, Artificial Sequence
  Description of Artificial Sequence: Synthetic oligonucleotide
  Target: LAMA2; (-) strand; PAM type: YTN; PAM sequence: CTT
tattcttctgtgacccagtg

SEQ ID NO: 276027 - DNA, 20 bp, Artificial Sequence
  Description of Artificial Sequence: Synthetic oligonucleotide
  Target: LAMA2; (-) strand; PAM type: YTN; PAM sequence: CTC
tttattcttctgtgacccag

SEQ ID NO: 276028 - DNA, 20 bp, Artificial Sequence
  Description of Artificial Sequence: Synthetic oligonucleotide
  Target: LAMA2; (-) strand; PAM type: YTN; PAM sequence: TTC
tctttattcttctgtgaccc

SEQ ID NO: 276029 - DNA, 20 bp, Artificial Sequence
  Description of Artificial Sequence: Synthetic oligonucleotide
  Target: LAMA2; (-) strand; PAM type: YTN; PAM sequence: CTT
ctctttattcttctgtgacc

SEQ ID NO: 276030 - DNA, 20 bp, Artificial Sequence
  Description of Artificial Sequence: Synthetic oligonucleotide
  Target: LAMA2; (-) strand; PAM type: YTN; PAM sequence: TTC
ttctctttattcttctgtga

SEQ ID NO: 276031 - DNA, 20 bp, Artificial Sequence
  Description of Artificial Sequence: Synthetic oligonucleotide
  Target: LAMA2; (-) strand; PAM type: YTN; PAM sequence: CTG
aaatgttcttctctttattc

SEQ ID NO: 276032 - DNA, 20 bp, Artificial Sequence
  Description of Artificial Sequence: Synthetic oligonucleotide
  Target: LAMA2; (-) strand; PAM type: YTN; PAM sequence: TTC
tgaaatgttcttctctttat

SEQ ID NO: 276033 - DNA, 20 bp, Artificial Sequence
  Description of Artificial Sequence: Synthetic oligonucleotide
  Target: LAMA2; (-) strand; PAM type: YTN; PAM sequence: TTT
ctgaaatgttcttctcttta

SEQ ID NO: 276034 - DNA, 20 bp, Artificial Sequence
  Description of Artificial Sequence: Synthetic oligonucleotide
  Target: LAMA2; (-) strand; PAM type: YTN; PAM sequence: TTC
ccagtttctgaaatgttctt

SEQ ID NO: 276035 - DNA, 20 bp, Artificial Sequence
  Description of Artificial Sequence: Synthetic oligonucleotide
  Target: LAMA2; (-) strand; PAM type: YTN; PAM sequence: TTT
cccagtttctgaaatgttct

SEQ ID NO: 276036 - DNA, 20 bp, Artificial Sequence
  Description of Artificial Sequence: Synthetic oligonucleotide
  Target: LAMA2; (-) strand; PAM type: YTN; PAM sequence: TTT
tcccagtttctgaaatgttc

SEQ ID NO: 276037 - DNA, 20 bp, Artificial Sequence
  Description of Artificial Sequence: Synthetic oligonucleotide
  Target: LAMA2; (-) strand; PAM type: YTN; PAM sequence: TTT
ttcccagtttctgaaatgtt

SEQ ID NO: 276038 - DNA, 20 bp, Artificial Sequence
  Description of Artificial Sequence: Synthetic oligonucleotide
  Target: LAMA2; (-) strand; PAM type: YTN; PAM sequence: TTG
tatatgtttttcccagtttc

SEQ ID NO: 276039 - DNA, 20 bp, Artificial Sequence
  Description of Artificial Sequence: Synthetic oligonucleotide
  Target: LAMA2; (-) strand; PAM type: YTN; PAM sequence: TTT
gtatatgtttttcccagttt

SEQ ID NO: 276040 - DNA, 20 bp, Artificial Sequence
  Description of Artificial Sequence: Synthetic oligonucleotide
  Target: LAMA2; (-) strand; PAM type: YTN; PAM sequence: CTT
tgtatatgtttttcccagtt

SEQ ID NO: 276041 - DNA, 20 bp, Artificial Sequence
  Description of Artificial Sequence: Synthetic oligonucleotide
  Target: LAMA2; (-) strand; PAM type: YTN; PAM sequence: CTC
catgcctttgtatatgtttt

SEQ ID NO: 276042 - DNA, 20 bp, Artificial Sequence
  Description of Artificial Sequence: Synthetic oligonucleotide
  Target: LAMA2; (-) strand; PAM type: YTN; PAM sequence: TTC
ctccatgcctttgtatatgt

SEQ ID NO: 276043 - DNA, 20 bp, Artificial Sequence
  Description of Artificial Sequence: Synthetic oligonucleotide
  Target: LAMA2; (-) strand; PAM type: YTN; PAM sequence: TTT
cctccatgcctttgtatatg

SEQ ID NO: 276044 - DNA, 20 bp, Artificial Sequence
  Description of Artificial Sequence: Synthetic oligonucleotide
  Target: LAMA2; (-) strand; PAM type: YTN; PAM sequence: CTT
tcctccatgcctttgtatat

SEQ ID NO: 276045 - DNA, 20 bp, Artificial Sequence
  Description of Artificial Sequence: Synthetic oligonucleotide
  Target: LAMA2; (-) strand; PAM type: YTN; PAM sequence: TTC
tttcctccatgcctttgtat

SEQ ID NO: 276046 - DNA, 20 bp, Artificial Sequence
  Description of Artificial Sequence: Synthetic oligonucleotide
  Target: LAMA2; (-) strand; PAM type: YTN; PAM sequence: TTT
ctttcctccatgcctttgta

SEQ ID NO: 276047 - DNA, 20 bp, Artificial Sequence
  Description of Artificial Sequence: Synthetic oligonucleotide
  Target: LAMA2; (-) strand; PAM type: YTN; PAM sequence: TTT
tctttcctccatgcctttgt

SEQ ID NO: 276048 - DNA, 20 bp, Artificial Sequence
  Description of Artificial Sequence: Synthetic oligonucleotide
  Target: LAMA2; (-) strand; PAM type: YTN; PAM sequence: TTC
ccccaaaatgtcattttctt

SEQ ID NO: 276049 - DNA, 20 bp, Artificial Sequence
  Description of Artificial Sequence: Synthetic oligonucleotide
  Target: LAMA2; (-) strand; PAM type: YTN; PAM sequence: TTT
cccccaaaatgtcattttct

SEQ ID NO: 276050 - DNA, 20 bp, Artificial Sequence
  Description of Artificial Sequence: Synthetic oligonucleotide
  Target: LAMA2; (-) strand; PAM type: YTN; PAM sequence: CTT
tcccccaaaatgtcattttc

SEQ ID NO: 276051 - DNA, 20 bp, Artificial Sequence
  Description of Artificial Sequence: Synthetic oligonucleotide
  Target: LAMA2; (-) strand; PAM type: YTN; PAM sequence: CTG
aactttcccccaaaatgtca

SEQ ID NO: 276052 - DNA, 20 bp, Artificial Sequence
  Description of Artificial Sequence: Synthetic oligonucleotide
  Target: LAMA2; (-) strand; PAM type: YTN; PAM sequence: CTA
tcaaaccactgaactttccc

SEQ ID NO: 276053 - DNA, 20 bp, Artificial Sequence
  Description of Artificial Sequence: Synthetic oligonucleotide
  Target: LAMA2; (-) strand; PAM type: YTN; PAM sequence: TTC
caagcctatcaaaccactga

SEQ ID NO: 276054 - DNA, 20 bp, Artificial Sequence
  Description of Artificial Sequence: Synthetic oligonucleotide
  Target: LAMA2; (-) strand; PAM type: YTN; PAM sequence: TTT
ccaagcctatcaaaccactg

SEQ ID NO: 276055 - DNA, 20 bp, Artificial Sequence
  Description of Artificial Sequence: Synthetic oligonucleotide
  Target: LAMA2; (-) strand; PAM type: YTN; PAM sequence: CTT
tccaagcctatcaaaccact

SEQ ID NO: 276056 - DNA, 20 bp, Artificial Sequence
  Description of Artificial Sequence: Synthetic oligonucleotide
  Target: LAMA2; (-) strand; PAM type: YTN; PAM sequence: TTC
tttccaagcctatcaaacca

SEQ ID NO: 276057 - DNA, 20 bp, Artificial Sequence
  Description of Artificial Sequence: Synthetic oligonucleotide
  Target: LAMA2; (-) strand; PAM type: YTN; PAM sequence: CTT
ctttccaagcctatcaaacc

SEQ ID NO: 276058 - DNA, 20 bp, Artificial Sequence
  Description of Artificial Sequence: Synthetic oligonucleotide
  Target: LAMA2; (-) strand; PAM type: YTN; PAM sequence: TTC
acatgcagtcttctttccaa

SEQ ID NO: 276059 - DNA, 20 bp, Artificial Sequence
  Description of Artificial Sequence: Synthetic oligonucleotide
  Target: LAMA2; (-) strand; PAM type: YTN; PAM sequence: TTC
agtcgttcacatgcagtctt

SEQ ID NO: 276060 - DNA, 20 bp, Artificial Sequence
  Description of Artificial Sequence: Synthetic oligonucleotide
  Target: LAMA2; (-) strand; PAM type: YTN; PAM sequence: CTT
cagtcgttcacatgcagtct

SEQ ID NO: 276061 - DNA, 20 bp, Artificial Sequence
  Description of Artificial Sequence: Synthetic oligonucleotide
  Target: LAMA2; (-) strand; PAM type: YTN; PAM sequence: CTA
tcccttcagtcgttcacatg

SEQ ID NO: 276062 - DNA, 20 bp, Artificial Sequence
  Description of Artificial Sequence: Synthetic oligonucleotide
  Target: LAMA2; (-) strand; PAM type: YTN; PAM sequence: TTC
tatcccttcagtcgttcaca

SEQ ID NO: 276063 - DNA, 20 bp, Artificial Sequence
  Description of Artificial Sequence: Synthetic oligonucleotide
  Target: LAMA2; (-) strand; PAM type: YTN; PAM sequence: TTT
ctatcccttcagtcgttcac

SEQ ID NO: 276064 - DNA, 20 bp, Artificial Sequence
  Description of Artificial Sequence: Synthetic oligonucleotide
  Target: LAMA2; (-) strand; PAM type: YTN; PAM sequence: CTT
tctatcccttcagtcgttca

SEQ ID NO: 276065 - DNA, 20 bp, Artificial Sequence
  Description of Artificial Sequence: Synthetic oligonucleotide
  Target: LAMA2; (-) strand; PAM type: YTN; PAM sequence: TTC
tttctatcccttcagtcgtt

SEQ ID NO: 276066 - DNA, 20 bp, Artificial Sequence
  Description of Artificial Sequence: Synthetic oligonucleotide
  Target: LAMA2; (-) strand; PAM type: YTN; PAM sequence: TTT
ctttctatcccttcagtcgt

SEQ ID NO: 276067 - DNA, 20 bp, Artificial Sequence
  Description of Artificial Sequence: Synthetic oligonucleotide
  Target: LAMA2; (-) strand; PAM type: YTN; PAM sequence: CTT
tctttctatcccttcagtcg

SEQ ID NO: 276068 - DNA, 20 bp, Artificial Sequence
  Description of Artificial Sequence: Synthetic oligonucleotide
  Target: LAMA2; (-) strand; PAM type: YTN; PAM sequence: CTC
tttctttctatcccttcagt

SEQ ID NO: 276069 - DNA, 20 bp, Artificial Sequence
  Description of Artificial Sequence: Synthetic oligonucleotide
  Target: LAMA2; (-) strand; PAM type: YTN; PAM sequence: TTC
tctttctttctatcccttca

SEQ ID NO: 276070 - DNA, 20 bp, Artificial Sequence
  Description of Artificial Sequence: Synthetic oligonucleotide
  Target: LAMA2; (-) strand; PAM type: YTN; PAM sequence: CTT
ctctttctttctatcccttc

SEQ ID NO: 276071 - DNA, 20 bp, Artificial Sequence
  Description of Artificial Sequence: Synthetic oligonucleotide
  Target: LAMA2; (-) strand; PAM type: YTN; PAM sequence: CTA
tcttctctttctttctatcc

SEQ ID NO: 276072 - DNA, 20 bp, Artificial Sequence
  Description of Artificial Sequence: Synthetic oligonucleotide
  Target: LAMA2; (-) strand; PAM type: YTN; PAM sequence: CTG
cctatcttctctttctttct

SEQ ID NO: 276073 - DNA, 20 bp, Artificial Sequence
  Description of Artificial Sequence: Synthetic oligonucleotide
  Target: LAMA2; (-) strand; PAM type: YTN; PAM sequence: CTC
tgcctatcttctctttcttt

SEQ ID NO: 276074 - DNA, 20 bp, Artificial Sequence
  Description of Artificial Sequence: Synthetic oligonucleotide
  Target: LAMA2; (-) strand; PAM type: YTN; PAM sequence: CTG
cactctgcctatcttctctt

SEQ ID NO: 276075 - DNA, 20 bp, Artificial Sequence
  Description of Artificial Sequence: Synthetic oligonucleotide
  Target: LAMA2; (-) strand; PAM type: YTN; PAM sequence: CTG
aaggtctgcactctgcctat

SEQ ID NO: 276076 - DNA, 20 bp, Artificial Sequence
  Description of Artificial Sequence: Synthetic oligonucleotide
  Target: LAMA2; (-) strand; PAM type: YTN; PAM sequence: TTA
taactgaaggtctgcactct

SEQ ID NO: 276077 - DNA, 20 bp, Artificial Sequence
  Description of Artificial Sequence: Synthetic oligonucleotide
  Target: LAMA2; (-) strand; PAM type: YTN; PAM sequence: CTT
ataactgaaggtctgcactc

SEQ ID NO: 276078 - DNA, 20 bp, Artificial Sequence
  Description of Artificial Sequence: Synthetic oligonucleotide
  Target: LAMA2; (-) strand; PAM type: YTN; PAM sequence: CTC
ttataactgaaggtctgcac

SEQ ID NO: 276079 - DNA, 20 bp, Artificial Sequence
  Description of Artificial Sequence: Synthetic oligonucleotide
  Target: LAMA2; (-) strand; PAM type: YTN; PAM sequence: TTC
tcttataactgaaggtctgc

SEQ ID NO: 276080 - DNA, 20 bp, Artificial Sequence
  Description of Artificial Sequence: Synthetic oligonucleotide
  Target: LAMA2; (-) strand; PAM type: YTN; PAM sequence: CTC
acaatgcgattctcttataa

SEQ ID NO: 276081 - DNA, 20 bp, Artificial Sequence
  Description of Artificial Sequence: Synthetic oligonucleotide
  Target: LAMA2; (-) strand; PAM type: YTN; PAM sequence: TTA
gtctcacaatgcgattctct

SEQ ID NO: 276082 - DNA, 20 bp, Artificial Sequence
  Description of Artificial Sequence: Synthetic oligonucleotide
  Target: LAMA2; (-) strand; PAM type: YTN; PAM sequence: CTT
agtctcacaatgcgattctc

SEQ ID NO: 276083 - DNA, 20 bp, Artificial Sequence
  Description of Artificial Sequence: Synthetic oligonucleotide
  Target: LAMA2; (-) strand; PAM type: YTN; PAM sequence: TTA
gcttagtctcacaatgcgat

SEQ ID NO: 276084 - DNA, 20 bp, Artificial Sequence
  Description of Artificial Sequence: Synthetic oligonucleotide
  Target: LAMA2; (-) strand; PAM type: YTN; PAM sequence: CTT
agcttagtctcacaatgcga

SEQ ID NO: 276085 - DNA, 20 bp, Artificial Sequence
  Description of Artificial Sequence: Synthetic oligonucleotide
  Target: LAMA2; (-) strand; PAM type: YTN; PAM sequence: TTC
cttagcttagtctcacaatg

SEQ ID NO: 276086 - DNA, 20 bp, Artificial Sequence
  Description of Artificial Sequence: Synthetic oligonucleotide
  Target: LAMA2; (-) strand; PAM type: YTN; PAM sequence: CTC
aggataaaaaccaattcctt

SEQ ID NO: 276087 - DNA, 20 bp, Artificial Sequence
  Description of Artificial Sequence: Synthetic oligonucleotide
  Target: LAMA2; (-) strand; PAM type: YTN; PAM sequence: CTC
tcaggataaaaaccaattcc

SEQ ID NO: 276088 - DNA, 20 bp, Artificial Sequence
  Description of Artificial Sequence: Synthetic oligonucleotide
  Target: LAMA2; (-) strand; PAM type: YTN; PAM sequence: CTA
tggctctcaggataaaaacc

SEQ ID NO: 276089 - DNA, 20 bp, Artificial Sequence
  Description of Artificial Sequence: Synthetic oligonucleotide
  Target: LAMA2; (-) strand; PAM type: YTN; PAM sequence: TTC
ctatggctctcaggataaaa

SEQ ID NO: 276090 - DNA, 20 bp, Artificial Sequence
  Description of Artificial Sequence: Synthetic oligonucleotide
  Target: LAMA2; (-) strand; PAM type: YTN; PAM sequence: CTT
cctatggctctcaggataaa

SEQ ID NO: 276091 - DNA, 20 bp, Artificial Sequence
  Description of Artificial Sequence: Synthetic oligonucleotide
  Target: LAMA2; (-) strand; PAM type: YTN; PAM sequence: TTG
cttcctatggctctcaggat

SEQ ID NO: 276092 - DNA, 20 bp, Artificial Sequence
  Description of Artificial Sequence: Synthetic oligonucleotide
  Target: LAMA2; (-) strand; PAM type: YTN; PAM sequence: TTC
aattgcttcctatggctctc

SEQ ID NO: 276093 - DNA, 20 bp, Artificial Sequence
  Description of Artificial Sequence: Synthetic oligonucleotide
  Target: LAMA2; (-) strand; PAM type: YTN; PAM sequence: TTT
caattgcttcctatggctct

SEQ ID NO: 276094 - DNA, 20 bp, Artificial Sequence
  Description of Artificial Sequence: Synthetic oligonucleotide
  Target: LAMA2; (-) strand; PAM type: YTN; PAM sequence: CTG
caatatttcaattgcttcct

SEQ ID NO: 276095 - DNA, 20 bp, Artificial Sequence
  Description of Artificial Sequence: Synthetic oligonucleotide
  Target: LAMA2; (-) strand; PAM type: YTN; PAM sequence: TTA
acccatgactgcaatatttc

SEQ ID NO: 276096 - DNA, 20 bp, Artificial Sequence
  Description of Artificial Sequence: Synthetic oligonucleotide
  Target: LAMA2; (-) strand; PAM type: YTN; PAM sequence: TTT
aacccatgactgcaatattt

SEQ ID NO: 276097 - DNA, 20 bp, Artificial Sequence
  Description of Artificial Sequence: Synthetic oligonucleotide
  Target: LAMA2; (-) strand; PAM type: YTN; PAM sequence: TTT
taacccatgactgcaatatt

SEQ ID NO: 276098 - DNA, 20 bp, Artificial Sequence
  Description of Artificial Sequence: Synthetic oligonucleotide
  Target: LAMA2; (-) strand; PAM type: YTN; PAM sequence: TTA
ttttaacccatgactgcaat

SEQ ID NO: 276099 - DNA, 20 bp, Artificial Sequence
  Description of Artificial Sequence: Synthetic oligonucleotide
  Target: LAMA2; (-) strand; PAM type: YTN; PAM sequence: TTT
attttaacccatgactgcaa

SEQ ID NO: 276100 - DNA, 20 bp, Artificial Sequence
  Description of Artificial Sequence: Synthetic oligonucleotide
  Target: LAMA2; (-) strand; PAM type: YTN; PAM sequence: TTT
tattttaacccatgactgca

SEQ ID NO: 276101 - DNA, 20 bp, Artificial Sequence
  Description of Artificial Sequence: Synthetic oligonucleotide
  Target: LAMA2; (-) strand; PAM type: YTN; PAM sequence: CTG
caacattttattttaaccca

SEQ ID NO: 276102 - DNA, 20 bp, Artificial Sequence
  Description of Artificial Sequence: Synthetic oligonucleotide
  Target: LAMA2; (-) strand; PAM type: YTN; PAM sequence: TTC
tgcaacattttattttaacc

SEQ ID NO: 276103 - DNA, 20 bp, Artificial Sequence
  Description of Artificial Sequence: Synthetic oligonucleotide
  Target: LAMA2; (-) strand; PAM type: YTN; PAM sequence: CTC
aaattctgcaacattttatt

SEQ ID NO: 276104 - DNA, 20 bp, Artificial Sequence
  Description of Artificial Sequence: Synthetic oligonucleotide
  Target: LAMA2; (-) strand; PAM type: YTN; PAM sequence: TTA
agtgagccactcaaattctg

SEQ ID NO: 276105 - DNA, 20 bp, Artificial Sequence
  Description of Artificial Sequence: Synthetic oligonucleotide
  Target: LAMA2; (-) strand; PAM type: YTN; PAM sequence: TTT
aagtgagccactcaaattct

SEQ ID NO: 276106 - DNA, 20 bp, Artificial Sequence
  Description of Artificial Sequence: Synthetic oligonucleotide
  Target: LAMA2; (-) strand; PAM type: YTN; PAM sequence: TTC
agtttaagtgagccactcaa

SEQ ID NO: 276107 - DNA, 20 bp, Artificial Sequence
  Description of Artificial Sequence: Synthetic oligonucleotide
  Target: LAMA2; (-) strand; PAM type: YTN; PAM sequence: TTA
ttcagtttaagtgagccact

SEQ ID NO: 276108 - DNA, 20 bp, Artificial Sequence
  Description of Artificial Sequence: Synthetic oligonucleotide
  Target: LAMA2; (-) strand; PAM type: YTN; PAM sequence: TTT
attcagtttaagtgagccac

SEQ ID NO: 276109 - DNA, 20 bp, Artificial Sequence
  Description of Artificial Sequence: Synthetic oligonucleotide
  Target: LAMA2; (-) strand; PAM type: YTN; PAM sequence: TTC
cgataaaaaaccatttattc

SEQ ID NO: 276110 - DNA, 20 bp, Artificial Sequence
  Description of Artificial Sequence: Synthetic oligonucleotide
  Target: LAMA2; (-) strand; PAM type: YTN; PAM sequence: TTT
ccgataaaaaaccatttatt

SEQ ID NO: 276111 - DNA, 20 bp, Artificial Sequence
  Description of Artificial Sequence: Synthetic oligonucleotide
  Target: LAMA2; (-) strand; PAM type: YTN; PAM sequence: TTT
tccgataaaaaaccatttat

SEQ ID NO: 276112 - DNA, 20 bp, Artificial Sequence
  Description of Artificial Sequence: Synthetic oligonucleotide
  Target: LAMA2; (-) strand; PAM type: YTN; PAM sequence: CTA
ttttccgataaaaaaccatt

SEQ ID NO: 276113 - DNA, 20 bp, Artificial Sequence
  Description of Artificial Sequence: Synthetic oligonucleotide
  Target: LAMA2; (-) strand; PAM type: YTN; PAM sequence: CTA
atatcacactattttccgat

SEQ ID NO: 276114 - DNA, 20 bp, Artificial Sequence
  Description of Artificial Sequence: Synthetic oligonucleotide
  Target: LAMA2; (-) strand; PAM type: YTN; PAM sequence: CTA
gcctaatatcacactatttt

SEQ ID NO: 276115 - DNA, 20 bp, Artificial Sequence
  Description of Artificial Sequence: Synthetic oligonucleotide
  Target: LAMA2; (-) strand; PAM type: YTN; PAM sequence: TTC
tagcctaatatcacactatt

SEQ ID NO: 276116 - DNA, 20 bp, Artificial Sequence
  Description of Artificial Sequence: Synthetic oligonucleotide
  Target: LAMA2; (-) strand; PAM type: YTN; PAM sequence: TTT
ctagcctaatatcacactat

SEQ ID NO: 276117 - DNA, 20 bp, Artificial Sequence
  Description of Artificial Sequence: Synthetic oligonucleotide
  Target: LAMA2; (-) strand; PAM type: YTN; PAM sequence: TTT
tctagcctaatatcacacta

SEQ ID NO: 276118 - DNA, 20 bp, Artificial Sequence
  Description of Artificial Sequence: Synthetic oligonucleotide
  Target: LAMA2; (-) strand; PAM type: YTN; PAM sequence: CTT
ttctagcctaatatcacact

SEQ ID NO: 276119 - DNA, 20 bp, Artificial Sequence
  Description of Artificial Sequence: Synthetic oligonucleotide
  Target: LAMA2; (-) strand; PAM type: YTN; PAM sequence: CTA
cttttctagcctaatatcac

SEQ ID NO: 276120 - DNA, 20 bp, Artificial Sequence
  Description of Artificial Sequence: Synthetic oligonucleotide
  Target: LAMA2; (-) strand; PAM type: YTN; PAM sequence: TTA
tcccagcctacttttctagc

SEQ ID NO: 276121 - DNA, 20 bp, Artificial Sequence
  Description of Artificial Sequence: Synthetic oligonucleotide
  Target: LAMA2; (-) strand; PAM type: YTN; PAM sequence: CTG
acagatatgtagataaatat

SEQ ID NO: 276122 - DNA, 20 bp, Artificial Sequence
  Description of Artificial Sequence: Synthetic oligonucleotide
  Target: LAMA2; (-) strand; PAM type: YTN; PAM sequence: TTG
atatggtaggtacctgacag

SEQ ID NO: 276123 - DNA, 20 bp, Artificial Sequence
  Description of Artificial Sequence: Synthetic oligonucleotide
  Target: LAMA2; (-) strand; PAM type: YTN; PAM sequence: CTT
gatatggtaggtacctgaca

SEQ ID NO: 276124 - DNA, 20 bp, Artificial Sequence
  Description of Artificial Sequence: Synthetic oligonucleotide
  Target: LAMA2; (-) strand; PAM type: YTN; PAM sequence: TTA
ccaacagtaccttgatatgg

SEQ ID NO: 276125 - DNA, 20 bp, Artificial Sequence
  Description of Artificial Sequence: Synthetic oligonucleotide
  Target: LAMA2; (-) strand; PAM type: YTN; PAM sequence: CTG
gttaccaacagtaccttgat

SEQ ID NO: 276126 - DNA, 20 bp, Artificial Sequence
  Description of Artificial Sequence: Synthetic oligonucleotide
  Target: LAMA2; (-) strand; PAM type: YTN; PAM sequence: CTC
aaataccctggttaccaaca

SEQ ID NO: 276127 - DNA, 20 bp, Artificial Sequence
  Description of Artificial Sequence: Synthetic oligonucleotide
  Target: LAMA2; (-) strand; PAM type: YTN; PAM sequence: TTC
aacctcaaataccctggtta

SEQ ID NO: 276128 - DNA, 20 bp, Artificial Sequence
  Description of Artificial Sequence: Synthetic oligonucleotide
  Target: LAMA2; (-) strand; PAM type: YTN; PAM sequence: CTA
ttcaacctcaaataccctgg

SEQ ID NO: 276129 - DNA, 20 bp, Artificial Sequence
  Description of Artificial Sequence: Synthetic oligonucleotide
  Target: LAMA2; (-) strand; PAM type: YTN; PAM sequence: TTC
tattcaacctcaaataccct

SEQ ID NO: 276130 - DNA, 20 bp, Artificial Sequence
  Description of Artificial Sequence: Synthetic oligonucleotide
  Target: LAMA2; (-) strand; PAM type: YTN; PAM sequence: TTT
ctattcaacctcaaataccc

SEQ ID NO: 276131 - DNA, 20 bp, Artificial Sequence
  Description of Artificial Sequence: Synthetic oligonucleotide
  Target: LAMA2; (-) strand; PAM type: YTN; PAM sequence: TTG
aggccaggaatcatttctat

SEQ ID NO: 276132 - DNA, 20 bp, Artificial Sequence
  Description of Artificial Sequence: Synthetic oligonucleotide
  Target: LAMA2; (-) strand; PAM type: YTN; PAM sequence: TTT
gaggccaggaatcatttcta

SEQ ID NO: 276133 - DNA, 20 bp, Artificial Sequence
  Description of Artificial Sequence: Synthetic oligonucleotide
  Target: LAMA2; (-) strand; PAM type: YTN; PAM sequence: CTT
tgaggccaggaatcatttct

SEQ ID NO: 276134 - DNA, 20 bp, Artificial Sequence
  Description of Artificial Sequence: Synthetic oligonucleotide
  Target: LAMA2; (-) strand; PAM type: YTN; PAM sequence: TTC
tttgaggccaggaatcattt

SEQ ID NO: 276135 - DNA, 20 bp, Artificial Sequence
  Description of Artificial Sequence: Synthetic oligonucleotide
  Target: LAMA2; (-) strand; PAM type: YTN; PAM sequence: TTG
taaattctttgaggccagga

SEQ ID NO: 276136 - DNA, 20 bp, Artificial Sequence
  Description of Artificial Sequence: Synthetic oligonucleotide
  Target: LAMA2; (-) strand; PAM type: YTN; PAM sequence: TTC
aggaggttgtaaattctttg

SEQ ID NO: 276137 - DNA, 20 bp, Artificial Sequence
  Description of Artificial Sequence: Synthetic oligonucleotide
  Target: LAMA2; (-) strand; PAM type: YTN; PAM sequence: TTT
caggaggttgtaaattcttt

SEQ ID NO: 276138 - DNA, 20 bp, Artificial Sequence
  Description of Artificial Sequence: Synthetic oligonucleotide
  Target: LAMA2; (-) strand; PAM type: YTN; PAM sequence: TTT
tcaggaggttgtaaattctt

SEQ ID NO: 276139 - DNA, 20 bp, Artificial Sequence
  Description of Artificial Sequence: Synthetic oligonucleotide
  Target: LAMA2; (-) strand; PAM type: YTN; PAM sequence: TTT
ttcaggaggttgtaaattct

SEQ ID NO: 276140 - DNA, 20 bp, Artificial Sequence
  Description of Artificial Sequence: Synthetic oligonucleotide
  Target: LAMA2; (-) strand; PAM type: YTN; PAM sequence: CTG
aatttttcaggaggttgtaa

SEQ ID NO: 276141 - DNA, 20 bp, Artificial Sequence
  Description of Artificial Sequence: Synthetic oligonucleotide
  Target: LAMA2; (-) strand; PAM type: YTN; PAM sequence: TTG
acatgtctgaatttttcagg

SEQ ID NO: 276142 - DNA, 20 bp, Artificial Sequence
  Description of Artificial Sequence: Synthetic oligonucleotide
  Target: LAMA2; (-) strand; PAM type: YTN; PAM sequence: TTA
tgtagagtgaaaggttgaca

SEQ ID NO: 276143 - DNA, 20 bp, Artificial Sequence
  Description of Artificial Sequence: Synthetic oligonucleotide
  Target: LAMA2; (-) strand; PAM type: YTN; PAM sequence: TTA
tcatagtattatgtagagtg

SEQ ID NO: 276144 - DNA, 20 bp, Artificial Sequence
  Description of Artificial Sequence: Synthetic oligonucleotide
  Target: LAMA2; (-) strand; PAM type: YTN; PAM sequence: CTC
ccagtcaatattatcatagt

SEQ ID NO: 276145 - DNA, 20 bp, Artificial Sequence
  Description of Artificial Sequence: Synthetic oligonucleotide
  Target: LAMA2; (-) strand; PAM type: YTN; PAM sequence: CTG
aatctcccagtcaatattat

SEQ ID NO: 276146 - DNA, 20 bp, Artificial Sequence
  Description of Artificial Sequence: Synthetic oligonucleotide
  Target: LAMA2; (-) strand; PAM type: YTN; PAM sequence: TTG
ctgaatctcccagtcaatat

SEQ ID NO: 276147 - DNA, 20 bp, Artificial Sequence
  Description of Artificial Sequence: Synthetic oligonucleotide
  Target: LAMA2; (-) strand; PAM type: YTN; PAM sequence: TTT
gctgaatctcccagtcaata

SEQ ID NO: 276148 - DNA, 20 bp, Artificial Sequence
  Description of Artificial Sequence: Synthetic oligonucleotide
  Target: LAMA2; (-) strand; PAM type: YTN; PAM sequence: TTT
tgctgaatctcccagtcaat

SEQ ID NO: 276149 - DNA, 20 bp, Artificial Sequence
  Description of Artificial Sequence: Synthetic oligonucleotide
  Target: LAMA2; (-) strand; PAM type: YTN; PAM sequence: CTT
ttgctgaatctcccagtcaa

SEQ ID NO: 276150 - DNA, 20 bp, Artificial Sequence
  Description of Artificial Sequence: Synthetic oligonucleotide
  Target: LAMA2; (-) strand; PAM type: YTN; PAM sequence: TTG
tgaaacttttgctgaatctc

SEQ ID NO: 276151 - DNA, 20 bp, Artificial Sequence
  Description of Artificial Sequence: Synthetic oligonucleotide
  Target: LAMA2; (-) strand; PAM type: YTN; PAM sequence: TTT
gtgaaacttttgctgaatct

SEQ ID NO: 276152 - DNA, 20 bp, Artificial Sequence
  Description of Artificial Sequence: Synthetic oligonucleotide
  Target: LAMA2; (-) strand; PAM type: YTN; PAM sequence: TTT
tgtgaaacttttgctgaatc

SEQ ID NO: 276153 - DNA, 20 bp, Artificial Sequence
  Description of Artificial Sequence: Synthetic oligonucleotide
  Target: LAMA2; (-) strand; PAM type: YTN; PAM sequence: TTT
ttgtgaaacttttgctgaat

SEQ ID NO: 276154 - DNA, 20 bp, Artificial Sequence
  Description of Artificial Sequence: Synthetic oligonucleotide
  Target: LAMA2; (-) strand; PAM type: YTN; PAM sequence: TTA
tttttgtgaaacttttgctg

SEQ ID NO: 276155 - DNA, 20 bp, Artificial Sequence
  Description of Artificial Sequence: Synthetic oligonucleotide
  Target: LAMA2; (-) strand; PAM type: YTN; PAM sequence: CTG
ttatttttgtgaaacttttg

SEQ ID NO: 276156 - DNA, 20 bp, Artificial Sequence
  Description of Artificial Sequence: Synthetic oligonucleotide
  Target: LAMA2; (-) strand; PAM type: YTN; PAM sequence: CTA
tgatgctgttatttttgtga

SEQ ID NO: 276157 - DNA, 20 bp, Artificial Sequence
  Description of Artificial Sequence: Synthetic oligonucleotide
  Target: LAMA2; (-) strand; PAM type: YTN; PAM sequence: CTG
ctatgatgctgttatttttg

SEQ ID NO: 276158 - DNA, 20 bp, Artificial Sequence
  Description of Artificial Sequence: Synthetic oligonucleotide
  Target: LAMA2; (-) strand; PAM type: YTN; PAM sequence: TTC
tgctatgatgctgttatttt

SEQ ID NO: 276159 - DNA, 20 bp, Artificial Sequence
  Description of Artificial Sequence: Synthetic oligonucleotide
  Target: LAMA2; (-) strand; PAM type: YTN; PAM sequence: CTT
ctgctatgatgctgttattt

SEQ ID NO: 276160 - DNA, 20 bp, Artificial Sequence
  Description of Artificial Sequence: Synthetic oligonucleotide
  Target: LAMA2; (-) strand; PAM type: YTN; PAM sequence: CTC
cacttctgctatgatgctgt

SEQ ID NO: 276161 - DNA, 20 bp, Artificial Sequence
  Description of Artificial Sequence: Synthetic oligonucleotide
  Target: LAMA2; (-) strand; PAM type: YTN; PAM sequence: CTC
tccacttctgctatgatgct

SEQ ID NO: 276162 - DNA, 20 bp, Artificial Sequence
  Description of Artificial Sequence: Synthetic oligonucleotide
  Target: LAMA2; (-) strand; PAM type: YTN; PAM sequence: TTC
ctctccacttctgctatgat

SEQ ID NO: 276163 - DNA, 20 bp, Artificial Sequence
  Description of Artificial Sequence: Synthetic oligonucleotide
  Target: LAMA2; (-) strand; PAM type: YTN; PAM sequence: TTC
caattcctctccacttctgc

SEQ ID NO: 276164 - DNA, 20 bp, Artificial Sequence
  Description of Artificial Sequence: Synthetic oligonucleotide
  Target: LAMA2; (-) strand; PAM type: YTN; PAM sequence: CTT
ccaattcctctccacttctg

SEQ ID NO: 276165 - DNA, 20 bp, Artificial Sequence
  Description of Artificial Sequence: Synthetic oligonucleotide
  Target: LAMA2; (-) strand; PAM type: YTN; PAM sequence: TTC
ttccaattcctctccacttc

SEQ ID NO: 276166 - DNA, 20 bp, Artificial Sequence
  Description of Artificial Sequence: Synthetic oligonucleotide
  Target: LAMA2; (-) strand; PAM type: YTN; PAM sequence: TTT
cttccaattcctctccactt

SEQ ID NO: 276167 - DNA, 20 bp, Artificial Sequence
  Description of Artificial Sequence: Synthetic oligonucleotide
  Target: LAMA2; (-) strand; PAM type: YTN; PAM sequence: CTT
tcttccaattcctctccact

SEQ ID NO: 276168 - DNA, 20 bp, Artificial Sequence
  Description of Artificial Sequence: Synthetic oligonucleotide
  Target: LAMA2; (-) strand; PAM type: YTN; PAM sequence: CTG
tctttcttccaattcctctc

SEQ ID NO: 276169 - DNA, 20 bp, Artificial Sequence
  Description of Artificial Sequence: Synthetic oligonucleotide
  Target: LAMA2; (-) strand; PAM type: YTN; PAM sequence: CTC
tgtctttcttccaattcctc

SEQ ID NO: 276170 - DNA, 20 bp, Artificial Sequence
  Description of Artificial Sequence: Synthetic oligonucleotide
  Target: LAMA2; (-) strand; PAM type: YTN; PAM sequence: TTG
ctctgtctttcttccaattc

SEQ ID NO: 276171 - DNA, 20 bp, Artificial Sequence
  Description of Artificial Sequence: Synthetic oligonucleotide
  Target: LAMA2; (-) strand; PAM type: YTN; PAM sequence: CTG
ttgctctgtctttcttccaa

SEQ ID NO: 276172 - DNA, 20 bp, Artificial Sequence
  Description of Artificial Sequence: Synthetic oligonucleotide
  Target: LAMA2; (-) strand; PAM type: YTN; PAM sequence: TTC
ctgttgctctgtctttcttc

SEQ ID NO: 276173 - DNA, 20 bp, Artificial Sequence
  Description of Artificial Sequence: Synthetic oligonucleotide
  Target: LAMA2; (-) strand; PAM type: YTN; PAM sequence: CTG
gggttcctgttgctctgtct

SEQ ID NO: 276174 - DNA, 20 bp, Artificial Sequence
  Description of Artificial Sequence: Synthetic oligonucleotide
  Target: LAMA2; (-) strand; PAM type: YTN; PAM sequence: CTG
gctggggttcctgttgctct

SEQ ID NO: 276175 - DNA, 20 bp, Artificial Sequence
  Description of Artificial Sequence: Synthetic oligonucleotide
  Target: LAMA2; (-) strand; PAM type: YTN; PAM sequence: CTC
tggctggggttcctgttgct

SEQ ID NO: 276176 - DNA, 20 bp, Artificial Sequence
  Description of Artificial Sequence: Synthetic oligonucleotide
  Target: LAMA2; (-) strand; PAM type: YTN; PAM sequence: TTC
caaagctctggctggggttc

SEQ ID NO: 276177 - DNA, 20 bp, Artificial Sequence
  Description of Artificial Sequence: Synthetic oligonucleotide
  Target: LAMA2; (-) strand; PAM type: YTN; PAM sequence: CTT
ccaaagctctggctggggtt

SEQ ID NO: 276178 - DNA, 20 bp, Artificial Sequence
  Description of Artificial Sequence: Synthetic oligonucleotide
  Target: LAMA2; (-) strand; PAM type: YTN; PAM sequence: TTA
cacttccaaagctctggctg

SEQ ID NO: 276179 - DNA, 20 bp, Artificial Sequence
  Description of Artificial Sequence: Synthetic oligonucleotide
  Target: LAMA2; (-) strand; PAM type: YTN; PAM sequence: CTT
acacttccaaagctctggct

SEQ ID NO: 276180 - DNA, 20 bp, Artificial Sequence
  Description of Artificial Sequence: Synthetic oligonucleotide
  Target: LAMA2; (-) strand; PAM type: YTN; PAM sequence: CTA
agatcaccttacacttccaa

SEQ ID NO: 276181 - DNA, 20 bp, Artificial Sequence
  Description of Artificial Sequence: Synthetic oligonucleotide
  Target: LAMA2; (-) strand; PAM type: YTN; PAM sequence: TTC
ctaagatcaccttacacttc

SEQ ID NO: 276182 - DNA, 20 bp, Artificial Sequence
  Description of Artificial Sequence: Synthetic oligonucleotide
  Target: LAMA2; (-) strand; PAM type: YTN; PAM sequence: CTT
cctaagatcaccttacactt

SEQ ID NO: 276183 - DNA, 20 bp, Artificial Sequence
  Description of Artificial Sequence: Synthetic oligonucleotide
  Target: LAMA2; (-) strand; PAM type: YTN; PAM sequence: CTG
gacacttcctaagatcacct

SEQ ID NO: 276184 - DNA, 20 bp, Artificial Sequence
  Description of Artificial Sequence: Synthetic oligonucleotide
  Target: LAMA2; (-) strand; PAM type: YTN; PAM sequence: CTG
tactggacacttcctaagat

SEQ ID NO: 276185 - DNA, 20 bp, Artificial Sequence
  Description of Artificial Sequence: Synthetic oligonucleotide
  Target: LAMA2; (-) strand; PAM type: YTN; PAM sequence: CTG
ctgtactggacacttcctaa

SEQ ID NO: 276186 - DNA, 20 bp, Artificial Sequence
  Description of Artificial Sequence: Synthetic oligonucleotide
  Target: LAMA2; (-) strand; PAM type: YTN; PAM sequence: TTC
tgctgtactggacacttcct

SEQ ID NO: 276187 - DNA, 20 bp, Artificial Sequence
  Description of Artificial Sequence: Synthetic oligonucleotide
  Target: LAMA2; (-) strand; PAM type: YTN; PAM sequence: TTT
ctgctgtactggacacttcc

SEQ ID NO: 276188 - DNA, 20 bp, Artificial Sequence
  Description of Artificial Sequence: Synthetic oligonucleotide
  Target: LAMA2; (-) strand; PAM type: YTN; PAM sequence: TTT
tctgctgtactggacacttc

SEQ ID NO: 276189 - DNA, 20 bp, Artificial Sequence
  Description of Artificial Sequence: Synthetic oligonucleotide
  Target: LAMA2; (-) strand; PAM type: YTN; PAM sequence: TTT
ttctgctgtactggacactt

SEQ ID NO: 276190 - DNA, 20 bp, Artificial Sequence
  Description of Artificial Sequence: Synthetic oligonucleotide
  Target: LAMA2; (-) strand; PAM type: YTN; PAM sequence: TTG
aaagtttttctgctgtactg

SEQ ID NO: 276191 - DNA, 20 bp, Artificial Sequence
  Description of Artificial Sequence: Synthetic oligonucleotide
  Target: LAMA2; (-) strand; PAM type: YTN; PAM sequence: TTT
gaaagtttttctgctgtact

SEQ ID NO: 276192 - DNA, 20 bp, Artificial Sequence
  Description of Artificial Sequence: Synthetic oligonucleotide
  Target: LAMA2; (-) strand; PAM type: YTN; PAM sequence: TTT
tgaaagtttttctgctgtac

SEQ ID NO: 276193 - DNA, 20 bp, Artificial Sequence
  Description of Artificial Sequence: Synthetic oligonucleotide
  Target: LAMA2; (-) strand; PAM type: YTN; PAM sequence: CTT
ttgaaagtttttctgctgta

SEQ ID NO: 276194 - DNA, 20 bp, Artificial Sequence
  Description of Artificial Sequence: Synthetic oligonucleotide
  Target: LAMA2; (-) strand; PAM type: YTN; PAM sequence: TTA
cgtagcttttgaaagttttt

SEQ ID NO: 276195 - DNA, 20 bp, Artificial Sequence
  Description of Artificial Sequence: Synthetic oligonucleotide
  Target: LAMA2; (-) strand; PAM type: YTN; PAM sequence: TTT
acgtagcttttgaaagtttt

SEQ ID NO: 276196 - DNA, 20 bp, Artificial Sequence
  Description of Artificial Sequence: Synthetic oligonucleotide
  Target: LAMA2; (-) strand; PAM type: YTN; PAM sequence: TTT
tacgtagcttttgaaagttt

SEQ ID NO: 276197 - DNA, 20 bp, Artificial Sequence
  Description of Artificial Sequence: Synthetic oligonucleotide
  Target: LAMA2; (-) strand; PAM type: YTN; PAM sequence: TTT
ttacgtagcttttgaaagtt

SEQ ID NO: 276198 - DNA, 20 bp, Artificial Sequence
  Description of Artificial Sequence: Synthetic oligonucleotide
  Target: LAMA2; (-) strand; PAM type: YTN; PAM sequence: CTA
cagatttttacgtagctttt

SEQ ID NO: 276199 - DNA, 20 bp, Artificial Sequence
  Description of Artificial Sequence: Synthetic oligonucleotide
  Target: LAMA2; (-) strand; PAM type: YTN; PAM sequence: CTG
ctacagatttttacgtagct

SEQ ID NO: 276200 - DNA, 20 bp, Artificial Sequence
  Description of Artificial Sequence: Synthetic oligonucleotide
  Target: LAMA2; (-) strand; PAM type: YTN; PAM sequence: CTC
tgctacagatttttacgtag

SEQ ID NO: 276201 - DNA, 20 bp, Artificial Sequence
  Description of Artificial Sequence: Synthetic oligonucleotide
  Target: LAMA2; (-) strand; PAM type: YTN; PAM sequence: TTC
tctgctacagatttttacgt

SEQ ID NO: 276202 - DNA, 20 bp, Artificial Sequence
  Description of Artificial Sequence: Synthetic oligonucleotide
  Target: LAMA2; (-) strand; PAM type: YTN; PAM sequence: CTT
ctctgctacagatttttacg

SEQ ID NO: 276203 - DNA, 20 bp, Artificial Sequence
  Description of Artificial Sequence: Synthetic oligonucleotide
  Target: LAMA2; (-) strand; PAM type: YTN; PAM sequence: TTC
cagagccttctctgctacag

SEQ ID NO: 276204 - DNA, 20 bp, Artificial Sequence
  Description of Artificial Sequence: Synthetic oligonucleotide
  Target: LAMA2; (-) strand; PAM type: YTN; PAM sequence: CTC
caaattccagagccttctct

SEQ ID NO: 276205 - DNA, 20 bp, Artificial Sequence
  Description of Artificial Sequence: Synthetic oligonucleotide
  Target: LAMA2; (-) strand; PAM type: YTN; PAM sequence: CTG
gctccaaattccagagcctt

SEQ ID NO: 276206 - DNA, 20 bp, Artificial Sequence
  Description of Artificial Sequence: Synthetic oligonucleotide
  Target: LAMA2; (-) strand; PAM type: YTN; PAM sequence: CTA
tgatctggctccaaattcca

SEQ ID NO: 276207 - DNA, 20 bp, Artificial Sequence
  Description of Artificial Sequence: Synthetic oligonucleotide
  Target: LAMA2; (-) strand; PAM type: YTN; PAM sequence: TTC
tatgatctggctccaaattc

SEQ ID NO: 276208 - DNA, 20 bp, Artificial Sequence
  Description of Artificial Sequence: Synthetic oligonucleotide
  Target: LAMA2; (-) strand; PAM type: YTN; PAM sequence: CTT
ctatgatctggctccaaatt

SEQ ID NO: 276209 - DNA, 20 bp, Artificial Sequence
  Description of Artificial Sequence: Synthetic oligonucleotide
  Target: LAMA2; (-) strand; PAM type: YTN; PAM sequence: CTG
catccaaagccttctatgat

SEQ ID NO: 276210 - DNA, 20 bp, Artificial Sequence
  Description of Artificial Sequence: Synthetic oligonucleotide
  Target: LAMA2; (-) strand; PAM type: YTN; PAM sequence: TTG
gctgcatccaaagccttcta

SEQ ID NO: 276211 - DNA, 20 bp, Artificial Sequence
  Description of Artificial Sequence: Synthetic oligonucleotide
  Target: LAMA2; (-) strand; PAM type: YTN; PAM sequence: CTA
gttggctgcatccaaagcct

SEQ ID NO: 276212 - DNA, 20 bp, Artificial Sequence
  Description of Artificial Sequence: Synthetic oligonucleotide
  Target: LAMA2; (-) strand; PAM type: YTN; PAM sequence: CTC
catcaccatctagttggctg

SEQ ID NO: 276213 - DNA, 20 bp, Artificial Sequence
  Description of Artificial Sequence: Synthetic oligonucleotide
  Target: LAMA2; (-) strand; PAM type: YTN; PAM sequence: TTC
caactccatcaccatctagt

SEQ ID NO: 276214 - DNA, 20 bp, Artificial Sequence
  Description of Artificial Sequence: Synthetic oligonucleotide
  Target: LAMA2; (-) strand; PAM type: YTN; PAM sequence: TTT
ccaactccatcaccatctag

SEQ ID NO: 276215 - DNA, 20 bp, Artificial Sequence
  Description of Artificial Sequence: Synthetic oligonucleotide
  Target: LAMA2; (-) strand; PAM type: YTN; PAM sequence: CTT
tccaactccatcaccatcta

SEQ ID NO: 276216 - DNA, 20 bp, Artificial Sequence
  Description of Artificial Sequence: Synthetic oligonucleotide
  Target: LAMA2; (-) strand; PAM type: YTN; PAM sequence: CTG
gaaatgcctttccaactcca

SEQ ID NO: 276217 - DNA, 20 bp, Artificial Sequence
  Description of Artificial Sequence: Synthetic oligonucleotide
  Target: LAMA2; (-) strand; PAM type: YTN; PAM sequence: CTG
ctggaaatgcctttccaact

SEQ ID NO: 276218 - DNA, 20 bp, Artificial Sequence
  Description of Artificial Sequence: Synthetic oligonucleotide
  Target: LAMA2; (-) strand; PAM type: YTN; PAM sequence: CTC
cactgctggaaatgcctttc

SEQ ID NO: 276219 - DNA, 20 bp, Artificial Sequence
  Description of Artificial Sequence: Synthetic oligonucleotide
  Target: LAMA2; (-) strand; PAM type: YTN; PAM sequence: CTC
tccactgctggaaatgcctt

SEQ ID NO: 276220 - DNA, 20 bp, Artificial Sequence
  Description of Artificial Sequence: Synthetic oligonucleotide
  Target: LAMA2; (-) strand; PAM type: YTN; PAM sequence: CTC
tctccactgctggaaatgcc

SEQ ID NO: 276221 - DNA, 20 bp, Artificial Sequence
  Description of Artificial Sequence: Synthetic oligonucleotide
  Target: LAMA2; (-) strand; PAM type: YTN; PAM sequence: TTA
gccctctctccactgctgga

SEQ ID NO: 276222 - DNA, 20 bp, Artificial Sequence
  Description of Artificial Sequence: Synthetic oligonucleotide
  Target: LAMA2; (-) strand; PAM type: YTN; PAM sequence: CTT
agccctctctccactgctgg

SEQ ID NO: 276223 - DNA, 20 bp, Artificial Sequence
  Description of Artificial Sequence: Synthetic oligonucleotide
  Target: LAMA2; (-) strand; PAM type: YTN; PAM sequence: TTC
ccttagccctctctccactg

SEQ ID NO: 276224 - DNA, 20 bp, Artificial Sequence
  Description of Artificial Sequence: Synthetic oligonucleotide
  Target: LAMA2; (-) strand; PAM type: YTN; PAM sequence: TTC
ccatgacgtccccagttccc

SEQ ID NO: 276225 - DNA, 20 bp, Artificial Sequence
  Description of Artificial Sequence: Synthetic oligonucleotide
  Target: LAMA2; (-) strand; PAM type: YTN; PAM sequence: CTT
cccatgacgtccccagttcc

SEQ ID NO: 276226 - DNA, 20 bp, Artificial Sequence
  Description of Artificial Sequence: Synthetic oligonucleotide
  Target: LAMA2; (-) strand; PAM type: YTN; PAM sequence: TTC
ttcccatgacgtccccagtt

SEQ ID NO: 276227 - DNA, 20 bp, Artificial Sequence
  Description of Artificial Sequence: Synthetic oligonucleotide
  Target: LAMA2; (-) strand; PAM type: YTN; PAM sequence: TTT
cttcccatgacgtccccagt

SEQ ID NO: 276228 - DNA, 20 bp, Artificial Sequence
  Description of Artificial Sequence: Synthetic oligonucleotide
  Target: LAMA2; (-) strand; PAM type: YTN; PAM sequence: TTT
tcttcccatgacgtccccag

SEQ ID NO: 276229 - DNA, 20 bp, Artificial Sequence
  Description of Artificial Sequence: Synthetic oligonucleotide
  Target: LAMA2; (-) strand; PAM type: YTN; PAM sequence: CTT
ttcttcccatgacgtcccca

SEQ ID NO: 276230 - DNA, 20 bp, Artificial Sequence
  Description of Artificial Sequence: Synthetic oligonucleotide
  Target: LAMA2; (-) strand; PAM type: YTN; PAM sequence: CTC
ttttcttcccatgacgtccc

SEQ ID NO: 276231 - DNA, 20 bp, Artificial Sequence
  Description of Artificial Sequence: Synthetic oligonucleotide
  Target: LAMA2; (-) strand; PAM type: YTN; PAM sequence: TTC
tcttttcttcccatgacgtc

SEQ ID NO: 276232 - DNA, 20 bp, Artificial Sequence
  Description of Artificial Sequence: Synthetic oligonucleotide
  Target: LAMA2; (-) strand; PAM type: YTN; PAM sequence: CTT
ctcttttcttcccatgacgt

SEQ ID NO: 276233 - DNA, 20 bp, Artificial Sequence
  Description of Artificial Sequence: Synthetic oligonucleotide
  Target: LAMA2; (-) strand; PAM type: YTN; PAM sequence: TTG
tcttctcttttcttcccatg

SEQ ID NO: 276234 - DNA, 20 bp, Artificial Sequence
  Description of Artificial Sequence: Synthetic oligonucleotide
  Target: LAMA2; (-) strand; PAM type: YTN; PAM sequence: TTT
gtcttctcttttcttcccat

SEQ ID NO: 276235 - DNA, 20 bp, Artificial Sequence
  Description of Artificial Sequence: Synthetic oligonucleotide
  Target: LAMA2; (-) strand; PAM type: YTN; PAM sequence: CTG
aaatatttgtcttctctttt

SEQ ID NO: 276236 - DNA, 20 bp, Artificial Sequence
  Description of Artificial Sequence: Synthetic oligonucleotide
  Target: LAMA2; (-) strand; PAM type: YTN; PAM sequence: TTC
actgaaatatttgtcttctc

SEQ ID NO: 276237 - DNA, 20 bp, Artificial Sequence
  Description of Artificial Sequence: Synthetic oligonucleotide
  Target: LAMA2; (-) strand; PAM type: YTN; PAM sequence: CTT
cactgaaatatttgtcttct

SEQ ID NO: 276238 - DNA, 20 bp, Artificial Sequence
  Description of Artificial Sequence: Synthetic oligonucleotide
  Target: LAMA2; (-) strand; PAM type: YTN; PAM sequence: TTG
cttcactgaaatatttgtct

SEQ ID NO: 276239 - DNA, 20 bp, Artificial Sequence
  Description of Artificial Sequence: Synthetic oligonucleotide
  Target: LAMA2; (-) strand; PAM type: YTN; PAM sequence: TTT
gcttcactgaaatatttgtc

SEQ ID NO: 276240 - DNA, 20 bp, Artificial Sequence
  Description of Artificial Sequence: Synthetic oligonucleotide
  Target: LAMA2; (-) strand; PAM type: YTN; PAM sequence: TTT
tgcttcactgaaatatttgt

SEQ ID NO: 276241 - DNA, 20 bp, Artificial Sequence
  Description of Artificial Sequence: Synthetic oligonucleotide
  Target: LAMA2; (-) strand; PAM type: YTN; PAM sequence: TTA
ttttgcttcactgaaatatt

SEQ ID NO: 276242 - DNA, 20 bp, Artificial Sequence
  Description of Artificial Sequence: Synthetic oligonucleotide
  Target: LAMA2; (-) strand; PAM type: YTN; PAM sequence: CTC
aatacatattattttgcttc

SEQ ID NO: 276243 - DNA, 20 bp, Artificial Sequence
  Description of Artificial Sequence: Synthetic oligonucleotide
  Target: LAMA2; (-) strand; PAM type: YTN; PAM sequence: CTG
ctcaatacatattattttgc

SEQ ID NO: 276244 - DNA, 20 bp, Artificial Sequence
  Description of Artificial Sequence: Synthetic oligonucleotide
  Target: LAMA2; (-) strand; PAM type: YTN; PAM sequence: TTG
gggatagactgctcaataca

SEQ ID NO: 276245 - DNA, 20 bp, Artificial Sequence
  Description of Artificial Sequence: Synthetic oligonucleotide
  Target: LAMA2; (-) strand; PAM type: YTN; PAM sequence: TTT
ggggatagactgctcaatac

SEQ ID NO: 276246 - DNA, 20 bp, Artificial Sequence
  Description of Artificial Sequence: Synthetic oligonucleotide
  Target: LAMA2; (-) strand; PAM type: YTN; PAM sequence: TTG
gcaaggatataatggtagat

SEQ ID NO: 276247 - DNA, 20 bp, Artificial Sequence
  Description of Artificial Sequence: Synthetic oligonucleotide
  Target: LAMA2; (-) strand; PAM type: YTN; PAM sequence: TTT
ggcaaggatataatggtaga

SEQ ID NO: 276248 - DNA, 20 bp, Artificial Sequence
  Description of Artificial Sequence: Synthetic oligonucleotide
  Target: LAMA2; (-) strand; PAM type: YTN; PAM sequence: CTT
tggcaaggatataatggtag

SEQ ID NO: 276249 - DNA, 20 bp, Artificial Sequence
  Description of Artificial Sequence: Synthetic oligonucleotide
  Target: LAMA2; (-) strand; PAM type: YTN; PAM sequence: TTC
tttggcaaggatataatggt

SEQ ID NO: 276250 - DNA, 20 bp, Artificial Sequence
  Description of Artificial Sequence: Synthetic oligonucleotide
  Target: LAMA2; (-) strand; PAM type: YTN; PAM sequence: CTT
ctttggcaaggatataatgg

SEQ ID NO: 276251 - DNA, 20 bp, Artificial Sequence
  Description of Artificial Sequence: Synthetic oligonucleotide
  Target: LAMA2; (-) strand; PAM type: YTN; PAM sequence: CTG
ccttctttggcaaggatata

SEQ ID NO: 276252 - DNA, 20 bp, Artificial Sequence
  Description of Artificial Sequence: Synthetic oligonucleotide
  Target: LAMA2; (-) strand; PAM type: YTN; PAM sequence: TTG
atccgcactgccttctttgg

SEQ ID NO: 276253 - DNA, 20 bp, Artificial Sequence
  Description of Artificial Sequence: Synthetic oligonucleotide
  Target: LAMA2; (-) strand; PAM type: YTN; PAM sequence: CTT
gatccgcactgccttctttg

SEQ ID NO: 276254 - DNA, 20 bp, Artificial Sequence
  Description of Artificial Sequence: Synthetic oligonucleotide
  Target: LAMA2; (-) strand; PAM type: YTN; PAM sequence: TTA
cttgatccgcactgccttct

SEQ ID NO: 276255 - DNA, 20 bp, Artificial Sequence
  Description of Artificial Sequence: Synthetic oligonucleotide
  Target: LAMA2; (-) strand; PAM type: YTN; PAM sequence: TTT
acttgatccgcactgccttc

SEQ ID NO: 276256 - DNA, 20 bp, Artificial Sequence
  Description of Artificial Sequence: Synthetic oligonucleotide
  Target: LAMA2; (-) strand; PAM type: YTN; PAM sequence: CTT
tacttgatccgcactgcctt

SEQ ID NO: 276257 - DNA, 20 bp, Artificial Sequence
  Description of Artificial Sequence: Synthetic oligonucleotide
  Target: LAMA2; (-) strand; PAM type: YTN; PAM sequence: CTC
tttacttgatccgcactgcc

SEQ ID NO: 276258 - DNA, 20 bp, Artificial Sequence
  Description of Artificial Sequence: Synthetic oligonucleotide
  Target: LAMA2; (-) strand; PAM type: YTN; PAM sequence: TTA
ctctttacttgatccgcact

SEQ ID NO: 276259 - DNA, 20 bp, Artificial Sequence
  Description of Artificial Sequence: Synthetic oligonucleotide
  Target: LAMA2; (-) strand; PAM type: YTN; PAM sequence: CTT
actctttacttgatccgcac

SEQ ID NO: 276260 - DNA, 20 bp, Artificial Sequence
  Description of Artificial Sequence: Synthetic oligonucleotide
  Target: LAMA2; (-) strand; PAM type: YTN; PAM sequence: TTA
tgtagcaacttactctttac

SEQ ID NO: 276261 - DNA, 20 bp, Artificial Sequence
  Description of Artificial Sequence: Synthetic oligonucleotide
  Target: LAMA2; (-) strand; PAM type: YTN; PAM sequence: TTT
atgtagcaacttactcttta

SEQ ID NO: 276262 - DNA, 20 bp, Artificial Sequence
  Description of Artificial Sequence: Synthetic oligonucleotide
  Target: LAMA2; (-) strand; PAM type: YTN; PAM sequence: CTT
tatgtagcaacttactcttt

SEQ ID NO: 276263 - DNA, 20 bp, Artificial Sequence
  Description of Artificial Sequence: Synthetic oligonucleotide
  Target: LAMA2; (-) strand; PAM type: YTN; PAM sequence: TTC
tttatgtagcaacttactct

SEQ ID NO: 276264 - DNA, 20 bp, Artificial Sequence
  Description of Artificial Sequence: Synthetic oligonucleotide
  Target: LAMA2; (-) strand; PAM type: YTN; PAM sequence: CTG
tgtattctttatgtagcaac

SEQ ID NO: 276265 - DNA, 20 bp, Artificial Sequence
  Description of Artificial Sequence: Synthetic oligonucleotide
  Target: LAMA2; (-) strand; PAM type: YTN; PAM sequence: CTG
gcctgtgtattctttatgta

SEQ ID NO: 276266 - DNA, 20 bp, Artificial Sequence
  Description of Artificial Sequence: Synthetic oligonucleotide
  Target: LAMA2; (-) strand; PAM type: YTN; PAM sequence: CTC
aggctggcctgtgtattctt

SEQ ID NO: 276267 - DNA, 20 bp, Artificial Sequence
  Description of Artificial Sequence: Synthetic oligonucleotide
  Target: LAMA2; (-) strand; PAM type: YTN; PAM sequence: TTG
ctcaggctggcctgtgtatt

SEQ ID NO: 276268 - DNA, 20 bp, Artificial Sequence
  Description of Artificial Sequence: Synthetic oligonucleotide
  Target: LAMA2; (-) strand; PAM type: YTN; PAM sequence: CTA
tagagatagggtgtcaccat

SEQ ID NO: 276269 - DNA, 20 bp, Artificial Sequence
  Description of Artificial Sequence: Synthetic oligonucleotide
  Target: LAMA2; (-) strand; PAM type: YTN; PAM sequence: TTC
tatagagatagggtgtcacc

SEQ ID NO: 276270 - DNA, 20 bp, Artificial Sequence
  Description of Artificial Sequence: Synthetic oligonucleotide
  Target: LAMA2; (-) strand; PAM type: YTN; PAM sequence: TTT
ctatagagatagggtgtcac

SEQ ID NO: 276271 - DNA, 20 bp, Artificial Sequence
  Description of Artificial Sequence: Synthetic oligonucleotide
  Target: LAMA2; (-) strand; PAM type: YTN; PAM sequence: TTT
tctatagagatagggtgtca

SEQ ID NO: 276272 - DNA, 20 bp, Artificial Sequence
  Description of Artificial Sequence: Synthetic oligonucleotide
  Target: LAMA2; (-) strand; PAM type: YTN; PAM sequence: TTT
ttctatagagatagggtgtc

SEQ ID NO: 276273 - DNA, 20 bp, Artificial Sequence
  Description of Artificial Sequence: Synthetic oligonucleotide
  Target: LAMA2; (-) strand; PAM type: YTN; PAM sequence: TTG
tatttttctatagagatagg

SEQ ID NO: 276274 - DNA, 20 bp, Artificial Sequence
  Description of Artificial Sequence: Synthetic oligonucleotide
  Target: LAMA2; (-) strand; PAM type: YTN; PAM sequence: TTT
gtatttttctatagagatag

SEQ ID NO: 276275 - DNA, 20 bp, Artificial Sequence
  Description of Artificial Sequence: Synthetic oligonucleotide
  Target: LAMA2; (-) strand; PAM type: YTN; PAM sequence: TTT
tgtatttttctatagagata

SEQ ID NO: 276276 - DNA, 20 bp, Artificial Sequence
  Description of Artificial Sequence: Synthetic oligonucleotide
  Target: LAMA2; (-) strand; PAM type: YTN; PAM sequence: TTT
ttgtatttttctatagagat

SEQ ID NO: 276277 - DNA, 20 bp, Artificial Sequence
  Description of Artificial Sequence: Synthetic oligonucleotide
  Target: LAMA2; (-) strand; PAM type: YTN; PAM sequence: CTA
atttttgtatttttctatag

SEQ ID NO: 276278 - DNA, 20 bp, Artificial Sequence
  Description of Artificial Sequence: Synthetic oligonucleotide
  Target: LAMA2; (-) strand; PAM type: YTN; PAM sequence: CTG
ggaccacaggcatgcaccac

SEQ ID NO: 276279 - DNA, 20 bp, Artificial Sequence
  Description of Artificial Sequence: Synthetic oligonucleotide
  Target: LAMA2; (-) strand; PAM type: YTN; PAM sequence: CTC
caagtagctgggaccacagg

SEQ ID NO: 276280 - DNA, 20 bp, Artificial Sequence
  Description of Artificial Sequence: Synthetic oligonucleotide
  Target: LAMA2; (-) strand; PAM type: YTN; PAM sequence: CTC
agcctccaagtagctgggac

SEQ ID NO: 276281 - DNA, 20 bp, Artificial Sequence
  Description of Artificial Sequence: Synthetic oligonucleotide
  Target: LAMA2; (-) strand; PAM type: YTN; PAM sequence: CTC
ccacctcagcctccaagtag

SEQ ID NO: 276282 - DNA, 20 bp, Artificial Sequence
  Description of Artificial Sequence: Synthetic oligonucleotide
  Target: LAMA2; (-) strand; PAM type: YTN; PAM sequence: CTC
aagcaatcctcccacctcag

SEQ ID NO: 276283 - DNA, 20 bp, Artificial Sequence
  Description of Artificial Sequence: Synthetic oligonucleotide
  Target: LAMA2; (-) strand; PAM type: YTN; PAM sequence: CTG
ggctcaagcaatcctcccac

SEQ ID NO: 276284 - DNA, 20 bp, Artificial Sequence
  Description of Artificial Sequence: Synthetic oligonucleotide
  Target: LAMA2; (-) strand; PAM type: YTN; PAM sequence: TTC
tgggctcaagcaatcctccc

SEQ ID NO: 276285 - DNA, 20 bp, Artificial Sequence
  Description of Artificial Sequence: Synthetic oligonucleotide
  Target: LAMA2; (-) strand; PAM type: YTN; PAM sequence: CTT
ctgggctcaagcaatcctcc

SEQ ID NO: 276286 - DNA, 20 bp, Artificial Sequence
  Description of Artificial Sequence: Synthetic oligonucleotide
  Target: LAMA2; (-) strand; PAM type: YTN; PAM sequence: CTC
aaacttctgggctcaagcaa

SEQ ID NO: 276287 - DNA, 20 bp, Artificial Sequence
  Description of Artificial Sequence: Synthetic oligonucleotide
  Target: LAMA2; (-) strand; PAM type: YTN; PAM sequence: CTG
caggctcaaacttctgggct

SEQ ID NO: 276288 - DNA, 20 bp, Artificial Sequence
  Description of Artificial Sequence: Synthetic oligonucleotide
  Target: LAMA2; (-) strand; PAM type: YTN; PAM sequence: CTC
actgcaggctcaaacttctg

SEQ ID NO: 276289 - DNA, 20 bp, Artificial Sequence
  Description of Artificial Sequence: Synthetic oligonucleotide
  Target: LAMA2; (-) strand; PAM type: YTN; PAM sequence: CTG
tggcatgatcacagctcact

SEQ ID NO: 276290 - DNA, 20 bp, Artificial Sequence
  Description of Artificial Sequence: Synthetic oligonucleotide
  Target: LAMA2; (-) strand; PAM type: YTN; PAM sequence: CTG
gagtgctgtggcatgatcac

SEQ ID NO: 276291 - DNA, 20 bp, Artificial Sequence
  Description of Artificial Sequence: Synthetic oligonucleotide
  Target: LAMA2; (-) strand; PAM type: YTN; PAM sequence: CTG
tcatccaggctggagtgctg

SEQ ID NO: 276292 - DNA, 20 bp, Artificial Sequence
  Description of Artificial Sequence: Synthetic oligonucleotide
  Target: LAMA2; (-) strand; PAM type: YTN; PAM sequence: CTC
actgtcatccaggctggagt

SEQ ID NO: 276293 - DNA, 20 bp, Artificial Sequence
  Description of Artificial Sequence: Synthetic oligonucleotide
  Target: LAMA2; (-) strand; PAM type: YTN; PAM sequence: TTG
tctcactgtcatccaggctg

SEQ ID NO: 276294 - DNA, 20 bp, Artificial Sequence
  Description of Artificial Sequence: Synthetic oligonucleotide
  Target: LAMA2; (-) strand; PAM type: YTN; PAM sequence: CTC
attgtctcactgtcatccag

SEQ ID NO: 276295 - DNA, 20 bp, Artificial Sequence
  Description of Artificial Sequence: Synthetic oligonucleotide
  Target: LAMA2; (-) strand; PAM type: YTN; PAM sequence: CTG
tctcattgtctcactgtcat

SEQ ID NO: 276296 - DNA, 20 bp, Artificial Sequence
  Description of Artificial Sequence: Synthetic oligonucleotide
  Target: LAMA2; (-) strand; PAM type: YTN; PAM sequence: CTC
actgtctcattgtctcactg

SEQ ID NO: 276297 - DNA, 20 bp, Artificial Sequence
  Description of Artificial Sequence: Synthetic oligonucleotide
  Target: LAMA2; (-) strand; PAM type: YTN; PAM sequence: CTG
tctcactgtctcattgtctc

SEQ ID NO: 276298 - DNA, 20 bp, Artificial Sequence
  Description of Artificial Sequence: Synthetic oligonucleotide
  Target: LAMA2; (-) strand; PAM type: YTN; PAM sequence: TTG
agacactgtctcactgtctc

SEQ ID NO: 276299 - DNA, 20 bp, Artificial Sequence
  Description of Artificial Sequence: Synthetic oligonucleotide
  Target: LAMA2; (-) strand; PAM type: YTN; PAM sequence: TTT
gagacactgtctcactgtct

SEQ ID NO: 276300 - DNA, 20 bp, Artificial Sequence
  Description of Artificial Sequence: Synthetic oligonucleotide
  Target: LAMA2; (-) strand; PAM type: YTN; PAM sequence: TTT
tgagacactgtctcactgtc

SEQ ID NO: 276301 - DNA, 20 bp, Artificial Sequence
  Description of Artificial Sequence: Synthetic oligonucleotide
  Target: LAMA2; (-) strand; PAM type: YTN; PAM sequence: TTT
ttgagacactgtctcactgt

SEQ ID NO: 276302 - DNA, 20 bp, Artificial Sequence
  Description of Artificial Sequence: Synthetic oligonucleotide
  Target: LAMA2; (-) strand; PAM type: YTN; PAM sequence: TTT
tttgagacactgtctcactg

SEQ ID NO: 276303 - DNA, 20 bp, Artificial Sequence
  Description of Artificial Sequence: Synthetic oligonucleotide
  Target: LAMA2; (-) strand; PAM type: YTN; PAM sequence: TTT
ttttgagacactgtctcact

SEQ ID NO: 276304 - DNA, 20 bp, Artificial Sequence
  Description of Artificial Sequence: Synthetic oligonucleotide
  Target: LAMA2; (-) strand; PAM type: YTN; PAM sequence: TTT
tttttgagacactgtctcac

SEQ ID NO: 276305 - DNA, 20 bp, Artificial Sequence
  Description of Artificial Sequence: Synthetic oligonucleotide
  Target: LAMA2; (-) strand; PAM type: YTN; PAM sequence: TTT
ttttttgagacactgtctca

SEQ ID NO: 276306 - DNA, 20 bp, Artificial Sequence
  Description of Artificial Sequence: Synthetic oligonucleotide
  Target: LAMA2; (-) strand; PAM type: YTN; PAM sequence: TTT
tttttttgagacactgtctc

SEQ ID NO: 276307 - DNA, 20 bp, Artificial Sequence
  Description of Artificial Sequence: Synthetic oligonucleotide
  Target: LAMA2; (-) strand; PAM type: YTN; PAM sequence: TTT
ttttttttgagacactgtct

SEQ ID NO: 276308 - DNA, 20 bp, Artificial Sequence
  Description of Artificial Sequence: Synthetic oligonucleotide
  Target: LAMA2; (-) strand; PAM type: YTN; PAM sequence: TTT
tttttttttgagacactgtc

SEQ ID NO: 276309 - DNA, 20 bp, Artificial Sequence
  Description of Artificial Sequence: Synthetic oligonucleotide
  Target: LAMA2; (-) strand; PAM type: YTN; PAM sequence: TTT
ttttttttttgagacactgt

SEQ ID NO: 276310 - DNA, 20 bp, Artificial Sequence
  Description of Artificial Sequence: Synthetic oligonucleotide
  Target: LAMA2; (-) strand; PAM type: YTN; PAM sequence: TTT
tttttttttttgagacactg

SEQ ID NO: 276311 - DNA, 20 bp, Artificial Sequence
  Description of Artificial Sequence: Synthetic oligonucleotide
  Target: LAMA2; (-) strand; PAM type: YTN; PAM sequence: TTT
ttttttttttttgagacact

SEQ ID NO: 276312 - DNA, 20 bp, Artificial Sequence
  Description of Artificial Sequence: Synthetic oligonucleotide
  Target: LAMA2; (-) strand; PAM type: YTN; PAM sequence: CTT
tttttttttttttgagacac

SEQ ID NO: 276313 - DNA, 20 bp, Artificial Sequence
  Description of Artificial Sequence: Synthetic oligonucleotide
  Target: LAMA2; (-) strand; PAM type: YTN; PAM sequence: TTC
tttttttttttttttgagac

SEQ ID NO: 276314 - DNA, 20 bp, Artificial Sequence
  Description of Artificial Sequence: Synthetic oligonucleotide
  Target: LAMA2; (-) strand; PAM type: YTN; PAM sequence: TTT
ctttttttttttttttgaga

SEQ ID NO: 276315 - DNA, 20 bp, Artificial Sequence
  Description of Artificial Sequence: Synthetic oligonucleotide
  Target: LAMA2; (-) strand; PAM type: YTN; PAM sequence: TTT
tctttttttttttttttgag

SEQ ID NO: 276316 - DNA, 20 bp, Artificial Sequence
  Description of Artificial Sequence: Synthetic oligonucleotide
  Target: LAMA2; (-) strand; PAM type: YTN; PAM sequence: TTT
ttctttttttttttttttga

SEQ ID NO: 276317 - DNA, 20 bp, Artificial Sequence
  Description of Artificial Sequence: Synthetic oligonucleotide
  Target: LAMA2; (-) strand; PAM type: YTN; PAM sequence: CTT
tttctttttttttttttttg

SEQ ID NO: 276318 - DNA, 20 bp, Artificial Sequence
  Description of Artificial Sequence: Synthetic oligonucleotide
  Target: LAMA2; (-) strand; PAM type: YTN; PAM sequence: TTC
tttttctttttttttttttt

SEQ ID NO: 276319 - DNA, 20 bp, Artificial Sequence
  Description of Artificial Sequence: Synthetic oligonucleotide
  Target: LAMA2; (-) strand; PAM type: YTN; PAM sequence: TTT
ctttttcttttttttttttt

SEQ ID NO: 276320 - DNA, 20 bp, Artificial Sequence
  Description of Artificial Sequence: Synthetic oligonucleotide
  Target: LAMA2; (-) strand; PAM type: YTN; PAM sequence: TTT
tctttttctttttttttttt

SEQ ID NO: 276321 - DNA, 20 bp, Artificial Sequence
  Description of Artificial Sequence: Synthetic oligonucleotide
  Target: LAMA2; (-) strand; PAM type: YTN; PAM sequence: TTA
ttttctttttcttttttttt

SEQ ID NO: 276322 - DNA, 20 bp, Artificial Sequence
  Description of Artificial Sequence: Synthetic oligonucleotide
  Target: LAMA2; (-) strand; PAM type: YTN; PAM sequence: TTT
attttctttttctttttttt

SEQ ID NO: 276323 - DNA, 20 bp, Artificial Sequence
  Description of Artificial Sequence: Synthetic oligonucleotide
  Target: LAMA2; (-) strand; PAM type: YTN; PAM sequence: TTT
tattttctttttcttttttt

SEQ ID NO: 276324 - DNA, 20 bp, Artificial Sequence
  Description of Artificial Sequence: Synthetic oligonucleotide
  Target: LAMA2; (-) strand; PAM type: YTN; PAM sequence: CTT
ttattttctttttctttttt

SEQ ID NO: 276325 - DNA, 20 bp, Artificial Sequence
  Description of Artificial Sequence: Synthetic oligonucleotide
  Target: LAMA2; (-) strand; PAM type: YTN; PAM sequence: TTC
ttttattttctttttctttt

SEQ ID NO: 276326 - DNA, 20 bp, Artificial Sequence
  Description of Artificial Sequence: Synthetic oligonucleotide
  Target: LAMA2; (-) strand; PAM type: YTN; PAM sequence: TTT
cttttattttctttttcttt

SEQ ID NO: 276327 - DNA, 20 bp, Artificial Sequence
  Description of Artificial Sequence: Synthetic oligonucleotide
  Target: LAMA2; (-) strand; PAM type: YTN; PAM sequence: TTT
tcttttattttctttttctt

SEQ ID NO: 276328 - DNA, 20 bp, Artificial Sequence
  Description of Artificial Sequence: Synthetic oligonucleotide
  Target: LAMA2; (-) strand; PAM type: YTN; PAM sequence: TTG
ttttcttttattttcttttt

SEQ ID NO: 276329 - DNA, 20 bp, Artificial Sequence
  Description of Artificial Sequence: Synthetic oligonucleotide
  Target: LAMA2; (-) strand; PAM type: YTN; PAM sequence: TTA
ttgttttcttttattttctt

SEQ ID NO: 276330 - DNA, 20 bp, Artificial Sequence
  Description of Artificial Sequence: Synthetic oligonucleotide
  Target: LAMA2; (-) strand; PAM type: YTN; PAM sequence: CTA
ttattgttttcttttatttt

SEQ ID NO: 276331 - DNA, 20 bp, Artificial Sequence
  Description of Artificial Sequence: Synthetic oligonucleotide
  Target: LAMA2; (-) strand; PAM type: YTN; PAM sequence: CTG
tctattattgttttctttta

SEQ ID NO: 276332 - DNA, 20 bp, Artificial Sequence
  Description of Artificial Sequence: Synthetic oligonucleotide
  Target: LAMA2; (-) strand; PAM type: YTN; PAM sequence: TTC
ctgtctattattgttttctt

SEQ ID NO: 276333 - DNA, 20 bp, Artificial Sequence
  Description of Artificial Sequence: Synthetic oligonucleotide
  Target: LAMA2; (-) strand; PAM type: YTN; PAM sequence: CTT
cctgtctattattgttttct

SEQ ID NO: 276334 - DNA, 20 bp, Artificial Sequence
  Description of Artificial Sequence: Synthetic oligonucleotide
  Target: LAMA2; (-) strand; PAM type: YTN; PAM sequence: CTA
tcttcctgtctattattgtt

SEQ ID NO: 276335 - DNA, 20 bp, Artificial Sequence
  Description of Artificial Sequence: Synthetic oligonucleotide
  Target: LAMA2; (-) strand; PAM type: YTN; PAM sequence: CTG
caaaagctatcttcctgtct

SEQ ID NO: 276336 - DNA, 20 bp, Artificial Sequence
  Description of Artificial Sequence: Synthetic oligonucleotide
  Target: LAMA2; (-) strand; PAM type: YTN; PAM sequence: TTC
aggaacctgcaaaagctatc

SEQ ID NO: 276337 - DNA, 20 bp, Artificial Sequence
  Description of Artificial Sequence: Synthetic oligonucleotide
  Target: LAMA2; (-) strand; PAM type: YTN; PAM sequence: CTT
caggaacctgcaaaagctat

SEQ ID NO: 276338 - DNA, 20 bp, Artificial Sequence
  Description of Artificial Sequence: Synthetic oligonucleotide
  Target: LAMA2; (-) strand; PAM type: YTN; PAM sequence: TTC
ttcaggaacctgcaaaagct

SEQ ID NO: 276339 - DNA, 20 bp, Artificial Sequence
  Description of Artificial Sequence: Synthetic oligonucleotide
  Target: LAMA2; (-) strand; PAM type: YTN; PAM sequence: TTG
gtgtggtagattcttcagga

SEQ ID NO: 276340 - DNA, 20 bp, Artificial Sequence
  Description of Artificial Sequence: Synthetic oligonucleotide
  Target: LAMA2; (-) strand; PAM type: YTN; PAM sequence: TTG
gtgtgttggtgtggtagatt

SEQ ID NO: 276341 - DNA, 20 bp, Artificial Sequence
  Description of Artificial Sequence: Synthetic oligonucleotide
  Target: LAMA2; (-) strand; PAM type: YTN; PAM sequence: TTT
ggtgtgttggtgtggtagat

SEQ ID NO: 276342 - DNA, 20 bp, Artificial Sequence
  Description of Artificial Sequence: Synthetic oligonucleotide
  Target: LAMA2; (-) strand; PAM type: YTN; PAM sequence: TTT
tggtgtgttggtgtggtaga

SEQ ID NO: 276343 - DNA, 20 bp, Artificial Sequence
  Description of Artificial Sequence: Synthetic oligonucleotide
  Target: LAMA2; (-) strand; PAM type: YTN; PAM sequence: TTT
ttggtgtgttggtgtggtag

SEQ ID NO: 276344 - DNA, 20 bp, Artificial Sequence
  Description of Artificial Sequence: Synthetic oligonucleotide
  Target: LAMA2; (-) strand; PAM type: YTN; PAM sequence: TTT
tttggtgtgttggtgtggta

SEQ ID NO: 276345 - DNA, 20 bp, Artificial Sequence
  Description of Artificial Sequence: Synthetic oligonucleotide
  Target: LAMA2; (-) strand; PAM type: YTN; PAM sequence: TTT
ttttggtgtgttggtgtggt

SEQ ID NO: 276346 - DNA, 20 bp, Artificial Sequence
  Description of Artificial Sequence: Synthetic oligonucleotide
  Target: LAMA2; (-) strand; PAM type: YTN; PAM sequence: TTT
tttttggtgtgttggtgtgg

SEQ ID NO: 276347 - DNA, 20 bp, Artificial Sequence
  Description of Artificial Sequence: Synthetic oligonucleotide
  Target: LAMA2; (-) strand; PAM type: YTN; PAM sequence: TTT
ttttttggtgtgttggtgtg

SEQ ID NO: 276348 - DNA, 20 bp, Artificial Sequence
  Description of Artificial Sequence: Synthetic oligonucleotide
  Target: LAMA2; (-) strand; PAM type: YTN; PAM sequence: CTT
tttttttggtgtgttggtgt

SEQ ID NO: 276349 - DNA, 20 bp, Artificial Sequence
  Description of Artificial Sequence: Synthetic oligonucleotide
  Target: LAMA2; (-) strand; PAM type: YTN; PAM sequence: TTC
tttttttttggtgtgttggt

SEQ ID NO: 276350 - DNA, 20 bp, Artificial Sequence
  Description of Artificial Sequence: Synthetic oligonucleotide
  Target: LAMA2; (-) strand; PAM type: YTN; PAM sequence: TTT
ctttttttttggtgtgttgg

SEQ ID NO: 276351 - DNA, 20 bp, Artificial Sequence
  Description of Artificial Sequence: Synthetic oligonucleotide
  Target: LAMA2; (-) strand; PAM type: YTN; PAM sequence: CTT
tctttttttttggtgtgttg

SEQ ID NO: 276352 - DNA, 20 bp, Artificial Sequence
  Description of Artificial Sequence: Synthetic oligonucleotide
  Target: LAMA2; (-) strand; PAM type: YTN; PAM sequence: TTC
tttctttttttttggtgtgt

SEQ ID NO: 276353 - DNA, 20 bp, Artificial Sequence
  Description of Artificial Sequence: Synthetic oligonucleotide
  Target: LAMA2; (-) strand; PAM type: YTN; PAM sequence: TTT
ctttctttttttttggtgtg

SEQ ID NO: 276354 - DNA, 20 bp, Artificial Sequence
  Description of Artificial Sequence: Synthetic oligonucleotide
  Target: LAMA2; (-) strand; PAM type: YTN; PAM sequence: CTT
tctttctttttttttggtgt

SEQ ID NO: 276355 - DNA, 20 bp, Artificial Sequence
  Description of Artificial Sequence: Synthetic oligonucleotide
  Target: LAMA2; (-) strand; PAM type: YTN; PAM sequence: TTC
tttctttctttttttttggt

SEQ ID NO: 276356 - DNA, 20 bp, Artificial Sequence
  Description of Artificial Sequence: Synthetic oligonucleotide
  Target: LAMA2; (-) strand; PAM type: YTN; PAM sequence: TTT
ctttctttctttttttttgg

SEQ ID NO: 276357 - DNA, 20 bp, Artificial Sequence
  Description of Artificial Sequence: Synthetic oligonucleotide
  Target: LAMA2; (-) strand; PAM type: YTN; PAM sequence: TTT
tctttctttctttttttttg

SEQ ID NO: 276358 - DNA, 20 bp, Artificial Sequence
  Description of Artificial Sequence: Synthetic oligonucleotide
  Target: LAMA2; (-) strand; PAM type: YTN; PAM sequence: TTT
ttctttctttcttttttttt

SEQ ID NO: 276359 - DNA, 20 bp, Artificial Sequence
  Description of Artificial Sequence: Synthetic oligonucleotide
  Target: LAMA2; (-) strand; PAM type: YTN; PAM sequence: CTT
tttctttctttctttttttt

SEQ ID NO: 276360 - DNA, 20 bp, Artificial Sequence
  Description of Artificial Sequence: Synthetic oligonucleotide
  Target: LAMA2; (-) strand; PAM type: YTN; PAM sequence: TTC
tttttctttctttctttttt

SEQ ID NO: 276361 - DNA, 20 bp, Artificial Sequence
  Description of Artificial Sequence: Synthetic oligonucleotide
  Target: LAMA2; (-) strand; PAM type: YTN; PAM sequence: TTT
ctttttctttctttcttttt

SEQ ID NO: 276362 - DNA, 20 bp, Artificial Sequence
  Description of Artificial Sequence: Synthetic oligonucleotide
  Target: LAMA2; (-) strand; PAM type: YTN; PAM sequence: CTT
tctttttctttctttctttt

SEQ ID NO: 276363 - DNA, 20 bp, Artificial Sequence
  Description of Artificial Sequence: Synthetic oligonucleotide
  Target: LAMA2; (-) strand; PAM type: YTN; PAM sequence: TTG
gacactttctttttctttct

SEQ ID NO: 276364 - DNA, 20 bp, Artificial Sequence
  Description of Artificial Sequence: Synthetic oligonucleotide
  Target: LAMA2; (-) strand; PAM type: YTN; PAM sequence: TTG
caaattggacactttctttt

SEQ ID NO: 276365 - DNA, 20 bp, Artificial Sequence
  Description of Artificial Sequence: Synthetic oligonucleotide
  Target: LAMA2; (-) strand; PAM type: YTN; PAM sequence: TTT
gcaaattggacactttcttt

SEQ ID NO: 276366 - DNA, 20 bp, Artificial Sequence
  Description of Artificial Sequence: Synthetic oligonucleotide
  Target: LAMA2; (-) strand; PAM type: YTN; PAM sequence: CTT
tgcaaattggacactttctt

SEQ ID NO: 276367 - DNA, 20 bp, Artificial Sequence
  Description of Artificial Sequence: Synthetic oligonucleotide
  Target: LAMA2; (-) strand; PAM type: YTN; PAM sequence: TTC
cagagctttgcaaattggac

SEQ ID NO: 276368 - DNA, 20 bp, Artificial Sequence
  Description of Artificial Sequence: Synthetic oligonucleotide
  Target: LAMA2; (-) strand; PAM type: YTN; PAM sequence: TTA
ttccagagctttgcaaattg

SEQ ID NO: 276369 - DNA, 20 bp, Artificial Sequence
  Description of Artificial Sequence: Synthetic oligonucleotide
  Target: LAMA2; (-) strand; PAM type: YTN; PAM sequence: TTT
attccagagctttgcaaatt

SEQ ID NO: 276370 - DNA, 20 bp, Artificial Sequence
  Description of Artificial Sequence: Synthetic oligonucleotide
  Target: LAMA2; (-) strand; PAM type: YTN; PAM sequence: TTA
tttattccagagctttgcaa

SEQ ID NO: 276371 - DNA, 20 bp, Artificial Sequence
  Description of Artificial Sequence: Synthetic oligonucleotide
  Target: LAMA2; (-) strand; PAM type: YTN; PAM sequence: TTT
atttattccagagctttgca

SEQ ID NO: 276372 - DNA, 20 bp, Artificial Sequence
  Description of Artificial Sequence: Synthetic oligonucleotide
  Target: LAMA2; (-) strand; PAM type: YTN; PAM sequence: CTT
tatttattccagagctttgc

SEQ ID NO: 276373 - DNA, 20 bp, Artificial Sequence
  Description of Artificial Sequence: Synthetic oligonucleotide
  Target: LAMA2; (-) strand; PAM type: YTN; PAM sequence: TTA
gatctttatttattccagag

SEQ ID NO: 276374 - DNA, 20 bp, Artificial Sequence
  Description of Artificial Sequence: Synthetic oligonucleotide
  Target: LAMA2; (-) strand; PAM type: YTN; PAM sequence: TTA
attagatctttatttattcc

SEQ ID NO: 276375 - DNA, 20 bp, Artificial Sequence
  Description of Artificial Sequence: Synthetic oligonucleotide
  Target: LAMA2; (-) strand; PAM type: YTN; PAM sequence: TTG
taattaattagatctttatt

SEQ ID NO: 276376 - DNA, 20 bp, Artificial Sequence
  Description of Artificial Sequence: Synthetic oligonucleotide
  Target: LAMA2; (-) strand; PAM type: YTN; PAM sequence: CTT
gtaattaattagatctttat

SEQ ID NO: 276377 - DNA, 20 bp, Artificial Sequence
  Description of Artificial Sequence: Synthetic oligonucleotide
  Target: LAMA2; (-) strand; PAM type: YTN; PAM sequence: TTA
acttgtaattaattagatct

SEQ ID NO: 276378 - DNA, 20 bp, Artificial Sequence
  Description of Artificial Sequence: Synthetic oligonucleotide
  Target: LAMA2; (-) strand; PAM type: YTN; PAM sequence: TTT
aacttgtaattaattagatc

SEQ ID NO: 276379 - DNA, 20 bp, Artificial Sequence
  Description of Artificial Sequence: Synthetic oligonucleotide
  Target: LAMA2; (-) strand; PAM type: YTN; PAM sequence: TTT
taacttgtaattaattagat

SEQ ID NO: 276380 - DNA, 20 bp, Artificial Sequence
  Description of Artificial Sequence: Synthetic oligonucleotide
  Target: LAMA2; (-) strand; PAM type: YTN; PAM sequence: CTT
ttaacttgtaattaattaga

SEQ ID NO: 276381 - DNA, 20 bp, Artificial Sequence
  Description of Artificial Sequence: Synthetic oligonucleotide
  Target: LAMA2; (-) strand; PAM type: YTN; PAM sequence: CTA
cttttaacttgtaattaatt

SEQ ID NO: 276382 - DNA, 20 bp, Artificial Sequence
  Description of Artificial Sequence: Synthetic oligonucleotide
  Target: LAMA2; (-) strand; PAM type: YTN; PAM sequence: TTC
tacttttaacttgtaattaa

SEQ ID NO: 276383 - DNA, 20 bp, Artificial Sequence
  Description of Artificial Sequence: Synthetic oligonucleotide
  Target: LAMA2; (-) strand; PAM type: YTN; PAM sequence: TTT
ctacttttaacttgtaatta

SEQ ID NO: 276384 - DNA, 20 bp, Artificial Sequence
  Description of Artificial Sequence: Synthetic oligonucleotide
  Target: LAMA2; (-) strand; PAM type: YTN; PAM sequence: TTA
tatttctacttttaacttgt

SEQ ID NO: 276385 - DNA, 20 bp, Artificial Sequence
  Description of Artificial Sequence: Synthetic oligonucleotide
  Target: LAMA2; (-) strand; PAM type: YTN; PAM sequence: TTG
attatatttctacttttaac

SEQ ID NO: 276386 - DNA, 20 bp, Artificial Sequence
  Description of Artificial Sequence: Synthetic oligonucleotide
  Target: LAMA2; (-) strand; PAM type: YTN; PAM sequence: TTG
gatatgaaggttgattatat

SEQ ID NO: 276387 - DNA, 20 bp, Artificial Sequence
  Description of Artificial Sequence: Synthetic oligonucleotide
  Target: LAMA2; (-) strand; PAM type: YTN; PAM sequence: TTT
ggatatgaaggttgattata

SEQ ID NO: 276388 - DNA, 20 bp, Artificial Sequence
  Description of Artificial Sequence: Synthetic oligonucleotide
  Target: LAMA2; (-) strand; PAM type: YTN; PAM sequence: TTG
tttggatatgaaggttgatt

SEQ ID NO: 276389 - DNA, 20 bp, Artificial Sequence
  Description of Artificial Sequence: Synthetic oligonucleotide
  Target: LAMA2; (-) strand; PAM type: YTN; PAM sequence: TTA
ttgtttggatatgaaggttg

SEQ ID NO: 276390 - DNA, 20 bp, Artificial Sequence
  Description of Artificial Sequence: Synthetic oligonucleotide
  Target: LAMA2; (-) strand; PAM type: YTN; PAM sequence: CTC
aattattgtttggatatgaa

SEQ ID NO: 276391 - DNA, 20 bp, Artificial Sequence
  Description of Artificial Sequence: Synthetic oligonucleotide
  Target: LAMA2; (-) strand; PAM type: YTN; PAM sequence: TTG
ctcaattattgtttggatat

SEQ ID NO: 276392 - DNA, 20 bp, Artificial Sequence
  Description of Artificial Sequence: Synthetic oligonucleotide
  Target: LAMA2; (-) strand; PAM type: YTN; PAM sequence: CTA
caaaaagtatggcataagta

SEQ ID NO: 276393 - DNA, 20 bp, Artificial Sequence
  Description of Artificial Sequence: Synthetic oligonucleotide
  Target: LAMA2; (-) strand; PAM type: YTN; PAM sequence: TTC
tacaaaaagtatggcataag

SEQ ID NO: 276394 - DNA, 20 bp, Artificial Sequence
  Description of Artificial Sequence: Synthetic oligonucleotide
  Target: LAMA2; (-) strand; PAM type: YTN; PAM sequence: TTA
ttctacaaaaagtatggcat

SEQ ID NO: 276395 - DNA, 20 bp, Artificial Sequence
  Description of Artificial Sequence: Synthetic oligonucleotide
  Target: LAMA2; (-) strand; PAM type: YTN; PAM sequence: CTA
tgtatagggagaattattct

SEQ ID NO: 276396 - DNA, 20 bp, Artificial Sequence
  Description of Artificial Sequence: Synthetic oligonucleotide
  Target: LAMA2; (-) strand; PAM type: YTN; PAM sequence: TTA
agaaacagaaagaaggccta

SEQ ID NO: 276397 - DNA, 20 bp, Artificial Sequence
  Description of Artificial Sequence: Synthetic oligonucleotide
  Target: LAMA2; (-) strand; PAM type: YTN; PAM sequence: TTT
aagaaacagaaagaaggcct

SEQ ID NO: 276398 - DNA, 20 bp, Artificial Sequence
  Description of Artificial Sequence: Synthetic oligonucleotide
  Target: LAMA2; (-) strand; PAM type: YTN; PAM sequence: TTA
gagtatttaagaaacagaaa

SEQ ID NO: 276399 - DNA, 20 bp, Artificial Sequence
  Description of Artificial Sequence: Synthetic oligonucleotide
  Target: LAMA2; (-) strand; PAM type: YTN; PAM sequence: CTT
agagtatttaagaaacagaa

SEQ ID NO: 276400 - DNA, 20 bp, Artificial Sequence
  Description of Artificial Sequence: Synthetic oligonucleotide
  Target: LAMA2; (-) strand; PAM type: YTN; PAM sequence: CTA
agataggaaacttagagtat

SEQ ID NO: 276401 - DNA, 20 bp, Artificial Sequence
  Description of Artificial Sequence: Synthetic oligonucleotide
  Target: LAMA2; (-) strand; PAM type: YTN; PAM sequence: TTA
gatgagtacaataaaaacaa

SEQ ID NO: 276402 - DNA, 20 bp, Artificial Sequence
  Description of Artificial Sequence: Synthetic oligonucleotide
  Target: LAMA2; (-) strand; PAM type: YTN; PAM sequence: TTA
aagaaagattagatgagtac

SEQ ID NO: 276403 - DNA, 20 bp, Artificial Sequence
  Description of Artificial Sequence: Synthetic oligonucleotide
  Target: LAMA2; (-) strand; PAM type: YTN; PAM sequence: CTT
aaagaaagattagatgagta

SEQ ID NO: 276404 - DNA, 20 bp, Artificial Sequence
  Description of Artificial Sequence: Synthetic oligonucleotide
  Target: LAMA2; (-) strand; PAM type: YTN; PAM sequence: TTC
ttaaagaaagattagatgag

SEQ ID NO: 276405 - DNA, 20 bp, Artificial Sequence
  Description of Artificial Sequence: Synthetic oligonucleotide
  Target: LAMA2; (-) strand; PAM type: YTN; PAM sequence: TTA
atgtataatatattcttaaa

SEQ ID NO: 276406 - DNA, 20 bp, Artificial Sequence
  Description of Artificial Sequence: Synthetic oligonucleotide
  Target: LAMA2; (-) strand; PAM type: YTN; PAM sequence: TTG
tgtggaggagagataaaatg

SEQ ID NO: 276407 - DNA, 20 bp, Artificial Sequence
  Description of Artificial Sequence: Synthetic oligonucleotide
  Target: LAMA2; (-) strand; PAM type: YTN; PAM sequence: CTT
gtgtggaggagagataaaat

SEQ ID NO: 276408 - DNA, 20 bp, Artificial Sequence
  Description of Artificial Sequence: Synthetic oligonucleotide
  Target: LAMA2; (-) strand; PAM type: YTN; PAM sequence: CTC
atggcttgtgtggaggagag

SEQ ID NO: 276409 - DNA, 20 bp, Artificial Sequence
  Description of Artificial Sequence: Synthetic oligonucleotide
  Target: LAMA2; (-) strand; PAM type: YTN; PAM sequence: TTC
ctcatggcttgtgtggagga

SEQ ID NO: 276410 - DNA, 20 bp, Artificial Sequence
  Description of Artificial Sequence: Synthetic oligonucleotide
  Target: LAMA2; (-) strand; PAM type: YTN; PAM sequence: TTG
ggggatgtgaggaagaacac

SEQ ID NO: 276411 - DNA, 20 bp, Artificial Sequence
  Description of Artificial Sequence: Synthetic oligonucleotide
  Target: LAMA2; (-) strand; PAM type: YTN; PAM sequence: CTA
ggattgggggatgtgaggaa

SEQ ID NO: 276412 - DNA, 20 bp, Artificial Sequence
  Description of Artificial Sequence: Synthetic oligonucleotide
  Target: LAMA2; (-) strand; PAM type: YTN; PAM sequence: TTC
taggattgggggatgtgagg

SEQ ID NO: 276413 - DNA, 20 bp, Artificial Sequence
  Description of Artificial Sequence: Synthetic oligonucleotide
  Target: LAMA2; (-) strand; PAM type: YTN; PAM sequence: CTG
ttctaggattgggggatgtg

SEQ ID NO: 276414 - DNA, 20 bp, Artificial Sequence
  Description of Artificial Sequence: Synthetic oligonucleotide
  Target: LAMA2; (-) strand; PAM type: YTN; PAM sequence: CTA
gatactgttctaggattggg

SEQ ID NO: 276415 - DNA, 20 bp, Artificial Sequence
  Description of Artificial Sequence: Synthetic oligonucleotide
  Target: LAMA2; (-) strand; PAM type: YTN; PAM sequence: TTG
ctagatactgttctaggatt

SEQ ID NO: 276416 - DNA, 20 bp, Artificial Sequence
  Description of Artificial Sequence: Synthetic oligonucleotide
  Target: LAMA2; (-) strand; PAM type: YTN; PAM sequence: TTT
gctagatactgttctaggat

SEQ ID NO: 276417 - DNA, 20 bp, Artificial Sequence
  Description of Artificial Sequence: Synthetic oligonucleotide
  Target: LAMA2; (-) strand; PAM type: YTN; PAM sequence: CTT
tgctagatactgttctagga

SEQ ID NO: 276418 - DNA, 20 bp, Artificial Sequence
  Description of Artificial Sequence: Synthetic oligonucleotide
  Target: LAMA2; (-) strand; PAM type: YTN; PAM sequence: TTG
cctttgctagatactgttct

SEQ ID NO: 276419 - DNA, 20 bp, Artificial Sequence
  Description of Artificial Sequence: Synthetic oligonucleotide
  Target: LAMA2; (-) strand; PAM type: YTN; PAM sequence: TTT
gcctttgctagatactgttc

SEQ ID NO: 276420 - DNA, 20 bp, Artificial Sequence
  Description of Artificial Sequence: Synthetic oligonucleotide
  Target: LAMA2; (-) strand; PAM type: YTN; PAM sequence: TTT
tgcctttgctagatactgtt

SEQ ID NO: 276421 - DNA, 20 bp, Artificial Sequence
  Description of Artificial Sequence: Synthetic oligonucleotide
  Target: LAMA2; (-) strand; PAM type: YTN; PAM sequence: CTG
ttttgcctttgctagatact

SEQ ID NO: 276422 - DNA, 20 bp, Artificial Sequence
  Description of Artificial Sequence: Synthetic oligonucleotide
  Target: LAMA2; (-) strand; PAM type: YTN; PAM sequence: TTC
acggaaaacaatctgttttg

SEQ ID NO: 276423 - DNA, 20 bp, Artificial Sequence
  Description of Artificial Sequence: Synthetic oligonucleotide
  Target: LAMA2; (-) strand; PAM type: YTN; PAM sequence: TTA
ttcacggaaaacaatctgtt

SEQ ID NO: 276424 - DNA, 20 bp, Artificial Sequence
  Description of Artificial Sequence: Synthetic oligonucleotide
  Target: LAMA2; (-) strand; PAM type: YTN; PAM sequence: TTT
attcacggaaaacaatctgt

SEQ ID NO: 276425 - DNA, 20 bp, Artificial Sequence
  Description of Artificial Sequence: Synthetic oligonucleotide
  Target: LAMA2; (-) strand; PAM type: YTN; PAM sequence: TTA
tttattcacggaaaacaatc

SEQ ID NO: 276426 - DNA, 20 bp, Artificial Sequence
  Description of Artificial Sequence: Synthetic oligonucleotide
  Target: LAMA2; (-) strand; PAM type: YTN; PAM sequence: TTT
atttattcacggaaaacaat

SEQ ID NO: 276427 - DNA, 20 bp, Artificial Sequence
  Description of Artificial Sequence: Synthetic oligonucleotide
  Target: LAMA2; (-) strand; PAM type: YTN; PAM sequence: CTT
tatttattcacggaaaacaa

SEQ ID NO: 276428 - DNA, 20 bp, Artificial Sequence
  Description of Artificial Sequence: Synthetic oligonucleotide
  Target: LAMA2; (-) strand; PAM type: YTN; PAM sequence: CTA
tggcactttatttattcacg

SEQ ID NO: 276429 - DNA, 20 bp, Artificial Sequence
  Description of Artificial Sequence: Synthetic oligonucleotide
  Target: LAMA2; (-) strand; PAM type: YTN; PAM sequence: TTC
tatggcactttatttattca

SEQ ID NO: 276430 - DNA, 20 bp, Artificial Sequence
  Description of Artificial Sequence: Synthetic oligonucleotide
  Target: LAMA2; (-) strand; PAM type: YTN; PAM sequence: TTG
ttctatggcactttatttat

SEQ ID NO: 276431 - DNA, 20 bp, Artificial Sequence
  Description of Artificial Sequence: Synthetic oligonucleotide
  Target: LAMA2; (-) strand; PAM type: YTN; PAM sequence: TTT
gttctatggcactttattta

SEQ ID NO: 276432 - DNA, 20 bp, Artificial Sequence
  Description of Artificial Sequence: Synthetic oligonucleotide
  Target: LAMA2; (-) strand; PAM type: YTN; PAM sequence: CTG
ggtttgttctatggcacttt

SEQ ID NO: 276433 - DNA, 20 bp, Artificial Sequence
  Description of Artificial Sequence: Synthetic oligonucleotide
  Target: LAMA2; (-) strand; PAM type: YTN; PAM sequence: TTG
acaaaagtatagagtatctg

SEQ ID NO: 276434 - DNA, 20 bp, Artificial Sequence
  Description of Artificial Sequence: Synthetic oligonucleotide
  Target: LAMA2; (-) strand; PAM type: YTN; PAM sequence: CTC
acaaatattgacaaaagtat

SEQ ID NO: 276435 - DNA, 20 bp, Artificial Sequence
  Description of Artificial Sequence: Synthetic oligonucleotide
  Target: LAMA2; (-) strand; PAM type: YTN; PAM sequence: TTG
gagctcacaaatattgacaa

SEQ ID NO: 276436 - DNA, 20 bp, Artificial Sequence
  Description of Artificial Sequence: Synthetic oligonucleotide
  Target: LAMA2; (-) strand; PAM type: YTN; PAM sequence: TTT
ggagctcacaaatattgaca

SEQ ID NO: 276437 - DNA, 20 bp, Artificial Sequence
  Description of Artificial Sequence: Synthetic oligonucleotide
  Target: LAMA2; (-) strand; PAM type: YTN; PAM sequence: TTG
aaccgagaaaagatggaaat

SEQ ID NO: 276438 - DNA, 20 bp, Artificial Sequence
  Description of Artificial Sequence: Synthetic oligonucleotide
  Target: LAMA2; (-) strand; PAM type: YTN; PAM sequence: TTT
gaaccgagaaaagatggaaa

SEQ ID NO: 276439 - DNA, 20 bp, Artificial Sequence
  Description of Artificial Sequence: Synthetic oligonucleotide
  Target: LAMA2; (-) strand; PAM type: YTN; PAM sequence: CTT
tgaaccgagaaaagatggaa

SEQ ID NO: 276440 - DNA, 20 bp, Artificial Sequence
  Description of Artificial Sequence: Synthetic oligonucleotide
  Target: LAMA2; (-) strand; PAM type: YTN; PAM sequence: CTA
gctttgaaccgagaaaagat

SEQ ID NO: 276441 - DNA, 20 bp, Artificial Sequence
  Description of Artificial Sequence: Synthetic oligonucleotide
  Target: LAMA2; (-) strand; PAM type: YTN; PAM sequence: TTC
tagctttgaaccgagaaaag

SEQ ID NO: 276442 - DNA, 20 bp, Artificial Sequence
  Description of Artificial Sequence: Synthetic oligonucleotide
  Target: LAMA2; (-) strand; PAM type: YTN; PAM sequence: CTG
atgggttctagctttgaacc

SEQ ID NO: 276443 - DNA, 20 bp, Artificial Sequence
  Description of Artificial Sequence: Synthetic oligonucleotide
  Target: LAMA2; (-) strand; PAM type: YTN; PAM sequence: TTA
gatactgatgggttctagct

SEQ ID NO: 276444 - DNA, 20 bp, Artificial Sequence
  Description of Artificial Sequence: Synthetic oligonucleotide
  Target: LAMA2; (-) strand; PAM type: YTN; PAM sequence: TTC
agattagatactgatgggtt

SEQ ID NO: 276445 - DNA, 20 bp, Artificial Sequence
  Description of Artificial Sequence: Synthetic oligonucleotide
  Target: LAMA2; (-) strand; PAM type: YTN; PAM sequence: TTT
cagattagatactgatgggt

SEQ ID NO: 276446 - DNA, 20 bp, Artificial Sequence
  Description of Artificial Sequence: Synthetic oligonucleotide
  Target: LAMA2; (-) strand; PAM type: YTN; PAM sequence: TTT
tcagattagatactgatggg

SEQ ID NO: 276447 - DNA, 20 bp, Artificial Sequence
  Description of Artificial Sequence: Synthetic oligonucleotide
  Target: LAMA2; (-) strand; PAM type: YTN; PAM sequence: TTG
ttttcagattagatactgat

SEQ ID NO: 276448 - DNA, 20 bp, Artificial Sequence
  Description of Artificial Sequence: Synthetic oligonucleotide
  Target: LAMA2; (-) strand; PAM type: YTN; PAM sequence: CTT
gttttcagattagatactga

SEQ ID NO: 276449 - DNA, 20 bp, Artificial Sequence
  Description of Artificial Sequence: Synthetic oligonucleotide
  Target: LAMA2; (-) strand; PAM type: YTN; PAM sequence: TTA
gaggtgtcttgttttcagat

SEQ ID NO: 276450 - DNA, 20 bp, Artificial Sequence
  Description of Artificial Sequence: Synthetic oligonucleotide
  Target: LAMA2; (-) strand; PAM type: YTN; PAM sequence: TTT
agaggtgtcttgttttcaga

SEQ ID NO: 276451 - DNA, 20 bp, Artificial Sequence
  Description of Artificial Sequence: Synthetic oligonucleotide
  Target: LAMA2; (-) strand; PAM type: YTN; PAM sequence: TTT
tagaggtgtcttgttttcag

SEQ ID NO: 276452 - DNA, 20 bp, Artificial Sequence
  Description of Artificial Sequence: Synthetic oligonucleotide
  Target: LAMA2; (-) strand; PAM type: YTN; PAM sequence: TTA
aataaattttagaggtgtct

SEQ ID NO: 276453 - DNA, 20 bp, Artificial Sequence
  Description of Artificial Sequence: Synthetic oligonucleotide
  Target: LAMA2; (-) strand; PAM type: YTN; PAM sequence: CTG
ggatgaggttaaataaattt

SEQ ID NO: 276454 - DNA, 20 bp, Artificial Sequence
  Description of Artificial Sequence: Synthetic oligonucleotide
  Target: LAMA2; (-) strand; PAM type: YTN; PAM sequence: CTC
ccagagtgctgggatgaggt

SEQ ID NO: 276455 - DNA, 20 bp, Artificial Sequence
  Description of Artificial Sequence: Synthetic oligonucleotide
  Target: LAMA2; (-) strand; PAM type: YTN; PAM sequence: CTC
agcctcccagagtgctggga

SEQ ID NO: 276456 - DNA, 20 bp, Artificial Sequence
  Description of Artificial Sequence: Synthetic oligonucleotide
  Target: LAMA2; (-) strand; PAM type: YTN; PAM sequence: CTG
cctcagcctcccagagtgct

SEQ ID NO: 276457 - DNA, 20 bp, Artificial Sequence
  Description of Artificial Sequence: Synthetic oligonucleotide
  Target: LAMA2; (-) strand; PAM type: YTN; PAM sequence: CTC
ctgcctcagcctcccagagt

SEQ ID NO: 276458 - DNA, 20 bp, Artificial Sequence
  Description of Artificial Sequence: Synthetic oligonucleotide
  Target: LAMA2; (-) strand; PAM type: YTN; PAM sequence: CTC
atgatcctcctgcctcagcc

SEQ ID NO: 276459 - DNA, 20 bp, Artificial Sequence
  Description of Artificial Sequence: Synthetic oligonucleotide
  Target: LAMA2; (-) strand; PAM type: YTN; PAM sequence: CTG
acctcatgatcctcctgcct

SEQ ID NO: 276460 - DNA, 20 bp, Artificial Sequence
  Description of Artificial Sequence: Synthetic oligonucleotide
  Target: LAMA2; (-) strand; PAM type: YTN; PAM sequence: CTC
ctgacctcatgatcctcctg

SEQ ID NO: 276461 - DNA, 20 bp, Artificial Sequence
  Description of Artificial Sequence: Synthetic oligonucleotide
  Target: LAMA2; (-) strand; PAM type: YTN; PAM sequence: CTC
gatctcctgacctcatgatc

SEQ ID NO: 276462 - DNA, 20 bp, Artificial Sequence
  Description of Artificial Sequence: Synthetic oligonucleotide
  Target: LAMA2; (-) strand; PAM type: YTN; PAM sequence: TTA
gccaggatggtctcgatctc

SEQ ID NO: 276463 - DNA, 20 bp, Artificial Sequence
  Description of Artificial Sequence: Synthetic oligonucleotide
  Target: LAMA2; (-) strand; PAM type: YTN; PAM sequence: TTC
accatgttagccaggatggt

SEQ ID NO: 276464 - DNA, 20 bp, Artificial Sequence
  Description of Artificial Sequence: Synthetic oligonucleotide
  Target: LAMA2; (-) strand; PAM type: YTN; PAM sequence: TTT
caccatgttagccaggatgg

SEQ ID NO: 276465 - DNA, 20 bp, Artificial Sequence
  Description of Artificial Sequence: Synthetic oligonucleotide
  Target: LAMA2; (-) strand; PAM type: YTN; PAM sequence: TTC
agtagagatggggtttcacc

SEQ ID NO: 276466 - DNA, 20 bp, Artificial Sequence
  Description of Artificial Sequence: Synthetic oligonucleotide
  Target: LAMA2; (-) strand; PAM type: YTN; PAM sequence: TTT
cagtagagatggggtttcac

SEQ ID NO: 276467 - DNA, 20 bp, Artificial Sequence
  Description of Artificial Sequence: Synthetic oligonucleotide
  Target: LAMA2; (-) strand; PAM type: YTN; PAM sequence: TTT
tcagtagagatggggtttca

SEQ ID NO: 276468 - DNA, 20 bp, Artificial Sequence
  Description of Artificial Sequence: Synthetic oligonucleotide
  Target: LAMA2; (-) strand; PAM type: YTN; PAM sequence: TTC
attttcagtagagatggggt

SEQ ID NO: 276469 - DNA, 20 bp, Artificial Sequence
  Description of Artificial Sequence: Synthetic oligonucleotide
  Target: LAMA2; (-) strand; PAM type: YTN; PAM sequence: TTT
cattttcagtagagatgggg

SEQ ID NO: 276470 - DNA, 20 bp, Artificial Sequence
  Description of Artificial Sequence: Synthetic oligonucleotide
  Target: LAMA2; (-) strand; PAM type: YTN; PAM sequence: TTT
tcattttcagtagagatggg

SEQ ID NO: 276471 - DNA, 20 bp, Artificial Sequence
  Description of Artificial Sequence: Synthetic oligonucleotide
  Target: LAMA2; (-) strand; PAM type: YTN; PAM sequence: TTA
attttcattttcagtagaga

SEQ ID NO: 276472 - DNA, 20 bp, Artificial Sequence
  Description of Artificial Sequence: Synthetic oligonucleotide
  Target: LAMA2; (-) strand; PAM type: YTN; PAM sequence: TTT
aattttcattttcagtagag

SEQ ID NO: 276473 - DNA, 20 bp, Artificial Sequence
  Description of Artificial Sequence: Synthetic oligonucleotide
  Target: LAMA2; (-) strand; PAM type: YTN; PAM sequence: TTT
taattttcattttcagtaga

SEQ ID NO: 276474 - DNA, 20 bp, Artificial Sequence
  Description of Artificial Sequence: Synthetic oligonucleotide
  Target: LAMA2; (-) strand; PAM type: YTN; PAM sequence: TTT
ttaattttcattttcagtag

SEQ ID NO: 276475 - DNA, 20 bp, Artificial Sequence
  Description of Artificial Sequence: Synthetic oligonucleotide
  Target: LAMA2; (-) strand; PAM type: YTN; PAM sequence: TTT
tttaattttcattttcagta

SEQ ID NO: 276476 - DNA, 20 bp, Artificial Sequence
  Description of Artificial Sequence: Synthetic oligonucleotide
  Target: LAMA2; (-) strand; PAM type: YTN; PAM sequence: TTT
ttttaattttcattttcagt

SEQ ID NO: 276477 - DNA, 20 bp, Artificial Sequence
  Description of Artificial Sequence: Synthetic oligonucleotide
  Target: LAMA2; (-) strand; PAM type: YTN; PAM sequence: TTT
tttttaattttcattttcag

SEQ ID NO: 276478 - DNA, 20 bp, Artificial Sequence
  Description of Artificial Sequence: Synthetic oligonucleotide
  Target: LAMA2; (-) strand; PAM type: YTN; PAM sequence: TTT
ttttttaattttcattttca

SEQ ID NO: 276479 - DNA, 20 bp, Artificial Sequence
  Description of Artificial Sequence: Synthetic oligonucleotide
  Target: LAMA2; (-) strand; PAM type: YTN; PAM sequence: TTG
tatttttttttaattttcat

SEQ ID NO: 276480 - DNA, 20 bp, Artificial Sequence
  Description of Artificial Sequence: Synthetic oligonucleotide
  Target: LAMA2; (-) strand; PAM type: YTN; PAM sequence: TTT
gtatttttttttaattttca

SEQ ID NO: 276481 - DNA, 20 bp, Artificial Sequence
  Description of Artificial Sequence: Synthetic oligonucleotide
  Target: LAMA2; (-) strand; PAM type: YTN; PAM sequence: TTT
tgtatttttttttaattttc

SEQ ID NO: 276482 - DNA, 20 bp, Artificial Sequence
  Description of Artificial Sequence: Synthetic oligonucleotide
  Target: LAMA2; (-) strand; PAM type: YTN; PAM sequence: TTT
ttgtatttttttttaatttt

SEQ ID NO: 276483 - DNA, 20 bp, Artificial Sequence
  Description of Artificial Sequence: Synthetic oligonucleotide
  Target: LAMA2; (-) strand; PAM type: YTN; PAM sequence: TTA
tttttgtatttttttttaat

SEQ ID NO: 276484 - DNA, 20 bp, Artificial Sequence
  Description of Artificial Sequence: Synthetic oligonucleotide
  Target: LAMA2; (-) strand; PAM type: YTN; PAM sequence: TTT
atttttgtatttttttttaa

SEQ ID NO: 276485 - DNA, 20 bp, Artificial Sequence
  Description of Artificial Sequence: Synthetic oligonucleotide
  Target: LAMA2; (-) strand; PAM type: YTN; PAM sequence: TTT
tatttttgtattttttttta

SEQ ID NO: 276486 - DNA, 20 bp, Artificial Sequence
  Description of Artificial Sequence: Synthetic oligonucleotide
  Target: LAMA2; (-) strand; PAM type: YTN; PAM sequence: TTT
ttatttttgtattttttttt

SEQ ID NO: 276487 - DNA, 20 bp, Artificial Sequence
  Description of Artificial Sequence: Synthetic oligonucleotide
  Target: LAMA2; (-) strand; PAM type: YTN; PAM sequence: TTT
tttatttttgtatttttttt

SEQ ID NO: 276488 - DNA, 20 bp, Artificial Sequence
  Description of Artificial Sequence: Synthetic oligonucleotide
  Target: LAMA2; (-) strand; PAM type: YTN; PAM sequence: TTT
ttttatttttgtattttttt

SEQ ID NO: 276489 - DNA, 20 bp, Artificial Sequence
  Description of Artificial Sequence: Synthetic oligonucleotide
  Target: LAMA2; (-) strand; PAM type: YTN; PAM sequence: TTT
tttttatttttgtatttttt

SEQ ID NO: 276490 - DNA, 20 bp, Artificial Sequence
  Description of Artificial Sequence: Synthetic oligonucleotide
  Target: LAMA2; (-) strand; PAM type: YTN; PAM sequence: CTA
attttttttatttttgtatt

SEQ ID NO: 276491 - DNA, 20 bp, Artificial Sequence
  Description of Artificial Sequence: Synthetic oligonucleotide
  Target: LAMA2; (-) strand; PAM type: YTN; PAM sequence: CTG
gctaattttttttatttttg

SEQ ID NO: 276492 - DNA, 20 bp, Artificial Sequence
  Description of Artificial Sequence: Synthetic oligonucleotide
  Target: LAMA2; (-) strand; PAM type: YTN; PAM sequence: CTG
ccaccacgcctggctaattt

SEQ ID NO: 276493 - DNA, 20 bp, Artificial Sequence
  Description of Artificial Sequence: Synthetic oligonucleotide
  Target: LAMA2; (-) strand; PAM type: YTN; PAM sequence: CTG
caggtgcctgccaccacgcc

SEQ ID NO: 276494 - DNA, 20 bp, Artificial Sequence
  Description of Artificial Sequence: Synthetic oligonucleotide
  Target: LAMA2; (-) strand; PAM type: YTN; PAM sequence: CTC
ccgagtagggactgcaggtg

SEQ ID NO: 276495 - DNA, 20 bp, Artificial Sequence
  Description of Artificial Sequence: Synthetic oligonucleotide
  Target: LAMA2; (-) strand; PAM type: YTN; PAM sequence: CTC
agcctcccgagtagggactg

SEQ ID NO: 276496 - DNA, 20 bp, Artificial Sequence
  Description of Artificial Sequence: Synthetic oligonucleotide
  Target: LAMA2; (-) strand; PAM type: YTN; PAM sequence: CTG
cctcagcctcccgagtaggg

SEQ ID NO: 276497 - DNA, 20 bp, Artificial Sequence
  Description of Artificial Sequence: Synthetic oligonucleotide
  Target: LAMA2; (-) strand; PAM type: YTN; PAM sequence: CTC
ctgcctcagcctcccgagta

SEQ ID NO: 276498 - DNA, 20 bp, Artificial Sequence
  Description of Artificial Sequence: Synthetic oligonucleotide
  Target: LAMA2; (-) strand; PAM type: YTN; PAM sequence: TTC
tcctgcctcagcctcccgag

SEQ ID NO: 276499 - DNA, 20 bp, Artificial Sequence
  Description of Artificial Sequence: Synthetic oligonucleotide
  Target: LAMA2; (-) strand; PAM type: YTN; PAM sequence: TTC
acaccattctcctgcctcag

SEQ ID NO: 276500 - DNA, 20 bp, Artificial Sequence
  Description of Artificial Sequence: Synthetic oligonucleotide
  Target: LAMA2; (-) strand; PAM type: YTN; PAM sequence: CTC
ccaggttcacaccattctcc

SEQ ID NO: 276501 - DNA, 20 bp, Artificial Sequence
  Description of Artificial Sequence: Synthetic oligonucleotide
  Target: LAMA2; (-) strand; PAM type: YTN; PAM sequence: CTG
cctcccaggttcacaccatt

SEQ ID NO: 276502 - DNA, 20 bp, Artificial Sequence
  Description of Artificial Sequence: Synthetic oligonucleotide
  Target: LAMA2; (-) strand; PAM type: YTN; PAM sequence: CTC
tgcctcccaggttcacacca

SEQ ID NO: 276503 - DNA, 20 bp, Artificial Sequence
  Description of Artificial Sequence: Synthetic oligonucleotide
  Target: LAMA2; (-) strand; PAM type: YTN; PAM sequence: CTG
caagctctgcctcccaggtt

SEQ ID NO: 276504 - DNA, 20 bp, Artificial Sequence
  Description of Artificial Sequence: Synthetic oligonucleotide
  Target: LAMA2; (-) strand; PAM type: YTN; PAM sequence: CTC
actgcaagctctgcctccca

SEQ ID NO: 276505 - DNA, 20 bp, Artificial Sequence
  Description of Artificial Sequence: Synthetic oligonucleotide
  Target: LAMA2; (-) strand; PAM type: YTN; PAM sequence: TTG
gctcactgcaagctctgcct

SEQ ID NO: 276506 - DNA, 20 bp, Artificial Sequence
  Description of Artificial Sequence: Synthetic oligonucleotide
  Target: LAMA2; (-) strand; PAM type: YTN; PAM sequence: CTT
ggctcactgcaagctctgcc

SEQ ID NO: 276507 - DNA, 20 bp, Artificial Sequence
  Description of Artificial Sequence: Synthetic oligonucleotide
  Target: LAMA2; (-) strand; PAM type: YTN; PAM sequence: CTG
gagtgcagtggagcaatctt

SEQ ID NO: 276508 - DNA, 20 bp, Artificial Sequence
  Description of Artificial Sequence: Synthetic oligonucleotide
  Target: LAMA2; (-) strand; PAM type: YTN; PAM sequence: CTG
tcgcccaggctggagtgcag

SEQ ID NO: 276509 - DNA, 20 bp, Artificial Sequence
  Description of Artificial Sequence: Synthetic oligonucleotide
  Target: LAMA2; (-) strand; PAM type: YTN; PAM sequence: CTC
tgtcgcccaggctggagtgc

SEQ ID NO: 276510 - DNA, 20 bp, Artificial Sequence
  Description of Artificial Sequence: Synthetic oligonucleotide
  Target: LAMA2; (-) strand; PAM type: YTN; PAM sequence: CTC
actctgtcgcccaggctgga

SEQ ID NO: 276511 - DNA, 20 bp, Artificial Sequence
  Description of Artificial Sequence: Synthetic oligonucleotide
  Target: LAMA2; (-) strand; PAM type: YTN; PAM sequence: CTG
agacggagtctcactctgtc

SEQ ID NO: 276512 - DNA, 20 bp, Artificial Sequence
  Description of Artificial Sequence: Synthetic oligonucleotide
  Target: LAMA2; (-) strand; PAM type: YTN; PAM sequence: TTC
tgagacggagtctcactctg

SEQ ID NO: 276513 - DNA, 20 bp, Artificial Sequence
  Description of Artificial Sequence: Synthetic oligonucleotide
  Target: LAMA2; (-) strand; PAM type: YTN; PAM sequence: TTT
ctgagacggagtctcactct

SEQ ID NO: 276514 - DNA, 20 bp, Artificial Sequence
  Description of Artificial Sequence: Synthetic oligonucleotide
  Target: LAMA2; (-) strand; PAM type: YTN; PAM sequence: TTT
tctgagacggagtctcactc

SEQ ID NO: 276515 - DNA, 20 bp, Artificial Sequence
  Description of Artificial Sequence: Synthetic oligonucleotide
  Target: LAMA2; (-) strand; PAM type: YTN; PAM sequence: TTT
ttctgagacggagtctcact

SEQ ID NO: 276516 - DNA, 20 bp, Artificial Sequence
  Description of Artificial Sequence: Synthetic oligonucleotide
  Target: LAMA2; (-) strand; PAM type: YTN; PAM sequence: TTT
tttctgagacggagtctcac

SEQ ID NO: 276517 - DNA, 20 bp, Artificial Sequence
  Description of Artificial Sequence: Synthetic oligonucleotide
  Target: LAMA2; (-) strand; PAM type: YTN; PAM sequence: TTT
ttttctgagacggagtctca

SEQ ID NO: 276518 - DNA, 20 bp, Artificial Sequence
  Description of Artificial Sequence: Synthetic oligonucleotide
  Target: LAMA2; (-) strand; PAM type: YTN; PAM sequence: TTT
tttttctgagacggagtctc

SEQ ID NO: 276519 - DNA, 20 bp, Artificial Sequence
  Description of Artificial Sequence: Synthetic oligonucleotide
  Target: LAMA2; (-) strand; PAM type: YTN; PAM sequence: TTT
ttttttctgagacggagtct

SEQ ID NO: 276520 - DNA, 20 bp, Artificial Sequence
  Description of Artificial Sequence: Synthetic oligonucleotide
  Target: LAMA2; (-) strand; PAM type: YTN; PAM sequence: TTT
tttttttctgagacggagtc

SEQ ID NO: 276521 - DNA, 20 bp, Artificial Sequence
  Description of Artificial Sequence: Synthetic oligonucleotide
  Target: LAMA2; (-) strand; PAM type: YTN; PAM sequence: TTT
ttttttttctgagacggagt

SEQ ID NO: 276522 - DNA, 20 bp, Artificial Sequence
  Description of Artificial Sequence: Synthetic oligonucleotide
  Target: LAMA2; (-) strand; PAM type: YTN; PAM sequence: TTT
tttttttttctgagacggag

SEQ ID NO: 276523 - DNA, 20 bp, Artificial Sequence
  Description of Artificial Sequence: Synthetic oligonucleotide
  Target: LAMA2; (-) strand; PAM type: YTN; PAM sequence: TTT
ttttttttttctgagacgga

SEQ ID NO: 276524 - DNA, 20 bp, Artificial Sequence
  Description of Artificial Sequence: Synthetic oligonucleotide
  Target: LAMA2; (-) strand; PAM type: YTN; PAM sequence: TTT
tttttttttttctgagacgg

SEQ ID NO: 276525 - DNA, 20 bp, Artificial Sequence
  Description of Artificial Sequence: Synthetic oligonucleotide
  Target: LAMA2; (-) strand; PAM type: YTN; PAM sequence: TTT
ttttttttttttctgagacg

SEQ ID NO: 276526 - DNA, 20 bp, Artificial Sequence
  Description of Artificial Sequence: Synthetic oligonucleotide
  Target: LAMA2; (-) strand; PAM type: YTN; PAM sequence: TTT
tttttttttttttctgagac

SEQ ID NO: 276527 - DNA, 20 bp, Artificial Sequence
  Description of Artificial Sequence: Synthetic oligonucleotide
  Target: LAMA2; (-) strand; PAM type: YTN; PAM sequence: TTT
ttttttttttttttctgaga

SEQ ID NO: 276528 - DNA, 20 bp, Artificial Sequence
  Description of Artificial Sequence: Synthetic oligonucleotide
  Target: LAMA2; (-) strand; PAM type: YTN; PAM sequence: TTT
tttttttttttttttctgag

SEQ ID NO: 276529 - DNA, 20 bp, Artificial Sequence
  Description of Artificial Sequence: Synthetic oligonucleotide
  Target: LAMA2; (-) strand; PAM type: YTN; PAM sequence: TTT
ttttttttttttttttctga

SEQ ID NO: 276530 - DNA, 20 bp, Artificial Sequence
  Description of Artificial Sequence: Synthetic oligonucleotide
  Target: LAMA2; (-) strand; PAM type: YTN; PAM sequence: TTT
tttttttttttttttttctg

SEQ ID NO: 276531 - DNA, 20 bp, Artificial Sequence
  Description of Artificial Sequence: Synthetic oligonucleotide
  Target: LAMA2; (-) strand; PAM type: YTN; PAM sequence: TTT
ttttttttttttttttttct

SEQ ID NO: 276532 - DNA, 20 bp, Artificial Sequence
  Description of Artificial Sequence: Synthetic oligonucleotide
  Target: LAMA2; (-) strand; PAM type: YTN; PAM sequence: TTT
tttttttttttttttttttc

SEQ ID NO: 276533 - DNA, 20 bp, Artificial Sequence
  Description of Artificial Sequence: Synthetic oligonucleotide
  Target: LAMA2; (-) strand; PAM type: YTN; PAM sequence: TTT
tttttttttttttttttttt

SEQ ID NO: 276534 - DNA, 20 bp, Artificial Sequence
  Description of Artificial Sequence: Synthetic oligonucleotide
  Target: LAMA2; (-) strand; PAM type: YTN; PAM sequence: TTT
tttttttttttttttttttt

SEQ ID NO: 276535 - DNA, 20 bp, Artificial Sequence
  Description of Artificial Sequence: Synthetic oligonucleotide
  Target: LAMA2; (-) strand; PAM type: YTN; PAM sequence: TTT
tttttttttttttttttttt

SEQ ID NO: 276536 - DNA, 20 bp, Artificial Sequence
  Description of Artificial Sequence: Synthetic oligonucleotide
  Target: LAMA2; (-) strand; PAM type: YTN; PAM sequence: TTA
aataattttttttttttttt

SEQ ID NO: 276537 - DNA, 20 bp, Artificial Sequence
  Description of Artificial Sequence: Synthetic oligonucleotide
  Target: LAMA2; (-) strand; PAM type: YTN; PAM sequence: CTC
aatcagaaatgatgatcaag

SEQ ID NO: 276538 - DNA, 20 bp, Artificial Sequence
  Description of Artificial Sequence: Synthetic oligonucleotide
  Target: LAMA2; (-) strand; PAM type: YTN; PAM sequence: TTA
gcatactcaatcagaaatga

SEQ ID NO: 276539 - DNA, 20 bp, Artificial Sequence
  Description of Artificial Sequence: Synthetic oligonucleotide
  Target: LAMA2; (-) strand; PAM type: YTN; PAM sequence: CTT
agcatactcaatcagaaatg

SEQ ID NO: 276540 - DNA, 20 bp, Artificial Sequence
  Description of Artificial Sequence: Synthetic oligonucleotide
  Target: LAMA2; (-) strand; PAM type: YTN; PAM sequence: TTC
ttagcatactcaatcagaaa

SEQ ID NO: 276541 - DNA, 20 bp, Artificial Sequence
  Description of Artificial Sequence: Synthetic oligonucleotide
  Target: LAMA2; (-) strand; PAM type: YTN; PAM sequence: CTT
cttagcatactcaatcagaa

SEQ ID NO: 276542 - DNA, 20 bp, Artificial Sequence
  Description of Artificial Sequence: Synthetic oligonucleotide
  Target: LAMA2; (-) strand; PAM type: YTN; PAM sequence: TTG
taaaagcaaagatcaaaatg

SEQ ID NO: 276543 - DNA, 20 bp, Artificial Sequence
  Description of Artificial Sequence: Synthetic oligonucleotide
  Target: LAMA2; (-) strand; PAM type: YTN; PAM sequence: TTT
gtaaaagcaaagatcaaaat

SEQ ID NO: 276544 - DNA, 20 bp, Artificial Sequence
  Description of Artificial Sequence: Synthetic oligonucleotide
  Target: LAMA2; (-) strand; PAM type: YTN; PAM sequence: TTT
tgtaaaagcaaagatcaaaa

SEQ ID NO: 276545 - DNA, 20 bp, Artificial Sequence
  Description of Artificial Sequence: Synthetic oligonucleotide
  Target: LAMA2; (-) strand; PAM type: YTN; PAM sequence: CTT
ttgtaaaagcaaagatcaaa

SEQ ID NO: 276546 - DNA, 20 bp, Artificial Sequence
  Description of Artificial Sequence: Synthetic oligonucleotide
  Target: LAMA2; (-) strand; PAM type: YTN; PAM sequence: TTA
gaatcttttgtaaaagcaaa

SEQ ID NO: 276547 - DNA, 20 bp, Artificial Sequence
  Description of Artificial Sequence: Synthetic oligonucleotide
  Target: LAMA2; (-) strand; PAM type: YTN; PAM sequence: TTC
aataaagtagtgagttagaa

SEQ ID NO: 276548 - DNA, 20 bp, Artificial Sequence
  Description of Artificial Sequence: Synthetic oligonucleotide
  Target: LAMA2; (-) strand; PAM type: YTN; PAM sequence: TTT
caataaagtagtgagttaga

SEQ ID NO: 276549 - DNA, 20 bp, Artificial Sequence
  Description of Artificial Sequence: Synthetic oligonucleotide
  Target: LAMA2; (-) strand; PAM type: YTN; PAM sequence: TTG
atttcaataaagtagtgagt

SEQ ID NO: 276550 - DNA, 20 bp, Artificial Sequence
  Description of Artificial Sequence: Synthetic oligonucleotide
  Target: LAMA2; (-) strand; PAM type: YTN; PAM sequence: TTT
gatttcaataaagtagtgag

SEQ ID NO: 276551 - DNA, 20 bp, Artificial Sequence
  Description of Artificial Sequence: Synthetic oligonucleotide
  Target: LAMA2; (-) strand; PAM type: YTN; PAM sequence: TTT
tgatttcaataaagtagtga

SEQ ID NO: 276552 - DNA, 20 bp, Artificial Sequence
  Description of Artificial Sequence: Synthetic oligonucleotide
  Target: LAMA2; (-) strand; PAM type: YTN; PAM sequence: CTA
tatatattttgatttcaata

SEQ ID NO: 276553 - DNA, 20 bp, Artificial Sequence
  Description of Artificial Sequence: Synthetic oligonucleotide
  Target: LAMA2; (-) strand; PAM type: YTN; PAM sequence: TTG
aagagctatatatattttga

SEQ ID NO: 276554 - DNA, 20 bp, Artificial Sequence
  Description of Artificial Sequence: Synthetic oligonucleotide
  Target: LAMA2; (-) strand; PAM type: YTN; PAM sequence: TTA
attgaagagctatatatatt

SEQ ID NO: 276555 - DNA, 20 bp, Artificial Sequence
  Description of Artificial Sequence: Synthetic oligonucleotide
  Target: LAMA2; (-) strand; PAM type: YTN; PAM sequence: TTC
cacacgtgtgttaattgaag

SEQ ID NO: 276556 - DNA, 20 bp, Artificial Sequence
  Description of Artificial Sequence: Synthetic oligonucleotide
  Target: LAMA2; (-) strand; PAM type: YTN; PAM sequence: TTT
ccacacgtgtgttaattgaa

SEQ ID NO: 276557 - DNA, 20 bp, Artificial Sequence
  Description of Artificial Sequence: Synthetic oligonucleotide
  Target: LAMA2; (-) strand; PAM type: YTN; PAM sequence: CTG
gaaacagggaagatatttcc

SEQ ID NO: 276558 - DNA, 20 bp, Artificial Sequence
  Description of Artificial Sequence: Synthetic oligonucleotide
  Target: LAMA2; (-) strand; PAM type: YTN; PAM sequence: CTG
tgccactggaaacagggaag

SEQ ID NO: 276559 - DNA, 20 bp, Artificial Sequence
  Description of Artificial Sequence: Synthetic oligonucleotide
  Target: LAMA2; (-) strand; PAM type: YTN; PAM sequence: TTA
aaatgctgtgccactggaaa

SEQ ID NO: 276560 - DNA, 20 bp, Artificial Sequence
  Description of Artificial Sequence: Synthetic oligonucleotide
  Target: LAMA2; (-) strand; PAM type: YTN; PAM sequence: TTT
aaaatgctgtgccactggaa

SEQ ID NO: 276561 - DNA, 20 bp, Artificial Sequence
  Description of Artificial Sequence: Synthetic oligonucleotide
  Target: LAMA2; (-) strand; PAM type: YTN; PAM sequence: TTA
atggatcaaggtaatttaaa

SEQ ID NO: 276562 - DNA, 20 bp, Artificial Sequence
  Description of Artificial Sequence: Synthetic oligonucleotide
  Target: LAMA2; (-) strand; PAM type: YTN; PAM sequence: TTG
aattaatggatcaaggtaat

SEQ ID NO: 276563 - DNA, 20 bp, Artificial Sequence
  Description of Artificial Sequence: Synthetic oligonucleotide
  Target: LAMA2; (-) strand; PAM type: YTN; PAM sequence: TTT
gaattaatggatcaaggtaa

SEQ ID NO: 276564 - DNA, 20 bp, Artificial Sequence
  Description of Artificial Sequence: Synthetic oligonucleotide
  Target: LAMA2; (-) strand; PAM type: YTN; PAM sequence: TTG
tttgaattaatggatcaagg

SEQ ID NO: 276565 - DNA, 20 bp, Artificial Sequence
  Description of Artificial Sequence: Synthetic oligonucleotide
  Target: LAMA2; (-) strand; PAM type: YTN; PAM sequence: CTT
gtttgaattaatggatcaag

SEQ ID NO: 276566 - DNA, 20 bp, Artificial Sequence
  Description of Artificial Sequence: Synthetic oligonucleotide
  Target: LAMA2; (-) strand; PAM type: YTN; PAM sequence: TTA
caacatggcttgtttgaatt

SEQ ID NO: 276567 - DNA, 20 bp, Artificial Sequence
  Description of Artificial Sequence: Synthetic oligonucleotide
  Target: LAMA2; (-) strand; PAM type: YTN; PAM sequence: TTT
acaacatggcttgtttgaat

SEQ ID NO: 276568 - DNA, 20 bp, Artificial Sequence
  Description of Artificial Sequence: Synthetic oligonucleotide
  Target: LAMA2; (-) strand; PAM type: YTN; PAM sequence: TTT
tacaacatggcttgtttgaa

SEQ ID NO: 276569 - DNA, 20 bp, Artificial Sequence
  Description of Artificial Sequence: Synthetic oligonucleotide
  Target: LAMA2; (-) strand; PAM type: YTN; PAM sequence: CTT
ttacaacatggcttgtttga

SEQ ID NO: 276570 - DNA, 20 bp, Artificial Sequence
  Description of Artificial Sequence: Synthetic oligonucleotide
  Target: LAMA2; (-) strand; PAM type: YTN; PAM sequence: TTA
aagtatagcatgtacagaaa

SEQ ID NO: 276571 - DNA, 20 bp, Artificial Sequence
  Description of Artificial Sequence: Synthetic oligonucleotide
  Target: LAMA2; (-) strand; PAM type: YTN; PAM sequence: CTT
aaagtatagcatgtacagaa

SEQ ID NO: 276572 - DNA, 20 bp, Artificial Sequence
  Description of Artificial Sequence: Synthetic oligonucleotide
  Target: LAMA2; (-) strand; PAM type: YTN; PAM sequence: CTG
acttaaagtatagcatgtac

SEQ ID NO: 276573 - DNA, 20 bp, Artificial Sequence
  Description of Artificial Sequence: Synthetic oligonucleotide
  Target: LAMA2; (-) strand; PAM type: YTN; PAM sequence: TTG
tatgagctgacttaaagtat

SEQ ID NO: 276574 - DNA, 20 bp, Artificial Sequence
  Description of Artificial Sequence: Synthetic oligonucleotide
  Target: LAMA2; (-) strand; PAM type: YTN; PAM sequence: TTT
gtatgagctgacttaaagta

SEQ ID NO: 276575 - DNA, 20 bp, Artificial Sequence
  Description of Artificial Sequence: Synthetic oligonucleotide
  Target: LAMA2; (-) strand; PAM type: YTN; PAM sequence: TTT
tgtatgagctgacttaaagt

SEQ ID NO: 276576 - DNA, 20 bp, Artificial Sequence
  Description of Artificial Sequence: Synthetic oligonucleotide
  Target: LAMA2; (-) strand; PAM type: YTN; PAM sequence: CTT
ttgtatgagctgacttaaag

SEQ ID NO: 276577 - DNA, 20 bp, Artificial Sequence
  Description of Artificial Sequence: Synthetic oligonucleotide
  Target: LAMA2; (-) strand; PAM type: YTN; PAM sequence: TTA
gcttttgtatgagctgactt

SEQ ID NO: 276578 - DNA, 20 bp, Artificial Sequence
  Description of Artificial Sequence: Synthetic oligonucleotide
  Target: LAMA2; (-) strand; PAM type: YTN; PAM sequence: CTT
agcttttgtatgagctgact

SEQ ID NO: 276579 - DNA, 20 bp, Artificial Sequence
  Description of Artificial Sequence: Synthetic oligonucleotide
  Target: LAMA2; (-) strand; PAM type: YTN; PAM sequence: TTA
gcccttagcttttgtatgag

SEQ ID NO: 276580 - DNA, 20 bp, Artificial Sequence
  Description of Artificial Sequence: Synthetic oligonucleotide
  Target: LAMA2; (-) strand; PAM type: YTN; PAM sequence: TTT
agcccttagcttttgtatga

SEQ ID NO: 276581 - DNA, 20 bp, Artificial Sequence
  Description of Artificial Sequence: Synthetic oligonucleotide
  Target: LAMA2; (-) strand; PAM type: YTN; PAM sequence: TTT
tagcccttagcttttgtatg

SEQ ID NO: 276582 - DNA, 20 bp, Artificial Sequence
  Description of Artificial Sequence: Synthetic oligonucleotide
  Target: LAMA2; (-) strand; PAM type: YTN; PAM sequence: CTG
ccaattttagcccttagctt

SEQ ID NO: 276583 - DNA, 20 bp, Artificial Sequence
  Description of Artificial Sequence: Synthetic oligonucleotide
  Target: LAMA2; (-) strand; PAM type: YTN; PAM sequence: TTA
cacaactgccaattttagcc

SEQ ID NO: 276584 - DNA, 20 bp, Artificial Sequence
  Description of Artificial Sequence: Synthetic oligonucleotide
  Target: LAMA2; (-) strand; PAM type: YTN; PAM sequence: TTT
acacaactgccaattttagc

SEQ ID NO: 276585 - DNA, 20 bp, Artificial Sequence
  Description of Artificial Sequence: Synthetic oligonucleotide
  Target: LAMA2; (-) strand; PAM type: YTN; PAM sequence: TTT
tacacaactgccaattttag

SEQ ID NO: 276586 - DNA, 20 bp, Artificial Sequence
  Description of Artificial Sequence: Synthetic oligonucleotide
  Target: LAMA2; (-) strand; PAM type: YTN; PAM sequence: CTT
ttacacaactgccaatttta

SEQ ID NO: 276587 - DNA, 20 bp, Artificial Sequence
  Description of Artificial Sequence: Synthetic oligonucleotide
  Target: LAMA2; (-) strand; PAM type: YTN; PAM sequence: TTC
ttttacacaactgccaattt

SEQ ID NO: 276588 - DNA, 20 bp, Artificial Sequence
  Description of Artificial Sequence: Synthetic oligonucleotide
  Target: LAMA2; (-) strand; PAM type: YTN; PAM sequence: CTA
acattcttttacacaactgc

SEQ ID NO: 276589 - DNA, 20 bp, Artificial Sequence
  Description of Artificial Sequence: Synthetic oligonucleotide
  Target: LAMA2; (-) strand; PAM type: YTN; PAM sequence: TTC
caagggtctaacattctttt

SEQ ID NO: 276590 - DNA, 20 bp, Artificial Sequence
  Description of Artificial Sequence: Synthetic oligonucleotide
  Target: LAMA2; (-) strand; PAM type: YTN; PAM sequence: CTT
ccaagggtctaacattcttt

SEQ ID NO: 276591 - DNA, 20 bp, Artificial Sequence
  Description of Artificial Sequence: Synthetic oligonucleotide
  Target: LAMA2; (-) strand; PAM type: YTN; PAM sequence: TTA
tcttccaagggtctaacatt

SEQ ID NO: 276592 - DNA, 20 bp, Artificial Sequence
  Description of Artificial Sequence: Synthetic oligonucleotide
  Target: LAMA2; (-) strand; PAM type: YTN; PAM sequence: CTT
atcttccaagggtctaacat

SEQ ID NO: 276593 - DNA, 20 bp, Artificial Sequence
  Description of Artificial Sequence: Synthetic oligonucleotide
  Target: LAMA2; (-) strand; PAM type: YTN; PAM sequence: TTA
caagtcatatcttatcttcc

SEQ ID NO: 276594 - DNA, 20 bp, Artificial Sequence
  Description of Artificial Sequence: Synthetic oligonucleotide
  Target: LAMA2; (-) strand; PAM type: YTN; PAM sequence: CTG
attacaagtcatatcttatc

SEQ ID NO: 276595 - DNA, 20 bp, Artificial Sequence
  Description of Artificial Sequence: Synthetic oligonucleotide
  Target: LAMA2; (-) strand; PAM type: YTN; PAM sequence: CTC
cctgattacaagtcatatct

SEQ ID NO: 276596 - DNA, 20 bp, Artificial Sequence
  Description of Artificial Sequence: Synthetic oligonucleotide
  Target: LAMA2; (-) strand; PAM type: YTN; PAM sequence: TTA
caatctccctgattacaagt

SEQ ID NO: 276597 - DNA, 20 bp, Artificial Sequence
  Description of Artificial Sequence: Synthetic oligonucleotide
  Target: LAMA2; (-) strand; PAM type: YTN; PAM sequence: CTG
attacaatctccctgattac

SEQ ID NO: 276598 - DNA, 20 bp, Artificial Sequence
  Description of Artificial Sequence: Synthetic oligonucleotide
  Target: LAMA2; (-) strand; PAM type: YTN; PAM sequence: TTC
acagacaacaaatgtgggaa

SEQ ID NO: 276599 - DNA, 20 bp, Artificial Sequence
  Description of Artificial Sequence: Synthetic oligonucleotide
  Target: LAMA2; (-) strand; PAM type: YTN; PAM sequence: CTT
cacagacaacaaatgtggga

SEQ ID NO: 276600 - DNA, 20 bp, Artificial Sequence
  Description of Artificial Sequence: Synthetic oligonucleotide
  Target: LAMA2; (-) strand; PAM type: YTN; PAM sequence: CTC
ttcacagacaacaaatgtgg

SEQ ID NO: 276601 - DNA, 20 bp, Artificial Sequence
  Description of Artificial Sequence: Synthetic oligonucleotide
  Target: LAMA2; (-) strand; PAM type: YTN; PAM sequence: TTC
actcttcacagacaacaaat

SEQ ID NO: 276602 - DNA, 20 bp, Artificial Sequence
  Description of Artificial Sequence: Synthetic oligonucleotide
  Target: LAMA2; (-) strand; PAM type: YTN; PAM sequence: TTG
atatgtcattcactcttcac

SEQ ID NO: 276603 - DNA, 20 bp, Artificial Sequence
  Description of Artificial Sequence: Synthetic oligonucleotide
  Target: LAMA2; (-) strand; PAM type: YTN; PAM sequence: TTT
gatatgtcattcactcttca

SEQ ID NO: 276604 - DNA, 20 bp, Artificial Sequence
  Description of Artificial Sequence: Synthetic oligonucleotide
  Target: LAMA2; (-) strand; PAM type: YTN; PAM sequence: TTT
tgatatgtcattcactcttc

SEQ ID NO: 276605 - DNA, 20 bp, Artificial Sequence
  Description of Artificial Sequence: Synthetic oligonucleotide
  Target: LAMA2; (-) strand; PAM type: YTN; PAM sequence: TTC
aggggaagttttgatatgtc

SEQ ID NO: 276606 - DNA, 20 bp, Artificial Sequence
  Description of Artificial Sequence: Synthetic oligonucleotide
  Target: LAMA2; (-) strand; PAM type: YTN; PAM sequence: CTA
attcaggggaagttttgata

SEQ ID NO: 276607 - DNA, 20 bp, Artificial Sequence
  Description of Artificial Sequence: Synthetic oligonucleotide
  Target: LAMA2; (-) strand; PAM type: YTN; PAM sequence: CTC
ccatcactaattcaggggaa

SEQ ID NO: 276608 - DNA, 20 bp, Artificial Sequence
  Description of Artificial Sequence: Synthetic oligonucleotide
  Target: LAMA2; (-) strand; PAM type: YTN; PAM sequence: CTA
ctcccatcactaattcaggg

SEQ ID NO: 276609 - DNA, 20 bp, Artificial Sequence
  Description of Artificial Sequence: Synthetic oligonucleotide
  Target: LAMA2; (-) strand; PAM type: YTN; PAM sequence: TTC
agctactcccatcactaatt

SEQ ID NO: 276610 - DNA, 20 bp, Artificial Sequence
  Description of Artificial Sequence: Synthetic oligonucleotide
  Target: LAMA2; (-) strand; PAM type: YTN; PAM sequence: CTC
attcagctactcccatcact

SEQ ID NO: 276611 - DNA, 20 bp, Artificial Sequence
  Description of Artificial Sequence: Synthetic oligonucleotide
  Target: LAMA2; (-) strand; PAM type: YTN; PAM sequence: TTG
gctcattcagctactcccat

SEQ ID NO: 276612 - DNA, 20 bp, Artificial Sequence
  Description of Artificial Sequence: Synthetic oligonucleotide
  Target: LAMA2; (-) strand; PAM type: YTN; PAM sequence: CTT
ggctcattcagctactccca

SEQ ID NO: 276613 - DNA, 20 bp, Artificial Sequence
  Description of Artificial Sequence: Synthetic oligonucleotide
  Target: LAMA2; (-) strand; PAM type: YTN; PAM sequence: CTG
acacttggctcattcagcta

SEQ ID NO: 276614 - DNA, 20 bp, Artificial Sequence
  Description of Artificial Sequence: Synthetic oligonucleotide
  Target: LAMA2; (-) strand; PAM type: YTN; PAM sequence: CTG
ctgacacttggctcattcag

SEQ ID NO: 276615 - DNA, 20 bp, Artificial Sequence
  Description of Artificial Sequence: Synthetic oligonucleotide
  Target: LAMA2; (-) strand; PAM type: YTN; PAM sequence: TTG
tgctgctgacacttggctca

SEQ ID NO: 276616 - DNA, 20 bp, Artificial Sequence
  Description of Artificial Sequence: Synthetic oligonucleotide
  Target: LAMA2; (-) strand; PAM type: YTN; PAM sequence: CTT
gtgctgctgacacttggctc

SEQ ID NO: 276617 - DNA, 20 bp, Artificial Sequence
  Description of Artificial Sequence: Synthetic oligonucleotide
  Target: LAMA2; (-) strand; PAM type: YTN; PAM sequence: CTG
ggacttgtgctgctgacact

SEQ ID NO: 276618 - DNA, 20 bp, Artificial Sequence
  Description of Artificial Sequence: Synthetic oligonucleotide
  Target: LAMA2; (-) strand; PAM type: YTN; PAM sequence: TTC
ctgggacttgtgctgctgac

SEQ ID NO: 276619 - DNA, 20 bp, Artificial Sequence
  Description of Artificial Sequence: Synthetic oligonucleotide
  Target: LAMA2; (-) strand; PAM type: YTN; PAM sequence: CTC
aaaaaaaaaaaaaaaaaaaa

SEQ ID NO: 276620 - DNA, 20 bp, Artificial Sequence
  Description of Artificial Sequence: Synthetic oligonucleotide
  Target: LAMA2; (-) strand; PAM type: YTN; PAM sequence: CTG
tctcaaaaaaaaaaaaaaaa

SEQ ID NO: 276621 - DNA, 20 bp, Artificial Sequence
  Description of Artificial Sequence: Synthetic oligonucleotide
  Target: LAMA2; (-) strand; PAM type: YTN; PAM sequence: CTC
tgtctcaaaaaaaaaaaaaa

SEQ ID NO: 276622 - DNA, 20 bp, Artificial Sequence
  Description of Artificial Sequence: Synthetic oligonucleotide
  Target: LAMA2; (-) strand; PAM type: YTN; PAM sequence: CTG
ggtgacaagagcgaaactct

SEQ ID NO: 276623 - DNA, 20 bp, Artificial Sequence
  Description of Artificial Sequence: Synthetic oligonucleotide
  Target: LAMA2; (-) strand; PAM type: YTN; PAM sequence: TTG
caatccagcctgggtgacaa

SEQ ID NO: 276624 - DNA, 20 bp, Artificial Sequence
  Description of Artificial Sequence: Synthetic oligonucleotide
  Target: LAMA2; (-) strand; PAM type: YTN; PAM sequence: TTG
caccattgcaatccagcctg

SEQ ID NO: 276625 - DNA, 20 bp, Artificial Sequence
  Description of Artificial Sequence: Synthetic oligonucleotide
  Target: LAMA2; (-) strand; PAM type: YTN; PAM sequence: TTA
aagtgagccaagattgcacc

SEQ ID NO: 276626 - DNA, 20 bp, Artificial Sequence
  Description of Artificial Sequence: Synthetic oligonucleotide
  Target: LAMA2; (-) strand; PAM type: YTN; PAM sequence: CTG
agaggtggaggttaaagtga

SEQ ID NO: 276627 - DNA, 20 bp, Artificial Sequence
  Description of Artificial Sequence: Synthetic oligonucleotide
  Target: LAMA2; (-) strand; PAM type: YTN; PAM sequence: TTG
acctgagaggtggaggttaa

SEQ ID NO: 276628 - DNA, 20 bp, Artificial Sequence
  Description of Artificial Sequence: Synthetic oligonucleotide
  Target: LAMA2; (-) strand; PAM type: YTN; PAM sequence: CTT
gacctgagaggtggaggtta

SEQ ID NO: 276629 - DNA, 20 bp, Artificial Sequence
  Description of Artificial Sequence: Synthetic oligonucleotide
  Target: LAMA2; (-) strand; PAM type: YTN; PAM sequence: CTG
aggcaggagaatcacttgac

SEQ ID NO: 276630 - DNA, 20 bp, Artificial Sequence
  Description of Artificial Sequence: Synthetic oligonucleotide
  Target: LAMA2; (-) strand; PAM type: YTN; PAM sequence: TTG
ggaggctgaggcaggagaat

SEQ ID NO: 276631 - DNA, 20 bp, Artificial Sequence
  Description of Artificial Sequence: Synthetic oligonucleotide
  Target: LAMA2; (-) strand; PAM type: YTN; PAM sequence: CTT
gggaggctgaggcaggagaa

SEQ ID NO: 276632 - DNA, 20 bp, Artificial Sequence
  Description of Artificial Sequence: Synthetic oligonucleotide
  Target: LAMA2; (-) strand; PAM type: YTN; PAM sequence: CTA
cttgggaggctgaggcagga

SEQ ID NO: 276633 - DNA, 20 bp, Artificial Sequence
  Description of Artificial Sequence: Synthetic oligonucleotide
  Target: LAMA2; (-) strand; PAM type: YTN; PAM sequence: CTC
agctacttgggaggctgagg

SEQ ID NO: 276634 - DNA, 20 bp, Artificial Sequence
  Description of Artificial Sequence: Synthetic oligonucleotide
  Target: LAMA2; (-) strand; PAM type: YTN; PAM sequence: CTG
taatctcagctacttgggag

SEQ ID NO: 276635 - DNA, 20 bp, Artificial Sequence
  Description of Artificial Sequence: Synthetic oligonucleotide
  Target: LAMA2; (-) strand; PAM type: YTN; PAM sequence: CTG
ggtgtggtggtgcatgcctg

SEQ ID NO: 276636 - DNA, 20 bp, Artificial Sequence
  Description of Artificial Sequence: Synthetic oligonucleotide
  Target: LAMA2; (-) strand; PAM type: YTN; PAM sequence: TTA
gctgggtgtggtggtgcatg

SEQ ID NO: 276637 - DNA, 20 bp, Artificial Sequence
  Description of Artificial Sequence: Synthetic oligonucleotide
  Target: LAMA2; (-) strand; PAM type: YTN; PAM sequence: CTA
aaaatacaaaattagctggg

SEQ ID NO: 276638 - DNA, 20 bp, Artificial Sequence
  Description of Artificial Sequence: Synthetic oligonucleotide
  Target: LAMA2; (-) strand; PAM type: YTN; PAM sequence: CTA
ctaaaaatacaaaattagct

SEQ ID NO: 276639 - DNA, 20 bp, Artificial Sequence
  Description of Artificial Sequence: Synthetic oligonucleotide
  Target: LAMA2; (-) strand; PAM type: YTN; PAM sequence: CTC
tactaaaaatacaaaattag

SEQ ID NO: 276640 - DNA, 20 bp, Artificial Sequence
  Description of Artificial Sequence: Synthetic oligonucleotide
  Target: LAMA2; (-) strand; PAM type: YTN; PAM sequence: CTC
gtctctactaaaaatacaaa

SEQ ID NO: 276641 - DNA, 20 bp, Artificial Sequence
  Description of Artificial Sequence: Synthetic oligonucleotide
  Target: LAMA2; (-) strand; PAM type: YTN; PAM sequence: CTG
gccaacatggtgaaacctcg

SEQ ID NO: 276642 - DNA, 20 bp, Artificial Sequence
  Description of Artificial Sequence: Synthetic oligonucleotide
  Target: LAMA2; (-) strand; PAM type: YTN; PAM sequence: CTG
aggtcaggagtccgagacca

SEQ ID NO: 276643 - DNA, 20 bp, Artificial Sequence
  Description of Artificial Sequence: Synthetic oligonucleotide
  Target: LAMA2; (-) strand; PAM type: YTN; PAM sequence: TTG
ggaggccaaggcaggtggat

SEQ ID NO: 276644 - DNA, 20 bp, Artificial Sequence
  Description of Artificial Sequence: Synthetic oligonucleotide
  Target: LAMA2; (-) strand; PAM type: YTN; PAM sequence: TTT
gggaggccaaggcaggtgga

SEQ ID NO: 276645 - DNA, 20 bp, Artificial Sequence
  Description of Artificial Sequence: Synthetic oligonucleotide
  Target: LAMA2; (-) strand; PAM type: YTN; PAM sequence: CTT
tgggaggccaaggcaggtgg

SEQ ID NO: 276646 - DNA, 20 bp, Artificial Sequence
  Description of Artificial Sequence: Synthetic oligonucleotide
  Target: LAMA2; (-) strand; PAM type: YTN; PAM sequence: TTA
tcccagcactttgggaggcc

SEQ ID NO: 276647 - DNA, 20 bp, Artificial Sequence
  Description of Artificial Sequence: Synthetic oligonucleotide
  Target: LAMA2; (-) strand; PAM type: YTN; PAM sequence: CTG
ttatcccagcactttgggag

SEQ ID NO: 276648 - DNA, 20 bp, Artificial Sequence
  Description of Artificial Sequence: Synthetic oligonucleotide
  Target: LAMA2; (-) strand; PAM type: YTN; PAM sequence: CTC
atgcctgttatcccagcact

SEQ ID NO: 276649 - DNA, 20 bp, Artificial Sequence
  Description of Artificial Sequence: Synthetic oligonucleotide
  Target: LAMA2; (-) strand; PAM type: YTN; PAM sequence: TTA
ataaataaataaaaatgggt

SEQ ID NO: 276650 - DNA, 20 bp, Artificial Sequence
  Description of Artificial Sequence: Synthetic oligonucleotide
  Target: LAMA2; (-) strand; PAM type: YTN; PAM sequence: TTT
aataaataaataaaaatggg

SEQ ID NO: 276651 - DNA, 20 bp, Artificial Sequence
  Description of Artificial Sequence: Synthetic oligonucleotide
  Target: LAMA2; (-) strand; PAM type: YTN; PAM sequence: TTT
taataaataaataaaaatgg

SEQ ID NO: 276652 - DNA, 20 bp, Artificial Sequence
  Description of Artificial Sequence: Synthetic oligonucleotide
  Target: LAMA2; (-) strand; PAM type: YTN; PAM sequence: TTT
ttaataaataaataaaaatg

SEQ ID NO: 276653 - DNA, 20 bp, Artificial Sequence
  Description of Artificial Sequence: Synthetic oligonucleotide
  Target: LAMA2; (-) strand; PAM type: YTN; PAM sequence: TTT
tttaataaataaataaaaat

SEQ ID NO: 276654 - DNA, 20 bp, Artificial Sequence
  Description of Artificial Sequence: Synthetic oligonucleotide
  Target: LAMA2; (-) strand; PAM type: YTN; PAM sequence: CTC
aataaatattttttaataaa

SEQ ID NO: 276655 - DNA, 20 bp, Artificial Sequence
  Description of Artificial Sequence: Synthetic oligonucleotide
  Target: LAMA2; (-) strand; PAM type: YTN; PAM sequence: TTC
ctcaataaatattttttaat

SEQ ID NO: 276656 - DNA, 20 bp, Artificial Sequence
  Description of Artificial Sequence: Synthetic oligonucleotide
  Target: LAMA2; (-) strand; PAM type: YTN; PAM sequence: TTT
cctcaataaatattttttaa

SEQ ID NO: 276657 - DNA, 20 bp, Artificial Sequence
  Description of Artificial Sequence: Synthetic oligonucleotide
  Target: LAMA2; (-) strand; PAM type: YTN; PAM sequence: CTA
gtatgtagatgagtttcctc

SEQ ID NO: 276658 - DNA, 20 bp, Artificial Sequence
  Description of Artificial Sequence: Synthetic oligonucleotide
  Target: LAMA2; (-) strand; PAM type: YTN; PAM sequence: CTC
tagtatgtagatgagtttcc

SEQ ID NO: 276659 - DNA, 20 bp, Artificial Sequence
  Description of Artificial Sequence: Synthetic oligonucleotide
  Target: LAMA2; (-) strand; PAM type: YTN; PAM sequence: CTA
tctctagtatgtagatgagt

SEQ ID NO: 276660 - DNA, 20 bp, Artificial Sequence
  Description of Artificial Sequence: Synthetic oligonucleotide
  Target: LAMA2; (-) strand; PAM type: YTN; PAM sequence: TTA
tatatcactatctctagtat

SEQ ID NO: 276661 - DNA, 20 bp, Artificial Sequence
  Description of Artificial Sequence: Synthetic oligonucleotide
  Target: LAMA2; (-) strand; PAM type: YTN; PAM sequence: TTT
atatatcactatctctagta

SEQ ID NO: 276662 - DNA, 20 bp, Artificial Sequence
  Description of Artificial Sequence: Synthetic oligonucleotide
  Target: LAMA2; (-) strand; PAM type: YTN; PAM sequence: TTT
tatatatcactatctctagt

SEQ ID NO: 276663 - DNA, 20 bp, Artificial Sequence
  Description of Artificial Sequence: Synthetic oligonucleotide
  Target: LAMA2; (-) strand; PAM type: YTN; PAM sequence: TTC
cataaagacagttttatata

SEQ ID NO: 276664 - DNA, 20 bp, Artificial Sequence
  Description of Artificial Sequence: Synthetic oligonucleotide
  Target: LAMA2; (-) strand; PAM type: YTN; PAM sequence: CTG
taacacaaattccataaaga

SEQ ID NO: 276665 - DNA, 20 bp, Artificial Sequence
  Description of Artificial Sequence: Synthetic oligonucleotide
  Target: LAMA2; (-) strand; PAM type: YTN; PAM sequence: CTG
cactgtaacacaaattccat

SEQ ID NO: 276666 - DNA, 20 bp, Artificial Sequence
  Description of Artificial Sequence: Synthetic oligonucleotide
  Target: LAMA2; (-) strand; PAM type: YTN; PAM sequence: CTC
ctgcactgtaacacaaattc

SEQ ID NO: 276667 - DNA, 20 bp, Artificial Sequence
  Description of Artificial Sequence: Synthetic oligonucleotide
  Target: LAMA2; (-) strand; PAM type: YTN; PAM sequence: CTG
tctcctgcactgtaacacaa

SEQ ID NO: 276668 - DNA, 20 bp, Artificial Sequence
  Description of Artificial Sequence: Synthetic oligonucleotide
  Target: LAMA2; (-) strand; PAM type: YTN; PAM sequence: TTA
gtgactgtctcctgcactgt

SEQ ID NO: 276669 - DNA, 20 bp, Artificial Sequence
  Description of Artificial Sequence: Synthetic oligonucleotide
  Target: LAMA2; (-) strand; PAM type: YTN; PAM sequence: CTT
agtgactgtctcctgcactg

SEQ ID NO: 276670 - DNA, 20 bp, Artificial Sequence
  Description of Artificial Sequence: Synthetic oligonucleotide
  Target: LAMA2; (-) strand; PAM type: YTN; PAM sequence: TTG
acttagtgactgtctcctgc

SEQ ID NO: 276671 - DNA, 20 bp, Artificial Sequence
  Description of Artificial Sequence: Synthetic oligonucleotide
  Target: LAMA2; (-) strand; PAM type: YTN; PAM sequence: TTA
ttgacttagtgactgtctcc

SEQ ID NO: 276672 - DNA, 20 bp, Artificial Sequence
  Description of Artificial Sequence: Synthetic oligonucleotide
  Target: LAMA2; (-) strand; PAM type: YTN; PAM sequence: TTT
attgacttagtgactgtctc

SEQ ID NO: 276673 - DNA, 20 bp, Artificial Sequence
  Description of Artificial Sequence: Synthetic oligonucleotide
  Target: LAMA2; (-) strand; PAM type: YTN; PAM sequence: TTA
tttattgacttagtgactgt

SEQ ID NO: 276674 - DNA, 20 bp, Artificial Sequence
  Description of Artificial Sequence: Synthetic oligonucleotide
  Target: LAMA2; (-) strand; PAM type: YTN; PAM sequence: CTT
atttattgacttagtgactg

SEQ ID NO: 276675 - DNA, 20 bp, Artificial Sequence
  Description of Artificial Sequence: Synthetic oligonucleotide
  Target: LAMA2; (-) strand; PAM type: YTN; PAM sequence: TTA
tgcttatttattgacttagt

SEQ ID NO: 276676 - DNA, 20 bp, Artificial Sequence
  Description of Artificial Sequence: Synthetic oligonucleotide
  Target: LAMA2; (-) strand; PAM type: YTN; PAM sequence: CTT
atgcttatttattgacttag

SEQ ID NO: 276677 - DNA, 20 bp, Artificial Sequence
  Description of Artificial Sequence: Synthetic oligonucleotide
  Target: LAMA2; (-) strand; PAM type: YTN; PAM sequence: TTA
tggtcgtagcttatgcttat

SEQ ID NO: 276678 - DNA, 20 bp, Artificial Sequence
  Description of Artificial Sequence: Synthetic oligonucleotide
  Target: LAMA2; (-) strand; PAM type: YTN; PAM sequence: TTT
atggtcgtagcttatgctta

SEQ ID NO: 276679 - DNA, 20 bp, Artificial Sequence
  Description of Artificial Sequence: Synthetic oligonucleotide
  Target: LAMA2; (-) strand; PAM type: YTN; PAM sequence: CTT
tatggtcgtagcttatgctt

SEQ ID NO: 276680 - DNA, 20 bp, Artificial Sequence
  Description of Artificial Sequence: Synthetic oligonucleotide
  Target: LAMA2; (-) strand; PAM type: YTN; PAM sequence: TTA
tcagcccgtgcatccagact

SEQ ID NO: 276681 - DNA, 20 bp, Artificial Sequence
  Description of Artificial Sequence: Synthetic oligonucleotide
  Target: LAMA2; (-) strand; PAM type: YTN; PAM sequence: TTT
atcagcccgtgcatccagac

SEQ ID NO: 276682 - DNA, 20 bp, Artificial Sequence
  Description of Artificial Sequence: Synthetic oligonucleotide
  Target: LAMA2; (-) strand; PAM type: YTN; PAM sequence: TTA
tgtttatcagcccgtgcatc

SEQ ID NO: 276683 - DNA, 20 bp, Artificial Sequence
  Description of Artificial Sequence: Synthetic oligonucleotide
  Target: LAMA2; (-) strand; PAM type: YTN; PAM sequence: CTT
atgtttatcagcccgtgcat

SEQ ID NO: 276684 - DNA, 20 bp, Artificial Sequence
  Description of Artificial Sequence: Synthetic oligonucleotide
  Target: LAMA2; (-) strand; PAM type: YTN; PAM sequence: TTA
catatcagtaaacaacttat

SEQ ID NO: 276685 - DNA, 20 bp, Artificial Sequence
  Description of Artificial Sequence: Synthetic oligonucleotide
  Target: LAMA2; (-) strand; PAM type: YTN; PAM sequence: TTA
ttacatatcagtaaacaact

SEQ ID NO: 276686 - DNA, 20 bp, Artificial Sequence
  Description of Artificial Sequence: Synthetic oligonucleotide
  Target: LAMA2; (-) strand; PAM type: YTN; PAM sequence: TTT
attacatatcagtaaacaac

SEQ ID NO: 276687 - DNA, 20 bp, Artificial Sequence
  Description of Artificial Sequence: Synthetic oligonucleotide
  Target: LAMA2; (-) strand; PAM type: YTN; PAM sequence: TTA
tgcaatatcatgcaacatac

SEQ ID NO: 276688 - DNA, 20 bp, Artificial Sequence
  Description of Artificial Sequence: Synthetic oligonucleotide
  Target: LAMA2; (-) strand; PAM type: YTN; PAM sequence: CTA
ttatgcaatatcatgcaaca

SEQ ID NO: 276689 - DNA, 20 bp, Artificial Sequence
  Description of Artificial Sequence: Synthetic oligonucleotide
  Target: LAMA2; (-) strand; PAM type: YTN; PAM sequence: TTG
aatctattatgcaatatcat

SEQ ID NO: 276690 - DNA, 20 bp, Artificial Sequence
  Description of Artificial Sequence: Synthetic oligonucleotide
  Target: LAMA2; (-) strand; PAM type: YTN; PAM sequence: TTA
atgaaggacaacacattgaa

SEQ ID NO: 276691 - DNA, 20 bp, Artificial Sequence
  Description of Artificial Sequence: Synthetic oligonucleotide
  Target: LAMA2; (-) strand; PAM type: YTN; PAM sequence: TTG
ttaatgaaggacaacacatt

SEQ ID NO: 276692 - DNA, 20 bp, Artificial Sequence
  Description of Artificial Sequence: Synthetic oligonucleotide
  Target: LAMA2; (-) strand; PAM type: YTN; PAM sequence: CTA
cacattgttaatgaaggaca

SEQ ID NO: 276693 - DNA, 20 bp, Artificial Sequence
  Description of Artificial Sequence: Synthetic oligonucleotide
  Target: LAMA2; (-) strand; PAM type: YTN; PAM sequence: TTG
aactacacattgttaatgaa

SEQ ID NO: 276694 - DNA, 20 bp, Artificial Sequence
  Description of Artificial Sequence: Synthetic oligonucleotide
  Target: LAMA2; (-) strand; PAM type: YTN; PAM sequence: CTG
ttgaactacacattgttaat

SEQ ID NO: 276695 - DNA, 20 bp, Artificial Sequence
  Description of Artificial Sequence: Synthetic oligonucleotide
  Target: LAMA2; (-) strand; PAM type: YTN; PAM sequence: CTA
gcagaaaggcacagcctgtt

SEQ ID NO: 276696 - DNA, 20 bp, Artificial Sequence
  Description of Artificial Sequence: Synthetic oligonucleotide
  Target: LAMA2; (-) strand; PAM type: YTN; PAM sequence: TTA
ggtaataaaaatcagaaata

SEQ ID NO: 276697 - DNA, 20 bp, Artificial Sequence
  Description of Artificial Sequence: Synthetic oligonucleotide
  Target: LAMA2; (-) strand; PAM type: YTN; PAM sequence: CTA
aaaacaaagattaggtaata

SEQ ID NO: 276698 - DNA, 20 bp, Artificial Sequence
  Description of Artificial Sequence: Synthetic oligonucleotide
  Target: LAMA2; (-) strand; PAM type: YTN; PAM sequence: TTG
ctaaaaacaaagattaggta

SEQ ID NO: 276699 - DNA, 20 bp, Artificial Sequence
  Description of Artificial Sequence: Synthetic oligonucleotide
  Target: LAMA2; (-) strand; PAM type: YTN; PAM sequence: TTG
ccgggagttgctaaaaacaa

SEQ ID NO: 276700 - DNA, 20 bp, Artificial Sequence
  Description of Artificial Sequence: Synthetic oligonucleotide
  Target: LAMA2; (-) strand; PAM type: YTN; PAM sequence: TTT
gccgggagttgctaaaaaca

SEQ ID NO: 276701 - DNA, 20 bp, Artificial Sequence
  Description of Artificial Sequence: Synthetic oligonucleotide
  Target: LAMA2; (-) strand; PAM type: YTN; PAM sequence: TTT
tgccgggagttgctaaaaac

SEQ ID NO: 276702 - DNA, 20 bp, Artificial Sequence
  Description of Artificial Sequence: Synthetic oligonucleotide
  Target: LAMA2; (-) strand; PAM type: YTN; PAM sequence: CTT
ttgccgggagttgctaaaaa

SEQ ID NO: 276703 - DNA, 20 bp, Artificial Sequence
  Description of Artificial Sequence: Synthetic oligonucleotide
  Target: LAMA2; (-) strand; PAM type: YTN; PAM sequence: TTA
cttttgccgggagttgctaa

SEQ ID NO: 276704 - DNA, 20 bp, Artificial Sequence
  Description of Artificial Sequence: Synthetic oligonucleotide
  Target: LAMA2; (-) strand; PAM type: YTN; PAM sequence: TTG
attacttttgccgggagttg

SEQ ID NO: 276705 - DNA, 20 bp, Artificial Sequence
  Description of Artificial Sequence: Synthetic oligonucleotide
  Target: LAMA2; (-) strand; PAM type: YTN; PAM sequence: CTT
gattacttttgccgggagtt

SEQ ID NO: 276706 - DNA, 20 bp, Artificial Sequence
  Description of Artificial Sequence: Synthetic oligonucleotide
  Target: LAMA2; (-) strand; PAM type: YTN; PAM sequence: TTC
gtcttgattacttttgccgg

SEQ ID NO: 276707 - DNA, 20 bp, Artificial Sequence
  Description of Artificial Sequence: Synthetic oligonucleotide
  Target: LAMA2; (-) strand; PAM type: YTN; PAM sequence: TTG
attcgtcttgattacttttg

SEQ ID NO: 276708 - DNA, 20 bp, Artificial Sequence
  Description of Artificial Sequence: Synthetic oligonucleotide
  Target: LAMA2; (-) strand; PAM type: YTN; PAM sequence: TTA
tatagattgattcgtcttga

SEQ ID NO: 276709 - DNA, 20 bp, Artificial Sequence
  Description of Artificial Sequence: Synthetic oligonucleotide
  Target: LAMA2; (-) strand; PAM type: YTN; PAM sequence: TTT
atatagattgattcgtcttg

SEQ ID NO: 276710 - DNA, 20 bp, Artificial Sequence
  Description of Artificial Sequence: Synthetic oligonucleotide
  Target: LAMA2; (-) strand; PAM type: YTN; PAM sequence: TTT
tatatagattgattcgtctt

SEQ ID NO: 276711 - DNA, 20 bp, Artificial Sequence
  Description of Artificial Sequence: Synthetic oligonucleotide
  Target: LAMA2; (-) strand; PAM type: YTN; PAM sequence: TTT
ttatatagattgattcgtct

SEQ ID NO: 276712 - DNA, 20 bp, Artificial Sequence
  Description of Artificial Sequence: Synthetic oligonucleotide
  Target: LAMA2; (-) strand; PAM type: YTN; PAM sequence: TTT
tttatatagattgattcgtc

SEQ ID NO: 276713 - DNA, 20 bp, Artificial Sequence
  Description of Artificial Sequence: Synthetic oligonucleotide
  Target: LAMA2; (-) strand; PAM type: YTN; PAM sequence: CTT
ttttatatagattgattcgt

SEQ ID NO: 276714 - DNA, 20 bp, Artificial Sequence
  Description of Artificial Sequence: Synthetic oligonucleotide
  Target: LAMA2; (-) strand; PAM type: YTN; PAM sequence: TTC
ttttttatatagattgattc

SEQ ID NO: 276715 - DNA, 20 bp, Artificial Sequence
  Description of Artificial Sequence: Synthetic oligonucleotide
  Target: LAMA2; (-) strand; PAM type: YTN; PAM sequence: TTT
cttttttatatagattgatt

SEQ ID NO: 276716 - DNA, 20 bp, Artificial Sequence
  Description of Artificial Sequence: Synthetic oligonucleotide
  Target: LAMA2; (-) strand; PAM type: YTN; PAM sequence: TTT
tcttttttatatagattgat

SEQ ID NO: 276717 - DNA, 20 bp, Artificial Sequence
  Description of Artificial Sequence: Synthetic oligonucleotide
  Target: LAMA2; (-) strand; PAM type: YTN; PAM sequence: TTA
ttttcttttttatatagatt

SEQ ID NO: 276718 - DNA, 20 bp, Artificial Sequence
  Description of Artificial Sequence: Synthetic oligonucleotide
  Target: LAMA2; (-) strand; PAM type: YTN; PAM sequence: CTA
cagagtggtagaaacataga

SEQ ID NO: 276719 - DNA, 20 bp, Artificial Sequence
  Description of Artificial Sequence: Synthetic oligonucleotide
  Target: LAMA2; (-) strand; PAM type: YTN; PAM sequence: TTC
tacagagtggtagaaacata

SEQ ID NO: 276720 - DNA, 20 bp, Artificial Sequence
  Description of Artificial Sequence: Synthetic oligonucleotide
  Target: LAMA2; (-) strand; PAM type: YTN; PAM sequence: TTA
tattctacagagtggtagaa

SEQ ID NO: 276721 - DNA, 20 bp, Artificial Sequence
  Description of Artificial Sequence: Synthetic oligonucleotide
  Target: LAMA2; (-) strand; PAM type: YTN; PAM sequence: CTG
aattatattctacagagtgg

SEQ ID NO: 276722 - DNA, 20 bp, Artificial Sequence
  Description of Artificial Sequence: Synthetic oligonucleotide
  Target: LAMA2; (-) strand; PAM type: YTN; PAM sequence: TTA
tctgaattatattctacaga

SEQ ID NO: 276723 - DNA, 20 bp, Artificial Sequence
  Description of Artificial Sequence: Synthetic oligonucleotide
  Target: LAMA2; (-) strand; PAM type: YTN; PAM sequence: TTT
atctgaattatattctacag

SEQ ID NO: 276724 - DNA, 20 bp, Artificial Sequence
  Description of Artificial Sequence: Synthetic oligonucleotide
  Target: LAMA2; (-) strand; PAM type: YTN; PAM sequence: TTA
gaacccatttatctgaatta

SEQ ID NO: 276725 - DNA, 20 bp, Artificial Sequence
  Description of Artificial Sequence: Synthetic oligonucleotide
  Target: LAMA2; (-) strand; PAM type: YTN; PAM sequence: CTT
agaacccatttatctgaatt

SEQ ID NO: 276726 - DNA, 20 bp, Artificial Sequence
  Description of Artificial Sequence: Synthetic oligonucleotide
  Target: LAMA2; (-) strand; PAM type: YTN; PAM sequence: TTC
ttagaacccatttatctgaa

SEQ ID NO: 276727 - DNA, 20 bp, Artificial Sequence
  Description of Artificial Sequence: Synthetic oligonucleotide
  Target: LAMA2; (-) strand; PAM type: YTN; PAM sequence: CTT
cttagaacccatttatctga

SEQ ID NO: 276728 - DNA, 20 bp, Artificial Sequence
  Description of Artificial Sequence: Synthetic oligonucleotide
  Target: LAMA2; (-) strand; PAM type: YTN; PAM sequence: TTC
ttcttagaacccatttatct

SEQ ID NO: 276729 - DNA, 20 bp, Artificial Sequence
  Description of Artificial Sequence: Synthetic oligonucleotide
  Target: LAMA2; (-) strand; PAM type: YTN; PAM sequence: TTG
ttcttcttagaacccattta

SEQ ID NO: 276730 - DNA, 20 bp, Artificial Sequence
  Description of Artificial Sequence: Synthetic oligonucleotide
  Target: LAMA2; (-) strand; PAM type: YTN; PAM sequence: TTT
gttcttcttagaacccattt

SEQ ID NO: 276731 - DNA, 20 bp, Artificial Sequence
  Description of Artificial Sequence: Synthetic oligonucleotide
  Target: LAMA2; (-) strand; PAM type: YTN; PAM sequence: TTT
tgttcttcttagaacccatt

SEQ ID NO: 276732 - DNA, 20 bp, Artificial Sequence
  Description of Artificial Sequence: Synthetic oligonucleotide
  Target: LAMA2; (-) strand; PAM type: YTN; PAM sequence: TTA
ttttgttcttcttagaaccc

SEQ ID NO: 276733 - DNA, 20 bp, Artificial Sequence
  Description of Artificial Sequence: Synthetic oligonucleotide
  Target: LAMA2; (-) strand; PAM type: YTN; PAM sequence: CTT
attttgttcttcttagaacc

SEQ ID NO: 276734 - DNA, 20 bp, Artificial Sequence
  Description of Artificial Sequence: Synthetic oligonucleotide
  Target: LAMA2; (-) strand; PAM type: YTN; PAM sequence: TTA
ccttattttgttcttcttag

SEQ ID NO: 276735 - DNA, 20 bp, Artificial Sequence
  Description of Artificial Sequence: Synthetic oligonucleotide
  Target: LAMA2; (-) strand; PAM type: YTN; PAM sequence: TTA
taattaccttattttgttct

SEQ ID NO: 276736 - DNA, 20 bp, Artificial Sequence
  Description of Artificial Sequence: Synthetic oligonucleotide
  Target: LAMA2; (-) strand; PAM type: YTN; PAM sequence: CTA
ttataattaccttattttgt

SEQ ID NO: 276737 - DNA, 20 bp, Artificial Sequence
  Description of Artificial Sequence: Synthetic oligonucleotide
  Target: LAMA2; (-) strand; PAM type: YTN; PAM sequence: TTA
actattataattaccttatt

SEQ ID NO: 276738 - DNA, 20 bp, Artificial Sequence
  Description of Artificial Sequence: Synthetic oligonucleotide
  Target: LAMA2; (-) strand; PAM type: YTN; PAM sequence: TTT
aactattataattaccttat

SEQ ID NO: 276739 - DNA, 20 bp, Artificial Sequence
  Description of Artificial Sequence: Synthetic oligonucleotide
  Target: LAMA2; (-) strand; PAM type: YTN; PAM sequence: TTT
taactattataattacctta

SEQ ID NO: 276740 - DNA, 20 bp, Artificial Sequence
  Description of Artificial Sequence: Synthetic oligonucleotide
  Target: LAMA2; (-) strand; PAM type: YTN; PAM sequence: CTG
taattttaactattataatt

SEQ ID NO: 276741 - DNA, 20 bp, Artificial Sequence
  Description of Artificial Sequence: Synthetic oligonucleotide
  Target: LAMA2; (-) strand; PAM type: YTN; PAM sequence: CTG
gcacccagtaacactgtaat

SEQ ID NO: 276742 - DNA, 20 bp, Artificial Sequence
  Description of Artificial Sequence: Synthetic oligonucleotide
  Target: LAMA2; (-) strand; PAM type: YTN; PAM sequence: CTG
cctggcacccagtaacactg

SEQ ID NO: 276743 - DNA, 20 bp, Artificial Sequence
  Description of Artificial Sequence: Synthetic oligonucleotide
  Target: LAMA2; (-) strand; PAM type: YTN; PAM sequence: TTA
gaacactgcctggcacccag

SEQ ID NO: 276744 - DNA, 20 bp, Artificial Sequence
  Description of Artificial Sequence: Synthetic oligonucleotide
  Target: LAMA2; (-) strand; PAM type: YTN; PAM sequence: CTT
agaacactgcctggcaccca

SEQ ID NO: 276745 - DNA, 20 bp, Artificial Sequence
  Description of Artificial Sequence: Synthetic oligonucleotide
  Target: LAMA2; (-) strand; PAM type: YTN; PAM sequence: TTA
gcttagaacactgcctggca

SEQ ID NO: 276746 - DNA, 20 bp, Artificial Sequence
  Description of Artificial Sequence: Synthetic oligonucleotide
  Target: LAMA2; (-) strand; PAM type: YTN; PAM sequence: TTG
gagaagaattagcttagaac

SEQ ID NO: 276747 - DNA, 20 bp, Artificial Sequence
  Description of Artificial Sequence: Synthetic oligonucleotide
  Target: LAMA2; (-) strand; PAM type: YTN; PAM sequence: TTG
taaaattggagaagaattag

SEQ ID NO: 276748 - DNA, 20 bp, Artificial Sequence
  Description of Artificial Sequence: Synthetic oligonucleotide
  Target: LAMA2; (-) strand; PAM type: YTN; PAM sequence: TTG
atagacattgtaaaattgga

SEQ ID NO: 276749 - DNA, 20 bp, Artificial Sequence
  Description of Artificial Sequence: Synthetic oligonucleotide
  Target: LAMA2; (-) strand; PAM type: YTN; PAM sequence: TTA
acaagaaccccacatgattg

SEQ ID NO: 276750 - DNA, 20 bp, Artificial Sequence
  Description of Artificial Sequence: Synthetic oligonucleotide
  Target: LAMA2; (-) strand; PAM type: YTN; PAM sequence: TTT
aacaagaaccccacatgatt

SEQ ID NO: 276751 - DNA, 20 bp, Artificial Sequence
  Description of Artificial Sequence: Synthetic oligonucleotide
  Target: LAMA2; (-) strand; PAM type: YTN; PAM sequence: CTT
taacaagaaccccacatgat

SEQ ID NO: 276752 - DNA, 20 bp, Artificial Sequence
  Description of Artificial Sequence: Synthetic oligonucleotide
  Target: LAMA2; (-) strand; PAM type: YTN; PAM sequence: CTG
cactttaacaagaaccccac

SEQ ID NO: 276753 - DNA, 20 bp, Artificial Sequence
  Description of Artificial Sequence: Synthetic oligonucleotide
  Target: LAMA2; (-) strand; PAM type: YTN; PAM sequence: CTC
agaatctgcactttaacaag

SEQ ID NO: 276754 - DNA, 20 bp, Artificial Sequence
  Description of Artificial Sequence: Synthetic oligonucleotide
  Target: LAMA2; (-) strand; PAM type: YTN; PAM sequence: CTG
actcagaatctgcactttaa

SEQ ID NO: 276755 - DNA, 20 bp, Artificial Sequence
  Description of Artificial Sequence: Synthetic oligonucleotide
  Target: LAMA2; (-) strand; PAM type: YTN; PAM sequence: CTA
ctgactcagaatctgcactt

SEQ ID NO: 276756 - DNA, 20 bp, Artificial Sequence
  Description of Artificial Sequence: Synthetic oligonucleotide
  Target: LAMA2; (-) strand; PAM type: YTN; PAM sequence: CTG
ggaactactgactcagaatc

SEQ ID NO: 276757 - DNA, 20 bp, Artificial Sequence
  Description of Artificial Sequence: Synthetic oligonucleotide
  Target: LAMA2; (-) strand; PAM type: YTN; PAM sequence: TTC
ctgggaactactgactcaga

SEQ ID NO: 276758 - DNA, 20 bp, Artificial Sequence
  Description of Artificial Sequence: Synthetic oligonucleotide
  Target: LAMA2; (-) strand; PAM type: YTN; PAM sequence: CTC
aatccattcctgggaactac

SEQ ID NO: 276759 - DNA, 20 bp, Artificial Sequence
  Description of Artificial Sequence: Synthetic oligonucleotide
  Target: LAMA2; (-) strand; PAM type: YTN; PAM sequence: TTA
gaaatgcataatctcaatcc

SEQ ID NO: 276760 - DNA, 20 bp, Artificial Sequence
  Description of Artificial Sequence: Synthetic oligonucleotide
  Target: LAMA2; (-) strand; PAM type: YTN; PAM sequence: CTC
attagaaatgcataatctca

SEQ ID NO: 276761 - DNA, 20 bp, Artificial Sequence
  Description of Artificial Sequence: Synthetic oligonucleotide
  Target: LAMA2; (-) strand; PAM type: YTN; PAM sequence: CTG
gaagctcattagaaatgcat

SEQ ID NO: 276762 - DNA, 20 bp, Artificial Sequence
  Description of Artificial Sequence: Synthetic oligonucleotide
  Target: LAMA2; (-) strand; PAM type: YTN; PAM sequence: TTC
accagcagcatcagcgtcac

SEQ ID NO: 276763 - DNA, 20 bp, Artificial Sequence
  Description of Artificial Sequence: Synthetic oligonucleotide
  Target: LAMA2; (-) strand; PAM type: YTN; PAM sequence: CTC
aatgtgcagcccattcacca

SEQ ID NO: 276764 - DNA, 20 bp, Artificial Sequence
  Description of Artificial Sequence: Synthetic oligonucleotide
  Target: LAMA2; (-) strand; PAM type: YTN; PAM sequence: CTA
ctcaatgtgcagcccattca

SEQ ID NO: 276765 - DNA, 20 bp, Artificial Sequence
  Description of Artificial Sequence: Synthetic oligonucleotide
  Target: LAMA2; (-) strand; PAM type: YTN; PAM sequence: CTC
cctactcaatgtgcagccca

SEQ ID NO: 276766 - DNA, 20 bp, Artificial Sequence
  Description of Artificial Sequence: Synthetic oligonucleotide
  Target: LAMA2; (-) strand; PAM type: YTN; PAM sequence: TTA
gtccctccctactcaatgtg

SEQ ID NO: 276767 - DNA, 20 bp, Artificial Sequence
  Description of Artificial Sequence: Synthetic oligonucleotide
  Target: LAMA2; (-) strand; PAM type: YTN; PAM sequence: TTT
agtccctccctactcaatgt

SEQ ID NO: 276768 - DNA, 20 bp, Artificial Sequence
  Description of Artificial Sequence: Synthetic oligonucleotide
  Target: LAMA2; (-) strand; PAM type: YTN; PAM sequence: TTC
atacaaaatgtttagtccct

SEQ ID NO: 276769 - DNA, 20 bp, Artificial Sequence
  Description of Artificial Sequence: Synthetic oligonucleotide
  Target: LAMA2; (-) strand; PAM type: YTN; PAM sequence: CTT
catacaaaatgtttagtccc

SEQ ID NO: 276770 - DNA, 20 bp, Artificial Sequence
  Description of Artificial Sequence: Synthetic oligonucleotide
  Target: LAMA2; (-) strand; PAM type: YTN; PAM sequence: TTA
ccttcatacaaaatgtttag

SEQ ID NO: 276771 - DNA, 20 bp, Artificial Sequence
  Description of Artificial Sequence: Synthetic oligonucleotide
  Target: LAMA2; (-) strand; PAM type: YTN; PAM sequence: TTT
accttcatacaaaatgttta

SEQ ID NO: 276772 - DNA, 20 bp, Artificial Sequence
  Description of Artificial Sequence: Synthetic oligonucleotide
  Target: LAMA2; (-) strand; PAM type: YTN; PAM sequence: TTA
aggaagtaatttaccttcat

SEQ ID NO: 276773 - DNA, 20 bp, Artificial Sequence
  Description of Artificial Sequence: Synthetic oligonucleotide
  Target: LAMA2; (-) strand; PAM type: YTN; PAM sequence: CTT
aaggaagtaatttaccttca

SEQ ID NO: 276774 - DNA, 20 bp, Artificial Sequence
  Description of Artificial Sequence: Synthetic oligonucleotide
  Target: LAMA2; (-) strand; PAM type: YTN; PAM sequence: CTA
tgaaaccttaaggaagtaat

SEQ ID NO: 276775 - DNA, 20 bp, Artificial Sequence
  Description of Artificial Sequence: Synthetic oligonucleotide
  Target: LAMA2; (-) strand; PAM type: YTN; PAM sequence: CTC
ccaagctatgaaaccttaag

SEQ ID NO: 276776 - DNA, 20 bp, Artificial Sequence
  Description of Artificial Sequence: Synthetic oligonucleotide
  Target: LAMA2; (-) strand; PAM type: YTN; PAM sequence: CTC
actcccaagctatgaaacct

SEQ ID NO: 276777 - DNA, 20 bp, Artificial Sequence
  Description of Artificial Sequence: Synthetic oligonucleotide
  Target: LAMA2; (-) strand; PAM type: YTN; PAM sequence: CTG
ctcactcccaagctatgaaa

SEQ ID NO: 276778 - DNA, 20 bp, Artificial Sequence
  Description of Artificial Sequence: Synthetic oligonucleotide
  Target: LAMA2; (-) strand; PAM type: YTN; PAM sequence: CTC
tgctcactcccaagctatga

SEQ ID NO: 276779 - DNA, 20 bp, Artificial Sequence
  Description of Artificial Sequence: Synthetic oligonucleotide
  Target: LAMA2; (-) strand; PAM type: YTN; PAM sequence: TTG
ggatcacagctctgctcact

SEQ ID NO: 276780 - DNA, 20 bp, Artificial Sequence
  Description of Artificial Sequence: Synthetic oligonucleotide
  Target: LAMA2; (-) strand; PAM type: YTN; PAM sequence: TTT
gggatcacagctctgctcac

SEQ ID NO: 276781 - DNA, 20 bp, Artificial Sequence
  Description of Artificial Sequence: Synthetic oligonucleotide
  Target: LAMA2; (-) strand; PAM type: YTN; PAM sequence: CTG
gtttgggatcacagctctgc

SEQ ID NO: 276782 - DNA, 20 bp, Artificial Sequence
  Description of Artificial Sequence: Synthetic oligonucleotide
  Target: LAMA2; (-) strand; PAM type: YTN; PAM sequence: TTC
tggtttgggatcacagctct

SEQ ID NO: 276783 - DNA, 20 bp, Artificial Sequence
  Description of Artificial Sequence: Synthetic oligonucleotide
  Target: LAMA2; (-) strand; PAM type: YTN; PAM sequence: CTT
ctggtttgggatcacagctc

SEQ ID NO: 276784 - DNA, 20 bp, Artificial Sequence
  Description of Artificial Sequence: Synthetic oligonucleotide
  Target: LAMA2; (-) strand; PAM type: YTN; PAM sequence: CTA
catccaagtgacagcccttc

SEQ ID NO: 276785 - DNA, 20 bp, Artificial Sequence
  Description of Artificial Sequence: Synthetic oligonucleotide
  Target: LAMA2; (-) strand; PAM type: YTN; PAM sequence: TTA
aaagctacatccaagtgaca

SEQ ID NO: 276786 - DNA, 20 bp, Artificial Sequence
  Description of Artificial Sequence: Synthetic oligonucleotide
  Target: LAMA2; (-) strand; PAM type: YTN; PAM sequence: CTA
gggcacagtgattaaaagct

SEQ ID NO: 276787 - DNA, 20 bp, Artificial Sequence
  Description of Artificial Sequence: Synthetic oligonucleotide
  Target: LAMA2; (-) strand; PAM type: YTN; PAM sequence: CTA
tgtactagggcacagtgatt

SEQ ID NO: 276788 - DNA, 20 bp, Artificial Sequence
  Description of Artificial Sequence: Synthetic oligonucleotide
  Target: LAMA2; (-) strand; PAM type: YTN; PAM sequence: CTC
tatgtactagggcacagtga

SEQ ID NO: 276789 - DNA, 20 bp, Artificial Sequence
  Description of Artificial Sequence: Synthetic oligonucleotide
  Target: LAMA2; (-) strand; PAM type: YTN; PAM sequence: TTC
tctatgtactagggcacagt

SEQ ID NO: 276790 - DNA, 20 bp, Artificial Sequence
  Description of Artificial Sequence: Synthetic oligonucleotide
  Target: LAMA2; (-) strand; PAM type: YTN; PAM sequence: CTC
aatcattctctatgtactag

SEQ ID NO: 276791 - DNA, 20 bp, Artificial Sequence
  Description of Artificial Sequence: Synthetic oligonucleotide
  Target: LAMA2; (-) strand; PAM type: YTN; PAM sequence: TTG
tctcaatcattctctatgta

SEQ ID NO: 276792 - DNA, 20 bp, Artificial Sequence
  Description of Artificial Sequence: Synthetic oligonucleotide
  Target: LAMA2; (-) strand; PAM type: YTN; PAM sequence: CTT
gtctcaatcattctctatgt

SEQ ID NO: 276793 - DNA, 20 bp, Artificial Sequence
  Description of Artificial Sequence: Synthetic oligonucleotide
  Target: LAMA2; (-) strand; PAM type: YTN; PAM sequence: CTA
tccttgtctcaatcattctc

SEQ ID NO: 276794 - DNA, 20 bp, Artificial Sequence
  Description of Artificial Sequence: Synthetic oligonucleotide
  Target: LAMA2; (-) strand; PAM type: YTN; PAM sequence: CTA
aaatagcacctatccttgtc

SEQ ID NO: 276795 - DNA, 20 bp, Artificial Sequence
  Description of Artificial Sequence: Synthetic oligonucleotide
  Target: LAMA2; (-) strand; PAM type: YTN; PAM sequence: CTA
tctaaaatagcacctatcct

SEQ ID NO: 276796 - DNA, 20 bp, Artificial Sequence
  Description of Artificial Sequence: Synthetic oligonucleotide
  Target: LAMA2; (-) strand; PAM type: YTN; PAM sequence: TTA
cctatctaaaatagcaccta

SEQ ID NO: 276797 - DNA, 20 bp, Artificial Sequence
  Description of Artificial Sequence: Synthetic oligonucleotide
  Target: LAMA2; (-) strand; PAM type: YTN; PAM sequence: CTG
attacctatctaaaatagca

SEQ ID NO: 276798 - DNA, 20 bp, Artificial Sequence
  Description of Artificial Sequence: Synthetic oligonucleotide
  Target: LAMA2; (-) strand; PAM type: YTN; PAM sequence: CTC
tgattacctatctaaaatag

SEQ ID NO: 276799 - DNA, 20 bp, Artificial Sequence
  Description of Artificial Sequence: Synthetic oligonucleotide
  Target: LAMA2; (-) strand; PAM type: YTN; PAM sequence: CTC
ctctgattacctatctaaaa

SEQ ID NO: 276800 - DNA, 20 bp, Artificial Sequence
  Description of Artificial Sequence: Synthetic oligonucleotide
  Target: LAMA2; (-) strand; PAM type: YTN; PAM sequence: CTG
gtaatagccactcctctgat

SEQ ID NO: 276801 - DNA, 20 bp, Artificial Sequence
  Description of Artificial Sequence: Synthetic oligonucleotide
  Target: LAMA2; (-) strand; PAM type: YTN; PAM sequence: TTC
tggtaatagccactcctctg

SEQ ID NO: 276802 - DNA, 20 bp, Artificial Sequence
  Description of Artificial Sequence: Synthetic oligonucleotide
  Target: LAMA2; (-) strand; PAM type: YTN; PAM sequence: CTC
cattctggtaatagccactc

SEQ ID NO: 276803 - DNA, 20 bp, Artificial Sequence
  Description of Artificial Sequence: Synthetic oligonucleotide
  Target: LAMA2; (-) strand; PAM type: YTN; PAM sequence: CTC
cctccattctggtaatagcc

SEQ ID NO: 276804 - DNA, 20 bp, Artificial Sequence
  Description of Artificial Sequence: Synthetic oligonucleotide
  Target: LAMA2; (-) strand; PAM type: YTN; PAM sequence: TTG
tgtcctccctccattctggt

SEQ ID NO: 276805 - DNA, 20 bp, Artificial Sequence
  Description of Artificial Sequence: Synthetic oligonucleotide
  Target: LAMA2; (-) strand; PAM type: YTN; PAM sequence: CTT
gtgtcctccctccattctgg

SEQ ID NO: 276806 - DNA, 20 bp, Artificial Sequence
  Description of Artificial Sequence: Synthetic oligonucleotide
  Target: LAMA2; (-) strand; PAM type: YTN; PAM sequence: TTG
gcttgtgtcctccctccatt

SEQ ID NO: 276807 - DNA, 20 bp, Artificial Sequence
  Description of Artificial Sequence: Synthetic oligonucleotide
  Target: LAMA2; (-) strand; PAM type: YTN; PAM sequence: TTT
ggcttgtgtcctccctccat

SEQ ID NO: 276808 - DNA, 20 bp, Artificial Sequence
  Description of Artificial Sequence: Synthetic oligonucleotide
  Target: LAMA2; (-) strand; PAM type: YTN; PAM sequence: CTT
tggcttgtgtcctccctcca

SEQ ID NO: 276809 - DNA, 20 bp, Artificial Sequence
  Description of Artificial Sequence: Synthetic oligonucleotide
  Target: LAMA2; (-) strand; PAM type: YTN; PAM sequence: CTC
tttggcttgtgtcctccctc

SEQ ID NO: 276810 - DNA, 20 bp, Artificial Sequence
  Description of Artificial Sequence: Synthetic oligonucleotide
  Target: LAMA2; (-) strand; PAM type: YTN; PAM sequence: CTA
ctctttggcttgtgtcctcc

SEQ ID NO: 276811 - DNA, 20 bp, Artificial Sequence
  Description of Artificial Sequence: Synthetic oligonucleotide
  Target: LAMA2; (-) strand; PAM type: YTN; PAM sequence: TTC
ctactctttggcttgtgtcc

SEQ ID NO: 276812 - DNA, 20 bp, Artificial Sequence
  Description of Artificial Sequence: Synthetic oligonucleotide
  Target: LAMA2; (-) strand; PAM type: YTN; PAM sequence: CTT
cctactctttggcttgtgtc

SEQ ID NO: 276813 - DNA, 20 bp, Artificial Sequence
  Description of Artificial Sequence: Synthetic oligonucleotide
  Target: LAMA2; (-) strand; PAM type: YTN; PAM sequence: CTC
ttcctactctttggcttgtg

SEQ ID NO: 276814 - DNA, 20 bp, Artificial Sequence
  Description of Artificial Sequence: Synthetic oligonucleotide
  Target: LAMA2; (-) strand; PAM type: YTN; PAM sequence: CTA
tgtgctcttcctactctttg

SEQ ID NO: 276815 - DNA, 20 bp, Artificial Sequence
  Description of Artificial Sequence: Synthetic oligonucleotide
  Target: LAMA2; (-) strand; PAM type: YTN; PAM sequence: TTC
ccactatgtgctcttcctac

SEQ ID NO: 276816 - DNA, 20 bp, Artificial Sequence
  Description of Artificial Sequence: Synthetic oligonucleotide
  Target: LAMA2; (-) strand; PAM type: YTN; PAM sequence: TTG
cagatattcccactatgtgc

SEQ ID NO: 276817 - DNA, 20 bp, Artificial Sequence
  Description of Artificial Sequence: Synthetic oligonucleotide
  Target: LAMA2; (-) strand; PAM type: YTN; PAM sequence: CTT
gcagatattcccactatgtg

SEQ ID NO: 276818 - DNA, 20 bp, Artificial Sequence
  Description of Artificial Sequence: Synthetic oligonucleotide
  Target: LAMA2; (-) strand; PAM type: YTN; PAM sequence: TTG
cacttgcagatattcccact

SEQ ID NO: 276819 - DNA, 20 bp, Artificial Sequence
  Description of Artificial Sequence: Synthetic oligonucleotide
  Target: LAMA2; (-) strand; PAM type: YTN; PAM sequence: TTT
gcacttgcagatattcccac

SEQ ID NO: 276820 - DNA, 20 bp, Artificial Sequence
  Description of Artificial Sequence: Synthetic oligonucleotide
  Target: LAMA2; (-) strand; PAM type: YTN; PAM sequence: CTT
tgcacttgcagatattccca

SEQ ID NO: 276821 - DNA, 20 bp, Artificial Sequence
  Description of Artificial Sequence: Synthetic oligonucleotide
  Target: LAMA2; (-) strand; PAM type: YTN; PAM sequence: CTA
agcctttgcacttgcagata

SEQ ID NO: 276822 - DNA, 20 bp, Artificial Sequence
  Description of Artificial Sequence: Synthetic oligonucleotide
  Target: LAMA2; (-) strand; PAM type: YTN; PAM sequence: CTC
taagcctttgcacttgcaga

SEQ ID NO: 276823 - DNA, 20 bp, Artificial Sequence
  Description of Artificial Sequence: Synthetic oligonucleotide
  Target: LAMA2; (-) strand; PAM type: YTN; PAM sequence: CTG
cctctaagcctttgcacttg

SEQ ID NO: 276824 - DNA, 20 bp, Artificial Sequence
  Description of Artificial Sequence: Synthetic oligonucleotide
  Target: LAMA2; (-) strand; PAM type: YTN; PAM sequence: TTC
ctgcctctaagcctttgcac

SEQ ID NO: 276825 - DNA, 20 bp, Artificial Sequence
  Description of Artificial Sequence: Synthetic oligonucleotide
  Target: LAMA2; (-) strand; PAM type: YTN; PAM sequence: CTA
gttcctgcctctaagccttt

SEQ ID NO: 276826 - DNA, 20 bp, Artificial Sequence
  Description of Artificial Sequence: Synthetic oligonucleotide
  Target: LAMA2; (-) strand; PAM type: YTN; PAM sequence: TTG
ccaggtacatacaactagtt

SEQ ID NO: 276827 - DNA, 20 bp, Artificial Sequence
  Description of Artificial Sequence: Synthetic oligonucleotide
  Target: LAMA2; (-) strand; PAM type: YTN; PAM sequence: TTC
agtatgttgccaggtacata

SEQ ID NO: 276828 - DNA, 20 bp, Artificial Sequence
  Description of Artificial Sequence: Synthetic oligonucleotide
  Target: LAMA2; (-) strand; PAM type: YTN; PAM sequence: TTC
accgaccaattcagtatgtt

SEQ ID NO: 276829 - DNA, 20 bp, Artificial Sequence
  Description of Artificial Sequence: Synthetic oligonucleotide
  Target: LAMA2; (-) strand; PAM type: YTN; PAM sequence: CTT
caccgaccaattcagtatgt

SEQ ID NO: 276830 - DNA, 20 bp, Artificial Sequence
  Description of Artificial Sequence: Synthetic oligonucleotide
  Target: LAMA2; (-) strand; PAM type: YTN; PAM sequence: TTC
ccttcaccgaccaattcagt

SEQ ID NO: 276831 - DNA, 20 bp, Artificial Sequence
  Description of Artificial Sequence: Synthetic oligonucleotide
  Target: LAMA2; (-) strand; PAM type: YTN; PAM sequence: CTT
cccttcaccgaccaattcag

SEQ ID NO: 276832 - DNA, 20 bp, Artificial Sequence
  Description of Artificial Sequence: Synthetic oligonucleotide
  Target: LAMA2; (-) strand; PAM type: YTN; PAM sequence: TTC
cttcccttcaccgaccaatt

SEQ ID NO: 276833 - DNA, 20 bp, Artificial Sequence
  Description of Artificial Sequence: Synthetic oligonucleotide
  Target: LAMA2; (-) strand; PAM type: YTN; PAM sequence: TTT
ccttcccttcaccgaccaat

SEQ ID NO: 276834 - DNA, 20 bp, Artificial Sequence
  Description of Artificial Sequence: Synthetic oligonucleotide
  Target: LAMA2; (-) strand; PAM type: YTN; PAM sequence: CTT
tccttcccttcaccgaccaa

SEQ ID NO: 276835 - DNA, 20 bp, Artificial Sequence
  Description of Artificial Sequence: Synthetic oligonucleotide
  Target: LAMA2; (-) strand; PAM type: YTN; PAM sequence: TTC
tttccttcccttcaccgacc

SEQ ID NO: 276836 - DNA, 20 bp, Artificial Sequence
  Description of Artificial Sequence: Synthetic oligonucleotide
  Target: LAMA2; (-) strand; PAM type: YTN; PAM sequence: CTT
ctttccttcccttcaccgac

SEQ ID NO: 276837 - DNA, 20 bp, Artificial Sequence
  Description of Artificial Sequence: Synthetic oligonucleotide
  Target: LAMA2; (-) strand; PAM type: YTN; PAM sequence: TTC
atacccttctttccttccct

SEQ ID NO: 276838 - DNA, 20 bp, Artificial Sequence
  Description of Artificial Sequence: Synthetic oligonucleotide
  Target: LAMA2; (-) strand; PAM type: YTN; PAM sequence: TTT
catacccttctttccttccc

SEQ ID NO: 276839 - DNA, 20 bp, Artificial Sequence
  Description of Artificial Sequence: Synthetic oligonucleotide
  Target: LAMA2; (-) strand; PAM type: YTN; PAM sequence: CTA
atttcatacccttctttcct

SEQ ID NO: 276840 - DNA, 20 bp, Artificial Sequence
  Description of Artificial Sequence: Synthetic oligonucleotide
  Target: LAMA2; (-) strand; PAM type: YTN; PAM sequence: CTA
gtgctaatttcatacccttc

SEQ ID NO: 276841 - DNA, 20 bp, Artificial Sequence
  Description of Artificial Sequence: Synthetic oligonucleotide
  Target: LAMA2; (-) strand; PAM type: YTN; PAM sequence: CTG
agctagtgctaatttcatac

SEQ ID NO: 276842 - DNA, 20 bp, Artificial Sequence
  Description of Artificial Sequence: Synthetic oligonucleotide
  Target: LAMA2; (-) strand; PAM type: YTN; PAM sequence: TTG
cactgagctagtgctaattt

SEQ ID NO: 276843 - DNA, 20 bp, Artificial Sequence
  Description of Artificial Sequence: Synthetic oligonucleotide
  Target: LAMA2; (-) strand; PAM type: YTN; PAM sequence: TTT
gcactgagctagtgctaatt

SEQ ID NO: 276844 - DNA, 20 bp, Artificial Sequence
  Description of Artificial Sequence: Synthetic oligonucleotide
  Target: LAMA2; (-) strand; PAM type: YTN; PAM sequence: TTA
aaatttgcactgagctagtg

SEQ ID NO: 276845 - DNA, 20 bp, Artificial Sequence
  Description of Artificial Sequence: Synthetic oligonucleotide
  Target: LAMA2; (-) strand; PAM type: YTN; PAM sequence: TTT
aaaatttgcactgagctagt

SEQ ID NO: 276846 - DNA, 20 bp, Artificial Sequence
  Description of Artificial Sequence: Synthetic oligonucleotide
  Target: LAMA2; (-) strand; PAM type: YTN; PAM sequence: TTT
taaaatttgcactgagctag

SEQ ID NO: 276847 - DNA, 20 bp, Artificial Sequence
  Description of Artificial Sequence: Synthetic oligonucleotide
  Target: LAMA2; (-) strand; PAM type: YTN; PAM sequence: TTA
tagaaatcacagttttaaaa

SEQ ID NO: 276848 - DNA, 20 bp, Artificial Sequence
  Description of Artificial Sequence: Synthetic oligonucleotide
  Target: LAMA2; (-) strand; PAM type: YTN; PAM sequence: CTA
ttatagaaatcacagtttta

SEQ ID NO: 276849 - DNA, 20 bp, Artificial Sequence
  Description of Artificial Sequence: Synthetic oligonucleotide
  Target: LAMA2; (-) strand; PAM type: YTN; PAM sequence: TTC
tattatagaaatcacagttt

SEQ ID NO: 276850 - DNA, 20 bp, Artificial Sequence
  Description of Artificial Sequence: Synthetic oligonucleotide
  Target: LAMA2; (-) strand; PAM type: YTN; PAM sequence: CTT
ctattatagaaatcacagtt

SEQ ID NO: 276851 - DNA, 20 bp, Artificial Sequence
  Description of Artificial Sequence: Synthetic oligonucleotide
  Target: LAMA2; (-) strand; PAM type: YTN; PAM sequence: CTC
ttctattatagaaatcacag

SEQ ID NO: 276852 - DNA, 20 bp, Artificial Sequence
  Description of Artificial Sequence: Synthetic oligonucleotide
  Target: LAMA2; (-) strand; PAM type: YTN; PAM sequence: CTA
tctcttctattatagaaatc

SEQ ID NO: 276853 - DNA, 20 bp, Artificial Sequence
  Description of Artificial Sequence: Synthetic oligonucleotide
  Target: LAMA2; (-) strand; PAM type: YTN; PAM sequence: CTA
cgaaaatactatctcttcta

SEQ ID NO: 276854 - DNA, 20 bp, Artificial Sequence
  Description of Artificial Sequence: Synthetic oligonucleotide
  Target: LAMA2; (-) strand; PAM type: YTN; PAM sequence: TTG
actacgaaaatactatctct

SEQ ID NO: 276855 - DNA, 20 bp, Artificial Sequence
  Description of Artificial Sequence: Synthetic oligonucleotide
  Target: LAMA2; (-) strand; PAM type: YTN; PAM sequence: CTT
gactacgaaaatactatctc

SEQ ID NO: 276856 - DNA, 20 bp, Artificial Sequence
  Description of Artificial Sequence: Synthetic oligonucleotide
  Target: LAMA2; (-) strand; PAM type: YTN; PAM sequence: CTG
ggtccttgactacgaaaata

SEQ ID NO: 276857 - DNA, 20 bp, Artificial Sequence
  Description of Artificial Sequence: Synthetic oligonucleotide
  Target: LAMA2; (-) strand; PAM type: YTN; PAM sequence: TTA
atgatagatcctgggtcctt

SEQ ID NO: 276858 - DNA, 20 bp, Artificial Sequence
  Description of Artificial Sequence: Synthetic oligonucleotide
  Target: LAMA2; (-) strand; PAM type: YTN; PAM sequence: CTT
aatgatagatcctgggtcct

SEQ ID NO: 276859 - DNA, 20 bp, Artificial Sequence
  Description of Artificial Sequence: Synthetic oligonucleotide
  Target: LAMA2; (-) strand; PAM type: YTN; PAM sequence: CTA
cttaatgatagatcctgggt

SEQ ID NO: 276860 - DNA, 20 bp, Artificial Sequence
  Description of Artificial Sequence: Synthetic oligonucleotide
  Target: LAMA2; (-) strand; PAM type: YTN; PAM sequence: CTG
tctacttaatgatagatcct

SEQ ID NO: 276861 - DNA, 20 bp, Artificial Sequence
  Description of Artificial Sequence: Synthetic oligonucleotide
  Target: LAMA2; (-) strand; PAM type: YTN; PAM sequence: TTA
aacccctgtctacttaatga

SEQ ID NO: 276862 - DNA, 20 bp, Artificial Sequence
  Description of Artificial Sequence: Synthetic oligonucleotide
  Target: LAMA2; (-) strand; PAM type: YTN; PAM sequence: TTT
aaacccctgtctacttaatg

SEQ ID NO: 276863 - DNA, 20 bp, Artificial Sequence
  Description of Artificial Sequence: Synthetic oligonucleotide
  Target: LAMA2; (-) strand; PAM type: YTN; PAM sequence: TTA
agatttaaacccctgtctac

SEQ ID NO: 276864 - DNA, 20 bp, Artificial Sequence
  Description of Artificial Sequence: Synthetic oligonucleotide
  Target: LAMA2; (-) strand; PAM type: YTN; PAM sequence: TTA
aggtcacatagtacagtgtg

SEQ ID NO: 276865 - DNA, 20 bp, Artificial Sequence
  Description of Artificial Sequence: Synthetic oligonucleotide
  Target: LAMA2; (-) strand; PAM type: YTN; PAM sequence: TTT
aaggtcacatagtacagtgt

SEQ ID NO: 276866 - DNA, 20 bp, Artificial Sequence
  Description of Artificial Sequence: Synthetic oligonucleotide
  Target: LAMA2; (-) strand; PAM type: YTN; PAM sequence: CTT
taaggtcacatagtacagtg

SEQ ID NO: 276867 - DNA, 20 bp, Artificial Sequence
  Description of Artificial Sequence: Synthetic oligonucleotide
  Target: LAMA2; (-) strand; PAM type: YTN; PAM sequence: TTC
ctttaaggtcacatagtaca

SEQ ID NO: 276868 - DNA, 20 bp, Artificial Sequence
  Description of Artificial Sequence: Synthetic oligonucleotide
  Target: LAMA2; (-) strand; PAM type: YTN; PAM sequence: TTA
aatgattcctttaaggtcac

SEQ ID NO: 276869 - DNA, 20 bp, Artificial Sequence
  Description of Artificial Sequence: Synthetic oligonucleotide
  Target: LAMA2; (-) strand; PAM type: YTN; PAM sequence: CTA
agatattaaatgattccttt

SEQ ID NO: 276870 - DNA, 20 bp, Artificial Sequence
  Description of Artificial Sequence: Synthetic oligonucleotide
  Target: LAMA2; (-) strand; PAM type: YTN; PAM sequence: CTC
agatgaactaagatattaaa

SEQ ID NO: 276871 - DNA, 20 bp, Artificial Sequence
  Description of Artificial Sequence: Synthetic oligonucleotide
  Target: LAMA2; (-) strand; PAM type: YTN; PAM sequence: CTA
tagcagctcagatgaactaa

SEQ ID NO: 276872 - DNA, 20 bp, Artificial Sequence
  Description of Artificial Sequence: Synthetic oligonucleotide
  Target: LAMA2; (-) strand; PAM type: YTN; PAM sequence: TTG
ctatagcagctcagatgaac

SEQ ID NO: 276873 - DNA, 20 bp, Artificial Sequence
  Description of Artificial Sequence: Synthetic oligonucleotide
  Target: LAMA2; (-) strand; PAM type: YTN; PAM sequence: CTT
gctatagcagctcagatgaa

SEQ ID NO: 276874 - DNA, 20 bp, Artificial Sequence
  Description of Artificial Sequence: Synthetic oligonucleotide
  Target: LAMA2; (-) strand; PAM type: YTN; PAM sequence: CTC
ttgctatagcagctcagatg

SEQ ID NO: 276875 - DNA, 20 bp, Artificial Sequence
  Description of Artificial Sequence: Synthetic oligonucleotide
  Target: LAMA2; (-) strand; PAM type: YTN; PAM sequence: TTG
gtctcttgctatagcagctc

SEQ ID NO: 276876 - DNA, 20 bp, Artificial Sequence
  Description of Artificial Sequence: Synthetic oligonucleotide
  Target: LAMA2; (-) strand; PAM type: YTN; PAM sequence: TTT
ggtctcttgctatagcagct

SEQ ID NO: 276877 - DNA, 20 bp, Artificial Sequence
  Description of Artificial Sequence: Synthetic oligonucleotide
  Target: LAMA2; (-) strand; PAM type: YTN; PAM sequence: TTT
tggtctcttgctatagcagc

SEQ ID NO: 276878 - DNA, 20 bp, Artificial Sequence
  Description of Artificial Sequence: Synthetic oligonucleotide
  Target: LAMA2; (-) strand; PAM type: YTN; PAM sequence: TTT
ttggtctcttgctatagcag

SEQ ID NO: 276879 - DNA, 20 bp, Artificial Sequence
  Description of Artificial Sequence: Synthetic oligonucleotide
  Target: LAMA2; (-) strand; PAM type: YTN; PAM sequence: CTC
agtttttggtctcttgctat

SEQ ID NO: 276880 - DNA, 20 bp, Artificial Sequence
  Description of Artificial Sequence: Synthetic oligonucleotide
  Target: LAMA2; (-) strand; PAM type: YTN; PAM sequence: TTG
catataagccactcagtttt

SEQ ID NO: 276881 - DNA, 20 bp, Artificial Sequence
  Description of Artificial Sequence: Synthetic oligonucleotide
  Target: LAMA2; (-) strand; PAM type: YTN; PAM sequence: TTG
attgcatataagccactcag

SEQ ID NO: 276882 - DNA, 20 bp, Artificial Sequence
  Description of Artificial Sequence: Synthetic oligonucleotide
  Target: LAMA2; (-) strand; PAM type: YTN; PAM sequence: TTT
gattgcatataagccactca

SEQ ID NO: 276883 - DNA, 20 bp, Artificial Sequence
  Description of Artificial Sequence: Synthetic oligonucleotide
  Target: LAMA2; (-) strand; PAM type: YTN; PAM sequence: TTT
tgattgcatataagccactc

SEQ ID NO: 276884 - DNA, 20 bp, Artificial Sequence
  Description of Artificial Sequence: Synthetic oligonucleotide
  Target: LAMA2; (-) strand; PAM type: YTN; PAM sequence: CTC
cagaaccataagaaataagt

SEQ ID NO: 276885 - DNA, 20 bp, Artificial Sequence
  Description of Artificial Sequence: Synthetic oligonucleotide
  Target: LAMA2; (-) strand; PAM type: YTN; PAM sequence: TTC
ccagcctccagaaccataag

SEQ ID NO: 276886 - DNA, 20 bp, Artificial Sequence
  Description of Artificial Sequence: Synthetic oligonucleotide
  Target: LAMA2; (-) strand; PAM type: YTN; PAM sequence: TTT
cccagcctccagaaccataa

SEQ ID NO: 276887 - DNA, 20 bp, Artificial Sequence
  Description of Artificial Sequence: Synthetic oligonucleotide
  Target: LAMA2; (-) strand; PAM type: YTN; PAM sequence: TTG
atcatggatttcccagcctc

SEQ ID NO: 276888 - DNA, 20 bp, Artificial Sequence
  Description of Artificial Sequence: Synthetic oligonucleotide
  Target: LAMA2; (-) strand; PAM type: YTN; PAM sequence: TTT
gatcatggatttcccagcct

SEQ ID NO: 276889 - DNA, 20 bp, Artificial Sequence
  Description of Artificial Sequence: Synthetic oligonucleotide
  Target: LAMA2; (-) strand; PAM type: YTN; PAM sequence: CTT
tgatcatggatttcccagcc

SEQ ID NO: 276890 - DNA, 20 bp, Artificial Sequence
  Description of Artificial Sequence: Synthetic oligonucleotide
  Target: LAMA2; (-) strand; PAM type: YTN; PAM sequence: CTG
ccaatactttgatcatggat

SEQ ID NO: 276891 - DNA, 20 bp, Artificial Sequence
  Description of Artificial Sequence: Synthetic oligonucleotide
  Target: LAMA2; (-) strand; PAM type: YTN; PAM sequence: CTC
atcagacaccaaatctgcca

SEQ ID NO: 276892 - DNA, 20 bp, Artificial Sequence
  Description of Artificial Sequence: Synthetic oligonucleotide
  Target: LAMA2; (-) strand; PAM type: YTN; PAM sequence: CTA
tgaaccagaaagtggtccct

SEQ ID NO: 276893 - DNA, 20 bp, Artificial Sequence
  Description of Artificial Sequence: Synthetic oligonucleotide
  Target: LAMA2; (-) strand; PAM type: YTN; PAM sequence: TTA
ccatgtgaggacacagtgaa

SEQ ID NO: 276894 - DNA, 20 bp, Artificial Sequence
  Description of Artificial Sequence: Synthetic oligonucleotide
  Target: LAMA2; (-) strand; PAM type: YTN; PAM sequence: TTT
accatgtgaggacacagtga

SEQ ID NO: 276895 - DNA, 20 bp, Artificial Sequence
  Description of Artificial Sequence: Synthetic oligonucleotide
  Target: LAMA2; (-) strand; PAM type: YTN; PAM sequence: TTT
taccatgtgaggacacagtg

SEQ ID NO: 276896 - DNA, 20 bp, Artificial Sequence
  Description of Artificial Sequence: Synthetic oligonucleotide
  Target: LAMA2; (-) strand; PAM type: YTN; PAM sequence: CTT
ttaccatgtgaggacacagt

SEQ ID NO: 276897 - DNA, 20 bp, Artificial Sequence
  Description of Artificial Sequence: Synthetic oligonucleotide
  Target: LAMA2; (-) strand; PAM type: YTN; PAM sequence: TTC
atccttttaccatgtgagga

SEQ ID NO: 276898 - DNA, 20 bp, Artificial Sequence
  Description of Artificial Sequence: Synthetic oligonucleotide
  Target: LAMA2; (-) strand; PAM type: YTN; PAM sequence: TTG
ttcatccttttaccatgtga

SEQ ID NO: 276899 - DNA, 20 bp, Artificial Sequence
  Description of Artificial Sequence: Synthetic oligonucleotide
  Target: LAMA2; (-) strand; PAM type: YTN; PAM sequence: CTT
gttcatccttttaccatgtg

SEQ ID NO: 276900 - DNA, 20 bp, Artificial Sequence
  Description of Artificial Sequence: Synthetic oligonucleotide
  Target: LAMA2; (-) strand; PAM type: YTN; PAM sequence: CTG
aaggagcttgttcatccttt

SEQ ID NO: 276901 - DNA, 20 bp, Artificial Sequence
  Description of Artificial Sequence: Synthetic oligonucleotide
  Target: LAMA2; (-) strand; PAM type: YTN; PAM sequence: TTA
taaaaaagacctgaaggagc

SEQ ID NO: 276902 - DNA, 20 bp, Artificial Sequence
  Description of Artificial Sequence: Synthetic oligonucleotide
  Target: LAMA2; (-) strand; PAM type: YTN; PAM sequence: CTT
ataaaaaagacctgaaggag

SEQ ID NO: 276903 - DNA, 20 bp, Artificial Sequence
  Description of Artificial Sequence: Synthetic oligonucleotide
  Target: LAMA2; (-) strand; PAM type: YTN; PAM sequence: CTG
cccttataaaaaagacctga

SEQ ID NO: 276904 - DNA, 20 bp, Artificial Sequence
  Description of Artificial Sequence: Synthetic oligonucleotide
  Target: LAMA2; (-) strand; PAM type: YTN; PAM sequence: TTA
ctgcccttataaaaaagacc

SEQ ID NO: 276905 - DNA, 20 bp, Artificial Sequence
  Description of Artificial Sequence: Synthetic oligonucleotide
  Target: LAMA2; (-) strand; PAM type: YTN; PAM sequence: TTC
ataaacgggattactgccct

SEQ ID NO: 276906 - DNA, 20 bp, Artificial Sequence
  Description of Artificial Sequence: Synthetic oligonucleotide
  Target: LAMA2; (-) strand; PAM type: YTN; PAM sequence: CTT
cataaacgggattactgccc

SEQ ID NO: 276907 - DNA, 20 bp, Artificial Sequence
  Description of Artificial Sequence: Synthetic oligonucleotide
  Target: LAMA2; (-) strand; PAM type: YTN; PAM sequence: TTG
gaggtgaccaggtcatgaag

SEQ ID NO: 276908 - DNA, 20 bp, Artificial Sequence
  Description of Artificial Sequence: Synthetic oligonucleotide
  Target: LAMA2; (-) strand; PAM type: YTN; PAM sequence: TTT
ggaggtgaccaggtcatgaa

SEQ ID NO: 276909 - DNA, 20 bp, Artificial Sequence
  Description of Artificial Sequence: Synthetic oligonucleotide
  Target: LAMA2; (-) strand; PAM type: YTN; PAM sequence: CTT
tggaggtgaccaggtcatga

SEQ ID NO: 276910 - DNA, 20 bp, Artificial Sequence
  Description of Artificial Sequence: Synthetic oligonucleotide
  Target: LAMA2; (-) strand; PAM type: YTN; PAM sequence: TTA
ggaagtggggcctttggagg

SEQ ID NO: 276911 - DNA, 20 bp, Artificial Sequence
  Description of Artificial Sequence: Synthetic oligonucleotide
  Target: LAMA2; (-) strand; PAM type: YTN; PAM sequence: CTC
aaggtgataggattaggaag

SEQ ID NO: 276912 - DNA, 20 bp, Artificial Sequence
  Description of Artificial Sequence: Synthetic oligonucleotide
  Target: LAMA2; (-) strand; PAM type: YTN; PAM sequence: CTA
atcctcaaggtgataggatt

SEQ ID NO: 276913 - DNA, 20 bp, Artificial Sequence
  Description of Artificial Sequence: Synthetic oligonucleotide
  Target: LAMA2; (-) strand; PAM type: YTN; PAM sequence: TTG
aaatcctaatcctcaaggtg

SEQ ID NO: 276914 - DNA, 20 bp, Artificial Sequence
  Description of Artificial Sequence: Synthetic oligonucleotide
  Target: LAMA2; (-) strand; PAM type: YTN; PAM sequence: TTC
atatgttgaaatcctaatcc

SEQ ID NO: 276915 - DNA, 20 bp, Artificial Sequence
  Description of Artificial Sequence: Synthetic oligonucleotide
  Target: LAMA2; (-) strand; PAM type: YTN; PAM sequence: CTG
aaaattcatatgttgaaatc

SEQ ID NO: 276916 - DNA, 20 bp, Artificial Sequence
  Description of Artificial Sequence: Synthetic oligonucleotide
  Target: LAMA2; (-) strand; PAM type: YTN; PAM sequence: CTG
tgtcccctgaaaattcatat

SEQ ID NO: 276917 - DNA, 20 bp, Artificial Sequence
  Description of Artificial Sequence: Synthetic oligonucleotide
  Target: LAMA2; (-) strand; PAM type: YTN; PAM sequence: CTG
aatgtctgtgtcccctgaaa

SEQ ID NO: 276918 - DNA, 20 bp, Artificial Sequence
  Description of Artificial Sequence: Synthetic oligonucleotide
  Target: LAMA2; (-) strand; PAM type: YTN; PAM sequence: TTG
aataagtaaagggcagtggc

SEQ ID NO: 276919 - DNA, 20 bp, Artificial Sequence
  Description of Artificial Sequence: Synthetic oligonucleotide
  Target: LAMA2; (-) strand; PAM type: YTN; PAM sequence: TTA
cataagtgggaaattgaata

SEQ ID NO: 276920 - DNA, 20 bp, Artificial Sequence
  Description of Artificial Sequence: Synthetic oligonucleotide
  Target: LAMA2; (-) strand; PAM type: YTN; PAM sequence: TTT
acataagtgggaaattgaat

SEQ ID NO: 276921 - DNA, 20 bp, Artificial Sequence
  Description of Artificial Sequence: Synthetic oligonucleotide
  Target: LAMA2; (-) strand; PAM type: YTN; PAM sequence: TTT
tacataagtgggaaattgaa

SEQ ID NO: 276922 - DNA, 20 bp, Artificial Sequence
  Description of Artificial Sequence: Synthetic oligonucleotide
  Target: LAMA2; (-) strand; PAM type: YTN; PAM sequence: TTT
ttacataagtgggaaattga

SEQ ID NO: 276923 - DNA, 20 bp, Artificial Sequence
  Description of Artificial Sequence: Synthetic oligonucleotide
  Target: LAMA2; (-) strand; PAM type: YTN; PAM sequence: CTT
tttacataagtgggaaattg

SEQ ID NO: 276924 - DNA, 20 bp, Artificial Sequence
  Description of Artificial Sequence: Synthetic oligonucleotide
  Target: LAMA2; (-) strand; PAM type: YTN; PAM sequence: TTG
atcactttttacataagtgg

SEQ ID NO: 276925 - DNA, 20 bp, Artificial Sequence
  Description of Artificial Sequence: Synthetic oligonucleotide
  Target: LAMA2; (-) strand; PAM type: YTN; PAM sequence: TTG
gatcccatgttgatcacttt

SEQ ID NO: 276926 - DNA, 20 bp, Artificial Sequence
  Description of Artificial Sequence: Synthetic oligonucleotide
  Target: LAMA2; (-) strand; PAM type: YTN; PAM sequence: TTT
ggatcccatgttgatcactt

SEQ ID NO: 276927 - DNA, 20 bp, Artificial Sequence
  Description of Artificial Sequence: Synthetic oligonucleotide
  Target: LAMA2; (-) strand; PAM type: YTN; PAM sequence: CTT
tggatcccatgttgatcact

SEQ ID NO: 276928 - DNA, 20 bp, Artificial Sequence
  Description of Artificial Sequence: Synthetic oligonucleotide
  Target: LAMA2; (-) strand; PAM type: YTN; PAM sequence: TTC
caatctttggatcccatgtt

SEQ ID NO: 276929 - DNA, 20 bp, Artificial Sequence
  Description of Artificial Sequence: Synthetic oligonucleotide
  Target: LAMA2; (-) strand; PAM type: YTN; PAM sequence: TTA
ttccaatctttggatcccat

SEQ ID NO: 276930 - DNA, 20 bp, Artificial Sequence
  Description of Artificial Sequence: Synthetic oligonucleotide
  Target: LAMA2; (-) strand; PAM type: YTN; PAM sequence: TTG
ttattccaatctttggatcc

SEQ ID NO: 276931 - DNA, 20 bp, Artificial Sequence
  Description of Artificial Sequence: Synthetic oligonucleotide
  Target: LAMA2; (-) strand; PAM type: YTN; PAM sequence: TTT
gttattccaatctttggatc

SEQ ID NO: 276932 - DNA, 20 bp, Artificial Sequence
  Description of Artificial Sequence: Synthetic oligonucleotide
  Target: LAMA2; (-) strand; PAM type: YTN; PAM sequence: TTT
tgttattccaatctttggat

SEQ ID NO: 276933 - DNA, 20 bp, Artificial Sequence
  Description of Artificial Sequence: Synthetic oligonucleotide
  Target: LAMA2; (-) strand; PAM type: YTN; PAM sequence: TTG
taagcattttgttattccaa

SEQ ID NO: 276934 - DNA, 20 bp, Artificial Sequence
  Description of Artificial Sequence: Synthetic oligonucleotide
  Target: LAMA2; (-) strand; PAM type: YTN; PAM sequence: TTT
gtaagcattttgttattcca

SEQ ID NO: 276935 - DNA, 20 bp, Artificial Sequence
  Description of Artificial Sequence: Synthetic oligonucleotide
  Target: LAMA2; (-) strand; PAM type: YTN; PAM sequence: CTC
aatatgtgccagacagtttg

SEQ ID NO: 276936 - DNA, 20 bp, Artificial Sequence
  Description of Artificial Sequence: Synthetic oligonucleotide
  Target: LAMA2; (-) strand; PAM type: YTN; PAM sequence: TTA
gatctcaatatgtgccagac

SEQ ID NO: 276937 - DNA, 20 bp, Artificial Sequence
  Description of Artificial Sequence: Synthetic oligonucleotide
  Target: LAMA2; (-) strand; PAM type: YTN; PAM sequence: TTT
agatctcaatatgtgccaga

SEQ ID NO: 276938 - DNA, 20 bp, Artificial Sequence
  Description of Artificial Sequence: Synthetic oligonucleotide
  Target: LAMA2; (-) strand; PAM type: YTN; PAM sequence: TTC
atttagatctcaatatgtgc

SEQ ID NO: 276939 - DNA, 20 bp, Artificial Sequence
  Description of Artificial Sequence: Synthetic oligonucleotide
  Target: LAMA2; (-) strand; PAM type: YTN; PAM sequence: CTA
attcatttagatctcaatat

SEQ ID NO: 276940 - DNA, 20 bp, Artificial Sequence
  Description of Artificial Sequence: Synthetic oligonucleotide
  Target: LAMA2; (-) strand; PAM type: YTN; PAM sequence: CTA
tagacaataatgctaattca

SEQ ID NO: 276941 - DNA, 20 bp, Artificial Sequence
  Description of Artificial Sequence: Synthetic oligonucleotide
  Target: LAMA2; (-) strand; PAM type: YTN; PAM sequence: TTC
tatagacaataatgctaatt

SEQ ID NO: 276942 - DNA, 20 bp, Artificial Sequence
  Description of Artificial Sequence: Synthetic oligonucleotide
  Target: LAMA2; (-) strand; PAM type: YTN; PAM sequence: TTT
ctatagacaataatgctaat

SEQ ID NO: 276943 - DNA, 20 bp, Artificial Sequence
  Description of Artificial Sequence: Synthetic oligonucleotide
  Target: LAMA2; (-) strand; PAM type: YTN; PAM sequence: TTT
tctatagacaataatgctaa

SEQ ID NO: 276944 - DNA, 20 bp, Artificial Sequence
  Description of Artificial Sequence: Synthetic oligonucleotide
  Target: LAMA2; (-) strand; PAM type: YTN; PAM sequence: TTT
ttctatagacaataatgcta

SEQ ID NO: 276945 - DNA, 20 bp, Artificial Sequence
  Description of Artificial Sequence: Synthetic oligonucleotide
  Target: LAMA2; (-) strand; PAM type: YTN; PAM sequence: TTT
tttctatagacaataatgct

SEQ ID NO: 276946 - DNA, 20 bp, Artificial Sequence
  Description of Artificial Sequence: Synthetic oligonucleotide
  Target: LAMA2; (-) strand; PAM type: YTN; PAM sequence: TTT
ttttctatagacaataatgc

SEQ ID NO: 276947 - DNA, 20 bp, Artificial Sequence
  Description of Artificial Sequence: Synthetic oligonucleotide
  Target: LAMA2; (-) strand; PAM type: YTN; PAM sequence: TTA
tagtttttttctatagacaa

SEQ ID NO: 276948 - DNA, 20 bp, Artificial Sequence
  Description of Artificial Sequence: Synthetic oligonucleotide
  Target: LAMA2; (-) strand; PAM type: YTN; PAM sequence: CTT
atagtttttttctatagaca

SEQ ID NO: 276949 - DNA, 20 bp, Artificial Sequence
  Description of Artificial Sequence: Synthetic oligonucleotide
  Target: LAMA2; (-) strand; PAM type: YTN; PAM sequence: TTG
accacttatagtttttttct

SEQ ID NO: 276950 - DNA, 20 bp, Artificial Sequence
  Description of Artificial Sequence: Synthetic oligonucleotide
  Target: LAMA2; (-) strand; PAM type: YTN; PAM sequence: TTT
gaccacttatagtttttttc

SEQ ID NO: 276951 - DNA, 20 bp, Artificial Sequence
  Description of Artificial Sequence: Synthetic oligonucleotide
  Target: LAMA2; (-) strand; PAM type: YTN; PAM sequence: CTT
tgaccacttatagttttttt

SEQ ID NO: 276952 - DNA, 20 bp, Artificial Sequence
  Description of Artificial Sequence: Synthetic oligonucleotide
  Target: LAMA2; (-) strand; PAM type: YTN; PAM sequence: TTA
agctttgaccacttatagtt

SEQ ID NO: 276953 - DNA, 20 bp, Artificial Sequence
  Description of Artificial Sequence: Synthetic oligonucleotide
  Target: LAMA2; (-) strand; PAM type: YTN; PAM sequence: TTT
aagctttgaccacttatagt

SEQ ID NO: 276954 - DNA, 20 bp, Artificial Sequence
  Description of Artificial Sequence: Synthetic oligonucleotide
  Target: LAMA2; (-) strand; PAM type: YTN; PAM sequence: TTT
taagctttgaccacttatag

SEQ ID NO: 276955 - DNA, 20 bp, Artificial Sequence
  Description of Artificial Sequence: Synthetic oligonucleotide
  Target: LAMA2; (-) strand; PAM type: YTN; PAM sequence: TTA
taattttaagctttgaccac

SEQ ID NO: 276956 - DNA, 20 bp, Artificial Sequence
  Description of Artificial Sequence: Synthetic oligonucleotide
  Target: LAMA2; (-) strand; PAM type: YTN; PAM sequence: CTG
catcaattataattttaagc

SEQ ID NO: 276957 - DNA, 20 bp, Artificial Sequence
  Description of Artificial Sequence: Synthetic oligonucleotide
  Target: LAMA2; (-) strand; PAM type: YTN; PAM sequence: TTA
actgcatcaattataatttt

SEQ ID NO: 276958 - DNA, 20 bp, Artificial Sequence
  Description of Artificial Sequence: Synthetic oligonucleotide
  Target: LAMA2; (-) strand; PAM type: YTN; PAM sequence: TTT
aactgcatcaattataattt

SEQ ID NO: 276959 - DNA, 20 bp, Artificial Sequence
  Description of Artificial Sequence: Synthetic oligonucleotide
  Target: LAMA2; (-) strand; PAM type: YTN; PAM sequence: CTA
cagatttaactgcatcaatt

SEQ ID NO: 276960 - DNA, 20 bp, Artificial Sequence
  Description of Artificial Sequence: Synthetic oligonucleotide
  Target: LAMA2; (-) strand; PAM type: YTN; PAM sequence: CTA
cctacagatttaactgcatc

SEQ ID NO: 276961 - DNA, 20 bp, Artificial Sequence
  Description of Artificial Sequence: Synthetic oligonucleotide
  Target: LAMA2; (-) strand; PAM type: YTN; PAM sequence: TTC
tacctacagatttaactgca

SEQ ID NO: 276962 - DNA, 20 bp, Artificial Sequence
  Description of Artificial Sequence: Synthetic oligonucleotide
  Target: LAMA2; (-) strand; PAM type: YTN; PAM sequence: CTG
aaatcaccattctacctaca

SEQ ID NO: 276963 - DNA, 20 bp, Artificial Sequence
  Description of Artificial Sequence: Synthetic oligonucleotide
  Target: LAMA2; (-) strand; PAM type: YTN; PAM sequence: TTC
ctgaaatcaccattctacct

SEQ ID NO: 276964 - DNA, 20 bp, Artificial Sequence
  Description of Artificial Sequence: Synthetic oligonucleotide
  Target: LAMA2; (-) strand; PAM type: YTN; PAM sequence: CTA
ttcctgaaatcaccattcta

SEQ ID NO: 276965 - DNA, 20 bp, Artificial Sequence
  Description of Artificial Sequence: Synthetic oligonucleotide
  Target: LAMA2; (-) strand; PAM type: YTN; PAM sequence: TTC
ctattcctgaaatcaccatt

SEQ ID NO: 276966 - DNA, 20 bp, Artificial Sequence
  Description of Artificial Sequence: Synthetic oligonucleotide
  Target: LAMA2; (-) strand; PAM type: YTN; PAM sequence: TTC
attcctattcctgaaatcac

SEQ ID NO: 276967 - DNA, 20 bp, Artificial Sequence
  Description of Artificial Sequence: Synthetic oligonucleotide
  Target: LAMA2; (-) strand; PAM type: YTN; PAM sequence: CTG
attcattcctattcctgaaa

SEQ ID NO: 276968 - DNA, 20 bp, Artificial Sequence
  Description of Artificial Sequence: Synthetic oligonucleotide
  Target: LAMA2; (-) strand; PAM type: YTN; PAM sequence: TTC
tgattcattcctattcctga

SEQ ID NO: 276969 - DNA, 20 bp, Artificial Sequence
  Description of Artificial Sequence: Synthetic oligonucleotide
  Target: LAMA2; (-) strand; PAM type: YTN; PAM sequence: CTT
ctgattcattcctattcctg

SEQ ID NO: 276970 - DNA, 20 bp, Artificial Sequence
  Description of Artificial Sequence: Synthetic oligonucleotide
  Target: LAMA2; (-) strand; PAM type: YTN; PAM sequence: TTA
tacttctgattcattcctat

SEQ ID NO: 276971 - DNA, 20 bp, Artificial Sequence
  Description of Artificial Sequence: Synthetic oligonucleotide
  Target: LAMA2; (-) strand; PAM type: YTN; PAM sequence: TTT
atacttctgattcattccta

SEQ ID NO: 276972 - DNA, 20 bp, Artificial Sequence
  Description of Artificial Sequence: Synthetic oligonucleotide
  Target: LAMA2; (-) strand; PAM type: YTN; PAM sequence: CTT
tatacttctgattcattcct

SEQ ID NO: 276973 - DNA, 20 bp, Artificial Sequence
  Description of Artificial Sequence: Synthetic oligonucleotide
  Target: LAMA2; (-) strand; PAM type: YTN; PAM sequence: TTC
tttatacttctgattcattc

SEQ ID NO: 276974 - DNA, 20 bp, Artificial Sequence
  Description of Artificial Sequence: Synthetic oligonucleotide
  Target: LAMA2; (-) strand; PAM type: YTN; PAM sequence: TTA
ttctttatacttctgattca

SEQ ID NO: 276975 - DNA, 20 bp, Artificial Sequence
  Description of Artificial Sequence: Synthetic oligonucleotide
  Target: LAMA2; (-) strand; PAM type: YTN; PAM sequence: TTT
attctttatacttctgattc

SEQ ID NO: 276976 - DNA, 20 bp, Artificial Sequence
  Description of Artificial Sequence: Synthetic oligonucleotide
  Target: LAMA2; (-) strand; PAM type: YTN; PAM sequence: TTT
tattctttatacttctgatt

SEQ ID NO: 276977 - DNA, 20 bp, Artificial Sequence
  Description of Artificial Sequence: Synthetic oligonucleotide
  Target: LAMA2; (-) strand; PAM type: YTN; PAM sequence: TTA
ttttattctttatacttctg

SEQ ID NO: 276978 - DNA, 20 bp, Artificial Sequence
  Description of Artificial Sequence: Synthetic oligonucleotide
  Target: LAMA2; (-) strand; PAM type: YTN; PAM sequence: CTT
attttattctttatacttct

SEQ ID NO: 276979 - DNA, 20 bp, Artificial Sequence
  Description of Artificial Sequence: Synthetic oligonucleotide
  Target: LAMA2; (-) strand; PAM type: YTN; PAM sequence: TTA
cttattttattctttatact

SEQ ID NO: 276980 - DNA, 20 bp, Artificial Sequence
  Description of Artificial Sequence: Synthetic oligonucleotide
  Target: LAMA2; (-) strand; PAM type: YTN; PAM sequence: TTT
acttattttattctttatac

SEQ ID NO: 276981 - DNA, 20 bp, Artificial Sequence
  Description of Artificial Sequence: Synthetic oligonucleotide
  Target: LAMA2; (-) strand; PAM type: YTN; PAM sequence: TTT
tacttattttattctttata

SEQ ID NO: 276982 - DNA, 20 bp, Artificial Sequence
  Description of Artificial Sequence: Synthetic oligonucleotide
  Target: LAMA2; (-) strand; PAM type: YTN; PAM sequence: TTT
ttacttattttattctttat

SEQ ID NO: 276983 - DNA, 20 bp, Artificial Sequence
  Description of Artificial Sequence: Synthetic oligonucleotide
  Target: LAMA2; (-) strand; PAM type: YTN; PAM sequence: TTT
tttacttattttattcttta

SEQ ID NO: 276984 - DNA, 20 bp, Artificial Sequence
  Description of Artificial Sequence: Synthetic oligonucleotide
  Target: LAMA2; (-) strand; PAM type: YTN; PAM sequence: CTA
ttttttacttattttattct

SEQ ID NO: 276985 - DNA, 20 bp, Artificial Sequence
  Description of Artificial Sequence: Synthetic oligonucleotide
  Target: LAMA2; (-) strand; PAM type: YTN; PAM sequence: TTG
gggtctattttttacttatt

SEQ ID NO: 276986 - DNA, 20 bp, Artificial Sequence
  Description of Artificial Sequence: Synthetic oligonucleotide
  Target: LAMA2; (-) strand; PAM type: YTN; PAM sequence: TTT
ggggtctattttttacttat

SEQ ID NO: 276987 - DNA, 20 bp, Artificial Sequence
  Description of Artificial Sequence: Synthetic oligonucleotide
  Target: LAMA2; (-) strand; PAM type: YTN; PAM sequence: CTC
catttggggtctatttttta

SEQ ID NO: 276988 - DNA, 20 bp, Artificial Sequence
  Description of Artificial Sequence: Synthetic oligonucleotide
  Target: LAMA2; (-) strand; PAM type: YTN; PAM sequence: TTC
tccatttggggtctattttt

SEQ ID NO: 276989 - DNA, 20 bp, Artificial Sequence
  Description of Artificial Sequence: Synthetic oligonucleotide
  Target: LAMA2; (-) strand; PAM type: YTN; PAM sequence: TTT
ctccatttggggtctatttt

SEQ ID NO: 276990 - DNA, 20 bp, Artificial Sequence
  Description of Artificial Sequence: Synthetic oligonucleotide
  Target: LAMA2; (-) strand; PAM type: YTN; PAM sequence: CTA
tttctccatttggggtctat

SEQ ID NO: 276991 - DNA, 20 bp, Artificial Sequence
  Description of Artificial Sequence: Synthetic oligonucleotide
  Target: LAMA2; (-) strand; PAM type: YTN; PAM sequence: TTG
ctatttctccatttggggtc

SEQ ID NO: 276992 - DNA, 20 bp, Artificial Sequence
  Description of Artificial Sequence: Synthetic oligonucleotide
  Target: LAMA2; (-) strand; PAM type: YTN; PAM sequence: CTA
gaagagtaaaatcagtgaga

SEQ ID NO: 276993 - DNA, 20 bp, Artificial Sequence
  Description of Artificial Sequence: Synthetic oligonucleotide
  Target: LAMA2; (-) strand; PAM type: YTN; PAM sequence: CTG
gcctagaagagtaaaatcag

SEQ ID NO: 276994 - DNA, 20 bp, Artificial Sequence
  Description of Artificial Sequence: Synthetic oligonucleotide
  Target: LAMA2; (-) strand; PAM type: YTN; PAM sequence: CTC
aatcctggcctagaagagta

SEQ ID NO: 276995 - DNA, 20 bp, Artificial Sequence
  Description of Artificial Sequence: Synthetic oligonucleotide
  Target: LAMA2; (-) strand; PAM type: YTN; PAM sequence: CTC
aaaagtacatgaaactcaat

SEQ ID NO: 276996 - DNA, 20 bp, Artificial Sequence
  Description of Artificial Sequence: Synthetic oligonucleotide
  Target: LAMA2; (-) strand; PAM type: YTN; PAM sequence: TTG
tctcaaaagtacatgaaact

SEQ ID NO: 276997 - DNA, 20 bp, Artificial Sequence
  Description of Artificial Sequence: Synthetic oligonucleotide
  Target: LAMA2; (-) strand; PAM type: YTN; PAM sequence: CTT
gtctcaaaagtacatgaaac

SEQ ID NO: 276998 - DNA, 20 bp, Artificial Sequence
  Description of Artificial Sequence: Synthetic oligonucleotide
  Target: LAMA2; (-) strand; PAM type: YTN; PAM sequence: TTG
gaacatatagcttgtctcaa

SEQ ID NO: 276999 - DNA, 20 bp, Artificial Sequence
  Description of Artificial Sequence: Synthetic oligonucleotide
  Target: LAMA2; (-) strand; PAM type: YTN; PAM sequence: TTT
ggaacatatagcttgtctca

SEQ ID NO: 277000 - DNA, 20 bp, Artificial Sequence
  Description of Artificial Sequence: Synthetic oligonucleotide
  Target: LAMA2; (-) strand; PAM type: YTN; PAM sequence: CTT
tggaacatatagcttgtctc

SEQ ID NO: 277001 - DNA, 20 bp, Artificial Sequence
  Description of Artificial Sequence: Synthetic oligonucleotide
  Target: LAMA2; (-) strand; PAM type: YTN; PAM sequence: TTC
tttggaacatatagcttgtc

SEQ ID NO: 277002 - DNA, 20 bp, Artificial Sequence
  Description of Artificial Sequence: Synthetic oligonucleotide
  Target: LAMA2; (-) strand; PAM type: YTN; PAM sequence: TTT
ctttggaacatatagcttgt

SEQ ID NO: 277003 - DNA, 20 bp, Artificial Sequence
  Description of Artificial Sequence: Synthetic oligonucleotide
  Target: LAMA2; (-) strand; PAM type: YTN; PAM sequence: TTT
tctttggaacatatagcttg

SEQ ID NO: 277004 - DNA, 20 bp, Artificial Sequence
  Description of Artificial Sequence: Synthetic oligonucleotide
  Target: LAMA2; (-) strand; PAM type: YTN; PAM sequence: TTT
ttctttggaacatatagctt

SEQ ID NO: 277005 - DNA, 20 bp, Artificial Sequence
  Description of Artificial Sequence: Synthetic oligonucleotide
  Target: LAMA2; (-) strand; PAM type: YTN; PAM sequence: TTA
taatttttctttggaacata

SEQ ID NO: 277006 - DNA, 20 bp, Artificial Sequence
  Description of Artificial Sequence: Synthetic oligonucleotide
  Target: LAMA2; (-) strand; PAM type: YTN; PAM sequence: TTC
atgagagaatagattataat

SEQ ID NO: 277007 - DNA, 20 bp, Artificial Sequence
  Description of Artificial Sequence: Synthetic oligonucleotide
  Target: LAMA2; (-) strand; PAM type: YTN; PAM sequence: TTT
catgagagaatagattataa

SEQ ID NO: 277008 - DNA, 20 bp, Artificial Sequence
  Description of Artificial Sequence: Synthetic oligonucleotide
  Target: LAMA2; (-) strand; PAM type: YTN; PAM sequence: CTG
tttcatgagagaatagatta

SEQ ID NO: 277009 - DNA, 20 bp, Artificial Sequence
  Description of Artificial Sequence: Synthetic oligonucleotide
  Target: LAMA2; (-) strand; PAM type: YTN; PAM sequence: CTA
atggactgtttcatgagaga

SEQ ID NO: 277010 - DNA, 20 bp, Artificial Sequence
  Description of Artificial Sequence: Synthetic oligonucleotide
  Target: LAMA2; (-) strand; PAM type: YTN; PAM sequence: TTA
agaaatagagaaaccatcac

SEQ ID NO: 277011 - DNA, 20 bp, Artificial Sequence
  Description of Artificial Sequence: Synthetic oligonucleotide
  Target: LAMA2; (-) strand; PAM type: YTN; PAM sequence: TTT
aagaaatagagaaaccatca

SEQ ID NO: 277012 - DNA, 20 bp, Artificial Sequence
  Description of Artificial Sequence: Synthetic oligonucleotide
  Target: LAMA2; (-) strand; PAM type: YTN; PAM sequence: TTT
taagaaatagagaaaccatc

SEQ ID NO: 277013 - DNA, 20 bp, Artificial Sequence
  Description of Artificial Sequence: Synthetic oligonucleotide
  Target: LAMA2; (-) strand; PAM type: YTN; PAM sequence: TTT
ttaagaaatagagaaaccat

SEQ ID NO: 277014 - DNA, 20 bp, Artificial Sequence
  Description of Artificial Sequence: Synthetic oligonucleotide
  Target: LAMA2; (-) strand; PAM type: YTN; PAM sequence: CTT
tttaagaaatagagaaacca

SEQ ID NO: 277015 - DNA, 20 bp, Artificial Sequence
  Description of Artificial Sequence: Synthetic oligonucleotide
  Target: LAMA2; (-) strand; PAM type: YTN; PAM sequence: TTA
gggaaaatactttttaagaa

SEQ ID NO: 277016 - DNA, 20 bp, Artificial Sequence
  Description of Artificial Sequence: Synthetic oligonucleotide
  Target: LAMA2; (-) strand; PAM type: YTN; PAM sequence: CTT
agggaaaatactttttaaga

SEQ ID NO: 277017 - DNA, 20 bp, Artificial Sequence
  Description of Artificial Sequence: Synthetic oligonucleotide
  Target: LAMA2; (-) strand; PAM type: YTN; PAM sequence: TTA
aggaaacttagggaaaatac

SEQ ID NO: 277018 - DNA, 20 bp, Artificial Sequence
  Description of Artificial Sequence: Synthetic oligonucleotide
  Target: LAMA2; (-) strand; PAM type: YTN; PAM sequence: TTT
aaggaaacttagggaaaata

SEQ ID NO: 277019 - DNA, 20 bp, Artificial Sequence
  Description of Artificial Sequence: Synthetic oligonucleotide
  Target: LAMA2; (-) strand; PAM type: YTN; PAM sequence: TTT
taaggaaacttagggaaaat

SEQ ID NO: 277020 - DNA, 20 bp, Artificial Sequence
  Description of Artificial Sequence: Synthetic oligonucleotide
  Target: LAMA2; (-) strand; PAM type: YTN; PAM sequence: TTT
ttaaggaaacttagggaaaa

SEQ ID NO: 277021 - DNA, 20 bp, Artificial Sequence
  Description of Artificial Sequence: Synthetic oligonucleotide
  Target: LAMA2; (-) strand; PAM type: YTN; PAM sequence: TTG
aagtgagatttttaaggaaa

SEQ ID NO: 277022 - DNA, 20 bp, Artificial Sequence
  Description of Artificial Sequence: Synthetic oligonucleotide
  Target: LAMA2; (-) strand; PAM type: YTN; PAM sequence: TTT
gaagtgagatttttaaggaa

SEQ ID NO: 277023 - DNA, 20 bp, Artificial Sequence
  Description of Artificial Sequence: Synthetic oligonucleotide
  Target: LAMA2; (-) strand; PAM type: YTN; PAM sequence: CTG
tgaaatttgaagtgagattt

SEQ ID NO: 277024 - DNA, 20 bp, Artificial Sequence
  Description of Artificial Sequence: Synthetic oligonucleotide
  Target: LAMA2; (-) strand; PAM type: YTN; PAM sequence: TTC
tgtgaaatttgaagtgagat

SEQ ID NO: 277025 - DNA, 20 bp, Artificial Sequence
  Description of Artificial Sequence: Synthetic oligonucleotide
  Target: LAMA2; (-) strand; PAM type: YTN; PAM sequence: TTC
aatgggagttctgtgaaatt

SEQ ID NO: 277026 - DNA, 20 bp, Artificial Sequence
  Description of Artificial Sequence: Synthetic oligonucleotide
  Target: LAMA2; (-) strand; PAM type: YTN; PAM sequence: TTG
tgagcataaacataagcaga

SEQ ID NO: 277027 - DNA, 20 bp, Artificial Sequence
  Description of Artificial Sequence: Synthetic oligonucleotide
  Target: LAMA2; (-) strand; PAM type: YTN; PAM sequence: TTT
gtgagcataaacataagcag

SEQ ID NO: 277028 - DNA, 20 bp, Artificial Sequence
  Description of Artificial Sequence: Synthetic oligonucleotide
  Target: LAMA2; (-) strand; PAM type: YTN; PAM sequence: CTT
tgtgagcataaacataagca

SEQ ID NO: 277029 - DNA, 20 bp, Artificial Sequence
  Description of Artificial Sequence: Synthetic oligonucleotide
  Target: LAMA2; (-) strand; PAM type: YTN; PAM sequence: CTA
tatacaaatgagtactttgt

SEQ ID NO: 277030 - DNA, 20 bp, Artificial Sequence
  Description of Artificial Sequence: Synthetic oligonucleotide
  Target: LAMA2; (-) strand; PAM type: YTN; PAM sequence: CTA
gaatctatatacaaatgagt

SEQ ID NO: 277031 - DNA, 20 bp, Artificial Sequence
  Description of Artificial Sequence: Synthetic oligonucleotide
  Target: LAMA2; (-) strand; PAM type: YTN; PAM sequence: TTC
tagaatctatatacaaatga

SEQ ID NO: 277032 - DNA, 20 bp, Artificial Sequence
  Description of Artificial Sequence: Synthetic oligonucleotide
  Target: LAMA2; (-) strand; PAM type: YTN; PAM sequence: TTG
aattctagaatctatataca

SEQ ID NO: 277033 - DNA, 20 bp, Artificial Sequence
  Description of Artificial Sequence: Synthetic oligonucleotide
  Target: LAMA2; (-) strand; PAM type: YTN; PAM sequence: CTA
catattgaattctagaatct

SEQ ID NO: 277034 - DNA, 20 bp, Artificial Sequence
  Description of Artificial Sequence: Synthetic oligonucleotide
  Target: LAMA2; (-) strand; PAM type: YTN; PAM sequence: TTG
gtactacatattgaattcta

SEQ ID NO: 277035 - DNA, 20 bp, Artificial Sequence
  Description of Artificial Sequence: Synthetic oligonucleotide
  Target: LAMA2; (-) strand; PAM type: YTN; PAM sequence: TTA
tattggtactacatattgaa

SEQ ID NO: 277036 - DNA, 20 bp, Artificial Sequence
  Description of Artificial Sequence: Synthetic oligonucleotide
  Target: LAMA2; (-) strand; PAM type: YTN; PAM sequence: CTG
aatagttatattggtactac

SEQ ID NO: 277037 - DNA, 20 bp, Artificial Sequence
  Description of Artificial Sequence: Synthetic oligonucleotide
  Target: LAMA2; (-) strand; PAM type: YTN; PAM sequence: CTA
aaatataagtgctgaatagt

SEQ ID NO: 277038 - DNA, 20 bp, Artificial Sequence
  Description of Artificial Sequence: Synthetic oligonucleotide
  Target: LAMA2; (-) strand; PAM type: YTN; PAM sequence: CTA
actaaaatataagtgctgaa

SEQ ID NO: 277039 - DNA, 20 bp, Artificial Sequence
  Description of Artificial Sequence: Synthetic oligonucleotide
  Target: LAMA2; (-) strand; PAM type: YTN; PAM sequence: TTC
taactaaaatataagtgctg

SEQ ID NO: 277040 - DNA, 20 bp, Artificial Sequence
  Description of Artificial Sequence: Synthetic oligonucleotide
  Target: LAMA2; (-) strand; PAM type: YTN; PAM sequence: TTT
ctaactaaaatataagtgct

SEQ ID NO: 277041 - DNA, 20 bp, Artificial Sequence
  Description of Artificial Sequence: Synthetic oligonucleotide
  Target: LAMA2; (-) strand; PAM type: YTN; PAM sequence: TTA
aagaaagatggagcatccat

SEQ ID NO: 277042 - DNA, 20 bp, Artificial Sequence
  Description of Artificial Sequence: Synthetic oligonucleotide
  Target: LAMA2; (-) strand; PAM type: YTN; PAM sequence: TTT
aaagaaagatggagcatcca

SEQ ID NO: 277043 - DNA, 20 bp, Artificial Sequence
  Description of Artificial Sequence: Synthetic oligonucleotide
  Target: LAMA2; (-) strand; PAM type: YTN; PAM sequence: TTT
taaagaaagatggagcatcc

SEQ ID NO: 277044 - DNA, 20 bp, Artificial Sequence
  Description of Artificial Sequence: Synthetic oligonucleotide
  Target: LAMA2; (-) strand; PAM type: YTN; PAM sequence: CTT
ttaaagaaagatggagcatc

SEQ ID NO: 277045 - DNA, 20 bp, Artificial Sequence
  Description of Artificial Sequence: Synthetic oligonucleotide
  Target: LAMA2; (-) strand; PAM type: YTN; PAM sequence: CTA
cttttaaagaaagatggagc

SEQ ID NO: 277046 - DNA, 20 bp, Artificial Sequence
  Description of Artificial Sequence: Synthetic oligonucleotide
  Target: LAMA2; (-) strand; PAM type: YTN; PAM sequence: TTA
aaactacttttaaagaaaga

SEQ ID NO: 277047 - DNA, 20 bp, Artificial Sequence
  Description of Artificial Sequence: Synthetic oligonucleotide
  Target: LAMA2; (-) strand; PAM type: YTN; PAM sequence: TTA
aggaattaaaactactttta

SEQ ID NO: 277048 - DNA, 20 bp, Artificial Sequence
  Description of Artificial Sequence: Synthetic oligonucleotide
  Target: LAMA2; (-) strand; PAM type: YTN; PAM sequence: CTA
gttaaggaattaaaactact

SEQ ID NO: 277049 - DNA, 20 bp, Artificial Sequence
  Description of Artificial Sequence: Synthetic oligonucleotide
  Target: LAMA2; (-) strand; PAM type: YTN; PAM sequence: TTA
tgcgatactagttaaggaat

SEQ ID NO: 277050 - DNA, 20 bp, Artificial Sequence
  Description of Artificial Sequence: Synthetic oligonucleotide
  Target: LAMA2; (-) strand; PAM type: YTN; PAM sequence: TTG
tgagaaagtcatccaagcga

SEQ ID NO: 277051 - DNA, 20 bp, Artificial Sequence
  Description of Artificial Sequence: Synthetic oligonucleotide
  Target: LAMA2; (-) strand; PAM type: YTN; PAM sequence: CTC
attgtgagaaagtcatccaa

SEQ ID NO: 277052 - DNA, 20 bp, Artificial Sequence
  Description of Artificial Sequence: Synthetic oligonucleotide
  Target: LAMA2; (-) strand; PAM type: YTN; PAM sequence: TTC
tcattgtgagaaagtcatcc

SEQ ID NO: 277053 - DNA, 20 bp, Artificial Sequence
  Description of Artificial Sequence: Synthetic oligonucleotide
  Target: LAMA2; (-) strand; PAM type: YTN; PAM sequence: CTT
ctcattgtgagaaagtcatc

SEQ ID NO: 277054 - DNA, 20 bp, Artificial Sequence
  Description of Artificial Sequence: Synthetic oligonucleotide
  Target: LAMA2; (-) strand; PAM type: YTN; PAM sequence: TTC
ttctcattgtgagaaagtca

SEQ ID NO: 277055 - DNA, 20 bp, Artificial Sequence
  Description of Artificial Sequence: Synthetic oligonucleotide
  Target: LAMA2; (-) strand; PAM type: YTN; PAM sequence: CTT
cttctcattgtgagaaagtc

SEQ ID NO: 277056 - DNA, 20 bp, Artificial Sequence
  Description of Artificial Sequence: Synthetic oligonucleotide
  Target: LAMA2; (-) strand; PAM type: YTN; PAM sequence: TTC
ttcttctcattgtgagaaag

SEQ ID NO: 277057 - DNA, 20 bp, Artificial Sequence
  Description of Artificial Sequence: Synthetic oligonucleotide
  Target: LAMA2; (-) strand; PAM type: YTN; PAM sequence: TTT
cttcttctcattgtgagaaa

SEQ ID NO: 277058 - DNA, 20 bp, Artificial Sequence
  Description of Artificial Sequence: Synthetic oligonucleotide
  Target: LAMA2; (-) strand; PAM type: YTN; PAM sequence: TTA
tttcttcttctcattgtgag

SEQ ID NO: 277059 - DNA, 20 bp, Artificial Sequence
  Description of Artificial Sequence: Synthetic oligonucleotide
  Target: LAMA2; (-) strand; PAM type: YTN; PAM sequence: TTG
tacaggttatttcttcttct

SEQ ID NO: 277060 - DNA, 20 bp, Artificial Sequence
  Description of Artificial Sequence: Synthetic oligonucleotide
  Target: LAMA2; (-) strand; PAM type: YTN; PAM sequence: CTT
gtacaggttatttcttcttc

SEQ ID NO: 277061 - DNA, 20 bp, Artificial Sequence
  Description of Artificial Sequence: Synthetic oligonucleotide
  Target: LAMA2; (-) strand; PAM type: YTN; PAM sequence: CTA
tgtagaggcttgtacaggtt

SEQ ID NO: 277062 - DNA, 20 bp, Artificial Sequence
  Description of Artificial Sequence: Synthetic oligonucleotide
  Target: LAMA2; (-) strand; PAM type: YTN; PAM sequence: TTC
tatgtagaggcttgtacagg

SEQ ID NO: 277063 - DNA, 20 bp, Artificial Sequence
  Description of Artificial Sequence: Synthetic oligonucleotide
  Target: LAMA2; (-) strand; PAM type: YTN; PAM sequence: CTT
ctatgtagaggcttgtacag

SEQ ID NO: 277064 - DNA, 20 bp, Artificial Sequence
  Description of Artificial Sequence: Synthetic oligonucleotide
  Target: LAMA2; (-) strand; PAM type: YTN; PAM sequence: TTC
ttctatgtagaggcttgtac

SEQ ID NO: 277065 - DNA, 20 bp, Artificial Sequence
  Description of Artificial Sequence: Synthetic oligonucleotide
  Target: LAMA2; (-) strand; PAM type: YTN; PAM sequence: TTG
aagagttcttctatgtagag

SEQ ID NO: 277066 - DNA, 20 bp, Artificial Sequence
  Description of Artificial Sequence: Synthetic oligonucleotide
  Target: LAMA2; (-) strand; PAM type: YTN; PAM sequence: CTT
gaagagttcttctatgtaga

SEQ ID NO: 277067 - DNA, 20 bp, Artificial Sequence
  Description of Artificial Sequence: Synthetic oligonucleotide
  Target: LAMA2; (-) strand; PAM type: YTN; PAM sequence: TTA
gccagtccttgaagagttct

SEQ ID NO: 277068 - DNA, 20 bp, Artificial Sequence
  Description of Artificial Sequence: Synthetic oligonucleotide
  Target: LAMA2; (-) strand; PAM type: YTN; PAM sequence: CTT
agccagtccttgaagagttc

SEQ ID NO: 277069 - DNA, 20 bp, Artificial Sequence
  Description of Artificial Sequence: Synthetic oligonucleotide
  Target: LAMA2; (-) strand; PAM type: YTN; PAM sequence: CTA
cttagccagtccttgaagag

SEQ ID NO: 277070 - DNA, 20 bp, Artificial Sequence
  Description of Artificial Sequence: Synthetic oligonucleotide
  Target: LAMA2; (-) strand; PAM type: YTN; PAM sequence: CTA
gatgagaaaaatataaacta

SEQ ID NO: 277071 - DNA, 20 bp, Artificial Sequence
  Description of Artificial Sequence: Synthetic oligonucleotide
  Target: LAMA2; (-) strand; PAM type: YTN; PAM sequence: TTG
aaatgtggctagatgagaaa

SEQ ID NO: 277072 - DNA, 20 bp, Artificial Sequence
  Description of Artificial Sequence: Synthetic oligonucleotide
  Target: LAMA2; (-) strand; PAM type: YTN; PAM sequence: TTA
gcaaaaaaggtacatcatgt

SEQ ID NO: 277073 - DNA, 20 bp, Artificial Sequence
  Description of Artificial Sequence: Synthetic oligonucleotide
  Target: LAMA2; (-) strand; PAM type: YTN; PAM sequence: CTT
agcaaaaaaggtacatcatg

SEQ ID NO: 277074 - DNA, 20 bp, Artificial Sequence
  Description of Artificial Sequence: Synthetic oligonucleotide
  Target: LAMA2; (-) strand; PAM type: YTN; PAM sequence: TTG
aataaaagcttagcaaaaaa

SEQ ID NO: 277075 - DNA, 20 bp, Artificial Sequence
  Description of Artificial Sequence: Synthetic oligonucleotide
  Target: LAMA2; (-) strand; PAM type: YTN; PAM sequence: TTT
gaataaaagcttagcaaaaa

SEQ ID NO: 277076 - DNA, 20 bp, Artificial Sequence
  Description of Artificial Sequence: Synthetic oligonucleotide
  Target: LAMA2; (-) strand; PAM type: YTN; PAM sequence: CTG
tttgaataaaagcttagcaa

SEQ ID NO: 277077 - DNA, 20 bp, Artificial Sequence
  Description of Artificial Sequence: Synthetic oligonucleotide
  Target: LAMA2; (-) strand; PAM type: YTN; PAM sequence: CTG
agctgtttgaataaaagctt

SEQ ID NO: 277078 - DNA, 20 bp, Artificial Sequence
  Description of Artificial Sequence: Synthetic oligonucleotide
  Target: LAMA2; (-) strand; PAM type: YTN; PAM sequence: TTC
ctgagctgtttgaataaaag

SEQ ID NO: 277079 - DNA, 20 bp, Artificial Sequence
  Description of Artificial Sequence: Synthetic oligonucleotide
  Target: LAMA2; (-) strand; PAM type: YTN; PAM sequence: TTT
cctgagctgtttgaataaaa

SEQ ID NO: 277080 - DNA, 20 bp, Artificial Sequence
  Description of Artificial Sequence: Synthetic oligonucleotide
  Target: LAMA2; (-) strand; PAM type: YTN; PAM sequence: CTT
tcctgagctgtttgaataaa

SEQ ID NO: 277081 - DNA, 20 bp, Artificial Sequence
  Description of Artificial Sequence: Synthetic oligonucleotide
  Target: LAMA2; (-) strand; PAM type: YTN; PAM sequence: CTG
actttcctgagctgtttgaa

SEQ ID NO: 277082 - DNA, 20 bp, Artificial Sequence
  Description of Artificial Sequence: Synthetic oligonucleotide
  Target: LAMA2; (-) strand; PAM type: YTN; PAM sequence: TTC
ctgactttcctgagctgttt

SEQ ID NO: 277083 - DNA, 20 bp, Artificial Sequence
  Description of Artificial Sequence: Synthetic oligonucleotide
  Target: LAMA2; (-) strand; PAM type: YTN; PAM sequence: TTG
tattcctgactttcctgagc

SEQ ID NO: 277084 - DNA, 20 bp, Artificial Sequence
  Description of Artificial Sequence: Synthetic oligonucleotide
  Target: LAMA2; (-) strand; PAM type: YTN; PAM sequence: CTT
gtattcctgactttcctgag

SEQ ID NO: 277085 - DNA, 20 bp, Artificial Sequence
  Description of Artificial Sequence: Synthetic oligonucleotide
  Target: LAMA2; (-) strand; PAM type: YTN; PAM sequence: CTA
ccccttgtattcctgacttt

SEQ ID NO: 277086 - DNA, 20 bp, Artificial Sequence
  Description of Artificial Sequence: Synthetic oligonucleotide
  Target: LAMA2; (-) strand; PAM type: YTN; PAM sequence: TTC
ataaaatcctaccccttgta

SEQ ID NO: 277087 - DNA, 20 bp, Artificial Sequence
  Description of Artificial Sequence: Synthetic oligonucleotide
  Target: LAMA2; (-) strand; PAM type: YTN; PAM sequence: TTT
cataaaatcctaccccttgt

SEQ ID NO: 277088 - DNA, 20 bp, Artificial Sequence
  Description of Artificial Sequence: Synthetic oligonucleotide
  Target: LAMA2; (-) strand; PAM type: YTN; PAM sequence: TTT
tcataaaatcctaccccttg

SEQ ID NO: 277089 - DNA, 20 bp, Artificial Sequence
  Description of Artificial Sequence: Synthetic oligonucleotide
  Target: LAMA2; (-) strand; PAM type: YTN; PAM sequence: TTG
cattttcataaaatcctacc

SEQ ID NO: 277090 - DNA, 20 bp, Artificial Sequence
  Description of Artificial Sequence: Synthetic oligonucleotide
  Target: LAMA2; (-) strand; PAM type: YTN; PAM sequence: TTA
tgaacaagacatcaaaattg

SEQ ID NO: 277091 - DNA, 20 bp, Artificial Sequence
  Description of Artificial Sequence: Synthetic oligonucleotide
  Target: LAMA2; (-) strand; PAM type: YTN; PAM sequence: CTG
tagaccattatgaacaagac

SEQ ID NO: 277092 - DNA, 20 bp, Artificial Sequence
  Description of Artificial Sequence: Synthetic oligonucleotide
  Target: LAMA2; (-) strand; PAM type: YTN; PAM sequence: TTC
tgtagaccattatgaacaag

SEQ ID NO: 277093 - DNA, 20 bp, Artificial Sequence
  Description of Artificial Sequence: Synthetic oligonucleotide
  Target: LAMA2; (-) strand; PAM type: YTN; PAM sequence: TTT
ctgtagaccattatgaacaa

SEQ ID NO: 277094 - DNA, 20 bp, Artificial Sequence
  Description of Artificial Sequence: Synthetic oligonucleotide
  Target: LAMA2; (-) strand; PAM type: YTN; PAM sequence: TTT
tctgtagaccattatgaaca

SEQ ID NO: 277095 - DNA, 20 bp, Artificial Sequence
  Description of Artificial Sequence: Synthetic oligonucleotide
  Target: LAMA2; (-) strand; PAM type: YTN; PAM sequence: TTT
ttctgtagaccattatgaac

SEQ ID NO: 277096 - DNA, 20 bp, Artificial Sequence
  Description of Artificial Sequence: Synthetic oligonucleotide
  Target: LAMA2; (-) strand; PAM type: YTN; PAM sequence: CTT
tttctgtagaccattatgaa

SEQ ID NO: 277097 - DNA, 20 bp, Artificial Sequence
  Description of Artificial Sequence: Synthetic oligonucleotide
  Target: LAMA2; (-) strand; PAM type: YTN; PAM sequence: TTC
tttttctgtagaccattatg

SEQ ID NO: 277098 - DNA, 20 bp, Artificial Sequence
  Description of Artificial Sequence: Synthetic oligonucleotide
  Target: LAMA2; (-) strand; PAM type: YTN; PAM sequence: CTT
ctttttctgtagaccattat

SEQ ID NO: 277099 - DNA, 20 bp, Artificial Sequence
  Description of Artificial Sequence: Synthetic oligonucleotide
  Target: LAMA2; (-) strand; PAM type: YTN; PAM sequence: CTC
cttctttttctgtagaccat

SEQ ID NO: 277100 - DNA, 20 bp, Artificial Sequence
  Description of Artificial Sequence: Synthetic oligonucleotide
  Target: LAMA2; (-) strand; PAM type: YTN; PAM sequence: TTC
aacagcctccttctttttct

SEQ ID NO: 277101 - DNA, 20 bp, Artificial Sequence
  Description of Artificial Sequence: Synthetic oligonucleotide
  Target: LAMA2; (-) strand; PAM type: YTN; PAM sequence: TTT
caacagcctccttctttttc

SEQ ID NO: 277102 - DNA, 20 bp, Artificial Sequence
  Description of Artificial Sequence: Synthetic oligonucleotide
  Target: LAMA2; (-) strand; PAM type: YTN; PAM sequence: CTT
tcaacagcctccttcttttt

SEQ ID NO: 277103 - DNA, 20 bp, Artificial Sequence
  Description of Artificial Sequence: Synthetic oligonucleotide
  Target: LAMA2; (-) strand; PAM type: YTN; PAM sequence: TTG
ccgctttcaacagcctcctt

SEQ ID NO: 277104 - DNA, 20 bp, Artificial Sequence
  Description of Artificial Sequence: Synthetic oligonucleotide
  Target: LAMA2; (-) strand; PAM type: YTN; PAM sequence: TTT
gccgctttcaacagcctcct

SEQ ID NO: 277105 - DNA, 20 bp, Artificial Sequence
  Description of Artificial Sequence: Synthetic oligonucleotide
  Target: LAMA2; (-) strand; PAM type: YTN; PAM sequence: TTG
tcgtttgccgctttcaacag

SEQ ID NO: 277106 - DNA, 20 bp, Artificial Sequence
  Description of Artificial Sequence: Synthetic oligonucleotide
  Target: LAMA2; (-) strand; PAM type: YTN; PAM sequence: TTT
gtcgtttgccgctttcaaca

SEQ ID NO: 277107 - DNA, 20 bp, Artificial Sequence
  Description of Artificial Sequence: Synthetic oligonucleotide
  Target: LAMA2; (-) strand; PAM type: YTN; PAM sequence: CTC
aatttgtcgtttgccgcttt

SEQ ID NO: 277108 - DNA, 20 bp, Artificial Sequence
  Description of Artificial Sequence: Synthetic oligonucleotide
  Target: LAMA2; (-) strand; PAM type: YTN; PAM sequence: TTC
tcaatttgtcgtttgccgct

SEQ ID NO: 277109 - DNA, 20 bp, Artificial Sequence
  Description of Artificial Sequence: Synthetic oligonucleotide
  Target: LAMA2; (-) strand; PAM type: YTN; PAM sequence: TTA
aagtgttctcaatttgtcgt

SEQ ID NO: 277110 - DNA, 20 bp, Artificial Sequence
  Description of Artificial Sequence: Synthetic oligonucleotide
  Target: LAMA2; (-) strand; PAM type: YTN; PAM sequence: TTT
aaagtgttctcaatttgtcg

SEQ ID NO: 277111 - DNA, 20 bp, Artificial Sequence
  Description of Artificial Sequence: Synthetic oligonucleotide
  Target: LAMA2; (-) strand; PAM type: YTN; PAM sequence: TTT
taaagtgttctcaatttgtc

SEQ ID NO: 277112 - DNA, 20 bp, Artificial Sequence
  Description of Artificial Sequence: Synthetic oligonucleotide
  Target: LAMA2; (-) strand; PAM type: YTN; PAM sequence: CTT
ttaaagtgttctcaatttgt

SEQ ID NO: 277113 - DNA, 20 bp, Artificial Sequence
  Description of Artificial Sequence: Synthetic oligonucleotide
  Target: LAMA2; (-) strand; PAM type: YTN; PAM sequence: CTC
ttttaaagtgttctcaattt

SEQ ID NO: 277114 - DNA, 20 bp, Artificial Sequence
  Description of Artificial Sequence: Synthetic oligonucleotide
  Target: LAMA2; (-) strand; PAM type: YTN; PAM sequence: TTG
ccctcttttaaagtgttctc

SEQ ID NO: 277115 - DNA, 20 bp, Artificial Sequence
  Description of Artificial Sequence: Synthetic oligonucleotide
  Target: LAMA2; (-) strand; PAM type: YTN; PAM sequence: TTC
atcgagtatgtcattgccct

SEQ ID NO: 277116 - DNA, 20 bp, Artificial Sequence
  Description of Artificial Sequence: Synthetic oligonucleotide
  Target: LAMA2; (-) strand; PAM type: YTN; PAM sequence: CTT
catcgagtatgtcattgccc

SEQ ID NO: 277117 - DNA, 20 bp, Artificial Sequence
  Description of Artificial Sequence: Synthetic oligonucleotide
  Target: LAMA2; (-) strand; PAM type: YTN; PAM sequence: TTG
gcttcatcgagtatgtcatt

SEQ ID NO: 277118 - DNA, 20 bp, Artificial Sequence
  Description of Artificial Sequence: Synthetic oligonucleotide
  Target: LAMA2; (-) strand; PAM type: YTN; PAM sequence: CTG
caagacggttggcttcatcg

SEQ ID NO: 277119 - DNA, 20 bp, Artificial Sequence
  Description of Artificial Sequence: Synthetic oligonucleotide
  Target: LAMA2; (-) strand; PAM type: YTN; PAM sequence: TTC
atctgcaagacggttggctt

SEQ ID NO: 277120 - DNA, 20 bp, Artificial Sequence
  Description of Artificial Sequence: Synthetic oligonucleotide
  Target: LAMA2; (-) strand; PAM type: YTN; PAM sequence: TTT
catctgcaagacggttggct

SEQ ID NO: 277121 - DNA, 20 bp, Artificial Sequence
  Description of Artificial Sequence: Synthetic oligonucleotide
  Target: LAMA2; (-) strand; PAM type: YTN; PAM sequence: TTG
atttcatctgcaagacggtt

SEQ ID NO: 277122 - DNA, 20 bp, Artificial Sequence
  Description of Artificial Sequence: Synthetic oligonucleotide
  Target: LAMA2; (-) strand; PAM type: YTN; PAM sequence: CTA
tgatggagttgatttcatct

SEQ ID NO: 277123 - DNA, 20 bp, Artificial Sequence
  Description of Artificial Sequence: Synthetic oligonucleotide
  Target: LAMA2; (-) strand; PAM type: YTN; PAM sequence: CTC
acgtctatgatggagttgat

SEQ ID NO: 277124 - DNA, 20 bp, Artificial Sequence
  Description of Artificial Sequence: Synthetic oligonucleotide
  Target: LAMA2; (-) strand; PAM type: YTN; PAM sequence: TTA
cccaatactcacgtctatga

SEQ ID NO: 277125 - DNA, 20 bp, Artificial Sequence
  Description of Artificial Sequence: Synthetic oligonucleotide
  Target: LAMA2; (-) strand; PAM type: YTN; PAM sequence: TTT
acccaatactcacgtctatg

SEQ ID NO: 277126 - DNA, 20 bp, Artificial Sequence
  Description of Artificial Sequence: Synthetic oligonucleotide
  Target: LAMA2; (-) strand; PAM type: YTN; PAM sequence: TTT
tacccaatactcacgtctat

SEQ ID NO: 277127 - DNA, 20 bp, Artificial Sequence
  Description of Artificial Sequence: Synthetic oligonucleotide
  Target: LAMA2; (-) strand; PAM type: YTN; PAM sequence: TTG
agttttacccaatactcacg

SEQ ID NO: 277128 - DNA, 20 bp, Artificial Sequence
  Description of Artificial Sequence: Synthetic oligonucleotide
  Target: LAMA2; (-) strand; PAM type: YTN; PAM sequence: TTT
gagttttacccaatactcac

SEQ ID NO: 277129 - DNA, 20 bp, Artificial Sequence
  Description of Artificial Sequence: Synthetic oligonucleotide
  Target: LAMA2; (-) strand; PAM type: YTN; PAM sequence: TTT
tgagttttacccaatactca

SEQ ID NO: 277130 - DNA, 20 bp, Artificial Sequence
  Description of Artificial Sequence: Synthetic oligonucleotide
  Target: LAMA2; (-) strand; PAM type: YTN; PAM sequence: CTT
ttgagttttacccaatactc

SEQ ID NO: 277131 - DNA, 20 bp, Artificial Sequence
  Description of Artificial Sequence: Synthetic oligonucleotide
  Target: LAMA2; (-) strand; PAM type: YTN; PAM sequence: CTC
ttttgagttttacccaatac

SEQ ID NO: 277132 - DNA, 20 bp, Artificial Sequence
  Description of Artificial Sequence: Synthetic oligonucleotide
  Target: LAMA2; (-) strand; PAM type: YTN; PAM sequence: CTC
tcttttgagttttacccaat

SEQ ID NO: 277133 - DNA, 20 bp, Artificial Sequence
  Description of Artificial Sequence: Synthetic oligonucleotide
  Target: LAMA2; (-) strand; PAM type: YTN; PAM sequence: TTA
tcatctctcttttgagtttt

SEQ ID NO: 277134 - DNA, 20 bp, Artificial Sequence
  Description of Artificial Sequence: Synthetic oligonucleotide
  Target: LAMA2; (-) strand; PAM type: YTN; PAM sequence: TTC
attatcatctctcttttgag

SEQ ID NO: 277135 - DNA, 20 bp, Artificial Sequence
  Description of Artificial Sequence: Synthetic oligonucleotide
  Target: LAMA2; (-) strand; PAM type: YTN; PAM sequence: TTA
ttcattatcatctctctttt

SEQ ID NO: 277136 - DNA, 20 bp, Artificial Sequence
  Description of Artificial Sequence: Synthetic oligonucleotide
  Target: LAMA2; (-) strand; PAM type: YTN; PAM sequence: TTT
attcattatcatctctcttt

SEQ ID NO: 277137 - DNA, 20 bp, Artificial Sequence
  Description of Artificial Sequence: Synthetic oligonucleotide
  Target: LAMA2; (-) strand; PAM type: YTN; PAM sequence: CTC
ccatttattcattatcatct

SEQ ID NO: 277138 - DNA, 20 bp, Artificial Sequence
  Description of Artificial Sequence: Synthetic oligonucleotide
  Target: LAMA2; (-) strand; PAM type: YTN; PAM sequence: CTC
atcggctcccatttattcat

SEQ ID NO: 277139 - DNA, 20 bp, Artificial Sequence
  Description of Artificial Sequence: Synthetic oligonucleotide
  Target: LAMA2; (-) strand; PAM type: YTN; PAM sequence: TTC
tcatcggctcccatttattc

SEQ ID NO: 277140 - DNA, 20 bp, Artificial Sequence
  Description of Artificial Sequence: Synthetic oligonucleotide
  Target: LAMA2; (-) strand; PAM type: YTN; PAM sequence: TTT
ctcatcggctcccatttatt

SEQ ID NO: 277141 - DNA, 20 bp, Artificial Sequence
  Description of Artificial Sequence: Synthetic oligonucleotide
  Target: LAMA2; (-) strand; PAM type: YTN; PAM sequence: CTT
tctcatcggctcccatttat

SEQ ID NO: 277142 - DNA, 20 bp, Artificial Sequence
  Description of Artificial Sequence: Synthetic oligonucleotide
  Target: LAMA2; (-) strand; PAM type: YTN; PAM sequence: CTG
agctttctcatcggctccca

SEQ ID NO: 277143 - DNA, 20 bp, Artificial Sequence
  Description of Artificial Sequence: Synthetic oligonucleotide
  Target: LAMA2; (-) strand; PAM type: YTN; PAM sequence: TTA
ctgagctttctcatcggctc

SEQ ID NO: 277144 - DNA, 20 bp, Artificial Sequence
  Description of Artificial Sequence: Synthetic oligonucleotide
  Target: LAMA2; (-) strand; PAM type: YTN; PAM sequence: CTA
ttactgagctttctcatcgg

SEQ ID NO: 277145 - DNA, 20 bp, Artificial Sequence
  Description of Artificial Sequence: Synthetic oligonucleotide
  Target: LAMA2; (-) strand; PAM type: YTN; PAM sequence: TTC
tattactgagctttctcatc

SEQ ID NO: 277146 - DNA, 20 bp, Artificial Sequence
  Description of Artificial Sequence: Synthetic oligonucleotide
  Target: LAMA2; (-) strand; PAM type: YTN; PAM sequence: CTT
ctattactgagctttctcat

SEQ ID NO: 277147 - DNA, 20 bp, Artificial Sequence
  Description of Artificial Sequence: Synthetic oligonucleotide
  Target: LAMA2; (-) strand; PAM type: YTN; PAM sequence: TTG
cttctattactgagctttct

SEQ ID NO: 277148 - DNA, 20 bp, Artificial Sequence
  Description of Artificial Sequence: Synthetic oligonucleotide
  Target: LAMA2; (-) strand; PAM type: YTN; PAM sequence: TTT
gcttctattactgagctttc

SEQ ID NO: 277149 - DNA, 20 bp, Artificial Sequence
  Description of Artificial Sequence: Synthetic oligonucleotide
  Target: LAMA2; (-) strand; PAM type: YTN; PAM sequence: CTA
gtatttgcttctattactga

SEQ ID NO: 277150 - DNA, 20 bp, Artificial Sequence
  Description of Artificial Sequence: Synthetic oligonucleotide
  Target: LAMA2; (-) strand; PAM type: YTN; PAM sequence: CTC
cacaagaaaacaagtactag

SEQ ID NO: 277151 - DNA, 20 bp, Artificial Sequence
  Description of Artificial Sequence: Synthetic oligonucleotide
  Target: LAMA2; (-) strand; PAM type: YTN; PAM sequence: TTA
tctccacaagaaaacaagta

SEQ ID NO: 277152 - DNA, 20 bp, Artificial Sequence
  Description of Artificial Sequence: Synthetic oligonucleotide
  Target: LAMA2; (-) strand; PAM type: YTN; PAM sequence: TTT
atctccacaagaaaacaagt

SEQ ID NO: 277153 - DNA, 20 bp, Artificial Sequence
  Description of Artificial Sequence: Synthetic oligonucleotide
  Target: LAMA2; (-) strand; PAM type: YTN; PAM sequence: TTT
tatctccacaagaaaacaag

SEQ ID NO: 277154 - DNA, 20 bp, Artificial Sequence
  Description of Artificial Sequence: Synthetic oligonucleotide
  Target: LAMA2; (-) strand; PAM type: YTN; PAM sequence: TTG
tcaccaatagataggcatgg

SEQ ID NO: 277155 - DNA, 20 bp, Artificial Sequence
  Description of Artificial Sequence: Synthetic oligonucleotide
  Target: LAMA2; (-) strand; PAM type: YTN; PAM sequence: TTC
cagttgtcaccaatagatag

SEQ ID NO: 277156 - DNA, 20 bp, Artificial Sequence
  Description of Artificial Sequence: Synthetic oligonucleotide
  Target: LAMA2; (-) strand; PAM type: YTN; PAM sequence: TTG
ggagaacaaagtgatattcc

SEQ ID NO: 277157 - DNA, 20 bp, Artificial Sequence
  Description of Artificial Sequence: Synthetic oligonucleotide
  Target: LAMA2; (-) strand; PAM type: YTN; PAM sequence: CTC
atgtccattgggagaacaaa

SEQ ID NO: 277158 - DNA, 20 bp, Artificial Sequence
  Description of Artificial Sequence: Synthetic oligonucleotide
  Target: LAMA2; (-) strand; PAM type: YTN; PAM sequence: TTA
cacaaacactcatgtccatt

SEQ ID NO: 277159 - DNA, 20 bp, Artificial Sequence
  Description of Artificial Sequence: Synthetic oligonucleotide
  Target: LAMA2; (-) strand; PAM type: YTN; PAM sequence: CTT
acacaaacactcatgtccat

SEQ ID NO: 277160 - DNA, 20 bp, Artificial Sequence
  Description of Artificial Sequence: Synthetic oligonucleotide
  Target: LAMA2; (-) strand; PAM type: YTN; PAM sequence: CTG
tggacaaaaacagatatgtg

SEQ ID NO: 277161 - DNA, 20 bp, Artificial Sequence
  Description of Artificial Sequence: Synthetic oligonucleotide
  Target: LAMA2; (-) strand; PAM type: YTN; PAM sequence: TTC
atcgctgtggacaaaaacag

SEQ ID NO: 277162 - DNA, 20 bp, Artificial Sequence
  Description of Artificial Sequence: Synthetic oligonucleotide
  Target: LAMA2; (-) strand; PAM type: YTN; PAM sequence: CTT
catcgctgtggacaaaaaca

SEQ ID NO: 277163 - DNA, 20 bp, Artificial Sequence
  Description of Artificial Sequence: Synthetic oligonucleotide
  Target: LAMA2; (-) strand; PAM type: YTN; PAM sequence: CTA
ggaacaagaaatgtccttca

SEQ ID NO: 277164 - DNA, 20 bp, Artificial Sequence
  Description of Artificial Sequence: Synthetic oligonucleotide
  Target: LAMA2; (-) strand; PAM type: YTN; PAM sequence: CTC
taggaacaagaaatgtcctt

SEQ ID NO: 277165 - DNA, 20 bp, Artificial Sequence
  Description of Artificial Sequence: Synthetic oligonucleotide
  Target: LAMA2; (-) strand; PAM type: YTN; PAM sequence: CTG
ctctaggaacaagaaatgtc

SEQ ID NO: 277166 - DNA, 20 bp, Artificial Sequence
  Description of Artificial Sequence: Synthetic oligonucleotide
  Target: LAMA2; (-) strand; PAM type: YTN; PAM sequence: TTG
taagtgctgctctaggaaca

SEQ ID NO: 277167 - DNA, 20 bp, Artificial Sequence
  Description of Artificial Sequence: Synthetic oligonucleotide
  Target: LAMA2; (-) strand; PAM type: YTN; PAM sequence: TTG
aagcagattgtaagtgctgc

SEQ ID NO: 277168 - DNA, 20 bp, Artificial Sequence
  Description of Artificial Sequence: Synthetic oligonucleotide
  Target: LAMA2; (-) strand; PAM type: YTN; PAM sequence: TTA
tataaatattgaagcagatt

SEQ ID NO: 277169 - DNA, 20 bp, Artificial Sequence
  Description of Artificial Sequence: Synthetic oligonucleotide
  Target: LAMA2; (-) strand; PAM type: YTN; PAM sequence: CTA
atgttatataaatattgaag

SEQ ID NO: 277170 - DNA, 20 bp, Artificial Sequence
  Description of Artificial Sequence: Synthetic oligonucleotide
  Target: LAMA2; (-) strand; PAM type: YTN; PAM sequence: TTA
actaatgttatataaatatt

SEQ ID NO: 277171 - DNA, 20 bp, Artificial Sequence
  Description of Artificial Sequence: Synthetic oligonucleotide
  Target: LAMA2; (-) strand; PAM type: YTN; PAM sequence: TTT
aactaatgttatataaatat

SEQ ID NO: 277172 - DNA, 20 bp, Artificial Sequence
  Description of Artificial Sequence: Synthetic oligonucleotide
  Target: LAMA2; (-) strand; PAM type: YTN; PAM sequence: TTT
taactaatgttatataaata

SEQ ID NO: 277173 - DNA, 20 bp, Artificial Sequence
  Description of Artificial Sequence: Synthetic oligonucleotide
  Target: LAMA2; (-) strand; PAM type: YTN; PAM sequence: CTT
ttaactaatgttatataaat

SEQ ID NO: 277174 - DNA, 20 bp, Artificial Sequence
  Description of Artificial Sequence: Synthetic oligonucleotide
  Target: LAMA2; (-) strand; PAM type: YTN; PAM sequence: TTG
tcttttaactaatgttatat

SEQ ID NO: 277175 - DNA, 20 bp, Artificial Sequence
  Description of Artificial Sequence: Synthetic oligonucleotide
  Target: LAMA2; (-) strand; PAM type: YTN; PAM sequence: TTT
gtcttttaactaatgttata

SEQ ID NO: 277176 - DNA, 20 bp, Artificial Sequence
  Description of Artificial Sequence: Synthetic oligonucleotide
  Target: LAMA2; (-) strand; PAM type: YTN; PAM sequence: TTA
catttgtcttttaactaatg

SEQ ID NO: 277177 - DNA, 20 bp, Artificial Sequence
  Description of Artificial Sequence: Synthetic oligonucleotide
  Target: LAMA2; (-) strand; PAM type: YTN; PAM sequence: TTT
acatttgtcttttaactaat

SEQ ID NO: 277178 - DNA, 20 bp, Artificial Sequence
  Description of Artificial Sequence: Synthetic oligonucleotide
  Target: LAMA2; (-) strand; PAM type: YTN; PAM sequence: TTG
taaatttacatttgtctttt

SEQ ID NO: 277179 - DNA, 20 bp, Artificial Sequence
  Description of Artificial Sequence: Synthetic oligonucleotide
  Target: LAMA2; (-) strand; PAM type: YTN; PAM sequence: TTT
gtaaatttacatttgtcttt

SEQ ID NO: 277180 - DNA, 20 bp, Artificial Sequence
  Description of Artificial Sequence: Synthetic oligonucleotide
  Target: LAMA2; (-) strand; PAM type: YTN; PAM sequence: CTG
tttgtaaatttacatttgtc

SEQ ID NO: 277181 - DNA, 20 bp, Artificial Sequence
  Description of Artificial Sequence: Synthetic oligonucleotide
  Target: LAMA2; (-) strand; PAM type: YTN; PAM sequence: TTA
aaagcctgtttgtaaattta

SEQ ID NO: 277182 - DNA, 20 bp, Artificial Sequence
  Description of Artificial Sequence: Synthetic oligonucleotide
  Target: LAMA2; (-) strand; PAM type: YTN; PAM sequence: TTA
catgttaaaagcctgtttgt

SEQ ID NO: 277183 - DNA, 20 bp, Artificial Sequence
  Description of Artificial Sequence: Synthetic oligonucleotide
  Target: LAMA2; (-) strand; PAM type: YTN; PAM sequence: TTA
gacattacatgttaaaagcc

SEQ ID NO: 277184 - DNA, 20 bp, Artificial Sequence
  Description of Artificial Sequence: Synthetic oligonucleotide
  Target: LAMA2; (-) strand; PAM type: YTN; PAM sequence: CTA
tgtaatgcattagacattac

SEQ ID NO: 277185 - DNA, 20 bp, Artificial Sequence
  Description of Artificial Sequence: Synthetic oligonucleotide
  Target: LAMA2; (-) strand; PAM type: YTN; PAM sequence: CTC
tatgtaatgcattagacatt

SEQ ID NO: 277186 - DNA, 20 bp, Artificial Sequence
  Description of Artificial Sequence: Synthetic oligonucleotide
  Target: LAMA2; (-) strand; PAM type: YTN; PAM sequence: CTA
tgaccacatatcactctatg

SEQ ID NO: 277187 - DNA, 20 bp, Artificial Sequence
  Description of Artificial Sequence: Synthetic oligonucleotide
  Target: LAMA2; (-) strand; PAM type: YTN; PAM sequence: TTC
tatgaccacatatcactcta

SEQ ID NO: 277188 - DNA, 20 bp, Artificial Sequence
  Description of Artificial Sequence: Synthetic oligonucleotide
  Target: LAMA2; (-) strand; PAM type: YTN; PAM sequence: TTT
ctatgaccacatatcactct

SEQ ID NO: 277189 - DNA, 20 bp, Artificial Sequence
  Description of Artificial Sequence: Synthetic oligonucleotide
  Target: LAMA2; (-) strand; PAM type: YTN; PAM sequence: TTG
catttctatgaccacatatc

SEQ ID NO: 277190 - DNA, 20 bp, Artificial Sequence
  Description of Artificial Sequence: Synthetic oligonucleotide
  Target: LAMA2; (-) strand; PAM type: YTN; PAM sequence: TTT
gcatttctatgaccacatat

SEQ ID NO: 277191 - DNA, 20 bp, Artificial Sequence
  Description of Artificial Sequence: Synthetic oligonucleotide
  Target: LAMA2; (-) strand; PAM type: YTN; PAM sequence: TTA
ggccatttgcatttctatga

SEQ ID NO: 277192 - DNA, 20 bp, Artificial Sequence
  Description of Artificial Sequence: Synthetic oligonucleotide
  Target: LAMA2; (-) strand; PAM type: YTN; PAM sequence: CTT
aggccatttgcatttctatg

SEQ ID NO: 277193 - DNA, 20 bp, Artificial Sequence
  Description of Artificial Sequence: Synthetic oligonucleotide
  Target: LAMA2; (-) strand; PAM type: YTN; PAM sequence: CTC
ttaggccatttgcatttcta

SEQ ID NO: 277194 - DNA, 20 bp, Artificial Sequence
  Description of Artificial Sequence: Synthetic oligonucleotide
  Target: LAMA2; (-) strand; PAM type: YTN; PAM sequence: TTA
ggatctcttaggccatttgc

SEQ ID NO: 277195 - DNA, 20 bp, Artificial Sequence
  Description of Artificial Sequence: Synthetic oligonucleotide
  Target: LAMA2; (-) strand; PAM type: YTN; PAM sequence: TTC
ataggtatacatgtcattag

SEQ ID NO: 277196 - DNA, 20 bp, Artificial Sequence
  Description of Artificial Sequence: Synthetic oligonucleotide
  Target: LAMA2; (-) strand; PAM type: YTN; PAM sequence: CTT
cataggtatacatgtcatta

SEQ ID NO: 277197 - DNA, 20 bp, Artificial Sequence
  Description of Artificial Sequence: Synthetic oligonucleotide
  Target: LAMA2; (-) strand; PAM type: YTN; PAM sequence: TTA
aacaatgccacttcataggt

SEQ ID NO: 277198 - DNA, 20 bp, Artificial Sequence
  Description of Artificial Sequence: Synthetic oligonucleotide
  Target: LAMA2; (-) strand; PAM type: YTN; PAM sequence: TTT
aaacaatgccacttcatagg

SEQ ID NO: 277199 - DNA, 20 bp, Artificial Sequence
  Description of Artificial Sequence: Synthetic oligonucleotide
  Target: LAMA2; (-) strand; PAM type: YTN; PAM sequence: CTA
tttaaacaatgccacttcat

SEQ ID NO: 277200 - DNA, 20 bp, Artificial Sequence
  Description of Artificial Sequence: Synthetic oligonucleotide
  Target: LAMA2; (-) strand; PAM type: YTN; PAM sequence: CTA
tctatttaaacaatgccact

SEQ ID NO: 277201 - DNA, 20 bp, Artificial Sequence
  Description of Artificial Sequence: Synthetic oligonucleotide
  Target: LAMA2; (-) strand; PAM type: YTN; PAM sequence: TTA
gaccaagaaaagcctatcta

SEQ ID NO: 277202 - DNA, 20 bp, Artificial Sequence
  Description of Artificial Sequence: Synthetic oligonucleotide
  Target: LAMA2; (-) strand; PAM type: YTN; PAM sequence: CTT
agaccaagaaaagcctatct

SEQ ID NO: 277203 - DNA, 20 bp, Artificial Sequence
  Description of Artificial Sequence: Synthetic oligonucleotide
  Target: LAMA2; (-) strand; PAM type: YTN; PAM sequence: TTA
agaaaccaacttagaccaag

SEQ ID NO: 277204 - DNA, 20 bp, Artificial Sequence
  Description of Artificial Sequence: Synthetic oligonucleotide
  Target: LAMA2; (-) strand; PAM type: YTN; PAM sequence: TTT
aagaaaccaacttagaccaa

SEQ ID NO: 277205 - DNA, 20 bp, Artificial Sequence
  Description of Artificial Sequence: Synthetic oligonucleotide
  Target: LAMA2; (-) strand; PAM type: YTN; PAM sequence: CTA
ggaaatttaagaaaccaact

SEQ ID NO: 277206 - DNA, 20 bp, Artificial Sequence
  Description of Artificial Sequence: Synthetic oligonucleotide
  Target: LAMA2; (-) strand; PAM type: YTN; PAM sequence: TTA
atggaatagactaggaaatt

SEQ ID NO: 277207 - DNA, 20 bp, Artificial Sequence
  Description of Artificial Sequence: Synthetic oligonucleotide
  Target: LAMA2; (-) strand; PAM type: YTN; PAM sequence: TTT
aatggaatagactaggaaat

SEQ ID NO: 277208 - DNA, 20 bp, Artificial Sequence
  Description of Artificial Sequence: Synthetic oligonucleotide
  Target: LAMA2; (-) strand; PAM type: YTN; PAM sequence: TTA
tttaatggaatagactagga

SEQ ID NO: 277209 - DNA, 20 bp, Artificial Sequence
  Description of Artificial Sequence: Synthetic oligonucleotide
  Target: LAMA2; (-) strand; PAM type: YTN; PAM sequence: TTA
aagtcattatttaatggaat

SEQ ID NO: 277210 - DNA, 20 bp, Artificial Sequence
  Description of Artificial Sequence: Synthetic oligonucleotide
  Target: LAMA2; (-) strand; PAM type: YTN; PAM sequence: CTA
acatagcaaaaagaatagag

SEQ ID NO: 277211 - DNA, 20 bp, Artificial Sequence
  Description of Artificial Sequence: Synthetic oligonucleotide
  Target: LAMA2; (-) strand; PAM type: YTN; PAM sequence: TTA
ctaacatagcaaaaagaata

SEQ ID NO: 277212 - DNA, 20 bp, Artificial Sequence
  Description of Artificial Sequence: Synthetic oligonucleotide
  Target: LAMA2; (-) strand; PAM type: YTN; PAM sequence: CTT
actaacatagcaaaaagaat

SEQ ID NO: 277213 - DNA, 20 bp, Artificial Sequence
  Description of Artificial Sequence: Synthetic oligonucleotide
  Target: LAMA2; (-) strand; PAM type: YTN; PAM sequence: TTC
aaacttactaacatagcaaa

SEQ ID NO: 277214 - DNA, 20 bp, Artificial Sequence
  Description of Artificial Sequence: Synthetic oligonucleotide
  Target: LAMA2; (-) strand; PAM type: YTN; PAM sequence: CTT
caaacttactaacatagcaa

SEQ ID NO: 277215 - DNA, 20 bp, Artificial Sequence
  Description of Artificial Sequence: Synthetic oligonucleotide
  Target: LAMA2; (-) strand; PAM type: YTN; PAM sequence: TTA
aaatgaaacttcaaacttac

SEQ ID NO: 277216 - DNA, 20 bp, Artificial Sequence
  Description of Artificial Sequence: Synthetic oligonucleotide
  Target: LAMA2; (-) strand; PAM type: YTN; PAM sequence: TTT
aaaatgaaacttcaaactta

SEQ ID NO: 277217 - DNA, 20 bp, Artificial Sequence
  Description of Artificial Sequence: Synthetic oligonucleotide
  Target: LAMA2; (-) strand; PAM type: YTN; PAM sequence: TTT
taaaatgaaacttcaaactt

SEQ ID NO: 277218 - DNA, 20 bp, Artificial Sequence
  Description of Artificial Sequence: Synthetic oligonucleotide
  Target: LAMA2; (-) strand; PAM type: YTN; PAM sequence: TTA
gttttaaaatgaaacttcaa

SEQ ID NO: 277219 - DNA, 20 bp, Artificial Sequence
  Description of Artificial Sequence: Synthetic oligonucleotide
  Target: LAMA2; (-) strand; PAM type: YTN; PAM sequence: TTT
agttttaaaatgaaacttca

SEQ ID NO: 277220 - DNA, 20 bp, Artificial Sequence
  Description of Artificial Sequence: Synthetic oligonucleotide
  Target: LAMA2; (-) strand; PAM type: YTN; PAM sequence: CTG
gcccacatgtttagttttaa

SEQ ID NO: 277221 - DNA, 20 bp, Artificial Sequence
  Description of Artificial Sequence: Synthetic oligonucleotide
  Target: LAMA2; (-) strand; PAM type: YTN; PAM sequence: TTA
caggcatgagccaccgtgcc

SEQ ID NO: 277222 - DNA, 20 bp, Artificial Sequence
  Description of Artificial Sequence: Synthetic oligonucleotide
  Target: LAMA2; (-) strand; PAM type: YTN; PAM sequence: CTG
ggattacaggcatgagccac

SEQ ID NO: 277223 - DNA, 20 bp, Artificial Sequence
  Description of Artificial Sequence: Synthetic oligonucleotide
  Target: LAMA2; (-) strand; PAM type: YTN; PAM sequence: CTC
ccaaagtgctgggattacag

SEQ ID NO: 277224 - DNA, 20 bp, Artificial Sequence
  Description of Artificial Sequence: Synthetic oligonucleotide
  Target: LAMA2; (-) strand; PAM type: YTN; PAM sequence: CTC
ggcctcccaaagtgctggga

SEQ ID NO: 277225 - DNA, 20 bp, Artificial Sequence
  Description of Artificial Sequence: Synthetic oligonucleotide
  Target: LAMA2; (-) strand; PAM type: YTN; PAM sequence: CTG
cccacctcggcctcccaaag

SEQ ID NO: 277226 - DNA, 20 bp, Artificial Sequence
  Description of Artificial Sequence: Synthetic oligonucleotide
  Target: LAMA2; (-) strand; PAM type: YTN; PAM sequence: CTC
aggcagtctgcccacctcgg

SEQ ID NO: 277227 - DNA, 20 bp, Artificial Sequence
  Description of Artificial Sequence: Synthetic oligonucleotide
  Target: LAMA2; (-) strand; PAM type: YTN; PAM sequence: CTC
ccgagctcaggcagtctgcc

SEQ ID NO: 277228 - DNA, 20 bp, Artificial Sequence
  Description of Artificial Sequence: Synthetic oligonucleotide
  Target: LAMA2; (-) strand; PAM type: YTN; PAM sequence: TTG
aactcccgagctcaggcagt

SEQ ID NO: 277229 - DNA, 20 bp, Artificial Sequence
  Description of Artificial Sequence: Synthetic oligonucleotide
  Target: LAMA2; (-) strand; PAM type: YTN; PAM sequence: TTT
gaactcccgagctcaggcag

SEQ ID NO: 277230 - DNA, 20 bp, Artificial Sequence
  Description of Artificial Sequence: Synthetic oligonucleotide
  Target: LAMA2; (-) strand; PAM type: YTN; PAM sequence: TTT
tgaactcccgagctcaggca

SEQ ID NO: 277231 - DNA, 20 bp, Artificial Sequence
  Description of Artificial Sequence: Synthetic oligonucleotide
  Target: LAMA2; (-) strand; PAM type: YTN; PAM sequence: CTG
gttttgaactcccgagctca

SEQ ID NO: 277232 - DNA, 20 bp, Artificial Sequence
  Description of Artificial Sequence: Synthetic oligonucleotide
  Target: LAMA2; (-) strand; PAM type: YTN; PAM sequence: TTG
cccaggctggttttgaactc

SEQ ID NO: 277233 - DNA, 20 bp, Artificial Sequence
  Description of Artificial Sequence: Synthetic oligonucleotide
  Target: LAMA2; (-) strand; PAM type: YTN; PAM sequence: TTC
gccatgttgcccaggctggt

SEQ ID NO: 277234 - DNA, 20 bp, Artificial Sequence
  Description of Artificial Sequence: Synthetic oligonucleotide
  Target: LAMA2; (-) strand; PAM type: YTN; PAM sequence: TTT
cgccatgttgcccaggctgg

SEQ ID NO: 277235 - DNA, 20 bp, Artificial Sequence
  Description of Artificial Sequence: Synthetic oligonucleotide
  Target: LAMA2; (-) strand; PAM type: YTN; PAM sequence: TTA
atagagacggggtttcgcca

SEQ ID NO: 277236 - DNA, 20 bp, Artificial Sequence
  Description of Artificial Sequence: Synthetic oligonucleotide
  Target: LAMA2; (-) strand; PAM type: YTN; PAM sequence: TTT
aatagagacggggtttcgcc

SEQ ID NO: 277237 - DNA, 20 bp, Artificial Sequence
  Description of Artificial Sequence: Synthetic oligonucleotide
  Target: LAMA2; (-) strand; PAM type: YTN; PAM sequence: TTG
aatatttaatagagacgggg

SEQ ID NO: 277238 - DNA, 20 bp, Artificial Sequence
  Description of Artificial Sequence: Synthetic oligonucleotide
  Target: LAMA2; (-) strand; PAM type: YTN; PAM sequence: TTT
gaatatttaatagagacggg

SEQ ID NO: 277239 - DNA, 20 bp, Artificial Sequence
  Description of Artificial Sequence: Synthetic oligonucleotide
  Target: LAMA2; (-) strand; PAM type: YTN; PAM sequence: TTT
tgaatatttaatagagacgg

SEQ ID NO: 277240 - DNA, 20 bp, Artificial Sequence
  Description of Artificial Sequence: Synthetic oligonucleotide
  Target: LAMA2; (-) strand; PAM type: YTN; PAM sequence: TTT
ttgaatatttaatagagacg

SEQ ID NO: 277241 - DNA, 20 bp, Artificial Sequence
  Description of Artificial Sequence: Synthetic oligonucleotide
  Target: LAMA2; (-) strand; PAM type: YTN; PAM sequence: TTT
tttgaatatttaatagagac

SEQ ID NO: 277242 - DNA, 20 bp, Artificial Sequence
  Description of Artificial Sequence: Synthetic oligonucleotide
  Target: LAMA2; (-) strand; PAM type: YTN; PAM sequence: CTA
attttttgaatatttaatag

SEQ ID NO: 277243 - DNA, 20 bp, Artificial Sequence
  Description of Artificial Sequence: Synthetic oligonucleotide
  Target: LAMA2; (-) strand; PAM type: YTN; PAM sequence: TTA
caggtgcccaccaccacacc

SEQ ID NO: 277244 - DNA, 20 bp, Artificial Sequence
  Description of Artificial Sequence: Synthetic oligonucleotide
  Target: LAMA2; (-) strand; PAM type: YTN; PAM sequence: CTG
ggattacaggtgcccaccac

SEQ ID NO: 277245 - DNA, 20 bp, Artificial Sequence
  Description of Artificial Sequence: Synthetic oligonucleotide
  Target: LAMA2; (-) strand; PAM type: YTN; PAM sequence: CTG
agtagctgggattacaggtg

SEQ ID NO: 277246 - DNA, 20 bp, Artificial Sequence
  Description of Artificial Sequence: Synthetic oligonucleotide
  Target: LAMA2; (-) strand; PAM type: YTN; PAM sequence: CTC
ctgagtagctgggattacag

SEQ ID NO: 277247 - DNA, 20 bp, Artificial Sequence
  Description of Artificial Sequence: Synthetic oligonucleotide
  Target: LAMA2; (-) strand; PAM type: YTN; PAM sequence: CTC
agcctcctgagtagctggga

SEQ ID NO: 277248 - DNA, 20 bp, Artificial Sequence
  Description of Artificial Sequence: Synthetic oligonucleotide
  Target: LAMA2; (-) strand; PAM type: YTN; PAM sequence: CTG
cctcagcctcctgagtagct

SEQ ID NO: 277249 - DNA, 20 bp, Artificial Sequence
  Description of Artificial Sequence: Synthetic oligonucleotide
  Target: LAMA2; (-) strand; PAM type: YTN; PAM sequence: CTC
ctgcctcagcctcctgagta

SEQ ID NO: 277250 - DNA, 20 bp, Artificial Sequence
  Description of Artificial Sequence: Synthetic oligonucleotide
  Target: LAMA2; (-) strand; PAM type: YTN; PAM sequence: TTC
tcctgcctcagcctcctgag

SEQ ID NO: 277251 - DNA, 20 bp, Artificial Sequence
  Description of Artificial Sequence: Synthetic oligonucleotide
  Target: LAMA2; (-) strand; PAM type: YTN; PAM sequence: TTC
aagcaattctcctgcctcag

SEQ ID NO: 277252 - DNA, 20 bp, Artificial Sequence
  Description of Artificial Sequence: Synthetic oligonucleotide
  Target: LAMA2; (-) strand; PAM type: YTN; PAM sequence: CTG
gttcaagcaattctcctgcc

SEQ ID NO: 277253 - DNA, 20 bp, Artificial Sequence
  Description of Artificial Sequence: Synthetic oligonucleotide
  Target: LAMA2; (-) strand; PAM type: YTN; PAM sequence: CTC
cctggttcaagcaattctcc

SEQ ID NO: 277254 - DNA, 20 bp, Artificial Sequence
  Description of Artificial Sequence: Synthetic oligonucleotide
  Target: LAMA2; (-) strand; PAM type: YTN; PAM sequence: CTG
cctccctggttcaagcaatt

SEQ ID NO: 277255 - DNA, 20 bp, Artificial Sequence
  Description of Artificial Sequence: Synthetic oligonucleotide
  Target: LAMA2; (-) strand; PAM type: YTN; PAM sequence: CTC
tgcctccctggttcaagcaa

SEQ ID NO: 277256 - DNA, 20 bp, Artificial Sequence
  Description of Artificial Sequence: Synthetic oligonucleotide
  Target: LAMA2; (-) strand; PAM type: YTN; PAM sequence: CTG
caacctctgcctccctggtt

SEQ ID NO: 277257 - DNA, 20 bp, Artificial Sequence
  Description of Artificial Sequence: Synthetic oligonucleotide
  Target: LAMA2; (-) strand; PAM type: YTN; PAM sequence: CTC
actgcaacctctgcctccct

SEQ ID NO: 277258 - DNA, 20 bp, Artificial Sequence
  Description of Artificial Sequence: Synthetic oligonucleotide
  Target: LAMA2; (-) strand; PAM type: YTN; PAM sequence: CTC
agctcactgcaacctctgcc

SEQ ID NO: 277259 - DNA, 20 bp, Artificial Sequence
  Description of Artificial Sequence: Synthetic oligonucleotide
  Target: LAMA2; (-) strand; PAM type: YTN; PAM sequence: CTG
gaatgcagtggtgcgatctc

SEQ ID NO: 277260 - DNA, 20 bp, Artificial Sequence
  Description of Artificial Sequence: Synthetic oligonucleotide
  Target: LAMA2; (-) strand; PAM type: YTN; PAM sequence: CTG
tcacccaggctggaatgcag

SEQ ID NO: 277261 - DNA, 20 bp, Artificial Sequence
  Description of Artificial Sequence: Synthetic oligonucleotide
  Target: LAMA2; (-) strand; PAM type: YTN; PAM sequence: CTC
tgtcacccaggctggaatgc

SEQ ID NO: 277262 - DNA, 20 bp, Artificial Sequence
  Description of Artificial Sequence: Synthetic oligonucleotide
  Target: LAMA2; (-) strand; PAM type: YTN; PAM sequence: TTG
ctctgtcacccaggctggaa

SEQ ID NO: 277263 - DNA, 20 bp, Artificial Sequence
  Description of Artificial Sequence: Synthetic oligonucleotide
  Target: LAMA2; (-) strand; PAM type: YTN; PAM sequence: CTT
gctctgtcacccaggctgga

SEQ ID NO: 277264 - DNA, 20 bp, Artificial Sequence
  Description of Artificial Sequence: Synthetic oligonucleotide
  Target: LAMA2; (-) strand; PAM type: YTN; PAM sequence: TTG
agacagagtcttgctctgtc

SEQ ID NO: 277265 - DNA, 20 bp, Artificial Sequence
  Description of Artificial Sequence: Synthetic oligonucleotide
  Target: LAMA2; (-) strand; PAM type: YTN; PAM sequence: TTT
gagacagagtcttgctctgt

SEQ ID NO: 277266 - DNA, 20 bp, Artificial Sequence
  Description of Artificial Sequence: Synthetic oligonucleotide
  Target: LAMA2; (-) strand; PAM type: YTN; PAM sequence: TTT
tgagacagagtcttgctctg

SEQ ID NO: 277267 - DNA, 20 bp, Artificial Sequence
  Description of Artificial Sequence: Synthetic oligonucleotide
  Target: LAMA2; (-) strand; PAM type: YTN; PAM sequence: TTT
ttgagacagagtcttgctct

SEQ ID NO: 277268 - DNA, 20 bp, Artificial Sequence
  Description of Artificial Sequence: Synthetic oligonucleotide
  Target: LAMA2; (-) strand; PAM type: YTN; PAM sequence: TTT
tttgagacagagtcttgctc

SEQ ID NO: 277269 - DNA, 20 bp, Artificial Sequence
  Description of Artificial Sequence: Synthetic oligonucleotide
  Target: LAMA2; (-) strand; PAM type: YTN; PAM sequence: TTT
ttttgagacagagtcttgct

SEQ ID NO: 277270 - DNA, 20 bp, Artificial Sequence
  Description of Artificial Sequence: Synthetic oligonucleotide
  Target: LAMA2; (-) strand; PAM type: YTN; PAM sequence: TTT
tttttgagacagagtcttgc

SEQ ID NO: 277271 - DNA, 20 bp, Artificial Sequence
  Description of Artificial Sequence: Synthetic oligonucleotide
  Target: LAMA2; (-) strand; PAM type: YTN; PAM sequence: TTT
ttttttgagacagagtcttg

SEQ ID NO: 277272 - DNA, 20 bp, Artificial Sequence
  Description of Artificial Sequence: Synthetic oligonucleotide
  Target: LAMA2; (-) strand; PAM type: YTN; PAM sequence: TTT
tttttttgagacagagtctt

SEQ ID NO: 277273 - DNA, 20 bp, Artificial Sequence
  Description of Artificial Sequence: Synthetic oligonucleotide
  Target: LAMA2; (-) strand; PAM type: YTN; PAM sequence: TTT
ttttttttgagacagagtct

SEQ ID NO: 277274 - DNA, 20 bp, Artificial Sequence
  Description of Artificial Sequence: Synthetic oligonucleotide
  Target: LAMA2; (-) strand; PAM type: YTN; PAM sequence: TTT
tttttttttgagacagagtc

SEQ ID NO: 277275 - DNA, 20 bp, Artificial Sequence
  Description of Artificial Sequence: Synthetic oligonucleotide
  Target: LAMA2; (-) strand; PAM type: YTN; PAM sequence: TTT
ttttttttttgagacagagt

SEQ ID NO: 277276 - DNA, 20 bp, Artificial Sequence
  Description of Artificial Sequence: Synthetic oligonucleotide
  Target: LAMA2; (-) strand; PAM type: YTN; PAM sequence: TTT
tttttttttttgagacagag

SEQ ID NO: 277277 - DNA, 20 bp, Artificial Sequence
  Description of Artificial Sequence: Synthetic oligonucleotide
  Target: LAMA2; (-) strand; PAM type: YTN; PAM sequence: TTT
ttttttttttttgagacaga

SEQ ID NO: 277278 - DNA, 20 bp, Artificial Sequence
  Description of Artificial Sequence: Synthetic oligonucleotide
  Target: LAMA2; (-) strand; PAM type: YTN; PAM sequence: TTT
tttttttttttttgagacag

SEQ ID NO: 277279 - DNA, 20 bp, Artificial Sequence
  Description of Artificial Sequence: Synthetic oligonucleotide
  Target: LAMA2; (-) strand; PAM type: YTN; PAM sequence: TTT
ttttttttttttttgagaca

SEQ ID NO: 277280 - DNA, 20 bp, Artificial Sequence
  Description of Artificial Sequence: Synthetic oligonucleotide
  Target: LAMA2; (-) strand; PAM type: YTN; PAM sequence: TTT
tttttttttttttttgagac

SEQ ID NO: 277281 - DNA, 20 bp, Artificial Sequence
  Description of Artificial Sequence: Synthetic oligonucleotide
  Target: LAMA2; (-) strand; PAM type: YTN; PAM sequence: TTT
ttttttttttttttttgaga

SEQ ID NO: 277282 - DNA, 20 bp, Artificial Sequence
  Description of Artificial Sequence: Synthetic oligonucleotide
  Target: LAMA2; (-) strand; PAM type: YTN; PAM sequence: TTA
gttttttttttttttttttt

SEQ ID NO: 277283 - DNA, 20 bp, Artificial Sequence
  Description of Artificial Sequence: Synthetic oligonucleotide
  Target: LAMA2; (-) strand; PAM type: YTN; PAM sequence: TTT
agtttttttttttttttttt

SEQ ID NO: 277284 - DNA, 20 bp, Artificial Sequence
  Description of Artificial Sequence: Synthetic oligonucleotide
  Target: LAMA2; (-) strand; PAM type: YTN; PAM sequence: TTA
gtttagtttttttttttttt

SEQ ID NO: 277285 - DNA, 20 bp, Artificial Sequence
  Description of Artificial Sequence: Synthetic oligonucleotide
  Target: LAMA2; (-) strand; PAM type: YTN; PAM sequence: TTT
agtttagttttttttttttt

SEQ ID NO: 277286 - DNA, 20 bp, Artificial Sequence
  Description of Artificial Sequence: Synthetic oligonucleotide
  Target: LAMA2; (-) strand; PAM type: YTN; PAM sequence: CTA
cacgtttagtttagtttttt

SEQ ID NO: 277287 - DNA, 20 bp, Artificial Sequence
  Description of Artificial Sequence: Synthetic oligonucleotide
  Target: LAMA2; (-) strand; PAM type: YTN; PAM sequence: CTA
tgagacataactacacgttt

SEQ ID NO: 277288 - DNA, 20 bp, Artificial Sequence
  Description of Artificial Sequence: Synthetic oligonucleotide
  Target: LAMA2; (-) strand; PAM type: YTN; PAM sequence: CTC
tatgagacataactacacgt

SEQ ID NO: 277289 - DNA, 20 bp, Artificial Sequence
  Description of Artificial Sequence: Synthetic oligonucleotide
  Target: LAMA2; (-) strand; PAM type: YTN; PAM sequence: TTC
tctatgagacataactacac

SEQ ID NO: 277290 - DNA, 20 bp, Artificial Sequence
  Description of Artificial Sequence: Synthetic oligonucleotide
  Target: LAMA2; (-) strand; PAM type: YTN; PAM sequence: TTT
ctctatgagacataactaca

SEQ ID NO: 277291 - DNA, 20 bp, Artificial Sequence
  Description of Artificial Sequence: Synthetic oligonucleotide
  Target: LAMA2; (-) strand; PAM type: YTN; PAM sequence: CTA
atttctctatgagacataac

SEQ ID NO: 277292 - DNA, 20 bp, Artificial Sequence
  Description of Artificial Sequence: Synthetic oligonucleotide
  Target: LAMA2; (-) strand; PAM type: YTN; PAM sequence: TTA
ctaatttctctatgagacat

SEQ ID NO: 277293 - DNA, 20 bp, Artificial Sequence
  Description of Artificial Sequence: Synthetic oligonucleotide
  Target: LAMA2; (-) strand; PAM type: YTN; PAM sequence: TTT
actaatttctctatgagaca

SEQ ID NO: 277294 - DNA, 20 bp, Artificial Sequence
  Description of Artificial Sequence: Synthetic oligonucleotide
  Target: LAMA2; (-) strand; PAM type: YTN; PAM sequence: TTT
tactaatttctctatgagac

SEQ ID NO: 277295 - DNA, 20 bp, Artificial Sequence
  Description of Artificial Sequence: Synthetic oligonucleotide
  Target: LAMA2; (-) strand; PAM type: YTN; PAM sequence: CTT
ttactaatttctctatgaga

SEQ ID NO: 277296 - DNA, 20 bp, Artificial Sequence
  Description of Artificial Sequence: Synthetic oligonucleotide
  Target: LAMA2; (-) strand; PAM type: YTN; PAM sequence: CTC
ttttactaatttctctatga

SEQ ID NO: 277297 - DNA, 20 bp, Artificial Sequence
  Description of Artificial Sequence: Synthetic oligonucleotide
  Target: LAMA2; (-) strand; PAM type: YTN; PAM sequence: CTC
tcttttactaatttctctat

SEQ ID NO: 277298 - DNA, 20 bp, Artificial Sequence
  Description of Artificial Sequence: Synthetic oligonucleotide
  Target: LAMA2; (-) strand; PAM type: YTN; PAM sequence: CTC
ctctcttttactaatttctc

SEQ ID NO: 277299 - DNA, 20 bp, Artificial Sequence
  Description of Artificial Sequence: Synthetic oligonucleotide
  Target: LAMA2; (-) strand; PAM type: YTN; PAM sequence: TTC
aagcctcctctcttttacta

SEQ ID NO: 277300 - DNA, 20 bp, Artificial Sequence
  Description of Artificial Sequence: Synthetic oligonucleotide
  Target: LAMA2; (-) strand; PAM type: YTN; PAM sequence: TTA
agcaagtgaattcaagcctc

SEQ ID NO: 277301 - DNA, 20 bp, Artificial Sequence
  Description of Artificial Sequence: Synthetic oligonucleotide
  Target: LAMA2; (-) strand; PAM type: YTN; PAM sequence: TTT
aagcaagtgaattcaagcct

SEQ ID NO: 277302 - DNA, 20 bp, Artificial Sequence
  Description of Artificial Sequence: Synthetic oligonucleotide
  Target: LAMA2; (-) strand; PAM type: YTN; PAM sequence: TTT
taagcaagtgaattcaagcc

SEQ ID NO: 277303 - DNA, 20 bp, Artificial Sequence
  Description of Artificial Sequence: Synthetic oligonucleotide
  Target: LAMA2; (-) strand; PAM type: YTN; PAM sequence: CTG
atatgtagagaagagggcat

SEQ ID NO: 277304 - DNA, 20 bp, Artificial Sequence
  Description of Artificial Sequence: Synthetic oligonucleotide
  Target: LAMA2; (-) strand; PAM type: YTN; PAM sequence: TTC
aacatactgatatgtagaga

SEQ ID NO: 277305 - DNA, 20 bp, Artificial Sequence
  Description of Artificial Sequence: Synthetic oligonucleotide
  Target: LAMA2; (-) strand; PAM type: YTN; PAM sequence: CTT
caacatactgatatgtagag

SEQ ID NO: 277306 - DNA, 20 bp, Artificial Sequence
  Description of Artificial Sequence: Synthetic oligonucleotide
  Target: LAMA2; (-) strand; PAM type: YTN; PAM sequence: TTG
gatgtcttcaacatactgat

SEQ ID NO: 277307 - DNA, 20 bp, Artificial Sequence
  Description of Artificial Sequence: Synthetic oligonucleotide
  Target: LAMA2; (-) strand; PAM type: YTN; PAM sequence: TTT
ggatgtcttcaacatactga

SEQ ID NO: 277308 - DNA, 20 bp, Artificial Sequence
  Description of Artificial Sequence: Synthetic oligonucleotide
  Target: LAMA2; (-) strand; PAM type: YTN; PAM sequence: TTA
gtttggatgtcttcaacata

SEQ ID NO: 277309 - DNA, 20 bp, Artificial Sequence
  Description of Artificial Sequence: Synthetic oligonucleotide
  Target: LAMA2; (-) strand; PAM type: YTN; PAM sequence: TTT
agtttggatgtcttcaacat

SEQ ID NO: 277310 - DNA, 20 bp, Artificial Sequence
  Description of Artificial Sequence: Synthetic oligonucleotide
  Target: LAMA2; (-) strand; PAM type: YTN; PAM sequence: CTC
agacataggtggcaatttag

SEQ ID NO: 277311 - DNA, 20 bp, Artificial Sequence
  Description of Artificial Sequence: Synthetic oligonucleotide
  Target: LAMA2; (-) strand; PAM type: YTN; PAM sequence: CTC
ctcagacataggtggcaatt

SEQ ID NO: 277312 - DNA, 20 bp, Artificial Sequence
  Description of Artificial Sequence: Synthetic oligonucleotide
  Target: LAMA2; (-) strand; PAM type: YTN; PAM sequence: TTA
agctcctcagacataggtgg

SEQ ID NO: 277313 - DNA, 20 bp, Artificial Sequence
  Description of Artificial Sequence: Synthetic oligonucleotide
  Target: LAMA2; (-) strand; PAM type: YTN; PAM sequence: TTA
tcattaagctcctcagacat

SEQ ID NO: 277314 - DNA, 20 bp, Artificial Sequence
  Description of Artificial Sequence: Synthetic oligonucleotide
  Target: LAMA2; (-) strand; PAM type: YTN; PAM sequence: TTT
atcattaagctcctcagaca

SEQ ID NO: 277315 - DNA, 20 bp, Artificial Sequence
  Description of Artificial Sequence: Synthetic oligonucleotide
  Target: LAMA2; (-) strand; PAM type: YTN; PAM sequence: TTT
tatcattaagctcctcagac

SEQ ID NO: 277316 - DNA, 20 bp, Artificial Sequence
  Description of Artificial Sequence: Synthetic oligonucleotide
  Target: LAMA2; (-) strand; PAM type: YTN; PAM sequence: CTA
ttttatcattaagctcctca

SEQ ID NO: 277317 - DNA, 20 bp, Artificial Sequence
  Description of Artificial Sequence: Synthetic oligonucleotide
  Target: LAMA2; (-) strand; PAM type: YTN; PAM sequence: TTG
ggagaggtcatctattttat

SEQ ID NO: 277318 - DNA, 20 bp, Artificial Sequence
  Description of Artificial Sequence: Synthetic oligonucleotide
  Target: LAMA2; (-) strand; PAM type: YTN; PAM sequence: CTT
gggagaggtcatctatttta

SEQ ID NO: 277319 - DNA, 20 bp, Artificial Sequence
  Description of Artificial Sequence: Synthetic oligonucleotide
  Target: LAMA2; (-) strand; PAM type: YTN; PAM sequence: TTC
ttgggagaggtcatctattt

SEQ ID NO: 277320 - DNA, 20 bp, Artificial Sequence
  Description of Artificial Sequence: Synthetic oligonucleotide
  Target: LAMA2; (-) strand; PAM type: YTN; PAM sequence: TTT
cttgggagaggtcatctatt

SEQ ID NO: 277321 - DNA, 20 bp, Artificial Sequence
  Description of Artificial Sequence: Synthetic oligonucleotide
  Target: LAMA2; (-) strand; PAM type: YTN; PAM sequence: TTA
tttcttgggagaggtcatct

SEQ ID NO: 277322 - DNA, 20 bp, Artificial Sequence
  Description of Artificial Sequence: Synthetic oligonucleotide
  Target: LAMA2; (-) strand; PAM type: YTN; PAM sequence: TTT
atttcttgggagaggtcatc

SEQ ID NO: 277323 - DNA, 20 bp, Artificial Sequence
  Description of Artificial Sequence: Synthetic oligonucleotide
  Target: LAMA2; (-) strand; PAM type: YTN; PAM sequence: CTT
tatttcttgggagaggtcat

SEQ ID NO: 277324 - DNA, 20 bp, Artificial Sequence
  Description of Artificial Sequence: Synthetic oligonucleotide
  Target: LAMA2; (-) strand; PAM type: YTN; PAM sequence: CTG
tcctttatttcttgggagag

SEQ ID NO: 277325 - DNA, 20 bp, Artificial Sequence
  Description of Artificial Sequence: Synthetic oligonucleotide
  Target: LAMA2; (-) strand; PAM type: YTN; PAM sequence: TTC
ctgtcctttatttcttggga

SEQ ID NO: 277326 - DNA, 20 bp, Artificial Sequence
  Description of Artificial Sequence: Synthetic oligonucleotide
  Target: LAMA2; (-) strand; PAM type: YTN; PAM sequence: CTT
cctgtcctttatttcttggg

SEQ ID NO: 277327 - DNA, 20 bp, Artificial Sequence
  Description of Artificial Sequence: Synthetic oligonucleotide
  Target: LAMA2; (-) strand; PAM type: YTN; PAM sequence: CTC
agcaagcttcctgtccttta

SEQ ID NO: 277328 - DNA, 20 bp, Artificial Sequence
  Description of Artificial Sequence: Synthetic oligonucleotide
  Target: LAMA2; (-) strand; PAM type: YTN; PAM sequence: TTC
tcagcaagcttcctgtcctt

SEQ ID NO: 277329 - DNA, 20 bp, Artificial Sequence
  Description of Artificial Sequence: Synthetic oligonucleotide
  Target: LAMA2; (-) strand; PAM type: YTN; PAM sequence: CTT
ctcagcaagcttcctgtcct

SEQ ID NO: 277330 - DNA, 20 bp, Artificial Sequence
  Description of Artificial Sequence: Synthetic oligonucleotide
  Target: LAMA2; (-) strand; PAM type: YTN; PAM sequence: CTG
ggacaccttctcagcaagct

SEQ ID NO: 277331 - DNA, 20 bp, Artificial Sequence
  Description of Artificial Sequence: Synthetic oligonucleotide
  Target: LAMA2; (-) strand; PAM type: YTN; PAM sequence: CTC
agcctgggacaccttctcag

SEQ ID NO: 277332 - DNA, 20 bp, Artificial Sequence
  Description of Artificial Sequence: Synthetic oligonucleotide
  Target: LAMA2; (-) strand; PAM type: YTN; PAM sequence: CTC
tcagcctgggacaccttctc

SEQ ID NO: 277333 - DNA, 20 bp, Artificial Sequence
  Description of Artificial Sequence: Synthetic oligonucleotide
  Target: LAMA2; (-) strand; PAM type: YTN; PAM sequence: CTG
cgtggctctcagcctgggac

SEQ ID NO: 277334 - DNA, 20 bp, Artificial Sequence
  Description of Artificial Sequence: Synthetic oligonucleotide
  Target: LAMA2; (-) strand; PAM type: YTN; PAM sequence: CTG
agctgcgtggctctcagcct

SEQ ID NO: 277335 - DNA, 20 bp, Artificial Sequence
  Description of Artificial Sequence: Synthetic oligonucleotide
  Target: LAMA2; (-) strand; PAM type: YTN; PAM sequence: TTC
aactgagctgcgtggctctc

SEQ ID NO: 277336 - DNA, 20 bp, Artificial Sequence
  Description of Artificial Sequence: Synthetic oligonucleotide
  Target: LAMA2; (-) strand; PAM type: YTN; PAM sequence: TTC
caaaaacaaatgacataccc

SEQ ID NO: 277337 - DNA, 20 bp, Artificial Sequence
  Description of Artificial Sequence: Synthetic oligonucleotide
  Target: LAMA2; (-) strand; PAM type: YTN; PAM sequence: TTT
ccaaaaacaaatgacatacc

SEQ ID NO: 277338 - DNA, 20 bp, Artificial Sequence
  Description of Artificial Sequence: Synthetic oligonucleotide
  Target: LAMA2; (-) strand; PAM type: YTN; PAM sequence: TTG
gacaagcatcaaaatacaca

SEQ ID NO: 277339 - DNA, 20 bp, Artificial Sequence
  Description of Artificial Sequence: Synthetic oligonucleotide
  Target: LAMA2; (-) strand; PAM type: YTN; PAM sequence: TTT
ggacaagcatcaaaatacac

SEQ ID NO: 277340 - DNA, 20 bp, Artificial Sequence
  Description of Artificial Sequence: Synthetic oligonucleotide
  Target: LAMA2; (-) strand; PAM type: YTN; PAM sequence: CTT
tggacaagcatcaaaataca

SEQ ID NO: 277341 - DNA, 20 bp, Artificial Sequence
  Description of Artificial Sequence: Synthetic oligonucleotide
  Target: LAMA2; (-) strand; PAM type: YTN; PAM sequence: CTA
gtcaaaacctttggacaagc

SEQ ID NO: 277342 - DNA, 20 bp, Artificial Sequence
  Description of Artificial Sequence: Synthetic oligonucleotide
  Target: LAMA2; (-) strand; PAM type: YTN; PAM sequence: TTA
tgctagtcaaaacctttgga

SEQ ID NO: 277343 - DNA, 20 bp, Artificial Sequence
  Description of Artificial Sequence: Synthetic oligonucleotide
  Target: LAMA2; (-) strand; PAM type: YTN; PAM sequence: TTT
atgctagtcaaaacctttgg

SEQ ID NO: 277344 - DNA, 20 bp, Artificial Sequence
  Description of Artificial Sequence: Synthetic oligonucleotide
  Target: LAMA2; (-) strand; PAM type: YTN; PAM sequence: CTA
tttatgctagtcaaaacctt

SEQ ID NO: 277345 - DNA, 20 bp, Artificial Sequence
  Description of Artificial Sequence: Synthetic oligonucleotide
  Target: LAMA2; (-) strand; PAM type: YTN; PAM sequence: CTA
ctatttatgctagtcaaaac

SEQ ID NO: 277346 - DNA, 20 bp, Artificial Sequence
  Description of Artificial Sequence: Synthetic oligonucleotide
  Target: LAMA2; (-) strand; PAM type: YTN; PAM sequence: CTC
tactatttatgctagtcaaa

SEQ ID NO: 277347 - DNA, 20 bp, Artificial Sequence
  Description of Artificial Sequence: Synthetic oligonucleotide
  Target: LAMA2; (-) strand; PAM type: YTN; PAM sequence: TTC
tctactatttatgctagtca

SEQ ID NO: 277348 - DNA, 20 bp, Artificial Sequence
  Description of Artificial Sequence: Synthetic oligonucleotide
  Target: LAMA2; (-) strand; PAM type: YTN; PAM sequence: TTG
aaaatgattctctactattt

SEQ ID NO: 277349 - DNA, 20 bp, Artificial Sequence
  Description of Artificial Sequence: Synthetic oligonucleotide
  Target: LAMA2; (-) strand; PAM type: YTN; PAM sequence: TTT
gaaaatgattctctactatt

SEQ ID NO: 277350 - DNA, 20 bp, Artificial Sequence
  Description of Artificial Sequence: Synthetic oligonucleotide
  Target: LAMA2; (-) strand; PAM type: YTN; PAM sequence: TTA
acagaaatcaggatttgaaa

SEQ ID NO: 277351 - DNA, 20 bp, Artificial Sequence
  Description of Artificial Sequence: Synthetic oligonucleotide
  Target: LAMA2; (-) strand; PAM type: YTN; PAM sequence: TTC
ataattaacagaaatcagga

SEQ ID NO: 277352 - DNA, 20 bp, Artificial Sequence
  Description of Artificial Sequence: Synthetic oligonucleotide
  Target: LAMA2; (-) strand; PAM type: YTN; PAM sequence: CTA
gtgtgttcataattaacaga

SEQ ID NO: 277353 - DNA, 20 bp, Artificial Sequence
  Description of Artificial Sequence: Synthetic oligonucleotide
  Target: LAMA2; (-) strand; PAM type: YTN; PAM sequence: CTA
tccacagaaaggccatatag

SEQ ID NO: 277354 - DNA, 20 bp, Artificial Sequence
  Description of Artificial Sequence: Synthetic oligonucleotide
  Target: LAMA2; (-) strand; PAM type: YTN; PAM sequence: TTA
agcctatccacagaaaggcc

SEQ ID NO: 277355 - DNA, 20 bp, Artificial Sequence
  Description of Artificial Sequence: Synthetic oligonucleotide
  Target: LAMA2; (-) strand; PAM type: YTN; PAM sequence: CTA
attaagcctatccacagaaa

SEQ ID NO: 277356 - DNA, 20 bp, Artificial Sequence
  Description of Artificial Sequence: Synthetic oligonucleotide
  Target: LAMA2; (-) strand; PAM type: YTN; PAM sequence: CTC
ctaattaagcctatccacag

SEQ ID NO: 277357 - DNA, 20 bp, Artificial Sequence
  Description of Artificial Sequence: Synthetic oligonucleotide
  Target: LAMA2; (-) strand; PAM type: YTN; PAM sequence: TTG
cccagaccctcctaattaag

SEQ ID NO: 277358 - DNA, 20 bp, Artificial Sequence
  Description of Artificial Sequence: Synthetic oligonucleotide
  Target: LAMA2; (-) strand; PAM type: YTN; PAM sequence: TTT
gcccagaccctcctaattaa

SEQ ID NO: 277359 - DNA, 20 bp, Artificial Sequence
  Description of Artificial Sequence: Synthetic oligonucleotide
  Target: LAMA2; (-) strand; PAM type: YTN; PAM sequence: CTT
tgcccagaccctcctaatta

SEQ ID NO: 277360 - DNA, 20 bp, Artificial Sequence
  Description of Artificial Sequence: Synthetic oligonucleotide
  Target: LAMA2; (-) strand; PAM type: YTN; PAM sequence: CTG
tagcaaagctttgcccagac

SEQ ID NO: 277361 - DNA, 20 bp, Artificial Sequence
  Description of Artificial Sequence: Synthetic oligonucleotide
  Target: LAMA2; (-) strand; PAM type: YTN; PAM sequence: CTG
ctgtagcaaagctttgccca

SEQ ID NO: 277362 - DNA, 20 bp, Artificial Sequence
  Description of Artificial Sequence: Synthetic oligonucleotide
  Target: LAMA2; (-) strand; PAM type: YTN; PAM sequence: TTG
atgctgctgtagcaaagctt

SEQ ID NO: 277363 - DNA, 20 bp, Artificial Sequence
  Description of Artificial Sequence: Synthetic oligonucleotide
  Target: LAMA2; (-) strand; PAM type: YTN; PAM sequence: TTT
gatgctgctgtagcaaagct

SEQ ID NO: 277364 - DNA, 20 bp, Artificial Sequence
  Description of Artificial Sequence: Synthetic oligonucleotide
  Target: LAMA2; (-) strand; PAM type: YTN; PAM sequence: TTT
tgatgctgctgtagcaaagc

SEQ ID NO: 277365 - DNA, 20 bp, Artificial Sequence
  Description of Artificial Sequence: Synthetic oligonucleotide
  Target: LAMA2; (-) strand; PAM type: YTN; PAM sequence: CTT
ttgatgctgctgtagcaaag

SEQ ID NO: 277366 - DNA, 20 bp, Artificial Sequence
  Description of Artificial Sequence: Synthetic oligonucleotide
  Target: LAMA2; (-) strand; PAM type: YTN; PAM sequence: TTG
taaatcagacttttgatgct

SEQ ID NO: 277367 - DNA, 20 bp, Artificial Sequence
  Description of Artificial Sequence: Synthetic oligonucleotide
  Target: LAMA2; (-) strand; PAM type: YTN; PAM sequence: CTT
gtaaatcagacttttgatgc

SEQ ID NO: 277368 - DNA, 20 bp, Artificial Sequence
  Description of Artificial Sequence: Synthetic oligonucleotide
  Target: LAMA2; (-) strand; PAM type: YTN; PAM sequence: CTA
cttgtaaatcagacttttga

SEQ ID NO: 277369 - DNA, 20 bp, Artificial Sequence
  Description of Artificial Sequence: Synthetic oligonucleotide
  Target: LAMA2; (-) strand; PAM type: YTN; PAM sequence: TTG
agtctacttgtaaatcagac

SEQ ID NO: 277370 - DNA, 20 bp, Artificial Sequence
  Description of Artificial Sequence: Synthetic oligonucleotide
  Target: LAMA2; (-) strand; PAM type: YTN; PAM sequence: TTT
gagtctacttgtaaatcaga

SEQ ID NO: 277371 - DNA, 20 bp, Artificial Sequence
  Description of Artificial Sequence: Synthetic oligonucleotide
  Target: LAMA2; (-) strand; PAM type: YTN; PAM sequence: CTA
agccatatttgagtctactt

SEQ ID NO: 277372 - DNA, 20 bp, Artificial Sequence
  Description of Artificial Sequence: Synthetic oligonucleotide
  Target: LAMA2; (-) strand; PAM type: YTN; PAM sequence: CTA
ctaagccatatttgagtcta

SEQ ID NO: 277373 - DNA, 20 bp, Artificial Sequence
  Description of Artificial Sequence: Synthetic oligonucleotide
  Target: LAMA2; (-) strand; PAM type: YTN; PAM sequence: TTC
ctactaagccatatttgagt

SEQ ID NO: 277374 - DNA, 20 bp, Artificial Sequence
  Description of Artificial Sequence: Synthetic oligonucleotide
  Target: LAMA2; (-) strand; PAM type: YTN; PAM sequence: CTT
cctactaagccatatttgag

SEQ ID NO: 277375 - DNA, 20 bp, Artificial Sequence
  Description of Artificial Sequence: Synthetic oligonucleotide
  Target: LAMA2; (-) strand; PAM type: YTN; PAM sequence: TTC
acttcctactaagccatatt

SEQ ID NO: 277376 - DNA, 20 bp, Artificial Sequence
  Description of Artificial Sequence: Synthetic oligonucleotide
  Target: LAMA2; (-) strand; PAM type: YTN; PAM sequence: CTA
tgttcacttcctactaagcc

SEQ ID NO: 277377 - DNA, 20 bp, Artificial Sequence
  Description of Artificial Sequence: Synthetic oligonucleotide
  Target: LAMA2; (-) strand; PAM type: YTN; PAM sequence: CTA
gggctatgttcacttcctac

SEQ ID NO: 277378 - DNA, 20 bp, Artificial Sequence
  Description of Artificial Sequence: Synthetic oligonucleotide
  Target: LAMA2; (-) strand; PAM type: YTN; PAM sequence: CTA
agtgtagcctagggctatgt

SEQ ID NO: 277379 - DNA, 20 bp, Artificial Sequence
  Description of Artificial Sequence: Synthetic oligonucleotide
  Target: LAMA2; (-) strand; PAM type: YTN; PAM sequence: TTC
taagtgtagcctagggctat

SEQ ID NO: 277380 - DNA, 20 bp, Artificial Sequence
  Description of Artificial Sequence: Synthetic oligonucleotide
  Target: LAMA2; (-) strand; PAM type: YTN; PAM sequence: TTT
ctaagtgtagcctagggcta

SEQ ID NO: 277381 - DNA, 20 bp, Artificial Sequence
  Description of Artificial Sequence: Synthetic oligonucleotide
  Target: LAMA2; (-) strand; PAM type: YTN; PAM sequence: TTT
tctaagtgtagcctagggct

SEQ ID NO: 277382 - DNA, 20 bp, Artificial Sequence
  Description of Artificial Sequence: Synthetic oligonucleotide
  Target: LAMA2; (-) strand; PAM type: YTN; PAM sequence: TTT
ttctaagtgtagcctagggc

SEQ ID NO: 277383 - DNA, 20 bp, Artificial Sequence
  Description of Artificial Sequence: Synthetic oligonucleotide
  Target: LAMA2; (-) strand; PAM type: YTN; PAM sequence: TTT
tttctaagtgtagcctaggg

SEQ ID NO: 277384 - DNA, 20 bp, Artificial Sequence
  Description of Artificial Sequence: Synthetic oligonucleotide
  Target: LAMA2; (-) strand; PAM type: YTN; PAM sequence: TTA
ataaagaacagaaaataatt

SEQ ID NO: 277385 - DNA, 20 bp, Artificial Sequence
  Description of Artificial Sequence: Synthetic oligonucleotide
  Target: LAMA2; (-) strand; PAM type: YTN; PAM sequence: TTT
aataaagaacagaaaataat

SEQ ID NO: 277386 - DNA, 20 bp, Artificial Sequence
  Description of Artificial Sequence: Synthetic oligonucleotide
  Target: LAMA2; (-) strand; PAM type: YTN; PAM sequence: TTT
taataaagaacagaaaataa

SEQ ID NO: 277387 - DNA, 20 bp, Artificial Sequence
  Description of Artificial Sequence: Synthetic oligonucleotide
  Target: LAMA2; (-) strand; PAM type: YTN; PAM sequence: TTT
ttaataaagaacagaaaata

SEQ ID NO: 277388 - DNA, 20 bp, Artificial Sequence
  Description of Artificial Sequence: Synthetic oligonucleotide
  Target: LAMA2; (-) strand; PAM type: YTN; PAM sequence: CTT
tttaataaagaacagaaaat

SEQ ID NO: 277389 - DNA, 20 bp, Artificial Sequence
  Description of Artificial Sequence: Synthetic oligonucleotide
  Target: LAMA2; (-) strand; PAM type: YTN; PAM sequence: CTG
tgctttttaataaagaacag

SEQ ID NO: 277390 - DNA, 20 bp, Artificial Sequence
  Description of Artificial Sequence: Synthetic oligonucleotide
  Target: LAMA2; (-) strand; PAM type: YTN; PAM sequence: CTA
ataaggcaaccactgtgctt

SEQ ID NO: 277391 - DNA, 20 bp, Artificial Sequence
  Description of Artificial Sequence: Synthetic oligonucleotide
  Target: LAMA2; (-) strand; PAM type: YTN; PAM sequence: TTA
aaatgctaataaggcaacca

SEQ ID NO: 277392 - DNA, 20 bp, Artificial Sequence
  Description of Artificial Sequence: Synthetic oligonucleotide
  Target: LAMA2; (-) strand; PAM type: YTN; PAM sequence: TTT
aaaatgctaataaggcaacc

SEQ ID NO: 277393 - DNA, 20 bp, Artificial Sequence
  Description of Artificial Sequence: Synthetic oligonucleotide
  Target: LAMA2; (-) strand; PAM type: YTN; PAM sequence: TTA
tttaaaatgctaataaggca

SEQ ID NO: 277394 - DNA, 20 bp, Artificial Sequence
  Description of Artificial Sequence: Synthetic oligonucleotide
  Target: LAMA2; (-) strand; PAM type: YTN; PAM sequence: TTC
atatatgttatttaaaatgc

SEQ ID NO: 277395 - DNA, 20 bp, Artificial Sequence
  Description of Artificial Sequence: Synthetic oligonucleotide
  Target: LAMA2; (-) strand; PAM type: YTN; PAM sequence: TTT
catatatgttatttaaaatg

SEQ ID NO: 277396 - DNA, 20 bp, Artificial Sequence
  Description of Artificial Sequence: Synthetic oligonucleotide
  Target: LAMA2; (-) strand; PAM type: YTN; PAM sequence: TTT
tcatatatgttatttaaaat

SEQ ID NO: 277397 - DNA, 20 bp, Artificial Sequence
  Description of Artificial Sequence: Synthetic oligonucleotide
  Target: LAMA2; (-) strand; PAM type: YTN; PAM sequence: TTG
aaacagaatgtattttcata

SEQ ID NO: 277398 - DNA, 20 bp, Artificial Sequence
  Description of Artificial Sequence: Synthetic oligonucleotide
  Target: LAMA2; (-) strand; PAM type: YTN; PAM sequence: TTT
gaaacagaatgtattttcat

SEQ ID NO: 277399 - DNA, 20 bp, Artificial Sequence
  Description of Artificial Sequence: Synthetic oligonucleotide
  Target: LAMA2; (-) strand; PAM type: YTN; PAM sequence: CTG
aaatttgaaacagaatgtat

SEQ ID NO: 277400 - DNA, 20 bp, Artificial Sequence
  Description of Artificial Sequence: Synthetic oligonucleotide
  Target: LAMA2; (-) strand; PAM type: YTN; PAM sequence: TTA
gaaacatgaaactgaaattt

SEQ ID NO: 277401 - DNA, 20 bp, Artificial Sequence
  Description of Artificial Sequence: Synthetic oligonucleotide
  Target: LAMA2; (-) strand; PAM type: YTN; PAM sequence: TTC
cattagaaacatgaaactga

SEQ ID NO: 277402 - DNA, 20 bp, Artificial Sequence
  Description of Artificial Sequence: Synthetic oligonucleotide
  Target: LAMA2; (-) strand; PAM type: YTN; PAM sequence: TTG
attccattagaaacatgaaa

SEQ ID NO: 277403 - DNA, 20 bp, Artificial Sequence
  Description of Artificial Sequence: Synthetic oligonucleotide
  Target: LAMA2; (-) strand; PAM type: YTN; PAM sequence: TTT
gattccattagaaacatgaa

SEQ ID NO: 277404 - DNA, 20 bp, Artificial Sequence
  Description of Artificial Sequence: Synthetic oligonucleotide
  Target: LAMA2; (-) strand; PAM type: YTN; PAM sequence: TTT
tgattccattagaaacatga

SEQ ID NO: 277405 - DNA, 20 bp, Artificial Sequence
  Description of Artificial Sequence: Synthetic oligonucleotide
  Target: LAMA2; (-) strand; PAM type: YTN; PAM sequence: TTG
ttttgattccattagaaaca

SEQ ID NO: 277406 - DNA, 20 bp, Artificial Sequence
  Description of Artificial Sequence: Synthetic oligonucleotide
  Target: LAMA2; (-) strand; PAM type: YTN; PAM sequence: TTA
acaataaattgttttgattc

SEQ ID NO: 277407 - DNA, 20 bp, Artificial Sequence
  Description of Artificial Sequence: Synthetic oligonucleotide
  Target: LAMA2; (-) strand; PAM type: YTN; PAM sequence: TTT
aacaataaattgttttgatt

SEQ ID NO: 277408 - DNA, 20 bp, Artificial Sequence
  Description of Artificial Sequence: Synthetic oligonucleotide
  Target: LAMA2; (-) strand; PAM type: YTN; PAM sequence: TTT
taacaataaattgttttgat

SEQ ID NO: 277409 - DNA, 20 bp, Artificial Sequence
  Description of Artificial Sequence: Synthetic oligonucleotide
  Target: LAMA2; (-) strand; PAM type: YTN; PAM sequence: CTT
ttaacaataaattgttttga

SEQ ID NO: 277410 - DNA, 20 bp, Artificial Sequence
  Description of Artificial Sequence: Synthetic oligonucleotide
  Target: LAMA2; (-) strand; PAM type: YTN; PAM sequence: TTC
aaaagccatccttttaacaa

SEQ ID NO: 277411 - DNA, 20 bp, Artificial Sequence
  Description of Artificial Sequence: Synthetic oligonucleotide
  Target: LAMA2; (-) strand; PAM type: YTN; PAM sequence: TTT
caaaagccatccttttaaca

SEQ ID NO: 277412 - DNA, 20 bp, Artificial Sequence
  Description of Artificial Sequence: Synthetic oligonucleotide
  Target: LAMA2; (-) strand; PAM type: YTN; PAM sequence: TTT
tcaaaagccatccttttaac

SEQ ID NO: 277413 - DNA, 20 bp, Artificial Sequence
  Description of Artificial Sequence: Synthetic oligonucleotide
  Target: LAMA2; (-) strand; PAM type: YTN; PAM sequence: CTA
cgtatggggccaaattttca

SEQ ID NO: 277414 - DNA, 20 bp, Artificial Sequence
  Description of Artificial Sequence: Synthetic oligonucleotide
  Target: LAMA2; (-) strand; PAM type: YTN; PAM sequence: TTA
aagactacgtatggggccaa

SEQ ID NO: 277415 - DNA, 20 bp, Artificial Sequence
  Description of Artificial Sequence: Synthetic oligonucleotide
  Target: LAMA2; (-) strand; PAM type: YTN; PAM sequence: CTT
aaagactacgtatggggcca

SEQ ID NO: 277416 - DNA, 20 bp, Artificial Sequence
  Description of Artificial Sequence: Synthetic oligonucleotide
  Target: LAMA2; (-) strand; PAM type: YTN; PAM sequence: TTA
aaagaggaaaaataaaaaag

SEQ ID NO: 277417 - DNA, 20 bp, Artificial Sequence
  Description of Artificial Sequence: Synthetic oligonucleotide
  Target: LAMA2; (-) strand; PAM type: YTN; PAM sequence: CTT
aaaagaggaaaaataaaaaa

SEQ ID NO: 277418 - DNA, 20 bp, Artificial Sequence
  Description of Artificial Sequence: Synthetic oligonucleotide
  Target: LAMA2; (-) strand; PAM type: YTN; PAM sequence: CTG
gagcttaaaagaggaaaaat

SEQ ID NO: 277419 - DNA, 20 bp, Artificial Sequence
  Description of Artificial Sequence: Synthetic oligonucleotide
  Target: LAMA2; (-) strand; PAM type: YTN; PAM sequence: CTC
cctggagcttaaaagaggaa

SEQ ID NO: 277420 - DNA, 20 bp, Artificial Sequence
  Description of Artificial Sequence: Synthetic oligonucleotide
  Target: LAMA2; (-) strand; PAM type: YTN; PAM sequence: TTA
caggagaaaatgtaatgtct

SEQ ID NO: 277421 - DNA, 20 bp, Artificial Sequence
  Description of Artificial Sequence: Synthetic oligonucleotide
  Target: LAMA2; (-) strand; PAM type: YTN; PAM sequence: TTT
acaggagaaaatgtaatgtc

SEQ ID NO: 277422 - DNA, 20 bp, Artificial Sequence
  Description of Artificial Sequence: Synthetic oligonucleotide
  Target: LAMA2; (-) strand; PAM type: YTN; PAM sequence: TTT
tacaggagaaaatgtaatgt

SEQ ID NO: 277423 - DNA, 20 bp, Artificial Sequence
  Description of Artificial Sequence: Synthetic oligonucleotide
  Target: LAMA2; (-) strand; PAM type: YTN; PAM sequence: CTA
ttttacaggagaaaatgtaa

SEQ ID NO: 277424 - DNA, 20 bp, Artificial Sequence
  Description of Artificial Sequence: Synthetic oligonucleotide
  Target: LAMA2; (-) strand; PAM type: YTN; PAM sequence: CTG
ctattttacaggagaaaatg

SEQ ID NO: 277425 - DNA, 20 bp, Artificial Sequence
  Description of Artificial Sequence: Synthetic oligonucleotide
  Target: LAMA2; (-) strand; PAM type: YTN; PAM sequence: CTA
gaataagctgctattttaca

SEQ ID NO: 277426 - DNA, 20 bp, Artificial Sequence
  Description of Artificial Sequence: Synthetic oligonucleotide
  Target: LAMA2; (-) strand; PAM type: YTN; PAM sequence: TTG
taataatcccagctagaata

SEQ ID NO: 277427 - DNA, 20 bp, Artificial Sequence
  Description of Artificial Sequence: Synthetic oligonucleotide
  Target: LAMA2; (-) strand; PAM type: YTN; PAM sequence: TTT
gtaataatcccagctagaat

SEQ ID NO: 277428 - DNA, 20 bp, Artificial Sequence
  Description of Artificial Sequence: Synthetic oligonucleotide
  Target: LAMA2; (-) strand; PAM type: YTN; PAM sequence: CTT
tgtaataatcccagctagaa

SEQ ID NO: 277429 - DNA, 20 bp, Artificial Sequence
  Description of Artificial Sequence: Synthetic oligonucleotide
  Target: LAMA2; (-) strand; PAM type: YTN; PAM sequence: CTA
tgacctttgtaataatccca

SEQ ID NO: 277430 - DNA, 20 bp, Artificial Sequence
  Description of Artificial Sequence: Synthetic oligonucleotide
  Target: LAMA2; (-) strand; PAM type: YTN; PAM sequence: CTC
ctatgacctttgtaataatc

SEQ ID NO: 277431 - DNA, 20 bp, Artificial Sequence
  Description of Artificial Sequence: Synthetic oligonucleotide
  Target: LAMA2; (-) strand; PAM type: YTN; PAM sequence: CTC
cctcctatgacctttgtaat

SEQ ID NO: 277432 - DNA, 20 bp, Artificial Sequence
  Description of Artificial Sequence: Synthetic oligonucleotide
  Target: LAMA2; (-) strand; PAM type: YTN; PAM sequence: CTC
tccctcctatgacctttgta

SEQ ID NO: 277433 - DNA, 20 bp, Artificial Sequence
  Description of Artificial Sequence: Synthetic oligonucleotide
  Target: LAMA2; (-) strand; PAM type: YTN; PAM sequence: TTA
ctctccctcctatgaccttt

SEQ ID NO: 277434 - DNA, 20 bp, Artificial Sequence
  Description of Artificial Sequence: Synthetic oligonucleotide
  Target: LAMA2; (-) strand; PAM type: YTN; PAM sequence: TTT
actctccctcctatgacctt

SEQ ID NO: 277435 - DNA, 20 bp, Artificial Sequence
  Description of Artificial Sequence: Synthetic oligonucleotide
  Target: LAMA2; (-) strand; PAM type: YTN; PAM sequence: CTT
tactctccctcctatgacct

SEQ ID NO: 277436 - DNA, 20 bp, Artificial Sequence
  Description of Artificial Sequence: Synthetic oligonucleotide
  Target: LAMA2; (-) strand; PAM type: YTN; PAM sequence: CTC
tttactctccctcctatgac

SEQ ID NO: 277437 - DNA, 20 bp, Artificial Sequence
  Description of Artificial Sequence: Synthetic oligonucleotide
  Target: LAMA2; (-) strand; PAM type: YTN; PAM sequence: TTC
cctctttactctccctccta

SEQ ID NO: 277438 - DNA, 20 bp, Artificial Sequence
  Description of Artificial Sequence: Synthetic oligonucleotide
  Target: LAMA2; (-) strand; PAM type: YTN; PAM sequence: CTT
ccctctttactctccctcct

SEQ ID NO: 277439 - DNA, 20 bp, Artificial Sequence
  Description of Artificial Sequence: Synthetic oligonucleotide
  Target: LAMA2; (-) strand; PAM type: YTN; PAM sequence: TTG
taagtcaaatgtatacttcc

SEQ ID NO: 277440 - DNA, 20 bp, Artificial Sequence
  Description of Artificial Sequence: Synthetic oligonucleotide
  Target: LAMA2; (-) strand; PAM type: YTN; PAM sequence: TTT
gtaagtcaaatgtatacttc

SEQ ID NO: 277441 - DNA, 20 bp, Artificial Sequence
  Description of Artificial Sequence: Synthetic oligonucleotide
  Target: LAMA2; (-) strand; PAM type: YTN; PAM sequence: CTG
tttgtaagtcaaatgtatac

SEQ ID NO: 277442 - DNA, 20 bp, Artificial Sequence
  Description of Artificial Sequence: Synthetic oligonucleotide
  Target: LAMA2; (-) strand; PAM type: YTN; PAM sequence: TTA
tacacagaaggctgtttgta

SEQ ID NO: 277443 - DNA, 20 bp, Artificial Sequence
  Description of Artificial Sequence: Synthetic oligonucleotide
  Target: LAMA2; (-) strand; PAM type: YTN; PAM sequence: TTG
taggaaaagcatatcagtta

SEQ ID NO: 277444 - DNA, 20 bp, Artificial Sequence
  Description of Artificial Sequence: Synthetic oligonucleotide
  Target: LAMA2; (-) strand; PAM type: YTN; PAM sequence: TTA
cgacaatcccaaaattgtag

SEQ ID NO: 277445 - DNA, 20 bp, Artificial Sequence
  Description of Artificial Sequence: Synthetic oligonucleotide
  Target: LAMA2; (-) strand; PAM type: YTN; PAM sequence: TTA
aattacgacaatcccaaaat

SEQ ID NO: 277446 - DNA, 20 bp, Artificial Sequence
  Description of Artificial Sequence: Synthetic oligonucleotide
  Target: LAMA2; (-) strand; PAM type: YTN; PAM sequence: CTA
ttaaattacgacaatcccaa

SEQ ID NO: 277447 - DNA, 20 bp, Artificial Sequence
  Description of Artificial Sequence: Synthetic oligonucleotide
  Target: LAMA2; (-) strand; PAM type: YTN; PAM sequence: CTA
atagcaccgctattaaatta

SEQ ID NO: 277448 - DNA, 20 bp, Artificial Sequence
  Description of Artificial Sequence: Synthetic oligonucleotide
  Target: LAMA2; (-) strand; PAM type: YTN; PAM sequence: TTG
gggctaatagcaccgctatt

SEQ ID NO: 277449 - DNA, 20 bp, Artificial Sequence
  Description of Artificial Sequence: Synthetic oligonucleotide
  Target: LAMA2; (-) strand; PAM type: YTN; PAM sequence: CTT
ggggctaatagcaccgctat

SEQ ID NO: 277450 - DNA, 20 bp, Artificial Sequence
  Description of Artificial Sequence: Synthetic oligonucleotide
  Target: LAMA2; (-) strand; PAM type: YTN; PAM sequence: TTC
ttggggctaatagcaccgct

SEQ ID NO: 277451 - DNA, 20 bp, Artificial Sequence
  Description of Artificial Sequence: Synthetic oligonucleotide
  Target: LAMA2; (-) strand; PAM type: YTN; PAM sequence: TTA
ttcttggggctaatagcacc

SEQ ID NO: 277452 - DNA, 20 bp, Artificial Sequence
  Description of Artificial Sequence: Synthetic oligonucleotide
  Target: LAMA2; (-) strand; PAM type: YTN; PAM sequence: CTG
ggcaaattattcttggggct

SEQ ID NO: 277453 - DNA, 20 bp, Artificial Sequence
  Description of Artificial Sequence: Synthetic oligonucleotide
  Target: LAMA2; (-) strand; PAM type: YTN; PAM sequence: TTA
tctgggcaaattattcttgg

SEQ ID NO: 277454 - DNA, 20 bp, Artificial Sequence
  Description of Artificial Sequence: Synthetic oligonucleotide
  Target: LAMA2; (-) strand; PAM type: YTN; PAM sequence: TTT
atctgggcaaattattcttg

SEQ ID NO: 277455 - DNA, 20 bp, Artificial Sequence
  Description of Artificial Sequence: Synthetic oligonucleotide
  Target: LAMA2; (-) strand; PAM type: YTN; PAM sequence: TTG
catgtgatgtagatttatct

SEQ ID NO: 277456 - DNA, 20 bp, Artificial Sequence
  Description of Artificial Sequence: Synthetic oligonucleotide
  Target: LAMA2; (-) strand; PAM type: YTN; PAM sequence: TTT
gcatgtgatgtagatttatc

SEQ ID NO: 277457 - DNA, 20 bp, Artificial Sequence
  Description of Artificial Sequence: Synthetic oligonucleotide
  Target: LAMA2; (-) strand; PAM type: YTN; PAM sequence: CTT
tgcatgtgatgtagatttat

SEQ ID NO: 277458 - DNA, 20 bp, Artificial Sequence
  Description of Artificial Sequence: Synthetic oligonucleotide
  Target: LAMA2; (-) strand; PAM type: YTN; PAM sequence: TTA
agtatgagaacaaagctttg

SEQ ID NO: 277459 - DNA, 20 bp, Artificial Sequence
  Description of Artificial Sequence: Synthetic oligonucleotide
  Target: LAMA2; (-) strand; PAM type: YTN; PAM sequence: TTA
taacagtaagtattaagtat

SEQ ID NO: 277460 - DNA, 20 bp, Artificial Sequence
  Description of Artificial Sequence: Synthetic oligonucleotide
  Target: LAMA2; (-) strand; PAM type: YTN; PAM sequence: TTT
ataacagtaagtattaagta

SEQ ID NO: 277461 - DNA, 20 bp, Artificial Sequence
  Description of Artificial Sequence: Synthetic oligonucleotide
  Target: LAMA2; (-) strand; PAM type: YTN; PAM sequence: CTT
tataacagtaagtattaagt

SEQ ID NO: 277462 - DNA, 20 bp, Artificial Sequence
  Description of Artificial Sequence: Synthetic oligonucleotide
  Target: LAMA2; (-) strand; PAM type: YTN; PAM sequence: TTC
tttataacagtaagtattaa

SEQ ID NO: 277463 - DNA, 20 bp, Artificial Sequence
  Description of Artificial Sequence: Synthetic oligonucleotide
  Target: LAMA2; (-) strand; PAM type: YTN; PAM sequence: TTT
ctttataacagtaagtatta

SEQ ID NO: 277464 - DNA, 20 bp, Artificial Sequence
  Description of Artificial Sequence: Synthetic oligonucleotide
  Target: LAMA2; (-) strand; PAM type: YTN; PAM sequence: TTT
tctttataacagtaagtatt

SEQ ID NO: 277465 - DNA, 20 bp, Artificial Sequence
  Description of Artificial Sequence: Synthetic oligonucleotide
  Target: LAMA2; (-) strand; PAM type: YTN; PAM sequence: TTT
ttctttataacagtaagtat

SEQ ID NO: 277466 - DNA, 20 bp, Artificial Sequence
  Description of Artificial Sequence: Synthetic oligonucleotide
  Target: LAMA2; (-) strand; PAM type: YTN; PAM sequence: TTT
tttctttataacagtaagta

SEQ ID NO: 277467 - DNA, 20 bp, Artificial Sequence
  Description of Artificial Sequence: Synthetic oligonucleotide
  Target: LAMA2; (-) strand; PAM type: YTN; PAM sequence: TTA
gcattttttctttataacag

SEQ ID NO: 277468 - DNA, 20 bp, Artificial Sequence
  Description of Artificial Sequence: Synthetic oligonucleotide
  Target: LAMA2; (-) strand; PAM type: YTN; PAM sequence: TTC
aaacattagcattttttctt

SEQ ID NO: 277469 - DNA, 20 bp, Artificial Sequence
  Description of Artificial Sequence: Synthetic oligonucleotide
  Target: LAMA2; (-) strand; PAM type: YTN; PAM sequence: CTT
caaacattagcattttttct

SEQ ID NO: 277470 - DNA, 20 bp, Artificial Sequence
  Description of Artificial Sequence: Synthetic oligonucleotide
  Target: LAMA2; (-) strand; PAM type: YTN; PAM sequence: TTG
tccaaggtcttcaaacatta

SEQ ID NO: 277471 - DNA, 20 bp, Artificial Sequence
  Description of Artificial Sequence: Synthetic oligonucleotide
  Target: LAMA2; (-) strand; PAM type: YTN; PAM sequence: TTC
atatattgtccaaggtcttc

SEQ ID NO: 277472 - DNA, 20 bp, Artificial Sequence
  Description of Artificial Sequence: Synthetic oligonucleotide
  Target: LAMA2; (-) strand; PAM type: YTN; PAM sequence: TTG
acataaaataaaatgatagt

SEQ ID NO: 277473 - DNA, 20 bp, Artificial Sequence
  Description of Artificial Sequence: Synthetic oligonucleotide
  Target: LAMA2; (-) strand; PAM type: YTN; PAM sequence: TTT
gacataaaataaaatgatag

SEQ ID NO: 277474 - DNA, 20 bp, Artificial Sequence
  Description of Artificial Sequence: Synthetic oligonucleotide
  Target: LAMA2; (-) strand; PAM type: YTN; PAM sequence: TTA
taaagtggcaaaagtttgac

SEQ ID NO: 277475 - DNA, 20 bp, Artificial Sequence
  Description of Artificial Sequence: Synthetic oligonucleotide
  Target: LAMA2; (-) strand; PAM type: YTN; PAM sequence: TTC
attataaagtggcaaaagtt

SEQ ID NO: 277476 - DNA, 20 bp, Artificial Sequence
  Description of Artificial Sequence: Synthetic oligonucleotide
  Target: LAMA2; (-) strand; PAM type: YTN; PAM sequence: CTT
cattataaagtggcaaaagt

SEQ ID NO: 277477 - DNA, 20 bp, Artificial Sequence
  Description of Artificial Sequence: Synthetic oligonucleotide
  Target: LAMA2; (-) strand; PAM type: YTN; PAM sequence: CTG
ccacccacccttcattataa

SEQ ID NO: 277478 - DNA, 20 bp, Artificial Sequence
  Description of Artificial Sequence: Synthetic oligonucleotide
  Target: LAMA2; (-) strand; PAM type: YTN; PAM sequence: TTC
atctgccacccacccttcat

SEQ ID NO: 277479 - DNA, 20 bp, Artificial Sequence
  Description of Artificial Sequence: Synthetic oligonucleotide
  Target: LAMA2; (-) strand; PAM type: YTN; PAM sequence: TTT
catctgccacccacccttca

SEQ ID NO: 277480 - DNA, 20 bp, Artificial Sequence
  Description of Artificial Sequence: Synthetic oligonucleotide
  Target: LAMA2; (-) strand; PAM type: YTN; PAM sequence: TTG
tgtttcatctgccacccacc

SEQ ID NO: 277481 - DNA, 20 bp, Artificial Sequence
  Description of Artificial Sequence: Synthetic oligonucleotide
  Target: LAMA2; (-) strand; PAM type: YTN; PAM sequence: TTT
gtgtttcatctgccacccac

SEQ ID NO: 277482 - DNA, 20 bp, Artificial Sequence
  Description of Artificial Sequence: Synthetic oligonucleotide
  Target: LAMA2; (-) strand; PAM type: YTN; PAM sequence: CTT
tgtgtttcatctgccaccca

SEQ ID NO: 277483 - DNA, 20 bp, Artificial Sequence
  Description of Artificial Sequence: Synthetic oligonucleotide
  Target: LAMA2; (-) strand; PAM type: YTN; PAM sequence: CTA
gctttgtgtttcatctgcca

SEQ ID NO: 277484 - DNA, 20 bp, Artificial Sequence
  Description of Artificial Sequence: Synthetic oligonucleotide
  Target: LAMA2; (-) strand; PAM type: YTN; PAM sequence: CTG
atgatacctagctttgtgtt

SEQ ID NO: 277485 - DNA, 20 bp, Artificial Sequence
  Description of Artificial Sequence: Synthetic oligonucleotide
  Target: LAMA2; (-) strand; PAM type: YTN; PAM sequence: CTG
gatctgatgatacctagctt

SEQ ID NO: 277486 - DNA, 20 bp, Artificial Sequence
  Description of Artificial Sequence: Synthetic oligonucleotide
  Target: LAMA2; (-) strand; PAM type: YTN; PAM sequence: TTA
gagcctggatctgatgatac

SEQ ID NO: 277487 - DNA, 20 bp, Artificial Sequence
  Description of Artificial Sequence: Synthetic oligonucleotide
  Target: LAMA2; (-) strand; PAM type: YTN; PAM sequence: CTT
agagcctggatctgatgata

SEQ ID NO: 277488 - DNA, 20 bp, Artificial Sequence
  Description of Artificial Sequence: Synthetic oligonucleotide
  Target: LAMA2; (-) strand; PAM type: YTN; PAM sequence: TTC
aggccaaatgaccaatatgt

SEQ ID NO: 277489 - DNA, 20 bp, Artificial Sequence
  Description of Artificial Sequence: Synthetic oligonucleotide
  Target: LAMA2; (-) strand; PAM type: YTN; PAM sequence: TTT
caggccaaatgaccaatatg

SEQ ID NO: 277490 - DNA, 20 bp, Artificial Sequence
  Description of Artificial Sequence: Synthetic oligonucleotide
  Target: LAMA2; (-) strand; PAM type: YTN; PAM sequence: CTG
tttcaggccaaatgaccaat

SEQ ID NO: 277491 - DNA, 20 bp, Artificial Sequence
  Description of Artificial Sequence: Synthetic oligonucleotide
  Target: LAMA2; (-) strand; PAM type: YTN; PAM sequence: TTA
aatggcctgtttcaggccaa

SEQ ID NO: 277492 - DNA, 20 bp, Artificial Sequence
  Description of Artificial Sequence: Synthetic oligonucleotide
  Target: LAMA2; (-) strand; PAM type: YTN; PAM sequence: TTC
agaaggttaaatggcctgtt

SEQ ID NO: 277493 - DNA, 20 bp, Artificial Sequence
  Description of Artificial Sequence: Synthetic oligonucleotide
  Target: LAMA2; (-) strand; PAM type: YTN; PAM sequence: TTT
cagaaggttaaatggcctgt

SEQ ID NO: 277494 - DNA, 20 bp, Artificial Sequence
  Description of Artificial Sequence: Synthetic oligonucleotide
  Target: LAMA2; (-) strand; PAM type: YTN; PAM sequence: TTC
ccagaagagaccaagtgaat

SEQ ID NO: 277495 - DNA, 20 bp, Artificial Sequence
  Description of Artificial Sequence: Synthetic oligonucleotide
  Target: LAMA2; (-) strand; PAM type: YTN; PAM sequence: CTT
cccagaagagaccaagtgaa

SEQ ID NO: 277496 - DNA, 20 bp, Artificial Sequence
  Description of Artificial Sequence: Synthetic oligonucleotide
  Target: LAMA2; (-) strand; PAM type: YTN; PAM sequence: CTG
gggtaggtgcacttcccaga

SEQ ID NO: 277497 - DNA, 20 bp, Artificial Sequence
  Description of Artificial Sequence: Synthetic oligonucleotide
  Target: LAMA2; (-) strand; PAM type: YTN; PAM sequence: TTC
tggggtaggtgcacttccca

SEQ ID NO: 277498 - DNA, 20 bp, Artificial Sequence
  Description of Artificial Sequence: Synthetic oligonucleotide
  Target: LAMA2; (-) strand; PAM type: YTN; PAM sequence: TTT
ctggggtaggtgcacttccc

SEQ ID NO: 277499 - DNA, 20 bp, Artificial Sequence
  Description of Artificial Sequence: Synthetic oligonucleotide
  Target: LAMA2; (-) strand; PAM type: YTN; PAM sequence: CTT
tctggggtaggtgcacttcc

SEQ ID NO: 277500 - DNA, 20 bp, Artificial Sequence
  Description of Artificial Sequence: Synthetic oligonucleotide
  Target: LAMA2; (-) strand; PAM type: YTN; PAM sequence: TTC
acaaaatctttctggggtag

SEQ ID NO: 277501 - DNA, 20 bp, Artificial Sequence
  Description of Artificial Sequence: Synthetic oligonucleotide
  Target: LAMA2; (-) strand; PAM type: YTN; PAM sequence: TTT
cacaaaatctttctggggta

SEQ ID NO: 277502 - DNA, 20 bp, Artificial Sequence
  Description of Artificial Sequence: Synthetic oligonucleotide
  Target: LAMA2; (-) strand; PAM type: YTN; PAM sequence: TTA
atttcacaaaatctttctgg

SEQ ID NO: 277503 - DNA, 20 bp, Artificial Sequence
  Description of Artificial Sequence: Synthetic oligonucleotide
  Target: LAMA2; (-) strand; PAM type: YTN; PAM sequence: CTG
gaattaatttcacaaaatct

SEQ ID NO: 277504 - DNA, 20 bp, Artificial Sequence
  Description of Artificial Sequence: Synthetic oligonucleotide
  Target: LAMA2; (-) strand; PAM type: YTN; PAM sequence: TTA
ctggaattaatttcacaaaa

SEQ ID NO: 277505 - DNA, 20 bp, Artificial Sequence
  Description of Artificial Sequence: Synthetic oligonucleotide
  Target: LAMA2; (-) strand; PAM type: YTN; PAM sequence: CTA
cattactggaattaatttca

SEQ ID NO: 277506 - DNA, 20 bp, Artificial Sequence
  Description of Artificial Sequence: Synthetic oligonucleotide
  Target: LAMA2; (-) strand; PAM type: YTN; PAM sequence: TTG
tactacattactggaattaa

SEQ ID NO: 277507 - DNA, 20 bp, Artificial Sequence
  Description of Artificial Sequence: Synthetic oligonucleotide
  Target: LAMA2; (-) strand; PAM type: YTN; PAM sequence: CTT
gtactacattactggaatta

SEQ ID NO: 277508 - DNA, 20 bp, Artificial Sequence
  Description of Artificial Sequence: Synthetic oligonucleotide
  Target: LAMA2; (-) strand; PAM type: YTN; PAM sequence: TTC
agagcacttgtactacatta

SEQ ID NO: 277509 - DNA, 20 bp, Artificial Sequence
  Description of Artificial Sequence: Synthetic oligonucleotide
  Target: LAMA2; (-) strand; PAM type: YTN; PAM sequence: CTG
tgagattcagagcacttgta

SEQ ID NO: 277510 - DNA, 20 bp, Artificial Sequence
  Description of Artificial Sequence: Synthetic oligonucleotide
  Target: LAMA2; (-) strand; PAM type: YTN; PAM sequence: TTG
tgaagcatgctgtgagattc

SEQ ID NO: 277511 - DNA, 20 bp, Artificial Sequence
  Description of Artificial Sequence: Synthetic oligonucleotide
  Target: LAMA2; (-) strand; PAM type: YTN; PAM sequence: TTT
gtgaagcatgctgtgagatt

SEQ ID NO: 277512 - DNA, 20 bp, Artificial Sequence
  Description of Artificial Sequence: Synthetic oligonucleotide
  Target: LAMA2; (-) strand; PAM type: YTN; PAM sequence: TTA
tttgtgaagcatgctgtgag

SEQ ID NO: 277513 - DNA, 20 bp, Artificial Sequence
  Description of Artificial Sequence: Synthetic oligonucleotide
  Target: LAMA2; (-) strand; PAM type: YTN; PAM sequence: CTT
atttgtgaagcatgctgtga

SEQ ID NO: 277514 - DNA, 20 bp, Artificial Sequence
  Description of Artificial Sequence: Synthetic oligonucleotide
  Target: LAMA2; (-) strand; PAM type: YTN; PAM sequence: TTC
accttatttgtgaagcatgc

SEQ ID NO: 277515 - DNA, 20 bp, Artificial Sequence
  Description of Artificial Sequence: Synthetic oligonucleotide
  Target: LAMA2; (-) strand; PAM type: YTN; PAM sequence: CTT
caccttatttgtgaagcatg

SEQ ID NO: 277516 - DNA, 20 bp, Artificial Sequence
  Description of Artificial Sequence: Synthetic oligonucleotide
  Target: LAMA2; (-) strand; PAM type: YTN; PAM sequence: TTC
ttcaccttatttgtgaagca

SEQ ID NO: 277517 - DNA, 20 bp, Artificial Sequence
  Description of Artificial Sequence: Synthetic oligonucleotide
  Target: LAMA2; (-) strand; PAM type: YTN; PAM sequence: CTA
gcaggtgtgtgatatgagac

SEQ ID NO: 277518 - DNA, 20 bp, Artificial Sequence
  Description of Artificial Sequence: Synthetic oligonucleotide
  Target: LAMA2; (-) strand; PAM type: YTN; PAM sequence: CTC
tagcaggtgtgtgatatgag

SEQ ID NO: 277519 - DNA, 20 bp, Artificial Sequence
  Description of Artificial Sequence: Synthetic oligonucleotide
  Target: LAMA2; (-) strand; PAM type: YTN; PAM sequence: CTG
caaccaggtgctctagcagg

SEQ ID NO: 277520 - DNA, 20 bp, Artificial Sequence
  Description of Artificial Sequence: Synthetic oligonucleotide
  Target: LAMA2; (-) strand; PAM type: YTN; PAM sequence: CTC
tgcaaccaggtgctctagca

SEQ ID NO: 277521 - DNA, 20 bp, Artificial Sequence
  Description of Artificial Sequence: Synthetic oligonucleotide
  Target: LAMA2; (-) strand; PAM type: YTN; PAM sequence: CTC
caaaagtctctgcaaccagg

SEQ ID NO: 277522 - DNA, 20 bp, Artificial Sequence
  Description of Artificial Sequence: Synthetic oligonucleotide
  Target: LAMA2; (-) strand; PAM type: YTN; PAM sequence: TTA
aatacccatagcatcctcca

SEQ ID NO: 277523 - DNA, 20 bp, Artificial Sequence
  Description of Artificial Sequence: Synthetic oligonucleotide
  Target: LAMA2; (-) strand; PAM type: YTN; PAM sequence: CTT
aaatacccatagcatcctcc

SEQ ID NO: 277524 - DNA, 20 bp, Artificial Sequence
  Description of Artificial Sequence: Synthetic oligonucleotide
  Target: LAMA2; (-) strand; PAM type: YTN; PAM sequence: CTA
ccaacatatcttaaataccc

SEQ ID NO: 277525 - DNA, 20 bp, Artificial Sequence
  Description of Artificial Sequence: Synthetic oligonucleotide
  Target: LAMA2; (-) strand; PAM type: YTN; PAM sequence: CTA
tgaaatactaccaacatatc

SEQ ID NO: 277526 - DNA, 20 bp, Artificial Sequence
  Description of Artificial Sequence: Synthetic oligonucleotide
  Target: LAMA2; (-) strand; PAM type: YTN; PAM sequence: TTC
agctatgaaatactaccaac

SEQ ID NO: 277527 - DNA, 20 bp, Artificial Sequence
  Description of Artificial Sequence: Synthetic oligonucleotide
  Target: LAMA2; (-) strand; PAM type: YTN; PAM sequence: CTA
ataattcagctatgaaatac

SEQ ID NO: 277528 - DNA, 20 bp, Artificial Sequence
  Description of Artificial Sequence: Synthetic oligonucleotide
  Target: LAMA2; (-) strand; PAM type: YTN; PAM sequence: TTC
taataattcagctatgaaat

SEQ ID NO: 277529 - DNA, 20 bp, Artificial Sequence
  Description of Artificial Sequence: Synthetic oligonucleotide
  Target: LAMA2; (-) strand; PAM type: YTN; PAM sequence: TTT
ctaataattcagctatgaaa

SEQ ID NO: 277530 - DNA, 20 bp, Artificial Sequence
  Description of Artificial Sequence: Synthetic oligonucleotide
  Target: LAMA2; (-) strand; PAM type: YTN; PAM sequence: TTA
tatttctaataattcagcta

SEQ ID NO: 277531 - DNA, 20 bp, Artificial Sequence
  Description of Artificial Sequence: Synthetic oligonucleotide
  Target: LAMA2; (-) strand; PAM type: YTN; PAM sequence: CTT
atatttctaataattcagct

SEQ ID NO: 277532 - DNA, 20 bp, Artificial Sequence
  Description of Artificial Sequence: Synthetic oligonucleotide
  Target: LAMA2; (-) strand; PAM type: YTN; PAM sequence: CTA
aacttatatttctaataatt

SEQ ID NO: 277533 - DNA, 20 bp, Artificial Sequence
  Description of Artificial Sequence: Synthetic oligonucleotide
  Target: LAMA2; (-) strand; PAM type: YTN; PAM sequence: CTA
taacctaaacttatatttct

SEQ ID NO: 277534 - DNA, 20 bp, Artificial Sequence
  Description of Artificial Sequence: Synthetic oligonucleotide
  Target: LAMA2; (-) strand; PAM type: YTN; PAM sequence: TTC
tataacctaaacttatattt

SEQ ID NO: 277535 - DNA, 20 bp, Artificial Sequence
  Description of Artificial Sequence: Synthetic oligonucleotide
  Target: LAMA2; (-) strand; PAM type: YTN; PAM sequence: TTT
ctataacctaaacttatatt

SEQ ID NO: 277536 - DNA, 20 bp, Artificial Sequence
  Description of Artificial Sequence: Synthetic oligonucleotide
  Target: LAMA2; (-) strand; PAM type: YTN; PAM sequence: TTT
tctataacctaaacttatat

SEQ ID NO: 277537 - DNA, 20 bp, Artificial Sequence
  Description of Artificial Sequence: Synthetic oligonucleotide
  Target: LAMA2; (-) strand; PAM type: YTN; PAM sequence: CTA
tagttttctataacctaaac

SEQ ID NO: 277538 - DNA, 20 bp, Artificial Sequence
  Description of Artificial Sequence: Synthetic oligonucleotide
  Target: LAMA2; (-) strand; PAM type: YTN; PAM sequence: TTG
tcctatagttttctataacc

SEQ ID NO: 277539 - DNA, 20 bp, Artificial Sequence
  Description of Artificial Sequence: Synthetic oligonucleotide
  Target: LAMA2; (-) strand; PAM type: YTN; PAM sequence: TTA
tattgtcctatagttttcta

SEQ ID NO: 277540 - DNA, 20 bp, Artificial Sequence
  Description of Artificial Sequence: Synthetic oligonucleotide
  Target: LAMA2; (-) strand; PAM type: YTN; PAM sequence: TTA
ttatattgtcctatagtttt

SEQ ID NO: 277541 - DNA, 20 bp, Artificial Sequence
  Description of Artificial Sequence: Synthetic oligonucleotide
  Target: LAMA2; (-) strand; PAM type: YTN; PAM sequence: CTT
attatattgtcctatagttt

SEQ ID NO: 277542 - DNA, 20 bp, Artificial Sequence
  Description of Artificial Sequence: Synthetic oligonucleotide
  Target: LAMA2; (-) strand; PAM type: YTN; PAM sequence: CTA
cttattatattgtcctatag

SEQ ID NO: 277543 - DNA, 20 bp, Artificial Sequence
  Description of Artificial Sequence: Synthetic oligonucleotide
  Target: LAMA2; (-) strand; PAM type: YTN; PAM sequence: TTC
caaataatagtgaagtatct

SEQ ID NO: 277544 - DNA, 20 bp, Artificial Sequence
  Description of Artificial Sequence: Synthetic oligonucleotide
  Target: LAMA2; (-) strand; PAM type: YTN; PAM sequence: CTA
tgacaattccaaataatagt

SEQ ID NO: 277545 - DNA, 20 bp, Artificial Sequence
  Description of Artificial Sequence: Synthetic oligonucleotide
  Target: LAMA2; (-) strand; PAM type: YTN; PAM sequence: TTC
caaatgatcatggccaatat

SEQ ID NO: 277546 - DNA, 20 bp, Artificial Sequence
  Description of Artificial Sequence: Synthetic oligonucleotide
  Target: LAMA2; (-) strand; PAM type: YTN; PAM sequence: CTT
ccaaatgatcatggccaata

SEQ ID NO: 277547 - DNA, 20 bp, Artificial Sequence
  Description of Artificial Sequence: Synthetic oligonucleotide
  Target: LAMA2; (-) strand; PAM type: YTN; PAM sequence: CTG
gcttccaaatgatcatggcc

SEQ ID NO: 277548 - DNA, 20 bp, Artificial Sequence
  Description of Artificial Sequence: Synthetic oligonucleotide
  Target: LAMA2; (-) strand; PAM type: YTN; PAM sequence: TTA
tatgaaatctggcttccaaa

SEQ ID NO: 277549 - DNA, 20 bp, Artificial Sequence
  Description of Artificial Sequence: Synthetic oligonucleotide
  Target: LAMA2; (-) strand; PAM type: YTN; PAM sequence: CTA
attatatgaaatctggcttc

SEQ ID NO: 277550 - DNA, 20 bp, Artificial Sequence
  Description of Artificial Sequence: Synthetic oligonucleotide
  Target: LAMA2; (-) strand; PAM type: YTN; PAM sequence: CTC
aaatgaagaacgtcctaatt

SEQ ID NO: 277551 - DNA, 20 bp, Artificial Sequence
  Description of Artificial Sequence: Synthetic oligonucleotide
  Target: LAMA2; (-) strand; PAM type: YTN; PAM sequence: CTC
aatggtactcaaatgaagaa

SEQ ID NO: 277552 - DNA, 20 bp, Artificial Sequence
  Description of Artificial Sequence: Synthetic oligonucleotide
  Target: LAMA2; (-) strand; PAM type: YTN; PAM sequence: TTC
aaaaaaggaatgtcagggca

SEQ ID NO: 277553 - DNA, 20 bp, Artificial Sequence
  Description of Artificial Sequence: Synthetic oligonucleotide
  Target: LAMA2; (-) strand; PAM type: YTN; PAM sequence: CTG
gtgggatgattcaaaaaagg

SEQ ID NO: 277554 - DNA, 20 bp, Artificial Sequence
  Description of Artificial Sequence: Synthetic oligonucleotide
  Target: LAMA2; (-) strand; PAM type: YTN; PAM sequence: TTC
tggtgggatgattcaaaaaa

SEQ ID NO: 277555 - DNA, 20 bp, Artificial Sequence
  Description of Artificial Sequence: Synthetic oligonucleotide
  Target: LAMA2; (-) strand; PAM type: YTN; PAM sequence: CTC
atcaaggattctggtgggat

SEQ ID NO: 277556 - DNA, 20 bp, Artificial Sequence
  Description of Artificial Sequence: Synthetic oligonucleotide
  Target: LAMA2; (-) strand; PAM type: YTN; PAM sequence: TTA
gcctcatcaaggattctggt

SEQ ID NO: 277557 - DNA, 20 bp, Artificial Sequence
  Description of Artificial Sequence: Synthetic oligonucleotide
  Target: LAMA2; (-) strand; PAM type: YTN; PAM sequence: TTT
agcctcatcaaggattctgg

SEQ ID NO: 277558 - DNA, 20 bp, Artificial Sequence
  Description of Artificial Sequence: Synthetic oligonucleotide
  Target: LAMA2; (-) strand; PAM type: YTN; PAM sequence: TTT
tagcctcatcaaggattctg

SEQ ID NO: 277559 - DNA, 20 bp, Artificial Sequence
  Description of Artificial Sequence: Synthetic oligonucleotide
  Target: LAMA2; (-) strand; PAM type: YTN; PAM sequence: TTT
ttagcctcatcaaggattct

SEQ ID NO: 277560 - DNA, 20 bp, Artificial Sequence
  Description of Artificial Sequence: Synthetic oligonucleotide
  Target: LAMA2; (-) strand; PAM type: YTN; PAM sequence: TTG
aaggagatgtttttagcctc

SEQ ID NO: 277561 - DNA, 20 bp, Artificial Sequence
  Description of Artificial Sequence: Synthetic oligonucleotide
  Target: LAMA2; (-) strand; PAM type: YTN; PAM sequence: CTG
cagtggcattgaaggagatg

SEQ ID NO: 277562 - DNA, 20 bp, Artificial Sequence
  Description of Artificial Sequence: Synthetic oligonucleotide
  Target: LAMA2; (-) strand; PAM type: YTN; PAM sequence: TTG
aaggctgcagtggcattgaa

SEQ ID NO: 277563 - DNA, 20 bp, Artificial Sequence
  Description of Artificial Sequence: Synthetic oligonucleotide
  Target: LAMA2; (-) strand; PAM type: YTN; PAM sequence: TTT
gaaggctgcagtggcattga

SEQ ID NO: 277564 - DNA, 20 bp, Artificial Sequence
  Description of Artificial Sequence: Synthetic oligonucleotide
  Target: LAMA2; (-) strand; PAM type: YTN; PAM sequence: CTT
tgaaggctgcagtggcattg

SEQ ID NO: 277565 - DNA, 20 bp, Artificial Sequence
  Description of Artificial Sequence: Synthetic oligonucleotide
  Target: LAMA2; (-) strand; PAM type: YTN; PAM sequence: CTG
taagctttgaaggctgcagt

SEQ ID NO: 277566 - DNA, 20 bp, Artificial Sequence
  Description of Artificial Sequence: Synthetic oligonucleotide
  Target: LAMA2; (-) strand; PAM type: YTN; PAM sequence: TTG
ctgtaagctttgaaggctgc

SEQ ID NO: 277567 - DNA, 20 bp, Artificial Sequence
  Description of Artificial Sequence: Synthetic oligonucleotide
  Target: LAMA2; (-) strand; PAM type: YTN; PAM sequence: TTA
atattgctgtaagctttgaa

SEQ ID NO: 277568 - DNA, 20 bp, Artificial Sequence
  Description of Artificial Sequence: Synthetic oligonucleotide
  Target: LAMA2; (-) strand; PAM type: YTN; PAM sequence: CTT
aatattgctgtaagctttga

SEQ ID NO: 277569 - DNA, 20 bp, Artificial Sequence
  Description of Artificial Sequence: Synthetic oligonucleotide
  Target: LAMA2; (-) strand; PAM type: YTN; PAM sequence: TTC
atcaatatagtccttaatat

SEQ ID NO: 277570 - DNA, 20 bp, Artificial Sequence
  Description of Artificial Sequence: Synthetic oligonucleotide
  Target: LAMA2; (-) strand; PAM type: YTN; PAM sequence: CTT
catcaatatagtccttaata

SEQ ID NO: 277571 - DNA, 20 bp, Artificial Sequence
  Description of Artificial Sequence: Synthetic oligonucleotide
  Target: LAMA2; (-) strand; PAM type: YTN; PAM sequence: CTC
agcttcatcaatatagtcct

SEQ ID NO: 277572 - DNA, 20 bp, Artificial Sequence
  Description of Artificial Sequence: Synthetic oligonucleotide
  Target: LAMA2; (-) strand; PAM type: YTN; PAM sequence: TTC
tcagcttcatcaatatagtc

SEQ ID NO: 277573 - DNA, 20 bp, Artificial Sequence
  Description of Artificial Sequence: Synthetic oligonucleotide
  Target: LAMA2; (-) strand; PAM type: YTN; PAM sequence: TTT
ctcagcttcatcaatatagt

SEQ ID NO: 277574 - DNA, 20 bp, Artificial Sequence
  Description of Artificial Sequence: Synthetic oligonucleotide
  Target: LAMA2; (-) strand; PAM type: YTN; PAM sequence: CTT
tctcagcttcatcaatatag

SEQ ID NO: 277575 - DNA, 20 bp, Artificial Sequence
  Description of Artificial Sequence: Synthetic oligonucleotide
  Target: LAMA2; (-) strand; PAM type: YTN; PAM sequence: TTG
gcaactttctcagcttcatc

SEQ ID NO: 277576 - DNA, 20 bp, Artificial Sequence
  Description of Artificial Sequence: Synthetic oligonucleotide
  Target: LAMA2; (-) strand; PAM type: YTN; PAM sequence: TTT
ggcaactttctcagcttcat

SEQ ID NO: 277577 - DNA, 20 bp, Artificial Sequence
  Description of Artificial Sequence: Synthetic oligonucleotide
  Target: LAMA2; (-) strand; PAM type: YTN; PAM sequence: CTT
tggcaactttctcagcttca

SEQ ID NO: 277578 - DNA, 20 bp, Artificial Sequence
  Description of Artificial Sequence: Synthetic oligonucleotide
  Target: LAMA2; (-) strand; PAM type: YTN; PAM sequence: TTC
tttggcaactttctcagctt

SEQ ID NO: 277579 - DNA, 20 bp, Artificial Sequence
  Description of Artificial Sequence: Synthetic oligonucleotide
  Target: LAMA2; (-) strand; PAM type: YTN; PAM sequence: CTT
ctttggcaactttctcagct

SEQ ID NO: 277580 - DNA, 20 bp, Artificial Sequence
  Description of Artificial Sequence: Synthetic oligonucleotide
  Target: LAMA2; (-) strand; PAM type: YTN; PAM sequence: TTG
gcttctttggcaactttctc

SEQ ID NO: 277581 - DNA, 20 bp, Artificial Sequence
  Description of Artificial Sequence: Synthetic oligonucleotide
  Target: LAMA2; (-) strand; PAM type: YTN; PAM sequence: TTT
ggcttctttggcaactttct

SEQ ID NO: 277582 - DNA, 20 bp, Artificial Sequence
  Description of Artificial Sequence: Synthetic oligonucleotide
  Target: LAMA2; (-) strand; PAM type: YTN; PAM sequence: CTT
tggcttctttggcaactttc

SEQ ID NO: 277583 - DNA, 20 bp, Artificial Sequence
  Description of Artificial Sequence: Synthetic oligonucleotide
  Target: LAMA2; (-) strand; PAM type: YTN; PAM sequence: TTC
atgtgcaagatctttggctt

SEQ ID NO: 277584 - DNA, 20 bp, Artificial Sequence
  Description of Artificial Sequence: Synthetic oligonucleotide
  Target: LAMA2; (-) strand; PAM type: YTN; PAM sequence: CTT
catgtgcaagatctttggct

SEQ ID NO: 277585 - DNA, 20 bp, Artificial Sequence
  Description of Artificial Sequence: Synthetic oligonucleotide
  Target: LAMA2; (-) strand; PAM type: YTN; PAM sequence: TTG
tagcttcatgtgcaagatct

SEQ ID NO: 277586 - DNA, 20 bp, Artificial Sequence
  Description of Artificial Sequence: Synthetic oligonucleotide
  Target: LAMA2; (-) strand; PAM type: YTN; PAM sequence: TTT
gtagcttcatgtgcaagatc

SEQ ID NO: 277587 - DNA, 20 bp, Artificial Sequence
  Description of Artificial Sequence: Synthetic oligonucleotide
  Target: LAMA2; (-) strand; PAM type: YTN; PAM sequence: TTT
tgtagcttcatgtgcaagat

SEQ ID NO: 277588 - DNA, 20 bp, Artificial Sequence
  Description of Artificial Sequence: Synthetic oligonucleotide
  Target: LAMA2; (-) strand; PAM type: YTN; PAM sequence: TTA
ccagttttgtagcttcatgt

SEQ ID NO: 277589 - DNA, 20 bp, Artificial Sequence
  Description of Artificial Sequence: Synthetic oligonucleotide
  Target: LAMA2; (-) strand; PAM type: YTN; PAM sequence: CTT
accagttttgtagcttcatg

SEQ ID NO: 277590 - DNA, 20 bp, Artificial Sequence
  Description of Artificial Sequence: Synthetic oligonucleotide
  Target: LAMA2; (-) strand; PAM type: YTN; PAM sequence: TTC
ttaccagttttgtagcttca

SEQ ID NO: 277591 - DNA, 20 bp, Artificial Sequence
  Description of Artificial Sequence: Synthetic oligonucleotide
  Target: LAMA2; (-) strand; PAM type: YTN; PAM sequence: TTT
cttaccagttttgtagcttc

SEQ ID NO: 277592 - DNA, 20 bp, Artificial Sequence
  Description of Artificial Sequence: Synthetic oligonucleotide
  Target: LAMA2; (-) strand; PAM type: YTN; PAM sequence: TTG
tttcttaccagttttgtagc

SEQ ID NO: 277593 - DNA, 20 bp, Artificial Sequence
  Description of Artificial Sequence: Synthetic oligonucleotide
  Target: LAMA2; (-) strand; PAM type: YTN; PAM sequence: TTT
gtttcttaccagttttgtag

SEQ ID NO: 277594 - DNA, 20 bp, Artificial Sequence
  Description of Artificial Sequence: Synthetic oligonucleotide
  Target: LAMA2; (-) strand; PAM type: YTN; PAM sequence: TTC
ccagcacatgtgccatttgt

SEQ ID NO: 277595 - DNA, 20 bp, Artificial Sequence
  Description of Artificial Sequence: Synthetic oligonucleotide
  Target: LAMA2; (-) strand; PAM type: YTN; PAM sequence: TTC
cattcccagcacatgtgcca

SEQ ID NO: 277596 - DNA, 20 bp, Artificial Sequence
  Description of Artificial Sequence: Synthetic oligonucleotide
  Target: LAMA2; (-) strand; PAM type: YTN; PAM sequence: CTT
ccattcccagcacatgtgcc

SEQ ID NO: 277597 - DNA, 20 bp, Artificial Sequence
  Description of Artificial Sequence: Synthetic oligonucleotide
  Target: LAMA2; (-) strand; PAM type: YTN; PAM sequence: TTG
acttccattcccagcacatg

SEQ ID NO: 277598 - DNA, 20 bp, Artificial Sequence
  Description of Artificial Sequence: Synthetic oligonucleotide
  Target: LAMA2; (-) strand; PAM type: YTN; PAM sequence: TTC
aaaaaggttgacttccattc

SEQ ID NO: 277599 - DNA, 20 bp, Artificial Sequence
  Description of Artificial Sequence: Synthetic oligonucleotide
  Target: LAMA2; (-) strand; PAM type: YTN; PAM sequence: TTG
aaaaattcaaaaaggttgac

SEQ ID NO: 277600 - DNA, 20 bp, Artificial Sequence
  Description of Artificial Sequence: Synthetic oligonucleotide
  Target: LAMA2; (-) strand; PAM type: YTN; PAM sequence: TTT
gaaaaattcaaaaaggttga

SEQ ID NO: 277601 - DNA, 20 bp, Artificial Sequence
  Description of Artificial Sequence: Synthetic oligonucleotide
  Target: LAMA2; (-) strand; PAM type: YTN; PAM sequence: TTA
catttgaaaaattcaaaaag

SEQ ID NO: 277602 - DNA, 20 bp, Artificial Sequence
  Description of Artificial Sequence: Synthetic oligonucleotide
  Target: LAMA2; (-) strand; PAM type: YTN; PAM sequence: CTT
acatttgaaaaattcaaaaa

SEQ ID NO: 277603 - DNA, 20 bp, Artificial Sequence
  Description of Artificial Sequence: Synthetic oligonucleotide
  Target: LAMA2; (-) strand; PAM type: YTN; PAM sequence: CTG
acttacatttgaaaaattca

SEQ ID NO: 277604 - DNA, 20 bp, Artificial Sequence
  Description of Artificial Sequence: Synthetic oligonucleotide
  Target: LAMA2; (-) strand; PAM type: YTN; PAM sequence: TTC
cagactgacttacatttgaa

SEQ ID NO: 277605 - DNA, 20 bp, Artificial Sequence
  Description of Artificial Sequence: Synthetic oligonucleotide
  Target: LAMA2; (-) strand; PAM type: YTN; PAM sequence: TTT
ccagactgacttacatttga

SEQ ID NO: 277606 - DNA, 20 bp, Artificial Sequence
  Description of Artificial Sequence: Synthetic oligonucleotide
  Target: LAMA2; (-) strand; PAM type: YTN; PAM sequence: TTT
tccagactgacttacatttg

SEQ ID NO: 277607 - DNA, 20 bp, Artificial Sequence
  Description of Artificial Sequence: Synthetic oligonucleotide
  Target: LAMA2; (-) strand; PAM type: YTN; PAM sequence: CTG
ggattttccagactgactta

SEQ ID NO: 277608 - DNA, 20 bp, Artificial Sequence
  Description of Artificial Sequence: Synthetic oligonucleotide
  Target: LAMA2; (-) strand; PAM type: YTN; PAM sequence: TTA
ctgggattttccagactgac

SEQ ID NO: 277609 - DNA, 20 bp, Artificial Sequence
  Description of Artificial Sequence: Synthetic oligonucleotide
  Target: LAMA2; (-) strand; PAM type: YTN; PAM sequence: TTT
actgggattttccagactga

SEQ ID NO: 277610 - DNA, 20 bp, Artificial Sequence
  Description of Artificial Sequence: Synthetic oligonucleotide
  Target: LAMA2; (-) strand; PAM type: YTN; PAM sequence: TTC
aaaaataacccaaaacaaat

SEQ ID NO: 277611 - DNA, 20 bp, Artificial Sequence
  Description of Artificial Sequence: Synthetic oligonucleotide
  Target: LAMA2; (-) strand; PAM type: YTN; PAM sequence: CTT
caaaaataacccaaaacaaa

SEQ ID NO: 277612 - DNA, 20 bp, Artificial Sequence
  Description of Artificial Sequence: Synthetic oligonucleotide
  Target: LAMA2; (-) strand; PAM type: YTN; PAM sequence: TTA
aaagaggtcttcaaaaataa

SEQ ID NO: 277613 - DNA, 20 bp, Artificial Sequence
  Description of Artificial Sequence: Synthetic oligonucleotide
  Target: LAMA2; (-) strand; PAM type: YTN; PAM sequence: TTT
aaaagaggtcttcaaaaata

SEQ ID NO: 277614 - DNA, 20 bp, Artificial Sequence
  Description of Artificial Sequence: Synthetic oligonucleotide
  Target: LAMA2; (-) strand; PAM type: YTN; PAM sequence: TTT
taaaagaggtcttcaaaaat

SEQ ID NO: 277615 - DNA, 20 bp, Artificial Sequence
  Description of Artificial Sequence: Synthetic oligonucleotide
  Target: LAMA2; (-) strand; PAM type: YTN; PAM sequence: TTA
ggcaaattttaaaagaggtc

SEQ ID NO: 277616 - DNA, 20 bp, Artificial Sequence
  Description of Artificial Sequence: Synthetic oligonucleotide
  Target: LAMA2; (-) strand; PAM type: YTN; PAM sequence: TTT
aggcaaattttaaaagaggt

SEQ ID NO: 277617 - DNA, 20 bp, Artificial Sequence
  Description of Artificial Sequence: Synthetic oligonucleotide
  Target: LAMA2; (-) strand; PAM type: YTN; PAM sequence: TTT
taggcaaattttaaaagagg

SEQ ID NO: 277618 - DNA, 20 bp, Artificial Sequence
  Description of Artificial Sequence: Synthetic oligonucleotide
  Target: LAMA2; (-) strand; PAM type: YTN; PAM sequence: TTA
ttttaggcaaattttaaaag

SEQ ID NO: 277619 - DNA, 20 bp, Artificial Sequence
  Description of Artificial Sequence: Synthetic oligonucleotide
  Target: LAMA2; (-) strand; PAM type: YTN; PAM sequence: TTT
attttaggcaaattttaaaa

SEQ ID NO: 277620 - DNA, 20 bp, Artificial Sequence
  Description of Artificial Sequence: Synthetic oligonucleotide
  Target: LAMA2; (-) strand; PAM type: YTN; PAM sequence: TTA
tagcataccgagaatttatt

SEQ ID NO: 277621 - DNA, 20 bp, Artificial Sequence
  Description of Artificial Sequence: Synthetic oligonucleotide
  Target: LAMA2; (-) strand; PAM type: YTN; PAM sequence: CTA
taattatagcataccgagaa

SEQ ID NO: 277622 - DNA, 20 bp, Artificial Sequence
  Description of Artificial Sequence: Synthetic oligonucleotide
  Target: LAMA2; (-) strand; PAM type: YTN; PAM sequence: CTG
ctataattatagcataccga

SEQ ID NO: 277623 - DNA, 20 bp, Artificial Sequence
  Description of Artificial Sequence: Synthetic oligonucleotide
  Target: LAMA2; (-) strand; PAM type: YTN; PAM sequence: TTC
tgctataattatagcatacc

SEQ ID NO: 277624 - DNA, 20 bp, Artificial Sequence
  Description of Artificial Sequence: Synthetic oligonucleotide
  Target: LAMA2; (-) strand; PAM type: YTN; PAM sequence: CTG
agaaaagagttctgctataa

SEQ ID NO: 277625 - DNA, 20 bp, Artificial Sequence
  Description of Artificial Sequence: Synthetic oligonucleotide
  Target: LAMA2; (-) strand; PAM type: YTN; PAM sequence: CTA
acagtggtagtgggtgactg

SEQ ID NO: 277626 - DNA, 20 bp, Artificial Sequence
  Description of Artificial Sequence: Synthetic oligonucleotide
  Target: LAMA2; (-) strand; PAM type: YTN; PAM sequence: TTA
agaccctaacagtggtagtg

SEQ ID NO: 277627 - DNA, 20 bp, Artificial Sequence
  Description of Artificial Sequence: Synthetic oligonucleotide
  Target: LAMA2; (-) strand; PAM type: YTN; PAM sequence: TTT
aagaccctaacagtggtagt

SEQ ID NO: 277628 - DNA, 20 bp, Artificial Sequence
  Description of Artificial Sequence: Synthetic oligonucleotide
  Target: LAMA2; (-) strand; PAM type: YTN; PAM sequence: TTT
taagaccctaacagtggtag

SEQ ID NO: 277629 - DNA, 20 bp, Artificial Sequence
  Description of Artificial Sequence: Synthetic oligonucleotide
  Target: LAMA2; (-) strand; PAM type: YTN; PAM sequence: CTG
agataattttaagaccctaa

SEQ ID NO: 277630 - DNA, 20 bp, Artificial Sequence
  Description of Artificial Sequence: Synthetic oligonucleotide
  Target: LAMA2; (-) strand; PAM type: YTN; PAM sequence: TTC
tgagataattttaagaccct

SEQ ID NO: 277631 - DNA, 20 bp, Artificial Sequence
  Description of Artificial Sequence: Synthetic oligonucleotide
  Target: LAMA2; (-) strand; PAM type: YTN; PAM sequence: TTT
ctgagataattttaagaccc

SEQ ID NO: 277632 - DNA, 20 bp, Artificial Sequence
  Description of Artificial Sequence: Synthetic oligonucleotide
  Target: LAMA2; (-) strand; PAM type: YTN; PAM sequence: TTG
gtttctgagataattttaag

SEQ ID NO: 277633 - DNA, 20 bp, Artificial Sequence
  Description of Artificial Sequence: Synthetic oligonucleotide
  Target: LAMA2; (-) strand; PAM type: YTN; PAM sequence: CTT
ggtttctgagataattttaa

SEQ ID NO: 277634 - DNA, 20 bp, Artificial Sequence
  Description of Artificial Sequence: Synthetic oligonucleotide
  Target: LAMA2; (-) strand; PAM type: YTN; PAM sequence: TTG
cttggtttctgagataattt

SEQ ID NO: 277635 - DNA, 20 bp, Artificial Sequence
  Description of Artificial Sequence: Synthetic oligonucleotide
  Target: LAMA2; (-) strand; PAM type: YTN; PAM sequence: CTT
gcttggtttctgagataatt

SEQ ID NO: 277636 - DNA, 20 bp, Artificial Sequence
  Description of Artificial Sequence: Synthetic oligonucleotide
  Target: LAMA2; (-) strand; PAM type: YTN; PAM sequence: TTG
gtagcacaaacttgcttggt

SEQ ID NO: 277637 - DNA, 20 bp, Artificial Sequence
  Description of Artificial Sequence: Synthetic oligonucleotide
  Target: LAMA2; (-) strand; PAM type: YTN; PAM sequence: TTG
tgagttggtagcacaaactt

SEQ ID NO: 277638 - DNA, 20 bp, Artificial Sequence
  Description of Artificial Sequence: Synthetic oligonucleotide
  Target: LAMA2; (-) strand; PAM type: YTN; PAM sequence: TTT
gtgagttggtagcacaaact

SEQ ID NO: 277639 - DNA, 20 bp, Artificial Sequence
  Description of Artificial Sequence: Synthetic oligonucleotide
  Target: LAMA2; (-) strand; PAM type: YTN; PAM sequence: TTT
tgtgagttggtagcacaaac

SEQ ID NO: 277640 - DNA, 20 bp, Artificial Sequence
  Description of Artificial Sequence: Synthetic oligonucleotide
  Target: LAMA2; (-) strand; PAM type: YTN; PAM sequence: TTA
ttttgtgagttggtagcaca

SEQ ID NO: 277641 - DNA, 20 bp, Artificial Sequence
  Description of Artificial Sequence: Synthetic oligonucleotide
  Target: LAMA2; (-) strand; PAM type: YTN; PAM sequence: TTT
attttgtgagttggtagcac

SEQ ID NO: 277642 - DNA, 20 bp, Artificial Sequence
  Description of Artificial Sequence: Synthetic oligonucleotide
  Target: LAMA2; (-) strand; PAM type: YTN; PAM sequence: TTT
tattttgtgagttggtagca

SEQ ID NO: 277643 - DNA, 20 bp, Artificial Sequence
  Description of Artificial Sequence: Synthetic oligonucleotide
  Target: LAMA2; (-) strand; PAM type: YTN; PAM sequence: CTG
ttttattttgtgagttggta

SEQ ID NO: 277644 - DNA, 20 bp, Artificial Sequence
  Description of Artificial Sequence: Synthetic oligonucleotide
  Target: LAMA2; (-) strand; PAM type: YTN; PAM sequence: TTG
cctgttttattttgtgagtt

SEQ ID NO: 277645 - DNA, 20 bp, Artificial Sequence
  Description of Artificial Sequence: Synthetic oligonucleotide
  Target: LAMA2; (-) strand; PAM type: YTN; PAM sequence: TTT
gcctgttttattttgtgagt

SEQ ID NO: 277646 - DNA, 20 bp, Artificial Sequence
  Description of Artificial Sequence: Synthetic oligonucleotide
  Target: LAMA2; (-) strand; PAM type: YTN; PAM sequence: CTT
tgcctgttttattttgtgag

SEQ ID NO: 277647 - DNA, 20 bp, Artificial Sequence
  Description of Artificial Sequence: Synthetic oligonucleotide
  Target: LAMA2; (-) strand; PAM type: YTN; PAM sequence: TTG
tctttgcctgttttattttg

SEQ ID NO: 277648 - DNA, 20 bp, Artificial Sequence
  Description of Artificial Sequence: Synthetic oligonucleotide
  Target: LAMA2; (-) strand; PAM type: YTN; PAM sequence: CTA
tccagagtgttgtctttgcc

SEQ ID NO: 277649 - DNA, 20 bp, Artificial Sequence
  Description of Artificial Sequence: Synthetic oligonucleotide
  Target: LAMA2; (-) strand; PAM type: YTN; PAM sequence: TTC
cctatccagagtgttgtctt

SEQ ID NO: 277650 - DNA, 20 bp, Artificial Sequence
  Description of Artificial Sequence: Synthetic oligonucleotide
  Target: LAMA2; (-) strand; PAM type: YTN; PAM sequence: TTG
agataatggtgataaaattc

SEQ ID NO: 277651 - DNA, 20 bp, Artificial Sequence
  Description of Artificial Sequence: Synthetic oligonucleotide
  Target: LAMA2; (-) strand; PAM type: YTN; PAM sequence: TTT
gagataatggtgataaaatt

SEQ ID NO: 277652 - DNA, 20 bp, Artificial Sequence
  Description of Artificial Sequence: Synthetic oligonucleotide
  Target: LAMA2; (-) strand; PAM type: YTN; PAM sequence: CTA
atgccatttgagataatggt

SEQ ID NO: 277653 - DNA, 20 bp, Artificial Sequence
  Description of Artificial Sequence: Synthetic oligonucleotide
  Target: LAMA2; (-) strand; PAM type: YTN; PAM sequence: TTA
ctaatgccatttgagataat

SEQ ID NO: 277654 - DNA, 20 bp, Artificial Sequence
  Description of Artificial Sequence: Synthetic oligonucleotide
  Target: LAMA2; (-) strand; PAM type: YTN; PAM sequence: TTT
actaatgccatttgagataa

SEQ ID NO: 277655 - DNA, 20 bp, Artificial Sequence
  Description of Artificial Sequence: Synthetic oligonucleotide
  Target: LAMA2; (-) strand; PAM type: YTN; PAM sequence: TTT
tactaatgccatttgagata

SEQ ID NO: 277656 - DNA, 20 bp, Artificial Sequence
  Description of Artificial Sequence: Synthetic oligonucleotide
  Target: LAMA2; (-) strand; PAM type: YTN; PAM sequence: TTT
ttactaatgccatttgagat

SEQ ID NO: 277657 - DNA, 20 bp, Artificial Sequence
  Description of Artificial Sequence: Synthetic oligonucleotide
  Target: LAMA2; (-) strand; PAM type: YTN; PAM sequence: TTT
tttactaatgccatttgaga

SEQ ID NO: 277658 - DNA, 20 bp, Artificial Sequence
  Description of Artificial Sequence: Synthetic oligonucleotide
  Target: LAMA2; (-) strand; PAM type: YTN; PAM sequence: CTT
ttttactaatgccatttgag

SEQ ID NO: 277659 - DNA, 20 bp, Artificial Sequence
  Description of Artificial Sequence: Synthetic oligonucleotide
  Target: LAMA2; (-) strand; PAM type: YTN; PAM sequence: TTC
ttttttactaatgccatttg

SEQ ID NO: 277660 - DNA, 20 bp, Artificial Sequence
  Description of Artificial Sequence: Synthetic oligonucleotide
  Target: LAMA2; (-) strand; PAM type: YTN; PAM sequence: TTT
cttttttactaatgccattt

SEQ ID NO: 277661 - DNA, 20 bp, Artificial Sequence
  Description of Artificial Sequence: Synthetic oligonucleotide
  Target: LAMA2; (-) strand; PAM type: YTN; PAM sequence: TTT
tcttttttactaatgccatt

SEQ ID NO: 277662 - DNA, 20 bp, Artificial Sequence
  Description of Artificial Sequence: Synthetic oligonucleotide
  Target: LAMA2; (-) strand; PAM type: YTN; PAM sequence: TTT
ttcttttttactaatgccat

SEQ ID NO: 277663 - DNA, 20 bp, Artificial Sequence
  Description of Artificial Sequence: Synthetic oligonucleotide
  Target: LAMA2; (-) strand; PAM type: YTN; PAM sequence: TTT
tttcttttttactaatgcca

SEQ ID NO: 277664 - DNA, 20 bp, Artificial Sequence
  Description of Artificial Sequence: Synthetic oligonucleotide
  Target: LAMA2; (-) strand; PAM type: YTN; PAM sequence: TTT
ttttcttttttactaatgcc

SEQ ID NO: 277665 - DNA, 20 bp, Artificial Sequence
  Description of Artificial Sequence: Synthetic oligonucleotide
  Target: LAMA2; (-) strand; PAM type: YTN; PAM sequence: TTT
tttttcttttttactaatgc

SEQ ID NO: 277666 - DNA, 20 bp, Artificial Sequence
  Description of Artificial Sequence: Synthetic oligonucleotide
  Target: LAMA2; (-) strand; PAM type: YTN; PAM sequence: CTT
ttttttcttttttactaatg

SEQ ID NO: 277667 - DNA, 20 bp, Artificial Sequence
  Description of Artificial Sequence: Synthetic oligonucleotide
  Target: LAMA2; (-) strand; PAM type: YTN; PAM sequence: TTA
cttttttttcttttttacta

SEQ ID NO: 277668 - DNA, 20 bp, Artificial Sequence
  Description of Artificial Sequence: Synthetic oligonucleotide
  Target: LAMA2; (-) strand; PAM type: YTN; PAM sequence: TTA
tatacaatggttactttttt

SEQ ID NO: 277669 - DNA, 20 bp, Artificial Sequence
  Description of Artificial Sequence: Synthetic oligonucleotide
  Target: LAMA2; (-) strand; PAM type: YTN; PAM sequence: TTG
tgtgtgattatatacaatgg

SEQ ID NO: 277670 - DNA, 20 bp, Artificial Sequence
  Description of Artificial Sequence: Synthetic oligonucleotide
  Target: LAMA2; (-) strand; PAM type: YTN; PAM sequence: TTT
gtgtgtgattatatacaatg

SEQ ID NO: 277671 - DNA, 20 bp, Artificial Sequence
  Description of Artificial Sequence: Synthetic oligonucleotide
  Target: LAMA2; (-) strand; PAM type: YTN; PAM sequence: TTC
atatgtaaccaatttgtgtg

SEQ ID NO: 277672 - DNA, 20 bp, Artificial Sequence
  Description of Artificial Sequence: Synthetic oligonucleotide
  Target: LAMA2; (-) strand; PAM type: YTN; PAM sequence: CTT
catatgtaaccaatttgtgt

SEQ ID NO: 277673 - DNA, 20 bp, Artificial Sequence
  Description of Artificial Sequence: Synthetic oligonucleotide
  Target: LAMA2; (-) strand; PAM type: YTN; PAM sequence: TTA
tagccaaacttcatatgtaa

SEQ ID NO: 277674 - DNA, 20 bp, Artificial Sequence
  Description of Artificial Sequence: Synthetic oligonucleotide
  Target: LAMA2; (-) strand; PAM type: YTN; PAM sequence: TTT
atagccaaacttcatatgta

SEQ ID NO: 277675 - DNA, 20 bp, Artificial Sequence
  Description of Artificial Sequence: Synthetic oligonucleotide
  Target: LAMA2; (-) strand; PAM type: YTN; PAM sequence: TTT
tatagccaaacttcatatgt

SEQ ID NO: 277676 - DNA, 20 bp, Artificial Sequence
  Description of Artificial Sequence: Synthetic oligonucleotide
  Target: LAMA2; (-) strand; PAM type: YTN; PAM sequence: TTA
aaaagtgaattttatagcca

SEQ ID NO: 277677 - DNA, 20 bp, Artificial Sequence
  Description of Artificial Sequence: Synthetic oligonucleotide
  Target: LAMA2; (-) strand; PAM type: YTN; PAM sequence: TTA
ttaaaaagtgaattttatag

SEQ ID NO: 277678 - DNA, 20 bp, Artificial Sequence
  Description of Artificial Sequence: Synthetic oligonucleotide
  Target: LAMA2; (-) strand; PAM type: YTN; PAM sequence: TTT
attaaaaagtgaattttata

SEQ ID NO: 277679 - DNA, 20 bp, Artificial Sequence
  Description of Artificial Sequence: Synthetic oligonucleotide
  Target: LAMA2; (-) strand; PAM type: YTN; PAM sequence: TTT
tattaaaaagtgaattttat

SEQ ID NO: 277680 - DNA, 20 bp, Artificial Sequence
  Description of Artificial Sequence: Synthetic oligonucleotide
  Target: LAMA2; (-) strand; PAM type: YTN; PAM sequence: TTT
ttattaaaaagtgaatttta

SEQ ID NO: 277681 - DNA, 20 bp, Artificial Sequence
  Description of Artificial Sequence: Synthetic oligonucleotide
  Target: LAMA2; (-) strand; PAM type: YTN; PAM sequence: TTA
gaagcatatgatccagtatg

SEQ ID NO: 277682 - DNA, 20 bp, Artificial Sequence
  Description of Artificial Sequence: Synthetic oligonucleotide
  Target: LAMA2; (-) strand; PAM type: YTN; PAM sequence: TTT
agaagcatatgatccagtat

SEQ ID NO: 277683 - DNA, 20 bp, Artificial Sequence
  Description of Artificial Sequence: Synthetic oligonucleotide
  Target: LAMA2; (-) strand; PAM type: YTN; PAM sequence: TTG
tttagaagcatatgatccag

SEQ ID NO: 277684 - DNA, 20 bp, Artificial Sequence
  Description of Artificial Sequence: Synthetic oligonucleotide
  Target: LAMA2; (-) strand; PAM type: YTN; PAM sequence: TTC
ataaacatggtataaattgt

SEQ ID NO: 277685 - DNA, 20 bp, Artificial Sequence
  Description of Artificial Sequence: Synthetic oligonucleotide
  Target: LAMA2; (-) strand; PAM type: YTN; PAM sequence: TTA
attcataaacatggtataaa

SEQ ID NO: 277686 - DNA, 20 bp, Artificial Sequence
  Description of Artificial Sequence: Synthetic oligonucleotide
  Target: LAMA2; (-) strand; PAM type: YTN; PAM sequence: TTC
attaattcataaacatggta

SEQ ID NO: 277687 - DNA, 20 bp, Artificial Sequence
  Description of Artificial Sequence: Synthetic oligonucleotide
  Target: LAMA2; (-) strand; PAM type: YTN; PAM sequence: TTC
ataaaaattcattaattcat

SEQ ID NO: 277688 - DNA, 20 bp, Artificial Sequence
  Description of Artificial Sequence: Synthetic oligonucleotide
  Target: LAMA2; (-) strand; PAM type: YTN; PAM sequence: TTC
aaaaattcataaaaattcat

SEQ ID NO: 277689 - DNA, 20 bp, Artificial Sequence
  Description of Artificial Sequence: Synthetic oligonucleotide
  Target: LAMA2; (-) strand; PAM type: YTN; PAM sequence: TTA
attcaaaaattcataaaaat

SEQ ID NO: 277690 - DNA, 20 bp, Artificial Sequence
  Description of Artificial Sequence: Synthetic oligonucleotide
  Target: LAMA2; (-) strand; PAM type: YTN; PAM sequence: TTT
aattcaaaaattcataaaaa

SEQ ID NO: 277691 - DNA, 20 bp, Artificial Sequence
  Description of Artificial Sequence: Synthetic oligonucleotide
  Target: LAMA2; (-) strand; PAM type: YTN; PAM sequence: TTT
taattcaaaaattcataaaa

SEQ ID NO: 277692 - DNA, 20 bp, Artificial Sequence
  Description of Artificial Sequence: Synthetic oligonucleotide
  Target: LAMA2; (-) strand; PAM type: YTN; PAM sequence: TTT
ttaattcaaaaattcataaa

SEQ ID NO: 277693 - DNA, 20 bp, Artificial Sequence
  Description of Artificial Sequence: Synthetic oligonucleotide
  Target: LAMA2; (-) strand; PAM type: YTN; PAM sequence: CTT
tttaattcaaaaattcataa

SEQ ID NO: 277694 - DNA, 20 bp, Artificial Sequence
  Description of Artificial Sequence: Synthetic oligonucleotide
  Target: LAMA2; (-) strand; PAM type: YTN; PAM sequence: TTA
agagctttttaattcaaaaa

SEQ ID NO: 277695 - DNA, 20 bp, Artificial Sequence
  Description of Artificial Sequence: Synthetic oligonucleotide
  Target: LAMA2; (-) strand; PAM type: YTN; PAM sequence: TTG
tagccaaaggttaagagctt

SEQ ID NO: 277696 - DNA, 20 bp, Artificial Sequence
  Description of Artificial Sequence: Synthetic oligonucleotide
  Target: LAMA2; (-) strand; PAM type: YTN; PAM sequence: TTA
cgaacaatgattgtagccaa

SEQ ID NO: 277697 - DNA, 20 bp, Artificial Sequence
  Description of Artificial Sequence: Synthetic oligonucleotide
  Target: LAMA2; (-) strand; PAM type: YTN; PAM sequence: TTC
caaatgtattacgaacaatg

SEQ ID NO: 277698 - DNA, 20 bp, Artificial Sequence
  Description of Artificial Sequence: Synthetic oligonucleotide
  Target: LAMA2; (-) strand; PAM type: YTN; PAM sequence: TTG
ttccaaatgtattacgaaca

SEQ ID NO: 277699 - DNA, 20 bp, Artificial Sequence
  Description of Artificial Sequence: Synthetic oligonucleotide
  Target: LAMA2; (-) strand; PAM type: YTN; PAM sequence: CTT
gttccaaatgtattacgaac

SEQ ID NO: 277700 - DNA, 20 bp, Artificial Sequence
  Description of Artificial Sequence: Synthetic oligonucleotide
  Target: LAMA2; (-) strand; PAM type: YTN; PAM sequence: CTA
aaatacttgttccaaatgta

SEQ ID NO: 277701 - DNA, 20 bp, Artificial Sequence
  Description of Artificial Sequence: Synthetic oligonucleotide
  Target: LAMA2; (-) strand; PAM type: YTN; PAM sequence: CTC
taaaatacttgttccaaatg

SEQ ID NO: 277702 - DNA, 20 bp, Artificial Sequence
  Description of Artificial Sequence: Synthetic oligonucleotide
  Target: LAMA2; (-) strand; PAM type: YTN; PAM sequence: TTG
gaatgcccaaactctaaaat

SEQ ID NO: 277703 - DNA, 20 bp, Artificial Sequence
  Description of Artificial Sequence: Synthetic oligonucleotide
  Target: LAMA2; (-) strand; PAM type: YTN; PAM sequence: CTT
ggaatgcccaaactctaaaa

SEQ ID NO: 277704 - DNA, 20 bp, Artificial Sequence
  Description of Artificial Sequence: Synthetic oligonucleotide
  Target: LAMA2; (-) strand; PAM type: YTN; PAM sequence: TTC
aaataatgtgatagaacttg

SEQ ID NO: 277705 - DNA, 20 bp, Artificial Sequence
  Description of Artificial Sequence: Synthetic oligonucleotide
  Target: LAMA2; (-) strand; PAM type: YTN; PAM sequence: TTG
aaggcattcaaataatgtga

SEQ ID NO: 277706 - DNA, 20 bp, Artificial Sequence
  Description of Artificial Sequence: Synthetic oligonucleotide
  Target: LAMA2; (-) strand; PAM type: YTN; PAM sequence: TTG
tcaccattgaaggcattcaa

SEQ ID NO: 277707 - DNA, 20 bp, Artificial Sequence
  Description of Artificial Sequence: Synthetic oligonucleotide
  Target: LAMA2; (-) strand; PAM type: YTN; PAM sequence: TTT
gtcaccattgaaggcattca

SEQ ID NO: 277708 - DNA, 20 bp, Artificial Sequence
  Description of Artificial Sequence: Synthetic oligonucleotide
  Target: LAMA2; (-) strand; PAM type: YTN; PAM sequence: CTA
aagcataaagatttgtcacc

SEQ ID NO: 277709 - DNA, 20 bp, Artificial Sequence
  Description of Artificial Sequence: Synthetic oligonucleotide
  Target: LAMA2; (-) strand; PAM type: YTN; PAM sequence: TTA
catctaaagcataaagattt

SEQ ID NO: 277710 - DNA, 20 bp, Artificial Sequence
  Description of Artificial Sequence: Synthetic oligonucleotide
  Target: LAMA2; (-) strand; PAM type: YTN; PAM sequence: TTT
acatctaaagcataaagatt

SEQ ID NO: 277711 - DNA, 20 bp, Artificial Sequence
  Description of Artificial Sequence: Synthetic oligonucleotide
  Target: LAMA2; (-) strand; PAM type: YTN; PAM sequence: CTT
tacatctaaagcataaagat

SEQ ID NO: 277712 - DNA, 20 bp, Artificial Sequence
  Description of Artificial Sequence: Synthetic oligonucleotide
  Target: LAMA2; (-) strand; PAM type: YTN; PAM sequence: TTG
ctttacatctaaagcataaa

SEQ ID NO: 277713 - DNA, 20 bp, Artificial Sequence
  Description of Artificial Sequence: Synthetic oligonucleotide
  Target: LAMA2; (-) strand; PAM type: YTN; PAM sequence: CTC
atgtacaaaatgttgcttta

SEQ ID NO: 277714 - DNA, 20 bp, Artificial Sequence
  Description of Artificial Sequence: Synthetic oligonucleotide
  Target: LAMA2; (-) strand; PAM type: YTN; PAM sequence: CTA
tcacacaactcatgtacaaa

SEQ ID NO: 277715 - DNA, 20 bp, Artificial Sequence
  Description of Artificial Sequence: Synthetic oligonucleotide
  Target: LAMA2; (-) strand; PAM type: YTN; PAM sequence: TTA
ctatcacacaactcatgtac

SEQ ID NO: 277716 - DNA, 20 bp, Artificial Sequence
  Description of Artificial Sequence: Synthetic oligonucleotide
  Target: LAMA2; (-) strand; PAM type: YTN; PAM sequence: CTT
actatcacacaactcatgta

SEQ ID NO: 277717 - DNA, 20 bp, Artificial Sequence
  Description of Artificial Sequence: Synthetic oligonucleotide
  Target: LAMA2; (-) strand; PAM type: YTN; PAM sequence: CTA
ccaacttactatcacacaac

SEQ ID NO: 277718 - DNA, 20 bp, Artificial Sequence
  Description of Artificial Sequence: Synthetic oligonucleotide
  Target: LAMA2; (-) strand; PAM type: YTN; PAM sequence: CTG
aaatagtactaccaacttac

SEQ ID NO: 277719 - DNA, 20 bp, Artificial Sequence
  Description of Artificial Sequence: Synthetic oligonucleotide
  Target: LAMA2; (-) strand; PAM type: YTN; PAM sequence: TTA
acctgaaatagtactaccaa

SEQ ID NO: 277720 - DNA, 20 bp, Artificial Sequence
  Description of Artificial Sequence: Synthetic oligonucleotide
  Target: LAMA2; (-) strand; PAM type: YTN; PAM sequence: TTT
aacctgaaatagtactacca

SEQ ID NO: 277721 - DNA, 20 bp, Artificial Sequence
  Description of Artificial Sequence: Synthetic oligonucleotide
  Target: LAMA2; (-) strand; PAM type: YTN; PAM sequence: TTT
taacctgaaatagtactacc

SEQ ID NO: 277722 - DNA, 20 bp, Artificial Sequence
  Description of Artificial Sequence: Synthetic oligonucleotide
  Target: LAMA2; (-) strand; PAM type: YTN; PAM sequence: TTT
ttaacctgaaatagtactac

SEQ ID NO: 277723 - DNA, 20 bp, Artificial Sequence
  Description of Artificial Sequence: Synthetic oligonucleotide
  Target: LAMA2; (-) strand; PAM type: YTN; PAM sequence: TTT
tttaacctgaaatagtacta

SEQ ID NO: 277724 - DNA, 20 bp, Artificial Sequence
  Description of Artificial Sequence: Synthetic oligonucleotide
  Target: LAMA2; (-) strand; PAM type: YTN; PAM sequence: TTT
ttttaacctgaaatagtact

SEQ ID NO: 277725 - DNA, 20 bp, Artificial Sequence
  Description of Artificial Sequence: Synthetic oligonucleotide
  Target: LAMA2; (-) strand; PAM type: YTN; PAM sequence: CTA
tgagatttttttaacctgaa

SEQ ID NO: 277726 - DNA, 20 bp, Artificial Sequence
  Description of Artificial Sequence: Synthetic oligonucleotide
  Target: LAMA2; (-) strand; PAM type: YTN; PAM sequence: TTC
ctatgagatttttttaacct

SEQ ID NO: 277727 - DNA, 20 bp, Artificial Sequence
  Description of Artificial Sequence: Synthetic oligonucleotide
  Target: LAMA2; (-) strand; PAM type: YTN; PAM sequence: TTC
aggatgattcctatgagatt

SEQ ID NO: 277728 - DNA, 20 bp, Artificial Sequence
  Description of Artificial Sequence: Synthetic oligonucleotide
  Target: LAMA2; (-) strand; PAM type: YTN; PAM sequence: TTA
ttcaggatgattcctatgag

SEQ ID NO: 277729 - DNA, 20 bp, Artificial Sequence
  Description of Artificial Sequence: Synthetic oligonucleotide
  Target: LAMA2; (-) strand; PAM type: YTN; PAM sequence: TTT
attcaggatgattcctatga

SEQ ID NO: 277730 - DNA, 20 bp, Artificial Sequence
  Description of Artificial Sequence: Synthetic oligonucleotide
  Target: LAMA2; (-) strand; PAM type: YTN; PAM sequence: TTT
tattcaggatgattcctatg

SEQ ID NO: 277731 - DNA, 20 bp, Artificial Sequence
  Description of Artificial Sequence: Synthetic oligonucleotide
  Target: LAMA2; (-) strand; PAM type: YTN; PAM sequence: CTG
aacattttattcaggatgat

SEQ ID NO: 277732 - DNA, 20 bp, Artificial Sequence
  Description of Artificial Sequence: Synthetic oligonucleotide
  Target: LAMA2; (-) strand; PAM type: YTN; PAM sequence: TTC
tgaacattttattcaggatg

SEQ ID NO: 277733 - DNA, 20 bp, Artificial Sequence
  Description of Artificial Sequence: Synthetic oligonucleotide
  Target: LAMA2; (-) strand; PAM type: YTN; PAM sequence: CTA
tgtgaaacaaaataaataaa

SEQ ID NO: 277734 - DNA, 20 bp, Artificial Sequence
  Description of Artificial Sequence: Synthetic oligonucleotide
  Target: LAMA2; (-) strand; PAM type: YTN; PAM sequence: TTC
tatgtgaaacaaaataaata

SEQ ID NO: 277735 - DNA, 20 bp, Artificial Sequence
  Description of Artificial Sequence: Synthetic oligonucleotide
  Target: LAMA2; (-) strand; PAM type: YTN; PAM sequence: TTG
gtaggttctatgtgaaacaa

SEQ ID NO: 277736 - DNA, 20 bp, Artificial Sequence
  Description of Artificial Sequence: Synthetic oligonucleotide
  Target: LAMA2; (-) strand; PAM type: YTN; PAM sequence: TTT
ggtaggttctatgtgaaaca

SEQ ID NO: 277737 - DNA, 20 bp, Artificial Sequence
  Description of Artificial Sequence: Synthetic oligonucleotide
  Target: LAMA2; (-) strand; PAM type: YTN; PAM sequence: CTC
atgtgtttggtaggttctat

SEQ ID NO: 277738 - DNA, 20 bp, Artificial Sequence
  Description of Artificial Sequence: Synthetic oligonucleotide
  Target: LAMA2; (-) strand; PAM type: YTN; PAM sequence: TTC
tcatgtgtttggtaggttct

SEQ ID NO: 277739 - DNA, 20 bp, Artificial Sequence
  Description of Artificial Sequence: Synthetic oligonucleotide
  Target: LAMA2; (-) strand; PAM type: YTN; PAM sequence: CTC
ccccaaaaaattctcatgtg

SEQ ID NO: 277740 - DNA, 20 bp, Artificial Sequence
  Description of Artificial Sequence: Synthetic oligonucleotide
  Target: LAMA2; (-) strand; PAM type: YTN; PAM sequence: TTC
tcccccaaaaaattctcatg

SEQ ID NO: 277741 - DNA, 20 bp, Artificial Sequence
  Description of Artificial Sequence: Synthetic oligonucleotide
  Target: LAMA2; (-) strand; PAM type: YTN; PAM sequence: TTT
ctcccccaaaaaattctcat

SEQ ID NO: 277742 - DNA, 20 bp, Artificial Sequence
  Description of Artificial Sequence: Synthetic oligonucleotide
  Target: LAMA2; (-) strand; PAM type: YTN; PAM sequence: CTC
acagtcaaatgtccaatcag

SEQ ID NO: 277743 - DNA, 20 bp, Artificial Sequence
  Description of Artificial Sequence: Synthetic oligonucleotide
  Target: LAMA2; (-) strand; PAM type: YTN; PAM sequence: TTC
actcacagtcaaatgtccaa

SEQ ID NO: 277744 - DNA, 20 bp, Artificial Sequence
  Description of Artificial Sequence: Synthetic oligonucleotide
  Target: LAMA2; (-) strand; PAM type: YTN; PAM sequence: TTT
cactcacagtcaaatgtcca

SEQ ID NO: 277745 - DNA, 20 bp, Artificial Sequence
  Description of Artificial Sequence: Synthetic oligonucleotide
  Target: LAMA2; (-) strand; PAM type: YTN; PAM sequence: TTA
tgtgtatttcactcacagtc

SEQ ID NO: 277746 - DNA, 20 bp, Artificial Sequence
  Description of Artificial Sequence: Synthetic oligonucleotide
  Target: LAMA2; (-) strand; PAM type: YTN; PAM sequence: CTT
atgtgtatttcactcacagt

SEQ ID NO: 277747 - DNA, 20 bp, Artificial Sequence
  Description of Artificial Sequence: Synthetic oligonucleotide
  Target: LAMA2; (-) strand; PAM type: YTN; PAM sequence: CTG
cttatgtgtatttcactcac

SEQ ID NO: 277748 - DNA, 20 bp, Artificial Sequence
  Description of Artificial Sequence: Synthetic oligonucleotide
  Target: LAMA2; (-) strand; PAM type: YTN; PAM sequence: TTA
acaccactgcttatgtgtat

SEQ ID NO: 277749 - DNA, 20 bp, Artificial Sequence
  Description of Artificial Sequence: Synthetic oligonucleotide
  Target: LAMA2; (-) strand; PAM type: YTN; PAM sequence: TTT
aacaccactgcttatgtgta

SEQ ID NO: 277750 - DNA, 20 bp, Artificial Sequence
  Description of Artificial Sequence: Synthetic oligonucleotide
  Target: LAMA2; (-) strand; PAM type: YTN; PAM sequence: CTT
taacaccactgcttatgtgt

SEQ ID NO: 277751 - DNA, 20 bp, Artificial Sequence
  Description of Artificial Sequence: Synthetic oligonucleotide
  Target: LAMA2; (-) strand; PAM type: YTN; PAM sequence: TTC
tttaacaccactgcttatgt

SEQ ID NO: 277752 - DNA, 20 bp, Artificial Sequence
  Description of Artificial Sequence: Synthetic oligonucleotide
  Target: LAMA2; (-) strand; PAM type: YTN; PAM sequence: TTT
ctttaacaccactgcttatg

SEQ ID NO: 277753 - DNA, 20 bp, Artificial Sequence
  Description of Artificial Sequence: Synthetic oligonucleotide
  Target: LAMA2; (-) strand; PAM type: YTN; PAM sequence: TTG
atcagtttctttaacaccac

SEQ ID NO: 277754 - DNA, 20 bp, Artificial Sequence
  Description of Artificial Sequence: Synthetic oligonucleotide
  Target: LAMA2; (-) strand; PAM type: YTN; PAM sequence: CTG
aagcaaagaaaatattgatc

SEQ ID NO: 277755 - DNA, 20 bp, Artificial Sequence
  Description of Artificial Sequence: Synthetic oligonucleotide
  Target: LAMA2; (-) strand; PAM type: YTN; PAM sequence: TTG
cccaacactgaagcaaagaa

SEQ ID NO: 277756 - DNA, 20 bp, Artificial Sequence
  Description of Artificial Sequence: Synthetic oligonucleotide
  Target: LAMA2; (-) strand; PAM type: YTN; PAM sequence: TTT
gcccaacactgaagcaaaga

SEQ ID NO: 277757 - DNA, 20 bp, Artificial Sequence
  Description of Artificial Sequence: Synthetic oligonucleotide
  Target: LAMA2; (-) strand; PAM type: YTN; PAM sequence: TTT
tgcccaacactgaagcaaag

SEQ ID NO: 277758 - DNA, 20 bp, Artificial Sequence
  Description of Artificial Sequence: Synthetic oligonucleotide
  Target: LAMA2; (-) strand; PAM type: YTN; PAM sequence: TTT
ttgcccaacactgaagcaaa

SEQ ID NO: 277759 - DNA, 20 bp, Artificial Sequence
  Description of Artificial Sequence: Synthetic oligonucleotide
  Target: LAMA2; (-) strand; PAM type: YTN; PAM sequence: CTA
gaaagtatttttgcccaaca

SEQ ID NO: 277760 - DNA, 20 bp, Artificial Sequence
  Description of Artificial Sequence: Synthetic oligonucleotide
  Target: LAMA2; (-) strand; PAM type: YTN; PAM sequence: CTA
aatcctagaaagtatttttg

SEQ ID NO: 277761 - DNA, 20 bp, Artificial Sequence
  Description of Artificial Sequence: Synthetic oligonucleotide
  Target: LAMA2; (-) strand; PAM type: YTN; PAM sequence: CTA
atatcccctaaatcctagaa

SEQ ID NO: 277762 - DNA, 20 bp, Artificial Sequence
  Description of Artificial Sequence: Synthetic oligonucleotide
  Target: LAMA2; (-) strand; PAM type: YTN; PAM sequence: CTC
taatatcccctaaatcctag

SEQ ID NO: 277763 - DNA, 20 bp, Artificial Sequence
  Description of Artificial Sequence: Synthetic oligonucleotide
  Target: LAMA2; (-) strand; PAM type: YTN; PAM sequence: TTA
ggggatatctctaatatccc

SEQ ID NO: 277764 - DNA, 20 bp, Artificial Sequence
  Description of Artificial Sequence: Synthetic oligonucleotide
  Target: LAMA2; (-) strand; PAM type: YTN; PAM sequence: TTT
aggggatatctctaatatcc

SEQ ID NO: 277765 - DNA, 20 bp, Artificial Sequence
  Description of Artificial Sequence: Synthetic oligonucleotide
  Target: LAMA2; (-) strand; PAM type: YTN; PAM sequence: TTC
atttaggggatatctctaat

SEQ ID NO: 277766 - DNA, 20 bp, Artificial Sequence
  Description of Artificial Sequence: Synthetic oligonucleotide
  Target: LAMA2; (-) strand; PAM type: YTN; PAM sequence: CTG
gttcatttaggggatatctc

SEQ ID NO: 277767 - DNA, 20 bp, Artificial Sequence
  Description of Artificial Sequence: Synthetic oligonucleotide
  Target: LAMA2; (-) strand; PAM type: YTN; PAM sequence: CTA
agactggttcatttagggga

SEQ ID NO: 277768 - DNA, 20 bp, Artificial Sequence
  Description of Artificial Sequence: Synthetic oligonucleotide
  Target: LAMA2; (-) strand; PAM type: YTN; PAM sequence: CTG
ctaagactggttcatttagg

SEQ ID NO: 277769 - DNA, 20 bp, Artificial Sequence
  Description of Artificial Sequence: Synthetic oligonucleotide
  Target: LAMA2; (-) strand; PAM type: YTN; PAM sequence: TTA
tgatcacaaaatgaacctgc

SEQ ID NO: 277770 - DNA, 20 bp, Artificial Sequence
  Description of Artificial Sequence: Synthetic oligonucleotide
  Target: LAMA2; (-) strand; PAM type: YTN; PAM sequence: TTC
attatgatcacaaaatgaac

SEQ ID NO: 277771 - DNA, 20 bp, Artificial Sequence
  Description of Artificial Sequence: Synthetic oligonucleotide
  Target: LAMA2; (-) strand; PAM type: YTN; PAM sequence: TTT
cattatgatcacaaaatgaa

SEQ ID NO: 277772 - DNA, 20 bp, Artificial Sequence
  Description of Artificial Sequence: Synthetic oligonucleotide
  Target: LAMA2; (-) strand; PAM type: YTN; PAM sequence: CTC
atagaatatgatgtttcatt

SEQ ID NO: 277773 - DNA, 20 bp, Artificial Sequence
  Description of Artificial Sequence: Synthetic oligonucleotide
  Target: LAMA2; (-) strand; PAM type: YTN; PAM sequence: TTG
ctcatagaatatgatgtttc

SEQ ID NO: 277774 - DNA, 20 bp, Artificial Sequence
  Description of Artificial Sequence: Synthetic oligonucleotide
  Target: LAMA2; (-) strand; PAM type: YTN; PAM sequence: CTC
aagagaaaccaaaaacagta

SEQ ID NO: 277775 - DNA, 20 bp, Artificial Sequence
  Description of Artificial Sequence: Synthetic oligonucleotide
  Target: LAMA2; (-) strand; PAM type: YTN; PAM sequence: CTC
actcaagagaaaccaaaaac

SEQ ID NO: 277776 - DNA, 20 bp, Artificial Sequence
  Description of Artificial Sequence: Synthetic oligonucleotide
  Target: LAMA2; (-) strand; PAM type: YTN; PAM sequence: TTA
gtagggctcactcaagagaa

SEQ ID NO: 277777 - DNA, 20 bp, Artificial Sequence
  Description of Artificial Sequence: Synthetic oligonucleotide
  Target: LAMA2; (-) strand; PAM type: YTN; PAM sequence: TTG
aataagaagtcaacagaaca

SEQ ID NO: 277778 - DNA, 20 bp, Artificial Sequence
  Description of Artificial Sequence: Synthetic oligonucleotide
  Target: LAMA2; (-) strand; PAM type: YTN; PAM sequence: TTT
gaataagaagtcaacagaac

SEQ ID NO: 277779 - DNA, 20 bp, Artificial Sequence
  Description of Artificial Sequence: Synthetic oligonucleotide
  Target: LAMA2; (-) strand; PAM type: YTN; PAM sequence: TTT
tgaataagaagtcaacagaa

SEQ ID NO: 277780 - DNA, 20 bp, Artificial Sequence
  Description of Artificial Sequence: Synthetic oligonucleotide
  Target: LAMA2; (-) strand; PAM type: YTN; PAM sequence: CTA
ttttgaataagaagtcaaca

SEQ ID NO: 277781 - DNA, 20 bp, Artificial Sequence
  Description of Artificial Sequence: Synthetic oligonucleotide
  Target: LAMA2; (-) strand; PAM type: YTN; PAM sequence: CTG
caatgatcatgccactattt

SEQ ID NO: 277782 - DNA, 20 bp, Artificial Sequence
  Description of Artificial Sequence: Synthetic oligonucleotide
  Target: LAMA2; (-) strand; PAM type: YTN; PAM sequence: TTC
tgcaatgatcatgccactat

SEQ ID NO: 277783 - DNA, 20 bp, Artificial Sequence
  Description of Artificial Sequence: Synthetic oligonucleotide
  Target: LAMA2; (-) strand; PAM type: YTN; PAM sequence: CTT
ctgcaatgatcatgccacta

SEQ ID NO: 277784 - DNA, 20 bp, Artificial Sequence
  Description of Artificial Sequence: Synthetic oligonucleotide
  Target: LAMA2; (-) strand; PAM type: YTN; PAM sequence: CTG
aacatagaaatgcttctgca

SEQ ID NO: 277785 - DNA, 20 bp, Artificial Sequence
  Description of Artificial Sequence: Synthetic oligonucleotide
  Target: LAMA2; (-) strand; PAM type: YTN; PAM sequence: CTG
aaaggataactgaacataga

SEQ ID NO: 277786 - DNA, 20 bp, Artificial Sequence
  Description of Artificial Sequence: Synthetic oligonucleotide
  Target: LAMA2; (-) strand; PAM type: YTN; PAM sequence: TTC
tgaaaggataactgaacata

SEQ ID NO: 277787 - DNA, 20 bp, Artificial Sequence
  Description of Artificial Sequence: Synthetic oligonucleotide
  Target: LAMA2; (-) strand; PAM type: YTN; PAM sequence: TTC
attctgaaaggataactgaa

SEQ ID NO: 277788 - DNA, 20 bp, Artificial Sequence
  Description of Artificial Sequence: Synthetic oligonucleotide
  Target: LAMA2; (-) strand; PAM type: YTN; PAM sequence: TTG
aaaagtagattcattctgaa

SEQ ID NO: 277789 - DNA, 20 bp, Artificial Sequence
  Description of Artificial Sequence: Synthetic oligonucleotide
  Target: LAMA2; (-) strand; PAM type: YTN; PAM sequence: TTT
gaaaagtagattcattctga

SEQ ID NO: 277790 - DNA, 20 bp, Artificial Sequence
  Description of Artificial Sequence: Synthetic oligonucleotide
  Target: LAMA2; (-) strand; PAM type: YTN; PAM sequence: TTA
gatttgaaaagtagattcat

SEQ ID NO: 277791 - DNA, 20 bp, Artificial Sequence
  Description of Artificial Sequence: Synthetic oligonucleotide
  Target: LAMA2; (-) strand; PAM type: YTN; PAM sequence: TTT
agatttgaaaagtagattca

SEQ ID NO: 277792 - DNA, 20 bp, Artificial Sequence
  Description of Artificial Sequence: Synthetic oligonucleotide
  Target: LAMA2; (-) strand; PAM type: YTN; PAM sequence: TTA
gtttagatttgaaaagtaga

SEQ ID NO: 277793 - DNA, 20 bp, Artificial Sequence
  Description of Artificial Sequence: Synthetic oligonucleotide
  Target: LAMA2; (-) strand; PAM type: YTN; PAM sequence: TTT
agtttagatttgaaaagtag

SEQ ID NO: 277794 - DNA, 20 bp, Artificial Sequence
  Description of Artificial Sequence: Synthetic oligonucleotide
  Target: LAMA2; (-) strand; PAM type: YTN; PAM sequence: TTA
aaatttagtttagatttgaa

SEQ ID NO: 277795 - DNA, 20 bp, Artificial Sequence
  Description of Artificial Sequence: Synthetic oligonucleotide
  Target: LAMA2; (-) strand; PAM type: YTN; PAM sequence: CTA
acagaagatggattaaaatt

SEQ ID NO: 277796 - DNA, 20 bp, Artificial Sequence
  Description of Artificial Sequence: Synthetic oligonucleotide
  Target: LAMA2; (-) strand; PAM type: YTN; PAM sequence: TTA
tctaacagaagatggattaa

SEQ ID NO: 277797 - DNA, 20 bp, Artificial Sequence
  Description of Artificial Sequence: Synthetic oligonucleotide
  Target: LAMA2; (-) strand; PAM type: YTN; PAM sequence: TTA
aaatagaaaattatctaaca

SEQ ID NO: 277798 - DNA, 20 bp, Artificial Sequence
  Description of Artificial Sequence: Synthetic oligonucleotide
  Target: LAMA2; (-) strand; PAM type: YTN; PAM sequence: TTT
aaaatagaaaattatctaac

SEQ ID NO: 277799 - DNA, 20 bp, Artificial Sequence
  Description of Artificial Sequence: Synthetic oligonucleotide
  Target: LAMA2; (-) strand; PAM type: YTN; PAM sequence: CTT
taaaatagaaaattatctaa

SEQ ID NO: 277800 - DNA, 20 bp, Artificial Sequence
  Description of Artificial Sequence: Synthetic oligonucleotide
  Target: LAMA2; (-) strand; PAM type: YTN; PAM sequence: TTA
gggtctttaaaatagaaaat

SEQ ID NO: 277801 - DNA, 20 bp, Artificial Sequence
  Description of Artificial Sequence: Synthetic oligonucleotide
  Target: LAMA2; (-) strand; PAM type: YTN; PAM sequence: TTG
aaattagggtctttaaaata

SEQ ID NO: 277802 - DNA, 20 bp, Artificial Sequence
  Description of Artificial Sequence: Synthetic oligonucleotide
  Target: LAMA2; (-) strand; PAM type: YTN; PAM sequence: CTT
gaaattagggtctttaaaat

SEQ ID NO: 277803 - DNA, 20 bp, Artificial Sequence
  Description of Artificial Sequence: Synthetic oligonucleotide
  Target: LAMA2; (-) strand; PAM type: YTN; PAM sequence: CTG
aaaataatcatacaataaaa

SEQ ID NO: 277804 - DNA, 20 bp, Artificial Sequence
  Description of Artificial Sequence: Synthetic oligonucleotide
  Target: LAMA2; (-) strand; PAM type: YTN; PAM sequence: TTA
ggtgctgaaaataatcatac

SEQ ID NO: 277805 - DNA, 20 bp, Artificial Sequence
  Description of Artificial Sequence: Synthetic oligonucleotide
  Target: LAMA2; (-) strand; PAM type: YTN; PAM sequence: TTT
aggtgctgaaaataatcata

SEQ ID NO: 277806 - DNA, 20 bp, Artificial Sequence
  Description of Artificial Sequence: Synthetic oligonucleotide
  Target: LAMA2; (-) strand; PAM type: YTN; PAM sequence: TTT
taggtgctgaaaataatcat

SEQ ID NO: 277807 - DNA, 20 bp, Artificial Sequence
  Description of Artificial Sequence: Synthetic oligonucleotide
  Target: LAMA2; (-) strand; PAM type: YTN; PAM sequence: TTG
ccaggcaccattttaggtgc

SEQ ID NO: 277808 - DNA, 20 bp, Artificial Sequence
  Description of Artificial Sequence: Synthetic oligonucleotide
  Target: LAMA2; (-) strand; PAM type: YTN; PAM sequence: TTT
gccaggcaccattttaggtg

SEQ ID NO: 277809 - DNA, 20 bp, Artificial Sequence
  Description of Artificial Sequence: Synthetic oligonucleotide
  Target: LAMA2; (-) strand; PAM type: YTN; PAM sequence: CTA
tttgccaggcaccattttag

SEQ ID NO: 277810 - DNA, 20 bp, Artificial Sequence
  Description of Artificial Sequence: Synthetic oligonucleotide
  Target: LAMA2; (-) strand; PAM type: YTN; PAM sequence: CTA
ctatttgccaggcaccattt

SEQ ID NO: 277811 - DNA, 20 bp, Artificial Sequence
  Description of Artificial Sequence: Synthetic oligonucleotide
  Target: LAMA2; (-) strand; PAM type: YTN; PAM sequence: TTA
taagtgcctactatttgcca

SEQ ID NO: 277812 - DNA, 20 bp, Artificial Sequence
  Description of Artificial Sequence: Synthetic oligonucleotide
  Target: LAMA2; (-) strand; PAM type: YTN; PAM sequence: TTT
ataagtgcctactatttgcc

SEQ ID NO: 277813 - DNA, 20 bp, Artificial Sequence
  Description of Artificial Sequence: Synthetic oligonucleotide
  Target: LAMA2; (-) strand; PAM type: YTN; PAM sequence: TTC
atttataagtgcctactatt

SEQ ID NO: 277814 - DNA, 20 bp, Artificial Sequence
  Description of Artificial Sequence: Synthetic oligonucleotide
  Target: LAMA2; (-) strand; PAM type: YTN; PAM sequence: CTC
attcatttataagtgcctac

SEQ ID NO: 277815 - DNA, 20 bp, Artificial Sequence
  Description of Artificial Sequence: Synthetic oligonucleotide
  Target: LAMA2; (-) strand; PAM type: YTN; PAM sequence: TTA
taatgaaaaaatacactcat

SEQ ID NO: 277816 - DNA, 20 bp, Artificial Sequence
  Description of Artificial Sequence: Synthetic oligonucleotide
  Target: LAMA2; (-) strand; PAM type: YTN; PAM sequence: TTA
tgaacaggcataaaaggtgt

SEQ ID NO: 277817 - DNA, 20 bp, Artificial Sequence
  Description of Artificial Sequence: Synthetic oligonucleotide
  Target: LAMA2; (-) strand; PAM type: YTN; PAM sequence: TTG
gtataaaagattatgaacag

SEQ ID NO: 277818 - DNA, 20 bp, Artificial Sequence
  Description of Artificial Sequence: Synthetic oligonucleotide
  Target: LAMA2; (-) strand; PAM type: YTN; PAM sequence: TTA
ttggtataaaagattatgaa

SEQ ID NO: 277819 - DNA, 20 bp, Artificial Sequence
  Description of Artificial Sequence: Synthetic oligonucleotide
  Target: LAMA2; (-) strand; PAM type: YTN; PAM sequence: TTT
attggtataaaagattatga

SEQ ID NO: 277820 - DNA, 20 bp, Artificial Sequence
  Description of Artificial Sequence: Synthetic oligonucleotide
  Target: LAMA2; (-) strand; PAM type: YTN; PAM sequence: TTT
tattggtataaaagattatg

SEQ ID NO: 277821 - DNA, 20 bp, Artificial Sequence
  Description of Artificial Sequence: Synthetic oligonucleotide
  Target: LAMA2; (-) strand; PAM type: YTN; PAM sequence: TTT
ttattggtataaaagattat

SEQ ID NO: 277822 - DNA, 20 bp, Artificial Sequence
  Description of Artificial Sequence: Synthetic oligonucleotide
  Target: LAMA2; (-) strand; PAM type: YTN; PAM sequence: CTA
cagcaaatttttattggtat

SEQ ID NO: 277823 - DNA, 20 bp, Artificial Sequence
  Description of Artificial Sequence: Synthetic oligonucleotide
  Target: LAMA2; (-) strand; PAM type: YTN; PAM sequence: TTA
ctacagcaaatttttattgg

SEQ ID NO: 277824 - DNA, 20 bp, Artificial Sequence
  Description of Artificial Sequence: Synthetic oligonucleotide
  Target: LAMA2; (-) strand; PAM type: YTN; PAM sequence: TTA
taaggatgaagcaattacta

SEQ ID NO: 277825 - DNA, 20 bp, Artificial Sequence
  Description of Artificial Sequence: Synthetic oligonucleotide
  Target: LAMA2; (-) strand; PAM type: YTN; PAM sequence: TTT
ataaggatgaagcaattact

SEQ ID NO: 277826 - DNA, 20 bp, Artificial Sequence
  Description of Artificial Sequence: Synthetic oligonucleotide
  Target: LAMA2; (-) strand; PAM type: YTN; PAM sequence: TTA
caagaaatttataaggatga

SEQ ID NO: 277827 - DNA, 20 bp, Artificial Sequence
  Description of Artificial Sequence: Synthetic oligonucleotide
  Target: LAMA2; (-) strand; PAM type: YTN; PAM sequence: TTA
tcataaaatgttacaagaaa

SEQ ID NO: 277828 - DNA, 20 bp, Artificial Sequence
  Description of Artificial Sequence: Synthetic oligonucleotide
  Target: LAMA2; (-) strand; PAM type: YTN; PAM sequence: CTT
atcataaaatgttacaagaa

SEQ ID NO: 277829 - DNA, 20 bp, Artificial Sequence
  Description of Artificial Sequence: Synthetic oligonucleotide
  Target: LAMA2; (-) strand; PAM type: YTN; PAM sequence: CTC
cttatcataaaatgttacaa

SEQ ID NO: 277830 - DNA, 20 bp, Artificial Sequence
  Description of Artificial Sequence: Synthetic oligonucleotide
  Target: LAMA2; (-) strand; PAM type: YTN; PAM sequence: TTA
aacacctccttatcataaaa

SEQ ID NO: 277831 - DNA, 20 bp, Artificial Sequence
  Description of Artificial Sequence: Synthetic oligonucleotide
  Target: LAMA2; (-) strand; PAM type: YTN; PAM sequence: TTA
gggtaaaattaaacacctcc

SEQ ID NO: 277832 - DNA, 20 bp, Artificial Sequence
  Description of Artificial Sequence: Synthetic oligonucleotide
  Target: LAMA2; (-) strand; PAM type: YTN; PAM sequence: TTA
aattagggtaaaattaaaca

SEQ ID NO: 277833 - DNA, 20 bp, Artificial Sequence
  Description of Artificial Sequence: Synthetic oligonucleotide
  Target: LAMA2; (-) strand; PAM type: YTN; PAM sequence: CTA
aaggtattaaattagggtaa

SEQ ID NO: 277834 - DNA, 20 bp, Artificial Sequence
  Description of Artificial Sequence: Synthetic oligonucleotide
  Target: LAMA2; (-) strand; PAM type: YTN; PAM sequence: TTC
ctaaaggtattaaattaggg

SEQ ID NO: 277835 - DNA, 20 bp, Artificial Sequence
  Description of Artificial Sequence: Synthetic oligonucleotide
  Target: LAMA2; (-) strand; PAM type: YTN; PAM sequence: TTT
cctaaaggtattaaattagg

SEQ ID NO: 277836 - DNA, 20 bp, Artificial Sequence
  Description of Artificial Sequence: Synthetic oligonucleotide
  Target: LAMA2; (-) strand; PAM type: YTN; PAM sequence: TTT
tcctaaaggtattaaattag

SEQ ID NO: 277837 - DNA, 20 bp, Artificial Sequence
  Description of Artificial Sequence: Synthetic oligonucleotide
  Target: LAMA2; (-) strand; PAM type: YTN; PAM sequence: TTT
ttcctaaaggtattaaatta

SEQ ID NO: 277838 - DNA, 20 bp, Artificial Sequence
  Description of Artificial Sequence: Synthetic oligonucleotide
  Target: LAMA2; (-) strand; PAM type: YTN; PAM sequence: TTG
gcaaaaaatgatttttccta

SEQ ID NO: 277839 - DNA, 20 bp, Artificial Sequence
  Description of Artificial Sequence: Synthetic oligonucleotide
  Target: LAMA2; (-) strand; PAM type: YTN; PAM sequence: TTC
atgttggcaaaaaatgattt

SEQ ID NO: 277840 - DNA, 20 bp, Artificial Sequence
  Description of Artificial Sequence: Synthetic oligonucleotide
  Target: LAMA2; (-) strand; PAM type: YTN; PAM sequence: CTT
catgttggcaaaaaatgatt

SEQ ID NO: 277841 - DNA, 20 bp, Artificial Sequence
  Description of Artificial Sequence: Synthetic oligonucleotide
  Target: LAMA2; (-) strand; PAM type: YTN; PAM sequence: CTA
ccatgtataagcatgggtgg

SEQ ID NO: 277842 - DNA, 20 bp, Artificial Sequence
  Description of Artificial Sequence: Synthetic oligonucleotide
  Target: LAMA2; (-) strand; PAM type: YTN; PAM sequence: TTA
gcctaccatgtataagcatg

SEQ ID NO: 277843 - DNA, 20 bp, Artificial Sequence
  Description of Artificial Sequence: Synthetic oligonucleotide
  Target: LAMA2; (-) strand; PAM type: YTN; PAM sequence: TTG
gttagcctaccatgtataag

SEQ ID NO: 277844 - DNA, 20 bp, Artificial Sequence
  Description of Artificial Sequence: Synthetic oligonucleotide
  Target: LAMA2; (-) strand; PAM type: YTN; PAM sequence: TTG
aggttggttagcctaccatg

SEQ ID NO: 277845 - DNA, 20 bp, Artificial Sequence
  Description of Artificial Sequence: Synthetic oligonucleotide
  Target: LAMA2; (-) strand; PAM type: YTN; PAM sequence: TTT
gaggttggttagcctaccat

SEQ ID NO: 277846 - DNA, 20 bp, Artificial Sequence
  Description of Artificial Sequence: Synthetic oligonucleotide
  Target: LAMA2; (-) strand; PAM type: YTN; PAM sequence: CTG
tttgaggttggttagcctac

SEQ ID NO: 277847 - DNA, 20 bp, Artificial Sequence
  Description of Artificial Sequence: Synthetic oligonucleotide
  Target: LAMA2; (-) strand; PAM type: YTN; PAM sequence: CTC
tgtttgaggttggttagcct

SEQ ID NO: 277848 - DNA, 20 bp, Artificial Sequence
  Description of Artificial Sequence: Synthetic oligonucleotide
  Target: LAMA2; (-) strand; PAM type: YTN; PAM sequence: CTC
tctgtttgaggttggttagc

SEQ ID NO: 277849 - DNA, 20 bp, Artificial Sequence
  Description of Artificial Sequence: Synthetic oligonucleotide
  Target: LAMA2; (-) strand; PAM type: YTN; PAM sequence: CTC
accatcactctctgtttgag

SEQ ID NO: 277850 - DNA, 20 bp, Artificial Sequence
  Description of Artificial Sequence: Synthetic oligonucleotide
  Target: LAMA2; (-) strand; PAM type: YTN; PAM sequence: TTA
caactcaccatcactctctg

SEQ ID NO: 277851 - DNA, 20 bp, Artificial Sequence
  Description of Artificial Sequence: Synthetic oligonucleotide
  Target: LAMA2; (-) strand; PAM type: YTN; PAM sequence: TTG
tggaaagagagaaggaataa

SEQ ID NO: 277852 - DNA, 20 bp, Artificial Sequence
  Description of Artificial Sequence: Synthetic oligonucleotide
  Target: LAMA2; (-) strand; PAM type: YTN; PAM sequence: TTA
aatgattgtggaaagagaga

SEQ ID NO: 277853 - DNA, 20 bp, Artificial Sequence
  Description of Artificial Sequence: Synthetic oligonucleotide
  Target: LAMA2; (-) strand; PAM type: YTN; PAM sequence: TTT
aaatgattgtggaaagagag

SEQ ID NO: 277854 - DNA, 20 bp, Artificial Sequence
  Description of Artificial Sequence: Synthetic oligonucleotide
  Target: LAMA2; (-) strand; PAM type: YTN; PAM sequence: TTT
taaatgattgtggaaagaga

SEQ ID NO: 277855 - DNA, 20 bp, Artificial Sequence
  Description of Artificial Sequence: Synthetic oligonucleotide
  Target: LAMA2; (-) strand; PAM type: YTN; PAM sequence: TTT
ttaaatgattgtggaaagag

SEQ ID NO: 277856 - DNA, 20 bp, Artificial Sequence
  Description of Artificial Sequence: Synthetic oligonucleotide
  Target: LAMA2; (-) strand; PAM type: YTN; PAM sequence: TTA
tttttaaatgattgtggaaa

SEQ ID NO: 277857 - DNA, 20 bp, Artificial Sequence
  Description of Artificial Sequence: Synthetic oligonucleotide
  Target: LAMA2; (-) strand; PAM type: YTN; PAM sequence: TTA
attatttttaaatgattgtg

SEQ ID NO: 277858 - DNA, 20 bp, Artificial Sequence
  Description of Artificial Sequence: Synthetic oligonucleotide
  Target: LAMA2; (-) strand; PAM type: YTN; PAM sequence: TTT
aattatttttaaatgattgt

SEQ ID NO: 277859 - DNA, 20 bp, Artificial Sequence
  Description of Artificial Sequence: Synthetic oligonucleotide
  Target: LAMA2; (-) strand; PAM type: YTN; PAM sequence: TTC
agacatttaattatttttaa

SEQ ID NO: 277860 - DNA, 20 bp, Artificial Sequence
  Description of Artificial Sequence: Synthetic oligonucleotide
  Target: LAMA2; (-) strand; PAM type: YTN; PAM sequence: TTT
cagacatttaattattttta

SEQ ID NO: 277861 - DNA, 20 bp, Artificial Sequence
  Description of Artificial Sequence: Synthetic oligonucleotide
  Target: LAMA2; (-) strand; PAM type: YTN; PAM sequence: TTT
tcagacatttaattattttt

SEQ ID NO: 277862 - DNA, 20 bp, Artificial Sequence
  Description of Artificial Sequence: Synthetic oligonucleotide
  Target: LAMA2; (-) strand; PAM type: YTN; PAM sequence: TTT
ttcagacatttaattatttt

SEQ ID NO: 277863 - DNA, 20 bp, Artificial Sequence
  Description of Artificial Sequence: Synthetic oligonucleotide
  Target: LAMA2; (-) strand; PAM type: YTN; PAM sequence: TTG
taatttttcagacatttaat

SEQ ID NO: 277864 - DNA, 20 bp, Artificial Sequence
  Description of Artificial Sequence: Synthetic oligonucleotide
  Target: LAMA2; (-) strand; PAM type: YTN; PAM sequence: TTT
gtaatttttcagacatttaa

SEQ ID NO: 277865 - DNA, 20 bp, Artificial Sequence
  Description of Artificial Sequence: Synthetic oligonucleotide
  Target: LAMA2; (-) strand; PAM type: YTN; PAM sequence: TTT
tgtaatttttcagacattta

SEQ ID NO: 277866 - DNA, 20 bp, Artificial Sequence
  Description of Artificial Sequence: Synthetic oligonucleotide
  Target: LAMA2; (-) strand; PAM type: YTN; PAM sequence: TTA
ttttgtaatttttcagacat

SEQ ID NO: 277867 - DNA, 20 bp, Artificial Sequence
  Description of Artificial Sequence: Synthetic oligonucleotide
  Target: LAMA2; (-) strand; PAM type: YTN; PAM sequence: CTT
attttgtaatttttcagaca

SEQ ID NO: 277868 - DNA, 20 bp, Artificial Sequence
  Description of Artificial Sequence: Synthetic oligonucleotide
  Target: LAMA2; (-) strand; PAM type: YTN; PAM sequence: CTA
tagcacttattttgtaattt

SEQ ID NO: 277869 - DNA, 20 bp, Artificial Sequence
  Description of Artificial Sequence: Synthetic oligonucleotide
  Target: LAMA2; (-) strand; PAM type: YTN; PAM sequence: CTC
tatagcacttattttgtaat

SEQ ID NO: 277870 - DNA, 20 bp, Artificial Sequence
  Description of Artificial Sequence: Synthetic oligonucleotide
  Target: LAMA2; (-) strand; PAM type: YTN; PAM sequence: TTC
tctatagcacttattttgta

SEQ ID NO: 277871 - DNA, 20 bp, Artificial Sequence
  Description of Artificial Sequence: Synthetic oligonucleotide
  Target: LAMA2; (-) strand; PAM type: YTN; PAM sequence: CTG
attctctatagcacttattt

SEQ ID NO: 277872 - DNA, 20 bp, Artificial Sequence
  Description of Artificial Sequence: Synthetic oligonucleotide
  Target: LAMA2; (-) strand; PAM type: YTN; PAM sequence: TTA
ataaatcactgattctctat

SEQ ID NO: 277873 - DNA, 20 bp, Artificial Sequence
  Description of Artificial Sequence: Synthetic oligonucleotide
  Target: LAMA2; (-) strand; PAM type: YTN; PAM sequence: TTT
aataaatcactgattctcta

SEQ ID NO: 277874 - DNA, 20 bp, Artificial Sequence
  Description of Artificial Sequence: Synthetic oligonucleotide
  Target: LAMA2; (-) strand; PAM type: YTN; PAM sequence: TTA
tccaatagtcatttaataaa

SEQ ID NO: 277875 - DNA, 20 bp, Artificial Sequence
  Description of Artificial Sequence: Synthetic oligonucleotide
  Target: LAMA2; (-) strand; PAM type: YTN; PAM sequence: CTT
atccaatagtcatttaataa

SEQ ID NO: 277876 - DNA, 20 bp, Artificial Sequence
  Description of Artificial Sequence: Synthetic oligonucleotide
  Target: LAMA2; (-) strand; PAM type: YTN; PAM sequence: TTC
ttatccaatagtcatttaat

SEQ ID NO: 277877 - DNA, 20 bp, Artificial Sequence
  Description of Artificial Sequence: Synthetic oligonucleotide
  Target: LAMA2; (-) strand; PAM type: YTN; PAM sequence: TTT
cttatccaatagtcatttaa

SEQ ID NO: 277878 - DNA, 20 bp, Artificial Sequence
  Description of Artificial Sequence: Synthetic oligonucleotide
  Target: LAMA2; (-) strand; PAM type: YTN; PAM sequence: TTT
tcttatccaatagtcattta

SEQ ID NO: 277879 - DNA, 20 bp, Artificial Sequence
  Description of Artificial Sequence: Synthetic oligonucleotide
  Target: LAMA2; (-) strand; PAM type: YTN; PAM sequence: TTT
ttcttatccaatagtcattt

SEQ ID NO: 277880 - DNA, 20 bp, Artificial Sequence
  Description of Artificial Sequence: Synthetic oligonucleotide
  Target: LAMA2; (-) strand; PAM type: YTN; PAM sequence: CTT
tttcttatccaatagtcatt

SEQ ID NO: 277881 - DNA, 20 bp, Artificial Sequence
  Description of Artificial Sequence: Synthetic oligonucleotide
  Target: LAMA2; (-) strand; PAM type: YTN; PAM sequence: TTC
tttttcttatccaatagtca

SEQ ID NO: 277882 - DNA, 20 bp, Artificial Sequence
  Description of Artificial Sequence: Synthetic oligonucleotide
  Target: LAMA2; (-) strand; PAM type: YTN; PAM sequence: CTT
ctttttcttatccaatagtc

SEQ ID NO: 277883 - DNA, 20 bp, Artificial Sequence
  Description of Artificial Sequence: Synthetic oligonucleotide
  Target: LAMA2; (-) strand; PAM type: YTN; PAM sequence: TTG
tcttctttttcttatccaat

SEQ ID NO: 277884 - DNA, 20 bp, Artificial Sequence
  Description of Artificial Sequence: Synthetic oligonucleotide
  Target: LAMA2; (-) strand; PAM type: YTN; PAM sequence: CTG
ggacagattgtcttcttttt

SEQ ID NO: 277885 - DNA, 20 bp, Artificial Sequence
  Description of Artificial Sequence: Synthetic oligonucleotide
  Target: LAMA2; (-) strand; PAM type: YTN; PAM sequence: TTC
tgggacagattgtcttcttt

SEQ ID NO: 277886 - DNA, 20 bp, Artificial Sequence
  Description of Artificial Sequence: Synthetic oligonucleotide
  Target: LAMA2; (-) strand; PAM type: YTN; PAM sequence: TTT
ctgggacagattgtcttctt

SEQ ID NO: 277887 - DNA, 20 bp, Artificial Sequence
  Description of Artificial Sequence: Synthetic oligonucleotide
  Target: LAMA2; (-) strand; PAM type: YTN; PAM sequence: TTC
caacaaaatttctgggacag

SEQ ID NO: 277888 - DNA, 20 bp, Artificial Sequence
  Description of Artificial Sequence: Synthetic oligonucleotide
  Target: LAMA2; (-) strand; PAM type: YTN; PAM sequence: TTC
atgaaaaacattccaacaaa

SEQ ID NO: 277889 - DNA, 20 bp, Artificial Sequence
  Description of Artificial Sequence: Synthetic oligonucleotide
  Target: LAMA2; (-) strand; PAM type: YTN; PAM sequence: CTG
ttcatgaaaaacattccaac

SEQ ID NO: 277890 - DNA, 20 bp, Artificial Sequence
  Description of Artificial Sequence: Synthetic oligonucleotide
  Target: LAMA2; (-) strand; PAM type: YTN; PAM sequence: TTC
tgttcatgaaaaacattcca

SEQ ID NO: 277891 - DNA, 20 bp, Artificial Sequence
  Description of Artificial Sequence: Synthetic oligonucleotide
  Target: LAMA2; (-) strand; PAM type: YTN; PAM sequence: TTC
attctgttcatgaaaaacat

SEQ ID NO: 277892 - DNA, 20 bp, Artificial Sequence
  Description of Artificial Sequence: Synthetic oligonucleotide
  Target: LAMA2; (-) strand; PAM type: YTN; PAM sequence: TTA
ttcattctgttcatgaaaaa

SEQ ID NO: 277893 - DNA, 20 bp, Artificial Sequence
  Description of Artificial Sequence: Synthetic oligonucleotide
  Target: LAMA2; (-) strand; PAM type: YTN; PAM sequence: TTT
attcattctgttcatgaaaa

SEQ ID NO: 277894 - DNA, 20 bp, Artificial Sequence
  Description of Artificial Sequence: Synthetic oligonucleotide
  Target: LAMA2; (-) strand; PAM type: YTN; PAM sequence: TTT
tattcattctgttcatgaaa

SEQ ID NO: 277895 - DNA, 20 bp, Artificial Sequence
  Description of Artificial Sequence: Synthetic oligonucleotide
  Target: LAMA2; (-) strand; PAM type: YTN; PAM sequence: CTA
aaattttattcattctgttc

SEQ ID NO: 277896 - DNA, 20 bp, Artificial Sequence
  Description of Artificial Sequence: Synthetic oligonucleotide
  Target: LAMA2; (-) strand; PAM type: YTN; PAM sequence: TTA
aactaaaattttattcattc

SEQ ID NO: 277897 - DNA, 20 bp, Artificial Sequence
  Description of Artificial Sequence: Synthetic oligonucleotide
  Target: LAMA2; (-) strand; PAM type: YTN; PAM sequence: CTA
ttaaactaaaattttattca

SEQ ID NO: 277898 - DNA, 20 bp, Artificial Sequence
  Description of Artificial Sequence: Synthetic oligonucleotide
  Target: LAMA2; (-) strand; PAM type: YTN; PAM sequence: CTG
atctattaaactaaaatttt

SEQ ID NO: 277899 - DNA, 20 bp, Artificial Sequence
  Description of Artificial Sequence: Synthetic oligonucleotide
  Target: LAMA2; (-) strand; PAM type: YTN; PAM sequence: TTA
tactgatctattaaactaaa

SEQ ID NO: 277900 - DNA, 20 bp, Artificial Sequence
  Description of Artificial Sequence: Synthetic oligonucleotide
  Target: LAMA2; (-) strand; PAM type: YTN; PAM sequence: CTA
tattatactgatctattaaa

SEQ ID NO: 277901 - DNA, 20 bp, Artificial Sequence
  Description of Artificial Sequence: Synthetic oligonucleotide
  Target: LAMA2; (-) strand; PAM type: YTN; PAM sequence: TTC
cagcaaagtagaactatatt

SEQ ID NO: 277902 - DNA, 20 bp, Artificial Sequence
  Description of Artificial Sequence: Synthetic oligonucleotide
  Target: LAMA2; (-) strand; PAM type: YTN; PAM sequence: TTT
ccagcaaagtagaactatat

SEQ ID NO: 277903 - DNA, 20 bp, Artificial Sequence
  Description of Artificial Sequence: Synthetic oligonucleotide
  Target: LAMA2; (-) strand; PAM type: YTN; PAM sequence: TTT
tccagcaaagtagaactata

SEQ ID NO: 277904 - DNA, 20 bp, Artificial Sequence
  Description of Artificial Sequence: Synthetic oligonucleotide
  Target: LAMA2; (-) strand; PAM type: YTN; PAM sequence: CTT
ttccagcaaagtagaactat

SEQ ID NO: 277905 - DNA, 20 bp, Artificial Sequence
  Description of Artificial Sequence: Synthetic oligonucleotide
  Target: LAMA2; (-) strand; PAM type: YTN; PAM sequence: TTC
ttttccagcaaagtagaact

SEQ ID NO: 277906 - DNA, 20 bp, Artificial Sequence
  Description of Artificial Sequence: Synthetic oligonucleotide
  Target: LAMA2; (-) strand; PAM type: YTN; PAM sequence: TTT
cttttccagcaaagtagaac

SEQ ID NO: 277907 - DNA, 20 bp, Artificial Sequence
  Description of Artificial Sequence: Synthetic oligonucleotide
  Target: LAMA2; (-) strand; PAM type: YTN; PAM sequence: TTC
aaatatatttcttttccagc

SEQ ID NO: 277908 - DNA, 20 bp, Artificial Sequence
  Description of Artificial Sequence: Synthetic oligonucleotide
  Target: LAMA2; (-) strand; PAM type: YTN; PAM sequence: TTT
caaatatatttcttttccag

SEQ ID NO: 277909 - DNA, 20 bp, Artificial Sequence
  Description of Artificial Sequence: Synthetic oligonucleotide
  Target: LAMA2; (-) strand; PAM type: YTN; PAM sequence: TTT
tcaaatatatttcttttcca

SEQ ID NO: 277910 - DNA, 20 bp, Artificial Sequence
  Description of Artificial Sequence: Synthetic oligonucleotide
  Target: LAMA2; (-) strand; PAM type: YTN; PAM sequence: CTT
ttcaaatatatttcttttcc

SEQ ID NO: 277911 - DNA, 20 bp, Artificial Sequence
  Description of Artificial Sequence: Synthetic oligonucleotide
  Target: LAMA2; (-) strand; PAM type: YTN; PAM sequence: CTC
aacgtaatgcttttcaaata

SEQ ID NO: 277912 - DNA, 20 bp, Artificial Sequence
  Description of Artificial Sequence: Synthetic oligonucleotide
  Target: LAMA2; (-) strand; PAM type: YTN; PAM sequence: TTA
ctcaacgtaatgcttttcaa

SEQ ID NO: 277913 - DNA, 20 bp, Artificial Sequence
  Description of Artificial Sequence: Synthetic oligonucleotide
  Target: LAMA2; (-) strand; PAM type: YTN; PAM sequence: CTA
gataattactcaacgtaatg

SEQ ID NO: 277914 - DNA, 20 bp, Artificial Sequence
  Description of Artificial Sequence: Synthetic oligonucleotide
  Target: LAMA2; (-) strand; PAM type: YTN; PAM sequence: CTA
tctagataattactcaacgt

SEQ ID NO: 277915 - DNA, 20 bp, Artificial Sequence
  Description of Artificial Sequence: Synthetic oligonucleotide
  Target: LAMA2; (-) strand; PAM type: YTN; PAM sequence: TTA
gtcctatctagataattact

SEQ ID NO: 277916 - DNA, 20 bp, Artificial Sequence
  Description of Artificial Sequence: Synthetic oligonucleotide
  Target: LAMA2; (-) strand; PAM type: YTN; PAM sequence: TTA
tgggatgttagtcctatcta

SEQ ID NO: 277917 - DNA, 20 bp, Artificial Sequence
  Description of Artificial Sequence: Synthetic oligonucleotide
  Target: LAMA2; (-) strand; PAM type: YTN; PAM sequence: TTT
atgggatgttagtcctatct

SEQ ID NO: 277918 - DNA, 20 bp, Artificial Sequence
  Description of Artificial Sequence: Synthetic oligonucleotide
  Target: LAMA2; (-) strand; PAM type: YTN; PAM sequence: TTA
tatttatgggatgttagtcc

SEQ ID NO: 277919 - DNA, 20 bp, Artificial Sequence
  Description of Artificial Sequence: Synthetic oligonucleotide
  Target: LAMA2; (-) strand; PAM type: YTN; PAM sequence: CTT
atatttatgggatgttagtc

SEQ ID NO: 277920 - DNA, 20 bp, Artificial Sequence
  Description of Artificial Sequence: Synthetic oligonucleotide
  Target: LAMA2; (-) strand; PAM type: YTN; PAM sequence: TTA
tatcagatcttatatttatg

SEQ ID NO: 277921 - DNA, 20 bp, Artificial Sequence
  Description of Artificial Sequence: Synthetic oligonucleotide
  Target: LAMA2; (-) strand; PAM type: YTN; PAM sequence: TTT
atatcagatcttatatttat

SEQ ID NO: 277922 - DNA, 20 bp, Artificial Sequence
  Description of Artificial Sequence: Synthetic oligonucleotide
  Target: LAMA2; (-) strand; PAM type: YTN; PAM sequence: TTT
tatatcagatcttatattta

SEQ ID NO: 277923 - DNA, 20 bp, Artificial Sequence
  Description of Artificial Sequence: Synthetic oligonucleotide
  Target: LAMA2; (-) strand; PAM type: YTN; PAM sequence: CTT
ttatatcagatcttatattt

SEQ ID NO: 277924 - DNA, 20 bp, Artificial Sequence
  Description of Artificial Sequence: Synthetic oligonucleotide
  Target: LAMA2; (-) strand; PAM type: YTN; PAM sequence: CTA
tagcttttatatcagatctt

SEQ ID NO: 277925 - DNA, 20 bp, Artificial Sequence
  Description of Artificial Sequence: Synthetic oligonucleotide
  Target: LAMA2; (-) strand; PAM type: YTN; PAM sequence: TTG
agctatagcttttatatcag

SEQ ID NO: 277926 - DNA, 20 bp, Artificial Sequence
  Description of Artificial Sequence: Synthetic oligonucleotide
  Target: LAMA2; (-) strand; PAM type: YTN; PAM sequence: CTG
ttgagctatagcttttatat

SEQ ID NO: 277927 - DNA, 20 bp, Artificial Sequence
  Description of Artificial Sequence: Synthetic oligonucleotide
  Target: LAMA2; (-) strand; PAM type: YTN; PAM sequence: CTC
tgttgagctatagcttttat

SEQ ID NO: 277928 - DNA, 20 bp, Artificial Sequence
  Description of Artificial Sequence: Synthetic oligonucleotide
  Target: LAMA2; (-) strand; PAM type: YTN; PAM sequence: TTC
tctgttgagctatagctttt

SEQ ID NO: 277929 - DNA, 20 bp, Artificial Sequence
  Description of Artificial Sequence: Synthetic oligonucleotide
  Target: LAMA2; (-) strand; PAM type: YTN; PAM sequence: CTT
ctctgttgagctatagcttt

SEQ ID NO: 277930 - DNA, 20 bp, Artificial Sequence
  Description of Artificial Sequence: Synthetic oligonucleotide
  Target: LAMA2; (-) strand; PAM type: YTN; PAM sequence: TTC
ttctctgttgagctatagct

SEQ ID NO: 277931 - DNA, 20 bp, Artificial Sequence
  Description of Artificial Sequence: Synthetic oligonucleotide
  Target: LAMA2; (-) strand; PAM type: YTN; PAM sequence: CTC
attcttctctgttgagctat

SEQ ID NO: 277932 - DNA, 20 bp, Artificial Sequence
  Description of Artificial Sequence: Synthetic oligonucleotide
  Target: LAMA2; (-) strand; PAM type: YTN; PAM sequence: TTA
atctcattcttctctgttga

SEQ ID NO: 277933 - DNA, 20 bp, Artificial Sequence
  Description of Artificial Sequence: Synthetic oligonucleotide
  Target: LAMA2; (-) strand; PAM type: YTN; PAM sequence: TTT
aatctcattcttctctgttg

SEQ ID NO: 277934 - DNA, 20 bp, Artificial Sequence
  Description of Artificial Sequence: Synthetic oligonucleotide
  Target: LAMA2; (-) strand; PAM type: YTN; PAM sequence: TTA
ataatacatttaatctcatt

SEQ ID NO: 277935 - DNA, 20 bp, Artificial Sequence
  Description of Artificial Sequence: Synthetic oligonucleotide
  Target: LAMA2; (-) strand; PAM type: YTN; PAM sequence: CTT
aataatacatttaatctcat

SEQ ID NO: 277936 - DNA, 20 bp, Artificial Sequence
  Description of Artificial Sequence: Synthetic oligonucleotide
  Target: LAMA2; (-) strand; PAM type: YTN; PAM sequence: CTA
tacttaataatacatttaat

SEQ ID NO: 277937 - DNA, 20 bp, Artificial Sequence
  Description of Artificial Sequence: Synthetic oligonucleotide
  Target: LAMA2; (-) strand; PAM type: YTN; PAM sequence: TTC
tatacttaataatacattta

SEQ ID NO: 277938 - DNA, 20 bp, Artificial Sequence
  Description of Artificial Sequence: Synthetic oligonucleotide
  Target: LAMA2; (-) strand; PAM type: YTN; PAM sequence: CTT
ctatacttaataatacattt

SEQ ID NO: 277939 - DNA, 20 bp, Artificial Sequence
  Description of Artificial Sequence: Synthetic oligonucleotide
  Target: LAMA2; (-) strand; PAM type: YTN; PAM sequence: CTC
ttctatacttaataatacat

SEQ ID NO: 277940 - DNA, 20 bp, Artificial Sequence
  Description of Artificial Sequence: Synthetic oligonucleotide
  Target: LAMA2; (-) strand; PAM type: YTN; PAM sequence: TTG
aactcttctatacttaataa

SEQ ID NO: 277941 - DNA, 20 bp, Artificial Sequence
  Description of Artificial Sequence: Synthetic oligonucleotide
  Target: LAMA2; (-) strand; PAM type: YTN; PAM sequence: TTT
gaactcttctatacttaata

SEQ ID NO: 277942 - DNA, 20 bp, Artificial Sequence
  Description of Artificial Sequence: Synthetic oligonucleotide
  Target: LAMA2; (-) strand; PAM type: YTN; PAM sequence: CTT
tgaactcttctatacttaat

SEQ ID NO: 277943 - DNA, 20 bp, Artificial Sequence
  Description of Artificial Sequence: Synthetic oligonucleotide
  Target: LAMA2; (-) strand; PAM type: YTN; PAM sequence: TTA
agctttgaactcttctatac

SEQ ID NO: 277944 - DNA, 20 bp, Artificial Sequence
  Description of Artificial Sequence: Synthetic oligonucleotide
  Target: LAMA2; (-) strand; PAM type: YTN; PAM sequence: TTG
ttaagctttgaactcttcta

SEQ ID NO: 277945 - DNA, 20 bp, Artificial Sequence
  Description of Artificial Sequence: Synthetic oligonucleotide
  Target: LAMA2; (-) strand; PAM type: YTN; PAM sequence: CTG
tattgttaagctttgaactc

SEQ ID NO: 277946 - DNA, 20 bp, Artificial Sequence
  Description of Artificial Sequence: Synthetic oligonucleotide
  Target: LAMA2; (-) strand; PAM type: YTN; PAM sequence: TTC
tgtattgttaagctttgaac

SEQ ID NO: 277947 - DNA, 20 bp, Artificial Sequence
  Description of Artificial Sequence: Synthetic oligonucleotide
  Target: LAMA2; (-) strand; PAM type: YTN; PAM sequence: CTT
ctgtattgttaagctttgaa

SEQ ID NO: 277948 - DNA, 20 bp, Artificial Sequence
  Description of Artificial Sequence: Synthetic oligonucleotide
  Target: LAMA2; (-) strand; PAM type: YTN; PAM sequence: CTC
ttctgtattgttaagctttg

SEQ ID NO: 277949 - DNA, 20 bp, Artificial Sequence
  Description of Artificial Sequence: Synthetic oligonucleotide
  Target: LAMA2; (-) strand; PAM type: YTN; PAM sequence: CTC
aaaggagtagaggactcttc

SEQ ID NO: 277950 - DNA, 20 bp, Artificial Sequence
  Description of Artificial Sequence: Synthetic oligonucleotide
  Target: LAMA2; (-) strand; PAM type: YTN; PAM sequence: CTA
gactcaaaggagtagaggac

SEQ ID NO: 277951 - DNA, 20 bp, Artificial Sequence
  Description of Artificial Sequence: Synthetic oligonucleotide
  Target: LAMA2; (-) strand; PAM type: YTN; PAM sequence: TTA
tagggctagactcaaaggag

SEQ ID NO: 277952 - DNA, 20 bp, Artificial Sequence
  Description of Artificial Sequence: Synthetic oligonucleotide
  Target: LAMA2; (-) strand; PAM type: YTN; PAM sequence: TTT
atagggctagactcaaagga

SEQ ID NO: 277953 - DNA, 20 bp, Artificial Sequence
  Description of Artificial Sequence: Synthetic oligonucleotide
  Target: LAMA2; (-) strand; PAM type: YTN; PAM sequence: CTT
tatagggctagactcaaagg

SEQ ID NO: 277954 - DNA, 20 bp, Artificial Sequence
  Description of Artificial Sequence: Synthetic oligonucleotide
  Target: LAMA2; (-) strand; PAM type: YTN; PAM sequence: TTC
tttatagggctagactcaaa

SEQ ID NO: 277955 - DNA, 20 bp, Artificial Sequence
  Description of Artificial Sequence: Synthetic oligonucleotide
  Target: LAMA2; (-) strand; PAM type: YTN; PAM sequence: CTT
ctttatagggctagactcaa

SEQ ID NO: 277956 - DNA, 20 bp, Artificial Sequence
  Description of Artificial Sequence: Synthetic oligonucleotide
  Target: LAMA2; (-) strand; PAM type: YTN; PAM sequence: TTC
cttctttatagggctagact

SEQ ID NO: 277957 - DNA, 20 bp, Artificial Sequence
  Description of Artificial Sequence: Synthetic oligonucleotide
  Target: LAMA2; (-) strand; PAM type: YTN; PAM sequence: CTT
ccttctttatagggctagac

SEQ ID NO: 277958 - DNA, 20 bp, Artificial Sequence
  Description of Artificial Sequence: Synthetic oligonucleotide
  Target: LAMA2; (-) strand; PAM type: YTN; PAM sequence: TTC
ttccttctttatagggctag

SEQ ID NO: 277959 - DNA, 20 bp, Artificial Sequence
  Description of Artificial Sequence: Synthetic oligonucleotide
  Target: LAMA2; (-) strand; PAM type: YTN; PAM sequence: TTG
aaaacattcttccttcttta

SEQ ID NO: 277960 - DNA, 20 bp, Artificial Sequence
  Description of Artificial Sequence: Synthetic oligonucleotide
  Target: LAMA2; (-) strand; PAM type: YTN; PAM sequence: TTA
ttgaaaacattcttccttct

SEQ ID NO: 277961 - DNA, 20 bp, Artificial Sequence
  Description of Artificial Sequence: Synthetic oligonucleotide
  Target: LAMA2; (-) strand; PAM type: YTN; PAM sequence: TTA
agttattgaaaacattcttc

SEQ ID NO: 277962 - DNA, 20 bp, Artificial Sequence
  Description of Artificial Sequence: Synthetic oligonucleotide
  Target: LAMA2; (-) strand; PAM type: YTN; PAM sequence: TTT
aagttattgaaaacattctt

SEQ ID NO: 277963 - DNA, 20 bp, Artificial Sequence
  Description of Artificial Sequence: Synthetic oligonucleotide
  Target: LAMA2; (-) strand; PAM type: YTN; PAM sequence: TTT
taagttattgaaaacattct

SEQ ID NO: 277964 - DNA, 20 bp, Artificial Sequence
  Description of Artificial Sequence: Synthetic oligonucleotide
  Target: LAMA2; (-) strand; PAM type: YTN; PAM sequence: CTT
ttaagttattgaaaacattc

SEQ ID NO: 277965 - DNA, 20 bp, Artificial Sequence
  Description of Artificial Sequence: Synthetic oligonucleotide
  Target: LAMA2; (-) strand; PAM type: YTN; PAM sequence: TTC
cttttaagttattgaaaaca

SEQ ID NO: 277966 - DNA, 20 bp, Artificial Sequence
  Description of Artificial Sequence: Synthetic oligonucleotide
  Target: LAMA2; (-) strand; PAM type: YTN; PAM sequence: TTT
ccttttaagttattgaaaac

SEQ ID NO: 277967 - DNA, 20 bp, Artificial Sequence
  Description of Artificial Sequence: Synthetic oligonucleotide
  Target: LAMA2; (-) strand; PAM type: YTN; PAM sequence: TTT
tccttttaagttattgaaaa

SEQ ID NO: 277968 - DNA, 20 bp, Artificial Sequence
  Description of Artificial Sequence: Synthetic oligonucleotide
  Target: LAMA2; (-) strand; PAM type: YTN; PAM sequence: TTT
ttccttttaagttattgaaa

SEQ ID NO: 277969 - DNA, 20 bp, Artificial Sequence
  Description of Artificial Sequence: Synthetic oligonucleotide
  Target: LAMA2; (-) strand; PAM type: YTN; PAM sequence: TTG
tttttccttttaagttattg

SEQ ID NO: 277970 - DNA, 20 bp, Artificial Sequence
  Description of Artificial Sequence: Synthetic oligonucleotide
  Target: LAMA2; (-) strand; PAM type: YTN; PAM sequence: TTT
gtttttccttttaagttatt

SEQ ID NO: 277971 - DNA, 20 bp, Artificial Sequence
  Description of Artificial Sequence: Synthetic oligonucleotide
  Target: LAMA2; (-) strand; PAM type: YTN; PAM sequence: CTT
tgtttttccttttaagttat

SEQ ID NO: 277972 - DNA, 20 bp, Artificial Sequence
  Description of Artificial Sequence: Synthetic oligonucleotide
  Target: LAMA2; (-) strand; PAM type: YTN; PAM sequence: TTC
tttgtttttccttttaagtt

SEQ ID NO: 277973 - DNA, 20 bp, Artificial Sequence
  Description of Artificial Sequence: Synthetic oligonucleotide
  Target: LAMA2; (-) strand; PAM type: YTN; PAM sequence: TTT
ctttgtttttccttttaagt

SEQ ID NO: 277974 - DNA, 20 bp, Artificial Sequence
  Description of Artificial Sequence: Synthetic oligonucleotide
  Target: LAMA2; (-) strand; PAM type: YTN; PAM sequence: TTG
tttctttgtttttcctttta

SEQ ID NO: 277975 - DNA, 20 bp, Artificial Sequence
  Description of Artificial Sequence: Synthetic oligonucleotide
  Target: LAMA2; (-) strand; PAM type: YTN; PAM sequence: CTG
caaatgtataaattgtttct

SEQ ID NO: 277976 - DNA, 20 bp, Artificial Sequence
  Description of Artificial Sequence: Synthetic oligonucleotide
  Target: LAMA2; (-) strand; PAM type: YTN; PAM sequence: CTC
ctgcaaatgtataaattgtt

SEQ ID NO: 277977 - DNA, 20 bp, Artificial Sequence
  Description of Artificial Sequence: Synthetic oligonucleotide
  Target: LAMA2; (-) strand; PAM type: YTN; PAM sequence: TTC
tcctgcaaatgtataaattg

SEQ ID NO: 277978 - DNA, 20 bp, Artificial Sequence
  Description of Artificial Sequence: Synthetic oligonucleotide
  Target: LAMA2; (-) strand; PAM type: YTN; PAM sequence: TTT
ctcctgcaaatgtataaatt

SEQ ID NO: 277979 - DNA, 20 bp, Artificial Sequence
  Description of Artificial Sequence: Synthetic oligonucleotide
  Target: LAMA2; (-) strand; PAM type: YTN; PAM sequence: TTT
tctcctgcaaatgtataaat

SEQ ID NO: 277980 - DNA, 20 bp, Artificial Sequence
  Description of Artificial Sequence: Synthetic oligonucleotide
  Target: LAMA2; (-) strand; PAM type: YTN; PAM sequence: CTT
ttctcctgcaaatgtataaa

SEQ ID NO: 277981 - DNA, 20 bp, Artificial Sequence
  Description of Artificial Sequence: Synthetic oligonucleotide
  Target: LAMA2; (-) strand; PAM type: YTN; PAM sequence: TTC
cttttctcctgcaaatgtat

SEQ ID NO: 277982 - DNA, 20 bp, Artificial Sequence
  Description of Artificial Sequence: Synthetic oligonucleotide
  Target: LAMA2; (-) strand; PAM type: YTN; PAM sequence: TTT
ccttttctcctgcaaatgta

SEQ ID NO: 277983 - DNA, 20 bp, Artificial Sequence
  Description of Artificial Sequence: Synthetic oligonucleotide
  Target: LAMA2; (-) strand; PAM type: YTN; PAM sequence: TTT
tccttttctcctgcaaatgt

SEQ ID NO: 277984 - DNA, 20 bp, Artificial Sequence
  Description of Artificial Sequence: Synthetic oligonucleotide
  Target: LAMA2; (-) strand; PAM type: YTN; PAM sequence: CTT
ttccttttctcctgcaaatg

SEQ ID NO: 277985 - DNA, 20 bp, Artificial Sequence
  Description of Artificial Sequence: Synthetic oligonucleotide
  Target: LAMA2; (-) strand; PAM type: YTN; PAM sequence: TTG
accttttccttttctcctgc

SEQ ID NO: 277986 - DNA, 20 bp, Artificial Sequence
  Description of Artificial Sequence: Synthetic oligonucleotide
  Target: LAMA2; (-) strand; PAM type: YTN; PAM sequence: CTT
gaccttttccttttctcctg

SEQ ID NO: 277987 - DNA, 20 bp, Artificial Sequence
  Description of Artificial Sequence: Synthetic oligonucleotide
  Target: LAMA2; (-) strand; PAM type: YTN; PAM sequence: CTA
cttgaccttttccttttctc

SEQ ID NO: 277988 - DNA, 20 bp, Artificial Sequence
  Description of Artificial Sequence: Synthetic oligonucleotide
  Target: LAMA2; (-) strand; PAM type: YTN; PAM sequence: CTA
ctacttgaccttttcctttt

SEQ ID NO: 277989 - DNA, 20 bp, Artificial Sequence
  Description of Artificial Sequence: Synthetic oligonucleotide
  Target: LAMA2; (-) strand; PAM type: YTN; PAM sequence: CTC
tactacttgaccttttcctt

SEQ ID NO: 277990 - DNA, 20 bp, Artificial Sequence
  Description of Artificial Sequence: Synthetic oligonucleotide
  Target: LAMA2; (-) strand; PAM type: YTN; PAM sequence: TTG
ctctactacttgaccttttc

SEQ ID NO: 277991 - DNA, 20 bp, Artificial Sequence
  Description of Artificial Sequence: Synthetic oligonucleotide
  Target: LAMA2; (-) strand; PAM type: YTN; PAM sequence: TTG
gttgctctactacttgacct

SEQ ID NO: 277992 - DNA, 20 bp, Artificial Sequence
  Description of Artificial Sequence: Synthetic oligonucleotide
  Target: LAMA2; (-) strand; PAM type: YTN; PAM sequence: TTC
atagtggtcgttggttgctc

SEQ ID NO: 277993 - DNA, 20 bp, Artificial Sequence
  Description of Artificial Sequence: Synthetic oligonucleotide
  Target: LAMA2; (-) strand; PAM type: YTN; PAM sequence: CTT
catagtggtcgttggttgct

SEQ ID NO: 277994 - DNA, 20 bp, Artificial Sequence
  Description of Artificial Sequence: Synthetic oligonucleotide
  Target: LAMA2; (-) strand; PAM type: YTN; PAM sequence: TTC
ttcatagtggtcgttggttg

SEQ ID NO: 277995 - DNA, 20 bp, Artificial Sequence
  Description of Artificial Sequence: Synthetic oligonucleotide
  Target: LAMA2; (-) strand; PAM type: YTN; PAM sequence: TTT
cttcatagtggtcgttggtt

SEQ ID NO: 277996 - DNA, 20 bp, Artificial Sequence
  Description of Artificial Sequence: Synthetic oligonucleotide
  Target: LAMA2; (-) strand; PAM type: YTN; PAM sequence: CTT
tcttcatagtggtcgttggt

SEQ ID NO: 277997 - DNA, 20 bp, Artificial Sequence
  Description of Artificial Sequence: Synthetic oligonucleotide
  Target: LAMA2; (-) strand; PAM type: YTN; PAM sequence: CTC
cactttcttcatagtggtcg

SEQ ID NO: 277998 - DNA, 20 bp, Artificial Sequence
  Description of Artificial Sequence: Synthetic oligonucleotide
  Target: LAMA2; (-) strand; PAM type: YTN; PAM sequence: CTG
acctccactttcttcatagt

SEQ ID NO: 277999 - DNA, 20 bp, Artificial Sequence
  Description of Artificial Sequence: Synthetic oligonucleotide
  Target: LAMA2; (-) strand; PAM type: YTN; PAM sequence: TTG
tctgacctccactttcttca

SEQ ID NO: 278000 - DNA, 20 bp, Artificial Sequence
  Description of Artificial Sequence: Synthetic oligonucleotide
  Target: LAMA2; (-) strand; PAM type: YTN; PAM sequence: CTC
aaattgtctgacctccactt

SEQ ID NO: 278001 - DNA, 20 bp, Artificial Sequence
  Description of Artificial Sequence: Synthetic oligonucleotide
  Target: LAMA2; (-) strand; PAM type: YTN; PAM sequence: TTC
tcaaattgtctgacctccac

SEQ ID NO: 278002 - DNA, 20 bp, Artificial Sequence
  Description of Artificial Sequence: Synthetic oligonucleotide
  Target: LAMA2; (-) strand; PAM type: YTN; PAM sequence: CTT
ctcaaattgtctgacctcca

SEQ ID NO: 278003 - DNA, 20 bp, Artificial Sequence
  Description of Artificial Sequence: Synthetic oligonucleotide
  Target: LAMA2; (-) strand; PAM type: YTN; PAM sequence: TTC
ttctcaaattgtctgacctc

SEQ ID NO: 278004 - DNA, 20 bp, Artificial Sequence
  Description of Artificial Sequence: Synthetic oligonucleotide
  Target: LAMA2; (-) strand; PAM type: YTN; PAM sequence: TTT
cttctcaaattgtctgacct

SEQ ID NO: 278005 - DNA, 20 bp, Artificial Sequence
  Description of Artificial Sequence: Synthetic oligonucleotide
  Target: LAMA2; (-) strand; PAM type: YTN; PAM sequence: TTT
tcttctcaaattgtctgacc

SEQ ID NO: 278006 - DNA, 20 bp, Artificial Sequence
  Description of Artificial Sequence: Synthetic oligonucleotide
  Target: LAMA2; (-) strand; PAM type: YTN; PAM sequence: TTT
ttcttctcaaattgtctgac

SEQ ID NO: 278007 - DNA, 20 bp, Artificial Sequence
  Description of Artificial Sequence: Synthetic oligonucleotide
  Target: LAMA2; (-) strand; PAM type: YTN; PAM sequence: TTT
tttcttctcaaattgtctga

SEQ ID NO: 278008 - DNA, 20 bp, Artificial Sequence
  Description of Artificial Sequence: Synthetic oligonucleotide
  Target: LAMA2; (-) strand; PAM type: YTN; PAM sequence: TTT
ttttcttctcaaattgtctg

SEQ ID NO: 278009 - DNA, 20 bp, Artificial Sequence
  Description of Artificial Sequence: Synthetic oligonucleotide
  Target: LAMA2; (-) strand; PAM type: YTN; PAM sequence: CTT
tttttcttctcaaattgtct

SEQ ID NO: 278010 - DNA, 20 bp, Artificial Sequence
  Description of Artificial Sequence: Synthetic oligonucleotide
  Target: LAMA2; (-) strand; PAM type: YTN; PAM sequence: TTC
aatgctttttttcttctcaa

SEQ ID NO: 278011 - DNA, 20 bp, Artificial Sequence
  Description of Artificial Sequence: Synthetic oligonucleotide
  Target: LAMA2; (-) strand; PAM type: YTN; PAM sequence: TTT
caatgctttttttcttctca

SEQ ID NO: 278012 - DNA, 20 bp, Artificial Sequence
  Description of Artificial Sequence: Synthetic oligonucleotide
  Target: LAMA2; (-) strand; PAM type: YTN; PAM sequence: TTT
tcaatgctttttttcttctc

SEQ ID NO: 278013 - DNA, 20 bp, Artificial Sequence
  Description of Artificial Sequence: Synthetic oligonucleotide
  Target: LAMA2; (-) strand; PAM type: YTN; PAM sequence: TTA
tggtattttcaatgcttttt

SEQ ID NO: 278014 - DNA, 20 bp, Artificial Sequence
  Description of Artificial Sequence: Synthetic oligonucleotide
  Target: LAMA2; (-) strand; PAM type: YTN; PAM sequence: CTT
atggtattttcaatgctttt

SEQ ID NO: 278015 - DNA, 20 bp, Artificial Sequence
  Description of Artificial Sequence: Synthetic oligonucleotide
  Target: LAMA2; (-) strand; PAM type: YTN; PAM sequence: TTC
ttatggtattttcaatgctt

SEQ ID NO: 278016 - DNA, 20 bp, Artificial Sequence
  Description of Artificial Sequence: Synthetic oligonucleotide
  Target: LAMA2; (-) strand; PAM type: YTN; PAM sequence: TTT
cttatggtattttcaatgct

SEQ ID NO: 278017 - DNA, 20 bp, Artificial Sequence
  Description of Artificial Sequence: Synthetic oligonucleotide
  Target: LAMA2; (-) strand; PAM type: YTN; PAM sequence: TTT
tcttatggtattttcaatgc

SEQ ID NO: 278018 - DNA, 20 bp, Artificial Sequence
  Description of Artificial Sequence: Synthetic oligonucleotide
  Target: LAMA2; (-) strand; PAM type: YTN; PAM sequence: CTT
ttcttatggtattttcaatg

SEQ ID NO: 278019 - DNA, 20 bp, Artificial Sequence
  Description of Artificial Sequence: Synthetic oligonucleotide
  Target: LAMA2; (-) strand; PAM type: YTN; PAM sequence: TTC
ttttcttatggtattttcaa

SEQ ID NO: 278020 - DNA, 20 bp, Artificial Sequence
  Description of Artificial Sequence: Synthetic oligonucleotide
  Target: LAMA2; (-) strand; PAM type: YTN; PAM sequence: TTT
cttttcttatggtattttca

SEQ ID NO: 278021 - DNA, 20 bp, Artificial Sequence
  Description of Artificial Sequence: Synthetic oligonucleotide
  Target: LAMA2; (-) strand; PAM type: YTN; PAM sequence: TTG
tttcttttcttatggtattt

SEQ ID NO: 278022 - DNA, 20 bp, Artificial Sequence
  Description of Artificial Sequence: Synthetic oligonucleotide
  Target: LAMA2; (-) strand; PAM type: YTN; PAM sequence: TTT
gtttcttttcttatggtatt

SEQ ID NO: 278023 - DNA, 20 bp, Artificial Sequence
  Description of Artificial Sequence: Synthetic oligonucleotide
  Target: LAMA2; (-) strand; PAM type: YTN; PAM sequence: CTT
tgtttcttttcttatggtat

SEQ ID NO: 278024 - DNA, 20 bp, Artificial Sequence
  Description of Artificial Sequence: Synthetic oligonucleotide
  Target: LAMA2; (-) strand; PAM type: YTN; PAM sequence: TTC
tttgtttcttttcttatggt

SEQ ID NO: 278025 - DNA, 20 bp, Artificial Sequence
  Description of Artificial Sequence: Synthetic oligonucleotide
  Target: LAMA2; (-) strand; PAM type: YTN; PAM sequence: TTT
ctttgtttcttttcttatgg

SEQ ID NO: 278026 - DNA, 20 bp, Artificial Sequence
  Description of Artificial Sequence: Synthetic oligonucleotide
  Target: LAMA2; (-) strand; PAM type: YTN; PAM sequence: CTA
tcatttctttgtttcttttc

SEQ ID NO: 278027 - DNA, 20 bp, Artificial Sequence
  Description of Artificial Sequence: Synthetic oligonucleotide
  Target: LAMA2; (-) strand; PAM type: YTN; PAM sequence: TTC
tatcatttctttgtttcttt

SEQ ID NO: 278028 - DNA, 20 bp, Artificial Sequence
  Description of Artificial Sequence: Synthetic oligonucleotide
  Target: LAMA2; (-) strand; PAM type: YTN; PAM sequence: TTT
ctatcatttctttgtttctt

SEQ ID NO: 278029 - DNA, 20 bp, Artificial Sequence
  Description of Artificial Sequence: Synthetic oligonucleotide
  Target: LAMA2; (-) strand; PAM type: YTN; PAM sequence: TTA
tttctatcatttctttgttt

SEQ ID NO: 278030 - DNA, 20 bp, Artificial Sequence
  Description of Artificial Sequence: Synthetic oligonucleotide
  Target: LAMA2; (-) strand; PAM type: YTN; PAM sequence: TTG
gaggttatttctatcatttc

SEQ ID NO: 278031 - DNA, 20 bp, Artificial Sequence
  Description of Artificial Sequence: Synthetic oligonucleotide
  Target: LAMA2; (-) strand; PAM type: YTN; PAM sequence: CTT
ggaggttatttctatcattt

SEQ ID NO: 278032 - DNA, 20 bp, Artificial Sequence
  Description of Artificial Sequence: Synthetic oligonucleotide
  Target: LAMA2; (-) strand; PAM type: YTN; PAM sequence: TTA
tgcttggaggttatttctat

SEQ ID NO: 278033 - DNA, 20 bp, Artificial Sequence
  Description of Artificial Sequence: Synthetic oligonucleotide
  Target: LAMA2; (-) strand; PAM type: YTN; PAM sequence: TTA
attatgcttggaggttattt

SEQ ID NO: 278034 - DNA, 20 bp, Artificial Sequence
  Description of Artificial Sequence: Synthetic oligonucleotide
  Target: LAMA2; (-) strand; PAM type: YTN; PAM sequence: CTT
aattatgcttggaggttatt

SEQ ID NO: 278035 - DNA, 20 bp, Artificial Sequence
  Description of Artificial Sequence: Synthetic oligonucleotide
  Target: LAMA2; (-) strand; PAM type: YTN; PAM sequence: TTG
tcttaattatgcttggaggt

SEQ ID NO: 278036 - DNA, 20 bp, Artificial Sequence
  Description of Artificial Sequence: Synthetic oligonucleotide
  Target: LAMA2; (-) strand; PAM type: YTN; PAM sequence: TTA
aacattgtcttaattatgct

SEQ ID NO: 278037 - DNA, 20 bp, Artificial Sequence
  Description of Artificial Sequence: Synthetic oligonucleotide
  Target: LAMA2; (-) strand; PAM type: YTN; PAM sequence: TTT
aaacattgtcttaattatgc

SEQ ID NO: 278038 - DNA, 20 bp, Artificial Sequence
  Description of Artificial Sequence: Synthetic oligonucleotide
  Target: LAMA2; (-) strand; PAM type: YTN; PAM sequence: TTT
taaacattgtcttaattatg

SEQ ID NO: 278039 - DNA, 20 bp, Artificial Sequence
  Description of Artificial Sequence: Synthetic oligonucleotide
  Target: LAMA2; (-) strand; PAM type: YTN; PAM sequence: TTG
attttaaacattgtcttaat

SEQ ID NO: 278040 - DNA, 20 bp, Artificial Sequence
  Description of Artificial Sequence: Synthetic oligonucleotide
  Target: LAMA2; (-) strand; PAM type: YTN; PAM sequence: TTA
aaaaatcaaagttgatttta

SEQ ID NO: 278041 - DNA, 20 bp, Artificial Sequence
  Description of Artificial Sequence: Synthetic oligonucleotide
  Target: LAMA2; (-) strand; PAM type: YTN; PAM sequence: TTT
aaaaaatcaaagttgatttt

SEQ ID NO: 278042 - DNA, 20 bp, Artificial Sequence
  Description of Artificial Sequence: Synthetic oligonucleotide
  Target: LAMA2; (-) strand; PAM type: YTN; PAM sequence: TTT
taaaaaatcaaagttgattt

SEQ ID NO: 278043 - DNA, 20 bp, Artificial Sequence
  Description of Artificial Sequence: Synthetic oligonucleotide
  Target: LAMA2; (-) strand; PAM type: YTN; PAM sequence: TTT
ttaaaaaatcaaagttgatt

SEQ ID NO: 278044 - DNA, 20 bp, Artificial Sequence
  Description of Artificial Sequence: Synthetic oligonucleotide
  Target: LAMA2; (-) strand; PAM type: YTN; PAM sequence: TTA
tatataggaagacaagtaaa

SEQ ID NO: 278045 - DNA, 20 bp, Artificial Sequence
  Description of Artificial Sequence: Synthetic oligonucleotide
  Target: LAMA2; (-) strand; PAM type: YTN; PAM sequence: TTT
atatataggaagacaagtaa

SEQ ID NO: 278046 - DNA, 20 bp, Artificial Sequence
  Description of Artificial Sequence: Synthetic oligonucleotide
  Target: LAMA2; (-) strand; PAM type: YTN; PAM sequence: CTA
tgtgtgtttatatataggaa

SEQ ID NO: 278047 - DNA, 20 bp, Artificial Sequence
  Description of Artificial Sequence: Synthetic oligonucleotide
  Target: LAMA2; (-) strand; PAM type: YTN; PAM sequence: TTG
tctatgtgtgtttatatata

SEQ ID NO: 278048 - DNA, 20 bp, Artificial Sequence
  Description of Artificial Sequence: Synthetic oligonucleotide
  Target: LAMA2; (-) strand; PAM type: YTN; PAM sequence: TTG
attgtctatgtgtgtttata

SEQ ID NO: 278049 - DNA, 20 bp, Artificial Sequence
  Description of Artificial Sequence: Synthetic oligonucleotide
  Target: LAMA2; (-) strand; PAM type: YTN; PAM sequence: CTT
gattgtctatgtgtgtttat

SEQ ID NO: 278050 - DNA, 20 bp, Artificial Sequence
  Description of Artificial Sequence: Synthetic oligonucleotide
  Target: LAMA2; (-) strand; PAM type: YTN; PAM sequence: TTC
ttgattgtctatgtgtgttt

SEQ ID NO: 278051 - DNA, 20 bp, Artificial Sequence
  Description of Artificial Sequence: Synthetic oligonucleotide
  Target: LAMA2; (-) strand; PAM type: YTN; PAM sequence: TTC
agtgtgattcttgattgtct

SEQ ID NO: 278052 - DNA, 20 bp, Artificial Sequence
  Description of Artificial Sequence: Synthetic oligonucleotide
  Target: LAMA2; (-) strand; PAM type: YTN; PAM sequence: TTT
cagtgtgattcttgattgtc

SEQ ID NO: 278053 - DNA, 20 bp, Artificial Sequence
  Description of Artificial Sequence: Synthetic oligonucleotide
  Target: LAMA2; (-) strand; PAM type: YTN; PAM sequence: CTT
tcagtgtgattcttgattgt

SEQ ID NO: 278054 - DNA, 20 bp, Artificial Sequence
  Description of Artificial Sequence: Synthetic oligonucleotide
  Target: LAMA2; (-) strand; PAM type: YTN; PAM sequence: TTC
ctttcagtgtgattcttgat

SEQ ID NO: 278055 - DNA, 20 bp, Artificial Sequence
  Description of Artificial Sequence: Synthetic oligonucleotide
  Target: LAMA2; (-) strand; PAM type: YTN; PAM sequence: TTT
cctttcagtgtgattcttga

SEQ ID NO: 278056 - DNA, 20 bp, Artificial Sequence
  Description of Artificial Sequence: Synthetic oligonucleotide
  Target: LAMA2; (-) strand; PAM type: YTN; PAM sequence: TTT
tcctttcagtgtgattcttg

SEQ ID NO: 278057 - DNA, 20 bp, Artificial Sequence
  Description of Artificial Sequence: Synthetic oligonucleotide
  Target: LAMA2; (-) strand; PAM type: YTN; PAM sequence: CTC
atattttcctttcagtgtga

SEQ ID NO: 278058 - DNA, 20 bp, Artificial Sequence
  Description of Artificial Sequence: Synthetic oligonucleotide
  Target: LAMA2; (-) strand; PAM type: YTN; PAM sequence: CTC
actcatattttcctttcagt

SEQ ID NO: 278059 - DNA, 20 bp, Artificial Sequence
  Description of Artificial Sequence: Synthetic oligonucleotide
  Target: LAMA2; (-) strand; PAM type: YTN; PAM sequence: TTC
tcactcatattttcctttca

SEQ ID NO: 278060 - DNA, 20 bp, Artificial Sequence
  Description of Artificial Sequence: Synthetic oligonucleotide
  Target: LAMA2; (-) strand; PAM type: YTN; PAM sequence: CTT
ctcactcatattttcctttc

SEQ ID NO: 278061 - DNA, 20 bp, Artificial Sequence
  Description of Artificial Sequence: Synthetic oligonucleotide
  Target: LAMA2; (-) strand; PAM type: YTN; PAM sequence: TTC
cttctcactcatattttcct

SEQ ID NO: 278062 - DNA, 20 bp, Artificial Sequence
  Description of Artificial Sequence: Synthetic oligonucleotide
  Target: LAMA2; (-) strand; PAM type: YTN; PAM sequence: CTT
ccttctcactcatattttcc

SEQ ID NO: 278063 - DNA, 20 bp, Artificial Sequence
  Description of Artificial Sequence: Synthetic oligonucleotide
  Target: LAMA2; (-) strand; PAM type: YTN; PAM sequence: TTA
taaaggatccacttccttct

SEQ ID NO: 278064 - DNA, 20 bp, Artificial Sequence
  Description of Artificial Sequence: Synthetic oligonucleotide
  Target: LAMA2; (-) strand; PAM type: YTN; PAM sequence: CTT
ataaaggatccacttccttc

SEQ ID NO: 278065 - DNA, 20 bp, Artificial Sequence
  Description of Artificial Sequence: Synthetic oligonucleotide
  Target: LAMA2; (-) strand; PAM type: YTN; PAM sequence: CTG
cttataaaggatccacttcc

SEQ ID NO: 278066 - DNA, 20 bp, Artificial Sequence
  Description of Artificial Sequence: Synthetic oligonucleotide
  Target: LAMA2; (-) strand; PAM type: YTN; PAM sequence: CTC
ctgcttataaaggatccact

SEQ ID NO: 278067 - DNA, 20 bp, Artificial Sequence
  Description of Artificial Sequence: Synthetic oligonucleotide
  Target: LAMA2; (-) strand; PAM type: YTN; PAM sequence: TTC
tcctgcttataaaggatcca

SEQ ID NO: 278068 - DNA, 20 bp, Artificial Sequence
  Description of Artificial Sequence: Synthetic oligonucleotide
  Target: LAMA2; (-) strand; PAM type: YTN; PAM sequence: TTT
ctcctgcttataaaggatcc

SEQ ID NO: 278069 - DNA, 20 bp, Artificial Sequence
  Description of Artificial Sequence: Synthetic oligonucleotide
  Target: LAMA2; (-) strand; PAM type: YTN; PAM sequence: CTT
tctcctgcttataaaggatc

SEQ ID NO: 278070 - DNA, 20 bp, Artificial Sequence
  Description of Artificial Sequence: Synthetic oligonucleotide
  Target: LAMA2; (-) strand; PAM type: YTN; PAM sequence: TTA
gctttctcctgcttataaag

SEQ ID NO: 278071 - DNA, 20 bp, Artificial Sequence
  Description of Artificial Sequence: Synthetic oligonucleotide
  Target: LAMA2; (-) strand; PAM type: YTN; PAM sequence: CTG
cagtacaaacaaatcgtatt

SEQ ID NO: 278072 - DNA, 20 bp, Artificial Sequence
  Description of Artificial Sequence: Synthetic oligonucleotide
  Target: LAMA2; (-) strand; PAM type: YTN; PAM sequence: TTA
caaaataatactgcagtaca

SEQ ID NO: 278073 - DNA, 20 bp, Artificial Sequence
  Description of Artificial Sequence: Synthetic oligonucleotide
  Target: LAMA2; (-) strand; PAM type: YTN; PAM sequence: TTT
acaaaataatactgcagtac

SEQ ID NO: 278074 - DNA, 20 bp, Artificial Sequence
  Description of Artificial Sequence: Synthetic oligonucleotide
  Target: LAMA2; (-) strand; PAM type: YTN; PAM sequence: CTT
tacaaaataatactgcagta

SEQ ID NO: 278075 - DNA, 20 bp, Artificial Sequence
  Description of Artificial Sequence: Synthetic oligonucleotide
  Target: LAMA2; (-) strand; PAM type: YTN; PAM sequence: CTC
tttacaaaataatactgcag

SEQ ID NO: 278076 - DNA, 20 bp, Artificial Sequence
  Description of Artificial Sequence: Synthetic oligonucleotide
  Target: LAMA2; (-) strand; PAM type: YTN; PAM sequence: TTA
ctctttacaaaataatactg

SEQ ID NO: 278077 - DNA, 20 bp, Artificial Sequence
  Description of Artificial Sequence: Synthetic oligonucleotide
  Target: LAMA2; (-) strand; PAM type: YTN; PAM sequence: CTA
ttactctttacaaaataata

SEQ ID NO: 278078 - DNA, 20 bp, Artificial Sequence
  Description of Artificial Sequence: Synthetic oligonucleotide
  Target: LAMA2; (-) strand; PAM type: YTN; PAM sequence: TTA
tgcaagacaagtagctatta

SEQ ID NO: 278079 - DNA, 20 bp, Artificial Sequence
  Description of Artificial Sequence: Synthetic oligonucleotide
  Target: LAMA2; (-) strand; PAM type: YTN; PAM sequence: TTA
gttatgcaagacaagtagct

SEQ ID NO: 278080 - DNA, 20 bp, Artificial Sequence
  Description of Artificial Sequence: Synthetic oligonucleotide
  Target: LAMA2; (-) strand; PAM type: YTN; PAM sequence: TTA
aagaaattagttatgcaaga

SEQ ID NO: 278081 - DNA, 20 bp, Artificial Sequence
  Description of Artificial Sequence: Synthetic oligonucleotide
  Target: LAMA2; (-) strand; PAM type: YTN; PAM sequence: TTT
aaagaaattagttatgcaag

SEQ ID NO: 278082 - DNA, 20 bp, Artificial Sequence
  Description of Artificial Sequence: Synthetic oligonucleotide
  Target: LAMA2; (-) strand; PAM type: YTN; PAM sequence: CTG
atatttaaagaaattagtta

SEQ ID NO: 278083 - DNA, 20 bp, Artificial Sequence
  Description of Artificial Sequence: Synthetic oligonucleotide
  Target: LAMA2; (-) strand; PAM type: YTN; PAM sequence: TTC
tgatatttaaagaaattagt

SEQ ID NO: 278084 - DNA, 20 bp, Artificial Sequence
  Description of Artificial Sequence: Synthetic oligonucleotide
  Target: LAMA2; (-) strand; PAM type: YTN; PAM sequence: TTC
attctgatatttaaagaaat

SEQ ID NO: 278085 - DNA, 20 bp, Artificial Sequence
  Description of Artificial Sequence: Synthetic oligonucleotide
  Target: LAMA2; (-) strand; PAM type: YTN; PAM sequence: TTT
cattctgatatttaaagaaa

SEQ ID NO: 278086 - DNA, 20 bp, Artificial Sequence
  Description of Artificial Sequence: Synthetic oligonucleotide
  Target: LAMA2; (-) strand; PAM type: YTN; PAM sequence: TTA
aaataacatttcattctgat

SEQ ID NO: 278087 - DNA, 20 bp, Artificial Sequence
  Description of Artificial Sequence: Synthetic oligonucleotide
  Target: LAMA2; (-) strand; PAM type: YTN; PAM sequence: CTT
aaaataacatttcattctga

SEQ ID NO: 278088 - DNA, 20 bp, Artificial Sequence
  Description of Artificial Sequence: Synthetic oligonucleotide
  Target: LAMA2; (-) strand; PAM type: YTN; PAM sequence: TTC
ttaaaataacatttcattct

SEQ ID NO: 278089 - DNA, 20 bp, Artificial Sequence
  Description of Artificial Sequence: Synthetic oligonucleotide
  Target: LAMA2; (-) strand; PAM type: YTN; PAM sequence: CTA
aattcttaaaataacatttc

SEQ ID NO: 278090 - DNA, 20 bp, Artificial Sequence
  Description of Artificial Sequence: Synthetic oligonucleotide
  Target: LAMA2; (-) strand; PAM type: YTN; PAM sequence: TTC
atgatgtctaaattcttaaa

SEQ ID NO: 278091 - DNA, 20 bp, Artificial Sequence
  Description of Artificial Sequence: Synthetic oligonucleotide
  Target: LAMA2; (-) strand; PAM type: YTN; PAM sequence: TTT
catgatgtctaaattcttaa

SEQ ID NO: 278092 - DNA, 20 bp, Artificial Sequence
  Description of Artificial Sequence: Synthetic oligonucleotide
  Target: LAMA2; (-) strand; PAM type: YTN; PAM sequence: TTA
tttcatgatgtctaaattct

SEQ ID NO: 278093 - DNA, 20 bp, Artificial Sequence
  Description of Artificial Sequence: Synthetic oligonucleotide
  Target: LAMA2; (-) strand; PAM type: YTN; PAM sequence: TTG
ttatttcatgatgtctaaat

SEQ ID NO: 278094 - DNA, 20 bp, Artificial Sequence
  Description of Artificial Sequence: Synthetic oligonucleotide
  Target: LAMA2; (-) strand; PAM type: YTN; PAM sequence: TTT
gttatttcatgatgtctaaa

SEQ ID NO: 278095 - DNA, 20 bp, Artificial Sequence
  Description of Artificial Sequence: Synthetic oligonucleotide
  Target: LAMA2; (-) strand; PAM type: YTN; PAM sequence: CTC
acccgacaccaatagaaaaa

SEQ ID NO: 278096 - DNA, 20 bp, Artificial Sequence
  Description of Artificial Sequence: Synthetic oligonucleotide
  Target: LAMA2; (-) strand; PAM type: YTN; PAM sequence: TTC
ctcacccgacaccaatagaa

SEQ ID NO: 278097 - DNA, 20 bp, Artificial Sequence
  Description of Artificial Sequence: Synthetic oligonucleotide
  Target: LAMA2; (-) strand; PAM type: YTN; PAM sequence: TTT
cctcacccgacaccaataga

SEQ ID NO: 278098 - DNA, 20 bp, Artificial Sequence
  Description of Artificial Sequence: Synthetic oligonucleotide
  Target: LAMA2; (-) strand; PAM type: YTN; PAM sequence: CTT
tcctcacccgacaccaatag

SEQ ID NO: 278099 - DNA, 20 bp, Artificial Sequence
  Description of Artificial Sequence: Synthetic oligonucleotide
  Target: LAMA2; (-) strand; PAM type: YTN; PAM sequence: TTA
tagtactttcctcacccgac

SEQ ID NO: 278100 - DNA, 20 bp, Artificial Sequence
  Description of Artificial Sequence: Synthetic oligonucleotide
  Target: LAMA2; (-) strand; PAM type: YTN; PAM sequence: TTT
atagtactttcctcacccga

SEQ ID NO: 278101 - DNA, 20 bp, Artificial Sequence
  Description of Artificial Sequence: Synthetic oligonucleotide
  Target: LAMA2; (-) strand; PAM type: YTN; PAM sequence: CTT
tatagtactttcctcacccg

SEQ ID NO: 278102 - DNA, 20 bp, Artificial Sequence
  Description of Artificial Sequence: Synthetic oligonucleotide
  Target: LAMA2; (-) strand; PAM type: YTN; PAM sequence: TTA
tatgtaggaaaacaaatgct

SEQ ID NO: 278103 - DNA, 20 bp, Artificial Sequence
  Description of Artificial Sequence: Synthetic oligonucleotide
  Target: LAMA2; (-) strand; PAM type: YTN; PAM sequence: TTG
gtgattatatgtaggaaaac

SEQ ID NO: 278104 - DNA, 20 bp, Artificial Sequence
  Description of Artificial Sequence: Synthetic oligonucleotide
  Target: LAMA2; (-) strand; PAM type: YTN; PAM sequence: CTT
ggtgattatatgtaggaaaa

SEQ ID NO: 278105 - DNA, 20 bp, Artificial Sequence
  Description of Artificial Sequence: Synthetic oligonucleotide
  Target: LAMA2; (-) strand; PAM type: YTN; PAM sequence: TTC
ttggtgattatatgtaggaa

SEQ ID NO: 278106 - DNA, 20 bp, Artificial Sequence
  Description of Artificial Sequence: Synthetic oligonucleotide
  Target: LAMA2; (-) strand; PAM type: YTN; PAM sequence: TTT
cttggtgattatatgtagga

SEQ ID NO: 278107 - DNA, 20 bp, Artificial Sequence
  Description of Artificial Sequence: Synthetic oligonucleotide
  Target: LAMA2; (-) strand; PAM type: YTN; PAM sequence: TTT
tcttggtgattatatgtagg

SEQ ID NO: 278108 - DNA, 20 bp, Artificial Sequence
  Description of Artificial Sequence: Synthetic oligonucleotide
  Target: LAMA2; (-) strand; PAM type: YTN; PAM sequence: CTA
aatgagatattttcttggtg

SEQ ID NO: 278109 - DNA, 20 bp, Artificial Sequence
  Description of Artificial Sequence: Synthetic oligonucleotide
  Target: LAMA2; (-) strand; PAM type: YTN; PAM sequence: CTA
gagaagtactaaatgagata

SEQ ID NO: 278110 - DNA, 20 bp, Artificial Sequence
  Description of Artificial Sequence: Synthetic oligonucleotide
  Target: LAMA2; (-) strand; PAM type: YTN; PAM sequence: CTC
tagagaagtactaaatgaga

SEQ ID NO: 278111 - DNA, 20 bp, Artificial Sequence
  Description of Artificial Sequence: Synthetic oligonucleotide
  Target: LAMA2; (-) strand; PAM type: YTN; PAM sequence: TTG
caccctctagagaagtacta

SEQ ID NO: 278112 - DNA, 20 bp, Artificial Sequence
  Description of Artificial Sequence: Synthetic oligonucleotide
  Target: LAMA2; (-) strand; PAM type: YTN; PAM sequence: CTT
gcaccctctagagaagtact

SEQ ID NO: 278113 - DNA, 20 bp, Artificial Sequence
  Description of Artificial Sequence: Synthetic oligonucleotide
  Target: LAMA2; (-) strand; PAM type: YTN; PAM sequence: TTC
cttgcaccctctagagaagt

SEQ ID NO: 278114 - DNA, 20 bp, Artificial Sequence
  Description of Artificial Sequence: Synthetic oligonucleotide
  Target: LAMA2; (-) strand; PAM type: YTN; PAM sequence: TTT
ccttgcaccctctagagaag

SEQ ID NO: 278115 - DNA, 20 bp, Artificial Sequence
  Description of Artificial Sequence: Synthetic oligonucleotide
  Target: LAMA2; (-) strand; PAM type: YTN; PAM sequence: TTT
tccttgcaccctctagagaa

SEQ ID NO: 278116 - DNA, 20 bp, Artificial Sequence
  Description of Artificial Sequence: Synthetic oligonucleotide
  Target: LAMA2; (-) strand; PAM type: YTN; PAM sequence: CTG
ttttccttgcaccctctaga

SEQ ID NO: 278117 - DNA, 20 bp, Artificial Sequence
  Description of Artificial Sequence: Synthetic oligonucleotide
  Target: LAMA2; (-) strand; PAM type: YTN; PAM sequence: TTC
tgttttccttgcaccctcta

SEQ ID NO: 278118 - DNA, 20 bp, Artificial Sequence
  Description of Artificial Sequence: Synthetic oligonucleotide
  Target: LAMA2; (-) strand; PAM type: YTN; PAM sequence: TTT
ctgttttccttgcaccctct

SEQ ID NO: 278119 - DNA, 20 bp, Artificial Sequence
  Description of Artificial Sequence: Synthetic oligonucleotide
  Target: LAMA2; (-) strand; PAM type: YTN; PAM sequence: CTT
tctgttttccttgcaccctc

SEQ ID NO: 278120 - DNA, 20 bp, Artificial Sequence
  Description of Artificial Sequence: Synthetic oligonucleotide
  Target: LAMA2; (-) strand; PAM type: YTN; PAM sequence: CTC
ctttctgttttccttgcacc

SEQ ID NO: 278121 - DNA, 20 bp, Artificial Sequence
  Description of Artificial Sequence: Synthetic oligonucleotide
  Target: LAMA2; (-) strand; PAM type: YTN; PAM sequence: TTA
tgagtgacatatctcctttc

SEQ ID NO: 278122 - DNA, 20 bp, Artificial Sequence
  Description of Artificial Sequence: Synthetic oligonucleotide
  Target: LAMA2; (-) strand; PAM type: YTN; PAM sequence: TTT
atgagtgacatatctccttt

SEQ ID NO: 278123 - DNA, 20 bp, Artificial Sequence
  Description of Artificial Sequence: Synthetic oligonucleotide
  Target: LAMA2; (-) strand; PAM type: YTN; PAM sequence: TTT
tatgagtgacatatctcctt

SEQ ID NO: 278124 - DNA, 20 bp, Artificial Sequence
  Description of Artificial Sequence: Synthetic oligonucleotide
  Target: LAMA2; (-) strand; PAM type: YTN; PAM sequence: TTC
cattttatgagtgacatatc

SEQ ID NO: 278125 - DNA, 20 bp, Artificial Sequence
  Description of Artificial Sequence: Synthetic oligonucleotide
  Target: LAMA2; (-) strand; PAM type: YTN; PAM sequence: TTA
ttccattttatgagtgacat

SEQ ID NO: 278126 - DNA, 20 bp, Artificial Sequence
  Description of Artificial Sequence: Synthetic oligonucleotide
  Target: LAMA2; (-) strand; PAM type: YTN; PAM sequence: TTT
attccattttatgagtgaca

SEQ ID NO: 278127 - DNA, 20 bp, Artificial Sequence
  Description of Artificial Sequence: Synthetic oligonucleotide
  Target: LAMA2; (-) strand; PAM type: YTN; PAM sequence: TTT
tattccattttatgagtgac

SEQ ID NO: 278128 - DNA, 20 bp, Artificial Sequence
  Description of Artificial Sequence: Synthetic oligonucleotide
  Target: LAMA2; (-) strand; PAM type: YTN; PAM sequence: TTT
ttattccattttatgagtga

SEQ ID NO: 278129 - DNA, 20 bp, Artificial Sequence
  Description of Artificial Sequence: Synthetic oligonucleotide
  Target: LAMA2; (-) strand; PAM type: YTN; PAM sequence: TTC
catttttattccattttatg

SEQ ID NO: 278130 - DNA, 20 bp, Artificial Sequence
  Description of Artificial Sequence: Synthetic oligonucleotide
  Target: LAMA2; (-) strand; PAM type: YTN; PAM sequence: CTG
atgtccatattccattttta

SEQ ID NO: 278131 - DNA, 20 bp, Artificial Sequence
  Description of Artificial Sequence: Synthetic oligonucleotide
  Target: LAMA2; (-) strand; PAM type: YTN; PAM sequence: TTA
ctgatgtccatattccattt

SEQ ID NO: 278132 - DNA, 20 bp, Artificial Sequence
  Description of Artificial Sequence: Synthetic oligonucleotide
  Target: LAMA2; (-) strand; PAM type: YTN; PAM sequence: CTA
agatgagaaaaaattactga

SEQ ID NO: 278133 - DNA, 20 bp, Artificial Sequence
  Description of Artificial Sequence: Synthetic oligonucleotide
  Target: LAMA2; (-) strand; PAM type: YTN; PAM sequence: TTA
taggatcaaagcaactaaga

SEQ ID NO: 278134 - DNA, 20 bp, Artificial Sequence
  Description of Artificial Sequence: Synthetic oligonucleotide
  Target: LAMA2; (-) strand; PAM type: YTN; PAM sequence: CTT
ataggatcaaagcaactaag

SEQ ID NO: 278135 - DNA, 20 bp, Artificial Sequence
  Description of Artificial Sequence: Synthetic oligonucleotide
  Target: LAMA2; (-) strand; PAM type: YTN; PAM sequence: CTC
ttataggatcaaagcaacta

SEQ ID NO: 278136 - DNA, 20 bp, Artificial Sequence
  Description of Artificial Sequence: Synthetic oligonucleotide
  Target: LAMA2; (-) strand; PAM type: YTN; PAM sequence: TTA
gagtctcttataggatcaaa

SEQ ID NO: 278137 - DNA, 20 bp, Artificial Sequence
  Description of Artificial Sequence: Synthetic oligonucleotide
  Target: LAMA2; (-) strand; PAM type: YTN; PAM sequence: TTT
agagtctcttataggatcaa

SEQ ID NO: 278138 - DNA, 20 bp, Artificial Sequence
  Description of Artificial Sequence: Synthetic oligonucleotide
  Target: LAMA2; (-) strand; PAM type: YTN; PAM sequence: TTT
tagagtctcttataggatca

SEQ ID NO: 278139 - DNA, 20 bp, Artificial Sequence
  Description of Artificial Sequence: Synthetic oligonucleotide
  Target: LAMA2; (-) strand; PAM type: YTN; PAM sequence: TTA
ttttagagtctcttatagga

SEQ ID NO: 278140 - DNA, 20 bp, Artificial Sequence
  Description of Artificial Sequence: Synthetic oligonucleotide
  Target: LAMA2; (-) strand; PAM type: YTN; PAM sequence: CTG
ttattttagagtctcttata

SEQ ID NO: 278141 - DNA, 20 bp, Artificial Sequence
  Description of Artificial Sequence: Synthetic oligonucleotide
  Target: LAMA2; (-) strand; PAM type: YTN; PAM sequence: CTC
tgttattttagagtctctta

SEQ ID NO: 278142 - DNA, 20 bp, Artificial Sequence
  Description of Artificial Sequence: Synthetic oligonucleotide
  Target: LAMA2; (-) strand; PAM type: YTN; PAM sequence: TTC
tctgttattttagagtctct

SEQ ID NO: 278143 - DNA, 20 bp, Artificial Sequence
  Description of Artificial Sequence: Synthetic oligonucleotide
  Target: LAMA2; (-) strand; PAM type: YTN; PAM sequence: CTA
attctctgttattttagagt

SEQ ID NO: 278144 - DNA, 20 bp, Artificial Sequence
  Description of Artificial Sequence: Synthetic oligonucleotide
  Target: LAMA2; (-) strand; PAM type: YTN; PAM sequence: TTA
aaaacatctaattctctgtt

SEQ ID NO: 278145 - DNA, 20 bp, Artificial Sequence
  Description of Artificial Sequence: Synthetic oligonucleotide
  Target: LAMA2; (-) strand; PAM type: YTN; PAM sequence: TTT
aaaaacatctaattctctgt

SEQ ID NO: 278146 - DNA, 20 bp, Artificial Sequence
  Description of Artificial Sequence: Synthetic oligonucleotide
  Target: LAMA2; (-) strand; PAM type: YTN; PAM sequence: TTT
taaaaacatctaattctctg

SEQ ID NO: 278147 - DNA, 20 bp, Artificial Sequence
  Description of Artificial Sequence: Synthetic oligonucleotide
  Target: LAMA2; (-) strand; PAM type: YTN; PAM sequence: CTG
gaaatgttttaaaaacatct

SEQ ID NO: 278148 - DNA, 20 bp, Artificial Sequence
  Description of Artificial Sequence: Synthetic oligonucleotide
  Target: LAMA2; (-) strand; PAM type: YTN; PAM sequence: CTA
tgacctggaaatgttttaaa

SEQ ID NO: 278149 - DNA, 20 bp, Artificial Sequence
  Description of Artificial Sequence: Synthetic oligonucleotide
  Target: LAMA2; (-) strand; PAM type: YTN; PAM sequence: TTA
ctatgacctggaaatgtttt

SEQ ID NO: 278150 - DNA, 20 bp, Artificial Sequence
  Description of Artificial Sequence: Synthetic oligonucleotide
  Target: LAMA2; (-) strand; PAM type: YTN; PAM sequence: TTT
actatgacctggaaatgttt

SEQ ID NO: 278151 - DNA, 20 bp, Artificial Sequence
  Description of Artificial Sequence: Synthetic oligonucleotide
  Target: LAMA2; (-) strand; PAM type: YTN; PAM sequence: TTG
agtttactatgacctggaaa

SEQ ID NO: 278152 - DNA, 20 bp, Artificial Sequence
  Description of Artificial Sequence: Synthetic oligonucleotide
  Target: LAMA2; (-) strand; PAM type: YTN; PAM sequence: TTT
gagtttactatgacctggaa

SEQ ID NO: 278153 - DNA, 20 bp, Artificial Sequence
  Description of Artificial Sequence: Synthetic oligonucleotide
  Target: LAMA2; (-) strand; PAM type: YTN; PAM sequence: CTT
tgagtttactatgacctgga

SEQ ID NO: 278154 - DNA, 20 bp, Artificial Sequence
  Description of Artificial Sequence: Synthetic oligonucleotide
  Target: LAMA2; (-) strand; PAM type: YTN; PAM sequence: CTG
atagataatgtaggctttga

SEQ ID NO: 278155 - DNA, 20 bp, Artificial Sequence
  Description of Artificial Sequence: Synthetic oligonucleotide
  Target: LAMA2; (-) strand; PAM type: YTN; PAM sequence: CTG
atctgatagataatgtaggc

SEQ ID NO: 278156 - DNA, 20 bp, Artificial Sequence
  Description of Artificial Sequence: Synthetic oligonucleotide
  Target: LAMA2; (-) strand; PAM type: YTN; PAM sequence: TTA
aaaatctgatctgatagata

SEQ ID NO: 278157 - DNA, 20 bp, Artificial Sequence
  Description of Artificial Sequence: Synthetic oligonucleotide
  Target: LAMA2; (-) strand; PAM type: YTN; PAM sequence: TTT
aaaaatctgatctgatagat

SEQ ID NO: 278158 - DNA, 20 bp, Artificial Sequence
  Description of Artificial Sequence: Synthetic oligonucleotide
  Target: LAMA2; (-) strand; PAM type: YTN; PAM sequence: TTT
taaaaatctgatctgataga

SEQ ID NO: 278159 - DNA, 20 bp, Artificial Sequence
  Description of Artificial Sequence: Synthetic oligonucleotide
  Target: LAMA2; (-) strand; PAM type: YTN; PAM sequence: TTC
atcaattttaaaaatctgat

SEQ ID NO: 278160 - DNA, 20 bp, Artificial Sequence
  Description of Artificial Sequence: Synthetic oligonucleotide
  Target: LAMA2; (-) strand; PAM type: YTN; PAM sequence: TTA
atacattcatcaattttaaa

SEQ ID NO: 278161 - DNA, 20 bp, Artificial Sequence
  Description of Artificial Sequence: Synthetic oligonucleotide
  Target: LAMA2; (-) strand; PAM type: YTN; PAM sequence: CTA
gagaacattaatacattcat

SEQ ID NO: 278162 - DNA, 20 bp, Artificial Sequence
  Description of Artificial Sequence: Synthetic oligonucleotide
  Target: LAMA2; (-) strand; PAM type: YTN; PAM sequence: TTC
tagagaacattaatacattc

SEQ ID NO: 278163 - DNA, 20 bp, Artificial Sequence
  Description of Artificial Sequence: Synthetic oligonucleotide
  Target: LAMA2; (-) strand; PAM type: YTN; PAM sequence: CTT
ctagagaacattaatacatt

SEQ ID NO: 278164 - DNA, 20 bp, Artificial Sequence
  Description of Artificial Sequence: Synthetic oligonucleotide
  Target: LAMA2; (-) strand; PAM type: YTN; PAM sequence: CTG
tccttctagagaacattaat

SEQ ID NO: 278165 - DNA, 20 bp, Artificial Sequence
  Description of Artificial Sequence: Synthetic oligonucleotide
  Target: LAMA2; (-) strand; PAM type: YTN; PAM sequence: TTC
tgtccttctagagaacatta

SEQ ID NO: 278166 - DNA, 20 bp, Artificial Sequence
  Description of Artificial Sequence: Synthetic oligonucleotide
  Target: LAMA2; (-) strand; PAM type: YTN; PAM sequence: TTA
gttctgtccttctagagaac

SEQ ID NO: 278167 - DNA, 20 bp, Artificial Sequence
  Description of Artificial Sequence: Synthetic oligonucleotide
  Target: LAMA2; (-) strand; PAM type: YTN; PAM sequence: CTA
ttagttctgtccttctagag

SEQ ID NO: 278168 - DNA, 20 bp, Artificial Sequence
  Description of Artificial Sequence: Synthetic oligonucleotide
  Target: LAMA2; (-) strand; PAM type: YTN; PAM sequence: CTA
tcctattagttctgtccttc

SEQ ID NO: 278169 - DNA, 20 bp, Artificial Sequence
  Description of Artificial Sequence: Synthetic oligonucleotide
  Target: LAMA2; (-) strand; PAM type: YTN; PAM sequence: TTG
tatacatctatcctattagt

SEQ ID NO: 278170 - DNA, 20 bp, Artificial Sequence
  Description of Artificial Sequence: Synthetic oligonucleotide
  Target: LAMA2; (-) strand; PAM type: YTN; PAM sequence: CTT
gtatacatctatcctattag

SEQ ID NO: 278171 - DNA, 20 bp, Artificial Sequence
  Description of Artificial Sequence: Synthetic oligonucleotide
  Target: LAMA2; (-) strand; PAM type: YTN; PAM sequence: TTC
ttgtatacatctatcctatt

SEQ ID NO: 278172 - DNA, 20 bp, Artificial Sequence
  Description of Artificial Sequence: Synthetic oligonucleotide
  Target: LAMA2; (-) strand; PAM type: YTN; PAM sequence: CTT
cttgtatacatctatcctat

SEQ ID NO: 278173 - DNA, 20 bp, Artificial Sequence
  Description of Artificial Sequence: Synthetic oligonucleotide
  Target: LAMA2; (-) strand; PAM type: YTN; PAM sequence: TTA
gtaaaccccccttcttgtat

SEQ ID NO: 278174 - DNA, 20 bp, Artificial Sequence
  Description of Artificial Sequence: Synthetic oligonucleotide
  Target: LAMA2; (-) strand; PAM type: YTN; PAM sequence: CTT
agtaaaccccccttcttgta

SEQ ID NO: 278175 - DNA, 20 bp, Artificial Sequence
  Description of Artificial Sequence: Synthetic oligonucleotide
  Target: LAMA2; (-) strand; PAM type: YTN; PAM sequence: TTC
cttagtaaaccccccttctt

SEQ ID NO: 278176 - DNA, 20 bp, Artificial Sequence
  Description of Artificial Sequence: Synthetic oligonucleotide
  Target: LAMA2; (-) strand; PAM type: YTN; PAM sequence: TTG
tgatggcgtgggtcaatatt

SEQ ID NO: 278177 - DNA, 20 bp, Artificial Sequence
  Description of Artificial Sequence: Synthetic oligonucleotide
  Target: LAMA2; (-) strand; PAM type: YTN; PAM sequence: CTT
gtgatggcgtgggtcaatat

SEQ ID NO: 278178 - DNA, 20 bp, Artificial Sequence
  Description of Artificial Sequence: Synthetic oligonucleotide
  Target: LAMA2; (-) strand; PAM type: YTN; PAM sequence: TTC
atcttgtgatggcgtgggtc

SEQ ID NO: 278179 - DNA, 20 bp, Artificial Sequence
  Description of Artificial Sequence: Synthetic oligonucleotide
  Target: LAMA2; (-) strand; PAM type: YTN; PAM sequence: CTT
catcttgtgatggcgtgggt

SEQ ID NO: 278180 - DNA, 20 bp, Artificial Sequence
  Description of Artificial Sequence: Synthetic oligonucleotide
  Target: LAMA2; (-) strand; PAM type: YTN; PAM sequence: TTG
tgggacttcatcttgtgatg

SEQ ID NO: 278181 - DNA, 20 bp, Artificial Sequence
  Description of Artificial Sequence: Synthetic oligonucleotide
  Target: LAMA2; (-) strand; PAM type: YTN; PAM sequence: CTA
ttgtgggacttcatcttgtg

SEQ ID NO: 278182 - DNA, 20 bp, Artificial Sequence
  Description of Artificial Sequence: Synthetic oligonucleotide
  Target: LAMA2; (-) strand; PAM type: YTN; PAM sequence: TTG
cagatggcctattgtgggac

SEQ ID NO: 278183 - DNA, 20 bp, Artificial Sequence
  Description of Artificial Sequence: Synthetic oligonucleotide
  Target: LAMA2; (-) strand; PAM type: YTN; PAM sequence: CTT
gcagatggcctattgtggga

SEQ ID NO: 278184 - DNA, 20 bp, Artificial Sequence
  Description of Artificial Sequence: Synthetic oligonucleotide
  Target: LAMA2; (-) strand; PAM type: YTN; PAM sequence: CTC
agcttgcagatggcctattg

SEQ ID NO: 278185 - DNA, 20 bp, Artificial Sequence
  Description of Artificial Sequence: Synthetic oligonucleotide
  Target: LAMA2; (-) strand; PAM type: YTN; PAM sequence: CTC
ctcagcttgcagatggccta

SEQ ID NO: 278186 - DNA, 20 bp, Artificial Sequence
  Description of Artificial Sequence: Synthetic oligonucleotide
  Target: LAMA2; (-) strand; PAM type: YTN; PAM sequence: CTG
ctcctcagcttgcagatggc

SEQ ID NO: 278187 - DNA, 20 bp, Artificial Sequence
  Description of Artificial Sequence: Synthetic oligonucleotide
  Target: LAMA2; (-) strand; PAM type: YTN; PAM sequence: TTC
cctgctcctcagcttgcaga

SEQ ID NO: 278188 - DNA, 20 bp, Artificial Sequence
  Description of Artificial Sequence: Synthetic oligonucleotide
  Target: LAMA2; (-) strand; PAM type: YTN; PAM sequence: CTT
ccctgctcctcagcttgcag

SEQ ID NO: 278189 - DNA, 20 bp, Artificial Sequence
  Description of Artificial Sequence: Synthetic oligonucleotide
  Target: LAMA2; (-) strand; PAM type: YTN; PAM sequence: CTG
gcttccctgctcctcagctt

SEQ ID NO: 278190 - DNA, 20 bp, Artificial Sequence
  Description of Artificial Sequence: Synthetic oligonucleotide
  Target: LAMA2; (-) strand; PAM type: YTN; PAM sequence: CTC
gggctggcttccctgctcct

SEQ ID NO: 278191 - DNA, 20 bp, Artificial Sequence
  Description of Artificial Sequence: Synthetic oligonucleotide
  Target: LAMA2; (-) strand; PAM type: YTN; PAM sequence: TTG
ggactcgggctggcttccct

SEQ ID NO: 278192 - DNA, 20 bp, Artificial Sequence
  Description of Artificial Sequence: Synthetic oligonucleotide
  Target: LAMA2; (-) strand; PAM type: YTN; PAM sequence: TTT
gggactcgggctggcttccc

SEQ ID NO: 278193 - DNA, 20 bp, Artificial Sequence
  Description of Artificial Sequence: Synthetic oligonucleotide
  Target: LAMA2; (-) strand; PAM type: YTN; PAM sequence: TTT
tgggactcgggctggcttcc

SEQ ID NO: 278194 - DNA, 20 bp, Artificial Sequence
  Description of Artificial Sequence: Synthetic oligonucleotide
  Target: LAMA2; (-) strand; PAM type: YTN; PAM sequence: TTG
aggttttgggactcgggctg

SEQ ID NO: 278195 - DNA, 20 bp, Artificial Sequence
  Description of Artificial Sequence: Synthetic oligonucleotide
  Target: LAMA2; (-) strand; PAM type: YTN; PAM sequence: TTT
gaggttttgggactcgggct

SEQ ID NO: 278196 - DNA, 20 bp, Artificial Sequence
  Description of Artificial Sequence: Synthetic oligonucleotide
  Target: LAMA2; (-) strand; PAM type: YTN; PAM sequence: TTT
tgaggttttgggactcgggc

SEQ ID NO: 278197 - DNA, 20 bp, Artificial Sequence
  Description of Artificial Sequence: Synthetic oligonucleotide
  Target: LAMA2; (-) strand; PAM type: YTN; PAM sequence: CTT
ttgaggttttgggactcggg

SEQ ID NO: 278198 - DNA, 20 bp, Artificial Sequence
  Description of Artificial Sequence: Synthetic oligonucleotide
  Target: LAMA2; (-) strand; PAM type: YTN; PAM sequence: CTA
cttttgaggttttgggactc

SEQ ID NO: 278199 - DNA, 20 bp, Artificial Sequence
  Description of Artificial Sequence: Synthetic oligonucleotide
  Target: LAMA2; (-) strand; PAM type: YTN; PAM sequence: TTC
cctacttttgaggttttggg

SEQ ID NO: 278200 - DNA, 20 bp, Artificial Sequence
  Description of Artificial Sequence: Synthetic oligonucleotide
  Target: LAMA2; (-) strand; PAM type: YTN; PAM sequence: CTT
ccctacttttgaggttttgg

SEQ ID NO: 278201 - DNA, 20 bp, Artificial Sequence
  Description of Artificial Sequence: Synthetic oligonucleotide
  Target: LAMA2; (-) strand; PAM type: YTN; PAM sequence: CTG
tcagcttccctacttttgag

SEQ ID NO: 278202 - DNA, 20 bp, Artificial Sequence
  Description of Artificial Sequence: Synthetic oligonucleotide
  Target: LAMA2; (-) strand; PAM type: YTN; PAM sequence: CTG
cactgtcagcttccctactt

SEQ ID NO: 278203 - DNA, 20 bp, Artificial Sequence
  Description of Artificial Sequence: Synthetic oligonucleotide
  Target: LAMA2; (-) strand; PAM type: YTN; PAM sequence: CTG
aaggctgcactgtcagcttc

SEQ ID NO: 278204 - DNA, 20 bp, Artificial Sequence
  Description of Artificial Sequence: Synthetic oligonucleotide
  Target: LAMA2; (-) strand; PAM type: YTN; PAM sequence: TTA
accacagactgaaggctgca

SEQ ID NO: 278205 - DNA, 20 bp, Artificial Sequence
  Description of Artificial Sequence: Synthetic oligonucleotide
  Target: LAMA2; (-) strand; PAM type: YTN; PAM sequence: TTT
aaccacagactgaaggctgc

SEQ ID NO: 278206 - DNA, 20 bp, Artificial Sequence
  Description of Artificial Sequence: Synthetic oligonucleotide
  Target: LAMA2; (-) strand; PAM type: YTN; PAM sequence: CTT
taaccacagactgaaggctg

SEQ ID NO: 278207 - DNA, 20 bp, Artificial Sequence
  Description of Artificial Sequence: Synthetic oligonucleotide
  Target: LAMA2; (-) strand; PAM type: YTN; PAM sequence: CTG
tcaggcctttaaccacagac

SEQ ID NO: 278208 - DNA, 20 bp, Artificial Sequence
  Description of Artificial Sequence: Synthetic oligonucleotide
  Target: LAMA2; (-) strand; PAM type: YTN; PAM sequence: TTG
ccaggggctgtcaggccttt

SEQ ID NO: 278209 - DNA, 20 bp, Artificial Sequence
  Description of Artificial Sequence: Synthetic oligonucleotide
  Target: LAMA2; (-) strand; PAM type: YTN; PAM sequence: TTT
gccaggggctgtcaggcctt

SEQ ID NO: 278210 - DNA, 20 bp, Artificial Sequence
  Description of Artificial Sequence: Synthetic oligonucleotide
  Target: LAMA2; (-) strand; PAM type: YTN; PAM sequence: TTA
caccaggggtttgccagggg

SEQ ID NO: 278211 - DNA, 20 bp, Artificial Sequence
  Description of Artificial Sequence: Synthetic oligonucleotide
  Target: LAMA2; (-) strand; PAM type: YTN; PAM sequence: CTT
acaccaggggtttgccaggg

SEQ ID NO: 278212 - DNA, 20 bp, Artificial Sequence
  Description of Artificial Sequence: Synthetic oligonucleotide
  Target: LAMA2; (-) strand; PAM type: YTN; PAM sequence: CTG
gacttacaccaggggtttgc

SEQ ID NO: 278213 - DNA, 20 bp, Artificial Sequence
  Description of Artificial Sequence: Synthetic oligonucleotide
  Target: LAMA2; (-) strand; PAM type: YTN; PAM sequence: TTC
ctggacttacaccaggggtt

SEQ ID NO: 278214 - DNA, 20 bp, Artificial Sequence
  Description of Artificial Sequence: Synthetic oligonucleotide
  Target: LAMA2; (-) strand; PAM type: YTN; PAM sequence: TTG
gattcctggacttacaccag

SEQ ID NO: 278215 - DNA, 20 bp, Artificial Sequence
  Description of Artificial Sequence: Synthetic oligonucleotide
  Target: LAMA2; (-) strand; PAM type: YTN; PAM sequence: TTT
ggattcctggacttacacca

SEQ ID NO: 278216 - DNA, 20 bp, Artificial Sequence
  Description of Artificial Sequence: Synthetic oligonucleotide
  Target: LAMA2; (-) strand; PAM type: YTN; PAM sequence: TTT
tggattcctggacttacacc

SEQ ID NO: 278217 - DNA, 20 bp, Artificial Sequence
  Description of Artificial Sequence: Synthetic oligonucleotide
  Target: LAMA2; (-) strand; PAM type: YTN; PAM sequence: CTT
ttggattcctggacttacac

SEQ ID NO: 278218 - DNA, 20 bp, Artificial Sequence
  Description of Artificial Sequence: Synthetic oligonucleotide
  Target: LAMA2; (-) strand; PAM type: YTN; PAM sequence: TTC
agcttttggattcctggact

SEQ ID NO: 278219 - DNA, 20 bp, Artificial Sequence
  Description of Artificial Sequence: Synthetic oligonucleotide
  Target: LAMA2; (-) strand; PAM type: YTN; PAM sequence: CTT
cagcttttggattcctggac

SEQ ID NO: 278220 - DNA, 20 bp, Artificial Sequence
  Description of Artificial Sequence: Synthetic oligonucleotide
  Target: LAMA2; (-) strand; PAM type: YTN; PAM sequence: TTC
ttcagcttttggattcctgg

SEQ ID NO: 278221 - DNA, 20 bp, Artificial Sequence
  Description of Artificial Sequence: Synthetic oligonucleotide
  Target: LAMA2; (-) strand; PAM type: YTN; PAM sequence: CTC
caagttcttcagcttttgga

SEQ ID NO: 278222 - DNA, 20 bp, Artificial Sequence
  Description of Artificial Sequence: Synthetic oligonucleotide
  Target: LAMA2; (-) strand; PAM type: YTN; PAM sequence: TTG
aacatcacactccaagttct

SEQ ID NO: 278223 - DNA, 20 bp, Artificial Sequence
  Description of Artificial Sequence: Synthetic oligonucleotide
  Target: LAMA2; (-) strand; PAM type: YTN; PAM sequence: CTT
gaacatcacactccaagttc

SEQ ID NO: 278224 - DNA, 20 bp, Artificial Sequence
  Description of Artificial Sequence: Synthetic oligonucleotide
  Target: LAMA2; (-) strand; PAM type: YTN; PAM sequence: CTG
cccttgaacatcacactcca

SEQ ID NO: 278225 - DNA, 20 bp, Artificial Sequence
  Description of Artificial Sequence: Synthetic oligonucleotide
  Target: LAMA2; (-) strand; PAM type: YTN; PAM sequence: TTC
ctgcccttgaacatcacact

SEQ ID NO: 278226 - DNA, 20 bp, Artificial Sequence
  Description of Artificial Sequence: Synthetic oligonucleotide
  Target: LAMA2; (-) strand; PAM type: YTN; PAM sequence: CTT
cctgcccttgaacatcacac

SEQ ID NO: 278227 - DNA, 20 bp, Artificial Sequence
  Description of Artificial Sequence: Synthetic oligonucleotide
  Target: LAMA2; (-) strand; PAM type: YTN; PAM sequence: CTG
gatacttcctgcccttgaac

SEQ ID NO: 278228 - DNA, 20 bp, Artificial Sequence
  Description of Artificial Sequence: Synthetic oligonucleotide
  Target: LAMA2; (-) strand; PAM type: YTN; PAM sequence: TTC
acccatgctggatacttcct

SEQ ID NO: 278229 - DNA, 20 bp, Artificial Sequence
  Description of Artificial Sequence: Synthetic oligonucleotide
  Target: LAMA2; (-) strand; PAM type: YTN; PAM sequence: TTT
cacccatgctggatacttcc

SEQ ID NO: 278230 - DNA, 20 bp, Artificial Sequence
  Description of Artificial Sequence: Synthetic oligonucleotide
  Target: LAMA2; (-) strand; PAM type: YTN; PAM sequence: CTT
tcacccatgctggatacttc

SEQ ID NO: 278231 - DNA, 20 bp, Artificial Sequence
  Description of Artificial Sequence: Synthetic oligonucleotide
  Target: LAMA2; (-) strand; PAM type: YTN; PAM sequence: TTC
atctttcacccatgctggat

SEQ ID NO: 278232 - DNA, 20 bp, Artificial Sequence
  Description of Artificial Sequence: Synthetic oligonucleotide
  Target: LAMA2; (-) strand; PAM type: YTN; PAM sequence: CTT
catctttcacccatgctgga

SEQ ID NO: 278233 - DNA, 20 bp, Artificial Sequence
  Description of Artificial Sequence: Synthetic oligonucleotide
  Target: LAMA2; (-) strand; PAM type: YTN; PAM sequence: TTC
cagccttcatctttcaccca

SEQ ID NO: 278234 - DNA, 20 bp, Artificial Sequence
  Description of Artificial Sequence: Synthetic oligonucleotide
  Target: LAMA2; (-) strand; PAM type: YTN; PAM sequence: CTT
ccagccttcatctttcaccc

SEQ ID NO: 278235 - DNA, 20 bp, Artificial Sequence
  Description of Artificial Sequence: Synthetic oligonucleotide
  Target: LAMA2; (-) strand; PAM type: YTN; PAM sequence: CTC
ttccagccttcatctttcac

SEQ ID NO: 278236 - DNA, 20 bp, Artificial Sequence
  Description of Artificial Sequence: Synthetic oligonucleotide
  Target: LAMA2; (-) strand; PAM type: YTN; PAM sequence: CTG
actcttccagccttcatctt

SEQ ID NO: 278237 - DNA, 20 bp, Artificial Sequence
  Description of Artificial Sequence: Synthetic oligonucleotide
  Target: LAMA2; (-) strand; PAM type: YTN; PAM sequence: TTC
tgactcttccagccttcatc

SEQ ID NO: 278238 - DNA, 20 bp, Artificial Sequence
  Description of Artificial Sequence: Synthetic oligonucleotide
  Target: LAMA2; (-) strand; PAM type: YTN; PAM sequence: CTT
ctgactcttccagccttcat

SEQ ID NO: 278239 - DNA, 20 bp, Artificial Sequence
  Description of Artificial Sequence: Synthetic oligonucleotide
  Target: LAMA2; (-) strand; PAM type: YTN; PAM sequence: CTA
gaataaaagcaggcagaaga

SEQ ID NO: 278240 - DNA, 20 bp, Artificial Sequence
  Description of Artificial Sequence: Synthetic oligonucleotide
  Target: LAMA2; (-) strand; PAM type: YTN; PAM sequence: CTG
ccagtgtggctagaataaaa

SEQ ID NO: 278241 - DNA, 20 bp, Artificial Sequence
  Description of Artificial Sequence: Synthetic oligonucleotide
  Target: LAMA2; (-) strand; PAM type: YTN; PAM sequence: CTA
ataagctgccagtgtggcta

SEQ ID NO: 278242 - DNA, 20 bp, Artificial Sequence
  Description of Artificial Sequence: Synthetic oligonucleotide
  Target: LAMA2; (-) strand; PAM type: YTN; PAM sequence: CTC
aatgtgggtgggcaccatct

SEQ ID NO: 278243 - DNA, 20 bp, Artificial Sequence
  Description of Artificial Sequence: Synthetic oligonucleotide
  Target: LAMA2; (-) strand; PAM type: YTN; PAM sequence: CTG
gaagaggcagacccaccctc

SEQ ID NO: 278244 - DNA, 20 bp, Artificial Sequence
  Description of Artificial Sequence: Synthetic oligonucleotide
  Target: LAMA2; (-) strand; PAM type: YTN; PAM sequence: CTG
gactggaagaggcagaccca

SEQ ID NO: 278245 - DNA, 20 bp, Artificial Sequence
  Description of Artificial Sequence: Synthetic oligonucleotide
  Target: LAMA2; (-) strand; PAM type: YTN; PAM sequence: TTG
agtcactggactggaagagg

SEQ ID NO: 278246 - DNA, 20 bp, Artificial Sequence
  Description of Artificial Sequence: Synthetic oligonucleotide
  Target: LAMA2; (-) strand; PAM type: YTN; PAM sequence: TTT
gagtcactggactggaagag

SEQ ID NO: 278247 - DNA, 20 bp, Artificial Sequence
  Description of Artificial Sequence: Synthetic oligonucleotide
  Target: LAMA2; (-) strand; PAM type: YTN; PAM sequence: TTA
aaatttgagtcactggactg

SEQ ID NO: 278248 - DNA, 20 bp, Artificial Sequence
  Description of Artificial Sequence: Synthetic oligonucleotide
  Target: LAMA2; (-) strand; PAM type: YTN; PAM sequence: TTG
ccaaaggagattaaaatttg

SEQ ID NO: 278249 - DNA, 20 bp, Artificial Sequence
  Description of Artificial Sequence: Synthetic oligonucleotide
  Target: LAMA2; (-) strand; PAM type: YTN; PAM sequence: CTG
tgagggtgttgccaaaggag

SEQ ID NO: 278250 - DNA, 20 bp, Artificial Sequence
  Description of Artificial Sequence: Synthetic oligonucleotide
  Target: LAMA2; (-) strand; PAM type: YTN; PAM sequence: CTC
tgtgagggtgttgccaaagg

SEQ ID NO: 278251 - DNA, 20 bp, Artificial Sequence
  Description of Artificial Sequence: Synthetic oligonucleotide
  Target: LAMA2; (-) strand; PAM type: YTN; PAM sequence: CTG
ggtgtctctgtgagggtgtt

SEQ ID NO: 278252 - DNA, 20 bp, Artificial Sequence
  Description of Artificial Sequence: Synthetic oligonucleotide
  Target: LAMA2; (-) strand; PAM type: YTN; PAM sequence: TTC
ctgggtgtctctgtgagggt

SEQ ID NO: 278253 - DNA, 20 bp, Artificial Sequence
  Description of Artificial Sequence: Synthetic oligonucleotide
  Target: LAMA2; (-) strand; PAM type: YTN; PAM sequence: TTG
ttcctgggtgtctctgtgag

SEQ ID NO: 278254 - DNA, 20 bp, Artificial Sequence
  Description of Artificial Sequence: Synthetic oligonucleotide
  Target: LAMA2; (-) strand; PAM type: YTN; PAM sequence: TTG
aacgatgcaaagtattgttc

SEQ ID NO: 278255 - DNA, 20 bp, Artificial Sequence
  Description of Artificial Sequence: Synthetic oligonucleotide
  Target: LAMA2; (-) strand; PAM type: YTN; PAM sequence: TTG
gattgaacgatgcaaagtat

SEQ ID NO: 278256 - DNA, 20 bp, Artificial Sequence
  Description of Artificial Sequence: Synthetic oligonucleotide
  Target: LAMA2; (-) strand; PAM type: YTN; PAM sequence: TTG
attggattgaacgatgcaaa

SEQ ID NO: 278257 - DNA, 20 bp, Artificial Sequence
  Description of Artificial Sequence: Synthetic oligonucleotide
  Target: LAMA2; (-) strand; PAM type: YTN; PAM sequence: CTT
gattggattgaacgatgcaa

SEQ ID NO: 278258 - DNA, 20 bp, Artificial Sequence
  Description of Artificial Sequence: Synthetic oligonucleotide
  Target: LAMA2; (-) strand; PAM type: YTN; PAM sequence: TTG
agtatcagcttgattggatt

SEQ ID NO: 278259 - DNA, 20 bp, Artificial Sequence
  Description of Artificial Sequence: Synthetic oligonucleotide
  Target: LAMA2; (-) strand; PAM type: YTN; PAM sequence: CTA
atattgagtatcagcttgat

SEQ ID NO: 278260 - DNA, 20 bp, Artificial Sequence
  Description of Artificial Sequence: Synthetic oligonucleotide
  Target: LAMA2; (-) strand; PAM type: YTN; PAM sequence: TTG
tgatgactaatattgagtat

SEQ ID NO: 278261 - DNA, 20 bp, Artificial Sequence
  Description of Artificial Sequence: Synthetic oligonucleotide
  Target: LAMA2; (-) strand; PAM type: YTN; PAM sequence: CTT
gtgatgactaatattgagta

SEQ ID NO: 278262 - DNA, 20 bp, Artificial Sequence
  Description of Artificial Sequence: Synthetic oligonucleotide
  Target: LAMA2; (-) strand; PAM type: YTN; PAM sequence: TTG
acaaggggtggacttgtgat

SEQ ID NO: 278263 - DNA, 20 bp, Artificial Sequence
  Description of Artificial Sequence: Synthetic oligonucleotide
  Target: LAMA2; (-) strand; PAM type: YTN; PAM sequence: TTC
aagttgacaaggggtggact

SEQ ID NO: 278264 - DNA, 20 bp, Artificial Sequence
  Description of Artificial Sequence: Synthetic oligonucleotide
  Target: LAMA2; (-) strand; PAM type: YTN; PAM sequence: TTC
aggagatgtgtatgggttca

SEQ ID NO: 278265 - DNA, 20 bp, Artificial Sequence
  Description of Artificial Sequence: Synthetic oligonucleotide
  Target: LAMA2; (-) strand; PAM type: YTN; PAM sequence: TTT
caggagatgtgtatgggttc

SEQ ID NO: 278266 - DNA, 20 bp, Artificial Sequence
  Description of Artificial Sequence: Synthetic oligonucleotide
  Target: LAMA2; (-) strand; PAM type: YTN; PAM sequence: TTA
tgtatgatttcaggagatgt

SEQ ID NO: 278267 - DNA, 20 bp, Artificial Sequence
  Description of Artificial Sequence: Synthetic oligonucleotide
  Target: LAMA2; (-) strand; PAM type: YTN; PAM sequence: TTG
gagattatgtatgatttcag

SEQ ID NO: 278268 - DNA, 20 bp, Artificial Sequence
  Description of Artificial Sequence: Synthetic oligonucleotide
  Target: LAMA2; (-) strand; PAM type: YTN; PAM sequence: TTT
ggagattatgtatgatttca

SEQ ID NO: 278269 - DNA, 20 bp, Artificial Sequence
  Description of Artificial Sequence: Synthetic oligonucleotide
  Target: LAMA2; (-) strand; PAM type: YTN; PAM sequence: TTA
tttggagattatgtatgatt

SEQ ID NO: 278270 - DNA, 20 bp, Artificial Sequence
  Description of Artificial Sequence: Synthetic oligonucleotide
  Target: LAMA2; (-) strand; PAM type: YTN; PAM sequence: TTT
atttggagattatgtatgat

SEQ ID NO: 278271 - DNA, 20 bp, Artificial Sequence
  Description of Artificial Sequence: Synthetic oligonucleotide
  Target: LAMA2; (-) strand; PAM type: YTN; PAM sequence: CTT
tatttggagattatgtatga

SEQ ID NO: 278272 - DNA, 20 bp, Artificial Sequence
  Description of Artificial Sequence: Synthetic oligonucleotide
  Target: LAMA2; (-) strand; PAM type: YTN; PAM sequence: TTG
tctttatttggagattatgt

SEQ ID NO: 278273 - DNA, 20 bp, Artificial Sequence
  Description of Artificial Sequence: Synthetic oligonucleotide
  Target: LAMA2; (-) strand; PAM type: YTN; PAM sequence: TTA
ttgtctttatttggagatta

SEQ ID NO: 278274 - DNA, 20 bp, Artificial Sequence
  Description of Artificial Sequence: Synthetic oligonucleotide
  Target: LAMA2; (-) strand; PAM type: YTN; PAM sequence: TTA
ttattgtctttatttggaga

SEQ ID NO: 278275 - DNA, 20 bp, Artificial Sequence
  Description of Artificial Sequence: Synthetic oligonucleotide
  Target: LAMA2; (-) strand; PAM type: YTN; PAM sequence: TTA
tgatgttattattgtcttta

SEQ ID NO: 278276 - DNA, 20 bp, Artificial Sequence
  Description of Artificial Sequence: Synthetic oligonucleotide
  Target: LAMA2; (-) strand; PAM type: YTN; PAM sequence: TTA
ggtataattatgatgttatt

SEQ ID NO: 278277 - DNA, 20 bp, Artificial Sequence
  Description of Artificial Sequence: Synthetic oligonucleotide
  Target: LAMA2; (-) strand; PAM type: YTN; PAM sequence: TTA
tgttaggtataattatgatg

SEQ ID NO: 278278 - DNA, 20 bp, Artificial Sequence
  Description of Artificial Sequence: Synthetic oligonucleotide
  Target: LAMA2; (-) strand; PAM type: YTN; PAM sequence: CTG
tattatgttaggtataatta

SEQ ID NO: 278279 - DNA, 20 bp, Artificial Sequence
  Description of Artificial Sequence: Synthetic oligonucleotide
  Target: LAMA2; (-) strand; PAM type: YTN; PAM sequence: TTG
tacaagggatagctgtatta

SEQ ID NO: 278280 - DNA, 20 bp, Artificial Sequence
  Description of Artificial Sequence: Synthetic oligonucleotide
  Target: LAMA2; (-) strand; PAM type: YTN; PAM sequence: CTG
attgtacaagggatagctgt

SEQ ID NO: 278281 - DNA, 20 bp, Artificial Sequence
  Description of Artificial Sequence: Synthetic oligonucleotide
  Target: LAMA2; (-) strand; PAM type: YTN; PAM sequence: TTC
tgattgtacaagggatagct

SEQ ID NO: 278282 - DNA, 20 bp, Artificial Sequence
  Description of Artificial Sequence: Synthetic oligonucleotide
  Target: LAMA2; (-) strand; PAM type: YTN; PAM sequence: CTT
ctgattgtacaagggatagc

SEQ ID NO: 278283 - DNA, 20 bp, Artificial Sequence
  Description of Artificial Sequence: Synthetic oligonucleotide
  Target: LAMA2; (-) strand; PAM type: YTN; PAM sequence: TTA
gtgtgcttctgattgtacaa

SEQ ID NO: 278284 - DNA, 20 bp, Artificial Sequence
  Description of Artificial Sequence: Synthetic oligonucleotide
  Target: LAMA2; (-) strand; PAM type: YTN; PAM sequence: TTA
aggattagtgtgcttctgat

SEQ ID NO: 278285 - DNA, 20 bp, Artificial Sequence
  Description of Artificial Sequence: Synthetic oligonucleotide
  Target: LAMA2; (-) strand; PAM type: YTN; PAM sequence: TTA
ggttaaggattagtgtgctt

SEQ ID NO: 278286 - DNA, 20 bp, Artificial Sequence
  Description of Artificial Sequence: Synthetic oligonucleotide
  Target: LAMA2; (-) strand; PAM type: YTN; PAM sequence: TTT
aggttaaggattagtgtgct

SEQ ID NO: 278287 - DNA, 20 bp, Artificial Sequence
  Description of Artificial Sequence: Synthetic oligonucleotide
  Target: LAMA2; (-) strand; PAM type: YTN; PAM sequence: TTA
tgtaatagcatttaggttaa

SEQ ID NO: 278288 - DNA, 20 bp, Artificial Sequence
  Description of Artificial Sequence: Synthetic oligonucleotide
  Target: LAMA2; (-) strand; PAM type: YTN; PAM sequence: TTT
atgtaatagcatttaggtta

SEQ ID NO: 278289 - DNA, 20 bp, Artificial Sequence
  Description of Artificial Sequence: Synthetic oligonucleotide
  Target: LAMA2; (-) strand; PAM type: YTN; PAM sequence: CTT
tatgtaatagcatttaggtt

SEQ ID NO: 278290 - DNA, 20 bp, Artificial Sequence
  Description of Artificial Sequence: Synthetic oligonucleotide
  Target: LAMA2; (-) strand; PAM type: YTN; PAM sequence: TTA
actttatgtaatagcattta

SEQ ID NO: 278291 - DNA, 20 bp, Artificial Sequence
  Description of Artificial Sequence: Synthetic oligonucleotide
  Target: LAMA2; (-) strand; PAM type: YTN; PAM sequence: TTG
ttaactttatgtaatagcat

SEQ ID NO: 278292 - DNA, 20 bp, Artificial Sequence
  Description of Artificial Sequence: Synthetic oligonucleotide
  Target: LAMA2; (-) strand; PAM type: YTN; PAM sequence: TTA
agtgttgttaactttatgta

SEQ ID NO: 278293 - DNA, 20 bp, Artificial Sequence
  Description of Artificial Sequence: Synthetic oligonucleotide
  Target: LAMA2; (-) strand; PAM type: YTN; PAM sequence: TTT
aagtgttgttaactttatgt

SEQ ID NO: 278294 - DNA, 20 bp, Artificial Sequence
  Description of Artificial Sequence: Synthetic oligonucleotide
  Target: LAMA2; (-) strand; PAM type: YTN; PAM sequence: TTC
atatcagcatttaagtgttg

SEQ ID NO: 278295 - DNA, 20 bp, Artificial Sequence
  Description of Artificial Sequence: Synthetic oligonucleotide
  Target: LAMA2; (-) strand; PAM type: YTN; PAM sequence: CTT
catatcagcatttaagtgtt

SEQ ID NO: 278296 - DNA, 20 bp, Artificial Sequence
  Description of Artificial Sequence: Synthetic oligonucleotide
  Target: LAMA2; (-) strand; PAM type: YTN; PAM sequence: TTG
acttcatatcagcatttaag

SEQ ID NO: 278297 - DNA, 20 bp, Artificial Sequence
  Description of Artificial Sequence: Synthetic oligonucleotide
  Target: LAMA2; (-) strand; PAM type: YTN; PAM sequence: TTA
ttgacttcatatcagcattt

SEQ ID NO: 278298 - DNA, 20 bp, Artificial Sequence
  Description of Artificial Sequence: Synthetic oligonucleotide
  Target: LAMA2; (-) strand; PAM type: YTN; PAM sequence: TTT
attgacttcatatcagcatt

SEQ ID NO: 278299 - DNA, 20 bp, Artificial Sequence
  Description of Artificial Sequence: Synthetic oligonucleotide
  Target: LAMA2; (-) strand; PAM type: YTN; PAM sequence: TTA
tcatgtgacataaaatttat

SEQ ID NO: 278300 - DNA, 20 bp, Artificial Sequence
  Description of Artificial Sequence: Synthetic oligonucleotide
  Target: LAMA2; (-) strand; PAM type: YTN; PAM sequence: TTT
atcatgtgacataaaattta

SEQ ID NO: 278301 - DNA, 20 bp, Artificial Sequence
  Description of Artificial Sequence: Synthetic oligonucleotide
  Target: LAMA2; (-) strand; PAM type: YTN; PAM sequence: CTT
tatcatgtgacataaaattt

SEQ ID NO: 278302 - DNA, 20 bp, Artificial Sequence
  Description of Artificial Sequence: Synthetic oligonucleotide
  Target: LAMA2; (-) strand; PAM type: YTN; PAM sequence: TTC
ctttatcatgtgacataaaa

SEQ ID NO: 278303 - DNA, 20 bp, Artificial Sequence
  Description of Artificial Sequence: Synthetic oligonucleotide
  Target: LAMA2; (-) strand; PAM type: YTN; PAM sequence: TTT
cctttatcatgtgacataaa

SEQ ID NO: 278304 - DNA, 20 bp, Artificial Sequence
  Description of Artificial Sequence: Synthetic oligonucleotide
  Target: LAMA2; (-) strand; PAM type: YTN; PAM sequence: TTT
tcctttatcatgtgacataa

SEQ ID NO: 278305 - DNA, 20 bp, Artificial Sequence
  Description of Artificial Sequence: Synthetic oligonucleotide
  Target: LAMA2; (-) strand; PAM type: YTN; PAM sequence: TTT
ttcctttatcatgtgacata

SEQ ID NO: 278306 - DNA, 20 bp, Artificial Sequence
  Description of Artificial Sequence: Synthetic oligonucleotide
  Target: LAMA2; (-) strand; PAM type: YTN; PAM sequence: CTT
tttcctttatcatgtgacat

SEQ ID NO: 278307 - DNA, 20 bp, Artificial Sequence
  Description of Artificial Sequence: Synthetic oligonucleotide
  Target: LAMA2; (-) strand; PAM type: YTN; PAM sequence: TTC
tttttcctttatcatgtgac

SEQ ID NO: 278308 - DNA, 20 bp, Artificial Sequence
  Description of Artificial Sequence: Synthetic oligonucleotide
  Target: LAMA2; (-) strand; PAM type: YTN; PAM sequence: TTT
ctttttcctttatcatgtga

SEQ ID NO: 278309 - DNA, 20 bp, Artificial Sequence
  Description of Artificial Sequence: Synthetic oligonucleotide
  Target: LAMA2; (-) strand; PAM type: YTN; PAM sequence: CTT
tctttttcctttatcatgtg

SEQ ID NO: 278310 - DNA, 20 bp, Artificial Sequence
  Description of Artificial Sequence: Synthetic oligonucleotide
  Target: LAMA2; (-) strand; PAM type: YTN; PAM sequence: TTG
ctttctttttcctttatcat

SEQ ID NO: 278311 - DNA, 20 bp, Artificial Sequence
  Description of Artificial Sequence: Synthetic oligonucleotide
  Target: LAMA2; (-) strand; PAM type: YTN; PAM sequence: TTT
gctttctttttcctttatca

SEQ ID NO: 278312 - DNA, 20 bp, Artificial Sequence
  Description of Artificial Sequence: Synthetic oligonucleotide
  Target: LAMA2; (-) strand; PAM type: YTN; PAM sequence: TTC
atttgctttctttttccttt

SEQ ID NO: 278313 - DNA, 20 bp, Artificial Sequence
  Description of Artificial Sequence: Synthetic oligonucleotide
  Target: LAMA2; (-) strand; PAM type: YTN; PAM sequence: CTT
catttgctttctttttcctt

SEQ ID NO: 278314 - DNA, 20 bp, Artificial Sequence
  Description of Artificial Sequence: Synthetic oligonucleotide
  Target: LAMA2; (-) strand; PAM type: YTN; PAM sequence: CTA
ggaaaatatcttcatttgct

SEQ ID NO: 278315 - DNA, 20 bp, Artificial Sequence
  Description of Artificial Sequence: Synthetic oligonucleotide
  Target: LAMA2; (-) strand; PAM type: YTN; PAM sequence: TTG
tactaggaaaatatcttcat

SEQ ID NO: 278316 - DNA, 20 bp, Artificial Sequence
  Description of Artificial Sequence: Synthetic oligonucleotide
  Target: LAMA2; (-) strand; PAM type: YTN; PAM sequence: CTT
gtactaggaaaatatcttca

SEQ ID NO: 278317 - DNA, 20 bp, Artificial Sequence
  Description of Artificial Sequence: Synthetic oligonucleotide
  Target: LAMA2; (-) strand; PAM type: YTN; PAM sequence: TTG
tgcatgtatacacttgtact

SEQ ID NO: 278318 - DNA, 20 bp, Artificial Sequence
  Description of Artificial Sequence: Synthetic oligonucleotide
  Target: LAMA2; (-) strand; PAM type: YTN; PAM sequence: TTT
gtgcatgtatacacttgtac

SEQ ID NO: 278319 - DNA, 20 bp, Artificial Sequence
  Description of Artificial Sequence: Synthetic oligonucleotide
  Target: LAMA2; (-) strand; PAM type: YTN; PAM sequence: TTA
agaatatgtttgtgcatgta

SEQ ID NO: 278320 - DNA, 20 bp, Artificial Sequence
  Description of Artificial Sequence: Synthetic oligonucleotide
  Target: LAMA2; (-) strand; PAM type: YTN; PAM sequence: CTG
ttaagaatatgtttgtgcat

SEQ ID NO: 278321 - DNA, 20 bp, Artificial Sequence
  Description of Artificial Sequence: Synthetic oligonucleotide
  Target: LAMA2; (-) strand; PAM type: YTN; PAM sequence: TTC
tgttaagaatatgtttgtgc

SEQ ID NO: 278322 - DNA, 20 bp, Artificial Sequence
  Description of Artificial Sequence: Synthetic oligonucleotide
  Target: LAMA2; (-) strand; PAM type: YTN; PAM sequence: TTA
ttctgttaagaatatgtttg

SEQ ID NO: 278323 - DNA, 20 bp, Artificial Sequence
  Description of Artificial Sequence: Synthetic oligonucleotide
  Target: LAMA2; (-) strand; PAM type: YTN; PAM sequence: CTT
attctgttaagaatatgttt

SEQ ID NO: 278324 - DNA, 20 bp, Artificial Sequence
  Description of Artificial Sequence: Synthetic oligonucleotide
  Target: LAMA2; (-) strand; PAM type: YTN; PAM sequence: CTC
cttattctgttaagaatatg

SEQ ID NO: 278325 - DNA, 20 bp, Artificial Sequence
  Description of Artificial Sequence: Synthetic oligonucleotide
  Target: LAMA2; (-) strand; PAM type: YTN; PAM sequence: TTC
ctccttattctgttaagaat

SEQ ID NO: 278326 - DNA, 20 bp, Artificial Sequence
  Description of Artificial Sequence: Synthetic oligonucleotide
  Target: LAMA2; (-) strand; PAM type: YTN; PAM sequence: TTT
cctccttattctgttaagaa

SEQ ID NO: 278327 - DNA, 20 bp, Artificial Sequence
  Description of Artificial Sequence: Synthetic oligonucleotide
  Target: LAMA2; (-) strand; PAM type: YTN; PAM sequence: TTG
tcatatatttcctccttatt

SEQ ID NO: 278328 - DNA, 20 bp, Artificial Sequence
  Description of Artificial Sequence: Synthetic oligonucleotide
  Target: LAMA2; (-) strand; PAM type: YTN; PAM sequence: CTG
taattgtcatatatttcctc

SEQ ID NO: 278329 - DNA, 20 bp, Artificial Sequence
  Description of Artificial Sequence: Synthetic oligonucleotide
  Target: LAMA2; (-) strand; PAM type: YTN; PAM sequence: TTG
cagaaatgaagactgtaatt

SEQ ID NO: 278330 - DNA, 20 bp, Artificial Sequence
  Description of Artificial Sequence: Synthetic oligonucleotide
  Target: LAMA2; (-) strand; PAM type: YTN; PAM sequence: CTA
caaccacgtggccagttgca

SEQ ID NO: 278331 - DNA, 20 bp, Artificial Sequence
  Description of Artificial Sequence: Synthetic oligonucleotide
  Target: LAMA2; (-) strand; PAM type: YTN; PAM sequence: TTA
gtagaagaaggtagtcatca

SEQ ID NO: 278332 - DNA, 20 bp, Artificial Sequence
  Description of Artificial Sequence: Synthetic oligonucleotide
  Target: LAMA2; (-) strand; PAM type: YTN; PAM sequence: TTG
cagaaggcaaagggaataca

SEQ ID NO: 278333 - DNA, 20 bp, Artificial Sequence
  Description of Artificial Sequence: Synthetic oligonucleotide
  Target: LAMA2; (-) strand; PAM type: YTN; PAM sequence: CTT
gcagaaggcaaagggaatac

SEQ ID NO: 278334 - DNA, 20 bp, Artificial Sequence
  Description of Artificial Sequence: Synthetic oligonucleotide
  Target: LAMA2; (-) strand; PAM type: YTN; PAM sequence: CTG
aggtgcttgcagaaggcaaa

SEQ ID NO: 278335 - DNA, 20 bp, Artificial Sequence
  Description of Artificial Sequence: Synthetic oligonucleotide
  Target: LAMA2; (-) strand; PAM type: YTN; PAM sequence: TTG
ggtcaccccaccaggtaaaa

SEQ ID NO: 278336 - DNA, 20 bp, Artificial Sequence
  Description of Artificial Sequence: Synthetic oligonucleotide
  Target: LAMA2; (-) strand; PAM type: YTN; PAM sequence: TTT
gggtcaccccaccaggtaaa

SEQ ID NO: 278337 - DNA, 20 bp, Artificial Sequence
  Description of Artificial Sequence: Synthetic oligonucleotide
  Target: LAMA2; (-) strand; PAM type: YTN; PAM sequence: TTC
cagaataaaggtttgggtca

SEQ ID NO: 278338 - DNA, 20 bp, Artificial Sequence
  Description of Artificial Sequence: Synthetic oligonucleotide
  Target: LAMA2; (-) strand; PAM type: YTN; PAM sequence: CTT
ccagaataaaggtttgggtc

SEQ ID NO: 278339 - DNA, 20 bp, Artificial Sequence
  Description of Artificial Sequence: Synthetic oligonucleotide
  Target: LAMA2; (-) strand; PAM type: YTN; PAM sequence: CTA
caaatggcacaggtccttcc

SEQ ID NO: 278340 - DNA, 20 bp, Artificial Sequence
  Description of Artificial Sequence: Synthetic oligonucleotide
  Target: LAMA2; (-) strand; PAM type: YTN; PAM sequence: CTA
caacaacccaatccaaccca

SEQ ID NO: 278341 - DNA, 20 bp, Artificial Sequence
  Description of Artificial Sequence: Synthetic oligonucleotide
  Target: LAMA2; (-) strand; PAM type: YTN; PAM sequence: TTA
aggtcaatgggaaactacaa

SEQ ID NO: 278342 - DNA, 20 bp, Artificial Sequence
  Description of Artificial Sequence: Synthetic oligonucleotide
  Target: LAMA2; (-) strand; PAM type: YTN; PAM sequence: TTT
aaggtcaatgggaaactaca

SEQ ID NO: 278343 - DNA, 20 bp, Artificial Sequence
  Description of Artificial Sequence: Synthetic oligonucleotide
  Target: LAMA2; (-) strand; PAM type: YTN; PAM sequence: CTG
tgtttaaggtcaatgggaaa

SEQ ID NO: 278344 - DNA, 20 bp, Artificial Sequence
  Description of Artificial Sequence: Synthetic oligonucleotide
  Target: LAMA2; (-) strand; PAM type: YTN; PAM sequence: CTC
tgtgtttaaggtcaatggga

SEQ ID NO: 278345 - DNA, 20 bp, Artificial Sequence
  Description of Artificial Sequence: Synthetic oligonucleotide
  Target: LAMA2; (-) strand; PAM type: YTN; PAM sequence: TTA
ccatcctctgtgtttaaggt

SEQ ID NO: 278346 - DNA, 20 bp, Artificial Sequence
  Description of Artificial Sequence: Synthetic oligonucleotide
  Target: LAMA2; (-) strand; PAM type: YTN; PAM sequence: TTA
atattaccatcctctgtgtt

SEQ ID NO: 278347 - DNA, 20 bp, Artificial Sequence
  Description of Artificial Sequence: Synthetic oligonucleotide
  Target: LAMA2; (-) strand; PAM type: YTN; PAM sequence: CTT
aatattaccatcctctgtgt

SEQ ID NO: 278348 - DNA, 20 bp, Artificial Sequence
  Description of Artificial Sequence: Synthetic oligonucleotide
  Target: LAMA2; (-) strand; PAM type: YTN; PAM sequence: CTC
ttaatattaccatcctctgt

SEQ ID NO: 278349 - DNA, 20 bp, Artificial Sequence
  Description of Artificial Sequence: Synthetic oligonucleotide
  Target: LAMA2; (-) strand; PAM type: YTN; PAM sequence: TTC
cacaatgaaggcaaggaaga

SEQ ID NO: 278350 - DNA, 20 bp, Artificial Sequence
  Description of Artificial Sequence: Synthetic oligonucleotide
  Target: LAMA2; (-) strand; PAM type: YTN; PAM sequence: CTA
ttccacaatgaaggcaagga

SEQ ID NO: 278351 - DNA, 20 bp, Artificial Sequence
  Description of Artificial Sequence: Synthetic oligonucleotide
  Target: LAMA2; (-) strand; PAM type: YTN; PAM sequence: CTA
ctattccacaatgaaggcaa

SEQ ID NO: 278352 - DNA, 20 bp, Artificial Sequence
  Description of Artificial Sequence: Synthetic oligonucleotide
  Target: LAMA2; (-) strand; PAM type: YTN; PAM sequence: TTG
acccagaatatcaaggtgaa

SEQ ID NO: 278353 - DNA, 20 bp, Artificial Sequence
  Description of Artificial Sequence: Synthetic oligonucleotide
  Target: LAMA2; (-) strand; PAM type: YTN; PAM sequence: CTG
ggtaattgacccagaatatc

SEQ ID NO: 278354 - DNA, 20 bp, Artificial Sequence
  Description of Artificial Sequence: Synthetic oligonucleotide
  Target: LAMA2; (-) strand; PAM type: YTN; PAM sequence: TTG
gctgggtaattgacccagaa

SEQ ID NO: 278355 - DNA, 20 bp, Artificial Sequence
  Description of Artificial Sequence: Synthetic oligonucleotide
  Target: LAMA2; (-) strand; PAM type: YTN; PAM sequence: TTC
agtgttggctgggtaattga

SEQ ID NO: 278356 - DNA, 20 bp, Artificial Sequence
  Description of Artificial Sequence: Synthetic oligonucleotide
  Target: LAMA2; (-) strand; PAM type: YTN; PAM sequence: TTT
cagtgttggctgggtaattg

SEQ ID NO: 278357 - DNA, 20 bp, Artificial Sequence
  Description of Artificial Sequence: Synthetic oligonucleotide
  Target: LAMA2; (-) strand; PAM type: YTN; PAM sequence: CTA
agaagggggtttcagtgttg

SEQ ID NO: 278358 - DNA, 20 bp, Artificial Sequence
  Description of Artificial Sequence: Synthetic oligonucleotide
  Target: LAMA2; (-) strand; PAM type: YTN; PAM sequence: CTC
caagtcaacaggctaagaag

SEQ ID NO: 278359 - DNA, 20 bp, Artificial Sequence
  Description of Artificial Sequence: Synthetic oligonucleotide
  Target: LAMA2; (-) strand; PAM type: YTN; PAM sequence: CTA
cctccaagtcaacaggctaa

SEQ ID NO: 278360 - DNA, 20 bp, Artificial Sequence
  Description of Artificial Sequence: Synthetic oligonucleotide
  Target: LAMA2; (-) strand; PAM type: YTN; PAM sequence: CTC
ctacctccaagtcaacaggc

SEQ ID NO: 278361 - DNA, 20 bp, Artificial Sequence
  Description of Artificial Sequence: Synthetic oligonucleotide
  Target: LAMA2; (-) strand; PAM type: YTN; PAM sequence: TTG
gggccctcctacctccaagt

SEQ ID NO: 278362 - DNA, 20 bp, Artificial Sequence
  Description of Artificial Sequence: Synthetic oligonucleotide
  Target: LAMA2; (-) strand; PAM type: YTN; PAM sequence: CTG
gccaattggggccctcctac

SEQ ID NO: 278363 - DNA, 20 bp, Artificial Sequence
  Description of Artificial Sequence: Synthetic oligonucleotide
  Target: LAMA2; (-) strand; PAM type: YTN; PAM sequence: TTA
ccacctggccaattggggcc

SEQ ID NO: 278364 - DNA, 20 bp, Artificial Sequence
  Description of Artificial Sequence: Synthetic oligonucleotide
  Target: LAMA2; (-) strand; PAM type: YTN; PAM sequence: TTA
agattaccacctggccaatt

SEQ ID NO: 278365 - DNA, 20 bp, Artificial Sequence
  Description of Artificial Sequence: Synthetic oligonucleotide
  Target: LAMA2; (-) strand; PAM type: YTN; PAM sequence: CTG
gaagttaagattaccacctg

SEQ ID NO: 278366 - DNA, 20 bp, Artificial Sequence
  Description of Artificial Sequence: Synthetic oligonucleotide
  Target: LAMA2; (-) strand; PAM type: YTN; PAM sequence: TTA
aactggaagttaagattacc

SEQ ID NO: 278367 - DNA, 20 bp, Artificial Sequence
  Description of Artificial Sequence: Synthetic oligonucleotide
  Target: LAMA2; (-) strand; PAM type: YTN; PAM sequence: TTC
cattaaactggaagttaaga

SEQ ID NO: 278368 - DNA, 20 bp, Artificial Sequence
  Description of Artificial Sequence: Synthetic oligonucleotide
  Target: LAMA2; (-) strand; PAM type: YTN; PAM sequence: CTG
tcaccaagggatacaacaat

SEQ ID NO: 278369 - DNA, 20 bp, Artificial Sequence
  Description of Artificial Sequence: Synthetic oligonucleotide
  Target: LAMA2; (-) strand; PAM type: YTN; PAM sequence: TTC
cagagggaagaatgctgtca

SEQ ID NO: 278370 - DNA, 20 bp, Artificial Sequence
  Description of Artificial Sequence: Synthetic oligonucleotide
  Target: LAMA2; (-) strand; PAM type: YTN; PAM sequence: TTA
gttccagagggaagaatgct

SEQ ID NO: 278371 - DNA, 20 bp, Artificial Sequence
  Description of Artificial Sequence: Synthetic oligonucleotide
  Target: LAMA2; (-) strand; PAM type: YTN; PAM sequence: CTT
agttccagagggaagaatgc

SEQ ID NO: 278372 - DNA, 20 bp, Artificial Sequence
  Description of Artificial Sequence: Synthetic oligonucleotide
  Target: LAMA2; (-) strand; PAM type: YTN; PAM sequence: CTA
gacatcttagttccagaggg

SEQ ID NO: 278373 - DNA, 20 bp, Artificial Sequence
  Description of Artificial Sequence: Synthetic oligonucleotide
  Target: LAMA2; (-) strand; PAM type: YTN; PAM sequence: CTG
gcctagacatcttagttcca

SEQ ID NO: 278374 - DNA, 20 bp, Artificial Sequence
  Description of Artificial Sequence: Synthetic oligonucleotide
  Target: LAMA2; (-) strand; PAM type: YTN; PAM sequence: CTG
ctggcctagacatcttagtt

SEQ ID NO: 278375 - DNA, 20 bp, Artificial Sequence
  Description of Artificial Sequence: Synthetic oligonucleotide
  Target: LAMA2; (-) strand; PAM type: YTN; PAM sequence: TTC
tgctggcctagacatcttag

SEQ ID NO: 278376 - DNA, 20 bp, Artificial Sequence
  Description of Artificial Sequence: Synthetic oligonucleotide
  Target: LAMA2; (-) strand; PAM type: YTN; PAM sequence: TTA
tgttctgctggcctagacat

SEQ ID NO: 278377 - DNA, 20 bp, Artificial Sequence
  Description of Artificial Sequence: Synthetic oligonucleotide
  Target: LAMA2; (-) strand; PAM type: YTN; PAM sequence: TTC
ccacaacattatgttctgct

SEQ ID NO: 278378 - DNA, 20 bp, Artificial Sequence
  Description of Artificial Sequence: Synthetic oligonucleotide
  Target: LAMA2; (-) strand; PAM type: YTN; PAM sequence: CTG
ttcccacaacattatgttct

SEQ ID NO: 278379 - DNA, 20 bp, Artificial Sequence
  Description of Artificial Sequence: Synthetic oligonucleotide
  Target: LAMA2; (-) strand; PAM type: YTN; PAM sequence: TTC
ctgttcccacaacattatgt

SEQ ID NO: 278380 - DNA, 20 bp, Artificial Sequence
  Description of Artificial Sequence: Synthetic oligonucleotide
  Target: LAMA2; (-) strand; PAM type: YTN; PAM sequence: CTT
cctgttcccacaacattatg

SEQ ID NO: 278381 - DNA, 20 bp, Artificial Sequence
  Description of Artificial Sequence: Synthetic oligonucleotide
  Target: LAMA2; (-) strand; PAM type: YTN; PAM sequence: TTG
cttcctgttcccacaacatt

SEQ ID NO: 278382 - DNA, 20 bp, Artificial Sequence
  Description of Artificial Sequence: Synthetic oligonucleotide
  Target: LAMA2; (-) strand; PAM type: YTN; PAM sequence: TTT
gcttcctgttcccacaacat

SEQ ID NO: 278383 - DNA, 20 bp, Artificial Sequence
  Description of Artificial Sequence: Synthetic oligonucleotide
  Target: LAMA2; (-) strand; PAM type: YTN; PAM sequence: TTT
tgcttcctgttcccacaaca

SEQ ID NO: 278384 - DNA, 20 bp, Artificial Sequence
  Description of Artificial Sequence: Synthetic oligonucleotide
  Target: LAMA2; (-) strand; PAM type: YTN; PAM sequence: CTA
gcaaaattttgcttcctgtt

SEQ ID NO: 278385 - DNA, 20 bp, Artificial Sequence
  Description of Artificial Sequence: Synthetic oligonucleotide
  Target: LAMA2; (-) strand; PAM type: YTN; PAM sequence: CTA
gtgacccactagcaaaattt

SEQ ID NO: 278386 - DNA, 20 bp, Artificial Sequence
  Description of Artificial Sequence: Synthetic oligonucleotide
  Target: LAMA2; (-) strand; PAM type: YTN; PAM sequence: CTC
accatcaccactagtgaccc

SEQ ID NO: 278387 - DNA, 20 bp, Artificial Sequence
  Description of Artificial Sequence: Synthetic oligonucleotide
  Target: LAMA2; (-) strand; PAM type: YTN; PAM sequence: TTC
acgtgtcccagaatcaaggg

SEQ ID NO: 278388 - DNA, 20 bp, Artificial Sequence
  Description of Artificial Sequence: Synthetic oligonucleotide
  Target: LAMA2; (-) strand; PAM type: YTN; PAM sequence: CTC
ccatagccagtgttcacgtg

SEQ ID NO: 278389 - DNA, 20 bp, Artificial Sequence
  Description of Artificial Sequence: Synthetic oligonucleotide
  Target: LAMA2; (-) strand; PAM type: YTN; PAM sequence: TTC
tcccatagccagtgttcacg

SEQ ID NO: 278390 - DNA, 20 bp, Artificial Sequence
  Description of Artificial Sequence: Synthetic oligonucleotide
  Target: LAMA2; (-) strand; PAM type: YTN; PAM sequence: TTT
ctcccatagccagtgttcac

SEQ ID NO: 278391 - DNA, 20 bp, Artificial Sequence
  Description of Artificial Sequence: Synthetic oligonucleotide
  Target: LAMA2; (-) strand; PAM type: YTN; PAM sequence: CTG
tttctcccatagccagtgtt

SEQ ID NO: 278392 - DNA, 20 bp, Artificial Sequence
  Description of Artificial Sequence: Synthetic oligonucleotide
  Target: LAMA2; (-) strand; PAM type: YTN; PAM sequence: TTG
aatcagtgtccaaaatatgg

SEQ ID NO: 278393 - DNA, 20 bp, Artificial Sequence
  Description of Artificial Sequence: Synthetic oligonucleotide
  Target: LAMA2; (-) strand; PAM type: YTN; PAM sequence: CTT
gaatcagtgtccaaaatatg

SEQ ID NO: 278394 - DNA, 20 bp, Artificial Sequence
  Description of Artificial Sequence: Synthetic oligonucleotide
  Target: LAMA2; (-) strand; PAM type: YTN; PAM sequence: CTG
tgtatgccttgaatcagtgt

SEQ ID NO: 278395 - DNA, 20 bp, Artificial Sequence
  Description of Artificial Sequence: Synthetic oligonucleotide
  Target: LAMA2; (-) strand; PAM type: YTN; PAM sequence: CTC
cagaaggctgtgtatgcctt

SEQ ID NO: 278396 - DNA, 20 bp, Artificial Sequence
  Description of Artificial Sequence: Synthetic oligonucleotide
  Target: LAMA2; (-) strand; PAM type: YTN; PAM sequence: TTC
tccagaaggctgtgtatgcc

SEQ ID NO: 278397 - DNA, 20 bp, Artificial Sequence
  Description of Artificial Sequence: Synthetic oligonucleotide
  Target: LAMA2; (-) strand; PAM type: YTN; PAM sequence: CTG
gggcaaagttctccagaagg

SEQ ID NO: 278398 - DNA, 20 bp, Artificial Sequence
  Description of Artificial Sequence: Synthetic oligonucleotide
  Target: LAMA2; (-) strand; PAM type: YTN; PAM sequence: TTG
ccggactggggcaaagttct

SEQ ID NO: 278399 - DNA, 20 bp, Artificial Sequence
  Description of Artificial Sequence: Synthetic oligonucleotide
  Target: LAMA2; (-) strand; PAM type: YTN; PAM sequence: TTT
gccggactggggcaaagttc

SEQ ID NO: 278400 - DNA, 20 bp, Artificial Sequence
  Description of Artificial Sequence: Synthetic oligonucleotide
  Target: LAMA2; (-) strand; PAM type: YTN; PAM sequence: CTT
tgccggactggggcaaagtt

SEQ ID NO: 278401 - DNA, 20 bp, Artificial Sequence
  Description of Artificial Sequence: Synthetic oligonucleotide
  Target: LAMA2; (-) strand; PAM type: YTN; PAM sequence: CTA
ggtgacaatactttgccgga

SEQ ID NO: 278402 - DNA, 20 bp, Artificial Sequence
  Description of Artificial Sequence: Synthetic oligonucleotide
  Target: LAMA2; (-) strand; PAM type: YTN; PAM sequence: TTA
caatgccaactaggtgacaa

SEQ ID NO: 278403 - DNA, 20 bp, Artificial Sequence
  Description of Artificial Sequence: Synthetic oligonucleotide
  Target: LAMA2; (-) strand; PAM type: YTN; PAM sequence: TTG
aagtcataattacaatgcca

SEQ ID NO: 278404 - DNA, 20 bp, Artificial Sequence
  Description of Artificial Sequence: Synthetic oligonucleotide
  Target: LAMA2; (-) strand; PAM type: YTN; PAM sequence: TTT
gaagtcataattacaatgcc

SEQ ID NO: 278405 - DNA, 20 bp, Artificial Sequence
  Description of Artificial Sequence: Synthetic oligonucleotide
  Target: LAMA2; (-) strand; PAM type: YTN; PAM sequence: TTT
tgaagtcataattacaatgc

SEQ ID NO: 278406 - DNA, 20 bp, Artificial Sequence
  Description of Artificial Sequence: Synthetic oligonucleotide
  Target: LAMA2; (-) strand; PAM type: YTN; PAM sequence: CTT
ttgaagtcataattacaatg

SEQ ID NO: 278407 - DNA, 20 bp, Artificial Sequence
  Description of Artificial Sequence: Synthetic oligonucleotide
  Target: LAMA2; (-) strand; PAM type: YTN; PAM sequence: TTG
tggaatgcccttttgaagtc

SEQ ID NO: 278408 - DNA, 20 bp, Artificial Sequence
  Description of Artificial Sequence: Synthetic oligonucleotide
  Target: LAMA2; (-) strand; PAM type: YTN; PAM sequence: TTG
atagaattgtggaatgccct

SEQ ID NO: 278409 - DNA, 20 bp, Artificial Sequence
  Description of Artificial Sequence: Synthetic oligonucleotide
  Target: LAMA2; (-) strand; PAM type: YTN; PAM sequence: CTG
aagcaggtggattgatagaa

SEQ ID NO: 278410 - DNA, 20 bp, Artificial Sequence
  Description of Artificial Sequence: Synthetic oligonucleotide
  Target: LAMA2; (-) strand; PAM type: YTN; PAM sequence: TTC
ccatcatcctgaagcaggtg

SEQ ID NO: 278411 - DNA, 20 bp, Artificial Sequence
  Description of Artificial Sequence: Synthetic oligonucleotide
  Target: LAMA2; (-) strand; PAM type: YTN; PAM sequence: TTT
cccatcatcctgaagcaggt

SEQ ID NO: 278412 - DNA, 20 bp, Artificial Sequence
  Description of Artificial Sequence: Synthetic oligonucleotide
  Target: LAMA2; (-) strand; PAM type: YTN; PAM sequence: TTA
tcatgtttcccatcatcctg

SEQ ID NO: 278413 - DNA, 20 bp, Artificial Sequence
  Description of Artificial Sequence: Synthetic oligonucleotide
  Target: LAMA2; (-) strand; PAM type: YTN; PAM sequence: CTT
atcatgtttcccatcatcct

SEQ ID NO: 278414 - DNA, 20 bp, Artificial Sequence
  Description of Artificial Sequence: Synthetic oligonucleotide
  Target: LAMA2; (-) strand; PAM type: YTN; PAM sequence: CTG
gtcttatcatgtttcccatc

SEQ ID NO: 278415 - DNA, 20 bp, Artificial Sequence
  Description of Artificial Sequence: Synthetic oligonucleotide
  Target: LAMA2; (-) strand; PAM type: YTN; PAM sequence: TTC
actggtcttatcatgtttcc

SEQ ID NO: 278416 - DNA, 20 bp, Artificial Sequence
  Description of Artificial Sequence: Synthetic oligonucleotide
  Target: LAMA2; (-) strand; PAM type: YTN; PAM sequence: CTC
atggaattcactggtcttat

SEQ ID NO: 278417 - DNA, 20 bp, Artificial Sequence
  Description of Artificial Sequence: Synthetic oligonucleotide
  Target: LAMA2; (-) strand; PAM type: YTN; PAM sequence: CTC
atgctcatggaattcactgg

SEQ ID NO: 278418 - DNA, 20 bp, Artificial Sequence
  Description of Artificial Sequence: Synthetic oligonucleotide
  Target: LAMA2; (-) strand; PAM type: YTN; PAM sequence: CTG
ggctcatgctcatggaattc

SEQ ID NO: 278419 - DNA, 20 bp, Artificial Sequence
  Description of Artificial Sequence: Synthetic oligonucleotide
  Target: LAMA2; (-) strand; PAM type: YTN; PAM sequence: CTA
aagaagtgcagcactgggct

SEQ ID NO: 278420 - DNA, 20 bp, Artificial Sequence
  Description of Artificial Sequence: Synthetic oligonucleotide
  Target: LAMA2; (-) strand; PAM type: YTN; PAM sequence: TTA
cagctaaagaagtgcagcac

SEQ ID NO: 278421 - DNA, 20 bp, Artificial Sequence
  Description of Artificial Sequence: Synthetic oligonucleotide
  Target: LAMA2; (-) strand; PAM type: YTN; PAM sequence: TTT
acagctaaagaagtgcagca

SEQ ID NO: 278422 - DNA, 20 bp, Artificial Sequence
  Description of Artificial Sequence: Synthetic oligonucleotide
  Target: LAMA2; (-) strand; PAM type: YTN; PAM sequence: CTT
tacagctaaagaagtgcagc

SEQ ID NO: 278423 - DNA, 20 bp, Artificial Sequence
  Description of Artificial Sequence: Synthetic oligonucleotide
  Target: LAMA2; (-) strand; PAM type: YTN; PAM sequence: CTC
actttacagctaaagaagtg

SEQ ID NO: 278424 - DNA, 20 bp, Artificial Sequence
  Description of Artificial Sequence: Synthetic oligonucleotide
  Target: LAMA2; (-) strand; PAM type: YTN; PAM sequence: CTG
aacaaggcactcactttaca

SEQ ID NO: 278425 - DNA, 20 bp, Artificial Sequence
  Description of Artificial Sequence: Synthetic oligonucleotide
  Target: LAMA2; (-) strand; PAM type: YTN; PAM sequence: CTC
tgaacaaggcactcacttta

SEQ ID NO: 278426 - DNA, 20 bp, Artificial Sequence
  Description of Artificial Sequence: Synthetic oligonucleotide
  Target: LAMA2; (-) strand; PAM type: YTN; PAM sequence: TTG
cctctgaacaaggcactcac

SEQ ID NO: 278427 - DNA, 20 bp, Artificial Sequence
  Description of Artificial Sequence: Synthetic oligonucleotide
  Target: LAMA2; (-) strand; PAM type: YTN; PAM sequence: TTC
cacacagcattgcctctgaa

SEQ ID NO: 278428 - DNA, 20 bp, Artificial Sequence
  Description of Artificial Sequence: Synthetic oligonucleotide
  Target: LAMA2; (-) strand; PAM type: YTN; PAM sequence: CTG
tcatggtattccacacagca

SEQ ID NO: 278429 - DNA, 20 bp, Artificial Sequence
  Description of Artificial Sequence: Synthetic oligonucleotide
  Target: LAMA2; (-) strand; PAM type: YTN; PAM sequence: TTC
gctgtcatggtattccacac

SEQ ID NO: 278430 - DNA, 20 bp, Artificial Sequence
  Description of Artificial Sequence: Synthetic oligonucleotide
  Target: LAMA2; (-) strand; PAM type: YTN; PAM sequence: TTA
ttcgctgtcatggtattcca

SEQ ID NO: 278431 - DNA, 20 bp, Artificial Sequence
  Description of Artificial Sequence: Synthetic oligonucleotide
  Target: LAMA2; (-) strand; PAM type: YTN; PAM sequence: CTT
attcgctgtcatggtattcc

SEQ ID NO: 278432 - DNA, 20 bp, Artificial Sequence
  Description of Artificial Sequence: Synthetic oligonucleotide
  Target: LAMA2; (-) strand; PAM type: YTN; PAM sequence: CTC
ccagaatgccttattcgctg

SEQ ID NO: 278433 - DNA, 20 bp, Artificial Sequence
  Description of Artificial Sequence: Synthetic oligonucleotide
  Target: LAMA2; (-) strand; PAM type: YTN; PAM sequence: CTG
ccaagagtaccatccgtgaa

SEQ ID NO: 278434 - DNA, 20 bp, Artificial Sequence
  Description of Artificial Sequence: Synthetic oligonucleotide
  Target: LAMA2; (-) strand; PAM type: YTN; PAM sequence: TTC
tgccaagagtaccatccgtg

SEQ ID NO: 278435 - DNA, 20 bp, Artificial Sequence
  Description of Artificial Sequence: Synthetic oligonucleotide
  Target: LAMA2; (-) strand; PAM type: YTN; PAM sequence: TTT
ctgccaagagtaccatccgt

SEQ ID NO: 278436 - DNA, 20 bp, Artificial Sequence
  Description of Artificial Sequence: Synthetic oligonucleotide
  Target: LAMA2; (-) strand; PAM type: YTN; PAM sequence: CTA
cgcccaatgtttctgccaag

SEQ ID NO: 278437 - DNA, 20 bp, Artificial Sequence
  Description of Artificial Sequence: Synthetic oligonucleotide
  Target: LAMA2; (-) strand; PAM type: YTN; PAM sequence: TTG
cccatcctacgcccaatgtt

SEQ ID NO: 278438 - DNA, 20 bp, Artificial Sequence
  Description of Artificial Sequence: Synthetic oligonucleotide
  Target: LAMA2; (-) strand; PAM type: YTN; PAM sequence: TTT
gcccatcctacgcccaatgt

SEQ ID NO: 278439 - DNA, 20 bp, Artificial Sequence
  Description of Artificial Sequence: Synthetic oligonucleotide
  Target: LAMA2; (-) strand; PAM type: YTN; PAM sequence: CTG
gatatggatttgcccatcct

SEQ ID NO: 278440 - DNA, 20 bp, Artificial Sequence
  Description of Artificial Sequence: Synthetic oligonucleotide
  Target: LAMA2; (-) strand; PAM type: YTN; PAM sequence: TTC
tggatatggatttgcccatc

SEQ ID NO: 278441 - DNA, 20 bp, Artificial Sequence
  Description of Artificial Sequence: Synthetic oligonucleotide
  Target: LAMA2; (-) strand; PAM type: YTN; PAM sequence: TTA
ttctggatatggatttgccc

SEQ ID NO: 278442 - DNA, 20 bp, Artificial Sequence
  Description of Artificial Sequence: Synthetic oligonucleotide
  Target: LAMA2; (-) strand; PAM type: YTN; PAM sequence: CTT
attctggatatggatttgcc

SEQ ID NO: 278443 - DNA, 20 bp, Artificial Sequence
  Description of Artificial Sequence: Synthetic oligonucleotide
  Target: LAMA2; (-) strand; PAM type: YTN; PAM sequence: CTC
aatggaataggcacttattc

SEQ ID NO: 278444 - DNA, 20 bp, Artificial Sequence
  Description of Artificial Sequence: Synthetic oligonucleotide
  Target: LAMA2; (-) strand; PAM type: YTN; PAM sequence: TTG
tcctcaatggaataggcact

SEQ ID NO: 278445 - DNA, 20 bp, Artificial Sequence
  Description of Artificial Sequence: Synthetic oligonucleotide
  Target: LAMA2; (-) strand; PAM type: YTN; PAM sequence: TTT
gtcctcaatggaataggcac

SEQ ID NO: 278446 - DNA, 20 bp, Artificial Sequence
  Description of Artificial Sequence: Synthetic oligonucleotide
  Target: LAMA2; (-) strand; PAM type: YTN; PAM sequence: TTC
catcatgcaaaggcagaggt

SEQ ID NO: 278447 - DNA, 20 bp, Artificial Sequence
  Description of Artificial Sequence: Synthetic oligonucleotide
  Target: LAMA2; (-) strand; PAM type: YTN; PAM sequence: CTT
ccatcatgcaaaggcagagg

SEQ ID NO: 278448 - DNA, 20 bp, Artificial Sequence
  Description of Artificial Sequence: Synthetic oligonucleotide
  Target: LAMA2; (-) strand; PAM type: YTN; PAM sequence: CTC
ttccatcatgcaaaggcaga

SEQ ID NO: 278449 - DNA, 20 bp, Artificial Sequence
  Description of Artificial Sequence: Synthetic oligonucleotide
  Target: LAMA2; (-) strand; PAM type: YTN; PAM sequence: TTA
tatcagacctcttccatcat

SEQ ID NO: 278450 - DNA, 20 bp, Artificial Sequence
  Description of Artificial Sequence: Synthetic oligonucleotide
  Target: LAMA2; (-) strand; PAM type: YTN; PAM sequence: TTG
attatatcagacctcttcca

SEQ ID NO: 278451 - DNA, 20 bp, Artificial Sequence
  Description of Artificial Sequence: Synthetic oligonucleotide
  Target: LAMA2; (-) strand; PAM type: YTN; PAM sequence: TTG
gtggcaggttgattatatca

SEQ ID NO: 278452 - DNA, 20 bp, Artificial Sequence
  Description of Artificial Sequence: Synthetic oligonucleotide
  Target: LAMA2; (-) strand; PAM type: YTN; PAM sequence: CTT
ggtggcaggttgattatatc

SEQ ID NO: 278453 - DNA, 20 bp, Artificial Sequence
  Description of Artificial Sequence: Synthetic oligonucleotide
  Target: LAMA2; (-) strand; PAM type: YTN; PAM sequence: TTC
ttggtggcaggttgattata

SEQ ID NO: 278454 - DNA, 20 bp, Artificial Sequence
  Description of Artificial Sequence: Synthetic oligonucleotide
  Target: LAMA2; (-) strand; PAM type: YTN; PAM sequence: CTT
cttggtggcaggttgattat

SEQ ID NO: 278455 - DNA, 20 bp, Artificial Sequence
  Description of Artificial Sequence: Synthetic oligonucleotide
  Target: LAMA2; (-) strand; PAM type: YTN; PAM sequence: CTC
agggtgatcagccagcttct

SEQ ID NO: 278456 - DNA, 20 bp, Artificial Sequence
  Description of Artificial Sequence: Synthetic oligonucleotide
  Target: LAMA2; (-) strand; PAM type: YTN; PAM sequence: TTC
ctcagggtgatcagccagct

SEQ ID NO: 278457 - DNA, 20 bp, Artificial Sequence
  Description of Artificial Sequence: Synthetic oligonucleotide
  Target: LAMA2; (-) strand; PAM type: YTN; PAM sequence: CTT
cctcagggtgatcagccagc

SEQ ID NO: 278458 - DNA, 20 bp, Artificial Sequence
  Description of Artificial Sequence: Synthetic oligonucleotide
  Target: LAMA2; (-) strand; PAM type: YTN; PAM sequence: CTG
gcatccttcctcagggtgat

SEQ ID NO: 278459 - DNA, 20 bp, Artificial Sequence
  Description of Artificial Sequence: Synthetic oligonucleotide
  Target: LAMA2; (-) strand; PAM type: YTN; PAM sequence: CTC
cgtctggcatccttcctcag

SEQ ID NO: 278460 - DNA, 20 bp, Artificial Sequence
  Description of Artificial Sequence: Synthetic oligonucleotide
  Target: LAMA2; (-) strand; PAM type: YTN; PAM sequence: CTG
agccctccgtctggcatcct

SEQ ID NO: 278461 - DNA, 20 bp, Artificial Sequence
  Description of Artificial Sequence: Synthetic oligonucleotide
  Target: LAMA2; (-) strand; PAM type: YTN; PAM sequence: TTG
ccagcagcagaaaccaacac

SEQ ID NO: 278462 - DNA, 20 bp, Artificial Sequence
  Description of Artificial Sequence: Synthetic oligonucleotide
  Target: LAMA2; (-) strand; PAM type: YTN; PAM sequence: TTT
gccagcagcagaaaccaaca

SEQ ID NO: 278463 - DNA, 20 bp, Artificial Sequence
  Description of Artificial Sequence: Synthetic oligonucleotide
  Target: LAMA2; (-) strand; PAM type: YTN; PAM sequence: CTG
agtgcccaatttgccagcag

SEQ ID NO: 278464 - DNA, 20 bp, Artificial Sequence
  Description of Artificial Sequence: Synthetic oligonucleotide
  Target: LAMA2; (-) strand; PAM type: YTN; PAM sequence: CTA
tagccaccgctgagtgccca

SEQ ID NO: 278465 - DNA, 20 bp, Artificial Sequence
  Description of Artificial Sequence: Synthetic oligonucleotide
  Target: LAMA2; (-) strand; PAM type: YTN; PAM sequence: CTG
actatagccaccgctgagtg

SEQ ID NO: 278466 - DNA, 20 bp, Artificial Sequence
  Description of Artificial Sequence: Synthetic oligonucleotide
  Target: LAMA2; (-) strand; PAM type: YTN; PAM sequence: CTG
acctgactatagccaccgct

SEQ ID NO: 278467 - DNA, 20 bp, Artificial Sequence
  Description of Artificial Sequence: Synthetic oligonucleotide
  Target: LAMA2; (-) strand; PAM type: YTN; PAM sequence: CTC
agcaacatggactgacctga

SEQ ID NO: 278468 - DNA, 20 bp, Artificial Sequence
  Description of Artificial Sequence: Synthetic oligonucleotide
  Target: LAMA2; (-) strand; PAM type: YTN; PAM sequence: TTA
tgcataggctcagcaacatg

SEQ ID NO: 278469 - DNA, 20 bp, Artificial Sequence
  Description of Artificial Sequence: Synthetic oligonucleotide
  Target: LAMA2; (-) strand; PAM type: YTN; PAM sequence: CTC
atgaacaaagtggccatggt

SEQ ID NO: 278470 - DNA, 20 bp, Artificial Sequence
  Description of Artificial Sequence: Synthetic oligonucleotide
  Target: LAMA2; (-) strand; PAM type: YTN; PAM sequence: CTC
aatgggctcatgaacaaagt

SEQ ID NO: 278471 - DNA, 20 bp, Artificial Sequence
  Description of Artificial Sequence: Synthetic oligonucleotide
  Target: LAMA2; (-) strand; PAM type: YTN; PAM sequence: CTG
tcatcgctcaatgggctcat

SEQ ID NO: 278472 - DNA, 20 bp, Artificial Sequence
  Description of Artificial Sequence: Synthetic oligonucleotide
  Target: LAMA2; (-) strand; PAM type: YTN; PAM sequence: TTC
cccagccaccctgtcatcgc

SEQ ID NO: 278473 - DNA, 20 bp, Artificial Sequence
  Description of Artificial Sequence: Synthetic oligonucleotide
  Target: LAMA2; (-) strand; PAM type: YTN; PAM sequence: TTT
ccccagccaccctgtcatcg

SEQ ID NO: 278474 - DNA, 20 bp, Artificial Sequence
  Description of Artificial Sequence: Synthetic oligonucleotide
  Target: LAMA2; (-) strand; PAM type: YTN; PAM sequence: CTT
tccccagccaccctgtcatc

SEQ ID NO: 278475 - DNA, 20 bp, Artificial Sequence
  Description of Artificial Sequence: Synthetic oligonucleotide
  Target: LAMA2; (-) strand; PAM type: YTN; PAM sequence: CTC
tttccccagccaccctgtca

SEQ ID NO: 278476 - DNA, 20 bp, Artificial Sequence
  Description of Artificial Sequence: Synthetic oligonucleotide
  Target: LAMA2; (-) strand; PAM type: YTN; PAM sequence: CTC
agcctctttccccagccacc

SEQ ID NO: 278477 - DNA, 20 bp, Artificial Sequence
  Description of Artificial Sequence: Synthetic oligonucleotide
  Target: LAMA2; (-) strand; PAM type: YTN; PAM sequence: CTG
tgtacaccactcagcctctt

SEQ ID NO: 278478 - DNA, 20 bp, Artificial Sequence
  Description of Artificial Sequence: Synthetic oligonucleotide
  Target: LAMA2; (-) strand; PAM type: YTN; PAM sequence: TTC
tgtgtacaccactcagcctc

SEQ ID NO: 278479 - DNA, 20 bp, Artificial Sequence
  Description of Artificial Sequence: Synthetic oligonucleotide
  Target: LAMA2; (-) strand; PAM type: YTN; PAM sequence: CTC
attctgtgtacaccactcag

SEQ ID NO: 278480 - DNA, 20 bp, Artificial Sequence
  Description of Artificial Sequence: Synthetic oligonucleotide
  Target: LAMA2; (-) strand; PAM type: YTN; PAM sequence: TTA
ataatcaagtggataggatg

SEQ ID NO: 278481 - DNA, 20 bp, Artificial Sequence
  Description of Artificial Sequence: Synthetic oligonucleotide
  Target: LAMA2; (-) strand; PAM type: YTN; PAM sequence: TTT
aataatcaagtggataggat

SEQ ID NO: 278482 - DNA, 20 bp, Artificial Sequence
  Description of Artificial Sequence: Synthetic oligonucleotide
  Target: LAMA2; (-) strand; PAM type: YTN; PAM sequence: TTT
taataatcaagtggatagga

SEQ ID NO: 278483 - DNA, 20 bp, Artificial Sequence
  Description of Artificial Sequence: Synthetic oligonucleotide
  Target: LAMA2; (-) strand; PAM type: YTN; PAM sequence: CTG
aggaggattttaataatcaa

SEQ ID NO: 278484 - DNA, 20 bp, Artificial Sequence
  Description of Artificial Sequence: Synthetic oligonucleotide
  Target: LAMA2; (-) strand; PAM type: YTN; PAM sequence: CTC
agctgaggaggattttaata

SEQ ID NO: 278485 - DNA, 20 bp, Artificial Sequence
  Description of Artificial Sequence: Synthetic oligonucleotide
  Target: LAMA2; (-) strand; PAM type: YTN; PAM sequence: CTC
accaacgggtgacctcagct

SEQ ID NO: 278486 - DNA, 20 bp, Artificial Sequence
  Description of Artificial Sequence: Synthetic oligonucleotide
  Target: LAMA2; (-) strand; PAM type: YTN; PAM sequence: CTA
tgtgagtgctcaccaacggg

SEQ ID NO: 278487 - DNA, 20 bp, Artificial Sequence
  Description of Artificial Sequence: Synthetic oligonucleotide
  Target: LAMA2; (-) strand; PAM type: YTN; PAM sequence: TTG
tatcctatgtgagtgctcac

SEQ ID NO: 278488 - DNA, 20 bp, Artificial Sequence
  Description of Artificial Sequence: Synthetic oligonucleotide
  Target: LAMA2; (-) strand; PAM type: YTN; PAM sequence: TTT
gtatcctatgtgagtgctca

SEQ ID NO: 278489 - DNA, 20 bp, Artificial Sequence
  Description of Artificial Sequence: Synthetic oligonucleotide
  Target: LAMA2; (-) strand; PAM type: YTN; PAM sequence: CTG
tgaagatatttgtatcctat

SEQ ID NO: 278490 - DNA, 20 bp, Artificial Sequence
  Description of Artificial Sequence: Synthetic oligonucleotide
  Target: LAMA2; (-) strand; PAM type: YTN; PAM sequence: CTG
agtggtcaaaaactgtgaag

SEQ ID NO: 278491 - DNA, 20 bp, Artificial Sequence
  Description of Artificial Sequence: Synthetic oligonucleotide
  Target: LAMA2; (-) strand; PAM type: YTN; PAM sequence: CTC
tgagtggtcaaaaactgtga

SEQ ID NO: 278492 - DNA, 20 bp, Artificial Sequence
  Description of Artificial Sequence: Synthetic oligonucleotide
  Target: LAMA2; (-) strand; PAM type: YTN; PAM sequence: CTC
tctgagtggtcaaaaactgt

SEQ ID NO: 278493 - DNA, 20 bp, Artificial Sequence
  Description of Artificial Sequence: Synthetic oligonucleotide
  Target: LAMA2; (-) strand; PAM type: YTN; PAM sequence: CTG
gggaagaggtatgtggatgg

SEQ ID NO: 278494 - DNA, 20 bp, Artificial Sequence
  Description of Artificial Sequence: Synthetic oligonucleotide
  Target: LAMA2; (-) strand; PAM type: YTN; PAM sequence: TTG
gtggcaaagtaatctgggga

SEQ ID NO: 278495 - DNA, 20 bp, Artificial Sequence
  Description of Artificial Sequence: Synthetic oligonucleotide
  Target: LAMA2; (-) strand; PAM type: YTN; PAM sequence: TTA
aaaaattggtggcaaagtaa

SEQ ID NO: 278496 - DNA, 20 bp, Artificial Sequence
  Description of Artificial Sequence: Synthetic oligonucleotide
  Target: LAMA2; (-) strand; PAM type: YTN; PAM sequence: TTG
gaagaagcatgattaaaaaa

SEQ ID NO: 278497 - DNA, 20 bp, Artificial Sequence
  Description of Artificial Sequence: Synthetic oligonucleotide
  Target: LAMA2; (-) strand; PAM type: YTN; PAM sequence: CTT
ggaagaagcatgattaaaaa

SEQ ID NO: 278498 - DNA, 20 bp, Artificial Sequence
  Description of Artificial Sequence: Synthetic oligonucleotide
  Target: LAMA2; (-) strand; PAM type: YTN; PAM sequence: CTG
gatggtcagggacttggaag

SEQ ID NO: 278499 - DNA, 20 bp, Artificial Sequence
  Description of Artificial Sequence: Synthetic oligonucleotide
  Target: LAMA2; (-) strand; PAM type: YTN; PAM sequence: TTG
gctggatggtcagggacttg

SEQ ID NO: 278500 - DNA, 20 bp, Artificial Sequence
  Description of Artificial Sequence: Synthetic oligonucleotide
  Target: LAMA2; (-) strand; PAM type: YTN; PAM sequence: TTT
ggctggatggtcagggactt

SEQ ID NO: 278501 - DNA, 20 bp, Artificial Sequence
  Description of Artificial Sequence: Synthetic oligonucleotide
  Target: LAMA2; (-) strand; PAM type: YTN; PAM sequence: CTG
tagccaatggtttggctgga

SEQ ID NO: 278502 - DNA, 20 bp, Artificial Sequence
  Description of Artificial Sequence: Synthetic oligonucleotide
  Target: LAMA2; (-) strand; PAM type: YTN; PAM sequence: TTA
atgtgctgtagccaatggtt

SEQ ID NO: 278503 - DNA, 20 bp, Artificial Sequence
  Description of Artificial Sequence: Synthetic oligonucleotide
  Target: LAMA2; (-) strand; PAM type: YTN; PAM sequence: CTA
attaatgtgctgtagccaat

SEQ ID NO: 278504 - DNA, 20 bp, Artificial Sequence
  Description of Artificial Sequence: Synthetic oligonucleotide
  Target: LAMA2; (-) strand; PAM type: YTN; PAM sequence: TTA
tatactaattaatgtgctgt

SEQ ID NO: 278505 - DNA, 20 bp, Artificial Sequence
  Description of Artificial Sequence: Synthetic oligonucleotide
  Target: LAMA2; (-) strand; PAM type: YTN; PAM sequence: TTG
gaagaagaaatggccagatg

SEQ ID NO: 278506 - DNA, 20 bp, Artificial Sequence
  Description of Artificial Sequence: Synthetic oligonucleotide
  Target: LAMA2; (-) strand; PAM type: YTN; PAM sequence: CTT
ggaagaagaaatggccagat

SEQ ID NO: 278507 - DNA, 20 bp, Artificial Sequence
  Description of Artificial Sequence: Synthetic oligonucleotide
  Target: LAMA2; (-) strand; PAM type: YTN; PAM sequence: TTG
cttggaagaagaaatggcca

SEQ ID NO: 278508 - DNA, 20 bp, Artificial Sequence
  Description of Artificial Sequence: Synthetic oligonucleotide
  Target: LAMA2; (-) strand; PAM type: YTN; PAM sequence: CTT
gcttggaagaagaaatggcc

SEQ ID NO: 278509 - DNA, 20 bp, Artificial Sequence
  Description of Artificial Sequence: Synthetic oligonucleotide
  Target: LAMA2; (-) strand; PAM type: YTN; PAM sequence: TTG
tgcacttgcttggaagaaga

SEQ ID NO: 278510 - DNA, 20 bp, Artificial Sequence
  Description of Artificial Sequence: Synthetic oligonucleotide
  Target: LAMA2; (-) strand; PAM type: YTN; PAM sequence: CTG
gttgtgcacttgcttggaag

SEQ ID NO: 278511 - DNA, 20 bp, Artificial Sequence
  Description of Artificial Sequence: Synthetic oligonucleotide
  Target: LAMA2; (-) strand; PAM type: YTN; PAM sequence: TTG
agcagggcacctggttgtgc

SEQ ID NO: 278512 - DNA, 20 bp, Artificial Sequence
  Description of Artificial Sequence: Synthetic oligonucleotide
  Target: LAMA2; (-) strand; PAM type: YTN; PAM sequence: TTT
gagcagggcacctggttgtg

SEQ ID NO: 278513 - DNA, 20 bp, Artificial Sequence
  Description of Artificial Sequence: Synthetic oligonucleotide
  Target: LAMA2; (-) strand; PAM type: YTN; PAM sequence: TTT
tgagcagggcacctggttgt

SEQ ID NO: 278514 - DNA, 20 bp, Artificial Sequence
  Description of Artificial Sequence: Synthetic oligonucleotide
  Target: LAMA2; (-) strand; PAM type: YTN; PAM sequence: TTC
ccagggggcagaattttgag

SEQ ID NO: 278515 - DNA, 20 bp, Artificial Sequence
  Description of Artificial Sequence: Synthetic oligonucleotide
  Target: LAMA2; (-) strand; PAM type: YTN; PAM sequence: CTT
cccagggggcagaattttga

SEQ ID NO: 278516 - DNA, 20 bp, Artificial Sequence
  Description of Artificial Sequence: Synthetic oligonucleotide
  Target: LAMA2; (-) strand; PAM type: YTN; PAM sequence: CTG
aaggacagtagcaaagggaa

SEQ ID NO: 278517 - DNA, 20 bp, Artificial Sequence
  Description of Artificial Sequence: Synthetic oligonucleotide
  Target: LAMA2; (-) strand; PAM type: YTN; PAM sequence: CTA
ggacatccctgaaggacagt

SEQ ID NO: 278518 - DNA, 20 bp, Artificial Sequence
  Description of Artificial Sequence: Synthetic oligonucleotide
  Target: LAMA2; (-) strand; PAM type: YTN; PAM sequence: TTC
taggacatccctgaaggaca

SEQ ID NO: 278519 - DNA, 20 bp, Artificial Sequence
  Description of Artificial Sequence: Synthetic oligonucleotide
  Target: LAMA2; (-) strand; PAM type: YTN; PAM sequence: TTT
ctaggacatccctgaaggac

SEQ ID NO: 278520 - DNA, 20 bp, Artificial Sequence
  Description of Artificial Sequence: Synthetic oligonucleotide
  Target: LAMA2; (-) strand; PAM type: YTN; PAM sequence: CTT
tctaggacatccctgaagga

SEQ ID NO: 278521 - DNA, 20 bp, Artificial Sequence
  Description of Artificial Sequence: Synthetic oligonucleotide
  Target: LAMA2; (-) strand; PAM type: YTN; PAM sequence: CTA
cagcccctttctaggacatc

SEQ ID NO: 278522 - DNA, 20 bp, Artificial Sequence
  Description of Artificial Sequence: Synthetic oligonucleotide
  Target: LAMA2; (-) strand; PAM type: YTN; PAM sequence: CTG
cagcactacagcccctttct

SEQ ID NO: 278523 - DNA, 20 bp, Artificial Sequence
  Description of Artificial Sequence: Synthetic oligonucleotide
  Target: LAMA2; (-) strand; PAM type: YTN; PAM sequence: CTG
caagatatgcaggtagcacc

SEQ ID NO: 278524 - DNA, 20 bp, Artificial Sequence
  Description of Artificial Sequence: Synthetic oligonucleotide
  Target: LAMA2; (-) strand; PAM type: YTN; PAM sequence: TTC
tgcaagatatgcaggtagca

SEQ ID NO: 278525 - DNA, 20 bp, Artificial Sequence
  Description of Artificial Sequence: Synthetic oligonucleotide
  Target: LAMA2; (-) strand; PAM type: YTN; PAM sequence: TTC
acagatgattctgcaagata

SEQ ID NO: 278526 - DNA, 20 bp, Artificial Sequence
  Description of Artificial Sequence: Synthetic oligonucleotide
  Target: LAMA2; (-) strand; PAM type: YTN; PAM sequence: CTG
gttcacagatgattctgcaa

SEQ ID NO: 278527 - DNA, 20 bp, Artificial Sequence
  Description of Artificial Sequence: Synthetic oligonucleotide
  Target: LAMA2; (-) strand; PAM type: YTN; PAM sequence: CTA
gggcctggttcacagatgat

SEQ ID NO: 278528 - DNA, 20 bp, Artificial Sequence
  Description of Artificial Sequence: Synthetic oligonucleotide
  Target: LAMA2; (-) strand; PAM type: YTN; PAM sequence: TTG
acagaggcagagaagactag

SEQ ID NO: 278529 - DNA, 20 bp, Artificial Sequence
  Description of Artificial Sequence: Synthetic oligonucleotide
  Target: LAMA2; (-) strand; PAM type: YTN; PAM sequence: TTC
cccatgatcagttgacagag

SEQ ID NO: 278530 - DNA, 20 bp, Artificial Sequence
  Description of Artificial Sequence: Synthetic oligonucleotide
  Target: LAMA2; (-) strand; PAM type: YTN; PAM sequence: CTC
acagggagttccccatgatc

SEQ ID NO: 278531 - DNA, 20 bp, Artificial Sequence
  Description of Artificial Sequence: Synthetic oligonucleotide
  Target: LAMA2; (-) strand; PAM type: YTN; PAM sequence: CTG
atggcctcacagggagttcc

SEQ ID NO: 278532 - DNA, 20 bp, Artificial Sequence
  Description of Artificial Sequence: Synthetic oligonucleotide
  Target: LAMA2; (-) strand; PAM type: YTN; PAM sequence: CTG
cactgatggcctcacaggga

SEQ ID NO: 278533 - DNA, 20 bp, Artificial Sequence
  Description of Artificial Sequence: Synthetic oligonucleotide
  Target: LAMA2; (-) strand; PAM type: YTN; PAM sequence: CTC
cccaagcctgcactgatggc

SEQ ID NO: 278534 - DNA, 20 bp, Artificial Sequence
  Description of Artificial Sequence: Synthetic oligonucleotide
  Target: LAMA2; (-) strand; PAM type: YTN; PAM sequence: CTC
tccccaagcctgcactgatg

SEQ ID NO: 278535 - DNA, 20 bp, Artificial Sequence
  Description of Artificial Sequence: Synthetic oligonucleotide
  Target: LAMA2; (-) strand; PAM type: YTN; PAM sequence: TTC
tctccccaagcctgcactga

SEQ ID NO: 278536 - DNA, 20 bp, Artificial Sequence
  Description of Artificial Sequence: Synthetic oligonucleotide
  Target: LAMA2; (-) strand; PAM type: YTN; PAM sequence: CTT
ctctccccaagcctgcactg

SEQ ID NO: 278537 - DNA, 20 bp, Artificial Sequence
  Description of Artificial Sequence: Synthetic oligonucleotide
  Target: LAMA2; (-) strand; PAM type: YTN; PAM sequence: CTG
ccttctctccccaagcctgc

SEQ ID NO: 278538 - DNA, 20 bp, Artificial Sequence
  Description of Artificial Sequence: Synthetic oligonucleotide
  Target: LAMA2; (-) strand; PAM type: YTN; PAM sequence: CTG
ccaccctgccttctctcccc

SEQ ID NO: 278539 - DNA, 20 bp, Artificial Sequence
  Description of Artificial Sequence: Synthetic oligonucleotide
  Target: LAMA2; (-) strand; PAM type: YTN; PAM sequence: CTC
ctgccaccctgccttctctc

SEQ ID NO: 278540 - DNA, 20 bp, Artificial Sequence
  Description of Artificial Sequence: Synthetic oligonucleotide
  Target: LAMA2; (-) strand; PAM type: YTN; PAM sequence: CTC
cactcctgccaccctgcctt

SEQ ID NO: 278541 - DNA, 20 bp, Artificial Sequence
  Description of Artificial Sequence: Synthetic oligonucleotide
  Target: LAMA2; (-) strand; PAM type: YTN; PAM sequence: CTC
aaacgcccatggcctccact

SEQ ID NO: 278542 - DNA, 20 bp, Artificial Sequence
  Description of Artificial Sequence: Synthetic oligonucleotide
  Target: LAMA2; (-) strand; PAM type: YTN; PAM sequence: TTG
catgaggaagtggctcaaac

SEQ ID NO: 278543 - DNA, 20 bp, Artificial Sequence
  Description of Artificial Sequence: Synthetic oligonucleotide
  Target: LAMA2; (-) strand; PAM type: YTN; PAM sequence: CTA
aaggcacaagtcagttgcat

SEQ ID NO: 278544 - DNA, 20 bp, Artificial Sequence
  Description of Artificial Sequence: Synthetic oligonucleotide
  Target: LAMA2; (-) strand; PAM type: YTN; PAM sequence: CTC
gagccagtcctaaaggcaca

SEQ ID NO: 278545 - DNA, 20 bp, Artificial Sequence
  Description of Artificial Sequence: Synthetic oligonucleotide
  Target: LAMA2; (-) strand; PAM type: YTN; PAM sequence: CTG
taagtggtatatacatgatc

SEQ ID NO: 278546 - DNA, 20 bp, Artificial Sequence
  Description of Artificial Sequence: Synthetic oligonucleotide
  Target: LAMA2; (-) strand; PAM type: YTN; PAM sequence: TTC
catcatcaactgtaagtggt

SEQ ID NO: 278547 - DNA, 20 bp, Artificial Sequence
  Description of Artificial Sequence: Synthetic oligonucleotide
  Target: LAMA2; (-) strand; PAM type: YTN; PAM sequence: CTT
ccatcatcaactgtaagtgg

SEQ ID NO: 278548 - DNA, 20 bp, Artificial Sequence
  Description of Artificial Sequence: Synthetic oligonucleotide
  Target: LAMA2; (-) strand; PAM type: YTN; PAM sequence: TTG
ggcatacacagcagccttcc

SEQ ID NO: 278549 - DNA, 20 bp, Artificial Sequence
  Description of Artificial Sequence: Synthetic oligonucleotide
  Target: LAMA2; (-) strand; PAM type: YTN; PAM sequence: CTA
gccataaagttgggcataca

SEQ ID NO: 278550 - DNA, 20 bp, Artificial Sequence
  Description of Artificial Sequence: Synthetic oligonucleotide
  Target: LAMA2; (-) strand; PAM type: YTN; PAM sequence: CTG
acccatctagccataaagtt

SEQ ID NO: 278551 - DNA, 20 bp, Artificial Sequence
  Description of Artificial Sequence: Synthetic oligonucleotide
  Target: LAMA2; (-) strand; PAM type: YTN; PAM sequence: TTC
tgacccatctagccataaag

SEQ ID NO: 278552 - DNA, 20 bp, Artificial Sequence
  Description of Artificial Sequence: Synthetic oligonucleotide
  Target: LAMA2; (-) strand; PAM type: YTN; PAM sequence: TTT
ctgacccatctagccataaa

SEQ ID NO: 278553 - DNA, 20 bp, Artificial Sequence
  Description of Artificial Sequence: Synthetic oligonucleotide
  Target: LAMA2; (-) strand; PAM type: YTN; PAM sequence: CTT
tctgacccatctagccataa

SEQ ID NO: 278554 - DNA, 20 bp, Artificial Sequence
  Description of Artificial Sequence: Synthetic oligonucleotide
  Target: LAMA2; (-) strand; PAM type: YTN; PAM sequence: CTG
gatgctttctgacccatcta

SEQ ID NO: 278555 - DNA, 20 bp, Artificial Sequence
  Description of Artificial Sequence: Synthetic oligonucleotide
  Target: LAMA2; (-) strand; PAM type: YTN; PAM sequence: TTC
atgaactggatgctttctga

SEQ ID NO: 278556 - DNA, 20 bp, Artificial Sequence
  Description of Artificial Sequence: Synthetic oligonucleotide
  Target: LAMA2; (-) strand; PAM type: YTN; PAM sequence: TTT
catgaactggatgctttctg

SEQ ID NO: 278557 - DNA, 20 bp, Artificial Sequence
  Description of Artificial Sequence: Synthetic oligonucleotide
  Target: LAMA2; (-) strand; PAM type: YTN; PAM sequence: CTT
tcatgaactggatgctttct

SEQ ID NO: 278558 - DNA, 20 bp, Artificial Sequence
  Description of Artificial Sequence: Synthetic oligonucleotide
  Target: LAMA2; (-) strand; PAM type: YTN; PAM sequence: CTG
cctttcatgaactggatgct

SEQ ID NO: 278559 - DNA, 20 bp, Artificial Sequence
  Description of Artificial Sequence: Synthetic oligonucleotide
  Target: LAMA2; (-) strand; PAM type: YTN; PAM sequence: CTA
aactgcctttcatgaactgg

SEQ ID NO: 278560 - DNA, 20 bp, Artificial Sequence
  Description of Artificial Sequence: Synthetic oligonucleotide
  Target: LAMA2; (-) strand; PAM type: YTN; PAM sequence: CTG
taggtcatcaagtcaccatg

SEQ ID NO: 278561 - DNA, 20 bp, Artificial Sequence
  Description of Artificial Sequence: Synthetic oligonucleotide
  Target: LAMA2; (-) strand; PAM type: YTN; PAM sequence: TTG
actgtaggtcatcaagtcac

SEQ ID NO: 278562 - DNA, 20 bp, Artificial Sequence
  Description of Artificial Sequence: Synthetic oligonucleotide
  Target: LAMA2; (-) strand; PAM type: YTN; PAM sequence: TTT
gactgtaggtcatcaagtca

SEQ ID NO: 278563 - DNA, 20 bp, Artificial Sequence
  Description of Artificial Sequence: Synthetic oligonucleotide
  Target: LAMA2; (-) strand; PAM type: YTN; PAM sequence: CTG
aatgtttgactgtaggtcat

SEQ ID NO: 278564 - DNA, 20 bp, Artificial Sequence
  Description of Artificial Sequence: Synthetic oligonucleotide
  Target: LAMA2; (-) strand; PAM type: YTN; PAM sequence: TTG
gtagaaactgaatgtttgac

SEQ ID NO: 278565 - DNA, 20 bp, Artificial Sequence
  Description of Artificial Sequence: Synthetic oligonucleotide
  Target: LAMA2; (-) strand; PAM type: YTN; PAM sequence: TTT
ggtagaaactgaatgtttga

SEQ ID NO: 278566 - DNA, 20 bp, Artificial Sequence
  Description of Artificial Sequence: Synthetic oligonucleotide
  Target: LAMA2; (-) strand; PAM type: YTN; PAM sequence: CTT
tggtagaaactgaatgtttg

SEQ ID NO: 278567 - DNA, 20 bp, Artificial Sequence
  Description of Artificial Sequence: Synthetic oligonucleotide
  Target: LAMA2; (-) strand; PAM type: YTN; PAM sequence: CTG
ggctttggtagaaactgaat

SEQ ID NO: 278568 - DNA, 20 bp, Artificial Sequence
  Description of Artificial Sequence: Synthetic oligonucleotide
  Target: LAMA2; (-) strand; PAM type: YTN; PAM sequence: TTA
ctgggctttggtagaaactg
